United States Patent Application Publication US 2007/0150978 A1 - sequence listing, part 5

SEQ ID NO: 26807 - DNA, 429 bp, Oryza sativa
  unsure (1)..(429): unsure at all n locations
ttgcgagataagttgaaacagttggaaatgaaatcattttatttgtaattccgaataactgggttcaaatgaaatgaaagaaaattataaaatcaacatgctaaatttattttattgcagcaagattaaataaaacagtattgtaaaacttttgctggtaaatgagccattagtacagtaatagatgtacagtacgaataaccctgtaataaatttttaatgagaaccattaaaagagaatatgaagtgcatgtgccattagtttggtttaattaagagagaaagggaggagaacagttctacttttccaatatntttagagggcttctatggataaccatatggcataacctacggtcaaagaggctctgataccaacttgtcacgcccggaatttctatccaaaattccaaacgcttacatgtgtgt

SEQ ID NO: 26808 - DNA, 461 bp, Oryza sativa
gacctatgaatctacgcttgcggcggcgcgctggcgaggagcgaatcggttttgactgtcccctcgcggaggcggcgttggcggaggatgcataactgcaccggactggccccttataacagcgtcgtcggcggaatggtggcgcctgatgacgcgtaacatctgagggagagatgagaggtaaaaaatgtggctaactagtgggttccacaccggattcttccctccattgccatgttggcatgccactttggcaaaagtggctaattagtaagatggcatctcataagacgggaaaataatatgtgcaaacaaaaagggcattcgtataattgctcaatctaaaagtggcaaatagttataggatcgacaaacgcctttgaccctttgaccctcctttggccacaaccaaccaggtctgctaccttccgcctgttcatttacatgtttgctgaaaaaaa

SEQ ID NO: 26809 - DNA, 388 bp, Oryza sativa
  unsure (1)..(388): unsure at all n locations
agcttagcgccattaaatttcatggtatctttatgcaagatgtgtgcttatatgctttccaactcttacagttgaattgcaaaacttccatgcagtgtacgaggaatgaaatcagaagatcttgcatccttgaaagaaaagcttgagcaagaggtatgcaagtacttggctcaagtttgttgtcaatctaactgtcaactgtgtgcaaaacaacttacttcctctgtccctaaaagagtgtagttttagcttaagaatttatccctaaaagagtgtagttttagcttaagaatttatccctaaaagagtgtaatnttaaagtggtccattagacctcttaaatattacatccttttcttctcggtctaaccattgaatcaatagtact

SEQ ID NO: 26810 - DNA, 409 bp, Oryza sativa
ttcctgcagatgaaattctcagtgctggcaatgagaatccacagatagttatctttgttggcacacttgtcaggggacatggatgtaagtcaattagcttccttgcttgcattttgtcctatgttttcagctgttgttctcatagcgtgggacactgttgttatagggaatgtttcgttgtcgggtaactctgcttgcaaatggtacataaatattgatgtgccagaggtcaacaccctcgctgctaggtttattctctacacttcgctatcagacaatgttctcttagcttactttgtcctgattttttgagctaaactgattctttatgtgcagtgttgaaaggaattaccaggcaatcaaatggattgatctcccaactgcacctattcttaaaacaactgtgaac

SEQ ID NO: 26811 - DNA, 390 bp, Oryza sativa
agcttgataaaagcttttaagatatcatagacttggctagaactatcaagcacagcataaatacaccagtattgtacaaattgagcctccatttgctacatttatactcagtcagaatcagttctttcatcatcagagttattattgctcggctgaaggtcgttgttgcggaattgctctacaacatcacttgcaatcttgtcagccgcactttgagcattactgataagatcaagagcagcttcttcgcttgtcccgtctgcaaagccatcaatggcgtcaatttcaatcctcgggtacaaggatttggtcatcgccaatgccatactagcttccatactttcagctttcttgatattcttggaagatacatccggtgctactctcagc

SEQ ID NO: 26812 - DNA, 341 bp, Oryza sativa
  unsure (1)..(341): unsure at all n locations
tanggatgtgcagtgcgttaccggctgcatggtcgctttaagacggaacatatcgaggctgggagagaaggcactacccctattaagctcctcaaacgctccgggccgtttacctggacggaggaagctgagcgggccttcactcagttgaaggcgtacctcagttctcccccagtcctggtcgccccagagccagatgagccgttgctactctacctggcggcaaccccgcatgtggtcagcgcggcgttggtcgtggagcgcgacgaggacaacccttactacgcgcatacccatcctgtgtttactcgacccgggagagagcatggaggagaggcccc

SEQ ID NO: 26813 - DNA, 416 bp, Oryza sativa
agcttgcatgatacaggaggtggctggtttctatctaatctgatgatagtccacggaaatgaacctcttgctcacatgtgtacatttaaattcagttcgattctgacacctggttgggttagtggcatgaagcttaaacaaagcttccaatttctcacgatccttatgcaccttgtatttaaacctggttcttgctggtaactgcagttccatcgtaaaacctactccctccatttcaggttataagacgttttgactcacaatgctataattttgaccaagtttgtagaaaaaatattaacatttttaacctatgacaaattattaataaaatatattcaaatattgatttgataaaggaatttagtattataaatatactatatttggctataaacttaataaacttgaaacaa

SEQ ID NO: 26814 - DNA, 453 bp, Oryza sativa
tcagcttgactctgttgctacaccacattagactgttctcttttcctttccaaatcccatcaccatcaggatatcaggtgtgtgttaatctctcaaagactatcagctatgtgttaaaatttaacaatgtccaagagcgatgagtcatatactcagattaagacgaggaccaactgcaagttatcactcttcttccttcatttttatcgtccattttcaagaaacagtatgcaacctcgatgagcaagtgccattctaccgttcttacttcttaggtacagataatcaattgtaccttcagaggtgctgcgtgttaagatgaggtatcaatattggataaattatagatgtgattagaacttaccactgtgtgccaatcttggatataaactaaaagatgttatcagactcgctagatagtggtcattgcatagttgcatgacagataccggc

SEQ ID NO: 26815 - DNA, 437 bp, Oryza sativa
  unsure (1)..(437): unsure at all n locations
atgaacattttgacctgagtgacacaggcgctttgtttataccatttgncctccagcgattggaaggagcaagaactctcaccccctgtgctgaattctcgcgtcactgtccatgatccactgatcatttcctggatgtttatcgttgtgtgcttttgcaattagtaatataattaagaaactacttaattaccagttgtcttgttcttcattttcatggatcagcttgcacatgagatctctcttcaatgaaaatggtggctcaccgattcgttaaaaaaagtctatagatgagatatttttccctttctctagcataaaaaagttcattatgacatggacatgtacttttcatgaatgtttgtaacacaccgtgtgtccgctatagatattgtatctaatatgggataaactattcagcgtgcctattcagtttc

SEQ ID NO: 26816 - DNA, 413 bp, Oryza sativa
agcttccgtaaattatttggtccgttcattgtttttttcgctgattttttttcagaaaacctatacactgtatcccgttagaacgggatatccttctatgagacagtacttgataccttatagctgttatgataccagccgcatggtacccgatacctgtgatacctgttacccaatacctatgatacctaggacctgatacctgtgatactcgtgcaagagaatagttaatatgtctatcccgttgcaacgggatcccgttttgtagcaaccctcattttttatgtccgactagtctttcggtttttatcgctggatttttcccgttcctgttaacgactaaatttggtaatatcaccatcggaggtgatgatgggatcgaagcacacccggaatatgattgttgtggaaca

SEQ ID NO: 26817 - DNA, 408 bp, Oryza sativa
  unsure (1)..(408): unsure at all n locations
tcatcctgatatcatcttcatcaaactctacttaggttcagttctctgattgtctgacatagactgagaattctgctgagatacattggacaccaatggtgagtcttttgccacatctgagcatgaattgtctgcagaagatggagaatggccatcagctgttaccatgtacggcattggtgaggcctgttgattgtaaaaggagttctcacgattgtatggttcaggcccataacggaacagctgtgtgtcggacgcatatcttcgtgcatcgaaatttgaatttggagtgccaaatttatgtatgtaaagattatctgcgtaagtggttgacgggtctgctcgcctgataaagacattacttntctgtagtgcttctaaacttactacgcctaatacttaaactca

SEQ ID NO: 26818 - DNA, 418 bp, Oryza sativa
tccttaagcacctgagctgcagctccttatagctctttctctagtttctctcttgtgctagcagtcagtttgccacggctgatatggagccaattaatcttttgccttgtactctgtttcagctgatgcatggaaaaaagatgcatggaaaatagggagatatgctgcttgtggaggtggctatcttttgcttggatggttcattgcaaagaaattattcatagattggacacctagtagaattcaaaataaacctctattgtagatttaactatcaaaggtatttattattggcatatatgcctggatgtgtatgtctggtgggtgctggttctacctggaagatatgggtgaatcaattattctagatcaccttaaaaatttcatagggcacaaaaccgttcatccatgcgcatgc

SEQ ID NO: 26819 - DNA, 460 bp, Oryza sativa
  unsure (1)..(460): unsure at all n locations
tgttaataatcagagtacccaatgcctcgctctctacatctttatcaacaatcagcagaggcctntgcttctgtgcaaggcaagatgttgaccagttatagcaagaaaatcagtagcaccaccacaatatacaactattttatgaaagcaaacacataccttcagagccaactccaagactttaactactgcatgcaggttcgaaaccttcttgtcatgtatcaggatcaaggggtcatccagttcctgttaaatataacctcatgacttagatagttccaaaagaaaaactgaacatatcaaccaacaacagaagttaaaaacttacacatttctgggtctttgggttggtaacaaagtaaggagagatgtagcctctgtcaagtttcatgccttccacaacttcaagctcattgtaaaggggtgtaccctcctaccanatggttaagcaaacaattaa

SEQ ID NO: 26820 - DNA, 394 bp, Oryza sativa
agctttctttttcttctgccatcgaatttacccgaatgcgctgatttgattcgagggatggctgtggagaggtgacggaattccgccgcgggatccctggaaggatttttattaacttttttacggtggtttccttgggaatgcgaacccctatttgtctggtcagctctttactgttgccaggattggggaaataggcgagagttcccgctgggaagacgaaccgtcacttcaatcttcggatttcttgttaagggtattcgtagggcgaatgggcctaggccttaccagacctcagcccatatactttgacagcgtgcccattgggtctcttatagacttaggcttttttgctttgcaattatgcccacaatacagtccccaacgctgtaaa

SEQ ID NO: 26821 - DNA, 352 bp, Oryza sativa
  unsure (1)..(352): unsure at all n locations
actcacgcttcttattgtggcgtctatgtacattgtgttgngtgtttatcctcctccctctcctcctaggggagcttgtatttatacccataagtgtccccttgtgcaagtataactatggaaaccaatatggataccatccgagtagtacttgtcggttccatgtagaactttgggtgtcttttcttatccggaactcctcctatgtccgaaggttgcttacgtatacgacatggtatgtaatgggttctgccgagattaagcaactactattaggtatgtggtattcataaccctgacaggctcggtctgaccggatgtggctctggcggatctgtattccacccaaatc

SEQ ID NO: 26822 - DNA, 412 bp, Oryza sativa
agcttcttggaacggctggccaatctttctagatagaacagctgaggaacctttctatcctccagctgaatgctgtagttcattacatagtccattttcctgtggagttcagtcacaaagtgatactcgcagtacctcagccttgcaatatcctccttcaagtcctggataccttgatctattctcttcagtctgtggagaaccatctcaacacctttggcaatgcctagtatggagggatcaactgtatccgatttaacaatagtttcggattgttgcagaatgtctggggtcactgcaagttcagttgctagaggctgtagatcatagtacctacgatgcaaaacattatggaagtcattgtctgatagaagatctctagcatgatctagtctcgcattaagatgaccct

SEQ ID NO: 26823 - DNA, 449 bp, Oryza sativa
  unsure (1)..(449): unsure at all n locations
aacactcagcttattatcctaaatgaggagagactttttataatgtttatacgctggtgcttatctagatattacatccttacttatccatattcattcgtataagtgagtacttatcttgatagaatgaatactggatcaaagcagctgtaataacaccccagcacatgaattctttctagtactagagcagtcgataaaggcaagcgatgccagaagtagcaacgaacgtgtgttgacgccgaagttaatgacgacattaaaaccttggagtaacacctcattgatctactaccttgtctgtcttctttccattattttttccgttggaacggtcggtcctggataagttcaaaaaatgtgacatttgatttgaaagganacggctctaattgaactttcttctacttctacggagtgtactgccacaacgtctctacgttaggtgc

SEQ ID NO: 26824 - DNA, 394 bp, Oryza sativa
agcttatctctatttataagccctatctctatgtcataggggctgtttagttcgcgaaaaaaaaaattggacgcatatcagatgttatcggatgtcaaaaggagctttcggactcgaatgaaaaaactaattacgtaactcgtctggaaaccgcgagacgaatcttctgagcctaattaatccgtcattagcacatgtaggttactttatggctaatgatggattaactaggctcaaaatatttatctcgcgatttccctcctaactgtgtaattagttttttaatctatacttaatgctctatgcatattgccaacagttcgatgtgatggttttggaaatatgtttgggaactaaaccatgccatagtttagtccttgaataaaaaatttga

SEQ ID NO: 26825 - DNA, 426 bp, Oryza sativa
  unsure (1)..(426): unsure at all n locations
tgcattaaacacctaagtttgcgtgacttgctgagttctaaagtactcacccttgctctatataaatatatatatatagttcctccgccctgaagagaagataaagtgaagattagggtttcgtcctggttcccagccgtcgcctgtggtgttgggtgttagaccgttggttccgctgctgctgttgttgttggtgttcgcctcgtccgtgtcgtcggttgtattctcgggctgtctgagctgcaacctaagttaaggtaaataaatcctctatctattttaaggattcctatgattcatatttgtcaccgtgggtaccaacactatgtcctgngactggtaccgagatcgcggtttcgtaggaagcggttcacgccgttttccctacgacacgctcctgttaggtgccgatgtacggcggtatca

SEQ ID NO: 26826 - DNA, 378 bp, Oryza sativa
agcttgaggataaagatgcaagtgtttataaatgcttccaaatcgaactctaggtctgactctgcttgttttgcaatggttgaagacaatttcaagtactaaaaaatcttggacaatttttcctgggagcaaatcttcagtgccatacttttcatagtgaatgcatggatggtcattttggcatggaatagatgtggagctggataggtgtttgcagaaaacatcactacatggttaaagctgtccagtctgtgaattctccagatcatagaaactcaggacctacacaagtgtaattggttcagaatatttagtcaccttcaaatacctgttaggttaataaaaataaagcagtagataattacctggatgcacttt

SEQ ID NO: 26827 - DNA, 388 bp, Oryza sativa
  unsure (1)..(388): unsure at all n locations
tcatggggctggagcgagctcgtatttcttgatgcatttttcagcccctccaagaacaggttcaggttcttggccataatcttcttgcagtcaaaaagaaagtctcaatttcttgctcaaatgtttggattttttttattatcttttttttttggtgatcaaggtaggagagattatttgtgttccttccattgctggttggttgctgcaatctgcatgtggtggattcttgggaagaaagtggtggtgaggtgatgtgaatagggagatgcccaatgtggccggagatggcggcggcggtggccggaggagcgaagacttgcgcgttgttttcctcanggtcggcgcccgcgtcgcgctctccgtcgtcgggctgcttctctcgcgg

SEQ ID NO: 26828 - DNA, 377 bp, Oryza sativa
agcttagtcaaaattagacatattgttttacatatgttaaaaacatcaatgtcatcatctattaaaaatctgagtgggcatttctttataaacttagtcaaaattagagaactttaacttagcacaaaactgaaacagctcattatatatagcggaagtactactcagttcggacttaagatagattgtgcttaatggatgcaaattgtgtgctgtactgcacctaaagtaggtgccactgacatgtgggtcacctactacatatgcttgtcaggagaagatcccctcctgcttaattagtttccgtgtgtttagtttcaccgtataattaaaagttgactaaaatcgaagtttgaagaaaaaactaaattttatgt

SEQ ID NO: 26829 - DNA, 389 bp, Oryza sativa
ttgctctgctgaacagaaagggtattggtagctaatgtattatctacttggggcttctaacaaaacaagaatctcttcgtcggcaatagttccactgtcaatagcatactgtaatgctgttctaccatctcggtccgtggcttgtgaatcagcgcccctgcatgaaaagttgagcaagtaaattatgatgctcaagtgtttttaggttttttttaacatcaccatgttttgctgcaagctataatccataacaataacatctatgtaaataaagcatttcattttgaccactaagcagtgccctcatcgatatcacgttacttggttcattaatgcttgtttatggaaatatgtgttcaaatctgctttaagaaacaagcattggtact

SEQ ID NO: 26830 - DNA, 381 bp, Oryza sativa
agctacaggcctccaaatccaatcatgtattaaacatcacatgtgagtatgtcacacaagatatcagatagaatttgtcttaatgactctattaaaataaagattgcgtctcatttgtttcatcttcacactgatcataatattaacaaatggcgattcaaccttacctgcacaagggtaagttttgggctgaactttccattgaaataattctctcttatagcaattcttaggctactctctgtgatatgcattaaatcaccatcaactgtcaaatttacctgcacaattaaatagaacataagtggtcactgatacttctaaatcgagaataaaatacaacctactaatgaaaaattaatatttaggattctttaaata

SEQ ID NO: 26831 - DNA, 422 bp, Oryza sativa
tataatgcattaagatagaagttaattgtccatattttagtggtgtaaaggtcttaaactcataattattcattgcagcacaatcttatgagtcatgatacatagcatgtcaatcatatattattggttgtagcttcacaaatcatactgcacgtgaattttaaaccttgtatttcgatgtaacgagtttaatggttcaatgaattaccttggactttttaaagagtcgagtcgagttgcatttttaactcgttatatcaatgaatcgagctaagctagctcgttaacttaaaagttttcacgagtggagttgagttggcttgttagcaacccctattaatacctatggtgcgggttccattctagagtttttgacatatcctatacattatacaaatatttctatatatcacttatgcata

SEQ ID NO: 26832 - DNA, 378 bp, Oryza sativa
agcttattatgagcctgatatccagatatatcgtacttgggcctcattgtggcctaacaagtcatcatcagacagcgaggcagatgctcggcgacggcaggcgttagcctgagcagcctccgcctcgatggctctagagattctgcggaaaccgccgccgcttgttctcaaattatgcgagatgcaggtaccatcgctttgatgatgattgtagtttttcccaaaacctacttttctacctcaaaacgcgaaacatttgcgacgatcatagagcagcaccttacgtgcgacgacaatgcaatatacttcgtacacgcataacaaaaatgactgtaccttcttcataagcctgatgttctgattaatgcctggaactga

SEQ ID NO: 26833 - DNA, 373 bp, Oryza sativa
  unsure (1)..(373): unsure at all n locations
tgaactataaaactcaacttgaaggaggtctgccggcttggaggaactgattatgtgctgctacgtcttggagcacaaaaggtnnnnnnnnnnnngcatttttatttgaatgcctcctcagcatggatccaagccgataatttaccagtcagaggctctacgcacgcagttaagcattcgctgcgcatatccaattggaattaatatatatgcatgtacgtagcaattgcatgtgagacgcatgcatgtgtcccttttaaacggttttaatctgaacattagctcaggccaaatttaatataattgtagttatttatatatactgatttaaacatataatacatgggtgggaaaagctgcagctatgtcctat

SEQ ID NO: 26834 - DNA, 421 bp, Oryza sativa
  unsure (1)..(421): unsure at all n locations
agcttaaagccatgaatccctgttgtgcatatctggatctggatcctgcagaacaaacatataggatgagtagtatctgatataaatataatactcgagaaaaaatcaagtattttaaaatatttataaatatgtatttctcctcttgtcaattttgatttccccgagcagatgactctgtaacgttaaacactctgtccgactagtcatagcccccaagcatcgggagtcggcctacgcatttcccaaacatgcatatgagtgacatgagttcgtcattaatggaacaaagtttcacggatcagaatttactactcaggtacttttgcaattattaagagcaaaannataaattggctcatctctatgcttttgatttattccgaataatacttagcaccttgcgttactcggtccattc

SEQ ID NO: 26835 - DNA, 445 bp, Oryza sativa
taatatacctaaacgcaacaagatcttaacataaagggcagatttatcatgtcaatcaagcatataagacatacggtagttaaatcaggtaagatcggctaatatcccaatgaaaccctaatcggcaaccaaaaagcatgctatagattgagattctaatcatgacttataaggtcaaactcaactgatgtagctataagtatgaaaagaataacaatatgtagacaatcaagccgttggttgtttcataggatggtagataccctatataatttacatcaacattgatatgtaacctaatcggctgccttctaacaattgatgttagccgattaaaggttatataacgatattgtcagagattatatagaatatatgatcactcgacgaattacatacaccagattagagtatcatacagatggaagcactaatcccgagaatg

SEQ ID NO: 26836 - DNA, 417 bp, Oryza sativa
  unsure (1)..(417): unsure at all n locations
agcttgacatctgggacaccgccggccaagaacgctaccacagccttgcgcccatgtactaccgcggcgcggccgccgctgtcgtcgtctacgacatctccagcacggtaattatcaaaataactagcaagtgatcttcagatgctagctgattacgcacctgctggctcatcagcagaaatggtagatttgctcatttgcagctaagcaattagtataatcacatcggtagattttcagcaactgattaagtgatatgcatatctgtgtgtcatacaggattcttacattcgagcaaggaagtgggtcgacgaactccagagacaaggtatgcctgagtgcctgacaatagtactactgccgtttcagtatcattcatatgggtctgtagcanaatagacgcaaaagtgttagttc

SEQ ID NO: 26837 - DNA, 500 bp, Oryza sativa
  unsure (1)..(500): unsure at all n locations
ngtcaatgtatatgtacagtatatatgaaacgcactatgatagtatgcctaatttgtactcgtttgtttcatattataagccatttaactttttctttaaatcaaagttctttaggttcgactaatatgtttgtttggtattgaaaatgttagtatatttttctttaagcttaatcaaacttaaagaagtttgactaaacaaagtcaaacggcttataatatgaaacagagggtgtaactgcatattttcacaccctcagtgtcactgtgtcaggccgcattntaagctgcggcggtaatcggctgcaggcttcggcccanaaccatagaacccatcaaggattcgtagccatcacaaaagatcagcgaaaaggctatcacgcgaggngtcgcgcgcatcgtgcgagcgatcaaccatctttccttcgttttctctttntgagcctgtntatggttccttntttccacgtatgggtgcccctcaactntgagtctatctg

SEQ ID NO: 26838 - DNA, 364 bp, Oryza sativa
  unsure (1)..(364): unsure at all n locations
agctataaaatcctgcttttctcangccttatttttttctatccctctctatctctctgttccttacattctacaaaaaaggaccccaggacctcctctttctccatagaagagaatactccatgtaagcaccagatgcttacatttaaatgctactcttaccaagaaagaaaaaatgcatgacttctcatgtattggtgggattcttagacaaattctcggaaatttcccaatcagatccgcatcaacacgcagatgatgtacctagttgatactaaagcatttaaggttcaagcacactagagaaactagtagaacggctaagtaatggatagctgagaacacagaagaatactgcgataat

SEQ ID NO: 26839 - DNA, 386 bp, Oryza sativa
caacgcttataccaagggaccaaatcaaaagatgatcaagagttccattacttgcttcaagtgcaccgaagtgggacacattgcctcaaggtctccttgcagattggatgtacaatgcaaaacatcaagtgagaggcaaaccggcaacaagcaaaccaaaaagcaatatagaagcaaaagtcgactttgctataattgccgggcaaagggacatattggtaaaaattgtcccatgggtaacattcctaagccaagtctctcatttgatcataaattgcttaggaatgccaaaaatgacatttatgctactatggtgatttgttcgccacacactagcacaaaggccatttgggtgcctaagtctcttgtgactaacctctatggat

SEQ ID NO: 26840 - DNA, 412 bp, Oryza sativa
  unsure (1)..(412): unsure at all n locations
agcttgagggtcggcacatcataacggatgttttataagatggacgtcctagtgccccggccgaagccgccaagaactatgtacgtcacagcggttgggttgtgcgggataacgtgcctgtcagtacggtgtactggcgaagaacaagggcacgaggagatcatgagagctttgtcccagattcggagaaagagatgctgtggaccacaatgctcgagacattcacccttcctgcgggtacagaggacaaagtgaaaaggtggactctgaagaaaatggcagaacagtttcagagcttcaagggagatctgtacaagaagtatatactgaaggggcagacaccgaacttttacacattcccaaagctaatggatcactgggacgagtnctgtgcatataagacaggtgaaca

SEQ ID NO: 26841 - DNA, 447 bp, Oryza sativa
  unsure (1)..(447): unsure at all n locations
tggatntntcttcatgcacaagttgccgattgacttggatagtggtttcaatgctctttcgttcacatcgattggctatccgttgcttagctttctccagcttgaattgatgttgctcaagataaacagctggagtgatgatgtctgccaagtcatctgggactaaggcttggatttcagcaaatcgtgcccggattgaaccacagtcggccactagactgtctagtgatgatcctaaccgatgagatatgtcttcaaggattttcttgacatcttcatttacaggggccagagatttgcttgatgtttcttcttctgtttcttcatctaagcagtctttgatgtcaaaagaaaactgatcggctaagaccttngaaagaagaaattgaagatagctagtgttgaatgttattcagccgatctaggaattatagttgcaaaaactta

SEQ ID NO: 26842 - DNA, 376 bp, Oryza sativa
  unsure (1)..(376): unsure at all n locations
agctntgctgcctaatgatgggccagctcttttaatggggtcgcactggacccgttttttatattctttttggagttgctttattttctgaatttctttgggggcaattgagccatgggtatgctaatttatcatcgttaatgcttagtgttatcaagtccctacggggaaaaaaaactacttagttttatgagcgcagctttacatagcactaatgggtaaggagtaccgagtacaccatgggtaagaacaacattccaggttgtgaacctattcgcacttgacctatgtttccacctatatcttggtaggtaaattgagtgacaataagcatgccactactgtctgttacaggtttttaataactgtacagcat

SEQ ID NO: 26843 - DNA, 393 bp, Oryza sativa
agcttcaaaataattgaaaagtttgtttgagtgcacatcgtgtgcattttataaaactaatgagactaaataattagtgcagaaaattttgacataaattttgaaaataaaataaatgtaaaaaattaaaatttttatttgaaattttaataggacaatggatttttttatcaggagcattcataaaaaaaatgttgtgaacattggtatacctatctttatatgaatgctcctcatttttatgatctttttttaaaaaaataaatacgtattttttttatttcattatctaaaaatatttttttgggataaataatgcatcgcacaacaaactcataactataatagtctcatgcgagaagcttttatatttttaataatgtaatttatgaa

SEQ ID NO: 26844 - DNA, 409 bp, Oryza sativa
cactgaagcacacgactccacagagagtgaatgtatcatcgttcggagaaaatcaacagcgagggactaatatggacgtccgggattgcaggagtgagcatacgtttctgatggcaaagttcttctcagtaaagcttcaactgtcgccacacaaattctcataaggcatgctccagacggactcccacgaggtaaacactccaatactcacaacaatggcgagtataggctccatgacaaaggatgtggctgaagtggagcagctacaacaatttcaggcaaatcaactgctgatgaactcagaggtagcaaaccatacgcagcccttccagatggcacatattctccactcaacatctggaccatgagcacatagcatggaagcaatgccttgccactggcataaagt

SEQ ID NO: 26845 - DNA, 419 bp, Oryza sativa
agcttcaattatctaaaaataataaaaatttatgaaattcaatgcaagactacagctactgaacagcaataagtacattcataaattacatgagtattgctctcagaatacaccattgacacccccttgaaaacactcacagaagaataagatgaaaaagaaaagatcaaactaactctgattatatttttacattgttaacaaacttctagaatcgaaatctaatatgagtagaaacagcttcacacagttctgttcagtgaccacaatagaggaacaaaaggagaatgagagtctcccatgaattttttctaaagctaaaggcatcaacacaaacttaagagaaccatataaagttatctacagttagattagaggattcagagtatccattgctcttccatatcagatatcagggc

SEQ ID NO: 26846 - DNA, 494 bp, Oryza sativa
  unsure (1)..(494): unsure at all n locations
atantnaagctttgactataagacactagaatgtgactatgtntgacatttttgatactcacgtcagtgctaacgtgatatcatatgagaagtacacgcctatagtcttctctgcagcatgcaggagttctgaaaattctgtttccattttactctgccaacagcttactcaaatcactaattgaaaaatagatggaagctatataaaactgtgaaggcataagtattgcttgacctgattgccagaagtgctacgtgagttactgcaggggagaacttttagtcctgtcactttaaaaattgcatgtcccaagtaggatcccacacaatcacggcctgttatcactagagaatatgatccaactgaaagcttgagaactcctatcacaccatacactgttagacactttggctttgtataagagtcacgtggtggcaactcttcaactagattcaatgaaccatcagaacgtgtagctgacagatacaagtca

SEQ ID NO: 26847 - DNA, 407 bp, Oryza sativa
  unsure (1)..(407): unsure at all n locations
agcttgaggtaataacaattntaatctgtttctctnttagntcttcccaaatttggcatctgggccagtaatggtgtgttttgggttgaatgacaaaagctgtgtcacttattttagcttaaagcctaatgagagtttttaaattgctaagggtttatacctccaaaggtagtggtccatatgatccagttcatatcttttaagcaaattaacttgaggctatctcactctgataagctatgcaatagacatggatatcattatcaaggctgatgggcctttgacaataatggatgtagatttttctagtcttttgcaaagtctctgcagaggtctctgttgggaaatgggcttgtcaattattaatttggtgtatgattgactataatcttagcaacaacaactga

SEQ ID NO: 26848 - DNA, 417 bp, Oryza sativa
agcttacaaaatcatattactagatatgttattattatagttcaacagaaatgcaggcataaataaaagcatagaatataggcatcaaagttgtaatgtcaacatagagtattacttaagtccagttgtatgctccaatattcggctgccttcgattgctgaactctgccccagaaactcataaagaactgaagaatcacatggcaaatctttatcgcgtttgtgaatagcagcaacaacaacctggcatattcttgcaagagggcttactccaggtttctgaaatctatacatagaggagccaaagataaaagtaccaatacctaaatccacaaatagtgcagaaatgggaataaccccagatccaatctttgtgatccttgcacccacacaataacagtccccgagatctatgac

SEQ ID NO: 26849 - DNA, 417 bp, Oryza sativa
  unsure (1)..(417): unsure at all n locations
agctntcataggaattttttccatatgattgaaatccttcaaanttcctacacttttcctacaaatcaaagggggtctgagtctttatctctcctttaattcctgtatttttttctgcagtccaatgaaacgaccattcctatgtttttcctgtgatttgcaatcctttgttttatatttgtattcctatcaagatcatatgtttttcctattcctatgttttctcattcctgcaattcaaatgggccctaagagagcaaaagcgcaagtgcatgacaaagaaatttgttaggtgtactcatatgccaaggggaatgtgcattgcaagtatgttcaaagtttaaatgaatntttctctttaactattnttctgaatttccaactaattatatcaatgaatattgtataattaaaatc

SEQ ID NO: 26850 - DNA, 386 bp, Oryza sativa
  unsure (1)..(386): unsure at all n locations
cgcagagaccctaagctacctccatttatacactccccgcagccatctgttgctccttccccatatctttctccagcttttccaccaattcctggtcatgtagatcctcccaatcatttacctggtgcagtccctggaccaacttatcaaatgatgtcaataccttcaccctcattgcctgtgtttcgaccttcaatggctccatggaagaagcgacgaanaaccaagtcctccccttcaattgccccttccncatattgtaagtaccctattctatgaagtgtttactttattatttgcttcaatatttcatgattaagactttngaatggttggtttgatatggtaacttctgaataagaattagcattgatcgacttgactac

SEQ ID NO: 26851 - DNA, 394 bp, Oryza sativa
  unsure (1)..(394): unsure at all n locations
gcatgcgcgcgcgtgcangcatggtgagcacagacgttatattattatgcgaacggcacgacttggtgaacagtgctgcgatacgcattctcgataaatacctcgggcatataatggaggaactttctaaatactgactggtacatccttcgacctgtgttacgggtgaaatcctttgcacacccggttctaacccgatgatcttaagagctacaatatattactgcacatgtactcatacgagagcatgcactgattgcaatccaagcgactgaggatactgccatgacacgttaaatacttgacggctatctggactattacctttcgaggaaccacaacagctcggagctgaaccactgagctagtcactccagtcccttaatgacttata

SEQ ID NO: 26852 - DNA, 396 bp, Oryza sativa
cactatcttcaacaacgggtacaaatgaagtcttatatatatcatatagaggcgcatgagaacaacagccatgacaccaagctacacactgggcatcatcaacatcaaccatcgcaactaacaagaggtataacagcatcaagcagagaaatgacagatgctgtcctcatcgggtctgagaagatatctgcgagaccacatatgcacattgcacgaaactgggccgaaatgatgtctatgagtgcctacaaaggtgtccaaaaaggagtcaagtcggacacgtatagacccctgcaactgagagtcgaccatacactgtacatagctgctattgcaactacaagaactgaagataccagacctaaatgtgatgctctactcaacctatacacatca

SEQ ID NO: 26853 - DNA, 389 bp, Oryza sativa
agctatgcctcgaatattattttttatttaaaaaaatccaaaagacggactgcgatgtgttcagggcctattatactataagaggccgataatacgcccctatgcaatatctaccaaaatttcgaactcccggagcctaactgcttctgctttcacccatgctgccacttattccttgatcttaggtagaattgatgccggcgatgctgctctgttgaggaagaaactaagctacgatcttgcaatactaatttgataccagtctatttggcggaaacttgacacacacgtaaccgagccctacaattatagcaccacatcttctctggtattaacaatcacttgccaggatacctttcccagaaagctattctcttcttgcgaatcta

SEQ ID NO: 26854 - DNA, 251 bp, Oryza sativa
  unsure (1)..(251): unsure at all n locations
catggaaaccgtttaatacgtcgtagatataaaggtgtaaattacttcagacttatttgtacatcaaccgaccatgaatacaaaagtcaagtttggaaacattgctnttntgctatgccgcgcggaccagcgctacaatntagctatggtactttcaattaataagctagctaatactaatntatacacaaataatactaccatcacacttattagaatatatggcactaaatgcaatcaacaaccataat

SEQ ID NO: 26855 - DNA, 489 bp, Oryza sativa
  unsure (1)..(489): unsure at all n locations
tccactataatcaacaatgggtacaaatgaagtcttctctagatcatctagaggcacatcacaacaacaaccataacaccaagctacacacttggcatcatcaacatcaaccatagcaacttacaagaggtataacaacaacaagcagagaaatgacagattctgtcctcttcggttctcagctgatatctcctaaaccacatatgcaaattgcacgaaacttggcagaaatgatgtctatgagtcccttcaaagctgtccaaaaaccagcccaatcggacaccttttgacccctcaaactgatattctaccatagactgtacatgctgaaactgcagttactcgagctgaagaaaccatacctaaatctgatgctctactcaaccaatccccatcaaaactggctagatngaagttcaccaagtgaggaacaaacttcaccaagttggtgttgatcaagcacatttgacactccatcgctgacttgat

SEQ ID NO: 26856 - DNA, 416 bp, Oryza sativa
  unsure (1)..(416): unsure at all n locations
agctatgaagactaggtgtggttgagcactttttatatcttgtgggctatcacttgnggcttattactcttggagatcttctcctagatggataggtgtcgcccgcgagcttctaaaatcttgtggatgtcccgggaaagtttgtgaaggttttcctcacctccacaaggaaacgaggtaagtgattaaggattcttgtgctgagtttttagaggttctcctagttagagcaacttgcacttgtggtcttttctagaaggatttgtgagttggatcttggtgatcactcaaattctagaaaatgacctangagtgttgaattgaaagccttggacttcttctgggttctttgcacaagtaaggcaaggggttaattgagatccggctctttggagcacctcaatggagagtaggat

SEQ ID NO: 26857 - DNA, 499 bp, Oryza sativa
  unsure (1)..(499): unsure at all n locations
tgtgaccagngcaatgtcaaaggaggatgaggaagagctcagttgttatgtcgatgatgatgatgaggatgacgacaatggtgatcacaaggaaggtgccaacaccgtagtgaataagaaagaagagcaaattgaggagcctgttagccacaaaacagaggatgataaacaaggagcggatacacctgatgtttcagaggacaagaagactactctggcagctgagaaggatggcaatggcgaatccaaggatgaagtagcagcaccaaagtcgagcaatgacatggggcgagaagagaaaatcgactcgtctaaggagagtgaattctcagcggcatctcctccatctgcacaggaggaagatcttagctgggaggagatcgaagatgttggtgatgaagatgagaagaataaaccgattccacggtcaagccctcctagcaaagctgaggatatcagaaaacgattagttctgtcgaagatgatgaagagctgagtt

SEQ ID NO: 26858 - DNA, 409 bp, Oryza sativa
  unsure (1)..(409): unsure at all n locations
agcttgaaaagaaatccagtaataacattaactaatttatgttgatttgtatttagggactgtttagttggcaaaaaaaattacccctacacgtcacatcggatattcggatacacatttaaaatattaaacgtagtctaataacaaaataaaatatagatttcgccagaaaactgtgagacgaatttataaagcctaattaatctgtcattagcaaatgtttactgtagcactacattgtaaatcatggcgtaattaggcttaaaagattcgtctcgtaatttcctggtgaactgtgcaattagtttttttttttctatatttaatactacatacatgtgtctaaacattttatgtgacagcatnaaaaattatttgtaactaaacaggtcttaacaatattttatga

SEQ ID NO: 26859 - DNA, 503 bp, Oryza sativa
  unsure (1)..(503): unsure at all n locations
ntagccttggtcttgagtcctgctttttctggatgttattcaaacaggagttttaaactttaaatgggacccctctcatggcgcttctatttaaaataatatgccctcagtgctctatgtttctttattgtcaccaagcagtaataacagaagcctctcgccatgcagatcaagcctgctcgaccagaaagcgcgctttctgactaattccttcctgctgccatataaaagaatttgctaatactaataatgcaggatatattatatggtgaagcctgttatacagtgcctgactgcctgtctcagtaaagtttgattgccttgaacccattacaaagaaactntattgtgcctaccaagaaccaaaagaatagagatatgtcttgagctcttctcanaaactaaaattaagttttgaaatctctatcacactcaacatatnnttttaccagatanttctgtgacatgtcatgtgttatggcacataacaagtgcagcacagc

SEQ ID NO: 26860 - DNA, 317 bp, Oryza sativa
  unsure (1)..(317): unsure at all n locations
agcttcctgttaagcatgtgttatctagatattttcgngtttgcggctactgcatattgttagagccttacataagatttatattcttccttactggtttcggttgcagatgtattttgataaaatagcagagcttacaatgagtagatctgaaacctcagtttttagagaagcattagtgagcttatcaagagactcaggccttcatcccgtgggtccttactattcctacttcatcgccgatgaggttgttatcttgctcttagagtctatattgcgcgagctggcattgccttacaatgtatatccttataatt

SEQ ID NO: 26861 - DNA, 422 bp, Oryza sativa
cagtctcttccagaatattgaagggaactgtctttctttttctgatacgaacttcttaggaacttcatgcaggcatacaatgcttgcctatacaagtccgctaacgacccccagaataagtggtcctcaccggaatgaaatgagccactttggtcagtgtgtcgactatcacccatataaagtcatgaccccacgacgttctgggtagtccagtgatgaaatccataccgattttctcccacttccattctggtatcttcaaaggctgcagcaaacctgcgggtatttgatgttctgctttgactcgctgacaaacatcacatacttgttcatatttctgggaattcacgctttatacttgcccacgaaaatctctctttagatcctggacatcttaatactactcgggtgaatggagttta

SEQ ID NO: 26862 - DNA, 289 bp, Oryza sativa
accagccatacatagaactacctgatgcatgcaagcttaatatggtcagtccgacgttattatattgtgcgagtggccccaggcggggataagtgattgggcatggctaccgtacaatgcctaaaagatgatgacgtggaaactacatcaaacttacccgcacaggaatttaccaaccatacgaccgatatatttacgagacgtcgtttaaccggtctaccgaccccagctaccctgagattgatctaccaactatacagacctctaggaactgagcacgcgacaaacc

SEQ ID NO: 26863 - DNA, 415 bp, Oryza sativa
  unsure (1)..(415): unsure at all n locations
agcttggaagagaggcaagggtgttttgtctatcttttgtttgaagacattntgaaatcactaagtgatttatttctttctatgtttgggcgaaaagagacttgcgtctcgattcgactttaagagatgcttttcaacagctcatttagcaatgtaccgacctcccgggtcagatcattacttctcggctcccagagccatttcacttaattaagcggctcccagagccttattcattttctcggactcccagagtccagctgcccagcagcacaacaatccgcttccactcgggaagcctagtctatgatgcccgcagacatcccgaatcacacagattcgtttctgaccactcaggtcattcatctgccacataggctgattctggttacgattcccacaccacaacaacttt

SEQ ID NO: 26864 - DNA, 472 bp, Oryza sativa
  unsure (1)..(472): unsure at all n locations
tgcttgataaccgtgttgatgagaattctgcatacggttttctctgctcccagtccttgccatangtaaggacgcatgctcttaacatatcctccataatctggtttactctttcggtttggccatcggtttgtgggtgataggcggagctgaaatccaatttggtgcccatagctttatgcaagctcttccaaaacctagaggtgaactgagttcctcgatctgaaacaattctgctgggcacaccatgcaacgttactatgttttccacatagagcttggctagcttctctccaccataattagttcgcacgggtataaaatgagccgatttagtgagctgatccacaattacccatatggaatcatgtcctttctgcgtcctgggtaagccaactacaaagtccataccaatctcatcccatttcacactgggatgggtagagggtgaataatccagctagcttcgatg

SEQ ID NO: 26865 - DNA, 219 bp, Oryza sativa
tggagcgcgtcacgccagcgcgtggtagccaccgaagaagatcacgctgtcacatgagctcatccgcggcgctcacactctaacatttacaccccgttcacctcaatattcctggcgatacctgtcccaaaactgcgtgaccgcgctagagctccatggcggctacaaatgccaagctgacactgagcacccccgatagtagcttcatcatcacgcacg

SEQ ID NO: 26866 - DNA, 497 bp, Oryza sativa
  unsure (1)..(497): unsure at all n locations
tactcagcttcatatgtatgatgatatggagtgtcgtgggaccgctttatttctactgatgacgtggagtgctgattntgtatcaccgtcttacccaagtccaaaacgacatttatgacatacgggcccaatatatccataacatgagggatttatgcacaatcgttatggaagtagttaatattgcaacaatctgacaattaagtaaactatgaaggtagcccacgtagatacgcgggcaatttattttatgtttatataaaaaaatctgaaaaaaagtcatatatcatcatattaattataagaacagtatattacctcgtaacctttccataaaagaaggaaatatttatactgtgaatctgataacgtaaatgatagtgtctatcatattcaaacataaaatcactatgttctggttatatgtaaacttacctatcatcatnctnttgcaacataatatgagttgtgatggtctgtttcatttattatacatc

SEQ ID NO: 26867 - DNA, 372 bp, Oryza sativa
  unsure (1)..(372): unsure at all n locations
agctttcactacggtaggaataagatattcacggttttcctaattaacctcctgcaaaaatcatcatttttatggacaggttcttacaaaacttcatagaaaatagggtgatttttaaaaacagttatggtaatggaaggcctataaaaattaacttttatcttgaaaattggagtactactaaaactaaaagcaattgctactatttcatatgaagttggatgacaacaaactttatatgtaaattttatctctcgacgagatttacaattttatagttgactttntttttcattcgggatcatttaggggcttaaatatccattacaaggtcccatatctatttntaaatgaatattttagttttcaaaa

SEQ ID NO: 26868 - DNA, 439 bp, Oryza sativa
ggtaaagcttgcgtaaaatattcatttcaaaattcgatcaatattttgattcagcattcaagaatgcttttccagtagtcattattttgatagtaaataatatgtatttctctctcggatttcaactcatacggtcatacgctagctgatttttgctgatctttcagtactaacctgatttagataccaaaatacaataaataaacatttaattgattgacgtgtaagtccattctgatggctacagctttgcaggtatatagtagcaaagttgctcaaatttggaaagggtaattataggttttgggtgcttctctttccggatgtgatttaccattgcttagcaattggaaataaaaagaaataatagatataggttcattcccactaaatacagttaatgccacttatctctcttctcagaaagacatcaccttat

SEQ ID NO: 26869 - DNA, 374 bp, Oryza sativa
agcttttctcagtggtcggcaatggcgttatctatgagagagtgaggagttcgctttggtgaagacgacacgagaggagccccggcactgcgttaactccatccacccccgtgccggagaaagtgacacgtggggcccaccgggcccaccataagtgggccccattcgtcagcgggaaagttaccgaggagggggggataaggcccccacggccccaccaccacctcgcttttggtcattttcgtgatgctgcggtctgcgtggagtgagatctgggccgcccgttggttggttgatcgatcgatggacggagatgcgggcgtcaaaaaggcggtaacaaaccaaccaaccaagtaactaaccccgtcagattc

SEQ ID NO: 26870 - DNA, 340 bp, Oryza sativa
  unsure (1)..(340): unsure at all n locations
catgaaggtacttatgacgaccaaacctaaaacttatatgcctgattctgcagattctaatcacttggaacagatttcgcaaagcaagggtgatgtacatggtcctttgcaggcttccacaagggaagagaacacgttgatagcatcacgccatggtgtagagagaactgtcagtgctgttcttgatagcatcaagccagaagatagtatagaagccaagatggacactttgtcagcagaagttgctacagaagacaangggaaagatccaaatcgtgatgcacgttatgataacgccgatgatatcaactctcttgcttcaatcgaggaaatattggaa

SEQ ID NO: 26871 - DNA, 353 bp, Oryza sativa
agcttcccctcctgcatcttacctgcatgacgccccccaacaagcaggcagcgcagtaagaggtttggtcactagctcttaggtgtcctgggattcttgatttctagctttgcaattgattggtgagatgttgtttgatttgttgatgggggcggctgaacgagtctgtgaatctgtgttggcgcacatgcagttggggtgggtttcggtcaagtctggtggtgtggattagtgaacagtgaacactgcctaaaatcgatgtaggagaataatgatctcctggcctgatgattgctgatttctattccgggacaaattatattattaaatccaatctgccttcgtgatgtgat

SEQ ID NO: 26872 - DNA, 430 bp, Oryza sativa
  unsure (1)..(430): unsure at all n locations
gcccacttctctctatccacacatataagtacttttagactttcacatgatcgatcttcaatgtactattttgaccaataatatatataaaaataatttatttttttaaaaaagttgcatgttacgatagtttgtttaatgataaatctaacaacatcctttntatgccatgaatttttatgattatttttttttgctattgatagttaagtcaaaacttagcactcttataataaaactagaggattgccccaaaagatatcattgcatgtagaaatctatttggatttcatatacaacccttggcttatatttctatgagcatctgaattntatatacaactcttagattctatcnttataatccgtagatttacatacaactcttagcttctatttatatgaacgcttttgattcatatacaactcg

SEQ ID NO: 26873 - DNA, 306 bp, Oryza sativa
tgaaacggggcaaaaatggaccctgggtagcatcggtgctctctcgccttattctcacacacctgacaagcgcgtagcataaagtagcataacggaaggtgcttaaaaatgaggcgacctatataagcttgcgtgccctctctgtccgatattccgtcgtgcataccgtgatgccgcctggcttcaagaaacatgctaacgcaatcacttgctgcctggcggggctcaagccgattgttatgctagacagcgaactggggatgtctttgtatatatgctatattaacacgcattcagccgtgggga

SEQ ID NO: 26874 - DNA, 391 bp, Oryza sativa
agctataagcagacaacctgcccttactgtatgtacagtataaatatgccatctttgtagattgtaaaaaatatactaacatagcaaaagtgttttgtgacttgtgactggtcgtaaataaatatactgcgagtttcaaacttaaaaaaggtagaattaattggccttaaatttaaaaaatgcatgagttcacttaaaatgcagagaatgcaaaaagaaagaggtaatgcagatagcacaactattttggcagatagataaaagtagttgagtatttctggtagtggtacgaaacatatataaacaggttcattgccaatcatatgcctaacatgtttaaaggatagcaaatgctggaaagttgtcatcttctaaatagctatcaaatgat

SEQ ID NO: 26875 - DNA, 415 bp, Oryza sativa
cttggaaggtgataaaccaaaagaatccaagagggttgatacctctatctatcagaagggctctcataaaggggctatgccacttcctttacctccaactacaaggggtggacctccatttttatcacaagacaggagaagcgctgatcaagtcgctcagtcaaaggaagctgacaggctggcagctctcaagtcttatagaagatccaatgtactttgtcttcgctgcggagaaaaatggagcaaggatcataaatgtgcatcttcaatacagctgcatgttgtacacgaatagatggatgccttgcatgtcactctgttgtctgatcatgaagcatatgaattccaggataacgatacacttatggctatgtcacctcatgctgacaatggcactgaatcaagtcactctatc

SEQ ID NO: 26876 - DNA, 391 bp, Oryza sativa
agctttccaatggtatataattaactgtttaatataatatatttataattgctacataattaatatcaaatgattagattatggttgacctaaaaatgtactaataaataaaattggtactgtacagtaaactatgtagaagaataattctctttaacatgctttatcactgtaaaacccatgtaaactaattagaagcatatatatgtggtcatatcccttctataactcaatagatagatcaactccgaattaacgaaatgtgtatcccatttatattatgataattagctcctaaataagccgccatgacaataagaatgattatgagaatatccgtttgcaaacacgagtagtatgaacagccctaggttcgaccccgacaattata

SEQ ID NO: 26877 - DNA, 96 bp, Oryza sativa
acgccaaaaaagcgtcgatgccatataagtaccacttttttaggggatgacttaacgaggaagggacctcagggaataatatttgaaatactcgac

SEQ ID NO: 26878 - DNA, 401 bp, Oryza sativa
  unsure (1)..(401): unsure at all n locations
agcttatgtggatgatgtggtcgtcaagacctatcagaaggatgatttgattacggatctagaagagacctttgcgagcatccgtgctttcaggatgaaactaaaccctgaaaagtgcatcttcggagtaccatcagggaagctgcttggatttatggtgtcccatagaggcatacaagccaactcggtgaaaattaacgccatcctcaacatgaaaccgccgagctcccagaaagatgttcaaaagttaactggctgcatggcggcgctcagccggttcgtttcacgactcggcgagcggnggaatgcctttttcaagctgttaaagaaaactgacaatttccagtggggaccctaagcacaagaaagccttgaaggcttaaaaaacttctcactactca

SEQ ID NO: 26879 - DNA, 484 bp, Oryza sativa
tatattacttgcagaaattggaataataaaacatctaactttatgttctttatggatgaagacctagccagaatacggacacaactgtttgttattttgttaatactcatgccaagctgcaaaatttgcactttttttcttctctgttatgtactaatgttgattacttcaatgaaaacatgtttaccttagcaagtgtatataactataccaaaaggagaatggaagatgtcatataattatacttgacaaacaatgaaacggtttgaaatacattttatttttctctgtttgaaccaaagaaaatagaattatgcatgaatttaatcatgccaaccttgcattagtagattacgcacaggtcaaatcccaacttgttcgagggaaagacatttgaaatcttgcaagacagaatctaacacatagtgtgcaagaaccatttagtataagttcagaacatgaaagcaactaacctttcaataca

SEQ ID NO: 26880 - DNA, 415 bp, Oryza sativa
agcttattagaagctctctcctagttacatatgcttctatgctcatttgggtatgtaagttcagttgatgaatctagagtgttttcttctgatcattgactgtaccgtttatatcatctatttatatattaaaagttcattaaacttcattcctacaaacactcttcaactgccaaatggcactcatacataagctcctaagttgtcaggtggcactctaataaattagaaaaaaatcctataaattctaaaaaaaaaaaagaaccgttggattttattaaatctcatggatccattatttacaaccattagacctatcttacgaaaaaaaatctagctctcaacccagccccaccctaagctgtaggggcagacgtacatatgtactttgaccctcctattacatcatatcttt

SEQ ID NO: 26881 - DNA, 303 bp, Oryza sativa
  unsure (1)..(303): unsure at all n locations
aattttattcctagaaatctttttttagttccttttctaaaaattcaaagagtcaacaactttccctaattttcaattcctccaaatcttatcccaaagtccacaaaaattctcattggttcctattaatttgggccaaacttccaattcatttggctcattcttttcccccttactcaattttctttcttcctcttgggctaccagcccagccgagctgcccgcctcttgccttctcttcctgtgggcacgccgncaccgacaccgcatcaccatgggcgccgncgccaccagccaatcatg

SEQ ID NO: 26882 - DNA, 423 bp, Oryza sativa
gcttgagtgtgcagctgcaacagcagctttttctattgttacagtcaatcctcgtctcgtcatatctagtaagccttaccgttgaccccttcattacctcactgtcgcggaactcgaaggagctatgcgggatttctcgcgcgacaaccccaccgctggcttacctatgggggggcggcgagatcataacagttgggcccgatcgaagcgacgaggagcagtggcaacatcgaccccgacaaccctttcaccctaccaccaccgctaccttgtcgagctaaagtaataagttgggaagaaaatttagtctggcatgtaagtcacacttatcaagaattttgatcatttacaaaaagtaccgtacgaataaaacgataccattacatcgtgagaaatatatacagtcacatgggtttaatttta

SEQ ID NO: 26883 - DNA, 421 bp, Oryza sativa
  unsure (1)..(421): unsure at all n locations
gacctgctgcatgcaagcttatacataggatccgcagtctgtttctttctgaaaaaaacaccacaacagacgaggtatcattntaaaacaatggcttcataaataggagtgccagaataatttctgcaagtatttgaaccttcatctgcaggtagcagtagtgtctctgcatcctccacatcataatcttcagtctttctgtgagctccactaattatgacgtactcagtattctttgggtctgattgcataactattttcttgtttgcagcatggggatttcatggtgaagctccatatctgacacatgaaatattggcaaaacaaagatagcaccatataatgtcagctcacacaattatgcaataaagcttcttctctgaatggaaggacctcaataaaataatggcatcaagttttt

SEQ ID NO: 26884 - DNA, 378 bp, Oryza sativa
aaaaactcagctttatattccatatagatattttttacgcatttttcttcgccccccacacaccctgttacaactatagggcgtctgccgggggagctaaagttataaggtaatggacagtaacttatctctaatatttatagctattaatacccattaattcgacaaggtacctataatatgtctaaccttatattattccattcatatcacataatttgaaactatacaatgcttaactgactcattctatcttctctatctctatatatgctaaatactatgctgcttgactcttattatcttctttttgcatttatttaataattataactgtattttaggaaccactttaaatggttcatctatgcatacaca

SEQ ID NO: 26885 - DNA, 412 bp, Oryza sativa
agctatgctgctgcctgtgtttgttttctttgattagtctctttcttagagtaattagagtcttttatgaaagttgtcatggacgcatgtatcactcggacaggtagaactggttcaggaattgaagacaaagctaggaaatttaattaggaattgtttagttagggaaaaatttaggtttagtggttatatcggatatgcggaaacacatttaaagtattaaacgcagtttaataacaaaataaattacagattccgctctgaaaccgcaagacgaatttattaagcttaattaatttattattagcaaatatttactataacaccacatttgtcaatcatgatacaattagacttaaaagaatccgcttaccatttacacgccatatggataattgggttttttctacct

SEQ ID NO: 26886 - DNA, 492 bp, Oryza sativa
  unsure (1)..(492): unsure at all n locations
taccgaaacattgtgatgaccagttaccaatgcaacanatcctatggcagtaccttcacgttctggaagagataagaaagtctacagcaagaaatggcaatgtgtaaatactttaggttctattatcaaatttaacctattacatttatctaggcatggctgcaaggtgaattatatattataactaaatattcttgaacttctgcataaataatatatcatcaatatactgtcctgttctagtcttctagatgagcaaattatcaactttagttcacaaaaccaagtaaactgtagaggatgcaaggtggtaaagttcgcaaatagctagggcatattaattatagaacacaaactcacccggtgcacactgtaaagggcttctactgtatctgctgattntccacccacagatgcactgacctgcagagtcaacaaacaactntcttactttggcaccaaagacaccaatgaaacatgaacacanaaaat

SEQ ID NO: 26887 - DNA, 415 bp, Oryza sativa
agcttgtgcaagttcatttttcagttgttatatcattaccatatgctgccatagattgaacttggtaatatttggggtttctgaaaagaatattcctggaattagcaaaaccaaatatgttgtgttgtacaatctgttgggttgtttttatatgtcggggtttagcccaatttagcagacaaatattgtctcagctgtattcaaggacataagtcagcagagacagatatcatcatcttcttttcttgtttcaaaaaggggggaaaaaaagagatctccacatctcttcatttgttttctcttatgatttgcggaccatttataggttcaaaatccttcgtcaaggaggtgagtaattcatggtcaagttcaacttcaacaactttctttcactctgcagctacctacttttttc

SEQ ID NO: 26888 - DNA, 494 bp, Oryza sativa
  unsure (1)..(494): unsure at all n locations
tactagcgcactnggcatggttaaaggttcacatcttaactcttgttaagacaaatccaaaacagaacaagaatgcaccacattatccaataaataatagccattagatcaactagcaaacaaaacaggtagaataaatcttagccatttgataaaagaggatgttcaagaactttccggtgtatcctttatggcttcatatatgtgctgttgggatacgcgtaggctacaatagcataaatcaaaattttctatcgcgtaaaccaggaaccatgcaagtattagatcataaatcgttaccactcgacgcgctgcgcagcggaagaaggcgctaagaagtcgaaggaattctcgcgaagtagcgcgcgtcgatgtagaggaagtagtcgatcgcaccgactcgaccttctcctcctcgtgcgttctnctcaaccgtanttccacgccgatcaacaccgcaaaccagcggcgcctctactcgtatccacacgtac

SEQ ID NO: 26889 - DNA, 405 bp, Oryza sativa
agcttggcgatgacgggaggagcttctttctctctccggagatcaaaacacgacggcgagcttcgggttgatggcgacgatgggcttcccggggtcttcggcgcaagggaacgggctgccgggcttgctcttgaccttgcggagccgagagaggtggcggcacaggaaggcgacggccgatgcggcggcaaacggcggctggagcggctgcctgcagcgagagagaagacgaacgcggcgactgcgctacaagcgacgggggagaaagggagaggtggtggccgaaagaggagatggaagggactctatttatagccatgggagagagagatcgggcttggaacgctacgaatcgcgccggaaaacctaaggtttgtgggaagatatccccaatcaagctcaatt

SEQ ID NO: 26890 - DNA, 435 bp, Oryza sativa
  unsure (1)..(435): unsure at all n locations
aaaaagcaaatatatcataggttgattataatgtgcttgcccacctaagacgcgtgcctgcgatattaaactgctatgaagctctcatgatggtgcccaatctaagggaaggtctcgtaaaagatttacaaacctctgagctctatgaggtggacatggcaaagcattcgccacgtctctaatccactgtatgtaaatgaaatcacctttgacgagcaagacaaagctgtggaacaggaagatcataactcctcactttatattgaacgaaatatngcgagcgcacatctgcgacgaatgctgattgatccgggttgtgccgtgaatatactacccatgcgtagtatggcctgtgctggatatgcataccatgatttggaatccactgttgcgatgatatgtggatntgacaatcaacggaaaccaactctacga

SEQ ID NO: 26891 - DNA, 417 bp, Oryza sativa
agcttgacattacggaccactgggtctatttccagggggtaccgccccgggtggaccactcggtcaggatgatccgagcggtcaaacttgattgcaatctctgaccatcgaagatattggggcgtgtcgggctgaacagcattgatctcccgttcggtcaacttttgcttccttttagactcataagccagggggccgccgaagatatggttgagctccttgcggtggtcttgaaatcctaccggggtgtcgccgtcgtccttcttcctcgacgtgctttgttcttcgtcggagttcttccgtgtagtcttggtgtattgctccgcgaatggcttgagacgaaacaatctttggccacgtgggtggagttaggatggtgcgggcattgggagttcatgatcttgtcgaacgtgttga

SEQ ID NO: 26892 - DNA, 375 bp, Oryza sativa
  unsure (1)..(375): unsure at all n locations
tagtcactatgcaaagatgcagnttacttcatgaagtgtatattaagtacctcagatgagttcttttctcctttggaagaaaggccttcacaaaccaaaaagagaagtccgaataacatcactattccaacaatgttgcatagcaaagaccaaccaatgaaaaggagcggagatggataagtgaagtacgcaagtagaacattcaaaaggaacaatgactatgagacatgtgggtgtctttgtgagagagaattcaacaattacagaaagtaggggtgggcgtccaggttcttcgggtcgatttttaccgcttggtggattnttggcttttaaagaaacaccaccgatctcatcanggaaaaacccaactacttc

SEQ ID NO: 26893 - DNA, 411 bp, Oryza sativa
  unsure (1)..(411): unsure at all n locations
agcttcagaggttagttattaaggccactgaggaggggactgatgaggtccacatagatggctttcctggaggagtgacagcgttcgaaatatgcgctaagttctgctatgggatggttgttaccctcagtcctcacaatgttgttgcagcaagatgtgcagcagagtaccttgaaatgactgaagatgtggacaagggaaacttgatattcaaaatcgatgtcttcataaattctagcatcctccgtagctggaaagactctatcattgttctccagagcacaaaagcactattaccttggtccgaagagctgaaggtcatcggcagatgtatagatgctattgcttcanagacatctgtggatccagctaatgtaacctggtcatacagtcacagcaggaaaggaatga

SEQ ID NO: 26894 - DNA, 436 bp, Oryza sativa
tgccgttcgccttgtgaacgaccaccgggttcgccagccactccggatggatgacttcacggatgaatccggcctccagaagtctcgccacctcctcgcggatgaaggcttgacgttccggggcctgccgccgtactttctgccggaccggccttgcgcccggccgcacggcgagacggtgctcaatcacctccctggggaccccgggcatatccgccggtctccatgcgaagacatcagcgtttgcccgcaggaaggagacgagcgcgtcttcctatttgccatccagaagaccaccgatccgtgtggtcttggatgggccgtcgcccaaggcaacctccttgaccgggacctcgtcgcatgtggcaatccgctgcctcggggcggtgggggcggaggtgccaagcctctcgtcaccaccctcgggcttggtcgc

SEQ ID NO: 26895 - DNA, 401 bp, Oryza sativa
  unsure (1)..(401): unsure at all n locations
agcttggtttctaatagtagggtcttatttatctgtcctatggaaatccagagtcttgaggtcaaggtcattgacgagagcatccaattaaggttgtgggaatatgacatgacagtatttaagtttgtcaaaccaaaatttcttttcaaaagaagcaaataatgtcaagattgtgtgataagacactatttgactatgaatgattgatgaattaagctatattaaaaggatcaacaagaaatcttaataaatatactgcaatatgatgaatagtgtgaaactcacttcatgtatagcttatgtgctattatcctggaatcgactagcgaaaaaatggaatctttatgatgtaagcctgatntgcgattttcactacctacgtactttcatgaacgtaagta

SEQ ID NO: 26896 - DNA, 458 bp, Oryza sativa
tgtgtatgcacatatcaagtatctatcagcactcatgccactttatgtatatatcacaatctctagtaagtaaggctgtccttacatatcacagagcaatcttggaaagtaataagcaaactacagtacattactaaaatatcaattcagttttctggtcgaatctcagaacgtttctgcttagaaaatctaatctctcccctaatacattggaggggaaatctgctctgtgctgcctactgaaaggcagaattattttaagccaatctcatcgtcatccaaagtactacatctaatgaagtgacaatataattgaagaaccaaagcaggggacatacttgtagacgaacaacttgtgtgaaatgagagagcttccatgcttataggcaacatatggaaactgatctgtaatctcctacaataaagaaaatgatctactctgtaccgatcgaccgtgg

SEQ ID NO: 26897 - DNA, 306 bp, Oryza sativa
  unsure (1)..(306): unsure at all n locations
gtcaatttattcttaanatatgtatatgtgacatcatacatgaatataatntaaatacttgtcatcacaattcttttactatacatttaaattagaaatcgcataatactgttctaagtgtctatatactttagtgttctcaaatcagattagaaaagacttgcctttatggtccagtcttgattntagatatgatcgagatttgattcanacaaattatattcagggtgctaaacataattggcatatntgtatctcagatntgtaaacagaaatatgtgatatagttttacaaattacaccacg

SEQ ID NO: 26898 - DNA, 500 bp, Oryza sativa
  unsure (1)..(500): unsure at all n locations
ctaagctaagaacaccnatctccaccgagaattccctctcagatctattctaatcagcctggtgcttcatcctctgctgtgccctaactaactgttggtgaagcacttcattcatttgagccatttcttgtagccaaacttgaatatcaggtactgtgctttggccgatttcagtgacaccaaagtcgctgggcttcctagtaaaaaggacttcataaggagacttacccagagtgctgtggatggaggtattgtaccaatactgtgcctgagacagccattgcgaccatntatgtgggcatgcatgaacagtgcatcttagataagcctccaggcattgatttaatcgctcagtctacccatgtgtttgaggatgataaaatgaactcatattgagttttacatcagctagcctgacaagttcctgccacaatgcacttgtaaacatcctgtcccggtctgagatgaataccctgngcattccanacatctcatacaca

SEQ ID NO: 26899 - DNA, 179 bp, Oryza sativa
agctttatgattcagccatcgcctgtttgtatccgctcgagaaagaagtatggagaaattaattcaacctgtagatgaaggtgagagatcacatcgctcaatgactggcttgttgcctaaaatcctatgctaatgaatgtacacccgctgggtgcaaaacgactggaattcgagtcact

SEQ ID NO: 26900 - DNA, 370 bp, Oryza sativa
  unsure (1)..(370): unsure at all n locations
gatgttcttaccagaatgtgagaagtcatccggattggaatcgggtctatctatgtattgacctattatgaaagtgaagatgattgcgcactcataggcggttgcggccatcctggtcatgctggatctgtccgattgagctcctattgatcattccttttttatccaacatgagcgttgaatctgcatcggcggcgagcaaactatgacccatatagctctcgcgatttatttatcctctgttcgctgatgctttatcacactttcaaggctttcttctttccatgttctcgcatctacgcctatatttatctcgtccgatccatctgacgtgcatnccgccaccgccgagacataccctcagcgctga

SEQ ID NO: 26901 - DNA, 407 bp, Oryza sativa
agcttcctcaagaaaacgaccatattgacaatgttgcacacaggacatcatgtgccaatgccttcgatggcatgccaagggattacctaaatgcacaagttctcgggtctggtgtccctgagttgcacaatcagaagctatctcatcctcgtggctcacagagggatttctttggtcacaatcagaggcaatcccatcctcatggctcacagagggatttcttcggtcaaagtaccgagtttacgatttatattaccatcgctaagaacatattgacttggaaaaatattcgggactacttcaagtattttcttctaaacttagtactatgtttacttttgtttgaggacaagactatgtgcaatatgatttgaagttcaattattccactatgttcaattaatata

SEQ ID NO: 26902 - DNA, 493 bp, Oryza sativa
  unsure (1)..(493): unsure at all n locations
ggactatgctgctngcatgctttaagttggttcagtgcctctgtttctattgattgtataatctgattactaattacgattatttgggcatgaaaaacaaacatcagattctattattgacaccagtgtccatattgcatgctttctgtatctctggttgatataataaagtaaaagcacggcatatattcgaagtaatatgcactattgtatacagagttaaaaccaatgctttgtatgcatgtttcccatgaaaactatgtaataatcacaggctttatatctatatttcctattgtgtcttgaaatctgagactcctttatttgcccaagtcattgaactttccatgttacacctgtactgtatgtcttgagctgctaaattcagagtctagtgtgagcaaactagtgtaatcttcttatataactttaaatagtttgcaaaattagaagtggttgctgtatgaacaatcatttatcttaacactcatct

SEQ ID NO: 26903 - DNA, 202 bp, Oryza sativa
  unsure (1)..(202): unsure at all n locations
agctnnttggcctgcattggagttaaacatatctcctangcctcgcgtttttacatcaacaggctataacgtcacaatgccgaaatgggaagagatggaggccaccttgattgagaggggtatcaaaccggccaccgcttaatggccggatcgatcgaaattctaatactatgctcaccgtggaacgcttaaccccgttgat

SEQ ID NO: 26904 - DNA, 317 bp, Oryza sativa
gtgttgtgtttaggcttgtacagaaaatctaacacacaccggtctaattgatataacgttgaggctgtaataaacttcggtcaacacttagagtatctatgtacttttcagggcataatatagacaatttggacatcgaattactttacttaaattatgatcaaaatatggccggagtgagataccatctctttgttacacgatgtctaaacaacagcaagtctcccatagacatgctcttttaatcatgcattctataacatgcttcacttataaccatatgaaaacatggtccatacaaatgttggcaaaacatt

SEQ ID NO: 26905 - DNA, 392 bp, Oryza sativa
agcttgtgtgccactgtttttcctaaccttaattgagcaatgctctccatctcttattactggtgtgccgacctccagcagagagagccttcaagctcacaaatctttctgctaatgtccatttcatctttcatgtcagtaaaatgatgctgatagctgtctccgataaatagatcaaatcagaacctggccaacaacccagtggtcaagtcacagatatttaaaccgcagttgctggtcagttgtaccaggttgtgagagcaacctggaacagatcattttataattttgatcttagcaataacaagtgaagtcaagcaccaagtacccaacattaaaacttttagcaatgccttcattatcaacaccaaaaaaggggatatgatggacta

SEQ ID NO: 26906 - DNA, 471 bp, Oryza sativa
  unsure (1)..(471): unsure at all n locations
ttaattagacattctacctaggatatcaagttgtgctaagcgtttggatcccgtgactaaagttttcttgtcacgttggatattggatgtttggacactaaatatataagtattaaatactctatagactactactaataaaactagataaattttttaagtctaattaacctataattagcacatgttactttagcatcacatatgctaatcataaattaattaggctcaatagattcgtctcgcagattagtctaaaattatggaattagttntatcattagtctacatttaatactttctaatttgtatcgaaatttcggatgacagggcctaacaccggtaaaaaaattcctgctcagtagtagtacaattttactacaaaccatactgtatagagacaccattaactgaaaaaaaaaatctattgtatgttcgtctttcagtactggatcanaacatactacgcac

SEQ ID NO: 26907 - DNA, 421 bp, Oryza sativa
  unsure (1)..(421): unsure at all n locations
ctgctgcatgcaagcttgggtgttggcagcggcgtttcttctttaagttcagctaattccttctgtagatggtacaccttgctctccaacttgcaaatcttgcctcgattcccattttccctgtcatgagctgctttgtctcgctccacacttactgcattcataacactaagcatatgcaccgcatgcatcagagtggcactctcttcaccatcaggacaggtataggttccatagtcttgaccacgaagcttgtgaagatgatactggaaagctgatgaatccaactcttcttcaaagcgttgacgcaactctccaatggccaccanagctgcttcttgacaagcatggttgtacgatcttcctctagtttcgaacttaatggacggaaggtcttcacgatcactagccaacgtcacac

SEQ ID NO: 26908 - DNA, 495 bp, Oryza sativa
  unsure (1)..(495): unsure at all n locations
ttcctatcgaaagagaccacttgccccgtgtagttcccatgatgctatcgaggaaaattctctcaaagacatggtgaggggatcaactaccatcgtgagcatgagcggttaagagatatggagctttctttcaaagcaattcgaattaactccccatccttaactattcaatgtctcatgaaagaggccatggtgaatgttcactataatcccattgttggtgctaacatcatatccacagcctttgcattaactagcttaggggacagactgttagcacccatagacaaaaccttccgaagttcctcaggtcttatgatagaaggttatgggattctatgtggagggccattaaggcacaagaatgtcaaagccctcctagacttccacgtgttcaaaatccctgactttgatcttttaatcgtccattccacataaaagcttcttctagatgtgctcagaagggaggactggcggtctttgaannactccaaa

SEQ ID NO: 26909 - DNA, 369 bp, Oryza sativa
agcttaactttaacctcaagtgcattgttattctgtaaaggtgcaagttggaagttaaccgttcatctactctcgtcggcaggggtacaaacagcttgaaatatcccttttttttttcttttttttccctttaagggcctgttttggtgttcgtgtctcccgaaattaccaggaaacatataaatccttatcgtttggaaatcgcatgaccagtaaaacattcattttcagaaaagtctccaaattaaaaaccaacaataaaaatagattaacatgcagtagaatttggcaataaattccaacaaaatcactgcccatacagaaataaagggcggcaccataaaagctcaggtgtacctacgtggatta

SEQ ID NO: 26910 - DNA, 447 bp, Oryza sativa
  unsure (1)..(447): unsure at all n locations
tgtcagccacttccctgngagggtgctgcgcgctgctgtctgcctcaactctngctggtgctgcacagacacccggaggtcgctactgccgttcgtctcgacaccctatagtgcaaagactggagacccgattgaatctgggataggattaccacctatttccagattgtttcctgccaaagagcctataggctgccagatccctccgtctcccctacggagatcctaatcactaaaggctgtgttcgggaggaggagttgggaacccctcctctccgatacgcaaaacggtgtgtgtattaacgcatgattaattaagtattagttaatttttttaaaacaatggattaatatatatttgaaaacaactttcgtatagaaaattcttacaaaagaaacaccgttaatagtttgaacagcgcgcgtgcggaaaaccagagggataag

SEQ ID NO: 26911 - DNA, 421 bp, Oryza sativa
agcttggtaaagagatacaacagtatggttattcttcaatgctcccacctggcaacaaaaactcaaaatttgagttgacaaatgatagaatttatggccagaccactgctagtgcccaagataagtacaggagcaagagatctaagtcagtagcaaaatctggctcatacaaatcccagtgggagatcatgaggagctttggcattgctgatggagagattgtggaatttcaaaatcttcatcattggttaagctactttcctccgctggccatggaagatctcgaggattttgggctaagttgtgattggaggcgttcatttataaccactgatatgaatccattttatgatgcttttgtccaatggcagatgagaaagttgaagaaaatgcacaggattgtcaaaggcaagcaatacat

SEQ ID NO: 26912 - DNA, 410 bp, Oryza sativa
gcacactggtttaacacatgtgcttaagttcctaaaagacacatggtttcaccacacccggaaatatatggcatatgtgggataaaatccgagtaaataaactcataaaggatttaccaaccgcctgaataatgaccacaatatataatcagcctaagccataatattggtcaataaaaatgcacacttacgtggcaaaaagcaatgatattgtatccaatcaattgcttaaaaacccaaacagcaccatgactatataaaaaagtcagcgggccagctatataaagctttacttgttgacaccttttaagatgcattgaccaactcctaaaaagttaagtaacttgcggataaaacgaatttaaggtattgggcacttgatcacgcgcactttgtgctaagcaaaaagt

SEQ ID NO: 26913 - DNA, 334 bp, Oryza sativa
  unsure (1)..(334): unsure at all n locations
agctntagttgatgtaactaagatacttattgccatgcctaaaattccaaccattttattcatttggaaaaatccaaaaaaggatatatagggaatagacaaattccacccgcctcagtagagaactgctgcaaataaagaggaaactaatacatgtttgtaagaaacaagactaaatagaccctattcgataccacaatattcgggttgataacctgctactaatacttgctgcgcttctggaaatcaaagggtaatcttcacattccgccaaagaagatattagaaataccagaaaacctataggctgacgccaaagattccatcccaaaaa

SEQ ID NO: 26914 - DNA, 415 bp, Oryza sativa
  unsure (1)..(415): unsure at all n locations
cgttcgacaaattcctacctctatatctatctctgaggtgtttgggttntgcaaaactccatagatatgcagaagagaaatgctatccccactccgaccaagacagaacttttaccaaaagtttattgtgatctttttgttcacataacaattaaggtgaagcacggtcaggaacaacgaatctctttatgataaacagatccattntgcaagctcgttattacgggtagttcctacaaagaatcggactaatgacgtatacaatgcttgaattatcgacgtagatgctacatagtgggttctcatccttcagagactacgagtgtaataggagcattcgttgacaaaaggatcaccctaagatgatcatctcatggctattgggacgaatcaaatcagatggtctatttctcac

SEQ ID NO: 26915 - DNA, 391 bp, Oryza sativa
  unsure (1)..(391): unsure at all n locations
agctnggatgctgcgngnngggttgattttctacaagaaaaaaaaagccattgctctctttagtagtgaatacaatgtcatatatctgattaaagacgccatatatctgattaatgacaatacattagctaagtgtaatattatggagcactagcactgttcggtgatgtaaaaaggctagctgtgttaactgttaactcctaaattaactggttgatggattttcatcattcgacgatatatatatatatcttggttgttttgtgcatgtcacttaaaaaattatcaaaaaattgaaaaaatattttgacaagataaatccatatatttgagatatatcaattcaccaatatgtaagtttaaatccaccctttataattaaaaaaaaaat

SEQ ID NO: 26916 - DNA, 359 bp, Oryza sativa
  unsure (1)..(359): unsure at all n locations
agcttcccggtttagctcgcttttatctttcttcctgcattcngaancttttatatttgtgtaagatgtgggtctgtatgtcaacaattatcgtttgcgtaccctggctggtcctggacagggatttaatgcccattcagcttagaaattctggttcgagaatttctgggtgtgactatctctatcagtgaattgttatttccatatgctagtagtacaagctctcacatattgtctacctggtgctagtagtacaagcttgcatgctcgaatgtgcttgatagtaatatgtcaagctcgcatgatcactactccatgacatggaataccaacagacatctgttggtaaaataaacatt

SEQ ID NO: 26917 - DNA, 375 bp, Oryza sativa
  unsure (1)..(375): unsure at all n locations
agctngttcggtgcatttaaaattcaaaagttgtgacttgtcatcagtgatggcccgacaggtgctaattattaacctgtcatacatgacttagcatccgttacaaatgatacatcagttataggtgttcacggatgacattttctaatcactaaccactaatctatgatgaagcctatactgatcatagatgtgggttacgacccattatatatagtgagaggtttcatggtagcgataattcacctttacatctaaaaaaccacaacccatctttctacctatcttcttagtgtcaaaagctaaaacttactatattttgaaacatatggagtaatgaattttcctatatatttgtgtagagagaatattcac

SEQ ID NO: 26918 - DNA, 430 bp, Oryza sativa
  unsure (1)..(430): unsure at all n locations
ctggtgtcctcgtggacgaacctcggtggtatgagcgggacatgttagtggcggcgcancgtctcgtggaagacggcgttgaggtacggcagccgcggcaggtgctcctcggtgaccgtctcgtcgccgcacacctcccggatttcttggtaaagccgttcctggcatgaccagaaaaacgcccaaaagaaaacgtttgggttgataatgccaagaatgagctggaacagagtaacaaatatttcttgcctgtttgtcagggttcttggcaagctcgtacatggcccattctgtggcgaccaaggtagtatctgcagcctctatgagttccttccacaccagcatcgtcagttgctcatctgtcagtgtgttctctgccagcagaagtcccatagcatatctttgcctgcatatttatctcagtttcatg

SEQ ID NO: 26919 - DNA, 395 bp, Oryza sativa
  unsure (1)..(395): unsure at all n locations
ctgcatgcatgcaagctntangacacgacttangtcttatatcttatagccggctcaggcgccttagaatcatcatatggaaaatgataatgtgaacattgttctaaaatatcaggtgtgctggctactacagtgatgctgatgctcccagccgcagacttggcaagcctctaaatttttgcagaactgacagtgatagtcccatggagaatggttatgcacgtcctgtggaagggatccatgttattgtagatatgcaaaataacgttgtcatagaatttgaagataagacagtggttcctctcctcccaccagatcatctgaaaaactacacttctgcggaaacgagatgtggtgttgatcgacatgatttgaaacctcttatcatcaatcaa

SEQ ID NO: 26920 - DNA, 429 bp, Oryza sativa
  unsure (1)..(429): unsure at all n locations
agcttnccagagccaaatgggactgggtgcacctgatgagcctggtttttttttgggcctaccacaagaagagaatacttgagctggagtgaacaaaataattctgtgcaggccagttctcatgttttgtccagagatgacacgaaaaaccctgctcctcagggtactggcagaaatgattctcgatatgagaacaaaaaccggcattccaaagatgctggaagtagtcagtaccagatattccctcaggatgattntggttcactagggcaaaacaaacctgaaatagctgcttcacaactgccacagttcataccttctgtccaaacaggcacagagagcataaacattgacaaggtatctgacatgggtggtcagagtggacctggaacacgtggcaatttgagtatgcaaatcgngatgcattct

SEQ ID NO: 26921 - DNA, 315 bp, Oryza sativa
  unsure (1)..(315): unsure at all n locations
agctatgattcccgatttaatggctgcgattgttgtanataaatcccagctggtggatcccttgatgtgtctcgagcgagttccgggaggcagcagcagcagcagcaatgttcggcaccgtcaacgcgacctcgccggccgccggcgctggcacgccgttgtggacgcggcacaagacgctggtgttgctccttcgtgctaccgacgcccgccgccctttccttttgggtcgccgccccctcatcggcggccggccgtaggacctccatgccccggcgacctacttcccaccgtcgggcgtncagagccccacag

SEQ ID NO: 26922 - DNA, 395 bp, Oryza sativa
caagaagttcagccccgagtcgtcgttgttttttatctagaagagttttccgaagtgacctaaacctaatccttcccggaagagtagttcgctggattctaaattcgcgtgttgtttgcttgtgtgtaagggtataggcttgcgtcattgtgtggcggatgcgaaccatactaggtttgtttgcttaagcaacttgaacaataaaagtgtactcacaacaaatccagacgcaagtggtttagtaccttatctttagcgacccctctctttcacctctctttcgtcctggcagcagatggtcagtgtagagatagggtaattaagccacagatcatggcttgttgaaagctccagtactccaatccagaagacccagctctgatcactttggatca

SEQ ID NO: 26923 - DNA, 390 bp, Oryza sativa
  unsure (1)..(390): unsure at all n locations
agcttgttcgtttcggtgcccaattcatctattctttcgatagcattggttttgcttggtttgatgtttnttaacgaatcacacaagacggtgcgaagttctattgatagagcatgagaaaaattaaaatattacaaccctgtaaggtcgtaaccaggaaaagaagaaaagtataccaccacccatacatcgacaatgctaacacacagaatcaagagaaggctagcaccggaccagccgccgctaggccaacaaagaaacacggtcgagatcgcccaaaacccaacccttataatcaacacaaagccccgttctatccaagtcttcaggagttaaggagagagagggtgtgaaaaaaaaagggaactcttctctcctagacccttcgac

SEQ ID NO: 26924 - DNA, 404 bp, Oryza sativa
  unsure (1)..(404): unsure at all n locations
agctttatacggccggagtgcctctctttnttctttgggatcagacaggcgagcgtcaactattcgggacagaggtattagcggaagcagaagaaaaagtcacaatcatcacggaaaggttgaggattgcccagtctcgacagaagagctacgcggataacccccgaagggagctcacttttgaggcaggagattacgtgtatcttcatgtcactccactcgagtttcgtcgccggaattctcatcccctcgcgctccggagagatcaacccctaccgccaccttcggctatgaatgcccgtcgccgtggatcatctccctctctctaatctctctctcttccttccttagggcaccccgaaacccgtccgccagttcccgacgtccttccgtggctacccgtc

SEQ ID NO: 26925 - DNA, 483 bp, Oryza sativa
aagctaatactatttgatgtcaatgaaaaaggagtgtctctttatttcaaccttatgttccatctctgttcatttccggaggaacttcttgaaccaacgggctgagttcttggggtatctcttcattccgttatcgtaatccacaaagtttatcccaaaccgaactgtgtagccctctgaccactcaaagttgtcaagcagagaccatgcgaagtaccccttcacatttgctccatccctgtgaaggcatatggaataacgcactgttaccgagtagcatcttaagttgtttactgatagctgagtgtctgaattgatgttctgacctcatagcacttagcagggcgagaaggtgctcgtgatagtattcaatcctgatatcatccttcagggcctccttgagtcgcatggtcttattattgatttcatcaacaccttgagatgtatgcagaaagaatcagtaattgtaaatcacttctataa

SEQ ID NO: 26926 - DNA, 409 bp, Oryza sativa
agcttgtgcgctggcatgccgaagaactgttattctatactatgctgaggcacccagcagattcagtgcagtgaaggacaatcgatacgatttaccaggaattctcaaatgacccaagaaacatgcgtttcgcaatgtgtacggacggcattaatcctttcggtgatttgagcagtcgtcacagtacatggccagttctgcttgttaactataaccttcctccctggatgtgtttcaaaagaaagtacattatgcttgccatgctcattcaaggaccgagacaaccgtgcaacgatatcgatgtgttccttgaaccgataatcgatgacttcgaaaggctattgaatgagggcacacgaacttgggacgcatatgcacaagagtatttcaaccttcatgcgatgctgtt

SEQ ID NO: 26927 - DNA, 495 bp, Oryza sativa
  unsure (1)..(495): unsure at all n locations
tgctgctatcgccatagccgatattaatcagcagattgctcttcatcgtgctgcccgtaaaaaaggcgtcgtccacgtgttgacggtcaaagcccgacatcgggccggtatccagtcccagcgcccggcaggcgacgatcagataggccgcctgcatggaactgttgcgaaacgctgtttcttcggcaagttgtgggctggaggtaaaccaactgcgggcatcaccgtggggaaacagtagtggtaaccgttcataaaattcactgtcccaggcgacgatagcggtgacgggcgcggtcagggttttttgcagattgccgctggaaagtgccgggcgcagacgttcttttccttctgccgtgcgggtaaacacgatccgtgccggagaacagttagctgatgtcggccaccatttcatcagggcataaatcttccgtaacgtctcatcggtgacnggtgtctcccgccagcccgtgtgagtgcgggcatcggtga

SEQ ID NO: 26928 - DNA, 426 bp, Oryza sativa
agcttattgaaagggctacccgaccccattaagaacaaattctaaaaccactcataggataggctaaaacttgggtctctctcaagtagcacttgcataagttactttaagcaccgagacataaacaaacacatcaacgttgcattcctcataatagtacgagattcatatacccaattgcaaatagaaaagctataccaataggaataccttcacaccattctctttcttcacttcgagggttgtcaacatcaaagtcgtttcaccattgggacattctcatacaactcaacaagcacattagtcccagaacaaatatacctttgccttgatcaatgcccctcttgattatcaacgaatcaaatattcttgatctttggctttgcatcttccatttctcaaatgattgatacagataatccatag

SEQ ID NO: 26929 - DNA, 380 bp, Oryza sativa
  unsure (1)..(380): unsure at all n locations
tgtggtataatatgagcactgtgaacaagcatactaatctttattttttattgtcattactcactacaaggaagggcgatagtgatgggaatgacttgatcattctgattattcaagagctacaagtgccatgggatccgggtggtttgcattttcagaaatttaattgccatcgacttgcggacaagattaattttaagaagacgggattgttaggaatcgagtgggctgncaatgggcctgtacaaccattcattcaagctggtccaagcaaacccaaggtaaagaacaaaagcaacagcatcggttctttcaggggaggaaaaacacagaaaggggcaagacggctaccagtctgagcggattggcgatcggcggca

SEQ ID NO: 26930 - DNA, 357 bp, Oryza sativa
agcttagcaaggtgagtacgtcatttcttaatcgattgaagcacagcattgagaagctctttcaagacttggagaacagtgctgcaacacagatgtcacccagttcagtgcatgtgcaaaagtgtgatccaacataatatcatcttacagtgatgtgtacctgtcagaggaggtgttatcaacacaaccgcagaccatgttcaggatgtcagtaaatagaggggaatttttaccaccctctaaaccagtgtcgccttctagatggtcataagcaataggtttctggtaattgaaaatggaacaggtcaatctagaaaaacatttcaattcccgcaaaaaacaaaaagaaagacattt

SEQ ID NO: 26931 - DNA, 483 bp, Oryza sativa
  unsure (1)..(483): unsure at all n locations
tgtcgtgtgcaaatatacaattcaatcactcggtcattatgtgtgagcatcttcaagagcacctcatatagcctcaccattcaaaaaaattagaacaaaaattactaaaaaaaatgcccctccaaatctccaataataacccctcaatccgatatggcatctatctagcctagtgtttttcacaaaagggtaaaaggttaagatattgagcactctaccttttaaacgactaatggcgagataaataagagcaaataactatattctactcaaacagttatcatcgaagaaatatcgatagttataaacagagattaaaaccttggtctaacccctctaataaccagcatcagaaagtcacaaaaaagtcatacgaagaggagcggcaaagcataatccctctatttntaatagatgacgcattgacacttagatacatatttgaccatttgtgtatttaanatttatgcacatgtatgacat

SEQ ID NO: 26932 - DNA, 365 bp, Oryza sativa
  unsure (1)..(365): unsure at all n locations
agcttcctttagtagatcaatgtccttaactcgaatatagcaagaatccgacaactgacgacttgacaactctcatcggctaatctcaggacttcgaagccgatgctgactctaagccgatgactactccgggcttgccaaatttcactgttaacacatctttgccgaagcatatgccaagatggggttgactacccaagcccttaccccaacaccgacatcgctccgaggattcggcggagaagcagttcaagttcttggccaagcacagttgatagtagccttcggcacaggggaaaacagacgcgaagagcangtattgatttacgttgtcgacatcccatacaactacaacgccatcttcg

SEQ ID NO: 26933 - DNA, 406 bp, Oryza sativa
  unsure (1)..(406): unsure at all n locations
ctcagacatgtcgagaggaatatcctgtgccatcaccctgttgatttacggacgctgctcatagccagtgtacaagacatcgattcggagaacaacacgagatgcttccagaattgtctttctaactgatcaagggcatgaaaaccaacctgaaccgcgtatcctcaaattggaataagtatctttgcctaactagagatcacgatactacaccattagccaatcttttggagttaatttactaatgatgagtgatgagtcctctgtgagcgtgtaaataggcctaagcgaattggaactggtgattctatgaatgagccttcgttgcaagtatcaagtacataaagtcaatcgtgtggaacactttgatangacttgtaatcactgatggcgtccaaacgctatg

SEQ ID NO: 26934 - DNA, 379 bp, Oryza sativa
  unsure (1)..(379): unsure at all n locations
agcttatgccgtagtgtgatagtgttaatcctccatggcatctcaagaaaagaaaagagagaaattggggatccgattgccttcccctctttgccccacaccacccaatatccccacgttatgtccgccactagctatatttttgttatttttaatagtttgcgccacacggttattgagttgaggctcgttcttaagctatgaacagttttttcctatgaaccaatggaaaatacgtagggatttatgcgcccatcangaaaaaaaaagaattgcggactactagttntaagtgactagtggcactggatttctaaccttatgggagatcgaggagaantaacttgtttttctaatagtatggcttcccttttttgat

SEQ ID NO: 26935 - DNA, 479 bp, Oryza sativa
  unsure (1)..(479): unsure at all n locations
tagagtatgtgagtgaagtgaagagcagtttacaatttcacattctttatcgaagagcagnttagtttcgtcacaaccagttttgggcttatgtacatcaccaaactgacaacagcgcatcatagccaacttgaaaatctacgtaagcttgtagcatatattacaaataaaacatgagatgggttttaaaacttcacatgaaccacacgttttgttctttttatttacgggaaagtgttgcctgaaattctgaaatcacaagcgatgccagcatagcacggtaaaaaaccctaaccactaagtattgcacaagctttaaaatgtaacatcaccttctgcaagcagaaaacctgataaggctgaatcttgcttagagattcatgagaaacaatcaattggtttgctttntgcaaggcttgtatctgaacaattcatatcgaacactgcaaatacaaccaanaattgatgtccttctcaca

SEQ ID NO: 26936 - DNA, 406 bp, Oryza sativa
agcttgagagccacactttggagagaaatctttttgtagtcattaaccctctcaggtgttgatttcttgggaacaagagtaatgaaagatctatttaaactttccaaagccaagttaccttcacaaaactgagcacaaagggtgtaaaaatcctgcctaataataggccaacaacttttaataaagcatccattaaaaccatctggaccgggtgctctatcagtaggcattcttttaacaacctcatcaatttcagagatggagaagttttcagacaagtgggcaagactatcattgtgagaaaccaaactctgcaggtcaaagtgcataacacgttacaaagacacttccattctctgctgaaaagttgaaaattatctgcgccttttatcgtgctgggtaaaac

SEQ ID NO: 26937 - DNA, 420 bp, Oryza sativa
agcttgcttgagagaggtatcgaaccggtcattgctaaatggccagatcgatcgaagttctagtactatgctcacggtggaacgctcaacccagttgatggctccctggtcttcagcgatcagatacgcgaggctgcgagtcgactaatggacgcagtggaagcctcttctcagggcacgttccgacccgacagagagaaggacgagctgtcactcgccctgtagactcccgagcatccaagacgaatacgagggaaaggggtgattacttggaatattggattcaaggaggacatccacatgtataggagtcggatgaggagcaagagagataccgaggcgaagattgtagatcttgagtacagggtatcgagctacgagctcagcatgcaagaggagggtggcaggaatgtggatgaa

SEQ ID NO: 26938 - DNA, 58 bp, Oryza sativa
aaacacgagcgcacacgcaagggaagaatttagacgcacaaaacggagagaacggacc

SEQ ID NO: 26939 - DNA, 390 bp, Oryza sativa
  unsure (1)..(390): unsure at all n locations
agctntgctgtgaaaataatgacttgttttctatctagctcttgctacagcataatcttgcctccctgaatcatggccagtgattacttgtaccttctcagtaccagaacaattacttaaacatgctactaggtaactcatgctgctttcttaagctaatgagctgttcctcatttacagcagcaggagcttcagtggtgcttgcttcaactgtggcgaaagcgggcaccgagcatcagactgcccaaacaagttgatggtaaaaacaacactcttccctgccgctcgggaagtgcttcttctgggcttgatcatgttccaaccagcggctggactattcaacacatgccaaggaacaccaaagccccagcccccttcatctgatccata

SEQ ID NO: 26940 - DNA, 300 bp, Oryza sativa
ttgcgttatcggcccgcccttgaataactctgactgtgtcaatccattgtacgaattgacatttccttacatcctcctatgtacatccattttgggatagttaagttgatgatagtactgaagagtgatgaaaagaatagtgtaattaccacgaaatcatcgtcgacaatgtttggacacacgaaacacctttgtcctcgagttcggtgccttacggaccttatgacctgacaacggtcaccacaacgacacttcggacgctcacgccacgtgaggagtcttaggggatttacgtgccat

SEQ ID NO: 26941 - DNA, 211 bp, Oryza sativa
gcagcgcaaccgcggggccaccattatttcaataccagggataggcgatgcctgggagagacagaaacccaagtgaggacgcggcacaccgaaacacacgacaaggacaggtaaaacgcgggacctaaactgccaaagcatcgccaaaccgggagaacggtccagcggagcgcattacaccaggcatcgaagacgcataagatacacccta

SEQ ID NO: 26942 - DNA, 489 bp, Oryza sativa
  unsure (1)..(489): unsure at all n locations
ctcagcttgtgacatctatttggacagaacaaagtgtgggtgttttctttgatgcatccagttactgtttactcgtcttttttacttaattgtagactccgtctgaaaaatgtagttccctgacagattagattggtttgcattgcagacaagcattcacagatgagcttgatgtgctacaactaataccgcatccgaatgtcgtgcaatttttatgtgctgtaacacaaagcagcccaatgatgattgtaatggaatttatgcccaaggtttgtcctatacgcagcgcttttttaaatgtgcattattcacatatctgatcatctttagatctgagacctatttgataaactgcaataggagctgctgctntagatgaactattctagttacctggtcattcatagctctgagtgataaaatgttgntgccattctcaagtgcaatgccagatctgntntcccttgcttagctgatgctnttcttttg

SEQ ID NO: 26943 - DNA, 413 bp, Oryza sativa
  unsure (1)..(413): unsure at all n locations
agcttcggcgatttcttcctacagcttgttgagcctcctggacctcttaggaaacacatgcatggatgcatctagcaaaatcaaagcccctaggcaacatgcagtaacagctcatatataccttccgctcaccctcaccatcggcgctactccgatgtctcctagccaagaaaactagaggaatggaatcgtgagagcattctattcattttatcttttgacctcattcccaatcgagccaccaatcgtcgccgacgagctcgccaaagccatggccaagctcccagtccatcgggctgctggaggttgaagatgaagactttgtcctgtaaataatcaaanatatagggttcaaactataaaacttcagtcgtttacatgtggacccatggagctaaatgcagttcataata

SEQ ID NO: 26944 - DNA, 467 bp, Oryza sativa
  unsure (1)..(467): unsure at all n locations
tggcatacaattgatgttcccgcaactttcccaacaccagactgttatggtgctgatggtcttcctctgattgtgagtatatcagaatgtcatcaatgaanaccacaacaaacttatccaagtattccatgaacactttgttcattaagttcatgaagaaggcaggtgcattggttagaccgaacgacatcaccgtgaattcatacagcccgtatcgcgtggtgaacgcggtcttagggatatcttcctcacggatacgtaattggcgatatccggaacgaagatcaatcttggagaatacagtggcacctttaagctgatcgaacagatcatcgatccggggaagagggtacttcgctttgatggtgacttcattgagagctctgtagtcaacgcacatcctcttcgtttggttttcttctccacaaaatacaggagcacccaggggaagactcggacgatatacc

SEQ ID NO: 26945 - DNA, 412 bp, Oryza sativa
agcttgcaatttccacccgacgttcgtattttattcaagcatgaatgaactgtatggtcggttcaggttgcgttatcggcccaccacttgaagtaactctgactgtgtcaatccattgtacgaattgacatttccttacatcctcctatgtacatccattttgggatagttaagttaatgataatactgaggagtgatgaaaagaatagttgtaattaccacgaaatcatcgtcgacaatgtttggacacatgaaacacctttgtcctcgagttcggtgccatacggaccttatgacctgacaacggtcaccacaacgacactccggacgctcacgccacgtgggaagtctagggatttacctgccattctaaagcctagcagcaatacgacgtcatgctcatccttccgct

SEQ ID NO: 26946 - DNA, 406 bp, Oryza sativa
  unsure (1)..(406): unsure at all n locations
ggcccgatctggaggttaagcgcgcgccgcagcggtgggctattattatataaatggccactagcgctagctacccctcctgctccttgtccgaatgccgtgcacagagcttttttttcttcttcttcttcgtcttctcccttgccatctctgcgctccgatccttggttgagctgctgtcttgtttgtttggctggatcaataatgcatgcgtccgtggggaggagatgggggtatgatccttgcgacgaggtaagtgttcttcacctttctcgttgcatgatgcatatatactgctctgtttctccagcttgtttgatcagtagaatcgatgtagtatcttgtattnttggtgcgatcttgctcaaaattaatatgggtattggccctgcaagaaagaacttat

SEQ ID NO: 26947 - DNA, 420 bp, Oryza sativa
  unsure (1)..(420): unsure at all n locations
agcttcatagccggntttaaataattctttcttctataagactaatctctatgtgatgttttatagtagtgagcgggatatgccagcgatacggtatttggtaagtattgttaattcgttagaaaaataaattaagaaaaaatagagatatgtcctcgatacataccggaggagagtatagatgaagctagataagagagtttgggcaagccaatgtgtaacacagataatcttaccttattccaatgtgagaatattagttaagggtagtaagtaaaactttagtaataaaaggtggtccaaactgtcaattcactcaatagtaaaagtatggtcgaatattcatttctcaaagtataccaaccgtttcaaatataacacgcttaattttattctagcaattttttacgtttgacaatt

SEQ ID NO: 26948 - DNA, 424 bp, Oryza sativa
taggaacttagatactaagcttcttatagctgggttgctatgtgaatactcaatgatgtatcctactctatgttacactcatcatatattacaaagtagtcggtatatcactcggatcatgttattcaggtgcccaccttatatatgatgggggcaggattacaagatagaaaccttaaccaatacgggatcgggttcctaaatctactttacaatattatcaaaccaggactttatgccgttccgtaatatacaaggaaacgtaatacccaagtcatgatctgttacatattccatagatataaggtatcccttataaccagtcggataaccatgtcgtgtgggtatggggtacccataatcttcacagtagcccctgagaaccttacagtcgaaaagaaatcttctctgaaccagatactcc

SEQ ID NO: 26949 - DNA, 410 bp, Oryza sativa
  unsure (1)..(410): unsure at all n locations
agctttccctagacactgttattcactagttaatcctctctatcctggcctatcctttgcttggtgtccttggatgaaccggaggaagatctgaccacacacgttcccttggtttcgatacccttggaatactccgtaggggaagtgctacatcagtatatccatgcgcttgcggattttatctgtgaccgtattaaataccagcattccccttccacaactgtcataactacctctatataaggacttcaccttctcacttcactcacacacctcaagcaagagctctctcatttctcacaagtttagtttagtagtatctagctagtggaataggaatagaatagaaatcaggagtccggaagtcttcgaaagagttcgggtatggctctagtagctnttctcttctc

SEQ ID NO: 26950 - DNA, 397 bp, Oryza sativa
  unsure (1)..(397): unsure at all n locations
agcagcatgcgagcaggagcaggtctagccgcagtgcctgaactcgcggcgtctgcggccctggcagcagcacgagagcaagcgatcatttgggcggcgagcaccttgtcgacgagacatctcgttcacgggcagctagcaactagtcttgtttctccttttccttttccctaattggttatctntatcttttctccccatctttgcaaggaatttatttcgtgatcattttcctggtgaatgtgatgaatatttttggaatatttctttgcacccgttgcatggttgtgaaaatcctgtcaaanatctatcattgttcagaagtggtcacatntagagaaacgcaaaatctataccgagagtgctctccatttagtgttaaagagcgacacactta

SEQ ID NO: 26951 - DNA, 225 bp, Oryza sativa
agcttaggaagaagaccacacgattatttaattccctccactgtatcataaagggtcttgcggtcaaggtgatctctgacgtgcaatatgtaaccatagggagtttcgagattatcagataacatactcgcgtccttaaacacccgtattactctcctacagagactccattcatcatcaatgaagcgggccgctaagtacacagtatccaccatggcagttcga

SEQ ID NO: 26952 - DNA, 361 bp, Oryza sativa
  unsure (1)..(361): unsure at all n locations
tgtanagaagagaacatatctactacttgcgctctgatcttctttgatggctgaatggacttactgtgtacttcaccttgataatgagatcaaacggagtcttggttatgccttctataacgctgaattaaaaacactcccacgcatgtataatttgaatctactcaagcaaattgactgtgtgcagccattttcctcttgcaaaatcgatacttccatgtgccattcactaaggcgcgatgaaacttgatataatctttaaaactaaactcacaacataatcataatttgtatgacaatctaatagtattttcttcaataaacaaatattgtgctataataaaatatttattggataaat

SEQ ID NO: 26953 - DNA, 417 bp, Oryza sativa
  unsure (1)..(417): unsure at all n locations
agcttgngttaggttgtgttctgatgcaagatgggaaggtggttgcctatgcatctcgtcagttacgcccgcatgagaagaactaccctactcatgatcttgagttaaccgcagtggttcatgcgttgaaaatttggcgtcactatctttttggtactcgtacggaagtgtataccgatcacaaatattttgaagtatattttcacccagccggatctgaacatgagacagcggaaatggttggaattgattaaggattatgatatgggaattcattatttgaacatccttgaaatgtgtcattttctaatcttgcatcatgctgattcttatgttcttaataaccttttaaacctaggaaaatatacttagcgggacttccttaaattaacttcgattaaaccctctctggtattt

SEQ ID NO: 26954 - DNA, 362 bp, Oryza sativa
  unsure (1)..(362): unsure at all n locations
actaagcttatccagaagtgaccgacggcaagaacaatgctgcatggcatgttatttatctattcngaatagcttgttagtgtcctatcacgactttatggtttccttttatccttagaaaaggatcgtttttctttatctacaagaacttagatctacccatcgggataaatatgtacacccgggacactgtaatatatctctcgatcaatactgctatcggctcatcgccaccctctttgctgaggtttttacttatcagcccggggaaattggcacctgacgcggtgctgcattgagtcgagtcaatctctggcgaacgggtaagtactacatttcactggccctgcaattatattggc

SEQ ID NO: 26955 - DNA, 409 bp, Oryza sativa
agcttgtgcgctggcatgccgaagaacggaaagtctatactatgctgaggcacccagcagattcagtgcagtggaggacaatcgataggatttaccaagaattctcaaatgacccaagaaacatgcctttcgcaatgtgtacggacggcattaatccttttggtgaattgagcagtcgtcacagtacatggtcagttctgcttgttaactataaccttcctccctggttgtgtttcaaaagaaagtacattatgcttgccatgctcattcaaggaccgagacaacctggcaacgatatcgatgtgttccttgaaccgataatcgatgacttcgaaggctatggaatgagggcacacgaacatgggacgcatatgcacaagagtatttcaacctccatgccatgctgttt

SEQ ID NO: 26956 - DNA, 337 bp, Oryza sativa
ttataacttatcacgcctctgcctaagactgagagaattatatcttcttcaaggcccaaatccttgcccatcccaccggccacaggcaatgccaatgtgttcacctaaactcctggcccattctcgaaggcggattagcaatttgaacaaatcttcttgcacgaaggctaccagcttgcagattaaactttgctaatagaaaccttatatgctagaacatcgtgttcgtatacgggtatatacatcatgcaatatataacagatgagaaaaacaaagaattcttcaatagcaaaataaatatttgttctttgcaagaatggaaatataaatatgtat

SEQ ID NO: 26957 - DNA, 411 bp, Oryza sativa
  unsure (1)..(411): unsure at all n locations
agcttgagagggccacgatgaccgaatttctttttataatcagtcgcgtgcctcccctcgtggccacgtggcacgtgcggagaaaagggctgcggtggccctcctgtgcggcgcaattctcggtatttttcttcgtttttttctttcaatttttcttttccggttttctggttttttcccttgaattctttctgttattaacatatatgtatataaattttgtattcgtacatatataaagtttgtatgtgtatgaatacaaatttttttgtatacgtggtggtnttctttggttttcggttctctaaatatgtatgtatttacgtagtatacaaccatgggataccccatgtttttctcttttctattctttaatacgcattatatatatataaacttgtatatgcggat

SEQ ID NO: 26958 - DNA, 410 bp, Oryza sativa
ttattttttatggaacaatgtcgtttacacaacatactttatcatatttgtttaatacaaagtgtgaaagtttcttcaaagcaaacatatctccttttgaatgcacatttcactaatttctagatcggaaactaagcaaatagagaacagaatatcttaactcacaaggttcagctatctctaaccaatcaaagagactacatggatacaagttcatgtaatatagctcatactgcgaacacagcactagatcatcaatcgtcataccgtcgacaactaagtttgataaacttcacagttgcattacagtgttcagttactactatattagataaactaatattataacatcgacatgagcacaggacttaacttatctgtcaaatcaactacaactgtcgacccatatc

SEQ ID NO: 26959 - DNA, 92 bp, Oryza sativa
aatcatgggcaagctggttctggggaaatggtatcgtcacattccacacataccagccgagcataagggtaaacctgggggctatgaggact

SEQ ID NO: 26960 - DNA, 75 bp, Oryza sativa
gaaaccgcgaccaaaacctgaaatcccttgacgggaacaaagccgcgacgctcaaaagcacgaggaaggccgagc

SEQ ID NO: 26961 - DNA, 399 bp, Oryza sativa
  unsure (1)..(399): unsure at all n locations
atccttgagtcacctgcggcatgcaagctntgtctgtagttacctacatttggtgtttctttgtactacatatgccggttaaagtaaactaactcttacttacagggttcaaatcaagctgtaattaacgaagtgattaaagctaggagtactatttttgcacgtacagttgaactcacctagaaagcttgcaaaggtagcgggcatttcatctaaaaaagcagcaacctcaacaactttgggccaactccctgcatttgcatgccagcagtgaacaatcatggtacatgtttcagttggcagagagagaaagatgagctcttgaagactgaacctttttttggccttcactttggatactgttgagcatttgacccttttgttaatacctaaccacca

SEQ ID NO: 26962 - DNA, 442 bp, Oryza sativa
  unsure (1)..(442): unsure at all n locations
atttgctgctggcagaacaggcaacgtgaaaataatagatagatgggcttgtatgccgatcgaatgttcagagaatcatggtcataaatgtcacatgcaaaggatttgtttatgtgactagattcttaatcctaaacaaaacataacaacatgagaaaatgatgtagtatgttgaggaccatattttaaatgctgtgaaaggtgaaagtattatcatagcatactgtacttttaagtgtcatctatgctatttacaccgaagctaacttaatatggttcagacattgatattaattgaaatagaagccaacagggggcacccaagtagcctagcgattacagtactcaaggaacatctctagatccttgngtctactccncacaggagcgaatttaggcctagttaaaagagtcattcgctagctcctcataaatgcacgtg

SEQ ID NO: 26963 - DNA, 388 bp, Oryza sativa
  unsure (1)..(388): unsure at all n locations
agcttanagcaagtgagcctgttntctcttaanatatttagagcacattaaagcactcttgcgacttggctatacaatatagtggtatatgaacagacaaagaacccaatcgacatattcataattaaaaatcagccgttctagcccgtttcttccttgtgccgcaccagttcccaccctacgatgagaacgtgcctcgcgagcccagcaaccgtcgtctccgtgtgcgtctcgctggagatgctccgtttcgcaccagtatataaaccgacccagagaccaaacctcattatgcatcagcagcagcgcccggattacgatagcgcgccaactcttgcgtgacaccgaccgaacttgacgaaggttgtttgggtcaaccatggtgcct

SEQ ID NO: 26964 - DNA, 442 bp, Oryza sativa
tcttcaccggaagacaagttcataactgacgtgcttcttcttttatcaagcaagatagaaagctcaatcagatcttttttcacttctgaaaacattttatctttacctatatcagtggtggagctgaaaagggaaatgcatcaactctgaactatagactcttttaggatagaactgaacaagcttaaccaaagtccccttgtcctaagcaacagatgattcgtgacttcaaacctactgtcttcttcttttatattttgtcatatttcaagctccacagttgattcaataactaattcagtttgaaataaaaagcggggacaaaaaagggcaaccgattggagaattcgagaagaggattcgtttcagaaaccataccggctggcggcgtggtccgtggaggggatgggtttcaagggctgaccacccggagctcggtgct

SEQ ID NO: 26965 - DNA, 419 bp, Oryza sativa
agcttgggggagagatgtctctccctttttaaggtaacttgtatcatattgcatatttccctttcaaattacatgtttaaatttttgcattgcatttataaacctgaaaacaacataaaaatttgcaaaactaaaaataccaaaaagataggttagatttaatatgctaggtaagacatgcttagttcttcatgttgaaatgatgaatagatgctctgttttatatctctcatatatgggttcatggttaagtactctctcaaaatttgaataagggtagcctacaattatccaggaacctgaggtaagtgagctgcactttgctgatctgagtctaggtttgttgcgagatatgagatagtaaataagagttgctataaataatcatgttctaagtttgacttgaattccggatgttt

SEQ ID NO: 26966 - DNA, 485 bp, Oryza sativa
  unsure (1)..(485): unsure at all n locations
ngagctacctcgccgatttgggttagccccacgtttaacattgcttatttaaagccatatttgggagaagaagatgagttagtgtcgaggacgactcaaatgcaagaaggggaggatgatgaggacatcccttccaacgatacaaccacgcctattgcacagcaagaaccaatgactagagctcgagctcgtgaacttaattatcaggtaaagtcattcctagctaatcatacaagttcttctcagaattgggtgctacaaaatggttgttgtgatctacttgttgctaggaatatggaagaggaaccaaatcgcaagcagcactagcagcgctgagttgatgaagtcaatgctcttcactccggagggcaaacggngcaaatgagtacttgttggaaagatctcatcgtctactttcagctatgtgtggcctcaccatcaactttgacccaggctgctcagaatgacgaanatagttctttaca

SEQ ID NO: 26967 - DNA, 327 bp, Oryza sativa
agcttgtaataacaaatctaaaggaattgtttacatgaatttcaaggatgtgaatttctggggcgccgtgtacccgacctactacgcgctgccgcacctcaaggccagcaggggaaagctcgtcgtctgctcctccgcggcaggaacggtggccacctcaaggatgagcttctacaacgtaagtgaccagattaacgccacaaattaaaacataatcatacagttctttttgcgtcttctcctgatctccatcgatctccaagctgtcattgatcaaccatgtctctctttcgtcctctttttcaggcgtccaaagcggcggtgctg

SEQ ID NO: 26968 - DNA, 487 bp, Oryza sativa
  unsure (1)..(487): unsure at all n locations
taatanattcgtctcgcagtttacaggtgaaatctgtaacttgttttgttattagnttacgtttaatacttcaaatgtgtatccgtatactttaaaaaaaatttgacacacagactaaagcgcagccaaacacagcctttaatttgttcttcgtcagagaaggggacagtgtggaggctgcatgcggatctccatgcacacgcgctgtacttcctcccaggcgaactgtagtagagtagctattcgctcgatcgatctatagctagcatcgatccgaggcgcggcgggcgatgcatgggcgaaaggtgctctcgatcgcacgagataaaagcaaggcgtgagcaagtaacatgggagcctgtactacctagcactatagattctactggcccatgtctgcatttctagtccggtgcgctgactcagtctatacttattttcattccttaaatccctttgaacaaaaaattctttctatatactaact

SEQ ID NO: 26969 - DNA, 399 bp, Oryza sativa
  unsure (1)..(399): unsure at all n locations
agcttaccactgtgcactaagttgagagttatccgtcttcgntcaacaaaccattctaagcactttgaaaatgtttcctccacaatggctgccactggtaaccttcgagaaaacttaaaaacgttgttcaaggactcggatccattgcttgtcatgattccccaacgatatcccccatccttacattgaaataccttctcaggcttttcttgctcatctntatcttcttgcaaatacttcccaactttttcaagatatgttattgcctcaggacaaatatttgcaatcgatgacattccttcttcaaattttcggggtttctttttcttcactgcccacttaaatgtcttgagcaccatgtcattacgaacaagctttcatagattctaactacatgct

SEQ ID NO: 26970 - DNA, 214 bp, Oryza sativa
agcttggatgttaagtagaccgtttcttttctaaacctacttaaatgaaaacaaaatataggatagcctggagttggctgtccattacaatgacaaccaaagtagtttgcattattcatcgaacaaaacaaccatctaattggtgcaaatgaaaggttttataatattaatcttccaacttaatccaactttctggtgttccacacttgaacac

SEQ ID NO: 26971 - DNA, 487 bp, Oryza sativa
  unsure (1)..(487): unsure at all n locations
taacttagtgggtgttgattgaaaaattaagttcccctcattttgatcttagtgaggctcttatttatgcatgtactggccagaacatatcttaatcaatcttaactttatgagcctttagagtatggatccatgagcaaaagcttagcttaataataattcgatcctgggacatatctttcacaactatatcaatgtgttaggcagaaaagacacaacatgttgctactagaatagaaaactgtgttcaattagtgcacaacttataacacagtataattgagtggttacaccttttgagtggttttgagcgctatttaccactcttagttctgggaaatatgattaatcataacatgctttacaatctaactgcatcattgactatgcagtaagagattaatttggagcttttccatggttattggctccctatgtgtggatatagcttaatccanataatctntatacatatccacacatctca

SEQ ID NO: 26972 - DNA, 417 bp, Oryza sativa
  unsure (1)..(417): unsure at all n locations
ctgcaacttaggacttgcgatattgttggtatgaaatgcttgacgagcactgcgatactgatccagtgtggtttccagaaatgtttaaggattggtagtggccagatttcttgtaaatttatttcaaccctaaattcgggttttatgcaatttaatggaaatacttcataatgatcaatcattcaggttaagatcgatctaaaccaatccattttttctatatacatacgacatgccaacggttaaacaacttattagaaacgcaagacagccaatacgaaatgctagaaaatcggccgcgcttaagggatgtcctcagcgtcgaggaacatgtgctanggtgtatgtgcgacttcgtcggatcatgggttctaacaaataagaccaattttgaagtatccatgatcggtacccatg

SEQ ID NO: 26973 - DNA, 509 bp, Oryza sativa
  unsure (1)..(509): unsure at all n locations
ctattacggacctataaaactcagcttcttccaagcataccgctntctagatgtatatgacgatctctatacagatggatcttatatgaatcgtatgatgaagtaccacatgagtggatatataggaaaggaatccaaatctgccgaatcgctcatgttatgatcttctacatcctaggtctccgcgttccgtcatctggcttatgttcttcatgtagcattcagatcgaatgactctatgaaattacgtcgatacttctacatattatgggtaacgtaggagacatccctattttcccccgggggtcttaattaccactgcttagctttcaattcgcctctgaccatcaaattaaatgtgaataacccgtcctcctctctttgaaacaangggcgcttacggttctgtgcgtgcttcaaacaantttgtcgtcttcatattaccatatctctagagtcaatattttctatgaggactactgactccatacttgctgccgtactaacag

SEQ ID NO: 26974 - DNA, 414 bp, Oryza sativa
  unsure (1)..(414): unsure at all n locations
agcttagaaactaattntagatttgtgacaggtatgaccagaccttctctttgaaacaagtcttaatgaagtaaacaggcaacattgaactggtcaaaattcatgagacaaatttctatgtatgtatgtattaactccgtggaagttatattttatacaaatgtgcacatcattttcatgttccaaatcttttttaaaaaataattacttaaactttgaaaactttgacataatgttataatgtattctcaaaactaaatgtgtttcctaaacaggacagagcacatgatttacaaacttcacaagtagacgtacctgtgcttatccgtgtgtgccatagagttgcaaacggatcgacccaacccatcttcaacatgtccttctccatgagagtttgctctctagaccatgcta

SEQ ID NO: 26975 - DNA, 367 bp, Oryza sativa
agctagcgtgcattggaacgatgcgctctatttttcatgatccgcgaattcagtgccatgtgggttcattcgtacaactcactacccagggactaaattaggcgacttgaacagctatgagggcccaactgtgtaactgaaagattaatgacctgcgcgagatacagcatcattttcgctatactacctgtgacatttgacctgtcctcctgcgaacacaaccataaacgcgtcatcgtatctgtgctataatggtgtaagcactgtttggcgttacacccgggttagctgtccgtaaagtttacatcttacttgaaactggccatgatgtgactggaaaagttatgtgtgtatcacatgttgatgt

SEQ ID NO: 26976 - DNA, 297 bp, Oryza sativa
gctatacgtgaaagtcttggaccttactgaaactgccaaggatgtcattccacagactccgcggaatctgtcatacctgaggttctcgaacctgtcccagacaaggatcaaggcgcttccagaaaccatttgccatctgcggagcctccaattcttgctcgctaagagagcgcaaggcattgcatgtgttgccaaaacggataaagcatctgaaggggctcagagaccttgatcctaccggtactgtgatccaagacgcggcattcatactacgccatctcagaaacctcacatcat

SEQ ID NO: 26977 - DNA, 441 bp, Oryza sativa
atccaaactgtgatttggatcctgttatagcaacacgcccactgcattggattctcttttctgcccactgagaatgtcgttgcctcgtatctttgctacagataatcccacaatggtccagaagcttccgaaaaatagtatctcttatatgttcacggcttgttcaaatagattcgcaatgtcaaattctggtaagactacaaactatatgagactttaccatcacacgaccttatcaatccttaccaacatttggtaattctaaaaacttctactcacaaaactataccacagacatgcggcacatacgtacgccatatacaagcgatactcaacactttgctcatgaaatcatgctagtgtcttgtttttcttttgacatttataaatggaaatgcttgtatccatgtgcagggctgcaagccaacatcatcgaacatg

SEQ ID NO: 26978 - DNA, 416 bp, Oryza sativa
agcttgtatgttgtgaataaagaaattttttaagtattgggcatacgccatgcgcacactgctttaacagatgtgcttaagtccctagaagacacatggttccaccacacctggaaatatatggcatatgtggtataaaatccgagtaaataaactcataaaggatttaccaaccgcctgaaaaatgaccataatatataatcagcctaagccctaatattggtcaataaaaatgcacacttacgtggcaaaaagcaacgatattgtattcaatcaattgcttaaaaacccaaacagcaccatgactatattaaaaagtcagcggggcagctatataaagctttactggttgacaccttttaagatgcattgtaccaacttctcaaaagttgagtaactgcggtataaaaggattt

SEQ ID NO: 26979 - DNA, 353 bp, Oryza sativa
  unsure (1)..(353): unsure at all n locations
tcaacgttgtgaccaatatgagttgaaaagcatctctggatcatgtgttgataagntgctcctgcattctttaatccaaaaggcatggtgatgtaacactaagcccctgaaggtgtgatgaacgaagtcttcaagcagtccgactcctttagtcggatctaatgatatcctgagtagcaatccaataaactgagtaactcccagccggccgttgagtcaactacctggtcaatgcgaggtaacccgaagggatccttgtgacaagatttgttgaggtccgtgcaatcaacacacatacaccattgtcccgtcttctttcgaaccaggactgggttggccacccagtcgggatg

SEQ ID NO: 26980 - DNA, 411 bp, Oryza sativa
ggatactattagtcacctgctgcatgctagcatagcttagctgtgtggccgatcatttgcactagacgtgcttctggtggctcacaggcaccgtggtggtggcatgcagccagtcattggcatagtgctacacccttacgcttcagcggtaatctcaagcgatgcggatgttcttagtatgggcgcggtgggggttcacgtattctataagagccgatcgaaaaccgagaaaatttgaggttcagagatgttattttctgattaagacatacattatatcttgatgttacgttcgcacgtgtattcaactacttatcagaacgtttcatgcaaaattttctatgtataagctattgtaaaatattaaaataatcacatgtcaattactcatatgttaaattacgggtttca

SEQ ID NO: 26981 - DNA, 335 bp, Oryza sativa
gggtcgctgacgccagcctgacagtgaagcagtgatgcatgcgtgacatagattgagaattgataagagaggcctaaactgaactgagatgcagcccacgagggaattaacgggcctcctagtacttatggccctcggcctataaatatatgggccgaatgcttatgggccttcacacggcccatgagtctgctctcgtcgcaaccaaaagtcttcttcttcttccccttcctttcccttctcatccatggctactccagcctagggagtagggagatcgatccaccttcgccatgctccttcctactccaccaatccggccatgaccggagctc

SEQ ID NO: 26982 - DNA, 327 bp, Oryza sativa
gtcgcctgctgcatgcaagcatctggtacgcatatattcgaagaccagtatcctctccctctttgtcgcgcagtattctacaagttctactatattagtatgctggagctctgggattagatcaagctcattctcaagctggcgaaatggaattttgtcaacatatgatgctcttttcacgggaacttcaagtgcttcatttatgcgcccctaggagtaaacgccaaatacaagtcaattatggtaaaattcatcatagagagagaatctaatatcttagtacaagagaagatgtttcaacaacttcgcttaatattttgctgaatg

SEQ ID NO: 26983 - DNA, 360 bp, Oryza sativa
  unsure (1)..(360): unsure at all n locations
gaactatgtacgtcacagcggttgggttgtgcgggataacgtgcctgtcaatacagtgtactggcgcaaaacaacggcacgcggagatcatgaaagctntgtcccagattccgagaaagagatgctgtggaccacaatgctcgagacattctaccttcctgccggtacagaggacaaagtgaaaaggtggactctgaagaacatggcagaacagtttcagagctttcacggagatctgtaccagaagtatatactgaaggggcagacaccgaacttcgacacanttccaaagctaagggatcattgcgacgagttctgtgcatataagacaggtgaacaacggcaggcgatgatggaaag

SEQ ID NO: 26984 - DNA, 92 bp, Oryza sativa
tagctagacgttactgaccactgggtcctttccttgggcccgccgggggggctatcccccgcttatcaccggtttgatgttgtctctctttt

SEQ ID NO: 26985 - DNA, 473 bp, Oryza sativa
  unsure (1)..(473): unsure at all n locations
tgctaacacttcagaatttataaactctacatcaaagggcgccagagggcatctagtcatcccacaagaatgatccacatttcacgaagaatttggggtactgctggtttatttgtactaaagcaaccacagttccataagattgttttcattatatagtttgtgcagataaactgtaggttcccaaaaaagcacanatgctgaaggaacaatcccagaataatctgctagtagaaaaatagtttggttgttatctggcaacagttataacatggtggcaattgtccttagcaaatttatttatttaaatagaacattcttcacagcaggctactgaaagaaatgcaaaagaaccatctttcatgtgaaaataaatcaattacctgtgtgtatatatttcagtcctcggagcaactgatacaagaaaaactggtagtgttcaggagtcaagtcatcgttggcctttataactt

SEQ ID NO: 26986 - DNA, 420 bp, Oryza sativa
  unsure (1)..(420): unsure at all n locations
agctngacatgttaccctgagagatacatttaaacgattagcctatcatactagatagctaacaaacagctaatggaaagaactgataggctccgtctagaggaaatgctattcatgtaattgcttatagctttctcagaataattgtgaactaaatatgctggggttttaagtcagctgtgtattactgtatttttcagaggaactgaaatagtttggagttttgacacaacagagggagcaactaaagagaggatgcactttctcctgtgtattatttataaaataaacaataagagtgctcctgtacataacattatatgcatgcttaccttgattcctaagcaagccaagtgaaaagttgaagggcagttatcgcagcagagcaaatcgccaccatcaccacanatgccacaagta

SEQ ID NO: 26987 - DNA, 430 bp, Oryza sativa
cgaccgggttcgatatttctctcaatatgaaaagcatatctgttattgaatgtgcatgaactcatgtggatgtttctttctgcagatacacgctggtatttctgcactggaagatgccctgaaagcaggttatgaagacttcaaggtaaccagacaacaactcttttgcagtacagataagcattcttcatgactagtgacacattttgcttgatttcatgaagagaattcgcaccgacccggatctagaaaacttgaggaaaactgaggaattcaacgtcctgctgaacaagtaccacgaatcgttcatcaatgagaatgctatcaacgccatcaaatccttgttcggattcaacaagaaatgagcactgaactggtcatggtggtaggagatattgcatcttttctccagctgcagatgaacacttct

SEQ ID NO: 26988 - DNA, 400 bp, Oryza sativa
agcttgtttatggacatgaatctgttttttcatgggaagttcgaatcggctcaagaggaacagagttgcagagtgatttgacagccaatgagtactataatcttatgaccgatgaacgagaggatttggatcagtcgcgattgcgagcacttgcaaaagttactatggataaggaacgtgttgctcggcattataataagaaagtggtgcctaagactttcttggaaggtgagcttgtgtggaaattgattttgccgattggaacccgggatagcaaatttggcaagtggtcaccaaattacgaagggcccgtccaaatacataatgctgtgtctcaaggagcatacatgtttgcaggactctatggagaatctatggctagcgcttaatgccaaaattg

SEQ ID NO: 26989 - DNA, 312 bp, Oryza sativa
  unsure (1)..(312): unsure at all n locations
agaaactcaacttacacagnacaatgtgaatctttcacgacctcttcttacgttttagaaaattcaacatcacccttaaagctttttagttaatattgtccaaaattattagatcacttatagcttttctcataagggctggtccttgataacaaggtggctttactgccctatacatcctgtctgatgagtggatccaatctgggctaatacactttgggacaactgtttcatactatggttttatcagtgatggtaactatcttgacaagacgtttgctctttaatactccctctgtcccataatataag

SEQ ID NO: 26990 - DNA, 237 bp, Oryza sativa
  unsure (1)..(237): unsure at all n locations
agcttctgcaggaatttataggttcagcatttgattntatttctgatatgcttttaccatgcataatactatttgtagntctttagcaatgtctgtctgagtctgtacaaccgtacgtatcgaatngatactttgaaggacgacccacatgccatgcacatgcaaatgtacatcccatgtgaccactgcaatgaaaacatgctatcaatggttaaggcaatatttggtctattgatg

SEQ ID NO: 26991 - DNA, 262 bp, Oryza sativa
cttaagcacctgagcatgcaagctcagcttactgctctctagttgttgttcatattccttacatgttcaaagagaccatacatgtcatggtggatcaaaactaactatcactaataactgcaattaaacaattaaacttgattcatatttgacttatgcccttgccatcccatataaaagagataacaactgcgacaattcaaattagatagacctagtttgcacaggtaaactcacagaattactcctatgctgttccaac

SEQ ID NO: 26992 - DNA, 198 bp, Oryza sativa
  unsure (1)..(198): unsure at all n locations
agctagggtggcgatcgatggctatgacgtcttattttttgtgaacgcggangacggggagatcaaggtgatgctcgtgatcgacccagagcaacggaagcatattagggtgaggacggcagtggccacacatatggcccctcccgcgatggagatcggcggctcgtacaccgtgtcactacactgactttctagccg

SEQ ID NO: 26993 - DNA, 381 bp, Oryza sativa
tattggtagcctttattaaaattacttttatgaattagaaggcatgtaatacaatcttaaacgaatttagatatattataaaacctaatctggatttttctttagtagaatattaatatgtgagaatatgttataagaatgctattggtatgaattcaatggcataatcagatcgtaaatcgaattagttatctaagagaaaatgctatacgagaaaatatgcatgtactttcgggtgtaccggcctatatctagtagcacctggatttgagattaatgtcgctcgttatgacaatccagcgcacagtctcatcgtagttacgtccacatacacacacactctctctctatatatatatgtatatcgcagatatatatata

SEQ ID NO: 26994 - DNA, 148 bp, Oryza sativa
acctgaggcatgcaagctgggggcacggaccctaaacagctcttacagtttccaagccaaatatcagtattaacaacgcatgatacatgggatgataggtacaaattatgaacgcgaaccttgattcccatgcaaaacgaaatacaaa

SEQ ID NO: 26995 - DNA, 460 bp, Oryza sativa
  unsure (1)..(460): unsure at all n locations
atatgcagagaacgaaaagaaatgtcactctttatgcatggctcatacgcttattactagtactagaactcatatactccactctctctgctgcttttgcttggtcccttatccagtcgtgtcagcatatatagtgacatggcagtgcgtgtcagcatcacgtttttcacgctagccgggtgtagtgtcatcgcaagatctggtcccttcaattccatcaccgncacgtggcgatctatgatcgagtcgatgatcagtggattagaagcaagtttttagtatagcccactgctaactttaaatcatctataagcaatgtaatagccaattcatacnaatagtgcttactatactattaatacctggtcccacatatcatacacacattacgtcttgaagtccgtgctgcagctggctatagatctgtaacccgctgctcttctctcattatctgtatctc

SEQ ID NO: 26996 - DNA, 259 bp, Oryza sativa
  unsure (1)..(259): unsure at all n locations
aaaataataccacgtggaggaggagagttgatcgctccaagcgatcgatagtccttagccttttcgatctggggtacctaactctgtcaaccgtaagatctggcccaatccacggacataatttggactgccagtactgttgacggtaaaatcttatactctcgttggtgcgatatacacatgtccctaagggttattacagtganccctactgctgcagcttgtttgatttctatccacaccggccaatgcttgatct

SEQ ID NO: 26997 - DNA, 267 bp, Oryza sativa
  unsure (1)..(267): unsure at all n locations
acccactaccttgttcatcttcttccccgccattaatggctcattcctcttcgtctccaaacccttnccaaaaccctactccgcgcacgcgcctntncttctagaaccttctggaaccctcgcccccgcgaaggcggcgccgccgccgagatggccttctncccctccgccgtcgtcctgcaagccgccctcgacggcgacctccacctcctgtgtggtaagcatcaatcgatcgccctcttttctcttccttttcttttttttttt

SEQ ID NO: 26998 - DNA, 209 bp, Oryza sativa
  unsure (1)..(209): unsure at all n locations
agcttggcatacaattgatgttcccgtaactttcccaacaccagacggagatggtgctgatggtcttnctctgattgtgagtatatcagaatgtcatcgatgaanaccaccacaaacttatccaagtattccatgaacactttgttcattaagttcatgaagaaggcaggtgcatttgttaaaccgaacgacatcaccgtgaattcata

SEQ ID NO: 26999 - DNA, 397 bp, Oryza sativa
  unsure (1)..(397): unsure at all n locations
gctggcattaatattagaaaccacacaaatctccaggaagttgctcttgattcatctatcagtatggaaaccataattacttgggaaaatgaagctcggaagcacccaaaaagacccaaggttntgttcttcaaaagggttggcacacccaacactgggtgtacggtaaagtatactgcgaccgagaggcctaaaacacctgagagcacggngcccggtgaatcgatggaaatagataattaaggtcctctccgtctctgactgatcgaacctgtaaatgctcgccatgttcttcaaagtcagtattattactcttatcatcaagtattactatcctgattattagtgcgctctacatacatcgagtaatttgatatctacatgcttggaacatgta

SEQ ID NO: 27000 - DNA, 443 bp, Oryza sativa
  unsure (1)..(443): unsure at all n locations
agctatctactcgaccagcgctatgtttaaatatatgctgacgggaaaatccttcccatcgggcccncgcgcctcccacgcctcgcgtgccacccccaccacgtgtactgttgcaacaaatcacccgcatattacggaaacgttctattaggaggatccatttcattattttgttccaccaacaatatctcagctagtgtactcgtgatgtttcactgtgtatgtaccanatgtcgtaagggattttttatatntgtttaataattttatctngaaggacacgtggnttgttatgtatacacggttaagtgttgaatggttaaaatagttggtgatatgtgaaccaaatggttcattaagactgacgtgttcactttttaaaactgaacaatttcctattactgatatggttaagaaattgatcatgacaaaaaaaatggtcc

SEQ ID NO: 27001 - DNA, 430 bp, Oryza sativa
  unsure (1)..(430): unsure at all n locations
taactgttccagatgattgatagaaaaatntgccactttcgtgtgaacttagacatgaactggttcttaactggcctattcatatgggtaattcattggcatgtgttatgttactttctgactattagtgagttgtgcctatcgcaacctttgtattttgggggtagcaaaatattaggaagaaccaaaaattgaaactagaaactactctntntggccagtagtcatggctattaattggttatttcgttgattatatcggatcactgattgattcttgcttactgatctngtgaactcaaaattactcatggcttcatggacttatccttgccttgacgacacttttgntatggcganatatgatactgtgtactgcgatttacctatnntgcatcatgtctattgtctaccgagacactgtgtatct

SEQ ID NO: 27002 - DNA, 284 bp, Oryza sativa
  unsure (1)..(284): unsure at all n locations
agctngtgtttagatgatgaanaagtttatattgtggagaaagttggtagtttgaagaacaagttgatagtttgtgtgtacgaaagttctcgatgtgatggaaagttagaaatntgggggaactaaacacggccttattgcgttagactgtaattataattatctcaggactgccatgaaattctcatatcccgatttcaagggtcgccatgacgaaaagcatcggagcagatgaagctnttgtatctggtacaacatgcanggcaatatcnaattttacaacc

SEQ ID NO: 27003 - DNA, 126 bp, Oryza sativa
taaccatgagttgggccatttgcaaagaatgaagatgcgtaaattatctcctttacggtgggcgttctcttagcagcctccaacacattctggagtcctctcacatggacctgtaatcataacaca

SEQ ID NO: 27004 - DNA, 360 bp, Oryza sativa
  unsure (1)..(360): unsure at all n locations
tgtgctttcgctgttgaacaaggtagcatcagatgtgttggatctaactgacttcctccactgtgagataactacatcaaagtatgaggatgcatcaaggtaacatttggcctacttaagagttataagagttatattaaaantttgcctgtccaccagaaactacctgatgttgtttgtcaaaaaatgttccttcatgatgtgaccctgtaacatattcattctttggattagtcaaagctgtgccttggagaacagtagaacacacaaataaggcagctnttggaacaaatgggagtagctgctctcctatttggtcttatcttatgagctcacataacactactaatggcatttttt

SEQ ID NO: 27005 - DNA, 178 bp, Oryza sativa
  unsure (1)..(178): unsure at all n locations
cgcatgtcaagcttgtcagcaaccaagcccaactatattataagatagtcgtntatacgaacttgtgctttatacgaacggaaattatttaggttaagtagtgaactcaccaattcctgatagacgacggcatcactgttgttctcaaatgtgacagagccgtccgggttgaccttac

SEQ ID NO: 27006 - DNA, 272 bp, Oryza sativa
  unsure (1)..(272): unsure at all n locations
aatggatcaaaagccctcaaccaattttacgagaacaagagattccgccaaatttgatgagaagatcggcgactgttcttgaagggtgaggacaaacagttggctatgcgagttgcgtctctacttgtgggttgggccgaagagaggcatgaccggcggagggaggtatcagactatgctaagctgataagtaaggaagaaatatgcttncgtctaaaaccaatgaaagatattcattattttgtaaattacaatgtatagcgaatctaata

SEQ ID NO: 27007 - DNA, 297 bp, Oryza sativa
  unsure (1)..(297): unsure at all n locations
agcttgtccatggcttgcaggttctccttctcaagagatgcatcgngcaagaaaaaggttgtttcttgacaaatgtcgagaacaacattntgatggccagagggacaaggttcatgctcgataggaggttgtgatggtggttctttggagtgcaattcaagggtctcgccagaatcttcttgaatgaaatgaagatcatcctgctctagaatagattcaggggactcatgaagaaaaccgcatacttncttatcggcgatatcaggaggatgcctgcaaggtttctttaatcgctat

SEQ ID NO: 27008 - DNA, 403 bp, Oryza sativa
  unsure (1)..(403): unsure at all n locations
agaagaagcttctagccgatgagagatgtcttcatgtgtttntctcacatcatcggatagaggagctagagctttgcttgaagtatcttcctctgcttcatcgaggtaatctctgatatcaaaagagaagagatcgactagaacctgcagaaacaatttcggaaaaagtaagagcttggtagattatagccgatctaattgttgagacaaaggaaaanttactgggatagcaggagcagctggttgttcttcttcctcgatgagatgactccccacagcttggtagaatatagccgatctaattgttgagacaaaggaaaatttactgggatagcangagcagctggttgttcttcttcctcgatgagatgactccccacagccgatggagtctggtcacttg

SEQ ID NO: 27009 - DNA, 278 bp, Oryza sativa
  unsure (1)..(278): unsure at all n locations
agctnggcttcagtggaagaagaggactattatgatattcatcaacatagtttggtccacaatgcaatctcctgtcactaggagcctctgtatttagatataaataaactagacacaaacaagtgaacaaccctgatgcttaatgtggtaaatccaacagaatgaacccaaaagtctctgcaaataacaacagagcttgtcacatgcattacaggattgtctcacagatcaaatcttcagcatttcacaaagaaacataaacatattctgacattaca

SEQ ID NO: 27010 - DNA, 393 bp, Oryza sativa
  unsure (1)..(393): unsure at all n locations
agcttgcganaacatgtcggctttggcaaatttcctagctatatcatcgaaatttcaatccgtaactagaagaagaggtaaactaagggtgtgtctgaggagaacgggattgaggagattgagaagatacgcanaacgaggggagccattagctcatgattaattgagtattaactattttaaattcaaaaatggactaatatgatttttaaaacaactttctatataaatctttacaaaaatcatcgttagtattgggaacgtgcgccgatacgaacaactactacttttacctctaaccagcaaattgtttctttttaatcgtatctttctctactgaatttagaatactgatcatctttttgaattattccatggtttatatatatatat

SEQ ID NO: 27011 - DNA, 440 bp, Oryza sativa
tatgtataataataataatactaacactactagatacttatgcatattatggccaaggagcaatgtctcactcactgaacaacactgagatgatcgcgctcggattgtcgtctttactgcagcggcgcttgcactgtcacgacgaccggggtgttcacggcgtgcctcccgtcgcttcacgtcaccgcgccgctcctcacctgcgagctcccgggctccatcttcttggctggcgccgcggcctccacccgcaccgtgaagctcagcttctgcccgtcgcgccggaacgccagctggcgcggctgcacggtcaccgcgcaccccttgggcgacctcaccgtcgcgcggtacaccgcgcgccctgccgcgacgatggtcaccgtccggatgaagtggtcttcatcgtcgccctgtgccgtccgcgcgaacgtgccgacatg

SEQ ID NO: 27012 - DNA, 389 bp, Oryza sativa
  unsure (1)..(389): unsure at all n locations
agctttgacatggccgcgcaatgtgttgtgttcattaatattattagagcctgtttagaggccaattaattgtgcacagcgatgtagttagaattttctcaagtctaagattcaactagtataatttacatagattaattttatctttcatagtttgaagtcttgaaatgtacattctgatggatattgaaggttacgagtaggtgctgcttcccctgttccggcactgatatgcgttgagtggtctgtttgtgtaataatacattcgactctgagcnggtaacccggtctctccgcatccatagtcgtgatgccatgctccattaggtcctgattaacacatcacattttttagaaactaggcttataattgataaaaataaaatgag

SEQ ID NO: 27013 - DNA, 316 bp, Oryza sativa
  unsure (1)..(316): unsure at all n locations
agcttctaatttagcatttatcttttcctatgttacaacactaagatgatgaanaacatgaaacatgtatgtatatatgaatatttatccattctagaatatcatcgcacggaggagatacaatattatgagggtgttgtgttcttgtaaagcatcatgtgggaatgttntatagcagaagtatatgaaatatgtagggtatagcactaagaggtagtgaggtggggaatcaaaaccgtgaaagataggtggaaattnntatgggatatcggtccaactatcaaaatattgactttagaaatataccacgtaaata

SEQ ID NO: 27014 - DNA, 276 bp, Oryza sativa
  unsure (1)..(276): unsure at all n locations
tagcagataaatcatttaaaaaatgtaaaccgtgagctggtccttatatatactcactaacaaggaaactaggccgcgttcgatagcgagagatncgaggggattggtgaattgtgcactgttcagcactgtacatgtctgaataatttactgcatattaaatggcgttggtgactaaacgtggcacctgtacaaacggcacagacggcatttggatggatcgattcgtcnggccattcgtcccaacccaccaccagcgcaagcaggcgtgctcgc

SEQ ID NO: 27015 - DNA, 253 bp, Oryza sativa
agcttatctcttacgctccaggaatgtatttttcataacaccaccaccggctcgcctcgaccgtcgctgactggtgtttccgcctgcacggctggcctattatgccgccgtttgtgggcgtctacgtcttcaccgaccggcttgccttcgccgccgccgactggtgtttccgcctgcacggctggcctttatgcccgccgtgtgggcgtctacgtcttcaccgaccggcttgcttcgccgtcgctactggtgt

SEQ ID NO: 27016 - DNA, 503 bp, Oryza sativa
  unsure (1)..(503): unsure at all n locations
tactcagcttgagctctatgagctatacgggagaaaatatacctcgttatggcgtcccacgtagatagcggagcactcgtaatatgtgagcataatggacagatgtatgggcactatgtaattgactcagaacatgaacagcatgtgagatatccggtcgagtaacagcaagatatacaagacttccaacaatatgtcggtatcgagaaggatctgaaagtggattcccatcagtaggacgaatcttgagatgaagctccataggagtggcagcagttntatcatcacttagaccagagcgagatagtaagtcgagagtatatcgatgctgagacaaatganaaccattcggtggtgaagcaacctcaatgcccagaanatactntagtggtccaagatcagtcatcatgaattgctcacttagacgttgcttcacgaaggcaacatgagaagcgtcatcacccgttatgatcatatcatcaacatagagcaagagaatcgta

SEQ ID NO: 27017 - DNA, 335 bp, Oryza sativa
  unsure (1)..(335): unsure at all n locations
agctacttcncggcacctcgatgccttttgttttcttctgtccaacggagggttgacttacactatccttctgtcacgcccggaagtctccccttttgcttgctttaaaaaattgggtaaataaattgtcccaagaaattattttaattaacctagagctgaatcgctatctaataaaagcacttaataattcggaatagctgggcggaacttctcctgagntccccatgctccaatgcattaacaagatatttagcgaattttcaaaccttggaataatttaaccaataaacatgaaccgcgcatactttaatccaggagagaccttcttcttt

SEQ ID NO: 27018 - DNA, 191 bp, Oryza sativa
  unsure (1)..(191): unsure at all n locations
ttaagtcacctgaggcatcaagcttaacattgcgaccgatctgagttgtataacatctntgaatcatgcgttgataggtcgctcctacattcttcaatccaaagggcatggtgatgtagcaataggccccaaagggcgtaataaacgaggtcttcaagcagtcggattcttttaagttggatctgatgata

SEQ ID NO: 27019 - DNA, 337 bp, Oryza sativa
  unsure (1)..(337): unsure at all n locations
tcagaanaacatcacaagccagacagcagagatgaaattgaacactgaatgcatccatattgtttcttacaggcaccaaaacaccattcatattaaatcaaaagtaaagttagacagtaaaacccaaattattagagcagaaaaaagataacacgccattaaaaagatcattctntttatgaaatttggtaattagccacatatacaaaatttatcaccagaagatcattcaaatactggactctgaagtaatcatcgcgaagatactatcaacaggcacctttccatcaaaggatttaaagggattggacaaaatggagagtacagtacacaaaat

SEQ ID NO: 27020 - DNA, 356 bp, Oryza sativa
  unsure (1)..(356): unsure at all n locations
agctagctataatccataaatggatctctttatacgacatcccatattntcgtttcctttcatgacaaaacctttcggatgcgccatgtatactttatcctccaaatctccatttagaaatgccgtttttacatgcatctgatgtaattccaaatcataatgtgccactagtgccattataatcctgaaggaatctttacaagagactggagaaaatgtctcattgtaataatcccttctcgtgcgtgaacctttagcacaagcgcgctttaaactcttctatattccctctggagtcatatatggttttgtagacccatntacagcctactgttntggctcctttaagaatttct

SEQ ID NO: 27021 - DNA, 315 bp, Oryza sativa
gcacttcgcacatagtgattgctctaatagctctggtctcagtactagtacctggctatgctacttcagattctagattctccttgtcactgttgcctctttttcgtccacttagctatgatgggtctatgagaagcatttgacagttgcatcttctctcagaatcaaaagttctctaacggcctaacttttaattaagattataagagttggaatctagatgatgaattataagccataaatggagtttttttcagcttcttcagatctcatcagtagattctcatcagctgcttcttataatctaaaactccc

SEQ ID NO: 27022 - DNA, 350 bp, Oryza sativa
  unsure (1)..(350): unsure at all n locations
agcttctcgggttcttggtctctgcccgatgtatctaggccaaccccgagaagatacgagctatagagcggatgcgccccccagcaagcttagggatgtgcagtgcgtcaccggctgcatggccgccctaagtcggttcatatcgaggctgggagagaaggctctacccctatttaagctcctcaaacgctccgggccgtttacctggaaggaggaggatgagcgggccttcactcagttgaaggcatacctcagttctccctcagtcctggtcgccccggagccagatgagccgntgttactctacctggcggcaaccccgcaggtggtcagcgcggcgttggtcgtgg

SEQ ID NO: 27023 - DNA, 350 bp, Oryza sativa
  unsure (1)..(350): unsure at all n locations
agcttcactcctatgacgatcaagcatgatcttctttatgtcttcttctcngggcatagttttcaaatggctacgcacaaagtatgaaatttcagtaaggtggngaactagataaaaaaccctggctttaatccgccgttcccgatacttcttcaaagcatttcgaatagcagcaatcgacacttcgatatttgttttatgttcattatattcttcccaatcgtacatcccttgtcatgtaagatttcatctcattataattttcttcagcaaagcgtactcagttacggaacaaatatgtttggttgatcataactngcctaatcatgtcggtaataccatactcatca

SEQ ID NO: 27024 - DNA, 428 bp, Oryza sativa
  unsure (1)..(428): unsure at all n locations
gattcgtctcgcaaattagtcgcaatatgtgcaattttttttttttatcatgtatnnaatacttcatacaggtgttcaaacgtttgatataatatgatgaaaaatttagggtagcatctaaacatagcctcagtactgcgtttgaatggtgaaatctgacgttattttgatccgtgattcgacaatgttttgatcttgagagatactattagctagtaagtatatagccttgtcaaccttgcattttgatgagagaaattacaaagaagaaatgtnagctactggtagcctcgtacgcatgggaaagaaagatataggtttagctgacttctatactccatttaccaaatacccatattctnntttaactctcacattactacagaaagtctttgcctacagctagaatgtatttctcatatattgat

SEQ ID NO: 27025 - DNA, 346 bp, Oryza sativa
  unsure (1)..(346): unsure at all n locations
agctngtatacgattattcatcgccctgattgtcttattgatgagaagtgcangattaaaatggcccttgatgtggtaatggttggattctgtattttcaattttatcatcatgtgcatgcccttattatgatttattcactctgcaggccagaggcatgaattgtcttcatactagtgtaccgacaattgttcatcgggatctaaaatcaccaaacttgctggttgacaataattggaccgtaggtatctattgctttcagacanagcctgaagctgttgtagctaacaattacattacaggtctgtgatttggactttcactttgagcacggtacattttgtca

SEQ ID NO: 27026 - DNA, 339 bp, Oryza sativa
caagtcactaagaagagcaacactttttggtgtcacatgtattcatttgcgcatgcatatattatggatgacgtgttgttgttacatttctgtttatccctatatcaacagcgaaactatgactattaccaccaatggaaatctattatctacgataactgtgtagagtactgatggtttctgttttgtctgtggctttgcaataactacaataatttgcacacctaggctatggatgaggcacatattaataattgtaagcatcacgcaacaacttaagtctacatatatgcgctttggttccctgaaatgttctacatgtacgactataatgataat

SEQ ID NO: 27027 - DNA, 244 bp, Oryza sativa
  unsure (1)..(244): unsure at all n locations
agctatcatttacaatgtgttctagtagccattgtctcatgaaagtatntctttggttggccccttttctgcaaaataaaccaattctgcaaaaagagacgacaggtcaatgcttttatcatgaaccccatcttccatttatccacccagaacanagttatcgttcttaccggttaccagataaaatagagtaataggcccatgcggaaagaactngcanacaataatnggatatattatgtga

SEQ ID NO: 27028 - DNA, 431 bp, Oryza sativa
ctaagctctatctaactcatatactcatcaacgagaaacttgtgtgccatattttatattgaaatcttgtcaagacgaaactaaatagtgttgatctatgcaaaatgaatagtcatgctatactgcattgaactataatatcaatgaaattataccaaattcatagttgaacatgcgaagcagcatgacatcatatcagatatcatattttgctgatggcactcataaaatcaaataatagaatctgcattataaatgcttaccccgatattcagctggaagtacaacagaagggaagactagcagcttggcaaaactaacatcagtttctagaacaatatcataatcaatgacatgcttcactaggtcatcaaattctttatttgacctggcaaagtagcaagaatattagaacttaatgtccaaacagc

SEQ ID NO: 27029 - DNA, 319 bp, Oryza sativa
  unsure (1)..(319): unsure at all n locations
agctngcatatgtgaataccattcttatgtgactttctaggaaaatctgctggaatctctccttcaatctctataacccgtgtgatctccccgatctcgtcgactggtgcaaaattgctctatagaagtgccaacacaaggtatgcatantaatatttgccttctgctcgtttttcagctccttgtcagcaagttaactggaacagaatcgaaccatttgtatttacctcagtgggacgcaaaggttgacattgaatgtgaaggtgtgataacaaatgaatcagcagctcgtggtaagtactgttcatgggcattgatg

SEQ ID NO: 27030 - DNA, 375 bp, Oryza sativa
  unsure (1)..(375): unsure at all n locations
taagctaggccttctaatccttgagaccattatgcatactctattgtcgtggaatatncataagaccatggtagaagactngtctattatattcttggggcacatctacagatgccaagattgaactcatcttggccatactactgactttaggaatttacagctcacaacatcttctttttctctttgcccaacctctccactgaagatgaaaacggaacctctcttatctctagacatttcttgggtcgtacatggaaccattttcgatgacctgcatgtcaaggtagaaaatggagcagatgattacttgtgaggtgnacttgttggcgagacaaattgggtgatgaggagattaatgggaatgggaatggt

SEQ ID NO: 27031 - DNA, 418 bp, Oryza sativa
  unsure (1)..(418): unsure at all n locations
agcttncataanagctagactaagctttttatgtccgcgtattttaccttctgcttgtggctgtctcgcaataccttctacagcttgtcctgcagcagtaccttgaccaactccaggcccaatagaagcaagacctacggccaatccagcagcaataacggaagcagcagcaattagtggattcatgatgagttcctcgtgtcaaaaaaagaaatggttaggatacatcaccaagaattatattctaacttatggcaaagaactaaaagtcaatgaacgatatctgaatctcgaactgttcgagactcttttagttctaatcatagaggttgtgactcatatttattttctttcttcaacaactgacttattcatcctcttcttctttcatatctgagtttattttccctacttatta

SEQ ID NO: 27032 - DNA, 483 bp, Oryza sativa
  unsure (1)..(483): unsure at all n locations
agcttangacaatgcgagcgaagatgatcatgtgctccacactcaaaacaatgattcgggtctcctcttttcctgttcctaatattnttcatagctcgagaaaatttgttagataacaaaaccaagtcctcctcctcgaactgttcgagttgatcatcggacatggcattaaataaagcaagaacagaagacttcgatgaagaagcaccaacatccaaagaagtcgaggaagaaatcaagcactagacttagaatcactntacgagcaagaatattcatctcatgagttttcagttttgtgtaaagcgaatccaaagtcaaagaagacatgtaacagactcctgaatagatgtaactttcatctnccaaatagatatgtcaagatcattaaaaaagtggcgagaaatctcagattgtggataattagcatcataagaagaatcaacagatccaagatcacttcaaaatttattaaaccgagaa

SEQ ID NO: 27033 - DNA, 499 bp, Oryza sativa
  unsure (1)..(499): unsure at all n locations
caagagcatgaagctttgaaggaaaagcttgatcatgtttatcatcagctggcagaaagaanaagggaattccagcaggaaattgatgcactcgagacacacaatgagcgtatcaaagggtataaaactcatattgctcctgaattntagtttgtccaacttctactatctatgtttactcctgaatccttttaggtacctgaattcaaagaagggcgagaagcttaatgaactacaggaaaaacatactcagttgcagtctgatctacagaaaagtaaggaaagaaaagaagaataatcggcggagttaagcaagaacaaagagctattgaagagccaagatcagttgaaaagaaacattgatgacaaccttaactacaggagaacaaaggatgaagtggaacgacttactcatgaaatagaaatacttganggacaaatacttttcattggcagcctgtctactatagaagcggatcttaacaacattcacaagaaa

SEQ ID NO: 27034 - DNA, 366 bp, Oryza sativa
  unsure (1)..(366): unsure at all n locations
agcttcgccaggttcggcgatattaatacctctttattccgcttgtaagaatgtgttttcgaggagagaagtttttcggtagagctttggaaaattgcacatgccacatatttcgtccgtttgagtttattttttacatgattggttcatgtgagttcctaagtgtgaaaaaaatatcaaaaaaataaaataaaaataaaaaagttgcacatctctttcctctgcactagttcagagagagaggagaggagaggaanaattctacatgtcacatattacgtccattngagttcaattntttttattgttgggtcttggtgtgctctaagcgtgaaaaaatatcaaccaattaaacaaaattaaaaa

SEQ ID NO: 27035 - DNA, 469 bp, Oryza sativa
  unsure (1)..(469): unsure at all n locations
ctgatttccttgccgagtggaccgagtgccaagaagacttgccagaggaaaagatggaatattggactatgcattttgatgggtcgaagatgcttatangcactggagctggggttgttttaatctccccgactggagaaagattgagctacgtattgtggatacatttttctgcgtcccataacatggcggaatacgatgcgctactccatggactaaggattgcaatatctctaggtattcgccgactaattgtccgtggagactcttagttggttgtcaatcaagtcatgaaagagtggtcatgtctagatgataatatgatctcttatcaacaagaggtacgcaagttggaagataaattcgatggactcgagctcacccatatccttcgacataacaatgaggaagctgacagactggccaattttggttccaaacgggaggcagcccccttctgatgtgtcgt

SEQ ID NO: 27036 - DNA, 199 bp, Oryza sativa
  unsure (1)..(199): unsure at all n locations
agctntacctaataagtatatctgtccatgatgcttgtgtgttgatataccatcagctacagaacttagtggacagtaaatcaccacattagttcacctagccacttgctcaccacattagttacagaacttaagtgctcgtcgattagtattagaaacaagaaaatgaggttcatcactcagtatctttatgcctttt

SEQ ID NO: 27037 - DNA, 436 bp, Oryza sativa
  unsure (1)..(436): unsure at all n locations
tgatgaataaactcgacgtaaaatatacgggccagttatttactactgtattgggctgattacagacctaacaggatcttatggtgtanttggataatgggaaatgagaggtgggattgggattgaaatataaataaagagttaggattaaatggaagagggagaatgaatggttaagatttaaagatggcttttggtgggagggaaatcatttccataacccattagccaaacaaggccttaatgtgaagggtaaatttgctacaggacactcaaagattngtggctnnnctgnganacacccgaagatcgcgtatttgctcgtgaccactgtataaatgggtaattagctgcttgacattcttcccattatgttattatcttccggcaatacggacatagaaagatttgtgtcgaccaaaatgccctcgcaact

SEQ ID NO: 27038 - DNA, 288 bp, Oryza sativa
  unsure (1)..(288): unsure at all n locations
gatatatgataaatagtagcatgcacaaccatacttctaaacatgttataaatgaggaccgaaaggtggtcgtggtcgtcgcacatggaagcgacactaatcgaacaggactctgcggattccttatgcgagcatgaatacaggggaattntgaaagaaaaactttcatgctcgattgcggattgctttctcttgtcctcaagagtccatgtccttagcttgtccgatgcctgaaggttttccttctcaagagatgcatcgcgcaggaaccgagttgtgtcttgatga

SEQ ID NO: 27039 - DNA, 318 bp, Oryza sativa
  unsure (1)..(318): unsure at all n locations
agcttgacttcattcttgccttcataacaatgtacttggctcggagaccactaacccatggtgtcattcattagcctcatcgtagtgggacctattccttttcacacctcanaggagaacattattctcaacaaatcggttgtcattcttcacttgatgaccaaccggttgcatatgaaagatatggatatgtttggtgagtattcattaacatcacaagtgtcatatactcgtatgcaacttcaagtgcaaagatccgatatacataatatggtgaaccaacatgnngatctagaacatgcaccaactaaatgtata

SEQ ID NO: 27040 - DNA, 239 bp, Oryza sativa
aaccactagacagaactcttacattttttttcatggggtattggatgcgaatggtctgctaatagtgctattacattcttggatattatgttcctaccgttatactgggttattggagctatgtgtgaaatactagacgggtactacaagtgaaatcttaggatcattgaaattatacacgctctacagaggtgatatcaaagtaaacttcctcctcttgaaaaggattgtcagtgagt

SEQ ID NO: 27041 - DNA, 354 bp, Oryza sativa
  unsure (1)..(354): unsure at all n locations
actcagctgtttttacgaaagtattctgatggcatcatgtaattctctttccattaaaggcttgcaaaaccagatgctcttgaaacggatctggatttattgaaataccacaggagaagaattattgcaattcttataatatgtcaggaagatctatatcataattgcgattgacatttaaacataggaagcgataaattagttatctagctgtgaaatataaaaataaacagactatcttagacattgcattaaaattttaaggtaccctacacagtaatacaagacaattcttggtaagcatcggaagtatttgtaaattgtactccctccgtatnttaatgtatgacgccg

SEQ ID NO: 27042 - DNA, 385 bp, Oryza sativa
  unsure (1)..(385): unsure at all n locations
caagcttctaaattaaaatggcgattctatttatttatttaccgcatcanaacctcatgtaggaaattaggaaacacanaacacccacactgatagaatgcgagggtgacaattatgtcaactggttaacatatttgctagctcattacaatcattagcacccagcactaatatgacaaaaggaaaatattgttctatagtacctctgtcctgtagcgtgtatcttgcggtgggagcttcagttggccttccagtcttgtaactgacaaggttaacttatttcttttactttattcatgatgttaatcatataccgatgacgaggaattaaagtattcatacgtattttctagtttaacaccaacagctacatatttctatacta

SEQ ID NO: 27043 - DNA, 455 bp, Oryza sativa
cacattgggttcgcaaacaaataaaacagtagaataatcattcataagttataaaattgggtgatagatcatctggtctgctctacatgatcatatcagaagccagaataaaagggaaactggaaaaatccaaccaaacaaaggaattcaaaggtacatgaaaaaggataagagaagcaaagtacctttagatctttaattttaagtcaggtctaacttaagcctcaactctaaattgcagtagtattcatctatttttatgatattggttttttctcttgagacaaagtaataaggctcatatgttcgtttggagcaattaccctatatataatattttcacttaaagcagagcaatacaaagataatatagtggttccttttggggcaatcaatagcgttgtcttatactgcaagaacatatatagaataattaaacaaatatacctgcttga

SEQ ID NO: 27044 - DNA, 484 bp, Oryza sativa
  unsure (1)..(484): unsure at all n locations
agctngngtttgtcctacggatccgagctgttctctctagtagaggtagaggaggagaaattagaagcagcaatcatagaagcagtaatggacggaggaggagatctcgacaaactggttactagttgtattaaggctctcaaagcttcccagatctagaagagatgagaagctagggttaacgcaagcaaattcgagggagagagaaagaggatgtggatgctcactcacctgccggaagcagcagcatgacgaggatgacggcgtgctctgctctgctcgagagagagagagagatggagatggagatcgccgcagcgcagcgcatgcgcaaggagcggagacacaacccacactgcacactcgagngttnttttctttcttttctttctttcgaccacaggccagcgacacacagggaacacgccaaagaatactctttttctttttatgggccacaacaagcattatagctactactatt

SEQ ID NO: 27045 - DNA, 490 bp, Oryza sativa
  unsure (1)..(490): unsure at all n locations
cgcttggaaattgctattcctatgtgagtgattgtgggcgttagccgctgacatgtgggtcccatgagtcccacattgactcagctttgacatgttagctaaaaccgggcataatactgccttagaacctcggacgatcctgttttgtatattgagggacccgttatatatgattttgctacacgtctatcgtgtgaatttttcttatgcatttcacgttttcttagtcgcaccatatgtgggccaagatctatgcaagaattggtggggctgcatgcatggataaagccgtgtgttggatgcttatgcccggttcttttctaaataaaaatagatttctttaacggttaatacattaagacatttgaaactaaaatataaaattacagtcctatataactaaaactacatatgtttattctatagtcctgtggatgcanatccaatggaagaaacaatctctcataaatcacccgagtgaacacaggcg

SEQ ID NO: 27046 - DNA, 242 bp, Oryza sativa
  unsure (1)..(242): unsure at all n locations
agctnggcggntcgggtatgctatatctctcttctttattttcttcttatttggtacatgtcacataattaacatttgttctctttacccgctcctaccttgcatacagattcttgcagctcactgttcgacagagcgaaacgagcgggcctctcttgacggattcaagaaccatcttcgggcctatgattgacaaatacgcccgaacaactttgagatggaggccctcgctcacacccttg

SEQ ID NO: 27047 - DNA, 449 bp, Oryza sativa
  unsure (1)..(449): unsure at all n locations
ttttctggcctacagctgtgtctgatgcttacattattgtgcgcacatgcnaaggttgtcaattgtttgcctgaccaactcatttgccatcctatgagttgcanaccaagcccgtgtcttggccgttcgcggtctggggccttgacatggtctgcctattcaaaagggcagtcggcggttacacacatctctatgtagctatcgataaattctccaagtggatcgaggctaaaccggtcatcacgatcacagcagataaagctagagatctttcatcaacattgtgcatcggcttggggtgcctaatcggacatcactaataatggcactcaattcactggcgcgagcattaaagacttttgtgaagacttccgcattaaaatctgtatgcctccatggacaccctatgataacggacagtcagcgcctaatggaagatcttatggatc

SEQ ID NO: 27048 - DNA, 269 bp, Oryza sativa
  unsure (1)..(269): unsure at all n locations
gttcatctattatagtccgaacacaacgctnaaagagtcaccatattcaccgcgaaagcctgaaattctacattaatcgaagatgatatgaatttattacaccgtcagactgttatgtctatattgtaacgtctgagagaagccttaatgacattgccaccatatattctacttagcaacctaactagtagcaaacacgaagctctcttctatgttcctgtatcagcctttcacgcagtaatcgctcgtcgtaatattctgcacatata

SEQ ID NO: 27049 - DNA, 372 bp, Oryza sativa
  unsure (1)..(372): unsure at all n locations
cgtatgctatatggaagtggccagccagatcatgcatattacatgacatcgcgttaacttctttttcaaaacaaaggctgataatattaaatagaagaaacaattataaccttacatgcaaacaagacattaagcatgtcaacacacaacaaaggcgattcacattctataatgctacaagagaatcgagcaaacgagcgcaactacaacgctgactaaattatatatacatctaacgggagaaaggcttaaaattgaatattgaatgattatagaanattgatctatactgggtaagcatccaatgcttggatcctacatgcagacctctgagaagtcatgctataattaccttggacaactccaatacac

SEQ ID NO: 27050 - DNA, 468 bp, Oryza sativa
  unsure (1)..(468): unsure at all n locations
agcttatcanattgggaagccataatttttttctatcagcattcagaaaggcactctatgtatctcagcatagcttcttcaaagaaaattagcagtagatggaaatacattgaaatccctaagttaaggagcatcaaagactagatgaagtagcactgcaaaaccagcatccctcttaggacgatggaatggactacataaacagaaattgcaaagtacccatacggagtgatatgagctaacatatatatcaaccacataaatntctggnaatgagtacagctgctcctgattagatatgcagaccacaataagatcattctacggttaaagtaactgtacataatatcttgaactatgatgcagagcataatcatgccatggtcagctgataacaacatatgcttgatacatgaacaatggccatctttgagcagctcaggcacagttgattttagttaagttctt

SEQ ID NO: 27051 - DNA, 468 bp, Oryza sativa
  unsure (1)..(468): unsure at all n locations
acacaacgaactaatgcgatactaatttctgaattgatctctatgattatgtatggagtacctcatcgctgccctcgtcgtcatcctcatcattgacctcggacttggacttgtcagattcctcctcgtcgtcctcctcttactccttggcgggtgccttcttggcagtgctctgaacaaacaaaccagagcatatgnttagaacaataaacaaattggacgcggtggcaagcatacaaggtaatctagatggttatacctcgcccttgttgtaggcagcaatggccttgtagtactcngccttgagcttgatggccttggctacataaggagcctcgtcctagaatcaaacagccatggctacatataagcttgggcacaaggaatctaacacttatataaatcatactatctctatgtgcgacgagacgaaactcaccgcttcggtcagggacttccacctatcac

SEQ ID NO: 27052 - DNA, 469 bp, Oryza sativa
  unsure (1)..(469): unsure at all n locations
agcttctcttactgaaggngggaaagatagatcaatgatgagtacaactacagtactcaacaagccacaccgggagatgcacgattaatgcaagggggtacaaggngtaataatataggggttaagttttgcagtaaacagcatttaaaagacacttagttgctcaaagctattttgtaaagacgatcctagagatacacaatattattaatcaagaccgtgaacccacacgaacctgccttaacccaaggcgtacgatgattcagaccgaactggcaacccgacctgngtcccagctcgtcccaagccaatccgggccaaccattccacattntagttgttaagcaagttttaagaattaaaccactaacttgtgtacatngctaggcttgcccataatcgagggcgcggctattcgaatagattatactctgatcagaggtgtacatctttacccacaagacacatc

SEQ ID NO: 27053 - DNA, 361 bp, Oryza sativa
  unsure (1)..(361): unsure at all n locations
agcttgcaatacatcaaaagacagctatgatgtatgctactttatttggaacttcctggcttacatgctactttcatctcaaacacaaccatgtaggaaattggtctcatcaccaaaacatgttctttttttctgaccaaggatgctacccgacttacactaaaagctagtaacaagagttcatcatcacaagaacaacaagccaaatctggcaacagaaaactacatctcatcgatggctgaaataaagggataatacctactgaaccttagatcttggtgcagtgctgacataatgtgacactaatacacacgctcangtgggactcatgagaacttgagaagcagagcatattactca

SEQ ID NO: 27054 - DNA, 496 bp, Oryza sativa
  unsure (1)..(496): unsure at all n locations
ctgtgatagatgacactcttattgagtattgcgcanaacctactttataaatgcangatatgatggcccgtgtcttgtcataacatcgacttcctctagtcataaatagtngacgnttaggacaagatttggttaaactntagaaacttngaccatcaatttcatattanaatatgtttatagaatctagtaagtntatgatgttatgatagtacttttcaaggcaaatctacatgaaccattttaaaactaaacatttgagaagttattaatggtaaaaaatttcaaaagtttgactaaatcttgtcctagacgccaaatatttatgaccagagggagtagcaaatatcgaaaaactagtatagattatgtacatggaatagttctcttcaagcttgaagaagcttagatactttctaaagaaactaactaccagaaaagactacaacatgctcaaagtttaacctcgatgacgccacgacataacagcatttca

SEQ ID NO: 27055 - DNA, 269 bp, Oryza sativa
  unsure (1)..(269): unsure at all n locations
agctagccaaccgccactgggngcgtttttttccttatgtcaagaaggccaggcaatggtttctgttgtcgaactttactgccgcaagccgcccacgcgcctgtggcgtatctgcgcatgtgctcaagtgctttcaccctcatcccctccaagagttcgagcgacacttcgcgcccctcttctgccccagagaacatcacccttggtgatgaaagacctatgccctagaattgccctgtagcgggagattggaatatctatgatcctaa

SEQ ID NO: 27056 - DNA, 476 bp, Oryza sativa
  unsure (1)..(476): unsure at all n locations
gctatccttatattcacagtgcacaatgcaaactatgattcttataatcaatcatatgctgaaggtgtgcaacgcagagntcttcttcaaaatgcatttgctgcagtctttgaatttggtggataccttctcaaaagatgcgcagagcttcatgatgttgcatcaagtatctacttgccagctattttggtcttcattgaatggctggcgtgccatccagattntgtggctagttctgagatggatgaaaagcaagccgatgcaagatctttcttctggagtcaatgcgtgccatttatgaataagctcattttgactggtctcgcacatgtcgatggtgataatgatgaaacttgcttctttgacatgggcacatatgaggagggtgaaactgggaacaggctcgcgttgtgggaggatgttgagttaagagggttctcgcctttgtacctgctcaggtatcttggacttctcca

SEQ ID NO: 27057 - DNA, 249 bp, Oryza sativa
  unsure (1)..(249): unsure at all n locations
ggatcctctnagtcacctgccgcatgcaagcttaaaaatganactaagtttctctatgtctttatggtttgaatttgggtggttttatgaaaaggctagcactgaccctatcttaataagtaccgagttaagaagggaggcaaggaaccaacaaagtatggccgcatttctcgaatgggtacagacccgacgtattaggtaacccaagtggggtgtcatcctagtaacggttggttctgcagttgaagt

SEQ ID NO: 27058 - DNA, 367 bp, Oryza sativa
ctattctaaattgcttactctagtacatatactatcatatgggtacatgggcatcttgagccacaatacacacatgcacacagtccaacactccttctcgagatggatgatatatatctatcatatccatcttgttacatatatatatagatgtacactctctgacacctaaacattttgttagacaatcacccttctaatgctcctttaaataagtactcccagtgacggagctagcaattactaaagagtgggctaacctatggctcaactaacgagttgttgattcttctttgaaattatatggcgatttaacctaaattatcatgaattgccctaggcttgcctccgacccagagtactccgt

SEQ ID NO: 27059 - DNA, 350 bp, Oryza sativa
  unsure (1)..(350): unsure at all n locations
agctagaagttgtactcaatttggtttaattcttatagntaanaaaatcaagaataccctatggtgttccagaaagtatatattatttgcagatactcgtaatatgatcaacgggcatgataaaacaaaatgcagccaatacatgtgcagattaatttattttaatagtcttactcaattcagagcataattncagggatattgcaccttcctgacttgnttgtcttcataatctgcctatgaagatgcccagcaaaacatttgagactacacaaggaaaggtgggttaatatgcccaaatgaatctattatatgtcgataattaactttattggcactaaataatactc

SEQ ID NO: 27060 - DNA, 400 bp, Oryza sativa
  unsure (1)..(400): unsure at all n locations
cttaactcacgcggcaaatgaatgtcattcttttattttcctcttcctttgtgtaggctgtattgaacaaccggccgctctttctcttcttctatatgacacagatagaatataacatatgtcaaaatctctttggccagaatcctccacatgtttaaacaagagatgcacataccaaattttctttggaacggctcaagtctacactgccttggccgagagatggccctttcatttcttcctccgtttctatgatcacctgagaagcctgccaattgattacacaccgaatcgtataaatccgcatgcatntctgaatcaaaaccccatggtctaccattgagaacaagactattcttattactatctattacaacaacataaatataatgtcatcata

SEQ ID NO: 27061 - DNA, 294 bp, Oryza sativa
agcttggattgatgtcgcaatccatgcgcatgtgagactagctacacgcatgaattcgatcggtatgccaagaactggcatgagagctacgtgtgacttgaccattgctttcctgagcgttattctcttcggccagctccatgcttaattggaccattagccaagtaacatcaacattcacatgcccacagatgatggaaaagatagtgctcttttgtgcccttaatgccttgtctctggcaagaaaacaataggctttatttacaaaaggaaataaaaccaaaaaaaaaaaac

SEQ ID NO: 27062 - DNA, 213 bp, Oryza sativa
  unsure (1)..(213): unsure at all n locations
agcttgaaataatctcatgtctattgggcatcttttgtttaacaatcataatggaaagatcatgaagattnttcacttttttaaacctttcaactattttatctatacgcatctcagtgaggaagagtactngggctaataatatgtgtacatgtgcatatatngaagtatactttgtttttgataaaaaaaagttggtatcctggaatatgc

SEQ ID NO: 27063 - DNA, 364 bp, Oryza sativa
  unsure (1)..(364): unsure at all n locations
accgactgctcgnggaaatacataaaaacttgtatantatatggagcagcaagaaaagcattgggagttctcaaaaaataaaagaataagataagtcactattacgaacgagtagaaacaaatgcttagaagaaacgaagcaagcttacaattaacttgatgctatgatcgatacagcatgcttacaaagacaagcattatatatcctggatgccgatcgctagcgtatgcttctctttctttncttcgaaaaacgacactagcttgctcgatagtaagtacagttggatcgatgcttgtctccaggggttcctaaaccgccggggctggggttaccgcgccccggcggtaagcactgttactg

SEQ ID NO: 27064 - DNA, 141 bp, Oryza sativa
tctaagtcacctgaggcatcaagctacctaggtaaggttataatgcatattccttctatgtctctactgtatgacacacaaggttatgtgcatcataattaagccatgtcacatggtacataagcactgatgtgcgggccc

SEQ ID NO: 27065 - DNA, 299 bp, Oryza sativa
ctaggtctctttataagcgagtagggtgtctgtatacatgcagcgggccagggctcagagaaaaaatgatctttgtctacgacctgctgctgctccaataagagacaatttgcggagatgacagagcgactttagtgctcatgctcggacgacatggttgacaccgaaaatttgaatttttcaggcttcatgcgaatctctcaaggaatgcctgaacgttgaggggacttttctttctcttttttaaagcacccaaggacggtaatccttgcttaggtcctacactgcgctgctatctt

SEQ ID NO: 27066 - DNA, 205 bp, Oryza sativa
tccttaatcacctgcagctgcaactagggtttgctgctgaagagatatgctataatctcatagacaaacctgaagacgacagatgatggccatatcatatgcggtgaaatgtaactggttaaagaaaggggaactaatcacttacaagagcctagatacttcttgctatgcagctatttctcaagcactcctttgatatactgat

SEQ ID NO: 27067 - DNA, 411 bp, Oryza sativa
cactttgcgcagatcgatggaacgctgaataccctgtaccatgtatgttcatcctactcctctactaacggctacatcgagtcgcctataataaagcactcaagacatttttttatatcctcgttcattttacagtttatttcgggcactcttaacatactctcttttttagcaatagcttttaaatcactaaaaacacgcatctaaaagtttcacctacatactattttatggttgctctgctttatacatcttttagttgctaataagctgctatggtttataatcagctctcggccaactgatgaagatgaacattgccatgctcagattgttactgaaatggatgtcatgctaatatcaactgtgttagcacaatatactgatactgaccagtgtggaaaataacat

SEQ ID NO: 27068 - DNA, 210 bp, Oryza sativa
  unsure (1)..(210): unsure at all n locations
agcttatgctgaggtcagttagcaactatttttttattattntacttaaacaagttgttataatgctggngagaatgtctaggatcatgcctttttctcagtatatgtgtatggtgcacaacgatgtattagcagtattggtgtgggaacctgcacattattattggtgtccttaacttggctttaaggagaaagttggtggccaaatct

SEQ ID NO: 27069 - DNA, 436 bp, Oryza sativa
  unsure (1)..(436): unsure at all n locations
aggttgttaagctggagcaaaaatttatcttattctaatgttctgcttgcaaattgcaatcgagcagtttgatttctagaccttgntgaggaggccaggtctctgacaagagaggagtttcacggagattgtgtagtgccacataattaagctcttatagttcatgacaatgtactggaaaaaaagatgcaccaatagatggatgttgctgggtgaagaaaacacaaagttctttcagtccattgctacataaatatctagagctaactcaatctcccaaatccaggaccatgatggttaggtggtcaccctgcatgagcagatagcagctttgttctataaaagtcttagagaaagaatgggtgtctctaattctcccacaatggggttnngattgaatgaagctcttcctgatcatgtntgtctggacaaccct

SEQ ID NO: 27070 - DNA, 345 bp, Oryza sativa
  unsure (1)..(345): unsure at all n locations
agcttacagctcctgagagtactccatataatctcatacgacatctgaaacaggaagtgtggttacctttatctctcanagtgagaacaccttttgggccaaaaattctgtgcctcatttatactggagaacccagatatactgcttagaacaagtgaagtaggtttgtttctttaattaaaaacacataaaagcactagttatctagatcaacttcttttagcaagaactttatctgggaagacagaaactaatcagacgttaagaggttgctaaagaaatacttattcaaaaaagtagtacttcataaaaccggattgaacttaaccaaaactacatttacat

SEQ ID NO: 27071 - DNA, 478 bp, Oryza sativa
  unsure (1)..(478): unsure at all n locations
tatcatggcctacacacattcgtcatgcatctttttatcataccacacgctctatgcaaactgcanagaactcatgagtatatctaattagcttagagaatggtcttgtcaagaagccttgaaattaagcataaatttacgcctatcggaactgcagcagattttatgggaaagaattcagaatagaggtgaacttaccgatcggaagtattcaacaaaccgtggctccttgaagacgattgatcgatattcctttgttgccacaacagccatctcatccattagagcacgccattctggtttgggggaaattggaggatgcattccatgctcaagagtagctgcagtaaagcgctgcagagttctaaagcacaagtgttcctcttcaaacgagtgttcaataacctcgccctgtactggtacacgaagtgatccatgtatcgtgtctggtggttgagataatatggcaagatgactg

SEQ ID NO: 27072 - DNA, 290 bp, Oryza sativa
  unsure (1)..(290): unsure at all n locations
agcttgataagctgattagacaattggcttgctttttgcctcacaggcttgcaagctagggtagcatacatttctacagcagaccttcgattgggagaaaatgttgcatggtacgggcaccaaaccatttatattgacattgttgcgtccttcattcanggatgcactccaggtgtaatccagatttgtacctataaaaataaaaatattttactaggaaagcatgaaagataaagaaaaccgtatgcatacatgatatgtgagatgatgtcatagaaaatggaaacaca

SEQ ID NO: 27073 - DNA, 249 bp, Oryza sativa
agcttcccacattatcgcctcgtctattcgtgtatctcttgcacaacaaagtggtttctgcctttgatcagtaagacatcttcacagtttctttcaaaaggtgttttttttcttccaatgttgagtcagcagctatgagaatgccgatggatcatggatggcatatgtgatctctacttgctggaatctttattaatctctatggatttgagacattatacactaatttttctagatcctgtattcggt

SEQ ID NO: 27074 - DNA, 429 bp, Oryza sativa
  unsure (1)..(429): unsure at all n locations
cagacatgaaggcctggcattactgacttctattgttgaaggcggnggaaactgcaatcaggctagtgatccaataacaaaaccaatctctgttatcagcanacatcgttaacaagcatatgtttctgctatatttggagaagaaagctttgcgcatcgatgctgaaatataaattgaactgccgtacgaagatgatnttgttgcctctttcttggctgcctcattctggcaactacagtgcatgatcttaacattttcttcagctaaattgcctcttatgtagtctggaatatatgacaacaacaaataggctcatattnttcaattacatctaagtcctggaataggaccattntctctctaagctctggcgagttaggctaagtaaccaactccacatgtgaataatggtaatctctgtcattacc

SEQ ID NO: 27075 - DNA, 354 bp, Oryza sativa
  unsure (1)..(354): unsure at all n locations
agcttaaggaagctcatgacaacctcctttccactactcaacatgaagctctcattgatgttggcatatcttgtgatttgcttgatgatagtgctacttgccatattgctcatgttgcatcatctagcatttctacctctggtgatgatcttgtggatatgtctagctctagatctagctcttgtgtttctatttgtgatgtctcacttgttgttgagaacaatgagcttaaggagcaagtggctaagctcaacaagagcttggagaggtgcttcaagggtagaacactcttgacaagaatttgagtgagcaatggtgcatccttaacaaggagggactnggattcattccaaa

SEQ ID NO: 27076 - DNA, 264 bp, Oryza sativa
  unsure (1)..(264): unsure at all n locations
tacgtcgacaacatcgnaggaaataacgtaggctatctatatgcgttctacctgcaagagacgttcgacagcttgcgcgcggcaagcataaagctgaatccggtgaagtgcgtttctggcgttcgcgcaggcaagttgttgggtttacttggttccgaaaggggcatcgaggcgaatcccgagaaaatcgatgccatccagcaaatgaagccttcgtcaagcgtacatgaagtacaaaagcttacaggccgaattgcagcactc

SEQ ID NO: 27077 - DNA, 270 bp, Oryza sativa
  unsure (1)..(270): unsure at all n locations
agctaganatatacacctacagngtggnctctttangtaanttaccatatacgcaaacaaaccgatgttctttgctgcggctcgcgtgtcgtcaggctatatgcagttttntgtcgcaccataggcgatggacatctctggccctatacnttcgaaaaatcttatcatgttaagcgatggtcttgctttggagttcatagttctgtgctctatgaagtgcaatcagctcggcgttcatctatatataatcttttggtgctggattctggt

SEQ ID NO: 27078 - DNA, 431 bp, Oryza sativa
  unsure (1)..(431): unsure at all n locations
aagctttctgggacagtagacgtttctatacccaaagagatatgttgttatncatttagcgcgcatttgcacattttggattgatttttcttcctccaaaggtgatagatcattttcgatgacatttatgagcgatatttactctgctcaatatacttgctttttattggatagaacagattatactttttatgggaatatatattctgagcatctatgtcatactgtgtttcccctttattgcttgctatctgctagttagagctatngatgtacccttttgtgtgcgaccgagatactactgctgaagagagctgacacacacatatatgatggataaatacagaagtgcaagatgcaacttatacggctgttatctgcctgtaatttggaatagtacttggtcatggtgacgctaattctttgtatat

SEQ ID NO: 27079 - DNA, 260 bp, Oryza sativa
  unsure (1)..(260): unsure at all n locations
gagcttgctgaagaaaggaccattagcacacatcnttttagtananagtactggggaccctgataagtggtgtgcggaaggagagacatcatactacactattgaagganaaatcccactgttgtgaaataacaagagagcatcctgaaaaaatcaaagcgtcgccctagccgatggatatcaccggctaaagcttgttcactattccaatttgcaaccttagcctcaaatttgatatctgataagacaacatcacccct

SEQ ID NO: 27080 - DNA, 185 bp, Oryza sativa
  unsure (1)..(185): unsure at all n locations
gcccgcacgaaggacgaagaagaagcagcacaggagntgacggggaatctcgatcggatctctcaacgaaaagcctcggcgctccacatggcaaagcgggacaaactgccggcaaatcgaggagcactagcagcacaaaacacagagcggcatcaacggcaggggcctctctggagacccaatgg

SEQ ID NO: 27081 - DNA, 96 bp, Oryza sativa
agctatacctcccttatccgatgatgcgaattaatactcttgttgatatcgctcataggctggcagcattattgttagatagtcaggtggtgaact

SEQ ID NO: 27082 - DNA, 436 bp, Oryza sativa
ttctcttcgatttggcaagcattatgtcccacatgcctgcccatttttcgctggcctgtatgttccagatcacatacacctataagctctccatttttcctcaagtactttcccgatggctcaagagagttatagtcatcacttcttgcaacccacccaaaaagatcatctcttctacagtttattttgatccaatcagtgttaccatacctatccacattgaaatgcttttcaaaagccaatgcatccttcattccattccagttttcagcaaacttcacgatagcataatctgcattggctgttgaattccaaaggatagttacttggagtggttgaatcgtgagaatttgctcttagctttcctagcctccccaacaatcctttccctttaactctagtggagataaccagataccattcatggcatacatac

SEQ ID NO: 27083 - DNA, 328 bp, Oryza sativa
  unsure (1)..(328): unsure at all n locations
agcttctacatttcgccccagctggttgctatgattttgttaccagcctggcaaaggatgctccggcattccttaggccgaaaggcatcctgaggtgacagacagtgccgaacggngtgatgaaggctgtcttccggatgtcaggcggattcatatggatctagtgatagccggaatatgcgtacaggaaactcatgagttcgcagccagctgctgaatccacgagctgatcgatccgggcaaagggaaatcgtctttggacatctttggtcaggtccgagaaattatacacatgcgcccatttgccgttgacttccgcaccaatact

SEQ ID NO: 27084 - DNA, 245 bp, Oryza sativa
acctgtctaacatccgaacctaaaaccaaactaatctatctagtaacatactcgtgcgaacgctacggcggcattagagaatacaaatgctggatatccacgtcacagaaaatatgcttttcattgtacgcgcaagataaaacgttgtacataaaaaactcggagtccatttacaaatagaatgaatcactgaacacaggagcactggtaccaaacattagctaagcatcacaatataaaaacca

SEQ ID NO: 27085 - DNA, 300 bp, Oryza sativa
  unsure (1)..(300): unsure at all n locations
agctntatattntntgaagaacttctacctgtcttctagtagattgatatgatgcgtgcatcaatattgtgttggttctagctagtgttttacatctacagaagttttagatggtgataatagtagtgtagactactacctcaataaaaaaatatcttttatatacgaatctggatatagtgagagtacctgatanaagcattagtaataaattatgttatctggctatcagagatcgtgctacnggtatttttgtcttcttgctgtagaactaaatttgcattagtttacgagtttttt

SEQ ID NO: 27086 - DNA, 428 bp, Oryza sativa
  unsure (1)..(428): unsure at all n locations
ctagcttgtatatcggggatttagggactntctttcacagaagaatcatcatacacacaggagtagggtattacgcttcatagcggcccgaacctgtataagcctcttttgtctcatcgtcttggaggggcctaaccccctcaagatcacatagcttcgctcaccgagccctcgaatctcacccgcttgccctgaccgaactcacaaagggaggcctcacgattccctggtggaggagttcattctctgacaaaaatactctagaattntgtcaaagcaacagtattacatgttaacctgtccaaaagctcagtaacaccaatcaactcccaagatattgatgtggttgttgttttagaaaatttcacatggcaacgagaaaccctcccatttatctacctactctanggtgcctcaggcgtgtacac

SEQ ID NO: 27087 - DNA, 366 bp, Oryza sativa
  unsure (1)..(366): unsure at all n locations
agctntnttccagccatccagatcatcttcttcttcttcttgaactaataccctgtttagttcgcgaaaagaaaatttttggtatcacatcggatgtntgaccagatatcggaatgggttttcggacacgaatgaaaaaactaatttcataactgcgcttgacaccgcgagacgaatcttttgagcctcaataagccatcattagcacatgtccaaatgtccgaaggcgttttcgacacgaatgaaaaactatttcatactcgcctgacaccgcagaaacttnccnatttgtcctcggaacttttctattgaaaacttgcaaatttgtgactaacctaattggtttactctacacttcaacccttt

SEQ ID NO: 27088 - DNA, 469 bp, Oryza sativa
  unsure (1)..(469): unsure at all n locations
ctaatccaaagagctatgatgtcaattagtcttatgttctccagnatccaactttaaagaaaaacagtatacagtatctgcacaatagcttcatgccaaccaaagtaacttcaaaatgcaaccctctcaatccaacaccagtatctagtatctacacaatagcttcatgctgactgcagttacttcaaaacgtgaccctctcattctgcaatccacaatgacttgatcttttgagctgcatttcaaaaccaaaattaaccaaaggatcttaacacctgaagaanaaaaaactgcagaagcgaggatcacccaacaacattctcagctactttccagtctttgaacgtgcatccctagttttccagctttgtgtgtttatccgatacaataaattgatatagaagacgagcacgcttcaatcaccttagaaaatgatcatagaaaaataatntatgactgtgacctcata

SEQ ID NO: 27089 - DNA, 377 bp, Oryza sativa
  unsure (1)..(377): unsure at all n locations
agctntgaagaanactgaacagctcctacatcttctaangtccgaggagcaaaaacgtgagcggaacatgcaagtggaaaggatgaaatctgagatgtacaatttacaaagtcagcttaatcgaatgaattccttcaccccaatcaacaatgcatctcacagtgaaggcttacgtcacaggaggaatactaagttgtatactgatattgacaccccgttgcaagatagtgggattggatcaccaagaaaggangataagactggtagcacagactcatcccaatcctttgaattntctgtagaagatgcacagaagagcttgacagatttaatgttccggactccatgtgatactcctaggtcaccaatcangggga

SEQ ID NO: 27090 - DNA, 452 bp, Oryza sativa
  unsure (1)..(452): unsure at all n locations
cctactggctcaaaccctgtaggaacgattattccttctgggagtatttcctctaaaatctacaaaaagtaagattcaatcaaaacagttaagcagcagaaagtgaacagaccacgagcatggtgcataagaatatttattnttttccatgtgaagcaatgttgatcaacatatctaatagaccccacaagtaacaatgtgatgacatgctaatacagtcctcatgctcctggaacatacagtntaatatctaaacatttcggtagatcaaaccattatacagcatttggattgaaaacaaaatctgtggagttngaaattgtgctgcctaaaagttaattagtaatcccacaattcatatttgtgcctcgataatgcattngtacgaactgagtntcaattgcatttctatgtngtcacatctttgaagcaagaacagagtagaccaatca

SEQ ID NO: 27091 - DNA, 238 bp, Oryza sativa
  unsure (1)..(238): unsure at all n locations
agcttgagcagataaagatagtgtaaaattttcttcagcctcaatggacagaanatcagagacagatgcattctggttntgagaaaaagaacaaagccttggcatagtgtgaaaaagagggggttgatcattccatacatcataccaaaaggagcaggtatttccacttttcagattacacttttcaatacctctaaagacattcatcaagttgcaaatatctttccaccagaatgag

SEQ ID NO: 27092 - DNA, 404 bp, Oryza sativa
  unsure (1)..(404): unsure at all n locations
agctatgtagctntntgctcaaactaggtctattcttcttaaccttgacttcatgangntaaagtgggaaataaatcaattcggagtggtcttaatcatatttttatatcccatgctttcaaaatatgaaagatttcaaaagttggatttatagctatttcaaatatcctctgtggtcaaaattaagaaaaatctcatttaagaggccaaattttgtgaaaatcctcccaaaagtgcttcaatatgtatttcatattcttgcacggtatttgaagtaaaagatcttatttctaaaataatataganaatgggcgtaaaaggatcttgcatgaatcttattttattcaaaatgttctatctccctaattcaaaatatttttgtgtttttgaaacattntctatac

SEQ ID NO: 27093 - DNA, 199 bp, Oryza sativa
  unsure (1)..(199): unsure at all n locations
tagagaaagaccgttccacatcananacaacaaanactagcgcanacatgtaatagcgtattcggaaatgtaaccaagccccncccatgggttctatacccgattcataactagaaagcttctctggtccttcaacaaccggaactaaagtgctgaaatcaaatgctaaatagaataggttgtatataaaatgccaaaa

SEQ ID NO: 27094 - DNA, 374 bp, Oryza sativa
  unsure (1)..(374): unsure at all n locations
gtatcctaatgtgggaaggtttggtctgtgttttctnaaatagcgcttcaagatccattacgcgttcaaggcctcttggtcttcttcgcatccgttattttggcacaagtttttttggttctcaaaaagaaacagtttgaaaaggttcaattgtacgaaatgaatttctaggtcccgggatttcttaccatcaagttggtaaaaagccgcgatttattggcgattgctagaattctctatgatccattttcggaaatctttttctgtttagactatntnttgtttgcgagatgtcttgtctgcaattccttatttctatcatctcatgcaaaacgaggagaatgcaaggccagggcgagaacaataaaaggaac

SEQ ID NO: 27095 - DNA, 254 bp, Oryza sativa
  unsure (1)..(254): unsure at all n locations
agcttgtgactcggaacataactntgtttacctctctgtcttngaaacatatattagggcaccacatatagtcaatntcagttactgttttgtctatcggattaaatgtgaggttatttcacacattaaaataaattcatcaagttagctgaagtgctgaactcttgaatatgggtgcaacatccttctttgtaaactcaaattntgaaatccagccctgatcttgtggagtaagaaatacttaggatgtctat

SEQ ID NO: 27096 - DNA, 301 bp, Oryza sativa
  unsure (1)..(301): unsure at all n locations
ggactcttacctctcacttccatcaacatgaatcagagaagccattaagtcctgttctctcatcaggtctgctcaaatagcattacctgtagattcggtagccgatgagttacagctattgtaactaacaatntgatctatactaaacgctgagaatatatgaagtggtatacatgaaagtactaaggaagaacaaaaatactagctatactacagtatatcagtaaagctatgcgatgaagctatgaaccattgtgcacgcaactgagactactgaaccatgtanggctgtcacagactc

SEQ ID NO: 27097 - DNA, 288 bp, Oryza sativa
  unsure (1)..(288): unsure at all n locations
agctagaaactcttttttnnttggttgcaactgtatgggaactaggctagtggtacatacaagagcaccanaagaccttgtggccctggtaagttttggtttgataaaaatccataaacttttgacttgtcctacaataaggctacaatgatattnttattatcaaagatacaaaatcaatgtcctacgggaacaatatgtactataaagattagtattagttcaattcgtaccaaatataactcatatntataaaagttgcatggtgtattattgtatacacatata

SEQ ID NO: 27098 - DNA, 447 bp, Oryza sativa
  unsure (1)..(447): unsure at all n locations
ttcgcatttgcaagggatcgtctcttctttgctaggcccaccactggntttatcgaaatcattaacaggtccttccaggacttggattgaaaaggcgtgaagataagcttgtgatttttaactcttacatatgggttttgcgcttgtgtaattgtgttgcctctagcacctggccacctgctacgagaaaatggccctgctccttttactaattttctcaagatttttaccacggattatttgctcctcacttcttaaaaaatatgatttcttaaaaaaaaaaactttctctccactacagtgattagacaacctattctaaactatgtttaagtttagtcttcanaatattaatcattatattaatcaaataaacaatccgtgacaataatccaagcaaatgtatatgcatctcatgttggtgtcatgattggggatgcgtcactt

SEQ ID NO: 27099 - DNA, 213 bp, Oryza sativa
  unsure (1)..(213): unsure at all n locations
agctntagctcctctatctgacgaaagaaatataactttttaagatatcnctcaacggctagctagaagcctcttctttagatagcttgcgagttgactgcngatcaattaggacacggctgcattgaagtcaagctctgattcccgaagattgggcgatgtcctaactccagccgcttatcttgaacaacattcagtcagcctgaaaaagcc

SEQ ID NO: 27100 - DNA, 384 bp, Oryza sativa
  unsure (1)..(384): unsure at all n locations
agcttngaaaactatntccacccgcttttntttatgtaatggttcaccttgctgtccatttgcctgacgaggcaatgcttcgagggccagtgcaatttgggtggatgtatcctgttgagcgacgattgtacactttgaagaggtcggttaggaataaggcacgaccggaaggctcgattgctgaggcttatgttgcagatgaagccctcacattctgctctaggtatatggaggatgtggagactangtttaaccgagcaccgagaaatccaggaatctcagatccatcggccttcaatattgatgtttntgggcacggtgttaatctgaatggtgatgtgactatgtactctgaagaattgaaaaatggttggatatccatat

SEQ ID NO: 27101 - DNA, 278 bp, Oryza sativa
gagagtttgggagcatctatctctatcacttgtagcatttgacatattgtaacctcgaggtacttgagctggtgcatcaggcaaggtaccttaaactggactatatcactgcattcagaaattaccaatcgctccaaagagaatgaattggaaaggaactgccctaactccttcccacaaatatctgacttacatagatgcaagcttggtaagcttatgttgcaaccaagagtaaccgtatgatgaatagcacaggaggagaggaaaagtgactgaat

SEQ ID NO: 27102 - DNA, 237 bp, Oryza sativa
ggatccttaagtcacctgcggcatgcaagcttgcattttcagataggggcgattttataccatactgggtttctaagctcccttcggacattccagctttaaacaacaagttccagtttatgctcccaatttgatccaaatataatttttcattctactcatttatgggcattacaataataacaattttggtaggctggaatgtgcctttcacgtgctctactacattccaaactg

SEQ ID NO: 27103 - DNA, 410 bp, Oryza sativa
  unsure (1)..(410): unsure at all n locations
ttctatttcaaaccacatatattatcaagttntggaagaccaaacaaatatattatcaaactatatctcatattggatataatggaacaaaatatttaatgctacgcataatgctattttttttaaaaaatagtaagtctgacttgaaaataaaaatcaaaagggtgtacgaaacaggacgcaccatatgtaggggataaatactctcttcgatcagtaatatatgacactttgaatgtcatagaaattttttatgagggcaagtatatctatatattgttgcatgtatcaattaacatctagaatctatatatcttcagatcaccaagcgtgtgtgataaacaagcacacgtgtgttgctcgcaaataggtagcctttctaaactcacactcaggatgatattttgact

SEQ ID NO: 27104 - DNA, 268 bp, Oryza sativa
  unsure (1)..(268): unsure at all n locations
agcttcttgattntgntaactaagacgtcttattgagcctgngatntgattntgcgatctgtacaaataaattcacatcaacgactgggcatgaagatgagagtggtttttgaagtttcagctacaagtaccttctacgtctttcagagacgagtccctctgttttgcccgttcgacctgtctttctcagagcctggattccctttctagctggatatcttgcagctcgactatatgctttcactggtagtccacatgatagcacctg

SEQ ID NO: 27105 - DNA, 379 bp, Oryza sativa
tccttcgcttcagtttataattagtccctccattttataaattatcagatccagttcgaatatgacacatcctattactatgaatctagacacacatatgtccaaattcatcgtactagaatatatcacatccaatgctaaattcgtgtttttatagaacggaaggagcaggtctataggacgatgacttcaattcaccagtgctggggaaaagcactgcattatttctttcttgttattctggcccctttgttttgatccatggatataattaagcattttttataacacggtgaatgttgactacacagagaaagaactatagaatatacaaatggcaaaataattaaatattctttctgataaaaataataattac

SEQ ID NO: 27106 - DNA, 336 bp, Oryza sativa
  unsure (1)..(336): unsure at all n locations
agcttacaccataagtcagcttacagtatgattgttgnttatggcgcatgccaacttacagaggaagccagcttataagagaagccagcttacgacgcaagccacaaggtccaaggcatacgacgtaagcctccaccctactccgcctataaatagggcccacaaggtccaaggcgagaacaacggatctaccggctcctgcttctcctcttgtagcatgtacttaaatccagaagaaataaagcgttcactcggtcatactgtctagtgtccacaactctgtgtttggttgctcgtgtgctgatcaatagaacacagctggttctcaacacgtta

SEQ ID NO: 27107 - DNA, 326 bp, Oryza sativa
gatgcaagatattgatatgaagcttgtgctactaactctattccttgagtctttgaaaagcaaaatgagaagttatgggactccttcaaatggcctcttaagtgtcatatgggtagtaaggcctaaagagacctagctataaagggaaacttaaccatgaggtcttgggatgttctctacaaaggaaaggggacagaggtgatgatcaaagcccaaggcttacaactttgtaagcaaagttccttctatgattggcttaattgtctttgagatctatgtttagaaaatgtatggcggtgtgcaagatgagccaaggcaatatttat

SEQ ID NO: 27108 - DNA, 237 bp, Oryza sativa
  unsure (1)..(237): unsure at all n locations
agcttcgaagtcaacagatcctcaacacaagcctctctttctctttgggtctgaagntcatgaaggaaatattgttccagtcacactagataaattgtcggctgaacataggcaagagcttgagcagatgatgagtagcgttaacgacaagttcatgaattcgttccaacaaacccgtagagggacaattgtgcagaaatacaagctgaaagtggttgctgccgatgaagttggtcc

SEQ ID NO: 27109 - DNA, 349 bp, Oryza sativa
cctctctgagacggctgcaactgagaagaacttcaactctggtgtggcggaaaagagagctagactgagtactacccactgtactcagcaagtcataccggaagaggaggtatgatgcaggatataaccaaaggaggctacggagttcatttgcataaagaatgcatttaaaaccagtaggtgaaaacagtaaaaacagctgtagtattaagcaatttaaccagtcactgtcaacgctacaccacgtgcacaggcccaccaccactgactacaccagtattagctaactagggtgagatatcacggaattggcgacgccatactgagcacgttattcaatagttacttg

SEQ ID NO: 27110 - DNA, 294 bp, Oryza sativa
  unsure (1)..(294): unsure at all n locations
agcttacanatcttcgagaaatccgctngtataatattatccgataaccgcaactaggcgcaaacaatcaataacctaagcaaagaccacataaaatgtccgatttaggctaattaatagtgccattagatagatcacaattcaatggaattactggaagtggaatggaggcaatcggatgaacggatcgagggatatgaaatttggaaagttaaatgaatttttcctgaccacgagatgatttgtcngaactttcttgaatacaagaaatggttatggatattatagaaatat

SEQ ID NO: 27111 - DNA, 439 bp, Oryza sativa
  unsure (1)..(439): unsure at all n locations
ctatactcagaaagaaggcgaagatttctttgacacttactcacctgttgctagactgaccacaattcgtgtgctactttccctagcagcctcacatggtcttctcgttcatcaaatggacgttaagacagcttttcttaatggagagctggatgaggagatctatatggatcaacctgatgggtttgtagttgaaggtcaagaaggcaaagtgtgcaaattgttgaagtctttgtatggtctgaaacaagctcctaagcaatggcatgagaaatttgacaaacattgacatctgcaagcttngcagtcaatgaagcagataaatgtgtgtactatcgccatggtgggggtgagggagtacttcgtgctttgatgtaacgacatactgatattcgggacaaacttgaggtgataatgaggtaaatcattctgctcaaat

SEQ ID NO: 27112 - DNA, 92 bp, Oryza sativa
  unsure (1)..(92): unsure at all n locations
tcacctgangcatgcaagcttatcgaaatactcaactgcaatgacctnttntttgttattagaatcacttcttgcatatccgttagacaacc

SEQ ID NO: 27113 - DNA, 311 bp, Oryza sativa
atatgttgttgaatcctagggcgaaatgattatgtattctgatccgactgctctgaaccttcgaaaaagattgctatggttttaattcacgaatataaatacaatcgatgcaattggtttctatatcgcaatggaatatcacatttattggaccattgctttccaatatcgaatttctatctgtaccctcattgtgctatacatgattgcctgccatggctattatcattacctaactctagctaggcttatcgatatttcactgctactgttttatttatgacatatgatcagtattacacttactatat

SEQ ID NO: 27114 - DNA, 129 bp, Oryza sativa
agcttaattagtgtctcaattaaatcagtcgatatggtgtaaattgaattatattcaaataaaacagaaaaatttactatcataccgggcatagcaagattgtgtaattctcaccacatgatcatcatg

SEQ ID NO: 27115 - DNA, 437 bp, Oryza sativa
  unsure (1)..(437): unsure at all n locations
tataagccgatgcaatgtccagataacttatcggctaacaccttctgtaaacactagcataaacctatcgggttgacaagatctatattatcaacaacaatctagaaggtcgaacctaaccgacacagcacgaaattgtatatgataatttaatactcgatgagccgatagatctatctaatatgatggatataacaaatctatttagaacaacattgtgattctagagatatatcggctaagacagaagatcggacctaactaagacagtcctaactaaactgatgcgtctctaaacacaatgcaattagagatagagttcataaatcaggtaggcaaatatatcatccanaccagagcgatccaagagatcgaagcgatgcagccttgaacaacaccaacgtaaccgatagattaccatggcagcggacgtatga

SEQ ID NO: 27116 - DNA, 260 bp, Oryza sativa
cgagaattagagtggcacacaagtgaatgagaccctacaagatcttctcacgagtcacggctatcaattttcaccgacaaaaaaattgaaaagcttcaagaggccacttcacatggagataaagagagaagtctgctaccagagcaaagtacaaaccacctcaaagagatcaagttgccacaaaagagctgctacagaagaaagaacagcatccaagttctaacaagagcaccatactgactaagaaggacaaaaccaaa

SEQ ID NO: 27117 - DNA, 202 bp, Oryza sativa
gcagcttcaagcaacagatgctcaacacaagttctcttgttttagcgcctgaagtcaggaggaggtattgttcagtacactctctccctcgctgtgaacatatgctagagcttgagcagatgatgagtagcgtaaagacaagttatgaattctgtccacaaacccgtaagggacaattggcagaaataccagccgaagtggg

SEQ ID NO: 27118 - DNA, 234 bp, Oryza sativa
  unsure (1)..(234): unsure at all n locations
agcttattgaattagcaaggtagaacaatctatattctatctgaaattnttagttaactgtttaataaaaaagttgaccacagttaacctactttctacagttatcttttagccttaatatggacctgagttctcgctgcaggtagtgcaaaaattccctgtaaccaaaagtatgaagtggataccaacaagataagggctcttacgaaaataatttggcaaggaacgatatat

SEQ ID NO: 27119 - DNA, 488 bp, Oryza sativa
  unsure (1)..(488): unsure at all n locations
catgcctatatganatnctggattacagattcatgtactctctctctctttacactgcgactcagggtacatcagaggacgcctggtgtgcaataacatatattactaaccttcaagagaaatatatcatcacactgtatacaaggatagaatatcttggcatctgccaactcatccgaatcatttcgacccataatctgacaacatctgtgaaccaaaaatatatactcacttgcaagttataaaattgcagctacacttcacgctttggaagagaataagccattagacgaacatattcaatccaaatgtggttacctcattattcattcgacattatctttacacgcaatgtccattacaagaggccaatattcattcgcacgattatggagttcttatgaagaccacaagaatctcacaccatcaagaatcataccagctgctctacacatctaatcatgtaccgtcaacagtctggatttttt

SEQ ID NO: 27120 - DNA, 239 bp, Oryza sativa
  unsure (1)..(239): unsure at all n locations
agcttgagagtactagagatagagagagaatagataacccagganaatagttgcatgtatgagaagagaatagagaacaaaccgagagagagggattggttacacggcatgcacgtatgcacggaagaaagaaaaggcaacccatgcaaaagaataatcgggggcccgatgactagtatcatccgacctcaactcctctgtcctctactacgcatctctttctctcagggaaaaaaaaa

SEQ ID NO: 27121 - DNA, 415 bp, Oryza sativa
  unsure (1)..(415): unsure at all n locations
catctactgttgggagtgaacactaatcaatagtacataaatgctgcacattataatcatgcctatgattcgtggtggtaatctcccattaatcatattacattctggtcaatgatgccataggtgaagaatacgttgagtttctcgagaacgaactcaagattgatgactcaagtgccgcggaagacgatgcaaatgatccatacacacagtctggaggcaaaaacaagcaagatggtaatactaatactaatacatcgacaagtagctctgatgatagcgtatctgagatagcggttgctatggagaatctgaagaaagagctcatggtcctcgggcacgaagtggccagccagcggcgggacgccgngcttgttatacacttctcgtcttcacccatctcccggtgcatgct

SEQ ID NO: 27122 - DNA, 306 bp, Oryza sativa
  unsure (1)..(306): unsure at all n locations
agcttatatgtcttatcattcggcttttctttactgtggtttttactaaatgataaatgtagacattatactantttggatcatactatgagctttactcatagatttaaaatagtcaataatatatattatgggtctctccttattcttcccactgggttttcgaagagttttacgtgatgtattaactataattatttctaagattatctctacagatatctggaacagtgaaagagcaatgatcaaagctggattcgatcaacggggagtgttatgaaacaacacggtgaatctatccatata

SEQ ID NO: 27123 - DNA, 374 bp, Oryza sativa
  unsure (1)..(374): unsure at all n locations
ttccgagatgttgattgcgcagctcatctcgcaccccttgatgcactgtggtgataatgggtcaactgcccatgggttctttcacaaccctatctatccctcatatatatttagttcaaaataaatataaatttatcccaccccattttatacccatcaatattttgtacgctaaaatgttgggcactctagcatgcctaaatgcacccgatgccaccatggacgagtccttctgaaagttcaagtgccattaatntggttctgacgattaatgacgaatccaattacatgagactaacattgctataagcatttctttatctactattctcatatggatatgaaagtggaatatgcgagaagtgattcctgga

SEQ ID NO: 27124 - DNA, 295 bp, Oryza sativa
agcttcaccattggcaatttctcttttcttttcgtgtatgagcccattctgcattcctggaccgagatcaacaagggttgtgtcatggtcacctctcatgctgtcataaacaaaaggctgttctgcatcgactggaagaaccagcggtcactcgcgatcttcaacccttcaacagctcatggcagaagatgccggtgccgattaccggtagctcaaccactctgttcagccttgggtgcttgatgggaaactgctgctgttatcccataagaagagcctgcgtatcatactctga

SEQ ID NO: 27125 - DNA, 328 bp, Oryza sativa
  unsure (1)..(328): unsure at all n locations
tcaccttcctagaatccttacacattgcagaagccatgtttattcagtcacttccagaattgccatcttccttacgggctctacagatctttgggtgtcaggagagcaaatgccatgactggcacaagattgcacatttcccagatctgcggattgagcaagattctgcatcacagtgttcatatacatgggttaagggcccctttgatttgtaggaaaagtngtggaaatntgaagggatttaatcctatggaaaaaattcctatgataacctttgaaacacaggattgaatcctatactatccttntaaattcctatggaatgact

SEQ ID NO: 27126 - DNA, 195 bp, Oryza sativa
gaaggacagtcgcgggatcttttttggcctatcaacgaccggtgtacatctaatcttgatacgaaatgctcctcatttgtagggatcggatgagatcaagcaccatgttatgtacacgaatatactctgtgtaatcgctaacattatctcatgctgatggacatacccgtgtcatgacccataatgtatccctct

SEQ ID NO: 27127 - DNA, 241 bp, Oryza sativa
ccttatgcatgcccactggccgctgcaactgtgaagtgttattcgattcttattatgtgatgaataattggcacttcctccgttgtaaaatatttgacaccgttaactttataatacgtgtttgactattctatcctatttaaacaattcttaacaattattttaattcttttcttatcactttgattcatttggtaaattatacctctcattgtacacactattagttttacattatttc

SEQ ID NO: 27128 - DNA, 370 bp, Oryza sativa
tcacgtgacacttgaatactaagcttgccaggaatggccggagttctgaagctgctgctcgttcttgttcttctggtctcgtcatcggacggctcggatgcgtcgatgcatctgaaatgagattccatcgaactgtcatgagcatccgcatgctaggctgttatgatgagagccgtgatggtgaacaaggctaatgctgggcactctggctgcacctacgacccctacaccaccattggacggcgctgcctgccatgataaagctagcccatacactgcttatagcaattttgcattgattattactttgtctcgtaactattggatcgaaataatttgattcattatgtgctcatcactaaaaatacaa

SEQ ID NO: 27129 - DNA, 449 bp, Oryza sativa
catctgttcgttgtcctaccaatctaccatctattaactatagctagagtatcaagctagcttctagcggtagatctagttaaaagtacaaagcacactgtatacaagaaagtgagaaagaaacataactgattaactagctgttttagtccctaccaatagaccgtcatgtctaatctatcaaaagatcatttcatgggcacggtattcagctagacaggatgcatcttatcctcgcccatgcatttcaccatactccccatctcttaccccagaatgaagacgagagactattaactccaaaaaccatgttgctgagcccatgcatgacacaatctgacatgttcatttcagagatctgtacagccagcacgagcagacaaagaggaatgtatcatttaatatggtggctagttgatgccaaggaggaagaacactgtacacatgca

SEQ ID NO: 27130 - DNA, 216 bp, Oryza sativa
tcacatgtgctgccacaccttactagtcactatattggtctattcatggtcactacatttatcagttggcggtctgccagtaatagtgggaacttaggtaaatgtgtgaacgttatgtccgcatgcttctatacagataggtgattgaatctttgacccacacttcgaaacgttcgtatgccaatggctcctctagaatatggcctgatcccagat

SEQ ID NO: 27131 - DNA, 218 bp, Oryza sativa
ccaaaccatactgtgccaagaagcccacgggttctccccgacaccaccccggcgaatccacatgtctcttgacataaaagctcccctgataagcctagtactcaaccaggggtgtcccattcacccaagtggaccgacacgtcttatgtttggatgaaatacccaggaatcaggccctaagagcaacaacggaaaaaaccgaacacccagtacgttcc

SEQ ID NO: 27132 - DNA, 430 bp, Oryza sativa
tactcagacttgtcaaggaagcctaattaactcggcgtactatctactctttctccagctcgtacgtacgtacgctcgtgtgctgattttaccatccaaacctgcgtactttcgttgcgcccatcggcccatgccatgctttgcttcagtcgtctaaaagtctgaaacttgtatacacacacacacacaccattcgtacgtattgcaatcggcatatacaaattgatcgcagtgtgctgctaatgtacatgcatgtggaattgtagatctatcctacatggcttatatatatgtacagatgtactgatccaccatctctatttaaatgtattttgatgatacagatcgaagaagtgagccatgagtattgctagctggctggaagccagcacagcgcaaaagctcagtactattactttggtcatgcaca

SEQ ID NO: 27133 - DNA, 408 bp, Oryza sativa
cggaccttaaaactcagctgtgcactatattagatggaagcgggaaaggtttattatggaaaatggatggtgattcacttttgtattgccctcctcattataccttattttaaaatgacctcctttccatctcctctttttttcatcatgcccaataatacactgtgtcattctcttttgggcattgttttcatatttattaaccgccggccccattggccttggtccatagaggagagacccttttttccaagagttctatttattggaagaaaatgggggatgctgaattctaatatataagattatcgtatgatacgtggatggaataccttgcaaattctctattgtacaaggagagcaatatatttagagaataattcacaagatttgacatgaaatatgaaa

SEQ ID NO: 27134 - DNA, 224 bp, Oryza sativa
gtcactgcatttctattgcactatcattattaccgcccaacatgttgcatgatctaagttaccttattccgctgcaatgcacggacttcattgctagttgtctttagaaacacaacggcatatacgcatggtgttcttctcaccccaactcctcgacgggatggctatgagggttatgagtcgccaattattggtctgtttaacttgactgacgcaatttggct

SEQ ID NO: 27135 - DNA, 393 bp, Oryza sativa
tgtagagcggtcgatcgagctgagcatgaggcttatagttttacggatgatgcacatattgcacatttgcatggatagagagaagcccttttatgaccagtgccctcatggaaattttatcagtggttgggagtggattggaggacccactgaaggaaatggaaaggcaaacagaagccttcttgcagtgtaacatcccatctaataaacagtcctacttgcacctacaaaattcgcgtgtattgtactattgtaatactaccgtttgtagtttaagcttgttatactacaaagggtactaggagtaattaccaatggataagattgattatatagttaagtgtggatgacgacaagtgagaatactgcttacacattagcaagccaccatca

SEQ ID NO: 27136 - DNA, 404 bp, Oryza sativa
ataatgaattatgtcgcctatttatcgaatttgaccaaaggtcactgcaattatatttcattattattattcttgcccaacagtatgcatgattaaaattaccctaatgcgttgcaatgcacagacgtcattgctagtataatttaaaaaatcaacggcataaacgaagggtgttcttctcaccctaactcctcgacgggatggcgatgaggattatgttggcgccaattattggatcgtgttcgacttgactgacgctaattgtggcttatgtggaagtctacggtaagactcttccttatatatgtttcatgcacggcacatgtgttatcaattatcacgtatcacatcccgtacctcattatcttcaacattgtcacgccagatgaataaatgttcttatg

SEQ ID NO: 27137 - DNA, 447 bp, Oryza sativa
  unsure (1)..(447): unsure at all n locations
gtacacccatactctgtctaattcagtcacatagatgtgctattgtacaaaagcttttggtgcaaacatcactgcaaagctggtgagaggaagcaaataatttccaaataccaaatattaaagcaaggaaaggaaataaacatatttatctgacatataaacaggaaagtggttcttactactctcttactctctatatctggtaactggcaagggcttaccgttgcatcacttgttgtcacttgtctctcgaattggacagttgctgagtcaagcttatatgttctaacccgatcatttggcatgattaatcttctactatgtttgttatgggttgcatagggggtaaacaccgctgggaggatagctgagcggcacggctgctatggatgagagagggacttgngtactgtttatgtttntgttgttttctgtggacatgcctgc

SEQ ID NO: 27138 - DNA, 396 bp, Oryza sativa
ttttgagagaaaagaagattctacttctaccgatatgcccttatgcacggccatacataacatagaaatcacacgtggaaggtgtgggcaattagctagagcagcaggtgctgtatcgaaactgattgcaaaagaaggtaaatcggccactttaagattaccatctggggaggtccgtttggtatcccaaaattgcttggcaacagtcggatggagggaggaggagggcatcggcaacgcggatttaccgtcgccgcctgataatggtcaccgccaccgtcgcctgcatccctctcaatccccttctcttgtctcagtgacctaatttctgagccaggggcacattggtcacaacacagccgattgtgtgcgttaatccggcgaagatggagaatc

SEQ ID NO: 27139 - DNA, 447 bp, Oryza sativa
  unsure (1)..(447): unsure at all n locations
tgcttgtcatatgctacaatactcacatgcatgggttctttctttttgttatccataactgactcggccagcacatgcgcacaggccaatgtggctattccatctgtgatgattgatcttttttatagaacagcgattagacattaatgaatgtcgcttggccagatggcagggacacgatgtgatacgacatccagatactgctgttattgttgttttctaccgcaggaagacagcaatacatgcgcgagacactcgatcttttgccgaatgcttcatggacacgtggcgtaaaactgaatggggtaaaacgaaccaatcatcttgcagcggaaaccgccagcttcagataatactagtaatcttgtacgcgcaaagcacgtttngacactatatattagtatacgaagaagaactatgcaatcattttatgcatgcactccgatt

SEQ ID NO: 27140 - DNA, 423 bp, Oryza sativa
ggaccttaaatctaagctatcgcgtcaaattcggtcgtggcaaaggtttccttccactgctccatggtcatttgaagaaaataaaaatatttgggggtgtgttttttgccggaatgaccgcaaggaggtcattctatgtaattaagataggaagaaaatatttcaagaaaagttgtacatcgacaactgactgtctaggaaagatgtgcaccacatcacacgccccgaaccaagtgccaaccgtccatacacacactatttacaggatagccaagcaccgaaccggccatcgctatgcgataccgattgccacctggccaacaacaccactacgatacgaatactcataaacgacgccctcacgaatgtcgcgatgccgtatacgccgtcgtcatccgtccaaagaactggactaagttttcg

SEQ ID NO: 27141 - DNA, 454 bp, Oryza sativa
ctaagctgtgttatgttgcgttctgatgcaagaagggaaggtggttgcctatgcatctcgtcagttacgtccgcatgataagaactaccctactcatgatcttgagttatctgcagtggtacatgcgttgaagatctggcgtcattatcttttcggtactcgcatagaggtgtacaaggatcacaagaatttgaagtatatctttacccagccggatctaaacatgagacaacggagatggttggaactgattaaggattatgacatgggaattcattatcaccccagaaaggctaatgttgtagcagatgctctcagcatgaaaggctactgcaatgctactgaatgacgacagttgccatgggaattatgcaaggaatttgaatgattgaatctgggaattgcaatagaggtttctgtgcagccttataagcgaagcccactctcattgacc

SEQ ID NO: 27142 - DNA, 456 bp, Oryza sativa
  unsure (1)..(456): unsure at all n locations
tagctggggaccaacatgatggatgggagttgggtgacgtgaatactcgctgtcgccgatactgaaacccgctactgcggcgccaccgtgcgtcgtcgacttggctaattgcaacatccacaagaagcaacctgtcacaacaagtactacaagtctctacctgatgagcccggctaggtgcaccgctgcatctaccttctggtgctccgcgcgcgcggcgagctgctgctgtccagcgtcctacaagctacatgacgccggctgcaccggccacgagcgcccctctcggtgtcggtgcacgtacgctttccattgcgacacagccttgcacgcgctcgatcacgatccggacgacgacgatgcgccgtcgccgatcatgcatgggagagaggagagacgacatgctcggngaccacgttctcttcctggtgtacccgtgcagcttctaactaaacg

SEQ ID NO: 27143 - DNA, 412 bp, Oryza sativa
tatgttcttgcaatttcgtttgagtacacgaatatatggtattgttacaaaggtttgaattttaaacccttttacatcatggagctttatttcatctcctttgagaatcccaatgtagaaggcttttctgaagaggctgaaatcccagttgctcacacaacatggtctgaactgtacatatgtttcaatgggatcgagatctggtgcagattttattacgactgcaactttaacaattgccgtgtagctgatacatcaaaaaccaacggctctgatgggaagaaaatactattcatcgatggtgtataagatggcagacaaattcgactgctgaagttgtagttgtactactacaacaccaggatttaattgctttcaatgtgaggcggtatatactccctccgtttaaaat

SEQ ID NO: 27144 - DNA, 454 bp, Oryza sativa
  unsure (1)..(454): unsure at all n locations
tacgtgacactataaaactaagcttcgaattattactccctccgtacgctggagatgactatttatcttatttaaatatttntaaaatatgaaaatatttatgttatgtttaaagaatattcgatgacaaattaagtcataataaaataaataataattacataaaattgtaatatttatgttatgtttaaagaatatttgatgacaaattaagtcataataaaataaatgataattacataaaatttttaaataagatgaatggtcaaacgttaatcaaaatacagaagtcaacgacgttatacattaaaatacggaagtcaacgatgttatatattaaaatttaatacggagtgatacattaaaatacggagggacaatgttatacattataatttaatacggagtgatacattaaaatacgtgtcggtgacatgggatcgggagtatcatg

SEQ ID NO: 27145 - DNA, 456 bp, Oryza sativa
tgctgctcaatccattgcgttacgtgaccagtcaccaacttattttactttgacaaatacaacttctacaattttttgtacaccatatatatcacaattctattacaccatacatggaacaagatcgttactaaaaacgttcctttctaatctccagctaggtggttatactatatatattttaaatggtggaacatattgtttaaataattgtacaaaaaatagggataaaactaaaagaagttttcatcaagacgacaaccccaacatggaaatcaaatctaaacttatactaacccaccagcaatatcaataattgatgcattcgatccccatatcagctttacactgagtgcactctcgcagacaatccacttgatataacacaacatactctgctattggatcaattgtcgatccactagagtctccataattaccattacagatctcttt

SEQ ID NO: 27146 - DNA, 392 bp, Oryza sativa
accgatcgaggtggttggagtttgatttgtgaacgcctaaaatggcctatgtttatgtgaggatttgatccttctatgtggcatgaggtaaccctgggtcggctggggaaaggctttgttgcgaacctccgataccgacgggtgttcggaataagttcgtatcttgtgggtaaagtgtacccctctgcagaggttaactaactgttcgaacagccgtgcccacggtcatgggcggatgtgaggtggttcccgttgcgtagatttgtttgcctgtgctttgtgaaaagttgttgtggtgtgggaatcgtaaccagaatcagcctatgtggcagatggacgacctgagtggtcagaaacgaatctgtgtgattcgggatgtctgcgggcatcat

SEQ ID NO: 27147 - DNA, 227 bp, Oryza sativa
acccccccacaccccccccccccaccacacacaccccacaccacccaccccaccccccccaaccccccccaaccccccccccacccccacgccccccccccaccccaacaccgcaacccacacaccccccgccccacccccccgcaccccacccccacaccccccaccccccccccccccaccaccccccccccaacgccacccccgccacccccccccaacccccc

SEQ ID NO: 27148 - DNA, 335 bp, Oryza sativa
tttattaattgtcctatcaacgtttcttttaccaatcaccgacggctcgatcgtcctggttttgggtgctctacaaactgagggactgtgttggactttccaaaagattgcttttcagcgtcgctattgtacgatgtatgatggcctccttgtcagatgcatacttacccctatagaattacctgacactggggtctattagaatcttgctttctggactgccaagcctgaattgtctatcgacttctgatgcaacttaagcgtcaagctccccttgcgtgctatcgtagccccagtcctggtattggcggatcaacgttggcttcttagctgcc

SEQ ID NO: 27149 - DNA, 406 bp, Oryza sativa
atgcacaaattgtcaactatgctggaacaaattgtcaactatggacaatcaacgtccatgcactgttactgacaacaaatgataggtgaatctggcaaataattacccactagccaatatctatacaacattcaaacataggcatcaaagtttgttctcttatgatatccataagaccttaactatcaaccaattttgctgcaaccagccaaagaaaacaagaaatggatatggaagtgaatataccaccatgcagaactcgtagtctcagtaattatacacacaactgatttgcttgtcccatccttcactaatattgtcgaacaattaattaggccaagattttcatggcaaatagaagtttctgtattattccataactacacttgatggataacaaattgtt

SEQ ID NO: 27150 - DNA, 450 bp, Oryza sativa
tcgccgcctccggccgccactccagctgtcgtgcgccgtcttctatgccgtctccctcctgcgccgccacctccatctgctccgcaaggtcgatatctaccccgtctaccggttcccctccgccaagtctcgctggaagtcgctgtcaccgtgaatgccgagtttgcctcctctgtttgatctccggccgagcctccttgctgttgcagtcgtcgccggttcaccccgaggccgtcgtctgcatcgcatcaccaagccgaatgccgtacacccctccgttgtcgtcgaatgtcgccgaaacaccgtcgccaccgtggacagtatctcaccgccgtcccgatctcgtcgccggccatcttccgtagctgtccgtcgtcgcgtaagtgttggtaagaatcgctagtgcctcctctatctaccggtgcccttcgtatgcattcgtttgcatta

SEQ ID NO: 27151 - DNA, 462 bp, Oryza sativa
  unsure (1)..(462): unsure at all n locations
tactaagctcactggagatggtgcttgtgtcaagcttggaccttttgttttcatggaaacatgctacgttntggtggttgcttanaggctaaaacttcttactagttgttagctcagtgaggcttgggatcaatctatgtctgtctccttggactgtcttatcagagctggattgttcagatccaaacttcgatgcataatccttgtttgctttgcttgtgtatatgcttcactgcatgttcttactcatttactctatttgttgcacctacttcttgtgagacatgaccctgagtttgccccctcatgggaaccaaaaactatgtaccgatagttctgatcggctacttatatgcctaaatagaacatgcaaactagaaggttaactgtgtaagactagaatctctagtaaattcgatagcgctgccaatatgttagattaatctatgataagtattatat

SEQ ID NO: 27152 - DNA, 458 bp, Oryza sativa
  unsure (1)..(458): unsure at all n locations
taatgctaatctatntgttctgttgcctgttgtcctatgatgcaatgtgagtctaacattctaaaattttgacctgtgtacataaaagcctttcaatttgtcacatggaaatggtattgataaaaagtaagaaaaaaatggttctctatcattgagagttcacgtttttagatttatagctcatgtcttggaagatttatcattgtccaacgtgaaaaataaaaacaaatgcagtaagtattgtttttgtgatgttgctagactttatagctatacctcagaaaccagttgattttttatgtgctttttcatgtggacattatttgcataaaagcttttctccctttctttaatcattgctatttttttttgcagcattcatggtcttatacgtggtgaaaatatggagcttgggcgtgattcatacactggtggtcaggtgcttaaatgcagtctct

SEQ ID NO: 27153 - DNA, 458 bp, Oryza sativa
ctaagcttgatatagtcgtgaaccttaggtatcacgcttgatacatgtgggtgttgtcaaagttcaatagttgcaagtcaaggatgacgtacttgcacataataccgacgagctgtatgatgggctatcgagaagtaccaccaaatcgagtcatccgactccaatgccattgacgcgcatggaatccgatgacactatagtgccctatggcaaggtgactagtacgaacccccgcctttgggcacaatacccatggaggccgcactgtggcgaggtcctccaaaatctaaatctcgtatgacatgaggttgagcttggagagtggaaactaaatccaacacatctcgcttgtcagcgtcttcctcgaccatcataacgatttgtgactttggaggcagtataattaatgaagctcttgagtcttgacgacgaccatcctgaatggatctccacgatac

SEQ ID NO: 27154 - DNA, 421 bp, Oryza sativa
gtgtttttttggcacatcattccttcttcgcagccagatcgttgtgttcatatttaaacatacatgggaaacatctgtgcgagggaaaggatcatgcttgaatcgataggggaaatagaaaggttcatcagtcaccgagttaattccgagtcgatccacgctcgaattttacttggtgagggggcattctggtcgatgatattctgtacaccttatttttattttataaaaaatggggtgcgtttaaatatgaattccgggaataacagtacaatagttaaaataagtgattaattaattatcattaatgatacaatctggtgtaaatgagaatattatatgacacgttgcagtgctgcccaattaatgtacgggcgcgaatatactcacgtgtgttgctatatatatatatatatatata

SEQ ID NO: 27155 - DNA, 201 bp, Oryza sativa
ttttttctcaaatcccatcagaggggggctgtagctgaccccaccacttgtaagctggttagctcaaactcagcacacgcggcctcttccatactaatcgtgctctaaccccatcaattatggccccgtgcctcgaattaggcccaatatgccctaagaaaggttaacctcgaacgtcaatggccccctgaattaacattt

SEQ ID NO: 27156 - DNA, 387 bp, Oryza sativa
taatatacagttctttaaggatatacaagcactcatgatgttcccgaatttcaaattttctccagagttaaagctaaagccaaagagtaagcttgtgcctatgaaaaagtggcagaaagcacaagcaaggaagaggaaaaatgaaaaacgttgagtccagatcacatcataatgtatttctctgcctcatcaaatagtatatgttagtttatctgtagtgctatctcacaatcaatatcttttttgtgatgacacaagtgcttatgaaaagtatttgtcttataattccatatctgttccggtcacaacataataaggttctgaattgtgtgggatatcctaattcaccaaccacagagtctgatgctgattgtttaaactgcaatt

SEQ ID NO: 27157 - DNA, 459 bp, Oryza sativa
tcagcttgttgtatgattgctggacgatactttacgtgtgatgtttctgcacctgtcatactgagcatggtttcttttcaggaggaacaatcctttgaaccccaaggtatgataaaggtagagcgagttgagccaaatgcagcaccatgtggctggagaatatggccattttatttcataaggacaaggtctgttaacactgtacatccagtttctgaaagcactgatgaggcttactcttccgctcctgtttaagaagtggagagagaaaacaacaaacccagggcatagatgatggagagaaaagtgcgttcgctcactccaacatctgatgagctagcatctcttgatctctgagagggcatgaacgtggtaacatgtaccttctcaactggaatgcttggaaaacagcaggtaagtttcattttcacattgtttaactaattgacatagagttct

SEQ ID NO: 27158 - DNA, 252 bp, Oryza sativa
  unsure (1)..(252): unsure at all n locations
aagtacgaattacctccaaactatcgcggtcgaccgaattacccccctaaaccataaaactggatattcttcacctccaactatacaaaccagacgaattacctccgtctacccaatccgcggttgttntggtctacgtggcatacacgtggcagtccagtcagcactctatatattaaaaagaatatgggacccacctgttatactcagtactatccatggtttacagaaccgtacagttaccacgcgcgg

SEQ ID NO: 27159 - DNA, 454 bp, Oryza sativa
tttattcatcaacacataccaatgaacatgcctttaaggtgtttgttgaatatttatcactctaaaacctctcattgtttgcattcagtattgaaaaagatatatttgtgcatccaatttgtgcacgctgcaatatcaatttaatgaaagtaaatgacagaactaaccgttctcagtatgcaaataatgagggggagaagccgatctctgagaatgaagctttcttcctcatatatgtttacctacggtataccaatgaacatgccgaaaattagagaaaatgtgatgaaaacctttacttatagtaccacagtactgtaagcatggaacaccaaatggaagaaataacataaacggtgtattaatgcaatctgatgaatatattaaacgcgtcaaacatttacgaaataactacatattctgctaaactgtgtttgtacagagcaattcactc

SEQ ID NO: 27160 - DNA, 460 bp, Oryza sativa
  unsure (1)..(460): unsure at all n locations
taccatctcaagcacgtggatcataccttcaatctggacttgttttgtataaacgcaagtaatcaatcgagaagccttcgcatcgaagattgaagcactcagtagtcagtataggttatgaatcaacggagaatactgcaactcgattatcaaggtctcatgggctactgtggaggacaagactgcaactctattatcaaggtctcacgggctactgtggagaatatggatactatgtactcatacaacctccatattcgattagagataagtgataggccacatccatgtattatatagagtatgactcggttgcaatgttaccatgtgttctatggcatgacctagagtaccgagtgaggattatcatataatagattagcaaactaataccaaatccgattacgttnttcgattctctntgtaaccctatccgctacctatataatgtggataggga

SEQ ID NO: 27161 - DNA, 392 bp, Oryza sativa
ctttagctcgtactcgtagctcgtagctcgggaatttatgttccccacctccacgttccttcctcccgatcctcctctcctcgctcacatcacatcacatgccggcccggctcgccattgatcacctctcgtgttgactgataagcgtttgtactgtgtggtggttggtgattgggtgttgtgccggtcatcttctccctcgccggcgagcgcttatatagtcgtccctgcttctgctgctgtcgtgtgagcgagcgatcttggtgaggttttctcttggcgatggggaaggcggagaggtggctgatgagcttcttggcggtgaagaatgatgggggtgggaggagatcaggggagaggcagcagcacggctgcggcgacgcgacgccggc

SEQ ID NO: 27162 - DNA, 448 bp, Oryza sativa
  unsure (1)..(448): unsure at all n locations
ttatatctttttgttctgatatcctactatattctcattctgttgtatatattaccttggcttgcatatttcaatttgctactttataccctaacttctatgctatatgatacaaactccatttttaagggagttttcaattacaagcatgaaaggaggttatcggcgggtgttccaacggcctattgattttgagtggtatgccttatcccattgactnttcacttcattagatgaccaatatcatcaccttttctttcgtataaattctagccctgttccactaaaaaatgctttggtgtgactgtagggaactcatgacttatacagatgacacagcatctttagcagaaactggattggatgttctgtccagaaacaaacctacaaaagccattgaagtaaatgagactatatctagcgcgatttcaaatgctcaatcacatga

SEQ ID NO: 27163 - DNA, 449 bp, Oryza sativa
  unsure (1)..(449): unsure at all n locations
tatgaacgataaacacctgaatgttccatcacagttttctttccatctttattgagtacatcatgcttgatggagttaattaaggatcangagcagcatgcccaccagcttggtaaattacttgaaacgtttaaattaagcggcatgagaaactttctgttctttctgcttcatttcatactgattatcttattaatgattctcttagatgggtggaaaaccttcatgatcatctttgcggtttacttaacctggatgttcaatcgtttgatattctaatttctgcccacttgtattatgatttatgacccatggtctctctgatgcgtcacggagtattagtttggagaatgttgtattatatactaaaattctattaaacttgctacaaacgcttctaagccgtcacatgacgctgttacatacgctctcaaatcgtcacctgacac

SEQ ID NO: 27164 - DNA, 451 bp, Oryza sativa
  unsure (1)..(451): unsure at all n locations
tcttttctggccagtggtgtcatgggcctgtgctcatatatttattgcaacctgtaacatatatgttgcttcttgctgtgctttaatatatttgtgccctttcatttggtaagatgcttctgtgttgtgttcatgctatgtctttctagatacaatattgctaatgtgatggtcaatggttatatgattggaaaacaataatgcaaccttatggcttatgtagaaaaagataggggaatcctttttttgagggctgaggtgaatgagatggttttgtctatctgtttggttaaaagaatgggatgacccggatcctggaggcccaatatggtagtatttgcttggggggattagatgggacatgaactagataatactagctctaactgactatgctagagaaaaaaatngganaagtatgtactatagtgatttagttatcattaattaa

SEQ ID NO: 27165 - DNA, 372 bp, Oryza sativa
  unsure (1)..(372): unsure at all n locations
tgccgntcgccttgtgaacgaccaccgggttcgcctttctctccggatggatgacctcacggatgaatccggcctccagaagtcgcgccacctcctcgcggatgaaggcttgacgttccggggcctgccgccgcactttctgccggaccggccttgcgcccggccgcacggcaagactgtgctcaatcaaccccctgtggaccccgggcatatccgccggtctccatgagaagacgtcagcgtttgcccgcaggaaggagacgagcgcgtcttcctatttgccgtccagaagaccaccgatccgtgtggtgttggacgggccgtcgcccatggaaacctccttgaccgggacctcagcgcctgtgatcatcc

SEQ ID NO: 27166 - DNA, 365 bp, Oryza sativa
ctatccagcgcctcaaatgccgtggtggccacagtgtctgcggagtccatcgcgagctccgccatgcgtccccaccacgtggtggcgtgcgccatgatctacgggttggatgatcacatgatcgcgaggtcgtcccgcgggatgagcgaggagagcgatgtcaccgccgcgaggcggatcgactcggcggtggaggagagcgcggcggcgatgtcggcgtgggccgatgagaggagcgacgggaggaggtggtaaaggagctaggggaacgatgcgatggacgatgcggcgacgtccgggtccggtaaggataggtctgatgcgatggacgagagcatcagcgggtctaggatgtcggtgggcat

SEQ ID NO: 27167 - DNA, 52 bp, Oryza sativa
cccaccgcaatgtatgaaaaaaaaaaaaaaagaatgtctccccaccaaaaaa

SEQ ID NO: 27168 - DNA, 343 bp, Oryza sativa
ttgtgacatctgcgaatgcatgttgaacacaaatcttggttcatggaattctactgcgtggattatgagacaacaatgggctatctgctgcatctactatgaggtgaacgggagttgttgttgttgctgctgcagatcatagaggaccatgggttgctgatgctatctgacaagaaatgggccaaaaactgatgttgcttgatgccttgatgtagattgacgatgccacatcggcggctctcgaacggctggaagaacgaacccctcgacgagcatcgtggatgaacaccacgacagcgtggctgcgttggtggagaaatgggaacgggcgcggctccgctac

SEQ ID NO: 27169 - DNA, 386 bp, Oryza sativa
agtcgacacacaagcttagcttcaagtgacaaatctggtgtcggtggcccttattgaaccgagttatccacaatccatccaaactgatgcattgcgaccaaccatatcgttctttccagcttctctgtgtaaagccacggtatattctctgtactacaacattaaacaaccaacttgggtttgatatatcatattaccgtatagcagttaacttttggctttaacacctgtgcaaagcacaaatgaagattcttcaaactccaattaacaacaaagattcctcagctcaatgacttgattttctcttctaacaaccaagaatccggtttaccaacaattatgccgtgcttcattatactcagtcatggatgagccaaaattttatc

SEQ ID NO: 27170 - DNA, 465 bp, Oryza sativa
  unsure (1)..(465): unsure at all n locations
tttgttcctgcttttgatgctactatactgcgttgtgatctcctggtcgcaacagctggcattcaaggatgtattagtaagggtatgtatgctgcagcttctttcaaaatcagaaactcattcaaacaatctagctcttgatttaaattttaagaagccatagttgtagaatctaggaaataaactagaagtcacaagctaaaaaacctagttttgtttattcttagaagcttagctaccaacaagcttaaataggcctaaaacaaggtgcggnttgaagttggacttattctggtgacctggtcagcaaatgtgcttataaggtgccttgttaagctgattaaaaagtgacgcttttgttcgtgcattgatatttctccatgattgtctctgtgacctgaacacgacaccttgctgcacgatgcttccaacggcagatacgtacgcacactcgttgggatgggt

SEQ ID NO: 27171 - DNA, 459 bp, Oryza sativa
atagtgtccagagctatgcattcttataggtgtgctatcttattcataaagcatgaacagtacataagtgtctagattgagtatatgttacatttccttaactttaaaaatgagttttatgggtcaagtcatcccaactatataaggatggattgtctctcttttcactaaacgatatagatgaattaatctagcatccgcgaacgttcttcatccttgttccacagtctcctcaagctaaaagatctatcaccttcaactttgcttatctaagtgaactaaggttcatcacatgtattgtcacatatggtgtttctagcatacacaactatttcaagctgtattggtgacgatgactcgcactaaagcatcttaccttatcttgtctgaaggagtgaattggcgcttaaatgcaaaggatagtgaatcggatggtaaagagacgcttggaataaatga

SEQ ID NO: 27172 - DNA, 461 bp, Oryza sativa
  unsure (1)..(461): unsure at all n locations
taacaactcgcaaccaaccgttgaatccaccaattggtctattctatgagagggaagtggtctttggggcacgccttgttgagatcggtgaagtcgacgcacatcctccacttcctgttggctntgcgtactattactggatttacgagtcactctggatggaggacttctcttatgaagccagctttgagaagtttgtctagttcttttcgtatggcttgtttttggtcgggtgcgaatctccgcagtttctgcttaactggcttggcatcgggtcgcaacatcagtttgtgctcaatcacctccctggtactcccggcatgtctaacggttgccaagcgaacacgtctgcattgtctcggaggaaggtgatgagcacgagttcctatttgtcgtccaacgatgccccaatcttgacagttntgtcggtgttggagctagacagtgggatgatcttgatg

SEQ ID NO: 27173 - DNA, 415 bp, Oryza sativa
tccgtgagagccaagtagagtagtatagcgctcgagccgttcttgatccccatctccttaccttgtcatcttccatgacgtcaccttcacttcgcttcgcctctgcttgcgtgccaagtctaagacgagccttataaatagggggccaatcctctcaaactagcttaattaccagctaaagcaaaccaagagacgaggtatatatctcgacgacgagacgaagcaaagcatgcaaggtgtgatctgatccaagtttttggagaatggcgtccatgatgggaggagacttcgtggaggcgtacgtgctcaagaacgcctacaatgagaagctcatgcgcatggatgccgctgatgcggctgcggcggcggcggtggccgggaagaatgacgtcgccgccgccgccgatggctctgc

SEQ ID NO: 27174 - DNA, 454 bp, Oryza sativa
gttaataagttgtaccgtgaacgacaacaaattacggtgtgctactataatcaattgaagactatcacaatttataaaccatataacacagtcaggaggagagaactattaagtaacttatgtctatggtgtggtagaaacatagccaacaatgatgtctcctatgattgaacaaacatactgttagaaatatggtcataattcaacatattttaatccagaataaagataataaacatgacatgtggaaaccgaaatgatccagtgatagtgctaaacatgaaaatactagtaacaatagtagcatcatctagtaacatgtctaacactaaggtgattagagtaatatacccagagaacgctcctgaggatgatacattgttgttgctgttgcctacgttggtgtagttgttctcgcctcctccagtaccgctgccgacatgtccaccgttga

SEQ ID NO: 27175 - DNA, 299 bp, Oryza sativa
  unsure (1)..(299): unsure at all n locations
ttcgttgctgctcntgatgctaccatactgctttgtgatcttctgtgtgcaacagcttgcattcgaggatgtgtctgtcagggtatgtttgctgcagcttgtttcgaaatcataatctcattcaaacgatctatcgcttgacttatattttaagaacccatggttagttaatccttgatatgaactgcaagtctcatgctataaaacccagatatggatattcttataaacttatgtaccatcaagcttaaattggcctagaacaaggtgcgggacgaaggtggacttatcctggagac

SEQ ID NO: 27176 - DNA, 59 bp, Oryza sativa
  unsure (1)..(59): unsure at all n locations
cccccccccccagccaccaatacnntcgtaanaaaaaaaaaaaaaaaacaaggatgtct

SEQ ID NO: 27177 - DNA, 416 bp, Oryza sativa
  unsure (1)..(416): unsure at all n locations
taagctaaattataagaggctatattgtactttattgtgttctataataagggagagagtacagtagaggaagtcggaggaattccggagctgtcggtaatcctcttcttatttcttttactatgttaattactctgctttaatccaaatactattctgagtaattaagatttattttgtgagacttatctcttggttagttcctaatcaacgtacgagatcattgataactataatccagtaaaatatagtggttgctctagttttagctaacgctaaagtagtttttaactgcgtagacgtggtgtctgggtagttaatttctggtggttgcttcatattctacagtangtttgaggtgggtgtagaggtggtgacatccctcaattacactaaagtccttcctgtccgggtac

SEQ ID NO: 27178 - DNA, 421 bp, Oryza sativa
tgggagaagcaagaaggaagatgatgggagagtcttttctatgtcgtgaacaagaagaagaacatgaaggagaaggagaagaagaagcattgcatgcagtggttaattcaagaactcataaaagttcttgatggatctgaagatgaagatgagggcaaaggtaatcaagttgttgatctaggttttatttctcgtaatgctagttctgatgttgataaatctgatgatgataatgaagaaaagcttatgtatgataaattagaacttgctacttaaaaatttgctaaaaaacttcaaacatgttctattgagcttgatgagaaagatcacactgttgagactctaaatgatgaaattgctagattaaaatctctgattactgatgatgataattgtcaatcttgcgaagctttattttctg

SEQ ID NO: 27179 - DNA, 402 bp, Oryza sativa
ctgcaaccattcatgcaagactgagcagagcttaagctctcaggctactgctcctaaggccgaatacgatgacgatcgcccggacctactgccggctggtggaaacgggaagctgaagccactgaaacattcggtgcttctgcagttcggaaagcatatatctcttcccaatgtggaatatctgaaggaaatacgactggttctctggagcaaatattaaggagtgcggacactcttagaaacgcgtgattcaaaataactccgagcatgacatgcgacaattcgatgtcgtaattgctgttttatggcagatcgcctggattcactgcacaacttgcgtcaactgcacgtgaggaacgaaaagacttaccattcacatgccattcacaatcatgtccggaa

SEQ ID NO: 27180 - DNA, 418 bp, Oryza sativa
ctttaataccagccatgtatttcaatttaaatggtggagtgagtactgctttttttcaaaggggtcttcaatggtacaatttacctcaacatggaacaaaaaattcatcaactggtttaaagagaaggtaatatttatataattacatatatggaataaaccggttcaaatatgaatatttggtgatggtatttttttaatcttttttccctgtagatatatcagcagcactagcatgataagagtgaggtcatggaagaccttttgtcattgtcgcgtggtccagtgaagaatataacatgctctactagatatgacatgaatgggttcaaatatcgcacagaaagacgggacagccgcaggtgtacacaaaacagtggtgtgatggttcttggtgatgatgtggaatattatggag

SEQ ID NO: 27181 - DNA, 445 bp, Oryza sativa
  unsure (1)..(445): unsure at all n locations
tgtgttatccttcacaatatgagaggtgaagatgataatgactcaattaaggatgtcctggatttgaatgaaaatacaagtgcgacgatagtgatcccaccatatgtgtgtgcaaatgatgaccctaatccaagctttgcagaggcacttcgtagaaattcggctatcaaagctcgaccaacacatatgcaacttaagaaggatctaatcgagcacatatggcaacgctacggaaacaaagaaaattagacaaaaagcggcgtgactatatataatataattattatatatatggctgctaaaaattattgtaatcgcgtttctattatttaatcttcatatttattctatcaattagccacacaatggtgcgtacaaatacatgtatagttgatctaagctacatgcanagcattaaacagcttacagatggcccctctgtttg

SEQ ID NO: 27182 - DNA, 429 bp, Oryza sativa
tcggtgctcatcaaactcatccaagagacccacgctcaccccaacttctaaaacatcaagcaacagttcaacacgggtactgaagccaagaacacgaggggaaaaaagatcactgccaggtaaaatcttagcaaatttcggactccgaaacgccttaaaattcgagaagagaacgaagcgcggtgctacttgaccaagacgtatggaagacgagcggattgcatcaggaacagcaaaaataataagaacacaccaaaacagaactgaaaaaattaaaaaaaaatcagagaagagacgaattcatggcgtctaacttctcgcgcacgcactggtcgcgccaggaactgtcaacatcaacatgctccgatgggagagaggcgaacggagtcggagaccaccatgaagttccgttgctcgtcaaccttctca

SEQ ID NO: 27183 - DNA, 419 bp, Oryza sativa
cggtggctcgtttgtgggtgcgacctatttacaaaatgaaggtcatgttattgcgattctattcctctactttcctcggttagtggacatcggagtaacgccggcggcgagtccgagcggaaaacgttttcgggtggtggtgcatgtcgtgctatagacttgatctacccaaagagatgcatgcatgtatgttttatatgctgcaggattctcaccgagatgctagacaaggttggcgaatcttggtcgtccgtaatatctcgcgaacaggtccggcggcggcaaactccttcgggttgacggcgacagctcaaactactccaagatctagcgtgcatgtgtgtccatgaggttattgaggtcccacggatagtgtatacgcgaataatcggacaatggctcaccggagaagatggatt

SEQ ID NO: 27184 - DNA, 467 bp, Oryza sativa
gtgattcccgaagatttggccgatgtcctaactccagttgtttatctctagcaacatcagttcaagctggaaaaagccaagctaagactagccgaacgccgtgagcgctaagaaattgtagccacaatccaggctaatcggcagctcgtgcatgaagaaaaaaccaaacttgatcagctatccgaatgtccgatcaaatctaatattgatcagctcgaagctcgcaagattgagctcttggcacaacttgaagaatgcaatgccgaattatatctggagcacaagaaactagccgatctcccgcggtctgtcgaagagtaaaaagcatgactcaaatcggctatcaagaatgttgctgaactgactaagtctttgaagatcattcctggaactgatgctcaagatgctcaagctattgaagaagtcgaacaaattatgcaataagctatttcagctatccagcaata

SEQ ID NO: 27185 - DNA, 51 bp, Oryza sativa
cccccccaccgacgcccagactttaaaaaaaaaagaaggagagtgtctccc

SEQ ID NO: 27186 - DNA, 460 bp, Oryza sativa
  unsure (1)..(460): unsure at all n locations
acttcatcagcggngcgactacactccacaggcaatctctttgtttgtntcgactaaaccaacctcattatgacagctccaactaggaagatcttcagctctggtgtgggggaaaagagagcaaggctgaatactatccactgtactcatcaagtcataccagaagatgatgtatgatgcaggatatatccaaatgaggctaaaggttcatttgcataaagcatgcatttaaaaacagtatttgaaagcagtaaaacaattgtagtaattaattaatattaaccaatcattgtccaacgctacaccacgctgtatcaggcccaaccaaccacttatactacaccagttcattaagctaaactatgggtgagactaatcacggtgaatctggttggtcacccataacacgtggcacggctattcgaatagttttactctggccagacgtgtacaactgtac

SEQ ID NO: 27187 - DNA, 446 bp, Oryza sativa
tccttgacgcttactccggctaccactaaatagcatggtttttatgacgagaagaagacaacattcatcacgccgttcggtgtattctgctatgttaaaatgccgtttggactgataaccgcatgaaataccttccagcgtacgatccatggggcacttagcgatcagctgggtaacaatgttgatgcctacgtcgatgacattgttgtcaagaccaagacaggtgactcattcattgatgatctacgggaaaccttcgataacctcagacgatatcgcctcatgctcaatcctaataagtgcacgttcggggtaccgttatgcaaactgctcgggttcctcgtctctggcagatgaatagaagcaaaccccgagaagatcaatgcaatcgagaacatgaagtcgcccacatgactcaatgaggtacagaagctaaccagatgcat

SEQ ID NO: 27188 - DNA, 395 bp, Oryza sativa
attcagttgccgtttaccgctgatcacttcttttttactgattctctaattccgctgataacttacgtttgtactgattctctaacttcacacaaaggagcagacatgcatgatatgtgctactgcttagttgacggtttcacacctagacgacgtaacatatccaaacgtgtcccttgtaattaagcttgtcgcaagcaaggtcactctcaattagatcatcaatacatagacagatcgcaaaacaatcagtaagcagtagtagtagtgtactacgggctacaaggtgcgtgaaacaacagtaccacacagatgtccacagcttggttactccagtgtttggtgatccctctacaccgaaccgagaattgaccatcgtcatcgcatctttaaca

SEQ ID NO: 27189 - DNA, 388 bp, Oryza sativa
tgccgaggtcgctactacataaacgagatgaattctctgttacttaagtcatatttagattgcatacgatacgtaaatagtcgcgtctgctaacaaatcatgttccattgtcacgcgcggctcttttagactactgcacgaaaaaaattaattttaacattcatgccactttatatgtccgcacgcgaaaatatatgctatgtggcccgtacacgataataaccacccaccttttaatctcgcgtgtcgtatccgccccacaccgactctctgattccatcaccctctcagatcaccccacacccactctctactaccataatcctattctgacccacaacccactgctacctctccctatccgactgctccttccactcctattata

SEQ ID NO: 27190 - DNA, 447 bp, Oryza sativa
  unsure (1)..(447): unsure at all n locations
tcaattngaagcgtctgatcttggtgataaggatgtcatgttgttgttgacactcgattatgatggtaacctaaggctatatagcttaaacgcaacgaatggttaatggtcagtctcttggctggcattccctcgactctgtgagatacatggtctgtgtggcataaacagcttctgcacatacatgccaagccttcagtgttcctgcctcgaaggtttcgagatgactgaacctagttactggagccaagggtgcaggcacatggaaaacatcacagtcaaaggggatcataacgcatacaacaatacagagcaaaaattcatattcgtggagatccccaagactgacttctatgggtatgacttcaactacaccccatctgtcgcattgccagtctgcatacagatttgcttgaacgatgatggctgcgaagactttgcatatcg

SEQ ID NO: 27191 - DNA, 438 bp, Oryza sativa
  unsure (1)..(438): unsure at all n locations
tattgctataacggcacgagaagaaccttcctctgaggtaacccaaacttactgattgctttagctttcacagctatttacccagtatatatgtcagcgccaatgaagttgacgctgaagtctcctgacgtggcgattttgtgccaccttggacaatatcttaacaccataaaccttggcgctgagacgttatatctcagcgccaaacgccaaacccggtggcgctgaggtcgcggcttatttttggaatagtttntgacacggtctattcttataataagtttgttaaaagggtcaatgtgtcaaatttttggtccaggacgtggtggtgtcaaaggataaatctcactggtgtcatccattatagaacatcatagatacttgcgttaaacaagaatccattggtgccaggtgacaccacacctaacacgaagaata

SEQ ID NO: 27192 - DNA, 375 bp, Oryza sativa
tcggcgtcgaaacaaccagcctcatctctgcacgttccattattcttgatatagcccaaacccatgttggtctgtgcatgatccaatatgcccactcatctgcagcatacgtatacggaatcatacggcaaaaagacccgcataacgtatatgcacctccatgcagatatacagcacacgcacagtcttgtgaagcagaccatcatgcatgaatcttccaagccatcaatctgctgctgctgctctccagataatagcatcatacctgcacttataaaacaaaaccaaactcctaaagaatatattcaaatcatctaactactcattaaaaataatttggccatttgaactacctaatcgggcaaattacattat

SEQ ID NO: 27193 - DNA, 452 bp, Oryza sativa
tgtgtcatgggaaactgttgagtccaggcttatgattgttcttcaacgggcagtagaaagagatgaatatgttagcacaaagcatataatgaagcaacttttatctcgggcaaagagccaaatcagagctatgcctcagcaggtcaatggggatgcaagagagcagaccagcggtcaagagaagtccctatgggtgtgacaacggagccaagtaagctacggcaggtgggtcatgttgccgagttgaaccatggggatgatggacttgtaacacaggaagctagagcagctgatcaatcttcaaggtagcagtatccgaagattgtatgcacatactgtgggcaaccctttgcttaatagcaaatgttgtcgtacaggcagcttcacagtttctgtcgctgtcgatgaatagatctgtagttcgtgacactgcagcaaatacatgtcacaaa

SEQ ID NO: 27194 - DNA, 383 bp, Oryza sativa
  unsure (1)..(383): unsure at all n locations
tgtgtaatttatcatggataatggtgccatgctctcttctgtactacanagggttgttcaatggtacaatgtatctgatcatggttcacacaactcttcaggtggcctaaggagaatgtaatattcatctaattgcctatatgtgactaaccgttccaaacatgactattgcgcgaggctataatggtaatgtctgcttcctgcacatacttgagcatgactacctcgatctgagtgaggtcatggaataccctctgtcattgtgcgactgctcgattgaacaaatatcatgctttactggacatgacctcattgggctcagatatcggacagatatacggtacagactgtggtgtgcacaatacagtggcgtgatggatcac

SEQ ID NO: 27195 - DNA, 447 bp, Oryza sativa
cggtactattgaaaagtacaaggctcggcttgttgtttatggctacactcagaaagaaggcgaagatttctttgacacttactcacctgttgctagattgaccacaatttgtgtgctactttccttatcagcctcacatggtcttctcgttcatcaaatggacattaagacaacttttcttaatggagagctggatgagatctatatggatcaacctgatgggtttgtagttgaaggtcaagaaggcaaagtgtgcaagttgatgaagtctttgtatggtctgaaacaagctcctaagcaatagcatgagaaatttgacaaaacattgacatctgcaggctttgcagtcaatgaggtagataaatgtgtgtactatcgccatggtgggggtgagggagttattctgtgcttgtatgttgatgacatactaatatttgggacaaacct

SEQ ID NO: 27196 - DNA, 434 bp, Oryza sativa
cccggactccatgtcacatgcgtttcatcttgttttgtcttgaaatgcttctaagttacaataatttttggcgcgtgcctatctgtacttttccttatgaggttgatgagatttataatagcacgtacgtgtaggagcagtaaatctatctagcaatgtaccattgagcaagcttgtcgtgcatacctttgtctaataattaaggaaaattgcaaaatatcacaccaaatatatatcatccttagtttatgattcgcctatatacataagacgatttaagccagcagtgcacaccgccggcgaactcctatggtctgtcgttgcattcaagtccggcgagcggcaaaagctggaggatgccggtttcaccatcgtcggtaacatcggtgaccagtggagcgacatcctctgtgcgccggatggcgcccgcacct

SEQ ID NO: 27197 - DNA, 87 bp, Oryza sativa
aaaaaaaaaaagaacaggaattgtctctcacaccaaaaaacaaagaaaaaaaaagcagaggaaaaaacaacaaacaacaacacgggg

SEQ ID NO: 27198 - DNA, 460 bp, Oryza sativa
  unsure (1)..(460): unsure at all n locations
nttcgataacctcgcattggcagtacccgctccatgaactttatccctcatgcactctaagcgtcatatgtttctagcagtgagaggagttctggcgctctcgagaagggaaaaacacacacactcctacgttgcttcttgtcgttgaacccagaccatcatgattgttctcttatgggtatccttatgtagtattgccaagccaacctctgaccatccggaacggtcatccgccatccacctgtccatccgaaccgggcatccgccagcagactgcttgccgcatcacacacctaatagaaaaccactatgcagggatactgcctccgctcatctatctactccgctaggtctatacccatacgagaagtgcggttgtacggtggtcgattcatgcttaacttcatggctcggtccttaactgaccagtgactgcactagccttttcctgacaccaccc

SEQ ID NO: 27199 - DNA, 443 bp, Oryza sativa
tcgagacagtggtacttgaagtgtgatgggacaatatttttttgtgggtttcaagagaatgtcgaggacaactgtatttattcaaagtttaagaatgggagatttattttcctaattctgtatgtggatgacattctactggctagtagtgatgtcagtctactgcatgaaacaaagaaattcttgtccacaaactttgacatgaaagacctcggtgaggcttcatatgttttgggcatatagattcaccgagatagaacaaagtatgcattgggactttctcaaaagacatatatataaaaggtgttgaagaaattcaacatgtacagatgcagtgctacacctgctcctataatgaaaggcgataagtatggggcatcgcaatgtcccataaatcagtatgagctcaatgaaatgaatacaaagccatatgtgtcagctgt

SEQ ID NO: 27200 - DNA, 453 bp, Oryza sativa
  unsure (1)..(453): unsure at all n locations
tgtaatttaaagctgtaaaatataataaaatatagacgatatttcatgtttgtataaggactaaaatgtaataattgctaatggacgatgatgtgtcatctttacatggtgagtgttaggatgtaatgagttgtaactttatagtatagattgagcaacagcataacaatgtacgattggtttttaattgcttagttctcgcctaaatcatagagaaaattaccaatgtccctccaacaatatactcggcccaatccttacgcatccctaccctcaaagtttaatttggatcatttccatacatttcaattagacattagttgactgataaattcctattaaacattctagtttgccttctgcatgaagaatatagggtttattaattgttggagtgtaaaaatttngtatataagaactatatatttatgagtttgtgtgatataatttatg

SEQ ID NO: 27201 - DNA, 393 bp, Oryza sativa
tttggacagaaagtccttgacctcctcaatcacattgatgcttgtcccaaagatcaatatgtcatcgacatataaacacaagatcactccctctaccccaccatagcgattgtacacaatttgtcagcttcgttcacaacaaagccagcagatgtaagtgtattgtcaaactctcatgccattgcttatgcgcttgtttgagaccatacaaggacttcaacagcttacacaccattcccttctgaccttctagtacatacccatctggttgatccatatagatctcctcctccaactctccattgaggaaagctgtcttaacatccatctgatggccgagtagaccatgagaggctgccagagcgagtagtactcgaatcatggtcaagcgag

SEQ ID NO: 27202 - DNA, 406 bp, Oryza sativa
  unsure (1)..(406): unsure at all n locations
tgcnatagagatgattgcaatgtggcaacacctattattgcttatgaagttctgcatacatgaaacgatagcacacatcttcttctacgatgggtagtgtagcgtccacaccacacgctggaatattggccgacgatagacagtcgacggtggctgtacatcagcgggatggcgtatgtatcaaccgcgcgtggctcgtccttaaagatcgagcgtgaactatctgaccatacgccgccatgtcctggtgagagcgcatcgcggtggacattttgcttcaactcactatcgtcccgtgcaacgcggcaacatgatccgattgatcatgacagtccctctcgctggctgcggtgaccagcaatcaagctaagctgaattacactggggagtagttcatacttcctga

SEQ ID NO: 27203 - DNA, 450 bp, Oryza sativa
  unsure (1)..(450): unsure at all n locations
tacgtcgacgacatcgtcggataaagccgcattgttttctaccatgcgatcgacctgcatgagacgttcgacagcttgcgcgcggtangcataaagctgaatccggagaagtgccgtttcggtgtccgcgcacgcaagttgttgggtttccttgtttctgaaaggggcatcgaggcgaatcccgagaaaatcgatgccatccagcaaatgaagcctccgtctagcgtacatgaagtacaaaagcttgcatgccgaattgcggcactcaatcgattcctctcaaaggcggccgaaagaggtttgcccttcttcaataccctccggggagcgggaaaggttaattggatactagagtgccaagcatcattcgacgagctaaagaaatacttgcacagcccgccagctctgataatcccaccaccaggaagcgaactgctttatacttacatc

SEQ ID NO: 27204 - DNA, 448 bp, Oryza sativa
  unsure (1)..(448): unsure at all n locations
ngcaacatgcaatgtgtggagtcgacaatgtgtgctagtttatctacttgagtagcttgcaatcgtgggaatggccggagcgaataaatgatgttttcattgactatagttgcaacattttgacagatctgaaccgtaaaagtgattgaaatttatgagtaattttaaatcaggtcagataacactccataaaagaacagaggttacacacaacacatgagtgtgaaccaagatttgtttggaaacgaaaaatgataaaaagtggtgttgactgcccacattgcgtgaaacagtctatttaatttgtgacttcattgtacatgcatagactcacctcttacagcttatagtacataacaaatttatttaaaaatacattatattaacatacatggtaatactatacggcacttcatganaattcttatctatattacatctgacaaat

SEQ ID NO: 27205 - DNA, 396 bp, Oryza sativa
tgtgcaatctgcgtaatactctagatattaccgttctgttttgttgaagatagacatgcactatctaatcatggtgtcttttgtgaccattattcacttatttaccctgcctttttcttttccaacttctacatcggccttgtaaagcagtaatctacataaaaccggaaaaaagagagcactgttttatactttgatgaaacactgtacatcatgaataaccaagcactataaagtactccaagaagcaaccaaaaatttcaaaagtccggaggaaagaagcgagaaatatattggttggcgcagttgcgtcgctttcattcaccgtggtggccctcgcgcgcacgatacagatgggggccttatcgccgtcgtaatcacgggagcaggtttctc

SEQ ID NO: 27206 - DNA, 492 bp, Oryza sativa
atcttgcatcacttgacacttagaatactaagcttgctctcataaagcatggagttccctgcaaaagaagatgatgtagtttcacacattattgtttgtgcaaacctgcaagggaaagcaaatgctgtccaaaagcaaacagaccgattttgttgacctgacctgtgataacataacaaccagtatacactcataactatcaataaacataggacatccaaatatgtgagcaatgaaactagttattacatctatgtcttgtgatttatcagaagtgctttatcttcttatgaatggttaggaaagcaccctgcttgcagcattaacaccagtgttgcaacaaagtgacttcctctaaaaaatcagttggatgcatgagccacatactggacggcatcaacttccatgatgtgtaaagccccacgtgcaccatatcaccaatcagtaaactattatactgtgctatatactcggcaatcaatggatctataa

SEQ ID NO: 27207 - DNA, 442 bp, Oryza sativa
  unsure (1)..(442): unsure at all n locations
tctgtctggaccattttagacaagttgatacatcaatgatatatttctttctcaatattttgtggttcaggaatttgatattttgtgctagctcaattgtatggacatggatcacttaaatgtttgtccctttttagtgaccagaaacttttgcttgataatgtagaattcctttgcccacatgcatgctgttgccatcctaaggtttatccaaaacaacactgccatgttctcggggtaatttttttccaagttgctgcctgttagagtctaccatgggaatcaacggatcattgtgttctcgtatctgatcatatctgtctgaaggcaatgtgaacagatatgtgaaacaaactgaatgctctggcatgtctgctttttacacttangagcttagacaacagcttatgctgcagttctgaagatatctggtatatccaca

SEQ ID NO: 27208 - DNA, 437 bp, Oryza sativa
  unsure (1)..(437): unsure at all n locations
tctcggggttttggtctctgcccgaggcattgatgccatctccctatattatacgagctattgagcggatccgccctcccagcaaacttatggacgtgcagtgcgtcactggttgcatggccgccctaagtcgtttcatatcaaggctgggagagaaggcgctacccttgtttaagctcctcaagcgctcggngccgtttacttggacggaggaagctgaacatgccctcactcaattaaaggcatatctcatctctcccccggttctagtcgccccggagccaaatgagcccctgctactttatttatcagcgaccccccatgtagttagcgcagcgttggttgtggagcgcgatgatgacaatcctcattctgcgcacccccactctgtgccgacttggaccgggagcatgcagggatgataggcccccgagtcg

SEQ ID NO: 27209 - DNA, 458 bp, Oryza sativa
tcttgatggaattccgagattgcttcgcttggacatacaatgagatgccgggacttgactctcgtgtcgccacccataagctggcgattgatccccaatttctcccagtgaatcatccaccatggcgcttaaggccatagttccaagaccaagtcatcgccgaagtcgatcgactcatcaacgtgggttttatcaaggagatacaatatcctcggtggttagccaacatcgtccctgtggaaaagaagaatggacaagttcgagtctgcgtatactttcgcgacttgaatcgtgcttgtcctaaagacgactttcccctaccaatcacggagatggtggtcgattcaacaacgggttatggcgcactgtcatgttataaccagatcaagatggatctccttgatgccttcgacacggcgtttagaacccctaaagggaacttctactacactgtcatg

SEQ ID NO: 27210 - DNA, 408 bp, Oryza sativa
atactcaagctttattgctctccattatcaatcttatcttttttctgtcatgcacacaatgattatttcactatttgatcaagtcaaaggatagctgagcagaaatatgattaccttttgaagatccacttatctcaaaattggcgtcttggagttctgcaactcggtccctgagagcatgttctatctttttggcttcctcctaagtttcataaagcttaactctggttgcttctagagttccgagatgatgaaccagtttctcgagggttgcggtttttgcctcattccgaagaacttattcttcatcgccaatcattgtgcctttatatatatgcgaaagcaatgaaacaacggaggaagattatctatacacaaatgtactacgaagattattacactgtatga

SEQ ID NO: 27211 - DNA, 420 bp, Oryza sativa
gtacttttgaataacaggttccaaaagaaataaaatcaagttataaaatcatcatgctaaatttattttattgcagcaggattaaataaaacaacattgtaaaacttttgctggaaaatgagccattagtacagtaatagatgtacagtactaataacactggaataaattttgaatgagaaccattaaaaaagattataaagtacatgtgccattagtttggtttaattaaaagagaaagggaggagaacagttctacttttccaatatttttagagggcttctatgggtaaccatttggcataacctaatgtcaatgggctctgataccaacttgtcacgcccggaatttctatccaaaattccaaacgcttacatgtgtgtgaaccctcgtccaggaatcagccgaggcacacaatt

SEQ ID NO: 27212 - DNA, 482 bp, Oryza sativa
  unsure (1)..(482): unsure at all n locations
tacggacacttataaactaagcttacacacacttcgctggctgctgctgctgggtttggctttgttctgatcactgnattcagaggccattagtgcaatccactcgtatccatgggttgaatccatggttacaatccattttggaccataaagaattgttaccacatccaaaccaacccacaccgtttttcaatgaatccaaaccgctccagtccattctgagtattgccccatttgaatccaaccaaagccagtccatttataaatccaacccattccacccatttacatccagtccattagcaggcttatttagatggattagtggaatagatggatcagtcttgcatttcacccatactatgtggggcataaagtactgagctactggtaacagtgcacctaactcccattaactaacctatctaccaagagtcaattganatttccctggtaaattagctcctttgcaatgatatgct

SEQ ID NO: 27213 - DNA, 446 bp, Oryza sativa
taatgaagctcatgacaacctgctttgcactactcttcatgaagctctcattgatgttggcatatcctgtgatttgcttgatgatagtgctacttgccatattgctcatgttgcatcatctaacatttctacctcttgtgatgatcttgtggatatgtctagctctagatctagctcttgtgtttctatttgtgatgtctcacttgttgttgagaacaatgagcttaaggagcaagtggctaagctcaacaagagcttggagaggtgcttcaagggtaagaacactcttgacaagattttgagtgagcaatggtgcatccttaacaaggagggacttggattcattccaaagaagggtaagaaaccttctcactgtgccactcgttttgtcaagagcaatggtaagtattgctccaagtgtcgtgagggtgggcatttggtgaatg

SEQ ID NO: 27214 - DNA, 321 bp, Oryza sativa
ccgtactagtgatgggctcggcaatcctttgtatgttgttgataaagaatgcgaacagacatgcacttttagagtgtctattattaatcattggtttcatggaggaacacacatatataatacacacgcatggtagttgtgccctatttaacacaccaccaatacatatcagatgctgccacaagcctatagcagctaatacgtgagcccgagacattgttcaacttatattagatacgataaagataagtgaaacgttggaagatacatcacgttgtaacaagttgaagcggagactcttgatcataaaatgcctatgct

SEQ ID NO: 27215 - DNA, 383 bp, Oryza sativa
tactatgcttcttgatggacgaactgatgagcgcgtgttatgatttcttcttacaaccactccagatgatacgtgtattcagcaatctgaatgacagcgagctattccgggccaaagggtacgggaatgattatgtgaggagcaatgaccatatcctggactggtctgattggatctaccatatagtggatcctgattacgagacgaatctctcactctggccaatacatccgaattatttgatgtgaccaacaaatcattctgtttgaaccatcccgcatactgagaaataatattgttatattgacgagagaagaaaaggagtaaatatctgaaattgacgagactttcggtctagaacaatatagaatttgaacaatttt

SEQ ID NO: 27216 - DNA, 428 bp, Oryza sativa
ctcccgacgtggctgatccccacgggctttgttatcctggatagtaatgtcgggcgggtaaagtgtacccccctctgcatatgttaacaaactgttcgaacagccgtgcccacggtcatgggcggatgtgaggtgattcctatcgtagtttggtttgactactgcttgtgaaattgttgtgtgaaactgggttcgatgtttgaaaaatcagcagctgacgggatcatctaagcccgggtggccgtttgaaaagttgttggcccatgtggccgtttgaaatagttgttggcccgggtggccgtttgaaaatctgttggccgggtgccaaccctgtttcaagatctaaagactgatacattgcacatactccgacctgacgagacgcactgtctcatccgtgtcgtttgagatgcactcacttatacttt

SEQ ID NO: 27217 - DNA, 233 bp, Oryza sativa
tgagtacttatcttgcatacttagacatgaccttcagcagtcacaccttgactaagtgtgatatcgcacatcgatgtgctatgtgctatcatggaacattagatcctgtttgacgcatattgcacttcgactatcacaaattatatcaaggttctacgtaactccacaatgctgagtgtataaacctatatgccaaatatctcctttacaagcttcagaaatatcgacatact

SEQ ID NO: 27218 - DNA, 416 bp, Oryza sativa
  unsure (1)..(416): unsure at all n locations
agcttncttggagagagggtnttctatgatatgtatctattaattgtcaaagaattcagattagatgattgatgtctgtttaaattctttctttgatttgcaaaagtagtaagtctactcttcttccccctctcctcagatgtctacaacaggaattgacagaccgcactcagagaccatttggaaagaatagcagcactccccacactctataggttgcgttagctatacgagcgaattggctgtttcgagcatgtagcaatgcgagatagaagattgagcttgcatgcaatagctataggttagtgaaagtaggcacgagtggagggcactagtagccttatcacgtcaggtagcttgctatccgaacaactacgatatacgccgcttcgctacaactacgcctattggcttac

SEQ ID NO: 27219 - DNA, 303 bp, Oryza sativa
gcagagcgctgtgagatgtctttatatagtgagatttagccccagctggtatcaccaaccgtgactaatgaccgtccgaaggctcgacatgacactgggctattgaaccgggactgtgccatctgggactatagaacataaagtgccgctgggctcttgaaccgctactactcctatactttagtcccaggttctacttaaaccgggtctaatgacagtattgcatgatctaccaaagatcacttctccagtcgagtaattattggtcggcttaactactgacagaaagtcggaacttctctg

SEQ ID NO: 27220 - DNA, 436 bp, Oryza sativa
  unsure (1)..(436): unsure at all n locations
gcttgagggtcagtgggcgccctccgatgtttcttgtganaacctgaaggagatggtggcgcacggcgttcttctggcaaaggagatcatcgggtggcgtctagcgtgcggtgaaacatttccgacccccgacacacacgaggtggtggtgttttcccatttcttttatggcggattttctcttccaacctcaagtttcttccgggggaatttggatttctatgggatccagttgcatcacctaaaccccaattccatagtccacatcaccgaatttatccacgcttgcgaggctttcctgggtgtaagaccgcattttgccctgttctgtcgcatcttttttctcaagccccagccaaacaagagcataccatgtgctgntggnggagccggttttcaactaaggtgaaccttgagccaaaagtacttttccatg

SEQ ID NO: 27221 - DNA, 446 bp, Oryza sativa
actcagcttatacatctctcaggtttagtatagtttctagagtacagtgtaatataaattgtatagaatcttcagtcctcggagtcttcagaagaattcgggtatggctctagtagcttttccttcttttgtaagacttgtactttatttagaatattcttcttaatactactctggtattgtattactttccgagtatatgaataccaactttactatatatccgagttatatttattatgatgctagcttatctgggaaatgcaatggtgtgggtataatgagcgtgtatacgatgactctatgtcatgacgatgatattagagtagtatttggtaatttaagcgtggtgttatattaccggatatcattatttggcgttatatgctgcggaagcgatgtgggccgctaatggtgacagctcagtatgggtatttctccgcgcg

SEQ ID NO: 27222 - DNA, 368 bp, Oryza sativa
agcttcgtcgaccgattgcgccatcgccactgtgcaccaagccccgtggctagatgtgccagccgctcctgccatcacccctctaagcgcagctgcgcgtctgtgcctgcccctgcccgctcccggcatcagccaactgcgcccatcccgctctcgccgttggccaccagtgcccatcctgctactgctattggccatactgcctatcttgatcccgttggccgtgccacctgcgcccggccggcagttatctttcttttttttacaagcttttgcagctaagaacaataacaaagcaatctctgaatgtgtgtctactgcttctggatggattactgctcacatcgctgcattgctctgctcgggtg

SEQ ID NO: 27223 - DNA, 430 bp, Oryza sativa
taaagccatgaatcccttctatgcatgtctggatctggattctgctgttcaaacatataggatgagtagtatctgatataaatacaatattcgaggaaaattcaagtattttaaaatatttataaatatgtatttctcctcttgtcaattttgatttccccgagcagatgactccttacgtttaaacactctgcccaactagtcatagcccccaagcactgggagccggcctatgcacgtcctaaacatgcatatgagtgacatgagttcgttattaatggaacaaagtttcacagataggagtttactactaaggtacttttgcaattattaagagtagaaatataaattatcttatctctgtgcttttgatttggtgcgaattatacttagcaccttgcgttactcggtccatacaacgagcccccgg

SEQ ID NO: 27224 - DNA, 417 bp, Oryza sativa
actgattcataatcctatacaagtcgcttccatttggtacctttgttccattcacagaaagaattatgtcccctaggataaacctaccctatgaaatcccgcttggatcgattggagaaccccagcataccaacaagatgtataagttttaagtgcaccagtcattttcaaagcaagcagctagtcttctattacacgaacatgttcaaagaacaaacagtgtctgcaataaaaaggatgtgttctatcaatcacataaggttagcctttatgctaaatgaattatcactgctatgtctgttcagctgtccttagtcctagtgacgaatggaaacacacgagaggacatcaatcaacatagcatatgatgtatggagtataactcggtgttctccagaaactcaaatgcacgtattg

SEQ ID NO: 27225 - DNA, 235 bp, Oryza sativa
ttagcctgagtagttatctcgcacactgagacatcgccgttcgcaggcacacctcgaacaaagtgatatcgcacatcaacgtgccaagtgctactaaggaacataagatgccgtgggacgcatgaagcgcgacgactattacacaatatatcaaggcccgacgcaacctcccaaaactgaaagtttagaccgccataccaaatagctcttttacagcctaagaaaatgcccaact

SEQ ID NO: 27226 - DNA, 369 bp, Oryza sativa
  unsure (1)..(369): unsure at all n locations
gcttacttcggagactctacctttattttaataacccctgcctaagctgagatcaatgcatgtcttatatattgtgaatatgatcngcgtgggtgtttctttcacaagctttccttgggattaaataatatcgataccttggaatactttccggtgaaatgctgaaatgctacaatggtatatccgggcgcttgcngattacttttgtgaccattaatataccaggactatttctgcgccattgcttggtatgaatattattattaatgtcatttaaaaataccaacagttaggtatgcccaagccttttgtgagctgcgtcgacatgatacggcttacgttgcgtcgggcagttcgaggctggaatat

SEQ ID NO: 27227 - DNA, 363 bp, Oryza sativa
tcaagctttgctattatatatgcagtctctgtctctcgcttcagatcagaagaatatatcgcagctggcttggcttcattagaaagacgccgtgcaaccttgcattaaagtcaacaagttccacataagacacaccactccaaatgtcttacggcaatctgaaatatgtcataccataccgcaacagcttggtgtcttccaatctcattcagttctacatccaggtgcccctaatacaggattttggttctatatcagttgaaaggcagtaagaaactattagtgtgataaaataaacttatgaataagacatggctagttaatgcgcaaagacaaggtactgttgtaatcatatcatgaaat

SEQ ID NO: 27228 - DNA, 404 bp, Oryza sativa
  unsure (1)..(404): unsure at all n locations
agcttnctgacgaacatggacgatccaccatcaccaccaccaccagacgaagaacaccaaccaaagaatccacggacagacgaaccaacactccggcaacaacttctctcgcagttgccaacctcttgttcaggaatcangacggaacaggctcgaggaaaccaagaacgaaaccgaccaacacagggtccgtgagagagaggaagaaaacgagaggtggcaatggaagcgtttgtgcctggagagcagtcaaggattatgttggtaggggcttctcttcttctgcttctccctcctaatgctgcacactgtctgagactgagtactcctatttgtgtgagaccacacgaagaggccagcgttatataaaaggaggagatgtcagtttggcaatggcagccaac

SEQ ID NO: 27229 - DNA, 445 bp, Oryza sativa
  unsure (1)..(445): unsure at all n locations
agcttngagcagataatatgaattaatggtacgctggagnttagtgtcacaattgctctagttgactcgacacggtaataggtatcctcgcacaaggtgttctcaagtggttgacaagaaattgatcccaatctcagagattcctcccgcattatttgcccacttgcgagaaacttctctgcattagtttgagcttccacatcccccctgatgcagaaacgtgtataatgcacagtaataaaatgcaaaataggtcaagtaacgatgacaacaaaaggaggttatcgtgtcatctaaaatcagaaagatgacggataaatccacagcaagtgcctacaatagtcataggatctgaccaggtccaccatccaagagaattttggcagttccatactaaaanattcaacaattatttcagntgaaacttattaccaggatgatacac

SEQ ID NO: 27230 - DNA, 346 bp, Oryza sativa
  unsure (1)..(346): unsure at all n locations
agcttctgagatatcaaaatatttcgtgtacacccaaccattagtttcttngctttccttccaaggtcttatgctaagtatatttgaagaaatgtagtctacatgatcatttacatgtattgtatacatctttacacaagagtgagggaagtgctgttcccactccatgggctccaagaatgggtatgaacatcgaaaagtatgttttgagggaccaggtttgttcattctccgcataattatagattgacctctcttgtctatgtaaatgctaattactgtgagttctttgtcagcaagtaaatacattgtcggtagtgtgattaatcataattaacaaatatct

SEQ ID NO: 27231 - DNA, 392 bp, Oryza sativa
  unsure (1)..(392): unsure at all n locations
agctatacaaaaatgagtcatcgntaatgtctgcctttgnttgacacaagagtccggttgtaaccgataagagatcaaaacaacctctaatacttgctatgtgaagatttacaaagagttatagtagatcatcacgctctgcctttgtttaacatatatatgtgtccagttttaacaggttagagataaaaaaaaccctaatgaagaacatatcacaatatcaaactcccaaaaagaaaaaaaaactgaagaaaagaaaaagaaagccacccccggacggaaaacgaagatccaaatatagagcacgcccgtataatcagaaggaaaccaaataagataaaaaataggagaattaaacgagcaagatatatcgtcgacgaggcccatcgcgt

SEQ ID NO: 27232 - DNA, 258 bp, Oryza sativa
gagcggtctcaactttgcagcatacctctggacttctcgacagaaactattacacgcggccatgacggggcctttacgccgcctcaacctgatccgaaaacttcctagcttcctcctcagagaacacttctacatgaccgggaggtgcgatatacttaccctttgcttccgtctggaccagatgcagaacatagactactccactgggagacactcctacatctctgcttcatacccacttggtagctctatcttcac

SEQ ID NO: 27233 - DNA, 471 bp, Oryza sativa
  unsure (1)..(471): unsure at all n locations
ggatccttgagtcaccgcggctgcagctagctaagtctttataatattcttctgattattgaaangaattatctactctgtgcttgaaaaaaaatttctcaaaagatttttttctactgcgttgtttattttttttaattttatttataaaaatatttaatttgtccctataatcaagtaaataatccatagcaataataatctgcttgataatctgttataaaagacttgaacctattctttntacattaagattcagattttacctcgattttcgtttgcatgcttttcaactaaacagtgtgtttcatataagaactcaaactactaaacagtgtgtttcatataagaactttctttatagaagttgctttaaaatatcaatatatctatttgtcaggtttgtaataattaaaacttaattgattactccatctgtccaaaaaaaaaatatagaactggatgtgacat

SEQ ID NO: 27234 - DNA, 401 bp, Oryza sativa
aaatctcttcgagtcatgctctgggccatggcccaggtggcctaaggcctagctagttccaccttcttgtcgcacatgacttataaagagtaagattcaccaaactacatgtatggtacacaatttatcagagaaaactacatgtttaagagcttgtttcacaaaactacagatttagtgttttcttgtatcacaaaactacatgtattttatacaatctatcacagaactaaagatttaacaacttcgttcacataactatatatttagtgtattcgcttatcatagaactacacatttagtgtctgcattatcacaaaatatagattagtgtctcattatcacaaactacatgtataaaaatgctaaccttagtttgcgaaatgaaacactaacctgag

SEQ ID NO: 27235 - DNA, 400 bp, Oryza sativa
accaagcccattacgaaaacagaattctcgagaatgcagccgcccttaatgaaagcagtttgagagcaagggatgagggttaatgacatgtgaacaagacggtgtaccataatatttgcatcccacttataaaaactgcgcaccacactaatctgcctgtaattcttgagcacgataagcgattctgaacatgagaatcacatcgttccctgaattaaaggcagccatagggttgctgctgtgccggcggtggtacacgcattggaacacggtggtgtccgtgtagacagtgctgggtacacccacgacgtgctttcatgacgggaggactagatcatggatgtgcttgcctaggggaactcagtctttatcgtactgccacgctgccacgtgttaattg

SEQ ID NO: 27236 - DNA, 441 bp, Oryza sativa
aggaagattcttcacttgtattattggtggagggcctactgtggttgaatttgctgcagagatgcatgattttcttgttgaggatctggtgaagctatatcctgcaattcaagattttgtgaagataacaattattcagtccggtgaacatatattgaacatgtaaggcccttgctactttcaagaaaacgttttagccttctgaagaagaaaatttgctgtagttgtatctgttttctgctaaatattatgactagcgttggggcattggaggttcctttattaggcaagcatttcaaacattatgaatacaacagttccatatctttttaacattgataccatcaggtgtagcatcagcagatgaccttgtcatccttcctgtgtgatcactatgtgttgttcagggttgaccaacggatagctacatctgctgaaatg

SEQ ID NO: 27237 - DNA, 423 bp, Oryza sativa
agctagaaaatctgaaaacaccaagtgctgtctttattttctgaaaagggcttccccctgctcttcatcagctggtagagattgcattcctaaaatcaccacgtaaacagaaaaaacttcaatcacttcagaggtcacagatgccaaatcaaaagcgtctaattaagaaatacaaaccatgtattcaaaaacaaagaataacatatcattctcccttatgaactccttgagtttcacaatgttcggatggttcatccttcgcaaagactgggatgcgcacacaaaaaaaaaatatattaatgaagtataatagatatcatgatcaaacttgactacatgttgcataataaagcaccttcacttcacggagattgatgcactcccgccatgaataatattttttctctcatttcttgattgcaa

SEQ ID NO: 27238 - DNA, 438 bp, Oryza sativa
  unsure (1)..(438): unsure at all n locations
agctntaacccaataatatcctaaacgtgttatatttatgaccagaaggagtaatagggaactcttttttcatcaaatagtgggggacatgtgttttactcctccctcggttataactataaatatttctagaattcaaattttgtatcacaatacaagcatttgtgtgtggattcccatgattctcattacttcaatgattcgaanatcaatccaagtatgaagtatctaagcaattcaaaattcaaaaattggcaaatgaagtaactaaaaaggaatcatttgatctaacctctgctaaataatttagaaatccttatantttggaacggatggagtactagaaaagcattagcatttcttgtagacgatgcatctagcatcttattttcaaattcgcattcatttcattcatcccgtgatgtctttctctattat

SEQ ID NO: 27239 - DNA, 458 bp, Oryza sativa
  unsure (1)..(458): unsure at all n locations
ngcatttgctagtaatattcatatccatatttcatactcttctgtttctactatgcagnactttctccgtcctaaaatgtaagtacttttaaggttggcacggctattaaaaaagtaggtgataatgattgaaaaagatgtgtgattggttgaaaagagaaagtacgtgaaaaagaatggttgtgattggttgagaggagaacgtgggttgaaaaatagctttattttggaataaagtactgtgctagaaatagctacattntaggacggaggtagtattccaattcatcactgcgtgtgtgtttgtgtgttcatcatccacacggacactgcgacacgcagcaaagctgcatagcagagccaatgagccatggcaatgccactgtgacgcatgcattggagaaccggatcgaactagtattgacctaccagcagtatactccctccatactcataaa

SEQ ID NO: 27240 - DNA, 449 bp, Oryza sativa
  unsure (1)..(449): unsure at all n locations
agctnntaaaaaaagaagaaacaaaanaactcttgcgcacgacacatgttggtttctactagtaccctgcatctgattgacaaattgttcatgacttcatgtgtgcatgcacaccacatgcatgcatcaactaattcgacaaataatcatagctataaggtaatcattgtatgtccaagcagctctaactgcatgaggtgttatggagtataagagtataacataagtgacatttcataatttaaaaaaaatgctaactcctattttcaaatggttaaaggggtcatacatgtactagtacaatccatttgacatatttgtctccacatgcatgtgtatgttgttggacggttagaccttaagaaaagctaggtctaagcttccaatccaggttaatgcactagctttacagctagtgtataattagtcaattagtttattaatgtatc

SEQ ID NO: 27241 - DNA, 467 bp, Oryza sativa
  unsure (1)..(467): unsure at all n locations
tgtcgcctggtacgacaacgagtggtgttacaggtgagcctcttgcatttcatactattaaccatgtacaatactccatgcccaatttgctcttactgatctttcttttttgaactattttctgcagcaaccgtgtcatcgacctgatccgccacatggtcaagacccagtagaatccttttgcttgccatggtattccatggccgccgagccggagataccggtatgctttgtctatgctgagaataaaacgtggacggtggtcatcangacccaccccctctgttaatgctagttgggataatgagttgcattntgttttccaatctacctacttgttagttgtaacgatgctgatgatatggacctgagtctanctttttgcttgtgaagaatataagccgtccagtgcaggtgtgaatttgttatgctgcgtgatatatgggcttagtgtttggttcgcgcta

SEQ ID NO: 27242 - DNA, 449 bp, Oryza sativa
agcatgaccactgctactaactatctgctgtcttgagacaacatcacctgtacgggccaagatgcgtaacatctgatcaaatcccacgcccaagagtccaaagtcacaactggaacgctcgaaacaacctaccccactccctagtgcctgtatgatttgttacgctagtaaaacaaaaccaatcaacctgcctaattatactcctatatagcactgttagcacttgttaatatcagatcactgtaatcgaatgaacgcgactggcatcactacattttgttgtcatgcgttgcgtacacactcaaaatactagtgatgccttctgcgccattccaaattgccacctctgctgtgtttagtgattacaacacaaacaaactactaacaatcgtccggcaggtaactctactctctgcaaactgagatgctcacactcacacgcatgcatg

SEQ ID NO: 27243 - DNA, 294 bp, Oryza sativa
tttcatgcagctctgtactagttaacacttccccaacataatcacaaacaaaggctcctttcggcagttcatcacgagtgcgaagaccccaacccttcccttctcctgtgaataatacctggacgttcgaatcgacaggtaatcaaacattcggcattcatataatctcgccactgccactgacaaatatagcatataatccaatacaagtcataggcattaaatattccctgcagactgcatgtgaagccaccatgaaccacacggtgaccacattgcatgctactaccacat

SEQ ID NO: 27244 - DNA, 443 bp, Oryza sativa
  unsure (1)..(443): unsure at all n locations
gcttctatgatcatataattcatcattttatatggaaaatggaagacactatcaaatctacaacactgattcactggcccaaaatgtgtagtgtgttctcattgatctaaaatggtgtaaaatgaaatgggaagaggaaggcagaggagttcatccagatgaaggcaattaagtgaacactgaacagttgtattcccaaaattgattgatgcataacatgtccaatttaacaatacaatacttgtaggttactgaattntctgtttagttgcttagaaatcttgtacagctatggagttacattaaaaagtaactcccaagtcacagttgaactgtcaagcctagtttcctctttagatgagggcgaactagatcttatgttgattccagtccaaaattactcaccttgagaagtgaaaatgtctatttacgatgtttgctta

SEQ ID NO: 27245 - DNA, 388 bp, Oryza sativa
  unsure (1)..(388): unsure at all n locations
tatcttcatgctggaattgataaaatgctttaatttagaagaacaattagtgtataatctgaggagttacaaccactcacacaggtcgacgtaactgtatttcagacaaatgttggctatgcactattgcgttttatcgcactctcgtagtcgatgactattccctggttgtgttgtgtggtcatccatgggttaatgaccatgcttgtcacacactggcgtttttcgcgtgtggacgtgtgcaagccgtgcaaaggttcgtcatgttgcatgcattgagcctcgtatgccaatgacagttgcaccgacacatatcactatatttgtggatatgtctgaatataatggctttattgggaatattaccatctgccngaggcatggatta

SEQ ID NO: 27246 - DNA, 441 bp, Oryza sativa
  unsure (1)..(441): unsure at all n locations
atttntcgaatacatactttgncatatttgttgttcttaaatagatattctggactgatctatcatgctatcgttttcacgagcctgcttctttgaaatttaaggattaacccaggctataccactgaatttcttttataatatcaatatgccactcagcgtgaattgaagatgacaagtgggggctttgggcccatatgttagtgagacaccactgtgattctcccattcttntaaaaaatgaaaatgttttagcatatacgaccaaccaacttgtcatttgaaaattctgtgtgactgtatctctggctacaagacaaaatgtaacccgatggctttatttgttcttaaatgcatgaagtataattcaaccttcacagattatgaagcatcatctaatcctttatggatcaagcctcatgctctcatacaatatgtcat

SEQ ID NO: 27247 - DNA, 414 bp, Oryza sativa
  unsure (1)..(414): unsure at all n locations
agcttgntcctcgacggatgcttctttttatttataagtattcgagatctccttatggtatctaatttatttgcttgagtgagacatattcacatcgttatgggttcctcgcttagttgaattattaagtgctctagtactaagactctggataaagaaggaagttcctaacttcctatgcgaggcttgagtagtaatcaataacttaggcatggtgtctaggttagcggttacattcatttgttgtgtggtccacggaaagtgaggtaggtgctaggtggtgacagctttgtccgtcctttacatccctncatgttcagttacatcatagagtcataggccgaactcagattgacagactaggggagagccagtgcccaagcaatcgatagggtttacccttactccgtctag

SEQ ID NO: 27248 - DNA, 468 bp, Oryza sativa
tgatcatgatccttctccgatgaatacaacgattttctatgataagaatgcgttgattcggccagagcaagccgaatctactaagggaaaaggagaggtcattggcgaaccgaggccaaagatgatagtgccaaagaaaccggaggttggtgtttggaaggaaaataatagtgaagcttcaacttctaaaacccctaggaagaccaaagtgacctttgatatgcttttggggaagtacgaaaaacaaggtggtgagaatgctcgctacaaagggaaaagaccaagatcacctcctatggagcaatatggtcattcaccaataccgtcggaatcacctcaatatatatgttctcaaaacatgtcatggggtccatatccaatgccgccgccgggtatacttatccttactacatgccattgggggcaacaccgtcaatgtcaaacatatgcctgcaatacaattcaatc

SEQ ID NO: 27249 - DNA, 405 bp, Oryza sativa
  unsure (1)..(405): unsure at all n locations
agcttagatgacatgatgatgatactatttattacctcaggcgnggacaacggcttcacatgggtgatggtcatataatccgtctcatgcccaccatatataaacaagtcatatatatataccaggccctctataatatagctaatgatatagtgtagtatatatatgcgaaatataaattatattgaactggcgattacacatctttctctcttatatctgactcgctatacatcatgaataatgctatgtcacaccattgtacatgcatgtcttaataaccatgtgtgaagtgatcaatattggactatctggtgcatcctagacatccattaagttggtgatgatatccctctgatatatatctctatttctctgaagatcaagaaatgatgcatgagtagc

SEQ ID NO: 27250 - DNA, 204 bp, Oryza sativa
  unsure (1)..(204): unsure at all n locations
cggacactgctgaatcctgagcgactgttgcatgcgcccacnactgcgcacgaggtaccatcctgcaccataaagtgtgttgcctagggcgcctgaatggtgaacgaactctcacgaattgcgctacgctgactaccctctatactggcattaaaccagatgcgcgatgtgcaataatggatatttcaacacgaaccacttgca

SEQ ID NO: 27251 - DNA, 443 bp, Oryza sativa
  unsure (1)..(443): unsure at all n locations
agcttaaaacagaggattacgcccctaatggtctaatcaacgacgcacgacgtctcctgttacacacacatatattgtcaccacactaccacatatatccatccaagacatatatagataagcacaaactttcaatggcaaaggttcagtaatcaacttaattcaataatagtagttttgagaaaaaaaaaacgtgagcaaagggctaattacccctacaattaatcaaatgctgcctccatataacaaaatcctatatatctatataggtaaactttctcacctttcaaatggtgtgtctgcgcgttcggaacctatatctctctttttctgcgctcatgttnttcaaaccattaaatagtatattgtttgaanaaaaattatacagaagttactaaaataatcatattgatctctttttaaaaaaattagctaatacttaa

SEQ ID NO: 27252 - DNA, 419 bp, Oryza sativa
  unsure (1)..(419): unsure at all n locations
ctcgatcattactctattggagaggtgtttagttttaagttgtgggnggccaaatgcgatctaaactagattgcgagagaagctttttcaaccatgtccgatttgtcaaggggcagcgcgtcggatgaacctggccgtcggatcgcgatttgaccgctgcatgattagtggagattggtaaatcgttctcatcgttgacggactaacgagtgacgtggacaggatgcggtctggtaaaatagacctggtcacggagtgcgagatgaacatattgctttacttattcttatgttaattcgaatcacttattactccctccgtatcatatacaaaacattttgggtgtttactagccgaaactttttttacatctatagaaaaatgtaggagtactttatacaccaagcaaatatattatt

SEQ ID NO: 27253 - DNA, 454 bp, Oryza sativa
  unsure (1)..(454): unsure at all n locations
agctngtcttttcagagagagtatgaggaattctttgtgagaatcaatgcattggttgctaaagctcagaaagttcccgaggaaggttggacaatgcaagatggaactccctggcctggaaacaatgttcgcgatcaccctggaatgattcaggtatgttcgggtgatttgtgatggtgcacagtatatatgctggcattttgatggatcccctctttcctattcttgaattatgatgataaagaagttaaaactttctcaatgaataggtcttccttggccaaagtggcggccatgacatcgaaggtaatgagctacctcgattggtgtatgtttcaagagaaaaaaggccaggctataaccatcacaagaaggctggtgccatgaacgcattggtaaaagataatttctttgatgttnntttggctttccataacctgtactcctgtattaa

SEQ ID NO: 27254 - DNA, 472 bp, Oryza sativa
  unsure (1)..(472): unsure at all n locations
ngctgaaggaatattatctgattctgcctttacaagggttgtaagattcaaaaacaggactccaccagaaggtagatatgcatttcttcatgaagtaggtctctatcagttggtattgcactatctcatacctgactgattcctctgtccaaaaagctgtaaaaaaagattcctctgccaaacacaaaaaacttactaaacatacaattgaccttccattgtttatgtactctctgagaaccatacatggtaagtacacaacttatgtttattcaaaaaaagagtaagtaatatcaggtaatattagatcacatactacattgtatnntgctattttatcaacgtcagctatggaaagggtaagaaacgcttcttgtcataaaatttgccaaatctaccttaggtgcactacatataggtcattngaaatatagaagatnttctcactgtgttcaggctcagtatgagaagt

SEQ ID NO: 27255 - DNA, 449 bp, Oryza sativa
  unsure (1)..(449): unsure at all n locations
gtcacctgangcatgcaagcttcttcgtaagtcaagatacctcgtttcttttgtcgtatgaacatttatgtctcttgacaaaagactgactctcaacaaaatatatggactacttcccgttttttaaatgtacgacgccgttgatttttcaaaatacatttgaccattcgtcttattaaaaaaaattatgtaattattaattattttattgtgacttgatttatcattaaatgttctttaagcatgctttaagtatttttatatttgcacaaaaattctaaataatataaatgtttaaacgttaataaaaaaaagtcaacggtgttatacaattaaaaaaaggaccccgcanaaaaatacattaaaaaaaggaggttgtacatatgttatctactccctccatttcaggttatcagacattttgactntgatcaaagtcaaactacttt

SEQ ID NO: 27256 - DNA, 459 bp, Oryza sativa
  unsure (1)..(459): unsure at all n locations
ggccctgccgccncgctgccgccatggagctcgcacccgttcagctcgtgccgaactcgccgacgcctnccccacacacgcggccgcggtaggcgacccctccccccgggcatggccggcgacacctcccccgcgcgcgccaagctcaccgacgcctctagcaccaacgaccagcgggaagggagaccgatggatctggccgtcagtgaggcgtgagcgccaccggcacgctagctacgaagacagtgacggcgctccgcaagctctcctctagttccctccgccgcctgccaactgctgccacattcgcccgtcgctgctccgctcgcaccccgccgccgcgcttgccctccaccgttccgcccgccgcccattcgtcaagaaagatatgagggccacgacagcgcggcgtcctgatcttcgagctcgtccgccgctcgcttcgtcccctctaatact

SEQ ID NO: 27257 - DNA, 431 bp, Oryza sativa
  unsure (1)..(431): unsure at all n locations
agcttatcaatctcgcgacagtgataggatatatcttctggacacgaactcgncgcgagatatttatctttggctcccatcatctctattggcttcacatcgacaagtcatcgaattgaaataaatatgcgattcaattgcgctgatatgtccatcaaatttattaatctcattatatgctgaagatctgaaattcaattattctgataaagcatactcctatcaattcaacggcagcatctctcccgtgtcaaactcagataattattctttttctttacaattttctgttgaaggataagaccactatgtactactatataattaatgaacagattatttgccaattatttatctgggtacaaaatatctcttcatttatactactactaccttgatttttttccaatataacaactttttaagacatc

SEQ ID NO: 27258 - DNA, 470 bp, Oryza sativa
ctggatagtggacaagattagaaagagcagaagggaatggttcttgaaaagaattgccttgaaaccgcctacagatcatagctgtaactagtcattcaaatcatcttttttactgaaacatcaaactagaaatgatagcaggaagaactctttgattaaaaaaaggaaactaaactaatgaagctaaagtacagattctttcacggtgaatacataaatattgtaaaatatattcaaagctgaataatgcttttcaagattggaagccatctcatcatgaatagtgacagaagatagatgcatcatttaccaacgctcaacaatcatccaaacttatataaagagacccctatagggtgattcagcacagtcaagtaaaaagatactctagaaacgagaaaaacaaactatctttcacaaatcacatgaagccaagtagcttagaatgcatctcatgttcacacctacaa

SEQ ID NO: 27259 - DNA, 414 bp, Oryza sativa
  unsure (1)..(414): unsure at all n locations
agcttgcaccttatgttcgattaggtaatttattttatggnttatccatggcgatgatgccctcatcatataaaaagaaaaaaaaaagaaaagtccgattcatcaatgacacggagaaaagaagacccaccgtccgtgataaaaaaggtagaattttttttgttcttattaatcactctatataccaatcatgtacgatggataaagcacaaaatcaaatcaaagatctacacggactgagagaacctgagaaaagtcatcctatcaaacagaactacacggagaatctaaaagaatcatcccatcggatagttacacagattgagaaccctagaaaaaaggaacaaaagagaggaaataaatcacacaaatgagcgagtttgccatcggatccggttgttctgagctcgtcac

SEQ ID NO: 27260 - DNA, 432 bp, Oryza sativa
  unsure (1)..(432): unsure at all n locations
tattggcttagacgtttaagtcagcttattagcctatattatttataatccggnggatttaatatcctaagattaatggtggagtcatacatctacctcacataagccaaaaaagcttcttcaacctagcttttggcttaatagtgttagagtggcttatggcttcaaaaaagacaaacgaaaaagccgcttgtttgtttagtcttagacttttcggcttataagttggcttataaacctaaacaaagagggccatagtagaagctctccaaacagacgcttactttcctacgatactcctatcatttactccctcagtctaaacactcaaattctattgataaatatacaggtagaatgtattttatttacagattgaatactagcaaccgaaacgttacactggtcaacgggtcggcgaatattcaccac

SEQ ID NO: 27261 - DNA, 451 bp, Oryza sativa
gacgagctgaacgagcggctggcaagctagcttgggcgctgcttgatttataaacgagctgcgcaagcggcttgagctcggcttgtttatgtttcaagccgagccgagcttttgcgagctcgagccaagcccgagcctgctcacgagcccaagcttttttgtccacccctatataggatagtaggatgaactcttgactgtggaatgctggagatatcatgatctttttcccttttttaccaacgatatttcacaagaacagtccgtgcttaaacaagtggaacattgtctcttagtagtccataatttgacaattacagcataaactggattcattatatctaacacaagatgtagactcaataatccatattgagatttgactgttttgaaaaaaaaatcttatgaagtccccacgttccacagtccaaaaagaacagcgtatctgacg

SEQ ID NO: 27262 - DNA, 367 bp, Oryza sativa
gcaatgcttcggaccatgaagaaggctgtattcgaggacagcgatatggcgcgcatgctgatgctcatgtcttcgcacagtcagcaagagcacgcgctggctctgccggtgcccgtgcaaatgtcgctcgccgcctcgcgcggggaccgcgcccctgagcgcgcgatcgtctgcaagacctgcatccgagtgttccctgtggtccatgcgctcgccgggcaccgtgccgaccacaagaagccgaggctcgacggcgacagcgatctgtacctgtacgaggccaatctccgacgctgttccatctgctgactggagttcttcattgggcgagctctatgctgccacatgatgcgccaccgcgccatga

SEQ ID NO: 27263 - DNA, 445 bp, Oryza sativa
  unsure (1)..(445): unsure at all n locations
agctngagcataatgcatagcctatctctttgctgctcgttgcgtaatactgtttcgccataagagtagagtgaaaacctgcaattgcgtaaatatcagcaaaatattcgtaaacctgcaattactaatgcaggatgtttgaatgtgctatattttccaagtattttgtggtcgatctggctcctaaagaaaataaaaacaagagtatatgtatatgctttcaagtaagtcattcttgactagtaattataaacaggcaaggacatgtgatgatgtgaaatgactacctggctactgcaaactctcaagatatccaatatatgcgaattagataaagattgtttacaactgattgataaaataaatttaagatgggccatgctatttcactttgcttctgcatgtangactagcaaatctaaggcattaaaatcaaaagtaaatc

SEQ ID NO: 27264 - DNA, 429 bp, Oryza sativa
  unsure (1)..(429): unsure at all n locations
gacctatgaaactcagctntacatacacgtgaacgatcacgggagttgttgtccatcggatattgcgacatccctgaggaagcaactctgacaaatgttgagcaggtatagaaattcccagcaaaaatcaataatttccatgtataacatatgttcaacgattttttaacacatatttatcttctgtttcagctattggagcccttggagctatgctacaggtcgctgtgcgcctgtggtgaccgtgccatcgctgatggaagccttcttgatttcttgcgccaagtttccacctttggactctcccttgtgaggcttgacattatgcaagaatccgacagacacaccgatgtccttgatgccatcacgacatacctgngcataggatcttaccgtgagtggtccgaggaacgccgtcaagagtggctg

SEQ ID NO: 27265 - DNA, 400 bp, Oryza sativa
  unsure (1)..(400): unsure at all n locations
agcttggatcaaagtgaagaatgctttcttgtgccaccctcaccgatcaacttagctcgcccaaggatccaacaaagtatccaaagagatcatcccaccgacaacatcttatgagacatcaacaagggagtatccactcgttctcgtattgcaaaattttgtgagcattactcgtttgtgtcttctcttgtacctctaagggtggaagaagcccttaatgattcggattgngtgatggcgatgcaagaggagttgaacaatttcacccggaataaagtgtggattctggtgtagcgacctcggcaaaatgtaattggcacatagtggatcttccgcaacaagcaagacgaggccggggtcgtaataaggaacaatgcgaggttagtggcgcaagggttca

SEQ ID NO: 27266 - DNA, 290 bp, Oryza sativa
gaaagacatctcttcttcagaatggtgtcttcaacaaccacatctttcagaaagcttataagctaatattttctccagccacatctttcagaaagcttataagctaatatgccctctatacatacccatccaaaagatttcagaaaaaaacattgcatcacagatgtgaacttcagataagaaaaaaaggttaaaagcctaaattttcagttaggggctattgtttatacgtggaacatataagaatgatatttatatgccatctgaaaggagcacgatacctggtatct

SEQ ID NO: 27267 - DNA, 462 bp, Oryza sativa
  unsure (1)..(462): unsure at all n locations
tgctgatcccgagntntctgatacatgatgcgatctacgcagtcctctatgtcgcgagccacgtcgcgaagctcttcgatggacagcagcagcacgcttccacggctcaccgtccgcaagagctgctcgccaatggctccggcgatcatgcggagctccttcaacagaaattctgcgtcgcctttgaatcccttgtacagattgtacttctgatctaccagagagagcatcctcgacgcgagtattttcaacaaaccgctcaaaatagctgcctccatctgcgatttctggctactcgacgggcttatcctcctattcgatccccttgtgcatcggnggtgactcgttttttttccttttagtataaaggaagctttcattaatggcaaaacgactatagtaaccactccctataattctatctgtaagttcattcataattttccgtgacaactctgatca

SEQ ID NO: 27268 - DNA, 435 bp, Oryza sativa
  unsure (1)..(435): unsure at all n locations
gcttgtatcgagcttgagcctatgtttatttctctctcgagctcggctcgttgacagccctactccactacctgtcacaagatacagaccagcatctccatgcttatagcaagatctagcaaagccaccaggatcctagttntatgatggattttggctgaatcaatttttttcttttctagttcgattcacctatgagtaatttttatcacttgtgtgtgattgagcctgtaacttttttttattcgtacgaccattttgtgatacatattaacaatattcttagtatcacgtttttactctattgaacacatcagtaaacatattactacatggttgctacgaaatcatgggctatatagagaggaatatggtaattgtttactccagaccatgagtctaagctntactcttatccgcgtctgaacacattat

SEQ ID NO: 27269 - DNA, 316 bp, Oryza sativa
caccctagggaaccgcttgagaattgcagcataccgtgaacgcgcggatcatatagagtgcacaatatgggcattctatgactcgtacaacactttatccaggtctttgtaaacacacaagtcaaatcatgtggacgttgccactattctactccctctgcttataacatttggatggtcaatattgcagccagaccgattaaagaaaaggggtcacagtatttgacaaccacgcataacactgaactattcttatatatttgcatagtaaacatgacaagctgaaacttatacctatgtatgtgcgattactggc

SEQ ID NO: 27270 - DNA, 437 bp, Oryza sativa
agcttaaagttatcatgcgtacttgctttttcatcttcttcaacttattcattgcagagaactgcttgatgcgagatatgacagctggatcaagaggccgatctggagcaactccgtgatcactaatccatggatggcctgagcaagagttgaagtgttacattttctcccggcagttgcaaatgtgtcaagtgattggataggcattagagagaaaaataagaccacgagtacaacatagtaaaagaattttgtcaaagaaaatatagtaaaagaaacatacatagaacttcatgtgctgttaagcgttcctttgggcgaggattgagcattattgttataagatcctttgcgctctcagagatcacaggccaaggatcagaatcaaaatcaatgataccttttagtacagcatcaaatattccttggtgtgtctc

SEQ ID NO: 27271 - DNA, 375 bp, Oryza sativa
  unsure (1)..(375): unsure at all n locations
taatctcanaggtcttttagaatcattgtatgactatattaattgaacggagtagtcccaaatgcatcctggaccaggntgtttatctacctttatcattttcgcaatgatgatccaaaatatgagctattnttaatatatcagatcatgtttatccgggtttcaggacgaagcctgcgagtacccacgaagaaatctgtaactagctgaagaaaaacaataataccagtacaacgcataanagaagaagcaaaccaagaacaactcanaaatcagaatgcatgcatgatgcatcgtccaggagttatagggacaactaacattggtatctgaagatatcatacatatattcagacacccctgaacatgcatgga

SEQ ID NO: 27272 - DNA, 381 bp, Oryza sativa
actaagtgagtgcctttgaaaccacaccgatgatgcaaggcgtctcgtccggtccgaagatgtgcaaagtgtcatcctttaaattttggaacaacgtggcacccagccataagcttttttaacggccacgcgggccaacacctttcagacggacacccgggccaacaactattaaacggacacccgagcctagctgatcccatcagctgcaaggttccaaacatggaacccagtttctctacagctatttccaagccgttgcccacagactaccctaggaatatctctcatcgcccatgaccggggcacagatgtccaacagttcgttaacctcgcagagggggtcactttaccacatgacatatctacccggatatcctg

SEQ ID NO: 27273 - DNA, 451 bp, Oryza sativa
  unsure (1)..(451): unsure at all n locations
agctnganaattcanatgttggtttataatctttttcattgtcgaggagtgatcctctctagcgggagatcgtgagatccccttttgtgagttcggccgggggaaggactcgcctgtagagatcgcgtatccgccctgagtgttgctaatcgcgtgtgggcgagaggattatacaggttcgggccgctatggagcgtaataccctactcttgtgtgtgggattaaggttgagagttacagggttcctgaactccggagagcgttcccgcttctcttcccctagagctcaggtctgctgagagtcgtcccctttctcggtgggcaaggtcctccttttatagctcaaggggataccacatgcactgcctctacgtactcttctatagggtggggacccaccctaccttcaccggatctcgatccgtgccttcgcccggaagctaagccgcag

SEQ ID NO: 27274 - DNA, 455 bp, Oryza sativa
  unsure (1)..(455): unsure at all n locations
tgacgatttcagcanacatcacaggttcagcacgacgattatcatgaagcttatatgtctgcaaatgcacatagcaattattttttttgaaaggaaatgcacatagcaaataaaacatgatgaaacgatgatgattaacgcaaacttcttccaagaggtattgctcatacaacatcatcccaacatagcatcctaatggaaattcatatccaagtcactaaaatcatgtgatagttatcatgccagcaattaattaaccgcgacagtatgaataaataagaagatgtagtttggttgatatggagttatagacttcaagcttgacgatttcagtaaaatttcttggcgtctcaatacaagattacaccgtgcacacctgtgaattaagttgcggcgttccgcatcgacttccaagctaacgctctgcccttcactgaacccggaattgatccatc

SEQ ID NO: 27275 - DNA, 451 bp, Oryza sativa
ttaagtcacctgagctgcaagcttgcctggtattgcgacgggtttcttctttaccggatatagagggtattagggtacgctggtacgaggatctacgtaatacgacatcaagcaggcagaaaacaaagattatactggttcaggccccttgataggtaataaccctaatccagctgatatgggattatatgatggaaaccacagattacaaagggaatagtggaactcgacgataccgacaagatagtagtcgagttgattcgactagatcacccggcgacttggctcctgtaagctccggcttcgtaggctgtggtgaatgtgttggcggtaagattcgatgccttaagtcctctcggggggtcccttttataccgcaggtcaactggtctccaagtatgactcggagacatctgacccgatacgatacaatgacgacccagttctatcc

SEQ ID NO: 27276 - DNA, 452 bp, Oryza sativa
  unsure (1)..(452): unsure at all n locations
tctcctctgctataagagtggctttctaggacactgtgtgtgtgtgtttgtatatatatagnagtagtacactactagtgtctatcattatccaacttaaaaaaatggagatgtgaagtagtagtagtagtagtaggaggagaagaaacaagagatgccaataattagcattgagaatttccaactcaagtcagctgccagcagatggatcaagatagttaatcactagtgtcaccaagctgcagcgtaggtaatgcatgagttgccggataatttcggcgtagctgttgccctcttcgtcgcaaaaactaagaagtgatgggccaacgagtcatcggctttgcttgcatatcgctgacgatctggcaatgacgacgaccgagatgcatgatcccggtatctttccggcgattggatgcgagtactgaagatgcgtgcgcttgttggatgct

SEQ ID NO: 27277 - DNA, 392 bp, Oryza sativa
  unsure (1)..(392): unsure at all n locations
agcttgcttgacaattaatccgggacgtttatatattgaccatgcaattaagtgcgtgcgtatatacacttccgactcccacaaggatcgttcaagaaaaaaaaactccgaaggatcgtaattaatgacatatatagcttaggaaaataatgcatgacaaggcagaattcataattcgatctcttaccacaaaatgcatctgcagctgcctccgcagccaccacctctctcatctgctcccgccaaggctccgtatgcaggtgcagatctagcgtgggtattggaggacttgaatccctatctcgctagatcatcattggtagaaggaaagagcggagaanaacaaaagagaaagcagtaagaatagggagatagtcctatctctaatccta

SEQ ID NO: 27278 - DNA, 421 bp, Oryza sativa
  unsure (1)..(421): unsure at all n locations
agttcactggtctggtacttcgtcatccaccacttctttttaagatctggaggagntaaggcatcgctttccttctgccacagcttggggtcaagctgtgtttcaaggaagggggaatgttacatccggcacaactgatgacgaacaggaacaagtgtccaaggtcgttggctccgttctgagtacggcccagcaacggcctgttcgtgtaactaggcccaacccgaagtataagggtggaaactgggttaactagctgtatataaaggagagagagaatcgggagtcatgacatgtaaagacagaattcccaactcaatacaaactcaatctctctctctctacaactctgtctttctctctgcttctcttcctctattcctctcaaactctctctgattctctgaaaatatcttacctc

SEQ ID NO: 27279 - DNA, 439 bp, Oryza sativa
  unsure (1)..(439): unsure at all n locations
agcttttatcattctggcatcgagctattttgctttangacctcccctacagtatcgtcaccgcagtagagtttaaccaccaaattcgggatggattggtgtggttcctctacgcctaggacaccagaatatcgaaccatgaacgaggaaaggcatgagagaaatattggctagtaattgtgaagccccaattcttgactggaagggacaccaaaggcctctgccctccctctctatctatccaagagatggaagggcagagcttttttttggttttttcatcttttcatcaaagagttgaacaatgaagatagatggcaagtgcctgatcgatttgatcaggtcgtgtaggaacaaggttcaaatcgttcgttcgttaggatgcctcagctgcatacattactgcacttgcacttgacacctatntatacggctcgtc

SEQ ID NO: 27280 - DNA, 428 bp, Oryza sativa
  unsure (1)..(428): unsure at all n locations
ctaagcttattattcttgggatccggatctggtattcattcaatggtatcctctgttggatattcaccacataaaagtcagaatatggctcttatgggtggcttaaaaaaatacattccaattacaagaacttgttttttatggggtaccctttctctttgtggtattccacctcttgcttgcttctggtccaaagatgaaatccttagtaatagttggttatattcacccttttttggaataatagcttcttttactgcaggattaactgcgttctatatgtttcggatatatttacttactttngatgggtatttgcgtgttcattttcaaaattacacgagtactaaagaggattcgttgtattcaatatcgttatggggaagaaggatatctaaaggagtcaatagagatttcgtttatcaaca

SEQ ID NO: 27281 - DNA, 444 bp, Oryza sativa
  unsure (1)..(444): unsure at all n locations
gctgggacatataaagtctgcaactaatatgcccgagcattatcgacctataactttgattcacagttttgttcgaattgtgacagagctacttgccagtcatttcgccccaatattgaacgaattgatctcgtataaccaaagggcttttattcgtaaaagataaattcatgataattttctttatgtgcggaatttactgtatggcttttatgctcactactagagaaataactattaacgatagaaaatgtggtccataaaagtataaatatgggccaactttggttctataattaaagtatagtaaaaacgggtattgtttggctaaggctctatttgtntaccctaacattattgtaatctatattattgagtcagaatactataaactggattataataagctatagtagatttggttgttctctagatatagtagat

SEQ ID NO: 27282 - DNA, 472 bp, Oryza sativa
  unsure (1)..(472): unsure at all n locations
tgacagcagccatggcggcgaggaggtgggctgaaggcgtctgctgcggcctgtggcagcgacgggaaggcaagacgaggcgacgccaactaggggtgtcgaggaggtagtggtgacgatgcatcactagttgtgggggcggcgacgaggcaccaagcaatgctctagccgatgatgtggtagccatatctggcaaaggccaccaagttaaccctccccaccggtagcatgtaaggccgcagttgctccggctcaacacctcgtttcacgcgcttcaaccagccttcacccttcatgcaggacggatccaagaggtatgcttcatcaggctcgagcctaccatctgatttttgaaaaaaaaaataattatatagcatctatcccatgggagtagctggagaacgcttggagaagagaagaggtgaagaactgtctctgttggcgcgaggaagaagatcangagcgatggagg

SEQ ID NO: 27283 - DNA, 180 bp, Oryza sativa
ggcacgacgagatatctattagtcacgaatagctagataccctccttttatctctagaagagcgagtgcatcgtcctataaagacgttatctctccttttatcttatgaaagttctttctaatccgacaagacttgatcaacccatgggttaaaaatgcacaccccggggcctatgaaat

SEQ ID NO: 27284 - DNA, 361 bp, Oryza sativa
  unsure (1)..(361): unsure at all n locations
tgtgtacaattgggctgtgatgggccgntgttcttcttttgttnttacactattgaccgtgcatcttgacctaaaggtaggattaaagaggcaaattcttctgagcttggttagtgattgtgctcgatgggtaatttctgccttctctggcattttatgctgagctgaagattgggtagaatttctcatgtggcttcttacttgcttatgtctaatctcttcattttaattccatttggagggcctgcaaatggtttccagaaagtgggacatgcagcgcagcattagattaataatttggtgcaacctcaacattttgatctaccttggataccttcatgaacagttttagcttcagaga

SEQ ID NO: 27285 - DNA, 445 bp, Oryza sativa
  unsure (1)..(445): unsure at all n locations
agctntgtaatcttttacaccctgttatttttttttctcttgtaattgagcatttttctcatccttgaggagataccatgaggtattataaggtacgaggtaccatgaggtaccgatctaatctaaccgttgatttataaagggtacgatcggactaaacaaatttagggcggcgctaatcaccacccatctcagcctctcagccaatagcatctccgtgccgcatcgaatccgccgcggccgccgtcgcatcgcagctagtccgccgcggctgatgtcacatcgaggccgccgcagctgacgttgcatcgaggccgccgcggccgcgcgtcgcatcaagaccggngcatcccgtcgcatcgaggccgccgcggccgccgtcgcatcaagaccagcgcatcccgtcgtcgcattcacctcgaagactccggcgtcgctttcaccc

SEQ ID NO: 27286 - DNA, 426 bp, Oryza sativa
  unsure (1)..(426): unsure at all n locations
atccttgagtcacccgcgggcatgcaagcttgccgtgacgcgtctcatgtgttttacgaggcgtgntggacagtcgcggagtgcgggtaaagtgtacatccactgcagcgtgagtaaaccaaatctattcgaatagccgtgctcgcgggtaatgagtaccggaacatgtattacacttggctaaacttttaattcttaacttgtgtgggatgggatattgcatgatgatttttatgctgatggagccactttctgagaggcgggaatatggacgtcctcaaaaaatcatgacgactcaatggcgggaagctatccttgggaatacaatggatggtggacagaaccatccgtgcttaatgtgaacactggtattaaaacttgatcagtctacgctaggtcttaggctcgtgaaaagaattataaaac

SEQ ID NO: 27287 - DNA, 395 bp, Oryza sativa
ctagaatccacatcatctaaacatacactccatatatattttctccaaaggtaagaaaggagcacatcacaattactggcaatctttcatgaacttttccttcttcaagatgctttcaaactccaattcagcgagacatctgtcaccaaggtgggctcaataattactcaattggcaatttcattttccaaatggctctaaattgaaagtgttgccgaaattttgaaaagacaccaattcacgttcagaaattgttcagacatgtgttgcagaaaattgtcagttcagactagatcagatagaaatttactactctctacatgggcccgataaatattcatgggcccaaaaggcccatataactggaatccatctagtctctcccccactgacaa

SEQ ID NO: 27288 - DNA, 433 bp, Oryza sativa
agcttcccccgccgtcgtaccgagcgccttctgctgccatcacctcctccacgaccctgagctccgcccgccactgtcccctccaccgctgattccacccaccatcgtcccgagcgccagcggctacgagcgccccctccaccaccccgagcttcacccgcccctgtcccctccacccaccggcatctcgggctcttgccgctgccgtcccaagctccatggcccggatcttggagagagagaggtgagggaaaaagagagtgcgggagactgacatgtggggcccgctgaatttaaaaataatggattgctaatggactgcccgtagaccagaaccgctttcaaactgctggggggggtcatccgtatcgatggtgagggtaaaacgtccgcttcatgttacggggaaatcatactcaccaatggtcagggg

SEQ ID NO: 27289 - DNA, 384 bp, Oryza sativa
tctttggaaactggctcgagggttccactgtatgttgggctatttggctactacaaataatatgacttttttattaaaacactatcaaaacctcttatttgcaggtactttttagggcaacatattgactccagggttaggctcaactacaaaggcacgatgatgatatcaagctaataaagtatgcatgtcgtaaacttgagtcgacgattacgcacctttacaccaacttcagatagagattctcagatagaatttagtaattgtgggctcttttatcttggggtggcgttactaccttgcgttactctatgttatggtaaggcgtgctgagattgttcatgtgcggactttgtaatatttgaatgtaactcgctgagcaaa

SEQ ID NO: 27290 - DNA, 275 bp, Oryza sativa
tcatctcaggagcattggctcagggccccgttgtcaatatatgctattgaacctttcgaggctactttgcgagtttgttgttggtctcctagcatatgccaaggtgtctctaccctctataaatcgacccgaagtcaaatataagttgctggacaacagtggagatactatggatcttgggcatgataacgactaatcgattagagcatacttgtgaccttagcagattggagatgaatcgcatgacattgatcatgcaaaggaacaccttaacg

SEQ ID NO: 27291 - DNA, 296 bp, Oryza sativa
tcgggagtttacgtgagagacgcttggccatccaattcaattgaagagtgcataagacaccgtcgcacattcagtgctgggatatctataaactagaggcatcttagagctattgatatgccaccctcacccctatggatggctacatgtcagatgccactccgcccgctatacttaagaccagcgcgggcatactgcatcagaccttgactttgtgacagaaatcatggacgactctcaaccccataatgattgataggctatcctgatgtgttttttacaacacggcgagaatg

SEQ ID NO: 27292 - DNA, 224 bp, Oryza sativa
  unsure (1)..(224): unsure at all n locations
tgccgagcgaggtggccggnggctttctttttcatcttctccgaataggtgtacaaatagtgctgttgggcgccaattccacgctagataccaacacacgttcttgccctttgactcagtctgatgaggagactctacttcatcacgcaccgcgcacttcttactagagacgaacctttgtgtcctggaagcatttgatggtccgtatggaaccttgaaccggt

SEQ ID NO: 27293 - DNA, 354 bp, Oryza sativa
  unsure (1)..(354): unsure at all n locations
agctngagggtcggcacatcatatcggaagtggacgaagacggccgacctaatgccccggcagaagccgccaagaactatgtacatcacagcggttgggttgtgcgggataatgtgcctgtcagtacggtgtactggcgcaaaacaagggcacgcggagatcatgagagctttgacacagattcggagaaagagatgctgtgggccacaatgctcgagacattcacccttcccgcgggtatataagacaaagtaaaaggtggactctgaaggaaatggcagaacagtttcaaagctttaagggagatctgtaccaaaaatatatcctgaaggggcagacaccgaacttcgatac

SEQ ID NO: 27294 - DNA, 411 bp, Oryza sativa
  unsure (1)..(411): unsure at all n locations
ggatagaatccataattaatgcgatggataggctcagtagccggtgcaccacatctgtggagacgtgggacccatatgacacgaccccatttttagactggtgggagcaccaccatagcccttcccaggatgtcgagggttcctatggcaagccacgtggaatgaagggtcttttccctccttgaagtagaacacccgtctagctccgaggaggggtgaaggtgacctacctgatccaactagccatgctcaaaacacagcatacgtggttgtcatagatagaccaacttcgagagctcatctctacagagccaatgttagtctcaagtaccagccactggtcccgacacccacgacatgccccactactagaaaatcatttgttgcacanaaaaatcgggcatcatacta

SEQ ID NO: 27295 - DNA, 445 bp, Oryza sativa
  unsure (1)..(445): unsure at all n locations
agcttctcgggttcttggtctctgcccgatgcatctatgtcaaccccgagaagatacgagctatagagcggatgcgcccccccagcaagcttagggatgtgcagtgcgtcaccggctgcatggccgccctaagtcggttcatatcgaggctgggagagaaggcactacccctatttaagctcctcaaacgctccgggccgtttacctggacggaggaggctgagcgggccttcactcagttgaaggtgtacctcagttctcccccggtcctggtcgccccggagccagatgagccgttgctactctacctggcggcaaccccgcaggtggtcagcacggcgttggtcgtggagcgcgacgaggacaaccctcactccgcgcattcccaccctgtgtcgactcgacccgggagagagcanggaggagaggcccncgagccgaacgg

SEQ ID NO: 27296 - DNA, 450 bp, Oryza sativa
  unsure (1)..(450): unsure at all n locations
agctngcatncattcgacagagttagtgcttatattcacataccgaggcggcctcacaggttctctagttcctcttcctgtttcacgagtcatcacctggatcatggtgatctgaacatcatcgtacagcttttttctaaccgtagaagaatagcctgcgcgggggtatccaccacgagcaagacagaacacaaggcagtgatcacagctgtgatcatcgtcatcatcctgaccaaccgaagcaaagcaaatcatgctcctctccctgacaatcttgctccaagccctcaagaagataggagcatcaaggtagtatgaaccatcgttctcgctgacgaccaattcgaaagcaagaatgcctccatcgaacagcgtgtatacgaagccatggatgcatagagacctaacacataatgcgccgtagcgataccattggcatgccttcacaat

SEQ ID NO: 27297 - DNA, 472 bp, Oryza sativa
  unsure (1)..(472): unsure at all n locations
actaagcttacattcnatatatgtcggacataccacatcatcaactttcttattttctagcaattattagctcctagagaataacaacaagaataccatatcatcagccactagaaaacatgtattccacagcaaagcgcaatgcatcaactagtttttataccatttcctcctgctaactgcaattaaaaattattatctcctataaaacataaatatatctcctagcagtaagccatgcacatagtgataatatattaatgggtggcacgcgcattagtaagtggacataagcttggccttctaagcacatatattttctcactatgttgctccattgctacctaaggttgattctaccttgatgatcagctctgcatgcacttgtcataagcatacattctttgcttcaagccattctattgtaacatgattgcaaatgggtaaagggaaaataacactattgaaaaat

SEQ ID NO: 27298 - DNA, 355 bp, Oryza sativa
tgcaagcttgcctgataatggacacttgggttcttgttctgagccgatcgaacgtgttcatctcaacatataaagagaaaaggaaaaaaaatctgacgtgtcagtcttggatatgccacaattgtttctggcgatgttttaatcctttttgttttgaaaaactcgggaatgtcttcttattattacgtgtcaaattggtatgggaaacatttatgtcgcgactgcaaatcaaacgtccgatctgaaaggaaaacaatgtcgagcggtattttatcgctttggagaataatattttatcaaatgttttaactaacctgatcagatatttaaaaaagatagatcatttaaaaatacg

SEQ ID NO: 27299 - DNA, 338 bp, Oryza sativa
  unsure (1)..(338): unsure at all n locations
catttaatctccactatcactgnacgccacgcctgaagcaatngacagaggataaaggcacacaacttttgatcaccacgttagagccctncagtacaatactaaggttgatggtaacctgaaaaggtcaatagtaaaagaacccaacttggacaatatatagaccaagtcacccaggagatgggggaatcttcagctgccgactgtttgcacaactagcaatacgtgcacaaaattttaatttgtgccccagaaaacacaactctttttttctgacaatgatgtgcataaacccctcatttctggacatgcaacccgatggctcaccgctcgccgaa

SEQ ID NO: 27300 - DNA, 424 bp, Oryza sativa
  unsure (1)..(424): unsure at all n locations
agcttacaggcagcgtgcatctgtgcttcttcatttgtgcaggtaaaaaaaagttgtatccgttactttagattataatccattcatgtttgattcacatctgttcctcagttcaaagttactgaccagaaaaataattacttgccaccgccagatagctaaactcccattttctcttgtcctaaaaatgtctaaactntattattaaaaaaacatccatatctgaaagactccattaaagaaccgttaagcatatgtgcctacttataacattgtcagttttacacgtatgtgtcacctttccgtatcccttactcgtttcaatgtggtttttctgaaagctaggtacaaggaagcggagggtgactatagcaaatacctggagctaaacctgggagttcttagtgaaaaagaatatctcact

SEQ ID NO: 27301 - DNA, 363 bp, Oryza sativa
  unsure (1)..(363): unsure at all n locations
ctatccatgagtgttgttatatttctcaataattagatcgataaatcctcgacgagggttgggggtgcttaattaggttggatgctgaaaaacataaatgatgctaattnttaatggtgctctgattttttttcttttttgggctgaacaaactgaggctggaattgagtaaaccttccgagaaataatctcctttcaaataaaaatcataatgcattagattctccaaataattcactataaccccatcaggtcacaaacacctaaacgtgattgaaaactgtcatgcatgtggatccatgacagtgtatacacaagatcaggtgtgacaacttgtttgcagacacagacatggcaaaaaac

SEQ ID NO: 27302 - DNA, 438 bp, Oryza sativa
  unsure (1)..(438): unsure at all n locations
agcttgntcanaacttatattgctgaggctgttttgtagtactaactccgtcccaaaataagtgcagtcatagatatgcgtgctgnagcgtttgaccatccgtcttatttgaaaatattatgaaaaatattaaaaaaattagtcacacataaagtactattcatgttttatcatctaataacaataaaaatactaatcataatcttttttcaaataagacgaacggttaaacgttggacatgaacagtgctaaaactgcacttattttgggacagagggagtagtaatagtactagagtactagtattaccttggtgaatagtatataataatataagtgatgaacaaatgtgaatttgtgatgaacaaatgcagtttactccttcaataggaggatgctagtgctactgtgggcactgggcagtatgagtagtacac

SEQ ID NO: 27303 - DNA, 418 bp, Oryza sativa
  unsure (1)..(418): unsure at all n locations
tctagttatatgcctgacaccaaaatagctgtttatctttatgtcttatgtgncatacatacacaaaccaaccgtgatccacggtttactacttctgtatgcacaaagctactgcatgcatgggcgctaggaggggggtgggggctgaaatattggaatgaaaaaagtgaaaactgagcaacttttgactaaatttgaataattcacaaagaagaacaaatgataaagtgaaatcttcggacgaagggatgtgaatatttggaaattgcaaaccctaccgtgaaccttctgtacaactcttgctggttctggtagatgtatagatgagcttgttatatgtctgcagctatcttgctcttacgaaccaaacaacatattgaaatgcctaaaggaagcggatttcttacctcaggtatta

SEQ ID NO: 27304 - DNA, 420 bp, Oryza sativa
  unsure (1)..(420): unsure at all n locations
agctngaactcaccttgtgagggctcattgtttataggcggnggcaaaaagaggctaccgctgagctgggggctaaagaatcatcccatcccaccccaattcaagtacccacccgttgcatgatacttgggagaatcagacccacactagttcttgtcaatctatgagttcgcaattgaatcagcccatggcgatgacaataccaagaagaaggtaatacatcttgcgcttgacgggatcgaccgctcttggatttcaatttgccatctaatagcatatactcatgggagcaacctcgtgatgtctttgttcttaactttcgnggcacttaagtggagccaaaaatgcaacaggacctctctggcatttgccagaagaccggccaaacaacaagggagcatattctatgcttttcgcaag

SEQ ID NO: 27305 - DNA, 404 bp, Oryza sativa
ctctcaagttggtttgtcatctttattaacttttaaagaaccaagagttacagttcacataaatatgtaccaacattcaaatttcagagtgatattttgctctctttttttgtgatttcaacaccacatcacagccagaaaatgaaaaggatattgattacaccaaagctaagtgaaatagtgaatacatgatggcgggcgatggaatgttaaaataatatcgggtagtaccagatctgaaaatgaaaacaaatacttatattggatagatgcatcagcaaggtggacaatgtgtggagttctagtataaatgtatagaagctagccactggatatcaaattcatcaccctttctgcctgtaattccacttggcaatttgcaatgttcctttgacaacagtcag

SEQ ID NO: 27306 - DNA, 440 bp, Oryza sativa
  unsure (1)..(440): unsure at all n locations
agcttgagtgaacgtatgcgccggtttgtattttggactgnacacagnggcacgaatcctatgtacaatataagctagccattttaccgcaagaaatatgccaagatgacatgttgttcataatagttagcaaacacacaagggaaacaggggaaaaaaagagtagaacctacaagtgaggaggaaccgtcgtcggcggtaaacagcaaggggtcccaagaagcatgtagttggctaacgacgatttttgattgggtagcttatgctcctgccagatgacgaagttagtgtgcaaaccaatcatgaataaaataaaaatgagtatattcaaaattcactcagaacaacccagaaatgatatcgcctaattcagaaatattcagagaggaaagccaaattcataaatattcagacaaacatttatatatgttggcgcgatg

SEQ ID NO: 27307 - DNA, 256 bp, Oryza sativa
aacatccgaaactatattacagcttttcctaagatatttgtcacatggtacacagactaccactaatggcaacgcctatccatatactagaagaacttatctgtcagcggcgccatcgacttcgccaggtgaactatctacacccgaggtctctgtgaacgagaaaacccttcctggaggaactccatgtgcatctgcgggcgatgatctcgtatgcaagcctatacatgccctccagcatatcaggttcatcgac

SEQ ID NO: 27308 - DNA, 447 bp, Oryza sativa
  unsure (1)..(447): unsure at all n locations
agctagntgacaatcaatattgctacattttttcttttggcagatattcataatttctgcagcgcacaactggtgacaatttggttattagctatctttatctcgcatttcagttttccatagaattacaaaactggtgatttctcattggtgctttaaaagttgcggcactggtttatcacagagaaggtgtgattgttgctctcaagaggagtaagttcgctgggttgatggttctttnttttgttgttttgagtttccctagtctttatacgagtgtacattccagttttcaatgctgaggtgggctatccctagagtttggtttattagaatatccgtgagctgtctcggtttactctcttgttttgaagcggagattgaaacctttcgttatcaaaactgagatatgtgttgtctatagaacatcacggctatatagtacaa

SEQ ID NO: 27309 - DNA, 399 bp, Oryza sativa
gcatgggaacattatgctcagagatgacgtccaccaattcggatgcaacattatctgattcaaccaccaatttcttaacttgtacctagagatgaatagcacagtgaagtatcaatcgagattacggatgacattttgcaacaaacaaaaccaatgaattgatacatccgtgttggcctttacatgtgaatacaactgaattttatttcaataaagtgggaaacaggcagaccttctgctgcgcgcatatgagttggtattgatccaagttgtcactgaatctttgcagggtcatcttcttgtgtgcaatcaactcctgctctcgcagcttggcggcgggaatcttgctccgactgacacgaaatggatggaagtgcataacatttgagccatacacat

SEQ ID NO: 27310 - DNA, 439 bp, Oryza sativa
  unsure (1)..(439): unsure at all n locations
agctntatcgntctatgagaggttgtcttgttttaccttactgcatctaggccggatatcatgtttagtgtttgcatgtgtgcacggtttcgagccgctcctaaggaatgtcacttagtggccgtgaaaaggattctaagatatttaaagcattcctcaactattggcttgtggtacccaaaaggtgctaagtttaagcttgttggctattccgattcatattatgccagttgcaaagtggatagaaagagcacatctggtagttgccaaatgcttggtagataccttgtgtcatggtcatccaataaacaaaactccgtagccctctctaccaccgaggcggaatatgtntcggcgggtagttgttgtgcccaattgctttggatgaaacaaaccttgntggactatggccatatcttcagccaaaccccacttctat

SEQ ID NO: 27311 - DNA, 247 bp, Oryza sativa
ctttaactttggtgtgggggaaaaagagagcaagactgtgtactacccactgtattcatcacgacataccgcaaggggaggtatgatgcacgatatatccataggacgctagaggttctttatcataaacctagcatttataagcataagtttaaagccgtaaaacacttctacgaattaattattattaaccgaacactgtccaacgcttcaccacgttgcgacaggccaaccaaccgcctgaact

SEQ ID NO: 27312 - DNA, 422 bp, Oryza sativa
  unsure (1)..(422): unsure at all n locations
agcttggaagagaggcaagggtgttttgtttatcttttgntctgaaatcatttgtgatatcactaagtggattacttctttctaagtttgggccgaaaagagacttgcgtctcgattcgacttttaagagatgtttttcaacaactcaattggtaatgtaccgacctcccgggtcagatcattacttctcggctcccagagccatttcacttgattagtcggctcccagagccttntcattttctcggattcccagagtccaactgcccagcagcacaacaatccgcttccactcgggaagcctagtctatgatgcccgtagacatcccgaatcacacagattcgtttcttgaccactcacgtcatccatcttgcacataggctgattctggtacgattccacagcacacaactttcacaag

SEQ ID NO: 27313 - DNA, 347 bp, Oryza sativa
actaagcttttaagacattatacgaaatttaagtgtgtttaactgttttacccaccaaatcccatgggtggaagtgagaacaactgtgttttctttgagactcgagtgccaccgaatgaaacatatattaacatattcacttttgtctagctattgccaacagctttattagcctttattataatacaaatgaaataatttctattgcccaatatattaattagaattctcacagaaaagggtacctataaaaaatatttgtcgtaataattttattgaggattaaatatgcataactatttgtatccagaaataattgtaggcatttgaagataacatctgaatat

SEQ ID NO: 27314 - DNA, 451 bp, Oryza sativa
  unsure (1)..(451): unsure at all n locations
agcttcaatatcttcgcagtgcccaagtgtgttttttataatgctgtcnaatttgcacttgaaatttcccctagatgtcctcgggcaaagtgttntgaaattcaagctgaggttgggatgaaatctccaggaattcagaaaggaatgagaaaggcaagcagcacgagcagcagcactcatcggcattaaggaatgtatgtgacgccagatgtcctgcatccataagcatgggataaaatctcaaattaaggccaaatggaattacaacatgagaaaaaaaaagaacaggagaaccacatggagtatctctgccccaggttgctctctatatgattgcacaaggtgcaggatggtgcaattgattgtagtccatgatataagtttatgtgcatttgttcaaccaaaatgcacatcgatgattagtttattgtgcaatagcatattataaata

SEQ ID NO: 27315 - DNA, 472 bp, Oryza sativa
  unsure (1)..(472): unsure at all n locations
tctgactgtgctgcggataatatcatacgatgcttgctatatttttctctgaatccaggaagcatcaatgtcttgtacatttatggtcagcccctcgttggagttctgcatatcatcatcatctaactcgccacccatttgcatagcaccaggggcattcgactcacgcaagtcatcatcttcatctncatccaaatcatcttgcacctgacgaggagaaataatgaaagccttgtaagtaaacactagcataacatgctttagccatatgcaggaaaagaattgtaaagagaaacaccaaatgtacctgatcgaaatcgctctcctcgtcatcttcgttctctttaaatcaacagcaacgccgatgtcatcatccagcgctgtgtccatgccatcaccagatggcgcagcagctgaatcaccagccgaggcatcatggaaatccgtgatgagcttcctatggagacgatct

SEQ ID NO: 27316 - DNA, 447 bp, Oryza sativa
  unsure (1)..(447): unsure at all n locations
agctnggcgaggcanatcaatagcccagattgatctatcagttcacatgaagaggcatgcaaccagcttccttggttttgccaaaggattgtcgagacaaaccctggaagtgcggcaacagtagaggccttggaagattcaaaattccgcttctttgttgcatttcatgcctccattcaaggttttgtgcatggctgcagacctctcctctttcttgatgtgatatctgtgaaaccgaacaagcattggaagctgttggctgctacctcagttgatggtgaaggcgatatgttcccagttgcactctctgtagtggacgacgagagtcaagaaaattggcattggtttcttgaacagctaaaagcttcattgcctgtgtctggagaactaacattcatatcaaatggcaaattgtggtctgtggatgaagtctctcttatatttcca

SEQ ID NO: 27317 - DNA, 461 bp, Oryza sativa
  unsure (1)..(461): unsure at all n locations
tgctggagtggacatggcanggctaggcattggtggatgtgcttagtgaccagtgggccttggtcccattgggggaggcattgagctatccatcaacatatgcttgccgagctccctctcaccgtgcgcaaagtggcacttatccccccatttgcatccctctgcagtgttatacttgttgcacaggcgagtcttaacagtgggtgttggtggcccatcaggaacagcatttcccattggcattcttcctggaggcggcgcaatagctggaccaccaagattggtcatctttgcaacagcttggtagccaccatggaagtggtggaggaagtggcaaccctcaccaaaggggcaaccagaggtactgcacaataagaatatcatgagtggcaagcaaaagatgctgcaaataatgtcctaattgaagaactacaccaaaagaattcattgtanatgcaact

SEQ ID NO: 27318 - DNA, 409 bp, Oryza sativa
tgacttaattcaactgggcttatgtgccgaattgcaactaccaggactgctataaagactactagacgcgagtggcctgatgatgcgatagttaaagagttaggactgctataaagactactagacgcgagtggcctgatgatgcgatagttaaagagggttatgagcttgccactgattggtatgtatctcgaaactttatgattatataactggaaaacttgctatactgatgtgtcatgtttccaattggaaaagtaaggaacaagtaatattgaatttcggagctatcgcaatgactggttctgaaatagaacagtcgttccagaaaagtgagtgtgccggggatattatctcattatttattaaatacctggagaacaatacgtatcctgatgacagcaggatc

SEQ ID NO: 27319 - DNA, 397 bp, Oryza sativa
gctgccttatattgcatatggcccttttgtttctaccttcgacatatctagcgctgtagccttgtatgcgtcgtgtgtttgctgcttcatgtttcgtgaggaagcactgctttgcttctgaacacagcttaatactgtaataattatttctctcaaacaacagcagctgcttaattagcttctcaatcagtgttaatgggtatacatcacaacagtatatttaaatgtaaagcatatgggagctaacaaacaaaaaaaaagatgccactaataattactgatccgtaagcactagcatgacatatataatccgctgccatcaccggacgttgtttaatgcggtacacctaattaatcgatcatctgctacactagctaagacgacgacgacataagt

SEQ ID NO: 27320 - DNA, 444 bp, Oryza sativa
  unsure (1)..(444): unsure at all n locations
ttaagtcacctgangctgcaagctatatgagcttccagaaaggctttatttgaggaccaaaggatgatacaagaagaaagccttacatgtatttctgaccagccatttgcttctgatgcacaggttgagaggcggttgggtgccaaatcaaaacgtgatgatggtggtgactctggtgatgatggcattgacatgaaagtggagcaaccaacaggtatttcttgatcaaaacttgtgttcctatctataatttcacataggagccaaaaaattctctgtaaaatattgttcttttcttgaatacgcatgagagttgcgtgtcatttcattagtaagggagaaaaatacgaacggggaagggagcagcacccaccatcacccgaaccaccaactggcattagccttcacatgataaaacacacacaacagtatacaaccaccttc

SEQ ID NO: 27321 - DNA, 250 bp, Oryza sativa
  unsure (1)..(250): unsure at all n locations
agctagngaaggcaaatcatgcgctctggagntatttgccttnnnnnccattgncaatacgggtgtgttgctggaatgccacctcccacaatgggtccgttaaaatgccaccctctaacaggggccccttgtatccatgccatttccatcatttctttcttagttcaaagttcttcgaatggtttttcttgttgaaatgaccataagacccttattctatctcaacctttctctctgtcttcctcctctc

SEQ ID NO: 27322 - DNA, 461 bp, Oryza sativa
  unsure (1)..(461): unsure at all n locations
gcttntgattgcgggggtttgcgtggactgacgagctggctattacgtttctcgngtttgggcacttgtcggcgaaatgacccattccttgacaattgaagcaacagatatctttccggactcggcatattcctttctcattttgcttcctctgtcctggccctggagttaggctgaaactgtaatcttgccgaggatttgtgttcccttgatgcttctctccgttggaactgacgggttgtgtggccatcttcttggccagaataaactgaatcgacaatcttttggtccatgatcagttccttcacaaaagaaacaagggatcctgctcgtggacacctatcgggtggatgtgcttcctcacaatgaacgcatgtataggcacaccaactggcaacatgaccgatttctcccaacagagagcatgccttaagttctattatattctggttaaaaccttg

SEQ ID NO: 27323 - DNA, 420 bp, Oryza sativa
gcagcatttcataatagggctttttcttttattgggagcggaaaagtgtttatcttaccaacaatcgttaaactctattggacaaccatttgtgggcttaatctcataagctcaagcaccgtccacaacaatgtggaatccttctcacagccctttgcctcatcgtacaaaagatcattcgctgcctttttcaatgcatcaaagttatccgacccacgagcggacccagcgacaacctcaggttcagcatgacgcaacatctcttgcaaatatgcaaaattactaacatctacgctgacattaccatcatcggcatcatcaactgtactgtgctgaccattgccacccacaacatcattatcattaacgggttctactgcaagcactgtgtcttcgtggtcttcttcttgatgttcttct

SEQ ID NO: 27324 - DNA, 420 bp, Oryza sativa
  unsure (1)..(420): unsure at all n locations
taggntagtattctcaagctagtggaggacgtttattatttaaatcggagnccgaaagtcttcggaagagttccggtagggctctatcacctctcctatcttcttttgtaagacttgtactttatttagaatattcttctttatacaattctggtggtgtaattctttccaattttatttacaataccaactttactttatatccaagttatattgattaaactgctagcttatctgggagatggataggtaccggtataatgtttgcttatgcatttactctatgtcatgacgatgatattagagtagtatatagtaggtttggcgtggtgtctagattactgggtatcattatttanggatatatgctgcggaagagaggtgagccgctgatggtgacagctcagtatgggtattcct

SEQ ID NO: 27325 - DNA, 418 bp, Oryza sativa
agctttctggtggctaattgcgctcttttcttatccgaacccactaaagaatcttaccaaattttggtgttaacacatatccccttattttggagtatgagaattcatgcttcaaaattctcttctgtcttgccttcattacttcaaaattgatcatccgttgcttcttgccatcaggtctcacaagacgatactatctacattagatgaactagactatcaaactcaagaaggaagaatttgtccttggtaggtgctgacaatccttgaaatgaaagatccgctagaatggctttcgttctttcataacttgacattttttacattacatcaagatatgataatgaaattataatgttgggaattcgtttttaaatatctagctagagaacatataaggatataattctcatgtaaa

SEQ ID NO: 27326 - DNA, 400 bp, Oryza sativa
agagaagcgacagaagcaccgtcatcgccatccgtcgaggtctcaaagagaaccaagactaggttttcacccagacaccccactataggcacgatagcaccctcaaaaggggagtgacgcataaacgccactgttgctggccaggctgggctatcacccgcagtcctccgcctgcctatccacagttgatgcaccattgctccaccaccatctaaactaccgccggcgcgtgggcgccactgcactagcgccccccgccggccagcctccatgtgtcaccaccagccgcgcctctgtcgcaccagcacgcgcatctgacggctcctgctctgccgaccttcgcttccactgtgtcgatcgcacctacccacgtcgcgccgggctccgtcgcgttttctta

SEQ ID NO: 27327 - DNA, 399 bp, Oryza sativa
  unsure (1)..(399): unsure at all n locations
agctagtggagcacgaccctaagcttctttatgtcgcctcccaccnctatatatagctagttaccccttcagggtttcttgggttttgtttagatgaaagtttatccattgctacttcgcttgcaccgcgcgtgtcggctagaccgtccgtctgcttgtattcgaaaccccaacttatcattcgtattaaattcctatttgcaatatcagattgctttcatcttattcttgcttgtttcttcgatttgcttgcacgaataaggttgatctgcaccggcaagatcaacaacccacggagaggtgtatcgatcgctaaggcgccacacaacgtctcgtacggttgtagtcggatcggcaaccgttctcccatatcgtagttatctcaactcaccgacagat

SEQ ID NO: 27328 - DNA, 451 bp, Oryza sativa
  unsure (1)..(451): unsure at all n locations
tgcatatcatgatagtatgaagtaacagttctggtatcttgttttaaacattgcagtttgttgaacaaaatggcagcataatacatgggaacataaacatctctgaaatatcgtttcaggtctttccaagattgtggtattttgttatgcctacaaagatgtttccaatcatgagaagcatgtttaattaaaacactagaggcacacataaccttctgtttctccgacaagacatgcgtttgaaattcactatcaaccgctagctcccaattaatgtaagcacgaggatcatagtcttcctctgaataaggcagtgcagatttgatcttacctagaacatcatcactcacctcataatggtcatgttgaaccctcctcatgtctcgaccaagatgtcgatgntgagcacagctatccccaattatcttgcgaattcctggcattgttagac

SEQ ID NO: 27329 - DNA, 439 bp, Oryza sativa
  unsure (1)..(439): unsure at all n locations
agctaggagccgtcgacacgtcgtggtctttctacctcatcaccggnggcgacaccgcatacatcgctgctaccctacctcccatccaccacctcgctgacatgtaggcccaaccccattagcggactctgactgggactggttcgaccagacccggtcgagtttagattgtgcaatgtcaggggcaatctggtcatttggaaaattatctcccctcttttgtgttggaaattataaaatattgcctccggtgtcctacagctaattacacaacttttgtagtgtccatggacagtgtcacgttttttcggagtctcctagctaattacacattttttgcgtgtcctgtagcaaattttgcctttattataaccttcaagctatcttttttcttngctaaaatataataaatctgagggtaagactttaaacagaaata

SEQ ID NO: 27330 - DNA, 400 bp, Oryza sativa
  unsure (1)..(400): unsure at all n locations
tagcacgcaccgtanagtccaaatttgaccagtcaacatgtctaataaaggcacaactccaccttatcatctccactatataaaattcattttcgatcgatcgatcgctcactcacccacttgtctcacactctcactgagctcctctgcttctcgcatccatggccgccgccgccacgggccctgtccccttcaaggacgccgacgacgacggcacgctcgccgccgccgaggcgcgctcgcctctcccgaaggaggagttcggcgacctcgtcgcggcgctgccgcggaaggagcagtacctcgacgggcggctctacgaggggttctggctgccggagcactacgcgccggggatcatcgcgttccgccgccgcttcacgccgcgcgccgacgacgt

SEQ ID NO: 27331 - DNA, 386 bp, Oryza sativa
  unsure (1)..(386): unsure at all n locations
ctaatggaacatctgcaattgcaaggaacttccaagctgtattagtaggatcctccacaactcagcgcgatttcaacaaaacttgagaacctggcactttcctgcagtcctgtactgttcgtgtaataacttatacttcctccgtcccacaaaaataaatctaatacggaatgtggcacattctagcactacgaagacaaagattactagctttttaggagtagttcaaacgagacaacatgtttgcctccctttgatccttgcagttatcaccatanatctgccaaactgatatgttctatgccgaacagntaactgaacttacaatggatattcagttatacattgtcagtgcgccaacacanggtgactgaatagtaattcat

SEQ ID NO: 27332 - DNA, 460 bp, Oryza sativa
cgttatggcggctagcgttctcgggattagagcttacatattcatgacactctaatcctgcctacgtaaaccaccgagttatcatatataccgcataatctagattgatctcgtcatttaagcttcatcggctagcctctatcatcgaaaacggccgataagcttaggcttcgatatcaagctagactatgcggagtatctaaaatcttgaatgggttttcatcgattcgattagatcttatgtttctttccacgcttaatgctacatcgttatgtttctttccacgcttaatgctacatcggttaggttcgatctgttaagtactgtcttgaaacgatatatctagttccttctttggatgctaatagagatagcatcagagttgtagccgaccttacctgatttagtcgtctggctgtcttatctggatctggatagtctaaatatgcctcttatatc

SEQ ID NO: 27333 - DNA, 336 bp, Oryza sativa
  unsure (1)..(336): unsure at all n locations
agctagaagagagcatgcccattcttatttttcttattgncctatggacattatgggaaatgactcattgctggtcataacaacaacgcaataattaatccctaccggtcgttaactgtcccatcacacaatgtcaacgattccttttttgaaaaaagaagactcgaggctgtagtgcaatcaagcaatcttaaccatccatgtgaattgattaagtgtcataaacatgcacgatgcattcatgcatcaatgcatgttgcccaccgtgtggattagacaatcagattataacgaccttgctaggtcagtcggacaagaataacgctcaacttagct

SEQ ID NO: 27334 - DNA, 449 bp, Oryza sativa
  unsure (1)..(449): unsure at all n locations
tgcatgaggatgttcgcggcttgcgcacagatgttggttactcgaatgcttccgcggggagattgcacactcgagtgggtatattggattctcgagtccaaatgttggagagctcccaagcttctcatcgtcgtcgtcgtgatgcttctcatccttccacttcggcgtgtcctccttctcctccacaagagtgaagacctttttggtgcttgatgccaaaagggggagaaaagtgtgttttatgttgggttgggactagtagtagtgaggttagtcacctcatatttaataggttaaggaggttcgggctatattttgtgtgggtatgggctattactctatcttgcgtggtatttgtcattntggtaaactctctatgtcatttggaccctttgtggtcttgaatagcctatgtttatntgtgacccttgatgtggcttaatgtgaac

SEQ ID NO: 27335 - DNA, 388 bp, Oryza sativa
  unsure (1)..(388): unsure at all n locations
agctatangtattcattggtgaataattttgttgtgcgttctagtaacatcttgacaaagttttgtacaattataatgtttccatcactgggttatgtcaccacaaaatacaccttctggcgactccatcgtcattaccagtgtacacgtatcaaccgtatacgtatgcaattcccaaatcgtatcgtatcagggcttaactagctactgcctctacttaaaatcgtcttattgatcaatctaagaacatcgatcgatcaaatcattgccgcgatctgcggcgagatggtccctgtcgagtctggtgggaggtcttgatcaaggcaccaaccaaagacgtcgcccggtcaagctgtgtgtccaagcagtggcgtgacatcgtcacgaa

SEQ ID NO: 27336 - DNA, 375 bp, Oryza sativa
  unsure (1)..(375): unsure at all n locations
agcttgctgtgtcaataagctctcccatttcttcttgtctctgggnnggaagaaacgtggtgaattggtgtaagcataagctgtgcacgaacagttcctactgcataacactgtgcactcctcaaagcttataccactgatgtacaccaacttatctggcaatttcatgccaggcaacagcaagaaatgctcatgatcaccacatcgcagctcctcctttctcgacagccttgtgaggagttaccggagacanggtcaaatccatcaaggcacttgcatgtatggacgcctgtcaagtcgcnatgaccatatgggccacatgagccatatcgaccgcaaccttgaccagatagatgtactgtactgccccaatga

SEQ ID NO: 27337 - DNA, 479 bp, Oryza sativa
  unsure (1)..(479): unsure at all n locations
gcttccgntctgtttggcttgtctaaagcttattacagaatcatctttcttttgtgtttatncaaacagaacacaatatatatatatatatatatatatatatgatggaataataataaatggaacaccagttaaaagtggtcacctaagtttgtgcatgtgcaagaagagattatcatggcagcaaaatctggaaagttagggacaagcacacacatgtaaaccattcctttaatttgcagccatttcttacatttgcgatcatccccaattgatggcacatccttgaagaatatgactgttggggatgctgcaagattaaacagtttgtgagttgttttacgtgaacaatggcttttgcatttaccaactcgtgagataaatatacaggcttatacaaaaggacagctgccaacaacgtggacctcgcggacaaaatatacaaccgggcccacactgtggtaacattatgacaacaa

SEQ ID NO: 27338 - DNA, 431 bp, Oryza sativa
  unsure (1)..(431): unsure at all n locations
tcttcgtcatcctcgcagtgttatatataatgcaaaaaatactgtgcagataaacgggtccaaatttaggatacaaacagagagtttttatttttgtcagaaatcatatatacaaaacccaatgactcctaattctcctgtcaatgcagttatatctatcacatcataagcacataaatacagaggattcttgctatacggaagcaagaggcaagtaatttgagatttaattcaaagattggctgggtagcatgtacagaaggcaaaaataaattttgttcatctgttaccgcaagaaaaccattcatgatgcaatcgctaacagctgaagacactactgaatatatctgctcggtgacatattcagctcgctctgcttacaaaattcanggtgaagaacagcacaatttggaaaaaatgcttaatcccat

SEQ ID NO: 27339 - DNA, 491 bp, Oryza sativa
  unsure (1)..(491): unsure at all n locations
ggaccaagaaactaagctttgtcttttctattatattgggtggcctgagattctatctacactcacgtctacatccatctgcctgtcctagatttacatgatgtcccctaaatttatgcagaccattagaataaaagttatgttccatggaacatcattnttttaaaagaaaaaattagtatgtctaaaatttaatcattactagatattatgctgacataatcatggtatgtttggtaataatgaagcctgctttagcttatttggagtgttcactattaagatggtatgaaaagcccatgtagctccttatttgtttggcccaagcttcaacttcaacttgcggctataggttacttcaacctgaagcttgcccaaacagttgggagctctatggactattccttcttgttcactgctgctgctactccctttcctggcatgtatactgctgctgctactccctttcctggcctgtataatctgacaat

SEQ ID NO: 27340 - DNA, 420 bp, Oryza sativa
  unsure (1)..(420): unsure at all n locations
agctgcagcttcgagatgagtgggcttaaaaattattatatttacatctgagatgagtgataggccagattaagcaatgatttggtttgttcatctttttgagtagcttgtgaggactgaaccaattagcagtgaacacctatggtgatatttgatggtgtttggacttgtgtctgaatatactgtcagtgctagcctggtcattatcagtgttataatggccctgtcaggatatatgcaccacaatgtgggattnttcttgtgattgaacggatgtagagctgtagcctgtaaggagatcaacaaattagattcatcatttgtgttttgagcatggcggtcacatgttatgcctaaggattatcatgtgcaacanagggttaacatcacaatttgataaaaagcaagtgaaatgttact

SEQ ID NO: 27341 - DNA, 445 bp, Oryza sativa
  unsure (1)..(445): unsure at all n locations
ctccttactctgaatacaacaaatggcaatgcttttggttaacatgatgtataaataatcaaatataattaattatattgtcacttaactctttaatgcaaaaaggattgagcctaaaaaactactgtgctgaaaagcacacatcatctaacagatgattaacatatattagcaaatcaccacagctgagtgcatagctgagctgcagaaacatgaaatggaacaacttgcaacaataactgattatcaagtaaaaccaactgatgttgctatcatatcaaccacaggaagatgtatctgnttctaatcatgataagagcctattgatgaagatgcgctcgtgacaatattatgtataagagaaataagcacatcatcacttacatccagtcccatggctcaacttgcagaacaaaagaaatggcaaagtaatgcacactttact

SEQ ID NO: 27342 - DNA, 409 bp, Oryza sativa
tcttctgcaccatattgggactagaaccttgcctcaaccttcttgccccggatgtcctttggcctcgccttctcctcaacacccaaagagccaatgagatcaaaaacactaaacgtttggttgtgctttagagaagtggcaaagtctgaccaagaaggtggcaacttggcaataatgccacccgccacaaacttgtctggcaactcacagttgttgttctcaagttccttagccagcatctgaatctcatgagcttggtctactacagaacggtcatcaaccatcttgtagtcatagaactgctccatgacatatagctcacttgcggcgtcggatactccgaacttggccttaagtgcattccacatgtccttgccggaaggcatgtgaatgtacacgtccactatgt

SEQ ID NO: 27343 - DNA, 330 bp, Oryza sativa
gaagacattcgaaccgttactctttatgatctatagtcccggagggtcacacagaccgggactattgatctaatatgtccgtgacccttttgaaccgggactaaagatcgtccttagccccggctactattgcatgcgggactattgcggaaatcggaccaccgacgaacgatggcctcaacaccagtgatccgtaaagtaaaggtaacataggaaacgtgactcatggctctgatcatcagagatggtcgtcctttgcacactgatcaagtaccatattaatcgcaatgttggattctctcggccatacgtataatcactactacagaa

SEQ ID NO: 27344 - DNA, 392 bp, Oryza sativa
  unsure (1)..(392): unsure at all n locations
agctagntatgcacgttgaaatcaggtgttttgttcttgatgatgcatccctngnacagagctgatttgtagctctggaatagttctgccattttcttcagggtccattctttgcatctaagacgatctgcctcaaggatcgtgaatgtctccagcatggtggtccacaacatgtccttctctgtgtcaaagagaaagctatcttcattccctcgtgacctatttcgacgccagtacactatgctgatggggacgttgtctctcacgaaccaaccacaatgattcacaaactttcgtcctatacccgccagggctactggttcgccgtctggggcaatctcagtaacgatgtgccttccctcaagcttcttcgcgggacctattttcccgcg

SEQ ID NO: 27345 - DNA, 478 bp, Oryza sativa
  unsure (1)..(478): unsure at all n locations
actcaagctggcaaccctnggtgaagatgtcagcgtactgtgacgatgtatgttcatgcagcacgcggactgtaccaagggcaaccttgtcacgtacaaagtggagatcaatctcgatgtgcttggttcactgatgttgtacgggattggtggagaggtacaccgcactaacattgtcacaataaaccaaggtggcccgtgtcggaggagtgtgtaactcgtggaggagctgtcgcaaccagcatgtctcggcaactgcgttagcaacagcgcgatattcagcttcagcactggagcgtgaaactgtattctgtcgcttggaagaccaggagacgagattatctcctataaaaacagcatatcccgattctgttctataagtcggggtatagagataagggaaactgaaccggatacaaatacaatatctctaacagtcttgagacccactactgccaatgggaccatgaaaaccttc

SEQ ID NO: 27346 - DNA, 352 bp, Oryza sativa
gaaacgtcgtcttgagcttcaagaagggacgacggtgcccacaacctcaggtgaagcagatctggtgagcacagatgcaggtggctccctatgagcgatgaggtcgtgctcttggtgatgaatcgcagccaaatgcgacctccctgcatgaaccaccttgggggcgtggagatggtggattcatgtgggatgggccacatggatgaaccaccgggggcaatacatcgtggatgatgtgggggagatggaggaggggacacgaggaggtggtggcgctgctggttggagaggaagcggcggcggcgctgctggttgggggaggagatgatgcggaggccgatgcggtgctgct

SEQ ID NO: 27347 - DNA, 368 bp, Oryza sativa
tgccgttcgccttaagaacgaccaccgggtttttcagtctctcctggtggatgacctcgcggatgaatccggcctccagaagtcgcgccaccttctcgcggatgaaggcttgacgttccggggcctggcgccgcactttctgccggaccggccttgcgcccgatcgtacggcgagacggtgctcaatcacctccctggggaccccgggcatatccgccggtctccatgcgaagacgtcagcgtttgcccgcacgaaagagacgagcgcgtcttcctatttgccatccaagagaccaccgatccgtgtggtcttggacgggccatcgcccagggcaaccttcttgaccgggacctcatcgcacgtgact

SEQ ID NO: 27348 - DNA, 414 bp, Oryza sativa
agcttctattggtatggtcacatatgtcttatttatcatatcaactcttgcaagaagtcatcatttgcaactacttttgccaaagggtacataacttagcaatatacaacatttgcatcacaacggccaaccgaccacataaaagagagatcaaacacagtggaataaaaccatatgtcaggttcacagtgttccatagaactgaggactcgcatgttccatgaacgaattttagatggactcattttatcatccgaaatgaaatatttaaaggtgaacacaaagttaggccaccacagtttcctgcaggggaatctaaccaaagagagcccttaagatccatatctgtgatgcagaaagcgattatgcaaatgtcttgccataatcatctataacttggtgatcaattccctc

SEQ ID NO: 27349 - DNA, 434 bp, Oryza sativa
tgcattactttaagacctataaagctgaggtagaatatcatcttgtaaggaaaatcaaacgggtgaggtctgatagaggtggggagtatttttccaatgaatttgcatccttttgcaaagagtttggaattattcatgaaaggacgcctccctattcaccccaatcaaatggggtggccgaaagaaagaaccgcactctaactgagatggtgaatgccatgttagacactgcagggctttctaaagaatggtggggtgagagcagtttgactgcgtgtcatatcctgaataaaattccaacgaagcataaggaagtgacaccattcgaggaatcggaaaggaagaaattaaatctctcgtacctacgaacataggagctgttggccaaggtaagtgtacctatagccaaaaaatgaaaacttggaccaaatact

SEQ ID NO: 27350 - DNA, 445 bp, Oryza sativa
  unsure (1)..(445): unsure at all n locations
agcttanaggaaagataagcaggatttcttttgactcaggagaattagtgacaacagttgtttcaggagcatgctctggatgtttgacctcatcctgcgcacaacgattggccttgcaagattatgtatggggtgaaaacctaaatagggtggcaggaagaacaatatgggcaggaaaggtaatgacaagtgttgtaccttaatagcagtgtcaacattggtgctaagaggctgcatgtggcacattgaaacaacgatgttttttttccctggtgttgaagaacttggtttgctggttggtgtgctctgtgtgggagtaccaataggtgactntgttggngttgaagtgctgtgcccttgctggacgagctgttgtgattcaaagctcgtttggctttgctggggccctgtttggacagaactgctggagcttgcggatgcaata

SEQ ID NO: 27351 - DNA, 439 bp, Oryza sativa
  unsure (1)..(439): unsure at all n locations
tataggtatcacaaatggctagcgtgatccatgccacttcatctaccatgagtgctggcatgtgaaaggagatttcttcgacccacagggtgccctatcggcaagtgacgaattcaaggatcttcgggagtggaacactgctatgccataatgtaactacatggcgtatttgaagtgacaatgtaaaaaaatattttaatatatatatatatatatatatatatatatattggcaacacctttgagttatgcaatatatgtagatttctcagcaccaaatgcttgataatctttcactatatgtacataataatctacctggcagagtttctattacataatttaaaagtaatgtacgggcaaattattattaaatttcaatactttctacctatcttcgcaggcggaagatttattttttgctggcggncgattccta

SEQ ID NO: 27352 - DNA, 438 bp, Oryza sativa
  unsure (1)..(438): unsure at all n locations
agctatacttcatcattgcttaaaatcccattctatatggtaatagngngaaagccaaaactcacgaccagtagctatcaatcagaacataacgtttgacattcaaacaagtgaatcaataattgttaatatacacagcatacattttcctaacaataattgttaaaattcacaccatacattacgagcgaaaaataatcatagagcagagcatatgtatgatattgacagattaggctgtaatactcatgtaaagggtaaaactatcagattttacagagtaaaactttttggtaaacaagtaagctatcagtaaaacagagcatgcctaggttgcacagcttcgttttgtttcttgtttgacattaataagcaaaacatagtacctatccagagcaaaagattnntttttcaagataagcaattacctcattcttt

SEQ ID NO: 27353 - DNA, 272 bp, Oryza sativa
tcgcaagaagccccatgcttataacttatgaaaacaacatgcttatggtaatgaccataagaatctgatggcttctcatggacaagataggctagtgagagctctccaacacggatattccttttcaccaatttctcccatgattcgttgggttcttctatgaccttcagagcatattcctaggagagagaattattcaatcagaatgcaaaaatatcctctatgtttaaatataactgaaggaggccacgcttaccttgcttgtgggtttg

SEQ ID NO: 27354 - DNA, 414 bp, Oryza sativa
agcttaatttacctaaaataattggattattcatatgacaacatgcatataatctaaaatactcttttaatctcattcttgcaaccaataataggatcaatcaaatcctacactgcctcgcatggtcaagtctacacaaaatagagtcattgtgcactcttatctaaataacaatttaaaatatgtttatattttaatattatttccatatcaaatgttatcaagaatagtagctatacttaacaaaaacaaatagtctagtaattgcatacagagacgtgcagggtctccaatacatgagaatagaatagatgaggaaacaaaagtcgtataggaaatggaaaaaaaattgatggatcctatccaacccaagcgtccatcaattttatctcgcgttgattccgacgggttttc

SEQ ID NO: 27355 - DNA, 464 bp, Oryza sativa
cggacacaagaaactcagcttaaccggctgcgggcgccggcttgctgttttcttttgtggtacactaatgagtcacatgggctctcgttccggcacagacattaatcactgtgctgcctagcccagagcaaggatgataatagagctcactttctactattatccaatattaaagccaacacatataatagaatagctataaggtgggctacaaactacttctcatatctctatctctcacttatacattaattagatttggcttacagattgtgataaactagctgtttgaagagagccaataaccttaacttcttattatatctctccttcccataaacttatagtatgcttatagctaactattatacttgctctaaaccaagctaaacatgcaacataggtagcttatacactcattaacttggtctaactagcttagctctaaccactgcctatatatg

SEQ ID NO: 27356 - DNA, 358 bp, Oryza sativa
  unsure (1)..(358): unsure at all n locations
agcttacaaagcgaggttgagtccgcgccttagaggcgcgaatatgacatcctcagaaaggcgctcggaaccaaagaacatcctgaccggactcggggaattggtagcgatgtgccctggaagcatggactcccgcagtacagctcccaatacaggaaacggaaagtctccaaggaagagagggacgttcgtttgaaggccgaacttaaggttgaggtcattcaagaactagaagctagcatgaatgctagggtggaagaaagggttaacaaggtcctcgccgacatgaatataccctgaggcacaacaccttgtgtgcatncaactcctcgtgcacaacacgacgcgagtccgtcac

SEQ ID NO: 27357 - DNA, 435 bp, Oryza sativa
  unsure (1)..(435): unsure at all n locations
ntacatcaactatattaccaccctaatgtgggtgaggacttcagggagtgcccaacgaagatgcacaccatgtatacagcaaaataatgctccatggggagagatattttaataacagatgggtcaaagatgcaaaaaagaagtgtatcaaaatcaagggaataccttctgatctcagaaatggtagagctttatgtacatagatgatacaactaccctgcaaattatagcaagttaacacaaagatgtgaaggcaataatacaagcaagtcatgcaggaataagcatattgttgataagccaagaaaagaatgaaataactacctatattcaaattgtagaactgaggaatctttcactggcaaacagaattaaaataattgaatgacgctatctgaagacaagaactccattctgctgttgcttattttatga

SEQ ID NO: 27358 - DNA, 425 bp, Oryza sativa
  unsure (1)..(425): unsure at all n locations
agctatagctaatgcactggctgcagtcttttttcatgtggattcttggaaatgctgggatgggtgcattacaggtgaacataaatctctcctatagctcctcctattgacaatttctgattaccttcatatcagaattttttgtatgagaaatttctaagcctctcagagccaggaatcatgcttgccccacagttcanatttgatcttcatattcatttgtaaccatgatttccaagctgtacaaactgaagctcatttctcccttgtgatcaattatctaaaaaaggttaaaatccatagtacaacgcagcctgtttctgcataataatcagttattgttgaatgaacttgctagttgctacttgctacatgaactagtttctttgaagntacttgggtaactattngatgttcatcaatct

SEQ ID NO: 27359 - DNA, 401 bp, Oryza sativa
ctacgaaatgtctgtttaacaaaaactttcaccatactgatttttgtagagataccaccccctcacggctggtgggtatcgcgagggatatcatggctttaaaaactgataaggttaccacacacgataaccatgcgaaaattgtacggccttgcaaaccctgtcctggtattagcttatgcgctacataaataatgtaaaaaaaatagggtaggaataaatatttaaccaccgcaatattatcattcaaaatataacgcggtaaattattattggagtgaagtgcacgagcggtccttaaacttgtacggatatattatctaactccctagactcttaagatgtattttttgataccacacatgttatgggtgtcatatatgccagacatgacatgccat

SEQ ID NO: 27360 - DNA, 370 bp, Oryza sativa
  unsure (1)..(370): unsure at all n locations
gctngtatgttgtgaataaataaatntctttttattgggcatacgccatgcgcatactgctttaacagacgtgctttagtccctaaaagacacatggtttcaccacacctggaaatatatggcatatgtggtgtaaaatccgagtaaataaactcataaaggaattaccaaccgcctagaaaatgaccacaatatataattagcctaagccataatattggtcaataaaaatgcacacttacgtggcgaanagcaatgatattgtatccaatcaattgcttaaaaacccaaacagcaccttgacttatatataaaaaagtcagcgggacagctatatatagctttactgtttgacaccttttaagatgct

SEQ ID NO: 27361 - DNA, 475 bp, Oryza sativa
tcaatattcatagatgaaatttaagattgccccttatgctttatgtttccatggtgacaaaacctccctcatccctgctccttaatagaattccctggtggggaatccatcactaattagaacctgtaagccaacaagcattaaaaggggggaccgaaggagatttactaaacaagtatagtagttccatatgttgatgctgacataaatccacttgtgtaattgtaacacctttgggttaattaaccctttttatgcatagcaaagggctaggcattgggaattttggactttggtgtgttatgatatgacttctgaatgtgtactcaaaatggccactgaacagctggcaaatcttctagatcttctgttgttctatcaaaattgctgtagaaaccaaagtagacaatgacgatcttaaagtataggcttctatgaggtgttctgttcgaggaaaatgttagtcatatcacca

SEQ ID NO: 27362 - DNA, 348 bp, Oryza sativa
gcttacctgatctgaaaagagtcaacaacttcttggatgccggaccatgcgtttcatcaaacggtttgtgaggtatcctgaacaccttgcgaagagcgacaagctgtgagtctatcaggctttcaagctcgttctcatcctcagtgttgtccgcgaagtccataaatgtactgcaaagtgttctctggacctccatcaccatgtcctggagaagaggggcgaggtttatgaacttgtacaaaatagataagagaactcattaattgccacagtacgatgggcagcacaattatgtgcgaaggtaccatctgtaccttacaaatagttgcacaaaattgggtttctgat

SEQ ID NO: 27363 - DNA, 476 bp, Oryza sativa
actcagctttatctcttcgtcgtcatcagctagctcctcagagaattgacgtgggcaacggggccccgctgcattatttctgtagcactgtcgtcacccggcgctgctggtggaccggactccagccttcaccgattgcttcacatcttcgtcctgttcctacttgcaatatatgtcttgatgatctccgggaggataagcctcggaatatttgaggaacccggacgcgcgacgtgtgtagtgtacgttgtccggttccatgacgttccgtgtgtactagtataatcaccgttattcacatcttcaattcacacggacggagatatcgccgaaccaaacaaacaggaggttcacagctgcgagtgaatgaatgacgagatattcgtatcatcgcagccgcgcctgctctggaccgtctgttacagatccagctcgtcctagtggtcctaagttctaaccgcagggaaatgcgtgcg

SEQ ID NO: 27364 - DNA, 424 bp, Oryza sativa
  unsure (1)..(424): unsure at all n locations
gcttctgagatntttcatgcacggtatattgttcttttctagcctgnagaatnttggatgctctggttgaacgtgcaccgactgttgctgttacagtgagatggattggatccctcagctacctatgaatccctgatcctctctgatcaatgagaagatgcatatgattgagagccttttttccagacatcatcctgttcctggttggtgcatccgtaccaggggtggggtgccactgccatggtgttcatctctcattttctctcccatctcttagatataagatatagatgttatctcaatttatgttaacatgattgtaagcagttaaacatcatatttcgtaaaagatgttgtttaaaatattaaataattatattttttaagtttaaaataattataacttaatcaataatatgctaat

SEQ ID NO: 27365 - DNA, 403 bp, Oryza sativa
cgacgactggagccttcacctatacggttggttcggcgcaacactattgttaagcgtctacatcttcaccaccggattgctatctccaccgccgactgcggtcactgactacatggctggcctattatgccgttgttgtagggcgtttacgtcttcaccgaccggacgcctcgttcagcgctgactggagtatccgtctgcacggatggcctgttatgacaccaactgatgctatcttcttcacggctggctacggtatcggtaccgataataggcgccatcatcttcaacgcaagctgcctacgtctgctgctgactagtgccgtcacctctacagctggttataccgctgccactattgatggaccgcatcatcttcattgctgcgcgccttgactgacac

SEQ ID NO: 27366 - DNA, 447 bp, Oryza sativa
  unsure (1)..(447): unsure at all n locations
agctnngctgttcagtctataggttaattatgggttgatattgctctggnttccctgccttttccccttcctgtcagttcggtctgcctttgtgctgaaggtattttcttcttctttattgttatgcattactatatttctctagtagtttaattctttgcatgatattatatggtatatgtgtgcccctgtaagtgtaagtttatgtgtgtgcaactgcagttcctccctagctttgtcattttttttatataattagatggttctatgctgtgtgcatatagtgaaagtgttcttccccctatatgtttgggtattagtagcaaaagagagacgctacaagttacaattgtcacaatcgttataacgaccaatttgttccttctactatctgttaagtcgatgggtgtacatagctttcttctcgactctatcttgcgatgatag

SEQ ID NO: 27367 - DNA, 477 bp, Oryza sativa
  unsure (1)..(477): unsure at all n locations
ctcaagcttgttggtgttgaaagcacttcgtctttctcctacatggtgcacacagtttctgcggcaggtggcaggatgtgcacgtgacaagtggcgtggttatctggcggcaacgggcgaaaggaggctataaatggcgtcgccgcgtccgctggactgcgtgaaaaggggatcgagagagagagagagagattgattgattgattctagagtttgagatggtagatggataggggnttggagggttatatttgggccttatgggccgcacgttgggagaaagattatatttgtaggcctgtagactactgaggtgtgtcacgatgtgtgctgtgtagtaaggtgcttatgggctaccctaacacgctaagctcacaagcagctcacgagtcagagctggctcgttatctctaacgagctaaaatgcttgctcagctcgttagagcaatacaacgagccgagtaagctgagcagagt

SEQ ID NO: 27368 - DNA, 336 bp, Oryza sativa
  unsure (1)..(336): unsure at all n locations
agcttcggattccgggaatntaccggacttgaagctccctaagctcgtcggagctcctcatggtcacgtcggcatccgccgtgcgcacgccgccttgaattttcccaccatcaccgccacgccaggacgggaaggcttggcttggcgtcgccttgtgctccgccccccagaaaaatgaagtccggagccgcacggcaaccactgccgcttgcgcgccgccactttgtcggaccgccaaaacgcctaaacgccacggcttggcgccgccccaagcgcgccccccagccggcaaagatggagccacggcggcgctcgtcgccgcgctagcttcccaac

SEQ ID NO: 27369 - DNA, 391 bp, Oryza sativa
  unsure (1)..(391): unsure at all n locations
gacaaaaaagagaaactacatgccttccttggtgttgaacgccttgaaatcttggagaagagggttcaaagggtggctggttcactggaagaccaaaaagggtgaagatttgctgataatttagtgatgtgaagataaactgagattaaggtgtatgaggtgagagagacactggaactactctcgaagttcgtttggggatagattattgaaacttgagatttttctatgagagggatccactggaactagttgtgttctagcaaattgatgaatggagctacctgtgtcacgggtactaactttttttgtttaatattcatgaataatgtcacacgcccatctatgactttttatttgcttcttgtctacccatagnggtatggatagc

SEQ ID NO: 27370 - DNA, 359 bp, Oryza sativa
  unsure (1)..(359): unsure at all n locations
ttaatctagaatatggtttattcactcataaaagaatctaagaatgcttgatatntttcctagaccttgcatccagtaaaataaatcagggtgatagagtttcttactccacatcgaagttgctggagaacattgctgttctcaaaaattgctggcttgagaacattatntggctntatacagcgaatgtaatgtggttctactgaactcaaagtttccaacaaagcttgcagntgttgctgtgatgcaagagaaaattaanatataatcggtagaagaaaactatagtgtaatgaaactgagtatggagtaaataaaaggaataacatttttaccttaaagcttgacctatggatgtg

SEQ ID NO: 27371 - DNA, 458 bp, Oryza sativa
  unsure (1)..(458): unsure at all n locations
acactatagaaatctaagctttgcgggagcaaaaatttggactgagatcttatgtggttatgtgcctatgaatcctaatacagttgaaaccatctacgagttagtagaaaattattttggatccagctggttgcgtatgcatttggtacattcatgtatggcaccacagggtgtgcccttctagaactagaagggtaccctctgcttttgcctggtgaaggcagatgttgtcgtaccctccatccactattcatgttagttcaatagcatgtttggacttctataataatgaccaatataccccctccgttttaaaatgtttgacaccgttgacctantcntaatatctgtatgtatctgcgataacaatgaatgactataatatattttataactgacgcccttttctggtctgttgatttaatctattttttattgtcgattgcttaccgaagttt

SEQ ID NO: 27372 - DNA, 361 bp, Oryza sativa
gcttcactctatacaacgccgaaataatatactttgctacactcaaatcctcctcaattcatcaccttaaacctgtctctctcaaacagcttattattcacaacccaattatcgcaattagccataaacctaaagctcagattgctccctccttgcaaagccaaactccccccacatcacctacctccaacccatttcgccatcaccgcgaaaattcaggccagttgatgacgatgacgacgacgcagaagaacagacaccaaccaatgcaaaatcaactaagtgatgatatatatatggcactttactcttgtttacgccggtagctatcatcaatcaagaactctactattgtaagcat

SEQ ID NO: 27373 - DNA, 313 bp, Oryza sativa
  unsure (1)..(313): unsure at all n locations
tacattgaccttacgaccattcgctatgggaatccatctcaagcagatgggagaatgattcaacggaatatgtacagtagaagcgcacatctgatgccactagataagaatcggacccactaaagctcttctaaaataaacattaagcgaaacagatcccatgacattagcaataaaagaacttttccttcggaccatagaatataaatatagaaatttatctttacaagctaaggttcctagccacttatcctcccaaaatctgcgttgttccccattattaacaagcanaaacccatatttaagagaatac

SEQ ID NO: 27374 - DNA, 276 bp, Oryza sativa
  unsure (1)..(276): unsure at all n locations
gctagtatgttagttgtggatttatgttttacntgagtaggaaactgttggcgcgcctgctctcgctaacaaaagataacgtcgagatcgttctgtgaacggcacggttggtctccaccacacctatgaatccttggtggaattccgacaatatttataacccaacgccttatattagttcagtatgcgtccgcatatgattgcaccatttctcagcttagttttgtactcacacttaacattacacatgcacgatggcatacgcctatgtgtgac

SEQ ID NO: 27375 - DNA, 368 bp, Oryza sativa
cagtgaaccaaaaatacacgattcgctcgcactcgccggggctaccaacggctcttgtcgtttggatcattttcagcagagttatactcagctgacccagcatgatgaaaaggaggaatcagataaggtgagagattcgacacaaactctagcaatcggctcaattctgctggcgactgtgacgttcggtgcgactttcgctctgcctggaggctacagagccgatgatcacgtcaacggaggtacaccaacacttgcagggaggtatacctttcatgccttctatcatggccaacacatttgcacttatcttctccgccatagctaccattgggctcatgtactctggatccccactgttcaactca

SEQ ID NO: 27376 - DNA, 440 bp, Oryza sativa
  unsure (1)..(440): unsure at all n locations
agctagaacttctctgcaaaaattattgttctttanagcagcaccaagatttggatgatctgaatcattggtcttactgccatagtattcatcaagctttatagcagcaattgatcccttgagacttaggttttcaggatatgtctgcaaacatcaagaacataacattagaatcaagcttcataaaattaggagatataaactacgaaaaagtgctattggtggaagcagaccaaacctccagggaaagatgaatgttctgacacttggcttcaacgtgatgcatattcaagctggcagcaggagcaggagatatcattgattgctcaaaatgtgcaaaggacaggcagctcgaaaacacttcanaaattctcatgtcattgaattgactgataagaacactggaattgcagcatccatttcatactgaacaaagaaca

SEQ ID NO: 27377 - DNA, 401 bp, Oryza sativa
gatatgggaatgggacgtgccttctcaaagctctgtcggagaagaagaagaatgtaccgcgtgcagggaatgctttcagaaaaccatggtggggtgtaccatctccttatgccacctatgttggatattagaagacaagtcagtaatcatagacaaaacagaatgatatttgcaatattataatagctttgatcatgtctgccttcctctttttttcgccttctgggcctaaaaacagtgtttctaacatcaactgttagacgatactgtcagtatgtcacatatgcgaaatagcacaccttgttctgctggagtacaagtgcccagggcggaaagatatgaatcgctcgcaatcatcacttaatgccttcatctctgacgaaaaccaaaccgaacctgaa

SEQ ID NO: 27378 - DNA, 445 bp, Oryza sativa
  unsure (1)..(445): unsure at all n locations
agctagctgtttcatgcctagaggaattcttttgttaagacccaccatggaaagtgtggtggaggtgcttgtttcanttgatgaagccagttctacaatttaagagttataattctggtaaagagctttgccatttgacatccacagaatatatcttgtagtctttcataattggctaaaatatcatctacttaagaaaatgtcttttggtctgatgcattaagaggaactgcttaagccccattgtgtactgaatgcatgatttttcatgtactatgctttctgaaatgtgcaatgtatcaatttagaaataatggggtagtaatgcaattactatgctacatatattttgttgcaatgattcgaacttatagctagaacctggagtcctggacaaagtgtgcattggtgtcctatggtagaatgaatcgtgctgatatttgca

SEQ ID NO: 27379 - DNA, 396 bp, Oryza sativa
  unsure (1)..(396): unsure at all n locations
agcttataattgaatatattattatagtatatttgattgcgnngaatatgtgactacttttctaaatttaatcaaatttgaaacaattttactttaatcaaagtcaaaatgacatataatctaaaatagagtgagtatctctgtaaggtgtgtttggataataggaaatagggagtgagattgggattgaaaattgaatgaagagttaggattaaatgaaagagagagaataaatggttaggatttaaatatgtttttagtaggtgggaaatcatttccatatcctattagccaaacacttgcctaagctaataccaacattcttcangagctggatgcaaatttggcagaccaaatccaaaacacgacaggcagcagcagcagcaggacaccaac

SEQ ID NO: 27380 - DNA, 470 bp, Oryza sativa
  unsure (1)..(470): unsure at all n locations
tacggacctataaaactcagcttgccatggaaggtcactcagaggtgcactctctgtgatggaagtaactntcatttcccaaacaccataatcaagacaattcaaaagatggcgagcattatcattatcagaaaattcttttccaacagatctcaacttcgaaataatttctccaaaacgtttgaaataagaatcaatggactctcctgagtgcatctcaaatctttgatattctttatgaaattgattctgacgaaccaattgaatatcattgtttccctcatggaaattgcacagagcagtccacatgtcatgagcggacttgtggtgttgaacacgattaaattcaccagaagaaattccaccaatgattgcatttcttgcacgataattaaaatcaacctgagccatatttgcaggcgtgatgtcagcatcatcgggcacagtgtaaccttattccacacattatg

SEQ ID NO: 27381 - DNA, 390 bp, Oryza sativa
  unsure (1)..(390): unsure at all n locations
agctattcacaagaggttgttggctgtctgcactcaaagaagcttgngacatggtacagtggtgcgaatgctgtcaatntcacactaaacacgcaaagctaccagcgcaagcgctccagactatctctcttactttctcgtgctgggggctcgacatactcggaccattcccacgaggacagggcggctacaggttcctattcgtggcgattgacaagttcaccaagtggatcgaagcgacactcacgggggaaatcaaggccgacaacgctatcaaattcattaaagggatattctgcagatatggattgcctcaccgcattataacggacaacggctcccaattcatcagtgccgactttcaggaatactgtatcggattgggagtca

SEQ ID NO: 27382 - DNA, 382 bp, Oryza sativa
  unsure (1)..(382): unsure at all n locations
agcttgactnggtgtgaggaggctggtttatctatgtctgccctgctaaaccaagggaaggggcttctttgacatatacccatggacaattcacggcatagtgtccttgctctctgcaatcgtgacaaaaggggacatcctcttctggcattggaaactcattgacctgggtggcaaatgctcgatcaaacacatactgattttggtcttgacttccaactaatggtagctgtgaactaagcagcatgcttggaatggaccaagggtgtgccctggttaactctcttgaggccagtggtagattgagttgaaaacttgagttacttgaggcatacccgctgacattctttcctttttctctgataaacatctgttaccggga

SEQ ID NO: 27383 - DNA, 350 bp, Oryza sativa
gacacccacgccgctataattgcagcatttcttatgctaaacaatatatcttcatctttgaaaacttaaacagtttaactggtgtggtaagtgcttgagcccgaatctattttccaacatcccttctctttcatattattagatggtttagattctgaatagattcattcatgcatccatcattcttcctctttcacattataagatggtttaaaatttgaatagattcatttctgcttgcacatgcgctacatatatatgcccaacctcatatgtatgttaatgaatttagacaagagattaaatgacccaaactttttattatgtgaaacggagggagtatatgtttt

SEQ ID NO: 27384 - DNA, 426 bp, Oryza sativa
  unsure (1)..(426): unsure at all n locations
tctcacagtcaaaaacaagtaatggttcaaaaatagaatattctatcacctgttgcctccatntatgtggaactcacaagagggtctaagtgctgcttgacactctgacctgtatttaaataaaatgttatcacctattgcctctgcttattattgggatctcaaaacacaatctattactgtgtatgccttggcattttttaaaatctgagctgcccccttattcttcacattttctcagaaaaccatataaacttttagataaatgaagctnttattgatctcagacaattacatcaagttgatagaaccaaactaagaacacttctggcctctgataatggaactgcnntgttgttaagtagaaagaatggtgtgtgtattttaacggttggtgattgggaattgngatgcagcgaccatgga

SEQ ID NO: 27385 - DNA, 437 bp, Oryza sativa
tgctcgttcacccataccagtgagggcagtccccgccggtgtttcctacggtagcggcatgacaggattggattgacacgccatattaggcggcatggtccaatgttcaaatcttgaaaatagattttggatgagatctatttttacgactgaagatgagaaatgttcattattttgggtaagctagggtccccataataaagaaatactaatagtaaggtggttcatctctacctggactgactcaccttgactgaaccaaagctacattattggtttgcttgtgacaagcaagaattgagggggagaaacacctggctgacgatcttatgctatctcactgcatgatcactcatgctatacaatagtgccatgcattattgctaaacttgctaatcattccctatgcccatgatgtatttgcatcttgcgttgta

SEQ ID NO: 27386 - DNA, 455 bp, Oryza sativa
  unsure (1)..(455): unsure at all n locations
ggtaccggtggcgtntgtttgaccatggatagagtagattgatgtgcacaggcactagctggcgcatatatgcacggggaatgatcgatctccgggttattttaagctggcaacaccggcctcctttcctttccgagagatgatactactcctacaaaccagcaggaaagagtcatgcacagccagtctttgtcagaaggcctccacaacaacaagtgaagtgatccctgcctgcctgcgagctgagagcacctgcagtccccagccttcaccatcttttttatactacttgctactaggactagctagtgctggagtaatgtttggtatacatgagtgcatcaaggaaatcatcaaaactaaatctcaactcatgtaatacaattctttcatctcatcatttataggagtatgtaatgaaaattaatttggctactacacgaagtttatatggg

SEQ ID NO: 27387 - DNA, 402 bp, Oryza sativa
agcttgtggttcgactcgttgtaggcgacagatctgtgttcttaaatcagtctgggtctcttgcattcaaagtggaaagtatttgccttctcactttgcctccattgacgagttgtggttggaaatacatcatccatttattttatttttttttgtaaggcgcaattgtcaaaacttgacctttgacctctagtttccccttgcaacatattgattgtgcgaaacagtggaagtactttaaaacatgatgaatctgttggtaccactgtcttatccatagacatataaatatttcaactaaccgttgatcaacagatacaatgaattatgtgcgtttcttataaactatatggtgggagtaacaaataggattataaaaatggctcaatacagtgtacaatg

SEQ ID NO: 27388 - DNA, 482 bp, Oryza sativa
tactcagcttaacatccactactggtgaagagcttcaatacaatggtgttcataatgatctcgcgaaggaactcaagactaggatggctcagaagcagaaggaaaatgatactgagcacatgaatggtggaaaacttcttgaatatgtcatgcgtttgagggaagaagatattgatggaacggtattgctttcactaatatagttatagtactatgtattttattttgcctgtacctttgagaatataaaataagtgacacaactctgatgatttcaggcatttgatgagactattcctggagagagtctttttcctttgcaggtatgcgatgccctaaagctctgatgtttctgtgactgatgtgtacctttatcataatgtagcaatgctcttgcttaaccttttcttttaagttcgagtatgtatttgtcttatatatggatcaagtgtccagctacgcaaccaagaagtgacatttgc

SEQ ID NO: 27389 - DNA, 403 bp, Oryza sativa
  unsure (1)..(403): unsure at all n locations
agcttgaaagcgcgcacacaatcatacctctttattgttgtcnggcctacaagcagttagatacatcatagttccaatcattcttctatactccttctgatcaacagcttcaccatcttcatcaggatccaacacagctgtagaaccaattggagttgaaattggctggcatttctccatcttgaaccgtctcaagagatccttcgtatacttcgtttgatgcacaaaagtaccttgaggtgtttgcttaatttgcaaccccagagagtacaataactcatccatcatgctcatctgaaattccctgcgcatagtctcatcttagtccacaacccaagcgtgagttgtacatctcaagatgatattatcacattaatctgaacaatagttgattatcccatgc

SEQ ID NO: 27390 - DNA, 380 bp, Oryza sativa
agcttcttgatcttaccaaccaggacattatactgagcttgagatttgattttacggtctgcaaaacacatttataataagaatctgctgcattaaagagaggacagttcaaattgtcagctggcaataccttcaacctccttcaaggctgattccctttccgcagccagttctactttgtcttttttcaaggcttcaatttgtttttcaatttgagccatcctggtggcttgcgctgttagaaatccaaatgtttgaggatacagttatgacagcatatatccgtggagcacatcggagaaattaccttttgatgaaccactcacctcgaagttagaatcctggagctgagcaatacgctcccttaacttcttctccgt

SEQ ID NO: 27391 - DNA, 459 bp, Oryza sativa
  unsure (1)..(459): unsure at all n locations
taatagcagggtagcaagtaagatgcaagatgtggtgaataatgcaccatgtaaagacaagaatcgactntgctacaattgccgtgcaaagggacatattggtacaaattgtcccatggttaacattcttaagccaaactcctcatttgattatgctttgcttaagaaggccaaaaaggacatttgtgctactaggctgattagttcaccacatactagcacaaaatccatttgggtgcctaagtctcgtgtgacttacctttatggacccaatgttgttagggactaaaatgtgctaaaatgagaatataggtacatggagaggcattggaggtatggctcatgcaagaaaaggtggatctcaccaagttcggaatttggagccaaccattgcaaaattcacatcaagaatcaatgttatctcggtaacatgtatctacattgaattatcttttatat

SEQ ID NO: 27392 - DNA, 413 bp, Oryza sativa
agcttttggatcggaaagggaagaaaaatggatgggatcccgtagcgtcggaggttgcgcctttttgctctcgttttggagggacgcttgcttcaactgccaccacttcgactattcgcctctcataacagtccactccccctgtctctctctatctctctccccaataatacgtactccccgttttattttaaattcagttatagattactatgcttaacatttgattgtctattttatttaaaaaatttataaaaataagtcgtacataaagtactattcatattttatcattcaataataataataataataataataataataataataataccatattaaacacagaaactaataactacacttaacatgggatgatggagtaccacattttacataaattaataaag

SEQ ID NO: 27393 - DNA, 465 bp, Oryza sativa
  unsure (1)..(465): unsure at all n locations
ctagagtcaaaaatgagaaanatcgagtgatgggaatagtcttcatctcctctgacaaaatgactacctgaactaaaagataaaacaaataaaaaaattagcaaatggttacacaggtgctacgccatctaaaatgttacaaaagataacgactaccaaaaccaataaaatagcatcattatgcataatatctatntgttcttttatccttgtcaccaaacaatattcatatttagaattcgactacttttttgtaaaaaataataaatacttaaatagatgtcactttatcgaagtgtattatatattaaacataattattaactttgttcataataatctagtcatttaaaaatacattaaagtttgccacaatactgatcaatggtgataattatatangaattgagggagtatcnattttaagtggtttgagaattaatataaaagttctggggaggagga

SEQ ID NO: 27394 - DNA, 332 bp, Oryza sativa
agccttgcttacctgaccgagcatgttcttcatatttatttgaaaacattatatgatgcagtctacatgatggctaggacagtggctctagtagcttgctagacacattcttcaccctttcgaacaaactacatatttaatctatatagtacaagcttatttggtcaaaccatttactaatgggctaactttgcaccttgataaagcctttgctaaaatattaactctctctaacattctattggcgctgctgctgaatgccatttctcaatttgagctttcagcatggcagcttgctttttaagacagcgactattgtcaaactatacgct

SEQ ID NO: 27395 - DNA, 280 bp, Oryza sativa
gacaatagttaaatctataagatgatagccgatctgccgatcggccgacaggccgatgttgtatcgcattagctgatgaacaaaataatcagctacaagcatgaaagatactggacatataattagactcagacttgatattaattataaagaactgtttgtttaataaaacccaatctataggcggaacgccatcgatgaagcatgtgataataaagtttaaagctcgcgcataatataattatttaacctatattacctagccatggtatagatgctt

SEQ ID NO: 27396 - DNA, 369 bp, Oryza sativa
agcattggcagaacgtgcggtttatacccagggacgccacaacactctcaaacaagctgtctgatcattgacctgtgggcatcaaccaaaacactactgccgcgcttgcaggggcaggacttgaggtgcacctcttgcaactgtaggcatgaaccgaacacactgctttctaagccgccgcgggtgtggagtcccgcaagacttgcaagaccagcttggcgagagcttggaacccctgcaatgggggaatcacacaatccaccagcttcaagccttgcaaacaggatctgtgcgggtcattgcagagaccatggcgaccgaagatgtgggcattctgaaaatgatgccgccaatacgttgtcctaccaa

SEQ ID NO: 27397 - DNA, 464 bp, Oryza sativa
  unsure (1)..(464): unsure at all n locations
tctttaagttgtactgaaatttaatctgcatctcacactctgtggaatattatagatgtgataatctgtgacacctgcagattgtactgcttctttatgatagctagttgctggcatgatgatcatattacactgctaataatctacactactgaaattagattgtactatatattatttagtcctgtaacatgtgcacaataaagcaaagtgtgtggtggtattttnttctttttccttggtacgaccctccagggttataatcttgtaattttttcctgttctatcaatagaacttcgcaccgtctcgtgcgagtcgttaaaaaaaatgaagcaaagtgtgtgtgaagaggttgaaatctcangattaatgcagcattataccaggttattgacattgttccacttccacctgctgtgttcttttggaggggttagaggaaaaaggagtacatatgtttcct

SEQ ID NO: 27398 - DNA, 273 bp, Oryza sativa
acacctttataataagaatctgctgccttaataaaggacacgttaaattgttaactggcgataccttcaaacttcttgaagcgctgaggtcctttccggaagcaagtctaacctgtctcttttgacagcgttaatttgttctacatctgaaccatcctggggggttgcgccgttagaaattccaatgtttgcagatacacttatgacagcatatatccatgtgacacatcttgaaacaaccttttgataaacactcaacctaagtttgatact

SEQ ID NO: 27399 - DNA, 463 bp, Oryza sativa
cgacattgcggaccactgggtctagtaccagtgggtatcgtcccgggtggaccactcggtcaggatgatccgagcggtcaaacttgattgcaatctctgaccatcgaagatattggggcgtgtcgggctgaacagcattgatctcccgttcggtcaacttttgcttccttttagactcataagccagggggccgccgaagatatgcgtgagttccttgcggtggtcttgaaatcctgccggggtgtcgccgtcagccttcttcctcgacgtgctttgttcttcgtcggagtttttccgtgtagtcttggtgtattgctccgcaaactgctcgtagacgaaacaatctttggccacgtggttggagttaggatggtgcgggcattgcgagttcatgatcttgtcgaacgtgttgacgcgcgaacgctgtcgagaagagtgagtggcggttgcaacaagttcctc

SEQ ID NO: 27400 - DNA, 397 bp, Oryza sativa
  unsure (1)..(397): unsure at all n locations
agctngaggttttcttggtacaccttttttatctttgccatctagagaagaacatgattaattaattatggcgtgcattaccgctggtcaacattgtaagacaaggcacaatgatgacaacttgccttattctaaaataagtaattgatatccctagggatgcatcaacacgtgctttggatgcatatatggaggttccttcttggacataccccgtatatatatatgcgaagaataattacagctctaatctctctgtacaaaaagcgaacaatctacgcttaagaaacgcagctgatgaataaagttatctcagcacatcagcccttttcagcatatcataatgacacaaacttcagggcttatataggaggaccacaaccatctgtgagaaaat

SEQ ID NO: 27401 - DNA, 429 bp, Oryza sativa
  unsure (1)..(429): unsure at all n locations
taagggagcctactttagatgggtctagctccacttattctttataatcagccggaaatttgcaaaacaagtcaagcacatcttccagttcgagtctgatttattccttgggtcttataattgtatcgtgggctaagcctaagaggaggacggcctaacgctcaccctggaatgtacgaatcatattcttctagtagctgtcatagcttacagctgggctttacttagattattttgccaaatgcatgttcgccactagttcggtacgtaaaatcccaactttgagggctaagacatttatttgcaattgagtagcaatctacctagctcctgcttttgttcttcgattcacatgtacggattaatcctcctggcaagtgtgacagctgcttaatgccaaatctacgccgcccatncctgcctacatct

SEQ ID NO: 27402 - DNA, 124 bp, Oryza sativa
tgtcacagtctataacaaggaatgggacagaaatgaatattctatcatctgctgccaccagacacgtggaactcacacgagggtctaagatgctgacttgacacctcatgacgctgatagttta

SEQ ID NO: 27403 - DNA, 417 bp, Oryza sativa
agcttatggatacatgtacatcttagctgcctctttttgtactacagcatgtggatatggaagctagaaatgactaggagaggaacagcaaacagctgttaatggcgcaagaagagtatgcatgtgaaacttactgatcagaggctgcagcctgcgtgtggcagagctcttcgtcttcctgagcaacaatggcggaagagagtgagaagagagggtggttagtgagcttttgcttgattggtaatggcaggttggagaattaagggtaacttacgagaatgggtttgattccttgatggttaggaagaagaagaagaaggggtaagaagtgggaatggtggtgacagaggagaaagataaagggtggcggtgggaactgccttctgcctttataggtagggtgtgccctgccctgcc

SEQ ID NO: 27404 - DNA, 426 bp, Oryza sativa
actaagctgctgaacgagctctcaaagtcagcaatcaattttctttcatacgccatactcgctcgccgacattagcacgtactactcatagtaagcttacggcaacaacacgcagcacagtgggaatgtaaaactcatatgaaaaatggtgtgcttacagaggtctcttccatggaggaaaccaccggatcctgcaacgccgtcgcgcccttcgactccggtgaggtggttgccgtccgtgccgctgaatcgatcaccaagggcaatggcgaaaccagtttgctcagtcgaacagaaaaaaaaaaaaaaccggaagcgagcacgcacgaatcggtcaacaactcctcacctcgccgcgacgacggagccggcgaagacagcggcctcgagcggcggtggtgcttctccgcgggtcgcgagccaccg

SEQ ID NO: 27405 - DNA, 396 bp, Oryza sativa
  unsure (1)..(396): unsure at all n locations
agcttgtggattaggcgtgatatatgcgcactcttgttttcttgtggtgaagccacgtgtccgaaagtttgggagagacatagtgtagatataacctgactcatatagatttgacttttaagataaatatctattctcgttaatggactgatatttactggttaataagtattatatcaatatgatttcattgatttagtagagctcttcccgaaatgttggttctataacattttcaaatgaaaatctctttttaacaatgaaactccattccaacattngctttctagatatcttagtcgactattatagagtttgcagattcaataactactatttacaaattacaacttggaggataaatgaaaattaattgaaattctcacgccaattatt

SEQ ID NO: 27406 - DNA, 449 bp, Oryza sativa
acatccaccacactacattcttttcataacaccctgtcttggccatggcttgcataattaagtataccactctaaacaggctaagctaaactaaccctgatgtgattagcaactactgaaaggtggaccaaatacatactacctccgtactcgtaaaggaagttgtttaggacagtgacacggtctccaaaacacaactttgatttcttgtttctataaaaatatttattgaaaagtgatatatgtatacttttatgaaagtatttttcaagacaaatatattcatataatttttacattttcaaacacaacaacttgagagttattcatgatttatattcccaagttttgacttaaacattgtcctaaactttgttcttttctattgataatgattgctcataatgttggttgcgtgttgcacgtattattatcactgcacatataat

SEQ ID NO: 27407 - DNA, 301 bp, Oryza sativa
agcttgagcagaacttgagttctgatgttctttaatatgtcctcaatataattaccgatgaaaggatcgtccattattggtcttctgttgctctgaattttggttgtaacaatcacatcagaaatccagaatcaattaacagaataactagcttaaaattgctgcagaaaatagcaagatggataatgttcaataacactgacctttagaatcttttcaaattccatgatgtcattcttctgatatgctgcaatcaagtttgtcatggcgaggatctcaagatcatttttgtacctgaaag

SEQ ID NO: 27408 - DNA, 467 bp, Oryza sativa
tgcaggaagaagagaagacgagaaattacttatgggtacctattactcttaggattgatgatccagctgaggctgcaaagagttcaatctgggcgacccttggcatcaagcctgacgataaaggcatattcaagtctttccagccaaatgttgcgaaaaatggcacggcaccagaatcgcctcaggctctgcaggccaatccagcagcattttcgcgttctcaatcgtttcaagagacgacttgaggagcttttctgtttgttttctgacataaggatcatactgctacctccacaggaatggtcacaatgtttctatccagtgtgatcttgagctcatatgttgctagagccagatcaaatctagcaactcaaatctggcagagttgccagtgatgaacttggttctgtggtaatgtttatgttgatcaaaaatctctgcttcttcccaaggagagacatgtgagc

SEQ ID NO: 27409 - DNA, 457 bp, Oryza sativa
tgagctgaattataagaggctctattgtactttattgtatactagattatggagagagtagagtagaagaagttggaggagttccggagttgtcggtaatccacttcttatttcttttgctctgttaattactctgattattatagaaatatcttttgagtaatttagttttgcttagtgagatttacttcttgattagttcctaattagcatacaggatcatcgttcattataatcaattaaaatatagtgattgctttagtgtgtagctaacattaaagtaagttattaactacttagacgcggtgtctaggtagttgatttccagtgtttgctctgcatcccacagtaggtgtgaggtggtgacagccctcaagatcactaaagtcctcccagtccggatgcgtagtagagcgatatttcagagcaacaggctggccagtgcccgaagtatcgc

SEQ ID NO: 27410 - DNA, 414 bp, Oryza sativa
agcttccgctgttctttatatttatttgttttttctgcctatgtaactatgaagtagttgtgatttagattattttcgtcttaagtgtatttttgctatgtattttcatgcttaagatgaaagtgtgaatctagtgcacatcttgggaactagatttacatgagtatgagttaagaatatttgagatgttgtagatctttagccatttttgtcaagtctgctgaatgtgtaacacatctggtcgccgcctttgagtggtttgatgggcatatctcagactgaagttgactggcaatgtctccaatattcttctctcgaggcgttggatgtttcattatgtttgtttgatgacttgaattattcacttcatctctcaaatataatgggaggtccggagagcctacgacaatatgt

SEQ ID NO: 27411 - DNA, 461 bp, Oryza sativa
tcctattcctgtcattggggatcaaaattttccaattgtgcaatatgcagacgatacactgctattcatgcaagcctctgggaaacgacttctagctctaaaagctttattgaatacagtgactctttccacaggattgaaagtgaattatgcaaagtcatgtctgatacccctaaatttggatgaagagaaggctgattgtctggcaaagacttttggttgtgtcctgggttctctgcctttcacctatctagggctccctctcagttgttctaagcacaaggtagtggatttttctcctctcactgatcggattgaaagaagacttgtggccacttcttccttcctctcttatggagataagctaactcttgtaaattcagttctgttagcaatgcccacttactatatgtgctcccttcagcttccggtggcagtgatagagaatattgatagagtaa

SEQ ID NO: 27412 - DNA, 411 bp, Oryza sativa
agcttatacctttctaccgaatagcaaggatctaaataatcagccatgttagggtttctatatgatattatgagagctaaagcatgtgggcatggtttaccagaaacttgccactctctacaggtgcatgtatggtttactagattgacagcatgtctaataatctgatgttcagcagtgatctcagtcacctcagcttggtctctatcaccttgaactaccttcaagtggcccagttctctagtcattgcattgagttgacaaaccacaatagatagcatcacaccatccaatttctcacctatcttcctcctcctagccaatagattcattgtctttgacctaataccatctgcaagctcaacaattggaagatgtttcatatctttaatccatttgttccatgactct

SEQ ID NO: 27413 - DNA, 460 bp, Oryza sativa
  unsure (1)..(460): unsure at all n locations
tcaaaccttgagaagacaatntcagaatttgctaatgaatgattcagagaaggtaaaagactatttctcaagagttattgagatcgttaatcagatgcgcctctatggtgaagatataaacgaccagaaggttgtggagaaaattttaatcagtctgcctgaaaaatacgagtacattgttgctgctattgaggagtcgaaagacttgtcgactctcacaattcagcaactaatgagctcgttggaatctcacgaagaaagaaagcttcagcgcgaagggagctctattgaaaatgcatttcagtcaaagttgagcttcaggcctcaaaactcaaggtttcgcggaaattttcaaaaaaaatggatttccaatgcgagaccgtggttatttttagaaaaatggcttttccaggcagaaggaagatggtcaagagagaagagaaaaaggtacgtccagttc

SEQ ID NO: 27414 - DNA, 402 bp, Oryza sativa
agcttgttattatcacttttgatcaacaatggtttaaagatacctggctccactgatgcttagactctcaagtttcttgggatggggaaggttagagtcaatatgatctggtaactctgggtttgaaggagtaccctcgagtgtggttgtgggaatagtgattgtcagagaacggatgcactcatgtaggtcgctgattgctttaagcaacttctcgaggtgacttttcttagcattaataaccacacctagctttctcagctgccatagctttccaatatcttccaaatcatcactgcgctgggccttgacattagatagtacctctatgtttaccatcttgtctatcctgtgaggaatatgaacgctagtgcgaaaattcttagactttggtcaatgtga

SEQ ID NO: 27415 - DNA, 463 bp, Oryza sativa
actcagcttgccaggtaactctatgtagcacaccactgaaccattattatctggaggtcctcgccaagctacccaagttacagtgtgttaggctccaacacatttcatgcacagggagcgtgctcatcttcaaggaagatgatttcaaatgtctcaagtaccttcttattgagggttttaacttgactaatgtcacttttgaggatggatcagcctgtgagctcgagaagatggttttatcttccaccaccatagagtctatctctggagttgatgggcttccaaaattcgaagagcttgagttgaacaacagccctgtcccgaatgaggtgaaagaagccattgaaaacaataaacggataaatcttaaatgtaatgaaccatgaactcaagaccaggcaaaacggagatgaacaagaggatgaagacaatgctgcaacatcctcattctgctggaagaaac

SEQ ID NO: 27416 - DNA, 390 bp, Oryza sativa
  unsure (1)..(390): unsure at all n locations
agctntcaccgtgacaaatggtgcatgcttcttacacaagtcatgcctagngatgagagagcaaatagtgtggtggaatgggacaacatgtgccgcacgagaatcgcattaatgtatgtgaagcgacgcatgtgaataaagctgagatgggcgcctacaccatgttcgcaacttctcggctcaacagcaaccataaggtaggccctgagttggcctacttatctggtgtcgccagtaatgccagcgactctagcactgccgttccatcttcgtgttaccttttgcacaatgttttctgtgagggagagagagagaggaggaaaaaatatcgtatgtgaaacatgtatcttttattttctaactgactaaaaactgcccggcgttacaaag

SEQ ID NO: 27417 - DNA, 335 bp, Oryza sativa
tcatgtgaagatcgtcagccaacacaggcgaggtgactttatcttccactgccataaggtcccttatcatctccctatctaatatatcaacacataatctgactatgcctgaccataggccctgcttcatctttgtattgtagactgtcatccatgataacctgcggcagatactcactgaactctggccatcaacagccaattgtgatacagctgctcctttgtttaagagacacatgacaatagctggctctctgctcatagcagccagatggagtgccgtgtatccacgcgaattcttcaaattcaagttgcgcaagtctcaagtctaacaa

SEQ ID NO: 27418 - DNA, 415 bp, Oryza sativa
ctcgcgttggagcatgagttcagcaccttcttatgatctaatactcgagtcaaccaccatggagtgtgcggcggaaaacaacggataaagtatcggtgcgcatgtcttgatatatagtatgagtatcggaaggttcttaactttttccatcaagactttcaagcgggctggtcatgtttcttaatgtagccaaattgtgttgccacttgcggctctagtccactgggagctcccacaaagaatatgaagaataatcctttaaacaatatttacacacatgggcggaatcccacaaggtgattttctttttcctaactcactgtattcttaagaaatagcgaacaaatttattgcagtgtccagaacagtaggaaagaagaatcatgacgatgttattgcagcataattccaccga

SEQ ID NO: 27419 - DNA, 408 bp, Oryza sativa
  unsure (1)..(408): unsure at all n locations
agcttcggaggatccctatgcctactttcattaggagatgaagacgatgacgctcagtaggtcttagtacggccgttgcctgtggcaatggcatgccgctgcctgaattccgctgccttatctatttctgcttttggatgtattccggaccgctcggtccgatgatttaagacaatgcctacgggcttatgatgtaataattagcactagactctcgtgtatgtgcttttggtatttcagctatgaactcgtgtgtaccagactacttgatccagggaaatggtattgtttacacgaatgattcctgttataaaaacaggggtccacagagctggcatcagagccatacgactgtangaaaagaccataaggcgccccaccccttttctatattggccaagggagaaa

SEQ ID NO: 27420 - DNA, 485 bp, Oryza sativa
  unsure (1)..(485): unsure at all n locations
gacctatgaaactcaagctgatctttaaataatcatgaaactcatgctccattngtgaccatgtagaaattgaattatgagcaagtaaactataccatgtagatgcaaagtttgacaaagaaagaagaaacaactttaacttaagcaaatcattactaccggccttaccacattgatcaataaattggccgatatgctccattgttgttctaacatcctcacctataaattttgtgaagttgggcacctcaaatccttgcgggtatgggaccgaatctacgtgtttaggatatggcctttgatatgtatgcatggctactttggattctatttcactactatcctgcaagacattgtcatcatcttttccaacatccacatgaccgatttgtgactcggtcttaggtgacaatgctatttcactttcgcttgtgatacaatccgaaccgtcatttagttcggctatatcttanatgatgctattc

SEQ ID NO: 27421 - DNA, 258 bp, Oryza sativa
cctgggggcaaccagacagcatccaacacccatgaaggcctccagaaaactaaaacggccaaccaaagaactggaaaattgcaaccctctcaaccgccgctcaaccgaacatcgatggcaacggccctaaggggcagattggggcttaataaaaaggaaccagaacggctcctgggacagaatccggggggaaaaaacagcaaaaacgtctggacaaaagtaaataataaacacaatccggggtagaacttagaaaaa

SEQ ID NO: 27422 - DNA, 385 bp, Oryza sativa
ggggagaggcaaaagagaagacaaagatggtgattagacttacatcaacaacaagccaatgggttcataccaagggaggaagatggagaatcttatgaatgcttttcaacaagtttgcgccgccttcgagccactaagtgatgtagatggtgaaagtggggatgatgataagggaaagaacatctccgatgtttgcttcatggcgcgtggtgaatctgacatagagtatgaagatcatgaggtaagtgattttgaggaagctattaatattttgagtgaaaagaataagaagtgtgaaaaaatgtattgaaaacaggaatttatcattaaatcttttaaatctgaaattgctagattaaaatctcttattcctaatgatgatgat

SEQ ID NO: 27423 - DNA, 378 bp, Oryza sativa
  unsure (1)..(378): unsure at all n locations
agcttnaactaacacgcgtatcttccatatgtttttctgtgctgnaaatatgatggttgttcaacctgataaaagaaacatgtatgaccaatactggcttatcaatcatttgaaggaatcatatcctttgattatttgcttctttttgagctgtaatgttgagctgttaacttctgaaatattgaaactttaatcattttctattcattttctaatgtgttgatttttgttcatatgacttaacgatttcttttctctgggatgcgatttaagtattgacatgttgcctgacttttattatgaaaattattcttgggcttggtaagcacttggttttaatacttatgtgattaccaccagttaaatcatggaaatagg

SEQ ID NO: 27424 - DNA, 347 bp, Oryza sativa
  unsure (1)..(347): unsure at all n locations
ttgaccaccgntgaccttagtggcgagcacgacgctgtttcttgtgtccggcgggcccgcagccagcggccgaggaactcctcgctgcgcccgtgcgtctcactgcgctgtgggaccgggtacctggaagacattttgcataaaagcccctccgataatttatccaggggtgtttcttggaaaagaggaaaagatgaggtgggggggggcaggatgagaagtggagcgtatcattacatctcggcggagtcgcaaaagttgacgccggcgtcgaatgcggcgtcaaggaggcggagcgacttcagcagacggctctgctcacccatcgtcatcgacccttcaacaca

SEQ ID NO: 27425 - DNA, 371 bp, Oryza sativa
agctataaagtatgtgtcgattatagatttctatgttgatacattgtaaaattgccaagagctacatcctgttcagagaagtatgccccactagtttacttccttgaataagatgttctacttctcgaaaaatttcatgcatacagttgttgcggagactcctaacttctaaatataaatgaagaaagatagaactgggggaatgtacaattttatctgaaccttcatccttttctcttgcctcttgccaaaaaaaaccaggcctcagtgcctatgccatggacccacaagaagctgctaagtcacttgtttctcttctagaggaagctgaaaaaagaatttctgtggaattacgtgagcaaactcctgtc

SEQ ID NO: 27426 - DNA, 494 bp, Oryza sativa
  unsure (1)..(494): unsure at all n locations
gacctatgaaactaagcttnggtgtgtgtgtatgcttcatttgaacgtgtagcttcatcatgcaagaatacagagctccagtattgagagagctagaactcacctttaacactaactatttgtgtgcagaagttaagattaccaagttatgttgtttcatataacaaattaacaataactaccctatgttacaggatgatgctagccttccaaatgttctcctgacataaattggcttagagtttgatgcagtttttttttcactgaatgttttcattcatcttttgcatcttctctattctttctttcttcagtcgagtagctattttatgtcaaaaattctggtaaacatataagcatattaagcaaatagaccatgtgtagtgagttcaagatatcaaccatatgtaaccagggagaagtgtgtaccacctgcaggtgtagagaactcgccgagatcaaatctttgaagagagggcgtccatcgtggagcc

SEQ ID NO: 27427 - DNA, 415 bp, Oryza sativa
agcttgcattgcgcatgctggcagactcacttttttttattagtatattcctcggatgaaaaagactataatgtaagtttcaaaatccaagtctatgctctcctccttattgtcaccattgtactgctcttggatattctgtatttgagtcctgatagtttacaaggacagaatgagctaaatagctaatcttgttaagatgcacatatatttcacataaaaaaggagatatattcgattgctcatgtcttatgcttttacccgtaattagtaaataaagcactgcagatttagttattaagcagaaacttagtggcacggttttcttcttctgctttgttcaaacaaatatagatgtaccaaactgtttgaagtgaacaggcaggggaagctagtaaacagtgctatatgtcaa

SEQ ID NO: 27428 - DNA, 466 bp, Oryza sativa
  unsure (1)..(466): unsure at all n locations
ngaagatgatggtcggatgtcaatcctaagtgctcaaactgattcttcaaagaatccactccaatctcactctaatcactcagatgcacttgatccaaggagagcttatgggaataggtctaaaagttctaacaacaacttgctcaaagcaggggtaggtggagttaaatattcacctacccgaagctaaccattactcacaattttgaacttcggaacatccggcttgagggctgagggttccggacaatacttcggttttggaagacatggaggaccgaaacttttcgactcaaactccggaacttctgattagccctctctgctagctagagaaactgtggtggaacttccggaacttacgtctggaacttctggtctagcccttggccaaacagagagctctatgtgaatgttccgaacccgaactttgaagctttccgcctggccaaacacaaagctcttt

SEQ ID NO: 27429 - DNA, 420 bp, Oryza sativa
agcttgctcgggctggaggaggaggaagacatatattatggggtgggactttagtcccaggtggtgttaaaaaccgggactaaagatcccgggggggcctgacaagccctgacagcatttgactttagtcccggttggtgttaccaaccatgactaaagatcaaatatgcctctttagtcccggtttttgttgcaaccgggactattgtggaattcggcagaccgacgaaagatggtttctccaccaatgtagatagaattttttttcaccatctatatagaataaaatcggagagtcgcgtgaaaaatggtttggtagtgctcctatacacttcgatttgtgtatatcttagccgccggttcaaattaaagaattcacaatcgttgcctatactagcaaaacgattgcaatatttcatg

SEQ ID NO: 27430 - DNA, 476 bp, Oryza sativa
  unsure (1)..(476): unsure at all n locations
ntaacatgctatgaaataattatagatgatacactaagtttcatatattacaagttgctttgactttntttagtcaatctttntcttaactctaactaagtttataaaaaatatagcaacatttccaacacaaaacaaacatattatcaaaatatattcaatgctacatttaataaaactaatttgatattataaatgttgctagatatttctataatttttgtcaaacctaaagaagtttgtttcagatagaagtcaaaatgttataatataaaatggaaagagtagtaattattagtgggatgttgcacacttagatattgagggggtgttttagatctaggggcgtaaagttttggcgtgccacatcggatattatatagggtttcgcgtggggtgttcaggcactaataaaaaaactaattacagaatccatcagtanaccacgagatgaatntataagcctaattaatcca

SEQ ID NO: 27431 - DNA, 415 bp, Oryza sativa
  unsure (1)..(415): unsure at all n locations
agcttcttgatcttaccaaccaggacatcttactgagcttgagatttgattttacggtctacaaaacacatttataataagaatctgctgcattaaagagaggacagttcaaattgtcagctggcagtaccttcaacctccttcaaggctgagtccctttccgcagccagttctaccttgtctcttttcaagacttctatttgcttctccatttgagccatcctggtggcttgcgctgtttgaaatccaaatgtttgaggacccagttatgacagcacaaatgggacagatctagagattaccttttgatgaaccactcagctcgaagttggagtcctggagctgtgcaattcgctcccttaattccttctccgttntcttggcatgctccttggcctcgtgtagctgttcccta

SEQ ID NO: 27432 - DNA, 442 bp, Oryza sativa
taaagccatggaatccctttatgcatatctggatctggattctgcagaacaaacatataggatgagtagtatctgatataaatataatactcgagaaaaaatcaagtattttaaaatatttataaatatgtatttctcctcttgtcaattttgatttccccgagcagatgactccgtacgtttaaacactctgtccgactagtcatagcccccaagcatcgggagtcggcctaggcacttcccaaacatgcatatgagtgacatgagtttgtcattaatggaataaagtttcacgaatcagaatttactactcgggtacttttgcaattgtaaagagcagaaaataaatttatcttatctctatgcttttgatttattctgaataatacttagaaccttgcgttactcagtccatccaacgagcccccgggtgctaggaatc

SEQ ID NO: 27433 - DNA, 469 bp, Oryza sativa
taatcgatatcgtgaggcacaagggttcatacaagtatattctatatgttcagccgatatgatctttatgtatgcccggtggatcaatacgttctgctaagggccactgttgacgcgtggaccgaaaaggagttttcgggttataaccgagtgtacatgaacctacagggtcgcatgcttaatgggccggaataatgggtttggatggagatccaatatgagcttaattcggatagggatccgaataggagtcctacaggccttggaagcccgagtgatggatcctatatatgcgtgaggggtgtgactggcggatgcattgcatcacgtgaaaaaccctatccgtcactttcctccccgagcaaaaccctagccgcgcgcgggtgctagcacatctgcgcgtggcgtccatccctgtacgtgtggatattggtagacgcgccgctggtttgcagtgctgatcggcgtg

SEQ ID NO: 27434 - DNA, 330 bp, Oryza sativa
agcttctgtggcgatgaatgaactcggtctttttatcacgccatcgaagctattcatcagttgataactgctagtttgctcgaataatgtgtgagatgaatgaatcactatctaacttatctatggtcaacttgtgcagaaagggtcgtgtatgtaacattaagatcacacgaatatgcgaatgcaccgagaaaagcacatgtttgcttgagagacaagaacagaatagctattatgagtaatccatgtattgttggctatcgagtaaaatcgagattcgttatgtgcacattacgatatgagaacaggatcccatatatgaacatgacg

SEQ ID NO: 27435 - DNA, 402 bp, Oryza sativa
tgtgcaggcggacttggcgcggtgaactcggagattcttatatatctcagcagatacatagccattaatatggtccccaaatactcctccgagcgagggatgacagagtacaagtccgagattatcgtgataattcagctgaacctccgcatattcctgcagctcatcagcctgtgccacggccacactgagctcctactcatgtactacctcactcccaaccaaaggcttgatggccctctgcaaggcgatgtgaccttgctcacatcgacaatgaagccattaattcacactcattaatattttagacacccatacacattattacgtgcaatgggcagtctacatatgtcatatgaaattctctgatcacgaccatggtattgtataagacaacatagt

SEQ ID NO: 27436 - DNA, 328 bp, Oryza sativa
tgatggccaagccaatgaaaaggcgttaagttatatgaaagtgagggccaatttacattaaaaacatatttttggcgccattatgtactaataacaaattgtagggaccaacacaagcttccataagaaatatatatatagcctaagaaaaggagttacctcgtttgatttgaaaacagagacaagaatacaattgcgctgaagtggctacgaaaaatattttattggaaaactattcttattattatttggacctctgctttgttcgcttatagcctaaggattgtcaaaccagtgtaaagtaccgtcagctagaccgaaaatggga

SEQ ID NO: 27437 - DNA, 471 bp, Oryza sativa
  unsure (1)..(471): unsure at all n locations
ntattatataggaatntaaactgcaattgttctgatctgattttaaacacttaanaagcaagcaaaaatccttattaagatagtcatatcatatgcacatgatatcgaccgtcgactgacccacgagcaagcaacctaaacacacaaactaacaaacaaatgctagacaatcgataaactaatggaaaacgagcctaatgctcggaacggctcctgcggtcagtggagtcgaaagcgtcctcctgctcgtcaccaggtccctctgagcgactcctggagcctggcagataagtctcgccgctgcccggctctgagccactggagctgttgctgctgaggtcacgactgccactgggagtagctggcaaccaaccttcattgccactggcggngaccctgactgctgatgcatgcgcgaatgagagagcggatgcatgagctgacactggaacgggaagtggagctagtgct

SEQ ID NO: 27438 - DNA, 396 bp, Oryza sativa
  unsure (1)..(396): unsure at all n locations
ttaaaatagccatgaaaaattataagagaattacaaaataaaatattgtgnttaatgcgtgcgaggagcttgctcaacacatgaaaggggggggggatgcatttgcatgtgagacgtcctttggactatgggaactaacctatttactataaacattggataaaaaattatgtttcaagaacgcctaaaatatgtaatcatattccaaccagcctctctttctaaaagtgggccgtggatatatatttggggagcgatttatttatagacgagatcataatttaatatctaatttatatcatgaggccttttgaagattcttctttactaattgagatccgtacggaatgaatccgtccactcaaaactataagaaatcgtccaccaacatgatat

SEQ ID NO: 27439 - DNA, 401 bp, Oryza sativa
agcttgcacgcaggtggattatacaagttctttccgctatggagcggaacaccctactcctgtgtttgggattatggatgagttttacaaaggtttcttcactctagaaagcgcgctcacttcctctcttctggagttcaagttttctgggcgttatccccctgtctcagtgggcagggtcctccttttatagctcaaggggataccacaagcgcagcctctacctaccctctatcggagggggatcccgctctactttttctgggctttaaaccgtgccttctcccggaagctaagcaacaaccggttctcgagtggaactcggcgccgctccccgcctgacacggaggacagccctgtcattccctcataaatgaacgatgacttgcgacagcccttcc

SEQ ID NO: 27440 - DNA, 473 bp, Oryza sativa
  unsure (1)..(473): unsure at all n locations
tctcactcaccgaacttccctggagaggattagcactactggtagtggaggaggacgacgccatcaagtaacgtcgctagattagattggatcaggctctgataccatgtgaaagaatttggcagaaaagccctcaccgtggcgtttacagaagcctacgagatcagcaacaaccacgccatctcaggaggaaaacagcagcgacaacggatgtaacagaaagagataaaatctaatcctatcttatcacaactcagccgatcattatcacatgcatggatagaaatatgctcaaccaacaaggagaagaagatatgctcctggtgccctggcgtggtttatgttctttgttattgttcgtcgataaaatggcaacttcccccaaatccttttcagacgattntttctcttctttttccaggaacttgttcttaatttctgatagcagntcattntgggtcacctggataact

SEQ ID NO: 27441 - DNA, 413 bp, Oryza sativa
agcttctcttcgaacaaagcgtcaaactttttattagagcgcggagctagcccaccctatcacccaaacaacccacaatcatgtagcttacatgagaccatctcgtcatggtgtggctgccatatagcaccacctccaccaagttgctgcagcttatctcggccaaaagtcgctactactaagccatcatcgtcacataatatggtactcatcgcactgcaatgcgaacaagctcctgcagccccaccgtcgttgctgcagaacctcacctccaccgagccaccgaagcttatatcactggagaacctctgccgccaagctgttgacattgcaatcaacaacctccacgaaactatgtagcttatctcgctagagagccatcgccggcgcataccaccacctctctcaagccg

SEQ ID NO: 27442 - DNA, 458 bp, Oryza sativa
  unsure (1)..(458): unsure at all n locations
aaaatattactccctccggntaggttatttgatgtttttgactttggtcaaaatttatagaaaacaatagtaatattttcgatctaagataaatttattataaaaatatatttaattattaattcaataaaactaatttggtaatgtaaatattactatatttatctataaacttgctcgaacttaaagcagtttaactttgaccaaagtcaaaatattttataacctgaaacagagggagtagttgctatcatattttttgcaaaaaaaaaaaaaaaaaaaaaaaaaaacagttccagtccatttgaacctatttatacacatttagagaaaaagaagaatggctttgaacctatttatacacatttagagaanaagaagaatggcattgtcattgatatttgtcgcctatttacaataaacaatataaggccagaaaaattttggatgtgacacat

SEQ ID NO: 27443 - DNA, 419 bp, Oryza sativa
agcttaagctaaagatctttttaattattcgtctgtttattgaaatgaattatctactctgtgcttgaaaaaaaatttctcaaaagatttttttctactgcgttggttattttttttaattttatttataaaaatatttaatttgtccctataatcaagtaaataatccatagcaataataatctgcttgataatctgttataaaagacttgaacctattctttttacattaagattcagattttacctcgattttcgtttgcatgcttttcaactaaacagtgtgtttcatataagaactcaaactactaaacagtgtgtttcatataagaactttctttatagaagttgctttaaaatatcaatatatctatttgtcacgtttgtaataattaaaacttaattgattactccatctg

SEQ ID NO: 27444 - DNA, 291 bp, Oryza sativa
  unsure (1)..(291): unsure at all n locations
tgacaggctntaccctctntttggacctactttagcaacttttttatcacatgataatactctcagggacgtatttctgcggtgatgccttgtcgtcttaagaatatttaaagtacactttaccatatgctataatcattggcaaagctaactgacttgtatgattactgaattctctgaatttaccagatgctgtaatcattgcaaagctcccaggcctgcatgattaaaaattaaggcaacacattacttaccgagattgtgatagccaactacttgcttatataatta

SEQ ID NO: 27445 - DNA, 417 bp, Oryza sativa
  unsure (1)..(417): unsure at all n locations
agcttcattgaatgcaaaagagggctttgtgaactctctagttgtgcttcctccacgcctttaattctccaaacacaacttccatatggttggtggcaccacaaagtgattggttttgtgcatcgcacatatggctgtggcatagtgttgacaaaaaaaaatcgaacacactggcctgngagatctgcttagctcctgtacaggtctaaaaattgatgagatgtgggcgtgccagtcagtttgatcctgcaactgacaagatatgcaaatagtagatcaaaacagccgatcaactgacaagccgatggagtagttccagccgatagccgataacagccgatgccgataccagccgatagagatagggtttaagcaatcggctatatgtccaatgtagataatgatataaaggcaatc

SEQ ID NO: 27446 - DNA, 483 bp, Oryza sativa
  unsure (1)..(483): unsure at all n locations
gacacaagaaactcagcttatcaagtcatcgccgccgtggagaatcttcagtatcggtatcttccgaaaccgatccaataccaattcctcctcgtgcacgacatcaattggtgtgaggtattggctggctgcacacaagccggacacgacgccgattcccaccaaccaatatacctcgatgcatgccgcacgaaattctccgagaacaggcgccgctgcgtcgccaacttgccgtgtgctagccggaattggtcaaccaagcgtgcttgcctaactatgtcacgtacacatgcctagacacgtgtatgcatgcgacaggtggcattgctcttccaagacagcaagatattgacgtctaggtctactgcatgcatacatatatcttctattgatagtatgtcgggcatgaaaatcaaggtatttagtagattgattntttaaattaatctactaatttcgtagatacatccggcatgtatctac

SEQ ID NO: 27447 - DNA, 458 bp, Oryza sativa
  unsure (1)..(458): unsure at all n locations
tgtctctcccaatgctgcgtgcgtcgcaagggatgagcttgtttactacgaccttgcactctacccagctctactcgatgatcaaagccagcgacgccgcgctcgcgagctctgaccccgccgtcgcgtacgtaccatcctttgaacacgtgaaattntctttctaatttgtgtgagatgatatgagatcgaattgaactgattcgtgtcaaaatcatggcaaaaaaatctgtatggtttttcaggtcgacttgcccaccaggcacgcttgacccggagaaggtgaagaacaagatcgtggtgtgcgtgcgtggcggcgacatcccaagggtgacgaagggcatgaccgtcctcaacgccggcggcaccgggatgatcctcgcgaacggcgagatggacggcgacgacatcgtcgncgacccgcacgtgctctcagccaccatgatcacctacagcga

SEQ ID NO: 27448 - DNA, 414 bp, Oryza sativa
agcttatgacaatgcgaacgaagatgatcaattttaccacattcaaagcaccgatttggaccacatcttttcctgttcctggcattattcatagctcgagcaatacggttagcgaccaaagccaaatcctcctcctcgatttgttcgagttgatcatcggatatggcattaaaagcagcaagaaaagaaggcatagatgaagaagcatcaacatccaaagaagaagtagaagaaaccaaagcagtcgacttagaatcaacttttcgagaaagaacattcatctcatgtgttttcaattttgtgtaaagtgaatccaaagtcaaagtagacatgtcaacagactcctgaatagatgtaactttcatctcccaaatagacatattaagaccattcaaaaagtgacgagaaatctct

SEQ ID NO: 27449 - DNA, 473 bp, Oryza sativa
  unsure (1)..(473): unsure at all n locations
tattcagaagaaaccgagttcaaaaaaggatcgtgaagaccacaacatggcaattcagttttatctaattaggcagggtgtggtaattttcatttttatctttcgtcaagttttcttagtgtccgatcaggattagtttattttcttttatctttaggaaagtctgtgtcgagtccaataaggactagtatccacccatgtgtataaatatgtacactcgaggtctctgtaatatatctccacagatcaataaaattactttcacttcatcggtaccctaatttattcccaacgagttcttagtttcgaccatggactgcatcggttaagtctgacctccagcgaatntgcgtcatcttcacttgcatcggcgtggctaagacttccttggttagatgtgatattctatacgggccagagcaagcgttgcctatccgatggcaccggcgatcctcgtatcccactcactcaca

SEQ ID NO: 27450 - DNA, 399 bp, Oryza sativa
gccccggaccttatatcaccgctgctgcagcttaaaacattgcatttctgactttttttgtcttggcaaaagatatttcttattttctgatgagttgcttcctatcctggagaggctagagcatttacggaggtatagtgttcataaataaattgtggattgctctagtcttttcattgctcacttaactgtgagttctcatatttggcatatctgcatttttttttgctggcctaataaatttaattaattgatcaaatgcaattataaagattcccctgtaaatgtgatgtattaccatattttgcctaaagatgttaccaacaattctcatatacttaaacttcatgcttcattaatggctcgaaatgattttttaaatggctgcacgacaagtcg

SEQ ID NO: 27451 - DNA, 476 bp, Oryza sativa
  unsure (1)..(476): unsure at all n locations
tcccatctggcatagtagtacatggtatcttctacctattgttttgtagaactgaatggagtgatcaagcggaaaaaaaatccagaaaaaaatacatatgaaaaatattatgatttctaaaattttaaaataaattagataatgtctattaaagtcctctgaaatttatgtgttataaattaactctaaataaataggacgaacaatgcatgcaccaatagaaaagggaaaaaatgtacgattataatcacataccctttatttcatcaattatgtntaaaataataataaatttattgaggaaaagtcttgcattcgaacactttgtctcagaaccaggtcacacatttaaataatatataaatccatcgattatttagttcgttggtctattgatttataacgaatgatttatctccctttgatgaaatatcaaaattctttactaaaatatcattttctgacatcaatcaata

SEQ ID NO: 27452 - DNA, 375 bp, Oryza sativa
  unsure (1)..(375): unsure at all n locations
ggatagtggaaggcggcgcgaagatggaattgaccttatatactatgctggagagccaccactgctcctccatgaaggagaggcagagctcacggatatctgaacacatcggctcttgagcagctcggcggnggtggctatgagcttgcgggccgggataggagcttgcccaaggtgacaatgctgaagccccaagcctcatgcgcggtagtaaagatgacattgcattaccaggaggaccagcccgtaccgcgcacgcgctccaaatggtgggaagcccgtcggcaagcggcctccgccgtcgagcttttccccggtagccaacactatnttcctaaccaatggcgggcgtgcctgaaggtcggggctgagatg

SEQ ID NO: 27453 - DNA, 395 bp, Oryza sativa
  unsure (1)..(395): unsure at all n locations
aagcttacgagcggcttgcgagcagcttgggctctgctcgatataaaagcgagccatggaggcagctcgagctcggctcgtttagttttcaagccgagccaagctttacgagctcaagccaagcccgagctaagctcacgagcccgagctttttatccacccctactgacggcgagtacttactaagatccataaacttacaaaacacgtatcggaattcgtaaacttgatttaatatctcatcccagtccaaaaccttatttgactgtggtcttgcctacgtggcatactacatggatgatgacatgtaattttttttttattntttctcccttccggcggcgacctgtcaggggcttctttcttctccgaccggctaccgccatggacacccc

SEQ ID NO: 27454 - DNA, 471 bp, Oryza sativa
  unsure (1)..(471): unsure at all n locations
ttagagaatgattntgttccttcaggagatcaagttgcttatgggtttacaaagtcactgtcagttccttcaggaggggctgtgaaacaacctaactctatcctgtgcgtggtgcatggcgcatgcatgcgataatggcgcactactggagatgggaaggctcccgtgtgcatgcgaatattaccgggtgtttctctgaacacacggtaacttaccgtgagtagaacaataaactcgggaaccatcaagcgcttaccgtgtgttagagatgactcacgggaacaccggaatccacctactttccgtctgtgcgcgtcaaactctgttggcgcgagtagtatttttctctttggcgcgaacggatntcttttggcgcgcgcctagctncgtttggcgcggcccaattnttcgctggcgcgaaacagaaggggtgttcccgtgttctttttcattcagcgcacgggaagtgag

SEQ ID NO: 27455 - DNA, 415 bp, Oryza sativa
agcttggcatgtaaatagataacctcttcatctgtctgcataaatatcttcaaatctccacttagcttgagttcaagatgtgaagctattctattgacaaatagatccagggcttgacgccgtaattcaatgaactctttgctaaaccggaatttttctggcggaaaagcaaaataattacagcccataagcaagagaacacaatattgatagttctgttcaatagtccacttttcttttctgttctagagataataaaagaatagattgttcagaaaactatgctgccatcttaccaacagcattcttctctggaaggggaggtataaaaatgcccttgtacttctcagccagacgatcatgccaccactcaaagtcactatagcgccggataacaaatttctcttgcccctaa

SEQ ID NO: 27456 - DNA, 471 bp, Oryza sativa
tcgggtactcgcatgttcttatttaagatcagttatgctgttcatgtggtgtgcataagaggaaaaattactgattactagtattaaacaagagtttagtgtcgcagctccaatattacacttaaccgactgtttcattgaaaagtaaaaacaatgaatttaataaaccaaaatagagctttgtgtcatttctttgtgtgctttgttcatagaattacaatggattcagaattccatgaacaaatgcaatctcctgacacatcaaaaccaaaaaaattcagaactgactgtaccttcaaaattttgacggatgtcacccgagtacataggaatcaggtgccaattaacaacccacgattagatggaatcacgttaattgttcaaaacttcgatgatttggctgatcttgtggagaaagcattgcgcgttctagcgaattcgcagtcgctacgaacaaataatgcacgatta

SEQ ID NO: 27457 - DNA, 409 bp, Oryza sativa
  unsure (1)..(409): unsure at all n locations
agctctttncaactggtggcaagggaaagatttattttagtcaatgtcacatgcccctcttcctttcgatcataaaataatagaactatatatttctatctagactgaggtcttgttatagtccagtgtcaaaacaatacgaacatgctatcctcaaaccccaaatggcactggtccagatactaatagatctgccaagctagatatgctattcgctaacaagggaattacttttaatatttccattactcaaacaccactttgatactgatcactgagatctagtaattcctgtagtaatcttccctgaacaatgtattcttgcacagcagcaataattattgagcataatacaactaccaaaagaattatggaaaataagagtctaatgatgattataaaaacacct

SEQ ID NO: 27458 - DNA, 438 bp, Oryza sativa
tacggaccttaaaactaagcttaggaaaaacgtgcgcgccctgatgattatgaaatttctattttactatagtactacaatatagcacaatgtcatatttatttgacaaaatttcaccatcatctatttgcatgaaacggtacaataaaatcataacttgtactaataagataaatactttattttcttaaaaaacaatagattaaaacctctacacccacaatagggtgtactcagtcaaagataatgacttcatgaaaattgtccttgtggtaacaatagtaaaaaatgcatatgttaacttcaaatgtccggccatttccttcccaaaagtactaaactctattgtccttgtgtgtaaaaatccctccatttggaatatgcagtacatgtcacgcactcacgcttgtgggtctcgagtgttgactcaccatcaca

SEQ ID NO: 27459 - DNA, 351 bp, Oryza sativa
agcttgtattaaacacctatttccgcgacttgcttagtaccaaagaactcacccttgctctatataaatatatataggtcctctgccctgaagttgaagatgaaatgaagtgaaaattacggttttgtcttggttcccagccgtcccctgaggtgttgggtgataagccgaaggtttcactgctgctgatggtggtgattcctcgtccgcgtcgtccgttgtattctcgggctgtctgagctgcaacctaagttaaggtaaataagtcctctatttattttaaggaatgcaatgaatcatatttgtcaccgtgggtaccaacactatgtcctgggactggtactgtgatcg

SEQ ID NO: 27460 - DNA, 488 bp, Oryza sativa
cggacacataaaactcagcttgaggaaactttgcttaagaatatgccactcttctaaatatagatgttcccagtatattgtactcatgtgccagaatgtgagctctatcataatcattcacttcgattgccttcttcgtggttttttttcttataaatgttctgtttataaacaggtagctgcagaagcaataaagacttttctgtcagttatacacactatagttgtacagcagactgaggagcgtcaactgaagaaaaagtccgaccaaatcgagagcaagttccatacccagttagagaaacacagcaacaatgcaacccaaaattcgggccagcctacacttgcaaagctggacacgttcaaaaagcaggttgaagaggagaaggctaggtatctgaactccgtgaggactagtcgagccatgacactgaacaatcttcagacgagccttccaaatgtgttccatgctctgatggggttttccg

SEQ ID NO: 27461 - DNA, 339 bp, Oryza sativa
  unsure (1)..(339): unsure at all n locations
ttcacaagctctaaggaatgtcatgatctaaatctttatgtctcatngaatgtacgagtacataattcttactagtactactagtagtagattacaaaaggaagagcacatgtactattttgatcatgtgtgttgatgctcatgcaagaagtacaagttgtgatacagcctttgtgtatcaatcaatcgtaagtcactggtcactggcgataccatgcgtgcccactcccaaatccttatatacaacacccgaagagacatgatgaggggacataacagccggacgttcgttgcatactactcgcacactgtatgtacagcttactataatgacactta

SEQ ID NO: 27462 - DNA, 409 bp, Oryza sativa
gcttcttaaccagcttcttaggcctgtgcattttcttttgagcctcaacaaccatgtagtctagcccaatcttctcagcctgcacacgagccaatccgcagcaagttggcagataaataaattctcattagacagaataaattgatccacaaacaacgtgtgaacattcttaatttcagactccagccaattatacatagcatacaacacttgagatgcaatggagaaggacccagacaatatatcaggcaaggcacaaataatgattcaacccaacaaattaaaaatatgaaatatgtttcagttaagatactacaagaatgtaaaacaaagtcttaaataatctaaggtcacttacatgagtgagaaaggaaaatcctcaatttcaatctaaacggagggtgtacaa

SEQ ID NO: 27463 - DNA, 463 bp, Oryza sativa
actcgtccaccctttgcaactatagttgttatttgcactagcagaaatcatcatactttagttgcaagacattttctctagttgactgaatgcaaacttcttgtgcaggccatatttactcttctttctataatcgcttgtatacccctaggtgaactcttcttcttccacatgatactgatcagaaaggtttgtatcgcaattctcaccgaatcaaatgtaatatctaaatgacatgtcagatgcatagaaatgtaatgtcatttgcttgaaattcccctacattgctttcatttgaactgaatcaggggatcacaacttacgaatatgttgtcgcaatgagagctatgagtgaagcacctcaagaggaggaagaagaggatggggtgaacattcgttattccccaacaaattcagcaactactggattcagcggtggaagctcacttggtcttccctacac

SEQ ID NO: 27464 - DNA, 415 bp, Oryza sativa
agcctttccctttttctaagcctgaagggccctatttgctggattggccgggctcacaataagcccacagtttggattgcaaggccggcccgcatacttggtgcatcctctatgctctgccatgcattttgcattggaaataagtccattttgcatcccctacctaccggcagagtttgattcgcatatactcgtttctcttaaaaatagataaaagaaaagtaaatgttcaacgtacatcaagtgcgctgtgcacatactgatacacattttctcatacaaggaaaaaagatgatatcttgtagtaaatgagctttgagatgcatttactgaaaaacaaaaaactaggaatttgttatgcaacacaaaaattaatcttccaaaacatttacatcccaaaatatccgttcaacat

SEQ ID NO: 27465 - DNA, 476 bp, Oryza sativa
  unsure (1)..(476): unsure at all n locations
tgccatcttccacctggcgccgtggcccatgccgctgctctttcgtcaccacacgcgcagccgtgtgctgcctctctttctctgtagctttgccgcacgcacgggacgacgaacgttgatgtgccttatcccatgtgggaccttgccaacgcggtcgatgcaaactgcctctcctagtggctgcatcgcccgggaggaggaaggagcggcgcanggagccatcgcttacacgtgggaacatatggagcccactgattgtttcatctttttcctaccaataatatacagcgtaagcttcacttttttttgagggggtaacgggcaggagctctgccaatttcatttaagaagaagagagaaaaggcaacaaagggtttatacaaacccaaattacagcaaggatcccaagcatccttctacagaggcagcaaggggagataagaaactaaaattntaagaaaatgagaagcaactag

SEQ ID NO: 27466 - DNA, 381 bp, Oryza sativa
  unsure (1)..(381): unsure at all n locations
agcttgatcagcggngagcagcaatggcacgttcttantctctggggagtggaggtgatgcaagcatgctcttcaagattggggcattggtggcgggagctccgttttcagggtggggcagcgcctcaagcttgggactgggaaggttggtggtgcgagatcatgctttatgagaaggggtggcactgtgatctggggtgctgggaaaattggtggagagcacggttagtggtgtgatctcaggatcccataaaaacggtggtgtgagctcaaaggcaagaaaaatgtgtgggtggtcagattatttgccccaaccttgcatcctgtcttttctctgcaccaagtggaagatgtggaattattttatcatggagaggtgga

SEQ ID NO: 27467 - DNA, 473 bp, Oryza sativa
  unsure (1)..(473): unsure at all n locations
actaagcttcgttattgtgcccgcacattatcatgaaggataccactatttattcatgaagcagctgtgtcataagcacgtgacagtcatgagacttctatgttgtgaacttcttatccttcgngcttattattctctttacattggaggagtatccggacggaaccttgatgctctctangcattgaaacatactctccttatcttccttgctanggtgtagctcgccggacttaataatggcttcctttcttgttcggntccggatgaaagccctcgcgttgttccatatgcttgagatcattgcgtgcttcgagtgtatctttggacttcccatatacgtctaagaagcccagcaggtttacgcaaaggttcttagtgaggtgcatcatgtcgattgcgtggcgaacgtccaagacctcccaatanggtagctcccaaaacatagatgttttcttccacatcgncacgtg

SEQ ID NO: 27468 - DNA, 414 bp, Oryza sativa
agcttctgaggagtggtccttccctggaccatatttttattaaatttaatggcagaggggatggtttctatgccattctcaggcgtaatcttgacgatgtaacatcatccattcatactcggaggggcagacatcccctgttccctgcatttcgcacgattgatgccctgacttactcagacattgcaacagtccaaaatgatcgtggtgtccctgatcttgcaactgaacccaatgattctcttcttgggggtgttgctatggatgatcctgatgagatgttctcttctgctcgcctatttgaagtttgcatgaagcgtccaactgatgattattcagaaccggaggacgcacgtgacacatatgacgaagatgatgatgaccatgatgactcagaagatgtattaatccttt

SEQ ID NO: 27469 - DNA, 455 bp, Oryza sativa
  unsure (1)..(455): unsure at all n locations
ctcagcttagattatttgaagatagtccaaacatacaagttttttttattcatataaaagaacaataacgacaaattttacttgcgttgcacgtacaggtgctattcgttacctgattttattatagttgtaaatcgaatttagttctacatgtttgtgtatagatttatgttatcataaccaatgttatctattataaatattttaagccgtatgaaaataacatgtgcaatattgcacctgtatgtaaaaggggtcttatccttagcacaacactcatgtctgactagtggggtagtactccctccgtttttaaatatttgacgccattgactttntttaatatgtttgaccgttcgtcttattaaaaaagttaattaattattattcttttcctatcatttgatttgttgttaatatacttatatgtatacatatagctttacatatttcac

SEQ ID NO: 27470 - DNA, 373 bp, Oryza sativa
gatccttaatgacctgagctgcagctttacatttttttgaataaaatttttcgtttttcctgcttcaaattacacgtactactttatcttctttttgggttactttcagaaaggaacaagtaatctattttggtgtagtagcagtagtatcaaacacacacaagtttgacgcgcaccggcaccggccctgtaccgaaattgtttggtcgcctttatcaaaagacacacacgcttgctttctgttgctgctgcggtgtgtgtgctggtgctgcaactgcaggactaatactaacattcatttcagactgcaacgtccgactagaaacatgtttattcaattgctatggacgctactgttatcgattcgaaatga

SEQ ID NO: 27471 - DNA, 412 bp, Oryza sativa
  unsure (1)..(412): unsure at all n locations
tgcaaaggagacgcattaattgttcgcccccttgccatgaccatcaggcccaatcgcgtcagacgagtcattcacatcgtgcaaatataaaataaattatttctttatcattttacatatcgccgatgattattatcatgtcatgtgcttttgataaattgttaatatcanacttcagcgaccccaccaatacccggtgtaacgcacgggtattttgctagtaagaaataacgaaggatacacacacataacggtaacacagcataacttacaaagtctagtggccatctatctatgcaacgttgatggcgcggaatagccaccttatctgtcttaaaaagtaaacatatgcccacatatttcttttagttatacataccttacatgtgccggcgcacgcgcgcgtatacag

SEQ ID NO: 27472 - DNA, 433 bp, Oryza sativa
  unsure (1)..(433): unsure at all n locations
tgatgatcactgatcttgacctctacactctatagtatttatttaggcctgctcatgtgcttctttctcgcctcctcccattccatggccgtcttctcgttgatgtcgagggatgatttaaggagcaccacttgctccagccgatggaagtaatcgatgtgagcagcctgtaatccgctgatgtctttgcagatgagctggagggtggtgaggtgtttcatggcgacggttntgtctttgccgctgacgacgattatcaccttgggaagctngtgggcctgcacgtggagaccccgaatgctccggaacccgcgtgcgtcgttgagcgtgagtgtgccgtccgtgaagatgctgttgtcttcgatgagcttcaggtacttgagaattggaaggcactgcatgagcaatatggcttcgcagctcaagcccgtgt

SEQ ID NO: 27473 - DNA, 347 bp, Oryza sativa
  unsure (1)..(347): unsure at all n locations
atgtgccaactacacaatctatgatcagntttgggcataacctttctaattggccttcgcattgatgcatccccatcgtgtcaagatttcgatgttttggtgcattggcctccaaaaaagttgcgaccggccaaccttttaaaaaacagactcatttgaccatataccacaccccaaaataacctgacttccaagaagggttacttcaacaaaaggaacaaatggaagaatgtaccggttcacaccggatgttctatcaaatattaccacgtcactgtatgcttcatagtcaagctgggattgactgtcggcccaaaataaatttctcagacgaaccttttcatcta

SEQ ID NO: 27474 - DNA, 475 bp, Oryza sativa
tatcatatctcataatatgatacactcataaggcattattctcttttgataatactgatgcagcagtaatggattctgctcaagaaaatcaacataaacacaagtgatgcagtcagttgtttctagttgttgaaaaagcaagtgacagatgaaacaaaatggcctagtaaccccccctgtagagatagtggaatagatgcctcacacccaatgtggggaggtgatctctcatatatagctgagttacaatcaatgctagtgagatacacaagaccaaaggtctaggagataaacagcctatagactaataaataattctaatacccccaaatcagaagaaaacttgaggaacaaccatgtagtagtagcctagtaggaggaaagtatgaaaagtatgaatggagagatagacagcacaacagctgtaaattaacgcaagcttaaactatcttacacacaggagaaaaaatgttgg

SEQ ID NO: 27475 - DNA, 417 bp, Oryza sativa
agcttgtggacaaagctatccgtcaggatatatctactcaataaaatggactgtaaaagaaaggcagctcagttcaagactcctccggggaacaatcagaagctcgcttcatgacaggacagcagggtggaccttccaccatgatcgttcgtcagcaccgtccctataatccgggcaacttcaacaatgactacaacggtggcagtcacaacagaagtgagcagcacaaccccaactcaactccacccccactaatggcaccagctcagtcagatctgccagttatgtcagctcagtaagaacagctcaaggagtctataggaaagtcacgaccctacttcaactgtggaaagcacgaccactttgctggcaagtgtccgaacccgaagcgcgctggacccatgttcgttcatgccc

SEQ ID NO: 27476 - DNA, 448 bp, Oryza sativa
taagataccaatgcgagtgcatactcctggaggtggtatgttcacaactcactactgcccatctgtgacagttgaaattcaagggtcgatttttccagccaacctcattcttctcgaatccaaggacctagacgtcatacttggaatggattggttgacaaggcacagaggagtgattgattgcgccagccgcaccatcaagttgaccaatgcaaaaggagaggtggtaactttccagtctcaagtgccgcagaagccaaggatcagtttaaaccacgctgctggtgaagaacaagaggtagcagtggagaaaaccactaagaagctggaggatattcccatagtcagagagtatccaggggtttttctggacgatctgacaacaatgccaccaaaaagggatatcgagttccggattgactttttacctggaactgcactgatccac

SEQ ID NO: 27477 - DNA, 393 bp, Oryza sativa
agcttagcttggtccttattcgcaaacattcttttatgcgctccgcaattgggagatactacaccacctttgctgggcctcccctctttgacttacttccttcaccttcactctttgctcgtttgtatcttgatgccccacagataggggagacattcaagtcagcgtattccttgttatacaaaatgcagtcgttcggacatgaatgaattcttctgaccttcaggcccaacggacataatacttgctttgcttcatatgtcgactgcggtaaattgttcccctctggccacagatcctttaacaagctaacaagttctgttaaactcttgtccgaccaaccattactaaccttatactttatgagttccaacacgcatgacaacttgcttt

SEQ ID NO: 27478 - DNA, 449 bp, Oryza sativa
  unsure (1)..(449): unsure at all n locations
tggcggtcggcaaagagctcggcggcgaccaaggatctctttgttaatgagctcggcggcagggagctccgcggtatggacctcaacggcggcacagcggcacggaggcgaggcatcattatctagcgcgccgaggtggaagcaccgagagacccttgccactcggtgagaaggtgtcacgccctaaaaatcgcctaaattaaaaatgcatattctaaatcacttttagaaattattctaaaagcctacaagctaaaccctaattttctaggaaaatnttcaacataaaaagaagctagcaaacaatttattaaatactatgcttgctcctctattctctagaattttctgggaattatttgagcaaggggaagatttctaataattgaaacaactcctcacaaattattgtatcggacaaagtcaataaaccccttccaagccgtcgg

SEQ ID NO: 27479 - DNA, 399 bp, Oryza sativa
cagcttaatgtttattggttcaacaggtgtttgttataccgaactggggaaaacactatctgaattccttttcaacacaaagaatgctctaataccgattgatatgagcgaatacattgaaaagcatgccgtcttccgtttggttggagcccctcctggctataatgggtatggggaaagggggcaactgacagaagctgttcgtcgtaagccttattctgtggttcttttcgatgaaattgagaaagcgcaccaagatgtgttcaacatcttattgcaaactttggatgatggaagaataaccgactctcaggcagaacagtcagctttactaactgtgttatcatcatgacttcaaacattgtgtcgccattgattcttgatacgcttagaaacaca

SEQ ID NO: 27480 - DNA, 471 bp, Oryza sativa
  unsure (1)..(471): unsure at all n locations
tataagaagactntcttcgtacgacctcagcaagacttgttctgtacgcatgacccatgccactggcaagttttatgctatcgaaaattntatcttgatgacccatcacctcttggaatgcatggagttcgttcatcatttccttgataacaatctgagcagatttgaccctttgcatgctaacatgtaccaaggtattcatttcattcttcttggctttgcatttctccagcaactttgtgaacaagcgatcgatattatggacactgggcaagttgtccttttcatgtacttcatagatgcggccaactgcagaaaccgcatcatgagggcggagagatgcagaaagctggcagtttgagcagtcatcaacaagctnttttgaagtagtcacatctttactgcangacacaagatattccagcttagagtgggatataacatataatcatataagcatcanaacacttg

SEQ ID NO: 27481 - DNA, 398 bp, Oryza sativa
  unsure (1)..(398): unsure at all n locations
agcttatcacctaatatcagaggggaacatgtttagctattaagagagcgttgcatccatggccacaagtcttaagcactacacatcagcattaattcagtcggcaatcacacactccatctaaccaatcaattcaatagctttcaaatacacgggtcaaaacatccatggaatggaggtgaaatggaaagctctcagcctctcatctcaccttggaaccaaagggcccgacgggcgcgtccatataaaacctcttcttcccctgaaatgaaaaaaaaattcacaccttccatctagtaaaaaaaaaaaaacttccactaataaatcaatatcaagaggagaggtggttgacctggagctcggnggagatctcctcgcgctcgagcccggtggagatc

SEQ ID NO: 27482 - DNA, 470 bp, Oryza sativa
tctgcagatggaaaacgacggcgaagctcatgatgattcttccatgtacaaatggcagcatcatcacccgaccactgcaccaggacttgttccaccatcttggcacctttgcgaatgaaatgacgctccagcacatgaataggttggggcggatcagctatcgtcggacgaagcacaggcagaggcgcatgaacttgttcaccaggggccaatgccttcttgagttgagagacatgtataactggatggatcaaactggtagcaggaagagccagtttgtacgccacttcgcccacacgatccaacacctgaaacggaccataaaacctgaaagataacttgcaattagcgcgggtgaccactgattgttggacaaacggttgaagtttcagataaacccagtcgccaacagcaaaagagcgctcagagcgacacttgtcctcttgtgatttcattctggtctgagcgcg

SEQ ID NO: 27483 - DNA, 401 bp, Oryza sativa
agcttgctggaggggcgcatccgctctatatttcgtatcttctcgggggtggcctcgatgcctccggcagagaccaataacccgagaagcttgcccgcaggcacaccgaacacgcacttgtcggggttcagttttatgcgggcggagcggagactttcgaaagtttccgctagatccgagagtaaggtctcttggttgcgcgtcttcacaaccaagtcatcaacataggcctcaacattacgtcctatttggctaccccaagaaattcgagtagtacgctgaaaagtaagacctgcattctttaacccgaaaggcattgtcgtataacaataaggtcctatgggggtaatgaaagtagttattcctcatcctccctatccatgcgaatctgatattaccag

SEQ ID NO: 27484 - DNA, 463 bp, Oryza sativa
  unsure (1)..(463): unsure at all n locations
tcgccggcctactctacccaccatcgctccgtctgtctgcttctctctgctcctcctctagccacctcctccattgcaacgtcgaccagggagcaagttcgactaagggcaaacttgtctttaatgagtgtntatctctcctattttggtgccgtgagtgtcggatagctaattaccagtttttgtgcccaacagcaaattcacgttcttgcggtatctaccagctaattacacattttttcaatgtcatgtaacaaactttgccccttgttttaaacccatatatgatatagggtctatatatttagttagttacaattagatactctcatcatcccaaaataaaccaacctcatattaaaatatgacatattctaatacaataaatntggacatcctagtatgagggtggcttattttgggatggagggagtacgtacaacccattcataccacactcaca

SEQ ID NO: 27485 - DNA, 300 bp, Oryza sativa
  unsure (1)..(300): unsure at all n locations
agcttaanaactatagacatgaacttaaagacttctttttatttaaaaattaaataattctaaaatattaaactaggttggatttgaagagatgattctgccagggtggcgaactaaacggacaataacggggcaatgacctctcatgccaagcttctttcttatacatctattattctcttataacaaggcccacttatcatttctttcttctaatcagtaactttctgtcttaatccttgaccacaacgttctccaattctacattcgatctcactctctctaccatgggcattattc

SEQ ID NO: 27486 - DNA, 479 bp, Oryza sativa
  unsure (1)..(479): unsure at all n locations
actaagctggactanatattntattatctactaaacttgttgcatacacttctactactccctccgtttcacaatgctacttacgagtatttggctacttgccatccccctctctctctccttttctttcgcaaactccaaacatctctctgagagtatcttccatacagcacgctaatcagctccaggttcaccatttgttagaacaaaatgtccatgtcgttttcgccctttaccaacattcggtctggaacattcccagatcaatgggtgccagctctccgtgtcgctagctgtcccctgtccggtgttgagctgcaaaagcccccggcgaccaatcgcccgcgggagcttgcgcggccgcgggtcaacacgtcgcgcgggcgcgccggccgtgcagagacccaggaggagaccgtgccgcgcggaaccgtccagaagcgcacgcgcacgcgcagaggagccagccacaagtcgcg

SEQ ID NO: 27487 - DNA, 415 bp, Oryza sativa
agcttgacaacaaccttaagcccatgtagccactttttatatatggcaaaattaagtgatgatggaccatgaccttacaagatattgattattgcgaggatcctaatgaagacgacgatgcacaaagtcaaacagtacaagcagcatattatgattgggactttgacaatggtgctaagtctatcgatattcaagataatagtggtcaagggtgtcataaaggttttggctttcttgcattccatcctttcaaagaggtggttttcctacattatagcttggagagagaactagcctataatttgaacagcttcaaggttcaagacttgggtaacttatgcccgaaagattatggatttgacactgaaccatatgtagaatcttctctttcataccatgctggatggaggtgttt

SEQ ID NO: 27488 - DNA, 490 bp, Oryza sativa
  unsure (1)..(490): unsure at all n locations
gacctataaaactaagctgaatcgaaggggaggaccgacctcatcagcacattttttacaggatcctttcgactggtgacactggaaggcgaagagttcgaccattcctagaacgctgcctctctcaagcgtttctatgtctagaacgggtggcacccaaatcgccaaacttgtaaaaatgtatatatcgttatgtaagaccttcgacactatgtaagcctttcggcaagaaaaaaaagaaaaaaaagaaaaaaagaagaggaaaatgaaaaaagacaaaaaaaaaaactggatgtagggctattatccaccacggaggcccgaactagtataaaatctttgtgtcctctaccttctttttacttgtttgtgcgattgataatttgcggaaaaaccccaaggcaaacgcctgatcagcgaanaaggccaggggggcgaaacgaatcggccgaagcatcacttgccgaacgattgaaaccgcaacagcttg

SEQ ID NO: 27489 - DNA, 394 bp, Oryza sativa
agcttcaccttctcgagatcgggttcgagcctcatgatgttgccgctcaatgtgtccatctccagtgtggccgctctcttcacgttggagagctcactgctgagccctgcaagtaatttcaagccgtcccttttgaactgttccttgctgccgctgccaggattaaccgcgctctgatcagaatcgaagccttctgatcggatgatctctttaaccacgaagtgaagcaatgtcgctctaacatctgttgacttgatggctgcaagctttatgagagtatcaagcttgaaaaccctcgcctcgcctcgattggttccatcattcatgccgttcccggattttagaactgcatctagcagcttcaaaaatggttctgtgctttttaactcttcac

SEQ ID NO: 27490 - DNA, 458 bp, Oryza sativa
  unsure (1)..(458): unsure at all n locations
tcctttgatggatccgactccaccaagaacacgacatcgtggctacttgactcccatcggctgattctagaactttgaagccgatactgactctaaaccgatggtaactntgggcttaccaaacataggtgatatatagctcgaagcattatcttttttgataaaaccgtttacacatgtgntttttttaagatattggctacttaagataatcttaaattttaccgataaagtatgtctctagggtctttgatgaaactgtttacacgcgtgtttgtttgagtgaagacattgctattcaaataatcgccagttctatcgacatcgtgcaatcaacctctggctccacgctttatagtctactccctccattctaaaaataatcacttatccaatttcgttgattctttttggataaagggagcaggactcangtccattctaaaaagagtcactta

SEQ ID NO: 27491 - DNA, 377 bp, Oryza sativa
agcttctatcactcctagataggttctcttattatatttgaaatatatatatgatgcacatttgggtagcccttctctgcttccatgtttggatgacttgtgtagaattaggtggcatttggagtggcatagccccattcattcaattgacatctgcaaggctctaatggatcgcctgtaaaaatgctgaaaatgcgcatgaaacaagcttcatcatctcgatgccacctgaaatacctaacttgggggtcatgaaaaatgcgcagagtggatgaaccattttcaaccaatagggggcaaatttaaaccttgtcgggacacagacgacgcgcaccatgtctcatttccttgttttgttcttggatgaaatctgcact

SEQ ID NO: 27492 - DNA, 436 bp, Oryza sativa
actaagctttagaatcaaggttcaactgatcaattactcaattcctcattttttagactcccagtccctcaatgcactacaagaccttatatatatggatggaatcatcaataaataacaaccctactggtaccggtttcctccggcttttgaaattcttttggctcatcggaatttttttagtacagaagctcctcgatggggcagcttaaccgttcaagcatatcatatataaaatccatgtatagtacatccataaaaaaatattagtgcttacacattgcacagccagctcgatgctgaaaagatataaccatttaaaataactaggtgaaacctcgtgccttgcagcgggtgtttggtatgataataaaaattagaaataatgtgtaagataactagacaatagaaacttgcataagctgatttttttttt

SEQ ID NO: 27493 - DNA, 420 bp, Oryza sativa
  unsure (1)..(420): unsure at all n locations
agcttcctatgaattctatcatccaatgagctcatttatacaacttggaatgggccaactcccaatcggcttatactctgccgacaagatccaatgccgaggaggaatttcatcaaccctgatgatggatcggctgcacaaccttcaaggaccccctttgggcagtattgacaacatagaactggcaacattcaaaagcaaaaactttgatatgtggtggggcgaatggaagctgcatctattccaccaaccaacttcaatgtatatgacggacctctntctagatgttgtccctcaagtaagtctttaactttgcttgatttcatttacatagctgcttggccgattaatctcaactaatcctccttatgatttgcagacaacagaatcctcccctcctcatcaaagcaacagtggaaa

SEQ ID NO: 27494 - DNA, 135 bp, Oryza sativa
  unsure (1)..(135): unsure at all n locations
tctattctaaacacttttatccaaaaatgcaaacacaaactttatttatggttntggtgagaaataaatatgaatgaatgttatgtacttatttgagctagtatgatgcatttatgcaaccccaacaatgagaac

SEQ ID NO: 27495 - DNA, 414 bp, Oryza sativa
agcttcaactgatgaaacatcaacatatctctttcttatcgaagtaagaaaaaatatgtaacatcaaaagaatttatacataaatattttgatataatacaaagaaacatgtaaaacatatatgggatgaaacatggaaaaaatgacaaaaaaatatgccaatccaaatctaggtccttcttactctccgatggctggatctaagattccttcgatgaactcgtgcctatgacgacccagtgctccttaccttcgatgatcttgccttcctcattgtcggagtccacagcaacggccatctccttcattgctggttcgccacgatggggtcatccccctcctcctctccactggtgacctcctagatgtcttcttactctgcccgccacaacagtcgttctccccgtcactatc

SEQ ID NO: 27496 - DNA, 405 bp, Oryza sativa
ctttcatgacaaaacctttcgggtgcgccatgtatacattttcctccaaatctccatctaaaaatgccgattttacatacatctgatgtaattccaaatcataatgggccactagtgccatcataatcctgaacgaatctctacaagagactggagaagatgtctcattggaatcaatcccttctcgttgcgagaagccttttgccacaagtcgcgctttaaacttttctatactccctctggagtcatatgtcggtctgtagaccacattacagcctactgatctggctcctttaggaatgtcttctaaataccaaacagtcggcacgcccattgatgccatttcatcttacatggctagcaaccgtacacatgagcgagcgcgtctcactggctcatcatatg

SEQ ID NO: 27497 - DNA, 427 bp, Oryza sativa
cacctgcaagcatgcaagcttgggaaactatacctcttggacctttttttgtttttaagttccaataagacacctgatgccttttcagttatacttatgccatgttcactaatacaccactctctgttgaaaagtttcctgcacatttattgcttaagttttacaaatgctcatgatcatatttctactgtggcctcgacaattacttgagtggattcttccatgatttccgcaatggactatgcttttatctttcgacaatgtaacatgtttccttcctactttgtgatttttaggtaccacagtatcaccctggatcgttactatggatgccctaaagcctttcacctgtgaagctcctaagcaggtgagcatgtcttactattatagtatatagctaaccatatttttcttgagaatcatcatt

SEQ ID NO: 27498 - DNA, 469 bp, Oryza sativa
  unsure (1)..(469): unsure at all n locations
nntaaantcaatgcacgaggaggatgcaattcctagtcttattgcaacttcccgaaatcaatattagaaaaaaatatgtgatttatcaaatttatcatttgctaaatagtaaaggcgcatattttttctacagattattttacatctgtgttttatatgtataacatgtatttatcctcgtacatgcagctcctggctatcaagaagatcaacatggtagatctgtcattatcggaacaagatgagctcatagacatgcttgggaaaatgtccaatttgaagcaccccaatatctctgcgcttgtgggctactgtgtcgagtttgggcactgtgcacttctatatgaatatgcagaanatggctctcttgatgatattttgttntcagcagccacaaggtccagggctttgtcatggaaagctcggatgaagattgctcttggagttgcctatgctttggagtaagtac

SEQ ID NO: 27499 - DNA, 321 bp, Oryza sativa
agcttgccgttcgccttgggaacgaccatctggttcgtcagccactccggatggatgacttcacggatgaatcccgcctccagaagcctcgccaccttctcgcggatgaaggcttgacgttccggggcctgccgccgcactttctgccggaccggccttgcgcccggccgcacggggagacggtgctcaatcacctccctggggaccccgggcatgtccgctggtctccatgcgaagacgtcagcgtttgcccgcatgaaggagacgagcgcgtcttcctatttgccatccagaagaccaccgatccgtgtggtcttggat

SEQ ID NO: 27500 - DNA, 471 bp, Oryza sativa
  unsure (1)..(471): unsure at all n locations
nntaaacaaatcanacctaaatgttattaacatactctattattttgttagaacattccatgattaatggaagcttggcagtcttagcactacgacttttcaattcaagatacatagtgagatgtgcttgcccgctgattgttctaattttcccatatttgacaatggataacataaaagaaaaaacaacagataacagtgaaggcattttacctggtacactctgatacttcttgctcttcctaccctcattatgccaggacctggagaggtgagaagatgatgaagccacctttgctccctttcttaatctgtttgccatgcgtacattctttaccatcatcacagcatccagacccatcactcgcatacttgccaagtcccggtcacaagccctgacagcagtgccctttcccttcaaccgatctgctgagcttcggctcttatcctatactgctgcgatgcattcat

SEQ ID NO: 27501 - DNA, 414 bp, Oryza sativa
  unsure (1)..(414): unsure at all n locations
tcacgaatcttcaagaaaacccgcgatcgacgaanatcttgttatctgttctatacgcaaacaactgaatacctatgcaaaagaccaaaagaaagatcctatttagactaatttgtagtgccattaaatagatctcaattttacggaattactggaagttgaacggagtcaatcggagttgcgaatcgggtgatatgaattttggaagtttaattggagtttctggaataggagaaatggtttatggaattttacagaaataatattctcaagaatattattgacagtcactgccatgtgggaccaaaggaaatggtttatggaattttggaagaaggaattgatttatgggacaaaggtaagaggatttattaaatccctaataagaaaaggatggagggatgtatattatac

SEQ ID NO: 27502 - DNA, 410 bp, Oryza sativa
  unsure (1)..(410): unsure at all n locations
agctttttattggcagcaaataatcaattatattttttttcacaatcagtactatggatttttttttttttgctcaacaatcgacccacaaggacattaacattaaggttcttgataacattactttgctatggaggagttccagaagaatactttttggagcttctgcaaagtgccattgaaggggctgaaaatgcatgttacgaatatgaaaatgcacttgaaagtaagttcaaaatacatttggtgcattcagtgcaatntacatgttgtcataagatttccattttatttatgtttttcaatcacctgtttatgtttgatctggactattattctcatgttgntcctacagntgcattcagctatgctgacatgaaaaatcaatgtcaacacgtatgattctttct

SEQ ID NO: 27503 - DNA, 472 bp, Oryza sativa
  unsure (1)..(472): unsure at all n locations
gtgaaggtccacattggtgaaaataacccactcacatactatttgtatggatgcaagcggggtgtgcaagcgggtttttttagcccgcttatttcacttctagtttattttttcttctaaattttatactatcatgtgggaaatgaactagcaagcgggtttttatacaggtagcgggattatccacttgcatccctaacaattngctactgtgtctattctctttgtccnccaaaatgtggcatatccctatttagatttgttctattatgatatatcatatttagttctaatttttttttaagaggggagtataccatttgacaatgcacacggcgaatgtaccgtgtacgtgttgatggccggtgctggattagctcttgctttgcgtgcttgcttccttgtatacaagggaaatactaacactaatcaagtgcggcgggagcaaccgaatctggaagctctgctacgt

SEQ ID NO: 27504 - DNA, 410 bp, Oryza sativa
agcttaaacgagcgcacctgaagcgattcttttgttttcacgttgcaggccatgattctccgcgaagcgggccgaggttgggtggtttacacatacgaggcccaacgtttcaaaggccacacgaaggaaatataacttcttcctttttaaaaaactagctaaaatacccgtgcgttgtaacgggtgaaaaaaattctaatgataatatacgttttttatgcataatcatgtcaatgacaatgtttgtattttaatgagcggcttgtgttttttttataaacggtgtttttttttcttgcacgattttctcgcatttctttctaacagatttttttctaacatgtttttttcctttcttttactaatgacgaagaccatatttttctccccttttttttgtgcttttctca

SEQ ID NO: 27505 - DNA, 450 bp, Oryza sativa
  unsure (1)..(450): unsure at all n locations
tactctagatttcatcctcttgtggcagcgttctattctctacaaattggctacgtcggaggacctatgggaagaggagttccattcttctctctcaccctcacgtcggaggacctatgggaagaggagttccattcttctctctcaccctctctccctaactcctgatggcttggatagagtgaggctcgtgttgattgtaagggtttgataacgatctggcccacgtagggttggccgaggcccaataacttaaagttgcccggaccccaacagttcataggcacacccactcggggaaaggcccaatctccctaaaagactagtccgataggggaagggtggctctcctttntaaggaggaggactagtccgataggggaagggtggctcttcttttaaggtggcttctcctcccaagctaacaggtgggatattcagggctccacg

SEQ ID NO: 27506 - DNA, 390 bp, Oryza sativa
agcttacgcacccacacaaatgcgctcctattttcttatgatgtcgacacttttatacacgggcccatatgctaattaacataaaatattggccttaatacgtgcagcgcctatctttatatggccattaagtgaaaggtttccactcttgcaaaatgcccctgagccctaaaataataaggtgaacaagctaatccctcattggctcctgaaaattacgggagacaaagaaggggtgattctggctatcattaacttggcgacatgattaagagaagcacctcccaacaaacaaagtctatgccgaattaatctttatttttcctttagatgccgcgcgccaatacaaaacatactgctccttctctctttctctctatcaagaactct

SEQ ID NO: 27507 - DNA, 418 bp, Oryza sativa
agcttgatcagctgtctgaaggcccgatcaaatttttatctgtcggcttgaagctcgtaagattgatctcatggcacagcttcaagaatgcaacgctgagttggatatggagcacaaaaagctagccgatctcccgcaagatattgaagaacagaaggcaaagctaaaatcggctatcaagaatgtcgctgatatgaccaagtccttgaaagttatccctggaactgacactcaagatgcccaagccatagaagatgtagaacatattaggcagaaggctatatcggctatcaagcaatacttatcccaataacttttgtgtaatagaacttagaaatttttgtaatcggctaagacattctagtactttattatcttgacaaccttttcgccaattaatatgacttcaaaattcgct

SEQ ID NO: 27508 - DNA, 459 bp, Oryza sativa
tcctttgcatcctccactcacatctagagcctatcttgtgtatatgatagattagatgagagtgtacgagtgttttggagatggcttgacgattagatttgtctgagcactttggataccttgtgggctgtcacttgggcttattactcttggagatcttctcctagacggttaggtgtcgcctgtgagcttccaaagatcttgtggatgtcccgggaaagtttgtgaaggttttcctcacctccgcaaggaaacgaggtaagtgagtaaagattcttgtgctgagttttcagaggttgtactaggtagagcaacttgcacttgtggtcttttctagaaggaattttgagttggatcttggtggtcactcaattctagaacatgacctataagtgttgagttgaatgctgtggacctcttctgggatctttgcataagtgaggcaaggcgttaatcgag

SEQ ID NO: 27509 - DNA, 411 bp, Oryza sativa
agcttgcatccttctacaaatgatgcatatatatgtttattgattgctttcagcaagatatggtcggccacacttcaaattttagggaccatatatccaatttgtacctcaggagtctcaaggtggtaaatttgaatttcttcctttatttcgtttgatgaatttgggaacaaaatttcatcaaacaacttcattgttggacatgctgaccaaatcaggtcataattgcatacatatatttattccccgtctcatctaagtctaacagcttgctgatttgatgaatttgggcacaaaatttcatctaacagcttgctcatccaacaccaacaactttgcagctctgcaacagcaaacgtcgcttgcgccgcaactgcttttcttagcataccatttgccagccttacattc

SEQ ID NO: 27510 - DNA, 468 bp, Oryza sativa
  unsure (1)..(468): unsure at all n locations
ctggtgagggagctctanggcggcgaggccggctgtgatggtgtctactgtgactangggtaggctagtgcacctgctgctcctaaggctacgtcagcgtcgctgacgacctctccgccgaagtcgtcgcctccgactcctctcccatcgaccgaagtggggcggagcgacgagcgaggaggatgccgccccctgctctaggctctccttcctcctcccaactcactagccacgaagcttgccgtcggcagcctcatcagcgccgctccctgtcgtcatcccactggtgccgcagcaggatggtgcggctccgcctcaactgccccctcaccgtgagtgccagcgttgagtctgcagctgccttcaccgcccacggctgcgacggcgcgtccctcccgaggagagagggggagagagggaggaagaaggggtcaaagagagactaacatgtggcgtccacatgttagt

SEQ ID NO: 27511 - DNA, 298 bp, Oryza sativa
agcttctgacagagggagagggggggagaggattttttttattctcccaccggaaatgccgctgtcaccaccttcgacggatctgcccgaaggagcgccgatgccgccgccgtcatctgtggagaagtttggtcactgagggtgaggaggaaggggtttataattcccggatccatcctgtggaaaagcctccgccggatccccctgctcgatacaccggtgtcaccgccttcgtcggattctgttcgggagccgcctatgccaccaccgcctgcggattccggtcggtgggagccac

SEQ ID NO: 27512 - DNA, 458 bp, Oryza sativa
  unsure (1)..(458): unsure at all n locations
cttcgacgacgtgcagagcttcttgtcttggttctatgactgatagtgtagcaagaaatggctcagttcttggtcggaattaacagtagctggtttaggaggagatgcatggttatcatttgtgtaatctgttcgaaatttttttaaaaagtttttaaggttgtttgtgtggctactggctacgtgattatctaagaactatcggttgatctaatcattatctgtgaacttgctggttgcgaaggtgaaccaaatgatttagttttttagcataaatttgtcgcanatttgttttataatttaaccaaaagcttttttgaaaaattgaaaataaaatcatctgtagcatatgcctacggtataatacgtcgccgtttctgcttgctcgtgccaccgcagcgcctcccgccgccgccgccgaccgatgcctcgccggtcgccgctgnctctactctact

SEQ ID NO: 27513 - DNA, 412 bp, Oryza sativa
ttatagtaacctgccgcatgccagctctcactggagatctccaagggactgattttgtgtttctgtccttggaaaagctgttcgcgcttgcttcaaaagcctaagagagtgacctcatctctaggaagaacactgaatcggcattgtgtcacgtggaagaagccaaccgatcaaaatccaactcgctcaacaagctggatgaagctaaattggaatttgagacatgtacacttgcctgcaagatgctctgaatagggcacactctgtcaattgggggaagctcgcactggaagagtgtggtcctatatggctatctgagagtggctaccagatgcactcatttcatgattcttcccatctaaaaaatgcgcgaaatatcactgacctctcaagagccttttgaggccacact

SEQ ID NO: 27514 - DNA, 473 bp, Oryza sativa
  unsure (1)..(473): unsure at all n locations
taacggctccccaatgtctccgtgctttcttgcaatntttagttgtttcttttaagaaaaaagcaagtcaccttatagtagatgtattagcaagtgataataccttaaattgcggttacagtataccgtgcaaaatcctcacaaaaataacacaatgcaatttgttttactaattaaatatactaccccattcagaattgatcgatgtatttgttcttgacagcagtaccaaggaggagtaaaatgacatgctactagaaaattattcactgccctgcctttgctgtggagaataaggcgaagccttgcatgcgagatgataagggagaggagcaataacttcgtatgaaaactgaactaccagcgcatccgtccgagataaaatcaacgcctgcaggcttttgcactaatttaccattttttgcgcaatattttctagaaagggcattaagttgtgctgaatttgctttaat

SEQ ID NO: 27515 - DNA, 416 bp, Oryza sativa
agctttggaaaagtcagaaacaagggtacaagttttgtatctttgaataacaggttcaaaagaaataaatgaaagttattaaatcaacttgctaaatttattttattgcagccagattaaatgaaacaacattgtaaaacttttgctggaaaatgagccgctagtacactaatagatgtacagtactaataacgctggaataaattttgaacgaataccattaaaagagattatgaaatgcatgtgccattagtttgtgttaattaaaagagaaagagaggagaacagttctacttttccaatatttttagagggcttctatgggtaaccatttggcataacctaaggtcaaggggctctgataccaacttgtcacgcccggaatttctatccaaaatccaaacgcttacatgtgt

SEQ ID NO: 27516 - DNA, 464 bp, Oryza sativa
  unsure (1)..(464): unsure at all n locations
cggcggcgtttctcctttaagttcagctaatttcttctatagacggtacaccttgctctccaacttgcaaatcttgcctcgattccaggtttccctgtcatgagctgctttgtctcgctccacacttactgcatccatagcactaagcatatgcaccgcatgcataagagtggcactctcttcaccaccaggacaggtataggttccatagtcttgaccatgaggctngtgaggatgatactggaaagctgatgaatccaactcttcttcaaagtgttgacgcaactctccaatggccaccaacgctgcttcttgacaagcatggcagtacgatcttcctccagcttcgaacttaaaagacggaaggtcttcactatcactagccaacgtcacacaaacacgacatttctcctcgtcggagtcatgggaaatttggcgatactcangagcaacttcatagccta

SEQ ID NO: 27517 - DNA, 274 bp, Oryza sativa
gggcacagaacacatacctcatcaacaaggggaatattgcacacaaaacacgagcctactataatgtatagacaaaaaaacatcaagcacagctccaacaacacttcaaaaaagcccctcattctgcacaagaaccaagaagtacttacaggaatccattcctactagtggcgaaacaacatgaaaaaacctaccaaaacaccatgtggacaaactatataagcagacgaaagcacatgaggcgccaacacatggaactgccaacatacatggg

SEQ ID NO: 27518 - DNA, 461 bp, Oryza sativa
tctccacttcatcaaaatcttcaatagtttcaccaatattgttctttgtagaccgatattcttgcaccctcttttgtaaccactctaaattagcctctttactcattatacaaatttatatggcttagccgtgctacactagctggctttacatagataggtacaaatttgccatcggagatactaataaaatcatagctagaaagatccctccccgataagcattgaatattcccatgacgccactcaaaagtagcatcggccattgcaacctcggccgatgtatccgcttgaacaatttcaacatcatcgccgtcccattgaattaaacattgatgcaaggtagaaggcacacaacaattggcatgaatccaacaacgacccataataacattgtagttacattgcacatcgacgatgaagaaagcggttagtaacgtcttggttcccatggtaagctc

SEQ ID NO: 27519 - DNA, 413 bp, Oryza sativa
agcttggtttgagttgcaagttgcttgaaatgctcttaaggaaacattaatatttacagaactgccattttcagcacttgagagcttgtcattttcatatctcccaaaccataagtgataatctggtgattcattcacctaaattcaagttaaaatatgatctacctactgtatttatttcataatttattgatcattttgcatgtgcatgtttatttggctcttattcgcatattgcttctttttgatatattcggagattccggagagaaacgagccatatcccgaggaggatagtgactaccctcagcagcaaggcaagcacctaagcatatagaacctatgatttctctaaaaatgatttggttgcaatctatacgtatatatatgcatgcattgcctagatattaata

SEQ ID NO: 27520 - DNA, 500 bp, Oryza sativa
ctattacggacctataaaactaagcttaacattgcgaccgatttgagttgaaaaacatctttgtatcatgcgctgataggttgctcctgcattcttcaatccaaagggcatggtgatgtagcagtaggccccaaagggcgtaataaacgaggtcttcaagcagccggactcttttagtcagatctgatgatatcccgagtaacagtccaagaagctgagtaactcgcagccggccgttgagtcaaccacctggtcaatgcgaggtaacccaaaagggtctttgggacaagatttgttgaggtcggtataatcgacacacatgcgccattgccccgtctttttccgaaccaggactaggttagccagccagtcgggatgaaggacttccttaatgaagccttgctgttaacagcttggtaattcctccttgattgcatccttcctgtcctgtgcaaaacggcggagtcgttgcttgacgggtttggcgtcttccttaacat

SEQ ID NO: 27521 - DNA, 410 bp, Oryza sativa
agctttttacaacttcaaacattaaattgttttctttaaacaaattttatcttggtccacacacatcgataaattcgtgcactaaaatgagctttttacaagttcaaggtttagatttacttaataaataaattcatgtatcaatacaatttacttaatagcaaaatttcttctatctaaaataaaggaatgtaccttttctcaatcgataaaataaatccaaatcctaatagcagatgaataattataatttttttgtgtgcacaagattggaataactttaaaataattgacacattattttatttatcctaaaatgaggtagaatcttttttttatttatggttaaagaagaaaactgatcttgaattttaagtatttagtttcattgctaagatatggagattttc

SEQ ID NO: 27522 - DNA, 471 bp, Oryza sativa
  unsure (1)..(471): unsure at all n locations
cttacattttcatatatgctatttgtattattagaagaattatttgtgttgnttcatcatcttgttggtgtagttgagatatggggtgcatatctttcgtcattgttactctccagctggcttgtgctacaacaaattattaaaaagaaactatgacagagtgtaaaattaattttggaatctcatgggataatatcatggatatagaatttaacaaattggattatgtatattcattaaaatattcatacaaataagtaccttttgcaatagcatgagtggctgaaactcgacgtgttgttagttggctctgatatatggcttcgttgatctcttccttgttaaaggacatattgaatccctttgcattgatcaagttaggaggccgcagtacattggaaggttgcatgttggtgtttttgtgatgatgatgcatgtttntaggcccatgataattggctgtcaacaact

SEQ ID NO: 27523 - DNA, 461 bp, Oryza sativa
ttaggacctatgaatctcagctgagtcttcacatattctcctctgttttatttgagtttttatacgatcatcaaatctaggtgttgctccttccttagtcctataaatcttatattattgtgtggtatgtttttgataatgtgttgtatatgtgtcatacatccagatagtattgataaggaattggattgtgatgattaatactatctccattttacgctgttaactttttgaaaacgtttgaccatttgccttattcattttttttacaaatatgaaatcatattttaaaatacaaaaacatttaagtcatgcttaaatttgatgataaatcaataaaataaatgatagttatattaatatttttgaataatacaatggtcaaacatatctaataagtcaacgacgtcgtatattaaaaagcggaggaagtatgtaattggtgttcatgatgattaact

SEQ ID NO: 27524 - DNA, 413 bp, Oryza sativa
agcttctatgcaatagaagtaatcttgattcatcttattgagcgagacgccatactgaattgtttttttctatctcaggagctgaagtagcattgtattgcgcaaaacaatttcacattgagctatgcaatcatgaagactatcacaacgatctgattaatgcactggacaatgtgtttttaaggatattttggcctactttacataattttgtttatagctgcacttggaaatgtgggatatcattgctcgtgtgattgctgcaacatggatgagaacctgcaacagtccgatgcttggagagagttagatattcctcatgataatggatgtatgtattttctcaaggctggtgtctgtgctaagcctttcccacatgtagtaatcttttaacccctagcatcctcaaatat

SEQ ID NO: 27525 - DNA, 437 bp, Oryza sativa
tcggtgctcatcaaactcatccaagagacccacgctcacttctatcttcaaaacatcaagcaacagtacaacacgggtacggaagccaagaacacgaggggaaaaaagatcactgccaggtaaaatcttagcaaatttcggactccgaaacgccttaaaattcgagaagagaacgaggcgcggtgctacttgaccaagacgtaaggaagacgagcggattgcatcatgaacagcaaaaataataagaacacaccaaaacagaactgaaaaaattaaaaaaaaatcagagaagagacgaattcatggcgtctaacttctcgcgcacgcactggtcgcgccaggaactgtcaacatcaacatgctccgatgggagagaggcgaacggagtcggagaaccaccatgaagttccgtgctcgtcaaccttctcatccaactc

SEQ ID NO: 27526 - DNA, 400 bp, Oryza sativa
  unsure (1)..(400): unsure at all n locations
agcttgatcaaccattaacaagtaatcctaatgtgggagggtttggncagggggatgcagaaatagtgcttcaggatccattacgcgttcaaggccttttgttcttcttcgcatccgttattgtggcacaagtttttttggttctcaaaaagaaacagcttgaaaaggttcaattgtacgaaatgaatttctaggtcccgggatttcttaccatcaagttggtaaaaagccgcgatttattggcgattgctagaattctctatgatccattttggaaatcttttttttgtttagactatcttttgtttgcgagatgtcttgtctgcaattccttatttctatcatctcatgcaaaacgaggagaatgcaaggcaagggcgagaacaataaaatgaacaaa

SEQ ID NO: 27527 - DNA, 472 bp, Oryza sativa
  unsure (1)..(472): unsure at all n locations
tccataaaagctagactaagcaataaagnaccgcgtattttaccttctgcttctggctgtctcgcaataccttctacagcttgtcctgcagcagtaccttgaccaactccaggcccaatagaagcaagacctacggccaatccagcagcaataacggaagcagcagcaattagtggattcatgatgagttcctcgtgtcaaaaaaaagaaatggttaaggatacaatcaaccaagaaattcatatttctaagctctattggacagaagtaactaaaaagtacaaattgaaacgataatctgaattctccgaactgcttcgagatctcctttttagtttctaatcattagaggtttgtgtactcattattctatttctctttctttccaaccaactgatctttcattccatccttctttctttcctcttcgatatcctggagtttctatntgtgtccctatcatactaatcat

SEQ ID NO: 27528 - DNA, 467 bp, Oryza sativa
  unsure (1)..(467): unsure at all n locations
taatcaagtgtttaaaaatctctatgatattcccatatttatgtgtctcgagtgaccaatagctagttaaaagttatatttttttactcgttaaatatagttaatttaggccttaaattaaacgacaaaatctaatatatgtggataaaaaatagctttaagattcagatcagatagttgttaaaatttgttatcatataatatgttttctatctaatactacatcataaaaacaggagagaaaagggacagaaggagtggagggatcggtatatacatgtacgtacgtacgtataggatggaaggggtgggacgtggcccacgtatgtgggcctttcaattttttaataacaaaaataaatttaatgggtccaccatgtttaatgaanaatgatggttgtgccacgtggcacttcacaagtgttcgtagaaatgccatgtggcggcttaagagtgtttatataatg

SEQ ID NO: 27529 - DNA, 464 bp, Oryza sativa
tacttctatcgtttggaaggatttcaagagagtaaaaatctgtgtgtttgtcaaggctcaatgccttcattgccacaagcggcttggagggaaaagcagtaatggaacaagacatctccatgaccatttgaaaatttgcacattgaaaaagatcaagatggcgggacaaaacaagacacttgcacagtcttctttaaggttcaattcccaggagggaggaaaaatatctgtggagaagtacacatttgatccacaaatagctaggagagagcttgctgccatgattgtactacatgagtatcctttatctattgttgatcatattggatttcaaaggtttgtgactgcacttcagccattatttaagatggtgactcgaaacactattaggtaataatgatatctattcagcttcagtgtctattaaaaatatctgcaattaagaagaaaaattaacatttatg

SEQ ID NO: 27530 - DNA, 416 bp, Oryza sativa
agctttaaattaataatactgagttgtacttgttatggtgtcttacttttagtatttttcttgataaaggatttctgaatttaggattgataaaaataaaatattgtacatggatcggggtccagattttaagttttcatggtgttgtctaaaaagacaacagtgcatttataagtgtacacaaagaaagtaaatatatttattaatccttaaaaactctcacttacatatattttctcttggaggtgtctatttatagccttagattagctttgaacattttatatttgtcagttaaaccagccatctatgctgccaaaaaacctaatttaacccggctttgcacgttggatgtccatatttattggaaagatgagaacatcaagtggacttatttccattgggggtaagcatgt

SEQ ID NO: 27531 - DNA, 472 bp, Oryza sativa
  unsure (1)..(472): unsure at all n locations
ntctctttcttccgccatgaatgtgaactagatgatttgatttatttcgagatacggctggaaagggatggggaatctgagcggtggatgcggngagaaatttcaggaagtttttgaggatggattggagcggattgatgaaccctagctttgttggcgcggttctgtactgtagcacggagtggggaatggcgagagtctcggcggggaagacgaagcgacgtttggacttcggtatttttagggtatcgggagtactaatgggcctaggcctgtacagtatttcagcccaattatgttttcagcgtggcccgttgtgatccctacggacttaggtgctttttgctttggcaatatgtgctcacaatggcgcagcccgatgcttgttaaaatccttttaacgtgattcaataattctttagaattattatgatgcacatgacaaggtgcccgacagaaaggtgttatacca

SEQ ID NO: 27532 - DNA, 411 bp, Oryza sativa
  unsure (1)..(411): unsure at all n locations
agcttagttnctgagcatctggatatcttcttttttcttctgctctttcctccagatggtctacaccaggactggcaaccgcacgacaggcgatggcagcaacggtgaagaacgctctgatggtgtgcaccccaacggtgattctggcaatggtccgccaccactttccgagaatccgacccttgcccaagttttggcacaatagactcagatgatggcagccatgatgcagcagatgcagcagcaacaccagcagatgcaccataggatgatgcagcacgccgaacagcagcaccagcagttnggtccccctctccctcagtccaagttgccagagtttctacgcgtcaagccacccaccttcttcagcaccaccaaccccatggaggctaacgactggctccatgcaat

SEQ ID NO: 27533 - DNA, 455 bp, Oryza sativa
tgcggtagcgaagcgcaagctccaggagggctacgaggatgcctcgtctgccaagaagcagaggatgatccaggtgatcgacgcgccgaggaagaaggtgaaaaactggcgtcccgtcgccgtggtcgagccgcggcggcgcatcgccccggcggtcgccgcggcgcctccgctacggatgtgtagagctgcatgagcattgatccgtagtgtggtgctgcacaagtgtaattgtctcagatcaaccatgaatcctttgattctttgatgctcatgtagatggttgtgaacttttgatctgttacatgcatcgttgccaatattcagttaagagattattctattgtgcaaaacatctgatgctgatgtagatgttgccatcaatgtacaatgtattttttcaaaaatctgaaatacatgcggatgtttcgaaatgaacagtgtgatggatgtgt

SEQ ID NO: 27534 - DNA, 474 bp, Oryza sativa
tgcactgcttgcttaactcgtttaaaaggaggagcgaactttttctctattaataggatatatcatcttcagttctcagccttttaaacgctattgatatgacgtaaatcaggatgcgcacggtgggaaatatatcctatggacacaagctttccgtccacactttatgcacaccaactagtaaatatcatgaaaattctataaaaaaataatctgacatagactcttaatagtattacatatgtgcacaaagtcttatattcaaactcattatagtattacacatgtctataaaggcttatatccaaatatattatatgctatctcgtgaaaaaagacaaatatgatagttctaagagtaaaatgtgttataatattgtccttttttttaggattgaaatataatgaacttgaatatgggatttcacagatatgtgtcatattattgtaaagtatgtgttcaatttctttgac

SEQ ID NO: 27535 - DNA, 390 bp, Oryza sativa
  unsure (1)..(390): unsure at all n locations
agctttcccagaaacactacaattcttcttattttaacgcgtagaacttcgaagtatgatgttaccacattaatatcgccgcactgagtggcactgacagacctctctttctccaaacccacattaaccagctgagggtgggtgtgctcttcaacactcctaccgngcacagccaacctgcgagcattgctacccaccataagttgtttttgttggacatcgctgtccaatatagtggcgaacttttcttcactcgataacgaacagaccagatcaagctccatatcatgcacacgacaaccatatacatacccattatcttctaactccatcggttggatcatgcttatatttattagctcgttgaagtaccctttcccaaactcaaat

SEQ ID NO: 27536 - DNA, 374 bp, Oryza sativa
  unsure (1)..(374): unsure at all n locations
tcccgggtgaagttgtagatcttgcgactgttctgttcattatctgtagtangggttgggccactagatgctggacatctcatggttgtcgtacaccaccgacagcatggcgtattcgctgaagcggaagctgtagaagcccgcggcgaggagcttgtctgccgagaccatcgcctcgccggcggcgatgcgctgcgtaagcagtagtgtgtcngtggggtggtcgaagctctgccataagacgttcccgctcgcgtcctcgacggcgaggttgccggaatcgtgcagccgaacgcgcgcacctgtggcggtggctgtggcgtttgcgctgacagtggagttccagaccacctcgccgtcgtagtcggtgaaga

SEQ ID NO: 27537 - DNA, 457 bp, Oryza sativa
cgtatgaaacacggttataactagcgatccactagtcagtattttgacagtccagcctgttcaacaactggtctgactaacaggcaccaaacagaggcctcctcatgtgttcccatctagagtatgtggatcttcttttctgctccatagccatcaaacagctcgtggagtagctcttcatccaccggatacaccagatggctcaccatgatacaaagaactcactcagtatcggaagccatggtgagtggctctgataccaagttgtcacgacctgaggccacgatgggataatcactgccaggatgatagccacgcagcgtaggctgctaaggaaggtatgtagacttatgttggtgagaagaacattcggcgagagattagactaattctgattcattgcttaatgataatagacacaatcccatccttgtatagatggaataacttgccccta

SEQ ID NO: 27538 - DNA, 476 bp, Oryza sativa
  unsure (1)..(476): unsure at all n locations
actcagcttcaatttaatttcatcctctcacagagatgcaggtgttctattgaaacagnggtcatggtcatgagaccaacctgaaccatcgaatttggatgctacattaagcacttcaacataagaattgcataggcttatgatctatatccaaaaacatacctgaaaaacaatggatacatccaaaaactggtgttctcttcttattccttaagatatatatctaaatagttctaaataaattgaaatcaagttttttgggtacttgacgaaatttgactagcagtacgccagtaacatattgtaagtgaccattcattaaatctgtcattgaatgtcacctgaaaagctatggtttngccagaacaagtccaacaggccaagaaacaatcaagaaaggtaaacactctgaagaagttcaagacaattccctacatttgatcttttcttaaccaaaattttatgaacatataagt

SEQ ID NO: 27539 - DNA, 395 bp, Oryza sativa
agcttggttgggtagaaagctgtctccaaagttttcgactaatctcatctgcatttcttcctgtggagaaagaatcctgatacatcgtacacatttcacaaagtccctgcacatgcaaagccatcggttcttagttatcaccgggatacaattagaaatagctatactttgataggggaataaatatgatcagttgaaaaaaatggagcctcgttatatttcccaatcaggtaagtggtgagatcactgcagaaaatatgcttgattggttttacgtaacacagagttgcttttaaagtctctctacatgttttaacaggtaaagtaaatattcagctggagttagaaaacattctatggcatgtgaaactaacaagcagggatgtacagatctt

SEQ ID NO: 27540 - DNA, 461 bp, Oryza sativa
  unsure (1)..(461): unsure at all n locations
cggcgctgcgtanggtcactaagaactaggtatgcctctcctagtgcctgcaatgagaattcctataagtaacaatagtacggaataggaaaatatgcaaaaaaaaaaaaagcaccctttctaataaagccaatgccatataatactacaatggctatgcagtaacagcttcaaatatattcattgctgctttggagttagggaggagagaagaatgtgatatgttactaatactagtaaaaatgcccgtgtgttgcaacggacctataaaatattaattgtgccctgtttctgtttatagccaatttttttaattgtttttacatgttttctgtcagctgttaaataaatccagttttttggggaggcgacgatgtggagcaagtggggcaagtggggcatgcgctgcatgcctctttttctctcactgtgcgtggtggagggaggggagtgcggacgga

SEQ ID NO: 27541 - DNA, 416 bp, Oryza sativa
agcttcacaaagcgagggtgagtccgcgccgtatatgctcgaagatgacatcctcacaaaggcgctcggaaccaaagaacatcctggccgaactcggggaattggtagcgatgtgccctggaagcatggactccctcagtacagctcccaatacaggaaacggaaagtctccaaggaagagagggacgctcgtttgaaggccgaacttaaggttgaggtcattcaagaactagaagctagcatgaatgcaagggtggaagaaagggttaacaaggtgctcgccgacatgaatataccccgagtcacaacacctgctgtgcaaccaactcctcgtgtacaacacgacgcgagtccgtcacagcataggagtagttgtgcatccacagaggtgccggcccctggtctcccgatcgcac

SEQ ID NO: 27542 - DNA, 479 bp, Oryza sativa
gacctatgaaactcagcttatgttgacaccttaagagcttgaccaacttctataagttgagtaactgcggtataaaaggattttaaggtattgggcacttgatcacgcgcactttggcctaagcaaaaagtgcctaagtccctaaaagaacgtgacaggccacacctgaaaatatgggctgcagacatattatgcctaggccaaaaaatatgccttcgataccctttaaaggatgacgcatgtaacatgctcccgagtaataaatcttccgggtaatatagaccaagtgtagctcatatgaatagcttctgatctgaatgattatcccttatgggatactccaaaataaatataataattgaatcccgactggcgcaagtattcggttgatagcccttacggggaataataattggtccagtctttgagcatagaaaatagactcatgactatgaatccatgtggaatgtatccggaac

SEQ ID NO: 27543 - DNA, 394 bp, Oryza sativa
agcttcaaaataaatagaataaatatatattattgttatgtaagcagtctaaccctgctggttggacgagtgtgatgatggtgagactccacaaatccttcttctcaagcatagagacgaaaccaccaacaagaacaacggtgggccataaacccaccaagaagcccacccctttgacggccatcgacaggtaccctacaaacagagcatgggtggtgatatatataactttcagccactcagagggatcaagcccataagccattgtgagttcgccctcaaaagagtgagggcatttgcgatggagcgcgagaatgtatagacagtacacacctatataatgtggcaagagtgaggtgtttggatgtggtgttacaaataacagagcctactc

SEQ ID NO: 27544 - DNA, 460 bp, Oryza sativa
  unsure (1)..(460): unsure at all n locations
tctttgcanaactactntcttctacggagctatcttcgtcttactcttgtaccgaatgctacctggcataacatccttacttaaatatcttccgctctccagacttcaacagtgccatcttctagtaggaagagaatcttttcattctcccacccaaccaagtaggcttcttttctataagaaatgctgtcgatatttcctgctaaatcctgcttatccaataaggttcggatatctatatcctggagtaagaaggattcaccttctttctagcggtgttcctttatacaaatttttaacgctagggcccccaatgaatgttttcactaacacttgtgataaactcatcatcaaaagtaaatcctcttgttcttgagccaatcacagctatccctacggattatattttaatcaactcttccagcctagaatcctctatcacactcctatgactagctat

SEQ ID NO: 27545 - DNA, 408 bp, Oryza sativa
agcttgcaactaacaaaatcaaatttgtgctttatttatatatatatatatatagggatgccatcactagaagggataccatcatctcaatcgggcggtaaaccccatctcaatcgggcacggcatccgtcacaggctagaagtcacagatgtgaagagttatctcaatcggacaaacggccgtcacggatgaatctatctcaatcgagccctaattaaagcccgtcaccgagagctttgacccagacgaccagtcaaactatagcccgtcacggatgacctatctcaatcgggccacaactagcgcccgtcacagataacccttatctgtgacgggcattaactatagccatagttaatgtccgtcacagatgagtataatccacaaatagataaattttatttttt

SEQ ID NO: 27546 - DNA, 463 bp, Oryza sativa
tgattcagcagttaactgtaaaagtaatcatgttgtgcctattgatcgtcggttgcctgcgctgtatgcggagttggatgctctcgttggtattgacggtccgagggatgagatcattaagtcattggatgatggggagcacaggatgaacgtagtttcaattgtgggttcacgaggattaggcaagagcactcttgctaatcaggtgtaccaaaaaatcgggaaccaatttgattgcaaagcttttgtgtcactctcgcagcatcctgtcatgggaatgatctttgaaaccatactctaccaagtcaatgatgaggttggtacaatcagatcaggggataaggagcaggtcatcaatgaactgagggctttcctgaagaacaagaggtattccaatatgataaatttatccgctctagcttcaaatacactagtaacttttatcattatctgtatctgacac

SEQ ID NO: 27547 - DNA, 289 bp, Oryza sativa
agctttttgaacttattcaatccggtcaaaaatatagcacccgtggggtctcaacatatgccaatattggtaataattgacaaaagtacccgcgcgattcacgaagtgagtttttgccacgaacgcacccaatacactccaatatgtccaaaattcaagttttggcgctttttgaactttttcattccggtcaaaaacatcgcacccgtggggctcaatatatgccaatattagcattaatggacaaaagtaccagcgcgaatcatgaagtgagtttttgccacgaacg

SEQ ID NO: 27548 - DNA, 354 bp, Oryza sativa
  unsure (1)..(354): unsure at all n locations
cactatcgaaactaagcttaattatcgagagagcgcacgcnaaccgggtccacgagcgggtccctcttgtcagccgctcggtccaccgtgagccgagaacaccaagctggctcacggtctgccggcgcacaggcacggtaacaaccgagccacgcggctcgcctgcgacagccaacgtctcggcggcggtgcgaccgagagcgcaaaggggaaaaactggaaaaggaggagacgacggttctcaccgaccacacacggcggctagaggtcgacagtgttgcctgcggtgaaggagaaacgaccagaagcttcgggtcatcggtgtcgtcatcgttcccgccgtccttctactct

SEQ ID NO: 27549 - DNA, 288 bp, Oryza sativa
agcttgtcgttttttgtccacatggacgttctccgtcacgcggttcgtcgtccccaactacgctggtcgtcatcctcagcagcgtggccgttggggttgtctgcttgtcgcccagccgcatgaggcttcgggagagtccttcgtgagcaaagcagcagaaagctagaaacccatctatggatcatttaatttttcctatcttggtcctgttcccctttccccttttgtgcaatccgtcatcaccgatagctctttgttgctaatctgctgctcagctgctgcattcca

SEQ ID NO: 27550 - DNA, 398 bp, Oryza sativa
  unsure (1)..(398): unsure at all n locations
atcgggccaaaagcgcttggntgaagagcctagtatctctaaagcccagaccccctctttgcttcgacttggctatggaattccaagatttccaatgcgtcttgcttttgccctcaactgctccccaccaaaagttcctaatggcctttgtcagctcatcgcacactgcatcagggaattttaaaatacacatgacgtaaaccggtatggtttgaaaaacaacttttataagcacttcctttccacccgatgacagatgggtttcgccccacagcagaattcggttcaaaccttctcttgaaactctggaaatgccctttcttattctaccctccggtgtcggaaaccccaagtatctgtcatcgaaaccattatcaccaactttgcaaatcgatctg

SEQ ID NO: 27551 - DNA, 288 bp, Oryza sativa
agcttgcgtcttcttacaacaagtgtgggattgagtccggatgcacctaaggactcgcatgcgcaactccgacatctggcttcgctacctggtggtgtgtggctcgcaagatggtgacaaagcatgacaggaaaacttttgatgtgggagcgcaacgcccgtattttcgaatggaaggcagcatccgtcatgcaagtgtgcacaaccatcaaagaggaacgaaagactagaaagtcggcggggttgcgaagtgcgctgtgagtaattcaccgagttttctgttcctat

SEQ ID NO: 27552 - DNA, 243 bp, Oryza sativa
tgtgcgcagctaggctgatgcaattcatttcattgctcgagaggatgattatatggagggatggatttattactgctaccgatacacacagagggtttcatttaacgtgcagaccacgcaccggtgaaggtgtctcgcgatcatgacatataatctactgaatcccataagcttatacgcttgcatgcatcaccagggtacaggtacactacactgtgtcctttttttgatctctgtgcttgt

SEQ ID NO: 27553 - DNA, 288 bp, Oryza sativa
agcttttctttttttgtttcctgcaaatgatgggccaatcctaaaacgccacggccctcacagctgctgccgcagctgttactagcactgatgatgctgctgccaatccctacagtttttgactcgtgtatctctcacacccacaagactgcagtgcagcgcctctgcctctgataacttcatcacagccagaggagaaaacgagcagagagagagccccggtccaacttactagtccaaccgcactactagtaatgatctgaaagttctgaactttactccagtaga

SEQ ID NO: 27554 - DNA, 351 bp, Oryza sativa
  unsure (1)..(351): unsure at all n locations
cgccctccttgaaccagtgtactctagtggggttacagggccaaagagcattaaagtggggaacccactgcatttagaaatgcataaacattangcatctcaatcttttcagtgttcagagaaccacacatttgtatttaaagtggagccttactctactccatattttgatccgagctttttgtatttgtcggggttcaccttaacaactacgatgggtgtgctcaatccaaccaccaccggagcatctttatctaactgcaacacaagcnacggctcacctatccaccatttcataaagaggcaaagacatccacacgcagatgaacaaagcatgataaaaagcgcgct

SEQ ID NO: 27555 - DNA, 290 bp, Oryza sativa
agcttgtgtgctcttaatataaataagagctcaccaagataagagtatagatgacactctgtccattgtagcctctgcaacatttctatcaatacagattttagttaaccaacatgttaggagagggtgtattaaatactatcggagaaacataccaacttcaaaatgcaaccaaagtaagagagagtccagtgctgtgtatgtgtggtgtgcgagagagggaagttggagcagaccatcatgtagaaactcctcagttattgaaggatttttcttcaacctgctcttta

SEQ ID NO: 27556 - DNA, 289 bp, Oryza sativa
agcttctcgggttcttggtctctgcccgaggcatcgaggccaaccccgagaagatacgagctatagagcggatgcgccccccccagcaaacttagggatgtgcaatgcgtcaccggttgcatggccgccctaagtcggttcatatcgaggctgggagagaaggcgctacccctatttaagctcctcaaacgctccgggccgtttacttggacggaggaagctgaacgtgccctcactcagttgaaggcgtatctcagctctcccccggttctggtcgccccggagccag

SEQ ID NO: 27557 - DNA, 363 bp, Oryza sativa
  unsure (1)..(363): unsure at all n locations
tcngatgtgcatcgactacaccgaccttaacaaggcatgttctattgacccttaccccctgccacgcatagatcagattgtcgactccaccgccgggtgcgaccttttgtgttttctagatgcatattctggttatcatcagattcgcatggctaaggaggatgaggaaaaaactgcattcattacccccataggaacttattgttatacgacaatgcctttcgggttaaagaatgcaggtcctacttttcagcgtactactcgaatttctttgggtagccaaataggacgtaatgttgaggcctatgttgatgacttggttgttaagacgcgcaaccaagagaccttactctcggatctagc

SEQ ID NO: 27558 - DNA, 286 bp, Oryza sativa
agcttgcattatacacctaagttcccgtgacttgctgagtacgaaagtactcacccttgctctatataaatatatatagttccgccgccctgaagttgaagatgaagtgaagtgaagattagggtttcgtcctggttcccagccgtcgcctgtggtgttgggtgttagttcgttggttccgctgcttctgctgttgttggtgtttcctcgtccgtgtcgtcggttgcattctcgggttgttctgagctgcaacctaagttaaggtaaataagtcctctatttattt

SEQ ID NO: 27559 - DNA, 393 bp, Oryza sativa
ttcctgtggcaactcatgaggactagtatcctacaattgctataaaacctgagaacccattccaaagacaaagagataaccgatgctgatattctcatttgggcacataataaggtcaaggaatcaggcaaaacatcctgtattgaaaacttcaaggttcatcaaccttccctgttttacttaattttagcaattgtctcattcggtgaacctacagtaatacacattgattttttaagataaaagcatagcaaatggagttctcttcctaaagcttctccacgctgttaaccacaggcatgttgacttgaacatggtgataaaaggggaggatggtggaatcattggtttcctcacactattcttgtccaacttaagattttcattgtttaa

SEQ ID NO: 27560 - DNA, 285 bp, Oryza sativa
agcttggctctgatagctgcgaaagtgagtatgaggtgtagtacaatacactgttctcttcatctagctcttcatcaaggaagctggtagaaagatcaaggtaaaccagattcgtgaggtggccgataccggcgggtacctggccggcgaaattgtcgtcggagatgtcaaggtgggtgagctcggcgagcagctcgaagccggtggctgggagcttggatgcactgaaatcgttggaggagatgtcaaggtactccagcgaggtcaggctgaacagtgcggtgt

SEQ ID NO: 27561 - DNA, 422 bp, Oryza sativa
  unsure (1)..(422): unsure at all n locations
ntgattggtacttttaaatttcaattagctgggtctttactatgttcgcatctaaagagaaattaacttacagactgtacacacagaacctcttatacaagtccgcactatagacgctggaaatagctagtaaaaccgacacctatagtgccgttcccgcccacgcccacaccagcctacttaaaccgtaaaaactagcacaattctcttcacatagttaggggcctattacccttgtcagataaaagtgtcggattctatataaaatccgggaccttntattcctcatctcatcaaaggagntggcacggggcccacccctaaacagcatctttgtgggaaagaaaatgtgttggtttattataaaccggcactttaccctccaccctgacaaccgtgggggccaactataaaaacacctt

SEQ ID NO: 27562 - DNA, 288 bp, Oryza sativa
agctttccaactaatactaatgggccccgaaattccttctagatcagcagctaggtccgtttacagttgatgctgtcaagaggcccgaatccgaatttaaaacgtgtagaactttatctcttgtcttctatggaccaaaaagtgatgtggtaagatggaagtggacttagagaaggtcttgatttggtccccaataaacttctttaatcatccattcattccttacgcacagtctcttttctttcgcccaagcaagtacctctgcaaacgaaagcacacaaaactcat

SEQ ID NO: 27563 - DNA, 431 bp, Oryza sativa
aagaggtgagggactcctccactcttaagttggttcatcttcgcctaaataagcaatgtgggactattcacaacatatactgccgcgatctgctattcatactgaaactaggtgctttttttggaattaaagcctacaaatatttgctgaatgtactatatgaaacatataatgttattactggattatggattacctcataaagttcattggatataagtcccatgccatggagaaatggaattttaccaccttcatcaaattggcgttcggtccttggattgccagcaacgtacccctgcgtcatgtacacaaggtaaagaaattggtggaaagcaaaagtaattgcatgccacattggactcacattacaagcatttatgtgactattgacgattaagaatcaatataaatttatgatgatattatct

SEQ ID NO: 27564 - DNA, 287 bp, Oryza sativa
agctttgtgatatttatatgaaatcaaagatagccttgctgcactactacgtggaatcaaagtgataagccagctgtaaggtgacagatcaaacaaagagatggaagttgcttgcattgcttatattgatacagcagtcggtagaactgctccatatatcgatgaaggattttctttatctgattgtttgcttacaaaatatattaaaaactatagtaattattttgaactcatcgaaccgttgatttcttgataaaaaaatgattgcttagaaataggaaagagaa

SEQ ID NO: 27565 - DNA, 452 bp, Oryza sativa
  unsure (1)..(452): unsure at all n locations
gacctatgaaactcagcttataaggcgctangaagcggctgttaacgccctttttttctgcgacgagaaggaaacttaggggttcggagagaggaaagcccatccgattcgaactttaatcaaacacattccaaaccgatttagccgatgtttccaaaagagaaaaggtagaggagatcccgacgatcatttcccctctatcaattcggccggaaacggaaaggggcggccggatttggaaaggaacggcggcggcggcgcgctaaggtttctggcggcggtcgacgcgaggaagacgacgacttgacaggcgggccccacctgtcatcgggcggactcgcgggcgcgggcggctgctgactgagccggctgggccgaggatagagagaaggtgtatgggccgacttttggtccaaagccaaaagagacttttaaaacatttctcaatttaa

SEQ ID NO: 27566 - DNA, 284 bp, Oryza sativa
agcttattcctttgtcggtcatcctgaagttctatttaagctcatgaggaacacaaatcatgcgaatgtttgttagacaagtccttgtaattcagcggttacttttcgcataatcttgcgatgaacaaacgttaacagccatgaatatgtaacgtaataaatcatgcatgtagcacattgcaggcttgcagccaattgccgggaacgagagagaattcatcagttgttaactttacttgatcgacagagatcctgccttgtgctaaaaaaaattgaaaaaataa

SEQ ID NO: 27567 - DNA, 446 bp, Oryza sativa
ctataaaactcagcttcattgcttcagtgttatcaaggcagcttgcgatttgatatatgagaggggatccactgatgcagggctcttacagctcatcaaaaccttcaaagcctgcaagtaagattattgcctggttaatacactacctaggtggtgttcttttctcctaaagataaagatgaaaaataagattaagtgttttacgtaaaacgaggtggtattaacatatgattaattgagttttaattactacaaacttaaaaaatagattaatatgatattttagagcaactttcatatagaaagtgttcgcacgaaacgcaccatttagtagtttgaaaaacgtgccacgaatatctcaaaatttatccacgtcttatagtcttattagatataaagggagacagaacattgagatcatctgtaatattatattccagatgtgt

SEQ ID NO: 27568 - DNA, 291 bp, Oryza sativa
agctttatcgtttgtgaaagtggaaaagcttgtcaccaattgagttaaggggcgagatagagagagcacagggattgttgtttgccagtatccgcgcgacagaaggttcaagttaggcctctttaatcgcatgattgagaaaacgtaggaataggaaaaacgtaggattttgataagaatgtaagtgtaaaacagaggattgcaaaacgcaggaaaaacacaggaatgaccgtttgattgaaacataggaaaaacacaggaattggatgagagatatagactcaaaggaaa

SEQ ID NO: 27569 - DNA, 293 bp, Oryza sativa
tgcagcttatccatatttagaccgagttcaaagagaatgcagcatggcaagttatctattaatcaggaatagtttgttagtttccttttatctttaggaaagtgtgtttagtgtccgataaggactttatattttccttttatctttaggttagtttctttcttgtccgacaaggacttgtatcaacccatgggtataaatatgtacacccgaggtctatgtaatctatcctcacgatcaatacaattcggcgcatcgccaccttttaccttttctactttattttatcgtcc

SEQ ID NO: 27570 - DNA, 382 bp, Oryza sativa
atcctcccccgcagggagtgtctgaacctgacccaaatagctagaaaagaggatatcatcgtcgatcgactattcaccatgggaatttcttctctctcggaaatgaaaagcactcactctgataaccgatttctcaccatcgaacatgatagcattctgctttccttgctgagcactatatcgatgggcacggtccctaacttcgttatctatgatttggactgagactatgcatgagtagtagttagtgcgaactagctccagataacaaatcggggacttgggtcgggtcctgtttatcttcaccacttctggaagggtgctcaggctagctcactattaacagtcactaaccactgcagtctccatattgtgaataccg

SEQ ID NO: 27571 - DNA, 288 bp, Oryza sativa
agcttgcttttttttttatggctatataagatatgtcaccgtggtcgcatatcgatcttagggtgatttcgcgtttctcttcgtcgagctatgtctcggctttcgggcttggcctagcgtgagtcgcgttggtgtgaaattgcggaaaggagtacggcatgcatgcagtacttacaaaataatttttacaagggccataacagtttttttttaggctaccaaatactccgctagtatctaaaggcctgcgaaaattgactttcgcaagcggtcataggtctacttgca

SEQ ID NO: 27572 - DNA, 453 bp, Oryza sativa
cgcccagaatagtgatcttataatataatctatgagatatgaatgtcagaacctatcccctacctcgagatattgtattaacagactaaaggactgcagtatgctgatcagctgtggcagacacatggtacaactgccacaggtggcgggaccattttcatgcttgatttaacttatttaatatttatattcattggccctaatcaacggatggtctgcacagtcccaatagttgcaagcttaatgtctctataacttccatcactttctttaataaaagagaggtataagccttatggtagatcagaccttgaaaggcccacttgatgatctaccataattagacccacctacttccatgctgctgtgtagctgtcatcgaattttgaaactgccacatggagatgttcagaggggaccacactatggttatgtggaagatttgtcccgtct

SEQ ID NO: 27573 - DNA, 285 bp, Oryza sativa
agcttgggcaattttctgccgcaaagacttatggtattttagagtttgttagagataagagtcgtgtccgacatggacatattttgtaatctcaggtataaatagacccctaacctcatgtaataatttaacacacgtttaataacaatctcagcgcttcgccacccttttctttcgttttgttttcgacgagttcttgctttcgggttgagctgcatcggtttcgatcttcaactagaagtaaaacttgttatggtggcttgcgttctcgggattagtgcttcc

SEQ ID NO: 27574 - DNA, 271 bp, Oryza sativa
agctttcacttttttattatctgaggtctgagggctgcgattatgtacaatggggaagctcaaaatgtgataacttgtttaacaatgaaatcgatgtaaaagatctagtatgcgaaaaatgaagtcatgatgatatacaatatattttctgcttttttggaagacgattttaccgatgtagcgctttgacttggtccaacccgctaaatcattctgtgacacccacctgtcactgatcaaccgacccttttctaccttcctttacccctcc

SEQ ID NO: 27575 - DNA, 460 bp, Oryza sativa
  unsure (1)..(460): unsure at all n locations
tcaacttacataaggatcgagagataacatagtcaacatgtaatcatattgctaaggtggtggttggatctacggacttaactntagtccctatatttaaacactaatttagagtattaaatatagactacttacaaaaactaattatacaaatgaaagctaattcgcgagacaaattttttaagcctaattaatccataattagagaatgtttactgtagcatcacataggctaatcatgaattaattacgctcaatagattcgtctcgcgaattagtccaagattatggatgggttttattaatagtctatgtgtaatatntataattactgttcaaacatccgatgtgataggggcttaaaagtttagtcccatctaaacagggcctanaactccatcctgttgcataatcaaaaatggatatgcatgtcggacatctatgctaaattcgaaatagg

SEQ ID NO: 27576 - DNA, 288 bp, Oryza sativa
  unsure (1)..(288): unsure at all n locations
agcttgtctttttcttagcttgnatatcggggatttagggactttctaagcacagaagaatcatcatacacacaggagtagggtattacgcttcatagcggcccgaacctgtataagcctcttttgtctcatcgtcttggaggggcctaaccccctcaagatcacatagcttcgctcaccgagccctcgaatctcacccgctgcccctgaccgaactcacaaagggaggcctcacgattccctggtggaggagttcattctctgacaaaaatactctagaattttgtc

SEQ ID NO: 27577 - DNA, 289 bp, Oryza sativa
agctttacttttctgcaaactgtaatgcaatataattcaaaggccttccacaacatactgtactcgtacaatacaaacctcaattcagcttcattcattttattcgttgcatgtcaacacccacacatgtcaaaatgctgtttctgcatctcctagctacgcctcgccaggtgatgctgcaaccactagcttattgcaattcaattgccggcacgaatcagtttgctactacatcacacaattcacaacccaactgactgacaatcgttctggtcagcccaggaattac

SEQ ID NO: 27578 - DNA, 314 bp, Oryza sativa
  unsure (1)..(314): unsure at all n locations
atctggcatcaacttatgtcactgatagntcttctacgaagtccttattcccatcttgaagtacatcacttgcaacatcttgaagcatgccacttgcaacatttcggattacgtcacttgcaacatcttctgcaacaaggtccatagatcttacctgctgaaaatcaaggacaatcctcttgggccgcacaaagagacgtggcaaatcttctgttagaagtttcgtgagaaacctaaaggaggtagagtcacaggtgacttattataaccaccggccaatgggtgaacaagggtttgctattatagagccgctt

SEQ ID NO: 27579 - DNA, 286 bp, Oryza sativa
agcttgggattttgggataagcagatcgatcgcaaggggatgtaagaacagaaaagcaaaaggaaagtaagtaggatcctatggagtatccgatggaagtcgacaggtcgatggatcgatgcatgtaaagattgattgaaagaggagggagacaccctgatcacagcatgcaggatgccggccggtgtacagttgcaagcagaaaggtagtagctatttgcaaagatagatataggagagaatgcatgctctggcccatgccattgcaaagcatttgcatatgcaa

SEQ ID NO: 27580 - DNA, 285 bp, Oryza sativa
agcttacttatttttctagaccaataagcctaaacctaaacaaagagggcctatataataaatcagtttcacagtatgctaaactgtttaatttgctattccaatatctgcttaagttgttatttctacactaatggaattaaataaaagaggaaaagtcgtgggcaactaaccggggtatatagaggtgaggaaagggagtctgggagtttctcagaaaatgctctatggacattatccatgtgcaaatcccaacattttagggcagaagggtcacctaggaag

SEQ ID NO: 27581 - DNA, 288 bp, Oryza sativa
agctttagttttgtttgtatatatatttgtgaggatggtaagtgatcacggtctgaaagcgagaggcttttcctcctgctgcagctcaatttgggagcatatgcaatgcgcttttgaaactatagcttgcgttgctgaaaagcaaagttgtgcacaaaattaaatagatgaaaattaatactagatgagatgatagcgtatccaagtcactgacaggtgggctgtggcgtgttgggcttaactagctgctttgaccgacgtgtcaacaaaggggtgtccttgtgcttt

SEQ ID NO: 27582 - DNA, 284 bp, Oryza sativa
agcttgttcttctcactgctgagactactcctataatcacttataactcttcctccagtagaaaatgcactttccgacggcacggttgatgctggaatagccaatatatcacatgccatctgagcaagtataggatacttgggggagaacatcttccaatattgcaaaatgtcaaaatcagcactaatagagaccacttcttcttcaagacacctgtcaagctcatttgctctttttcttttttgtgcatcaacatgttgtccccaattagaccaacgactact

SEQ ID NO: 27583 - DNA, 290 bp, Oryza sativa
agctttgcctgtatacttgatgtgaagagcgtgatagttatattacttctagctgatcagcacaagtgcaacatgctcaaacaaggcttgcttctctttccttgccactccgatcgaacacaatggaaatggtgattggaaccccagagtatgatcagcttaaaagtttatacccaagtctgctaatcgagcttctggagagtgtgtgcatactttgcaaatgatagctacatgtcgacggtagctattcagtcaaatttgggcaatatatgaattatgattttatttgt

SEQ ID NO: 27584 - DNA, 406 bp, Oryza sativa
  unsure (1)..(406): unsure at all n locations
ggcaccacagtacgttgctttcttgctcttttagggattaatgcaaagagattaagggccagctctactattggtttcccttgcaaccacctatctttctctgtgccaatcatttgctggcaagcttgtaaaccgaaatattctgctcactgcccagtgcccagtatgagtaaatgaggggtacatgcgtcttttggcaacatccttattttggccaaacagtgctcagtcccatataatgtgggacagagggagtattttctccaatttcaactatagttttaacaaccatatcaaagagggagtggacattctttggcacaataatagataaaccaacccatggtctattacaatcagntttttggagcctaacaacctcaagcgtaatgcccatcccatcttt

SEQ ID NO: 27585 - DNA, 288 bp, Oryza sativa
agcttgactgtttttttcagtctatgaagattttgggtgaatcttctaggaagtttactaaagacctaggagtatgacttatacgctccacccgaggggtagactacagacggtctagtaccagataagactctgagtgaaacttgcttgcacaagactttcaattcaaggcgtagtccattgttcaagttgttagtaagtgtagcttagagttctaggtggatgttcaaccttaatcggtctccatcgaaccactggtatataaatagtatattggaaaaggcaaat

SEQ ID NO: 27586 - DNA, 378 bp, Oryza sativa
ataggacactatgaccttgttatcttggaagatgtccttgtcggctcgtcattctcgtcgggaggacgagatatggccgcacttgggtccttctcgggctcagacgtccgcgatgttctgctctccacttccgcaggaggatccttcgacataaaggcgtctgggatcgtaagcacggcgttctcgcttccggtcattgatggaccagtcgagatcggcaccgcggtgtagatcggaagaacgaattcccgacttgagtcccaccagcattattgaagttgaaactccttgtgtgatgccggggttgacgtttgtgtccacgaggcttgatggcatattaacataaccttgagcaccaagtcccctacctggcgcgcc

SEQ ID NO: 27587 - DNA, 288 bp, Oryza sativa
  unsure (1)..(288): unsure at all n locations
agcttgncgatttttttccacctgcacaagggccgtaatgcagtactcataccccacgtactcttgaccaaaggatccacggtgtaacagttggggttgactggcctcctgaacggcgtaagcaagcttcccaatattgcccaaagagctgagcgaccaataacaacatacccatgcgtagatcgggaacatgctgccgtatccatccaggccaacagagaccttttgcgtgctcacccattacctaatatgccttgaaaatgaacagtctgctcttagctgcatgct

SEQ ID NO: 27588 - DNA, 406 bp, Oryza sativa
  unsure (1)..(406): unsure at all n locations
ccttcganacccagcttcgagggaaataaggtaacttacacgacagtggttcttttgcaagatcctaanaagaatgaggcgacgaggtgcaaataaaatcgacctttgctcataaagtttctacccggcacatcctagagatgaatgatgtgtcgcctataaaaaaattgacttacctatagaagttgtgcacaagctaataaaaataattgtcaagtttggctagggggcgggggacactggtgaaacttatgcggaaatgtcacacccgcgctggccccttccatagtctattgccttactctttttacccttcctccgaccctgtcactacaggacaccacacaatgtttgtaaaaaaacaagagttatagaacatttattgttataaatactttgtacaaaa

SEQ ID NO: 27589 - DNA, 288 bp, Oryza sativa
agcttcctccgtttttccaacccaccgacgccgctccgagctacctccgtcgtccccaccaccgttgtcatcctcggcttcccatccgccgctccgagctgcctctgccatactcgcccttcgccgccgctctaagctgccatcctcagctccgtctccaacgactgctcgatcatagagagagatggaggtgaggggagggaggagagagagagagaggtgacaggtggggcccatcgatttaagaaagaagaaatgctaactggactaccacgtaggaccaaaacc

SEQ ID NO: 27590 - DNA, 459 bp, Oryza sativa
  unsure (1)..(459): unsure at all n locations
aagcaaacattngatcttcatttatacatacactcgcatcaatttgaagtattcttaatgttcanacatggcatgccgtgaaactgtgatacgcttttctgtgctcgacaagcggacaaagatcatctcaacctcactttgattcttcatgtttacatctgcatatatataatgcccaaactaatgctaactcaggctttgacagtggggcctaagcaccaagctaacggaaaagtaaaaatgagagcttatctcatacttttagagaaaggctgcaagagcacaaaacctgctactgccttgagagcctttctctgaacaaacctgatatgaagaaaatgaatctaaacaccacatagctgctgctcgaacctatcactattcattcatcctcgtcaaggaagaacaaagattggagctcaaacgacaacaaggaaaggataaacacatgagcttctt

SEQ ID NO: 27591 - DNA, 290 bp, Oryza sativa
agctttgctactataacttgcatgagcaggatcatcatgtcaatttttgctaccaaagaactaatttcctatgaactgaacctatgtataccatatgaactagcactcaacatggccccatctgtactccaaaggtgtagagttcgcgtgtgtgctttgagctcctatatatcatgctaccaaatgagtgtattattgtcttctttgcatggaaaataaaaggggaaacggaaagagagaaaatttcacaaaactatatgttttggggttcaagttgtagaaaaccacac

SEQ ID NO: 27592 - DNA, 457 bp, Oryza sativa
cagctaaggaggaaagagcatgggactgaacctatctcagatggttgcatggagatgttggtctcaagagctgcacagtgccttgtgcagtcaagcccattgctgacagcactttccagtgagctgaacagcctcctgtgagcataagccctcaatgcctcaccaatcacctcactgctgattcttcccttggacttgatggccatgatgaccttcttgtacaggcacatctcaaggacacagagatcctctaaccaccagcctctgggcaccatctgctgcttccttacgcccgtccagtgcgagtcgaagccgtactccgacggtagctatctcctgttgtaagtgcatgaccactcaacctctgacggatcgatggaggccttcgtcgcgatcgaatcgacgcagtggtagatcaccttgaggttctctaccatggagcagtgacatggtgtct

SEQ ID NO: 27593 - DNA, 215 bp, Oryza sativa
agcttcgttttttcaacatcatcatcggtcgcccatgaggttcgctgttgctgctaccggttgtctgcgaggttcttcgccgtcaccggtagtcgccggcgtggtctatgggtaattaattttagagtaaatttcacaaaacttcacgttttgtagtccaagttacataaaaccacacacactttgatacttagcacgtaagtacatatattttg

SEQ ID NO: 27594 - DNA, 440 bp, Oryza sativa
  unsure (1)..(440): unsure at all n locations
ngccttgngaaggagtcatgcacagngcatatcattaattctctcaccggctccgggtgcctctccggcgtcctcaccgtccaagcctcatgttgatgcattattggggtctaataattagatatggtttgtttagattatgctctacgaaaacctggtgcatgtattaagttcaatattaaactagagtcttatatatgtgagttaaattggagtgtgatcaagtaatcttagattgtgtgatattggaacaatttgcatctatatagtatttttgtgagtgaaaaaattattgtctttactttgtttcgtggaattaaagaatatattttgggggtttataattctgtaagggtagttatttctgctatctcactattaaaatagattcctataaaanaaattcctatatacccagttcataaagttcaaaagagtaa

SEQ ID NO: 27595 - DNA, 288 bp, Oryza sativa
agctttgatctttttggtaattcacgaaggcaaaggagaaaaaaagatgaagctgatgctggttttcttgtcctaattcctttgcctgctttgcttgcacatacagattacagatgatgccattccgggatgttgctctccacttggacgccaggatgcttccagggcaataaaatcttgttaagatctctaatcacatggtattatctcgaatttatgccaaagctgcggcctttttattttcttttttacttaaccttgccaagttgcgctacggattcgccgcct

SEQ ID NO: 27596 - DNA, 364 bp, Oryza sativa
  unsure (1)..(364): unsure at all n locations
ntaatatatttctctggtcatcatccttaatggaaaaatgatttatgatttacgtcattaagcacacattgcataattaagccggccgagctacttagcttatttatatataggagatatgctaccacccacaaacttgcacgagctagcattatattcgccctgaacaaattaagctagcaactcctccggtttgtaagaatcgatcaatggctatcattggtcggaggcagcaacatggtgtcgcggcggcggcggcgacgttggtggccgtgatggccgtggtggtggcggcagcagcggaagctcacccgtcgcctggggtgtacccgagcaggatagtccgagcgcgggagttcgggcg

SEQ ID NO: 27597 - DNA, 286 bp, Oryza sativa
agcttccatgttcgctctcaccctccattccatctttctcagtagtagttcctctagcctaccttacataatatatattgaagcaaggagttgtaatataaaggtttgtaaggtgagaaaaacttctttgtatctaccttcggggttcccgaaagggaaaaccgtatgtaagcctatttgcttaatatgaagtaattttctttaagtttccctgtctgtttgctctagacaagcgtttatgctagggaccctataggagaaacctctcggttgttctcgtttttag

SEQ ID NO: 27598 - DNA, 445 bp, Oryza sativa
  unsure (1)..(445): unsure at all n locations
actaagcttcatcataagaagactcatgggattcgattattcattattttctgattcnacctgggccaggataggtcaaatcctccatctaaaatggtttaacattgcactaaatgatatactatgtaggataaatatgatgtaaatatcaattaaatgagaaaaaaagttaaccggatcttgcataaatccctatttatatgttggtccaaaacatcatgaaagattagtgctaattaaattagcttacgtattaaattggtactgtgtgcattggagttattagagcacgtacaataataggctataagccagctattaacatattttaaagagataaagaaagagagagaagagcagcggcctatagatatgtagcagcttgagcacggactccaagatgtaatgtgtgtatgatacgtgggaccaagcattaatagtatag

SEQ ID NO: 27599 - DNA, 285 bp, Oryza sativa
agctttgctttcttgaatgcttcgttgtggattggtagaaaatgatgatgctggtatggctagattcatgggtgggctgaaccgagaaattcaggacattctagcctacaaagaatataattcaattaatcgtttgtttcatcttgcttgtaaagctgaaagggaagtacagggacgaagagctagcttcaggactaacatttctgcaggtcgtgctagctcttggacatcttctaacgctgctgcaccgtcaactcgagcagcagcaccatcatcctcaagcaa

SEQ ID NO: 27600 - DNA, 196 bp, Oryza sativa
  unsure (1)..(196): unsure at all n locations
ccttagaaactaagcttggggagagatgctctcccacactaatgttctacttttctatngcacaccccctttcaaattgcatgtttaaataattgaatagcatctctcaacctgaaaacaacttaaaaatatgcgaaactaaaaatacccaaaagagtagttatatataatatgctacgttaaacactcttaattc

SEQ ID NO: 27601 - DNA, 290 bp, Oryza sativa
agcttaattgtttttaatgaaactttgtaagagactaatctttctctatatgcttcttatttgtgtccatatagattcactctggccatgtgttcttaaaatgattgcgtccacaatctaataagacaaagcaaaatttgtgctacacagactcgaaaatttagctctaggagttgggtctgaagcggagttgtggagtagccaaaatccagctccacatctctagttcattttgtaaaagtgttccacctagctctgctcccattttaagtgagctccagctccaggtg

SEQ ID NO: 27602 - DNA, 276 bp, Oryza sativa
agcttaattatttgatgactagaagtctagctagaaccacaccaatcgcaaaatgattgaagcattaaaatatagtaagttactaactactctctccgccccacgatacaaaggattttgagtttggacgttgctctccacttggacgccacgatgcttccacggcaataaaatcttgttaaaatctctaatcacatggtattatctcgaaattatgccaaagctgcgggctttttattaacttttttaattaaccctgccaagttgcgctacgga

SEQ ID NO: 27603 - DNA, 284 bp, Oryza sativa
agcttgttttttctcactgctgagactactcctataatcacttataactcttcctccagtagaaaatgcactttccgacggcacggatgatgctggaatagccaatatatcacatgccatctgagcaagtataggatacttgggggagaacatcttccaatattgcaaaatgtcaaaatcagcactaatagagaccacttcttcttcaagacacctgtcaagctcatttgctctttttcttttttgtgcatcaacatgttgtccccaattataccaacgactac

SEQ ID NO: 27604 - DNA, 244 bp, Oryza sativa
  unsure (1)..(244): unsure at all n locations
ggaccttgaaactcagcttgcagaganaaatcatgtactatttaaccatgctctactgattcacgaataatagtccctaatatccacatacagcacccaatcaatttctatgctcccagaataaaccatttctaataatcttttatggagaaaggtttgtatatccactgccagcatgttacactccaaaataatatcaccttgtactaactagcagattggaactaaacctcttggttttact

SEQ ID NO: 27605 - DNA, 287 bp, Oryza sativa
agcttatgggtctttttcacaatggcctacttaagtggcatatgggtagtaagaccctaaaggagtacctaggctatcaaagggacaacttcaaccatgagggtcttaggtatgttcctccaccaaaaggaaaggtggacaagagtgtgatgatcaagaggccccaaggtcttagcaattttgttaaggccaaaagtatccttcctaatgattatgcttcacattgttcttttgatgcatcttatgttcttaggaagaatgctagtggtcgtgttgttgctaagtat

SEQ ID NO: 27606 - DNA, 290 bp, Oryza sativa
agcttaggacttttttatcgaagatgatcaattgaaccacattcaaaacaacgatttggaccaccacttttcctgttcctggcattattcatagctcgagcaattctattagcaactaaagccaaatcctcctcctcgatttgttcgagttgattatcagatgtggcattaaaaacagcaagaaaagaagacttagatgaagaagcatcaacatccaaagaggaagaagaagaaaccaaagcacttgatctagaatcaactttttgagaaagaacattcatctcatgtgt

SEQ ID NO: 27607 - DNA, 291 bp, Oryza sativa
agctttataattttttgacagggccagcatgaaaatgggcgcaatacgacggaaagatgacataatgaaaatgtgacacatgaactgaaacactttgagatcacaaaacacaggagttcaggtgcagtttcaggtttaacaagagaacataagcaatgtatgcgttttccatctgaatggaatgcaatactacagaggttaaatagtactagtacataatctgatttgtctatcagctcatgtaatcttttgagggtacattgttgcaaacagaattgatatacacaacgg

SEQ ID NO: 27608 - DNA, 287 bp, Oryza sativa
agcttctgattttttgtgattttcggctaacccatcactaactcttcgatatatttcttgctgaaagtatccctgatcccactgataacgagtaggcccaaacaattcaattggggtagttgctgacccataccacatagttccggcaactacgaaagctgcaaaaaaaacagcagcgatactactggaaagtacagtttcaatattgcccatacgtaatcctttgtatagacgttgaggtggacggacactaagatggaataggcccgctaatatgcccaatgtac

SEQ ID NO: 27609 - DNA, 440 bp, Oryza sativa
  unsure (1)..(440): unsure at all n locations
acatggaacatgtggagacaacttctcatggcggggttttttatactttctattaganttcctttatgggtggaacacttaagccaactgtatgtgaaaatacattttcatgggtgaagcacttaagccaaccatcggtgaaattttatttttatcacggggcgctcatttgaatgaacttcgtacaagcgttaaaccaaccgcctacagtctaggatctgcagaaatcacctatttacacaagcttatatggagccgcatgtggagactcctttgcaggggtagtttcttcataacactgactgtgaagaatcattttcatgtgagatcacttaaggaaattgtcagtgaaaaatatgtttcatgggcagatcacttaagcaaaccgctcgcgaaatttttttccatgaccattcactgaatgaactgccctatctctt

SEQ ID NO: 27610 - DNA, 290 bp, Oryza sativa
agcttagagattttcggttatgattctaatacttcatagcgctctcattgttattaactactagcatatattccttgcttaacaggagatcttgctggttctggatggcacgactggcttgaatatgctacaacaagcgagggagttcaatgatgtaatcaccatttcctggttattttggtactcctgatttttcttttttttttcatcaagatataacgaactctgttggcttaatgccaggttgttggagtcacaggattcgtcctaacaaagcttgatggaactgc

SEQ ID NO: 27611 - DNA, 288 bp, Oryza sativa
agctttattttttttagtaaatttcatcaagtgatacaattattctgagagcacattcggcttctgcaccaaagagtacacacagccaacaagaaagaaacaaaagataaactcatcatccaaaatagcagaaacaaaaagaactttaggagcccgctaaccgtagcctagaacgtcacccatgtgctggggtagaaaactactatatggccactaactctaattgttgacaaaccgcaatgatagtaccctgcaaattgaccttctgaaggatagcctatgagcgga

SEQ ID NO: 27612 - DNA, 285 bp, Oryza sativa
agcttgtgttttatttgatggtaccaagtctgttaccgatcggtattaaacctagtaccaatctggtatcgagtcctttcactgatgctggcataagctccgtcctatagtagttctctttggtaaggtgctcctgttttaattgtagagataagtctagaatatatttgtcatacattatattttttatcatattgttacaagaaacagaaacataagatctgtcacagcaggactacacatcttgaaatgcacaagagatatgagccgatgagcgcgccaaaa

SEQ ID NO: 27613 - DNA, 286 bp, Oryza sativa
agcttctctttttgccggtgttgctaagtgcgcgcgcggcgcacgcgacgacggccagatggatggcaatgtaggcgaggacagcgccgatcagagctactacgtaggcggtggtgtgcgccgccctggagctcccggcggcgtaggctccgacgagccccgccagcgagacgaggacgcacccgtacagctcccaggcgcgcaccgtgccgtcgcgcagcttccggtcgaggagcagcacgatgacgagcagcgacgcgacgaacgcggtggtgttgcagaggag

SEQ ID NO: 27614 - DNA, 439 bp, Oryza sativa
actcaagcttgagggtcgacacatcataacggaagtgctttatgatggttgttctagtgccccggccgaagccgccaagaactatgtacgtcacagcggttgtgtcgtgcgggataacgagcctgtcagtacggtgtactggcgaagaacaagggcacgcggagatcatgagagctttgtcccagattcggagaaagagatgctgtggaccacaatgctcgagacattcaccctttctgcgggtacagaggacaaagtgaaaaggtggactctgaagaaaatggcagaacagtttcagagcttcaagggagatctgtaccagaagtatatactgaaggggcagacaccgaacttctacacattcccaaagctaagggatcactgggacgagttctctgcatataagacaggtgaacaagggcatgcgatgattgaaaga

SEQ ID NO: 27615 - DNA, 286 bp, Oryza sativa
agctttgctcttatttggtcactgctctgatcaattgggatgctctgccggttgattctgacatgttgttatcatcacctcgcatggcgtcactgaatagtataattgcagggctcacaggggatgatcagcgtgccaaataccgcctccctcctcttgacggatatggttttcgagcatctggtcttgtgtggagtaaattgaaaggtcatccttggtggcctggtgagatatttgatacttcagatgcatctgagttggcactgaaacaccagaagaagaaggg

SEQ ID NO: 27616 - DNA, 360 bp, Oryza sativa
  unsure (1)..(360): unsure at all n locations
actcaagctgtcaattttcgatgtgggcctgctaacaatgcaaatatatcgtctctctcttcatgctggggngaatcactaatcacattggaggatggagaacaccatgggggcatgtgcaggagcactcaccgatgcatttggcgaaactctcctggggcaggcgtccgtcggcgctcatctagtcgaaccgcttctcgacgttcttgcacccgacctttcccctcgacaacttgtcgaagaagcgcaagccgcgcatctccggctgagcgctggagagcgtccgcttcaacttcaatcggtggggcaccatggacgccagacgcttcatccctgacgccagccgcgacaggtgttttt

SEQ ID NO: 27617 - DNA, 287 bp, Oryza sativa
agctttgggtttttttgagatagaccaacatcctcaaatttgaacattttgcgtggattttatcaacatctgttgaccatttgttcctcaaattattccttctttccttacaagaattcttgctcggactaatttgagaaacaaattattcattgttgacacggactttttatttgattagaatatttagtccaagcaactgtagtaggacaaagttctatgagaaatcatatttttagaaacacggagtatataacccgcagcaataatctagtgaataagctgaa

SEQ ID NO: 27618 - DNA, 282 bp, Oryza sativa
  unsure (1)..(282): unsure at all n locations
gctttttttttatancggcacactgacacactttgcatctgatcgttatccaatatggtctacaattggctccagccatgctaatgttatgcttccggaatacacactttcaggatttatataaaggcaccctccccatcagtcccaacaacaggagcagcttgatcaactctagctactttctctctaccaactctggtaagtcaagatttcctatattatagaaaactccagtgatagcatgcctatatacaagtcaaataatgttgagtacatatatat

SEQ ID NO: 27619 - DNA, 175 bp, Oryza sativa
ttgccgaccaatgtccgaccggctgtatgtgacccacatatgccttcatgtatgtcgaggaggaggtgtctgccatcatcggtagagacgcatttgagaagtacaccggttagcgcttttttgtatagatcattacccgccatacaggagatctttgccttacggggtatattct

SEQ ID NO: 27620 - DNA, 283 bp, Oryza sativa
agctttttttttttaagattttatgccaacattttatctttccaacacgtgtcttgcacgtgcacgattactagtatataatctaaccctaagtcaacaggtcaaactccaaatcctctacccatccagatctgcaccagccaccaaccaccacccgagtcagtccgccggctccgggagcccgggagccacgcgcgccgccgttcgccagtccaccgggagcccgggagccgcgcgcgccgccttttgccagccaccaccgacgccgttcaccagtctgcca

SEQ ID NO: 27621 - DNA, 404 bp, Oryza sativa
  unsure (1)..(404): unsure at all n locations
tttcataatcacaaatgagntcattataagattatatgatatatgngataccacgaataattttcgaaaaaaataccttagccttgagcagtagttacaattttgtaaaggattatgtttcatgggaagaattttctcattttgtaggtcaagaaaatagttgaaaacaattttgataaacttccattgcatgggcggggaaaagactatccaccaaactggtggaaagctcttggcggcctgctcttagcacatggtaccatcgtatgcctctctctacatatttttagncattttcttgtgcaagctaagatacatgttctgtatgctgacttgaagttttgtacatatgtacagtgtcggtttcttgagaaaaaaatggttgattttttaaaataatagat

SEQ ID NO: 27622 - DNA, 287 bp, Oryza sativa
agcttgaattgtttggtatagatatgtcagtctgcatattataaagcttttgatttttctgcttatgcatcaggatagtaatcctttatcctttttccatctcctatttcagatgtagatcaaataggctatcctattagatggttattgagcaagcatgtttatatcaaacagtcattttgtttgttgctggaactatcatgtattgtgtgttacaaaattatgccaccaatatcttttggcagtatataataggttatagatatgcctacagcctccatgcaaaa

SEQ ID NO: 27623 - DNA, 301 bp, Oryza sativa
  unsure (1)..(301): unsure at all n locations
cagctatganatactttagtcaatggtagcagttataactttattatggngccgggctagcaacgataaaactctactctgaaaatacttataaagctaagtgaccatctatactatattaaaagggaaaacaagttatgcgctatattattcgcattagggtcaactgaaaacctatgcaaatctgagaagtttataaaagatcctaccaaaaacacatacatgccaaccaaaatctatcatccatttgatgccaacattgaatcaaagaaaccgctaagggattgggtcctggcctttc

SEQ ID NO: 27624 - DNA, 288 bp, Oryza sativa
agcttgggcgcttttggtgaggacgagggggtagagaaccgctggatccacccgccggaaaagcctccaccgaatccgcctgccagaaacaacaccgccgccgcctccgccggattcgccagcgggagccgccgatgccacagccaccgtcggatccagcccacgggagcagttaacgccatcgctgccgcctcctctgctaccgacaagggagagacgagaagggtgggggcggggatgagagggagtgatcgagagggagagagagggacgggtgagaggaggagg

SEQ ID NO: 27625 - DNA, 443 bp, Oryza sativa
  unsure (1)..(443): unsure at all n locations
gacacttagaaactaagcttagacaattataaacatggttggaaaagcacgagtttttataactctatgattgttngacataaacttcctcctatataaaaccattacaaaagcacttttcatattcatttgatacaatttaaaaccttttgaagcagcaaaagctaacaaaagtctaattacctcaattctagcaacaggagtaaaaggtccatcaaaatccaaaccctccatctgagtaaaaccttgagcaacaagtatagctttatttctcacaatcaaaccatcctcgttttgtttatttttgaaaacctacttggntctaataatgttatgttgntatgtccagaaggaggtttaactaaagtccaaacttttgttctctcagaattatcatgttcttcatgcatgggcgtaatctatgattcatcagttaatgcatg

SEQ ID NO: 27626 - DNA, 288 bp, Oryza sativa
agcttgggcatttttttacagtgcagtggagcatagcacggggctttcttctgtcaatggagcacataataataatattaaccacggtggactttcagctgccagtgaagcaggcagtgtaagctatggcggactttcaccacctgtcagtgaagtagggagtagaaggtatatggggtattcgccttcaccagccagcaaaccctggagctgcaggttcaggggactttagcctgtcagggagtcgagctagcagaattaagaatgctcaccgcgaacatggattaa

SEQ ID NO: 27627 - DNA, 411 bp, Oryza sativa
  unsure (1)..(411): unsure at all n locations
gaccttcaaactcagctgctactaccgatcanggtggtggagnnngantngttttcgcctaaaatagcctatgtgtatgtgaggatttgatccttctatgtggcatgaggtaaccctgggtcggctggggaaaggctctgttgcgaaccttcgataccgaccggtgttcggaataagttcgtatcttgtgggtaaagtgtacccctctgcagaggttaactaactgttcgaacagccgtgcccacggtcatgggcggatgtgaggtggttcccgttgcgtagatttgtttgcctgtgctttgtgaaaaattgttgtggtgtgggaatctgaacccgaatcagcctatgtggcagatggacgacctgagtggccagaaacgaatctgtgtgattcgggatgtctgcgggcat

SEQ ID NO: 27628 - DNA, 289 bp, Oryza sativa
agcttaggacattttactcgcccttgcgattttgcgaatgataaacgaacggtttcatttcacagacgcttcacttcgctcagctgtagtagacatcgagtttgagtcggactccgactccgagtcccattcggtacccctccatccataaatctcgtttcgtcctcgcccgccgcctccgcttcccattcccgccgcccgcttcctccacctgatccttcgccctcgattcgctgcacttgatccgccgctgcgccgcctctcgattcgatccatctctgtgccctag

SEQ ID NO: 27629 - DNA, 465 bp, Oryza sativa
  unsure (1)..(465): unsure at all n locations
cacaacaaactcaagcttttcacgccgatctgtccaagcatttgcgataatagaacattcaatttaagaccatgactccttttgcacttccaaatattcctgcaacanactgatatgtttgtttaataaaggagtgcccagcatataaagcttcaatcatgccccaaattgtccaatatcctctaacattagatcaaaagattcgagagaaaactgtgttatgaggaattgcttgctcataaaaccaaactgcaatatactcatgaagcttttcctctttatgaccttacagtgtttactcattgtagtctcgatatgctttcccttagcacgaggatcctcaaggcgcatgcaatagactgtcaatggttccttagttcgtgccttttactgactattgtgcttcctgcacctgatggagcctcttgaactacaacctctcctacttctatcatattctcatta

SEQ ID NO: 27630 - DNA, 286 bp, Oryza sativa
agcttgttctttttgggaaggggttttttgagagaaaagaagaatctacttcaaccgatatgcccttaggcacggccatacataacatagaaatcacacgtggaaggggtgggcaattagctagagcagcaggtgctgtagcgaaactgattgcaaaagaaggtaaatcggccactttaagattaccatctggggaggtccgtttggtatcccaaaactgcttagcaacagtcggacaagtgggtaatgttggggtgaaccaaaaaagtttgggtagagccgggtc

SEQ ID NO: 27631 - DNA, 369 bp, Oryza sativa
  unsure (1)..(369): unsure at all n locations
ntcaaaaaagattaactaatctaaagaataatcaaaattgatattcatcgaatcgtattgttatcgatcaattagaactgccttctagaacgtataattgtctcaaaagggccaatatccatacactaatggaccttttgagtaagacggaagaaaatctgatgagaatcgacagctttcgtatgccagacggaaaacagatatgggacactctatagaagcatctcccaatggattacccaagaataagatcacgtttaaatccattgcaaattctaccctcctcttttcgcagtcgaaaaaaagaaaaaataaacaatttcatctttggacacacatattttcccaaatggtctaataaaaaatata

SEQ ID NO: 27632 - DNA, 286 bp, Oryza sativa
agcttgcatattatgatagtatgaagtaacagttctggtatcttgttttaaacattgcagtttgttgaacaaaatgtcagcataatacatgggaacataaacatctctgaaatatcgtttcaggtctttccaagattgtggtattttgttatgcctacaaagatgtttccaatcattagaagcatgtttaattaaaacactagaggcacacataaccttttgtttctccgacaagacatgcttttgaaattcactatcaaccgctagctcccaattaatgtaagca

SEQ ID NO: 27633 - DNA, 286 bp, Oryza sativa
agcttggctttttcaaacagggacatggtcatacccaggattataaacggtgttacctttaccggacctagatgatagactggagttgggctccatcggaactttgccaatctgaaatttgcaaatctgaactttgccatgacgattaccatggcctcagtcatgcatacaatcagaaccaatctgatcaggcgaggacgcctgaaagctccccttgtcctgaagaagaactggtactcaagtctactgttttggctgaacatcctgcagtaaaatcacaaaattg

SEQ ID NO: 27634 - DNA, 442 bp, Oryza sativa
actactttataggttgcttggaacttttatttgttccaaccttaggttacactcagcatatattacaaagcagacgcgatatcactcggatcatgttattcagggatttacaccgcatatgctacatattaatatcaagtcgcttagttaactataattatggaagccactcggctggttggattatttattccttgactatatgcttggctggttcacttaaccgcatagtcgagggctacacctattaggtgcatttagtcgatgcacctgactttattatttcaccctccacagtcttcagatttggtaaaagcactccggagaccatggcacagatgattgaagtactccgccttggagtaatctggttcgagagaagaatatcttttctactgtgaaggtctcaagggctactgtggagattatgggtaccctatat

SEQ ID NO: 27635 - DNA, 286 bp, Oryza sativa
agctttgactttagctggttgcagcactgttcaagggcccccaagtcaagctgttcacactaccacagtaggcaaacaatgtgagaaaaaagacaaagaacctgatatacaaagtacaccagaagttggtaccgaagagatgttagtacatggaagtacagagaaaaagaagctggtttcaagtactatagaggatcatgtcagctgcaactcaaagaatgtcaatactgctggtaaggtgcatcagatggaaccagtccagtctgttccattggttcaccgagtt

SEQ ID NO: 27636 - DNA, 331 bp, Oryza sativa
  unsure (1)..(331): unsure at all n locations
aatggaacacaacaaagcatcggatcctgatggattgctgtcgacatttgatgtccccaattccgtatttgcataaaatggggatcggtggtacaaagatatatgccagattgaggtcaatgagactgagacgaggatttttatacaggttcnggcccctgaaatgtcaggaaaaaccctatatcctgttggccgaagccggttgttgctcttattcaccataaacacaccagtacaatatttggggtcgcctatctaaccgctgtcgacatggcggtctgaagctctgactcgtagtctacaacagggtagtcttcctccttgagttcgt

SEQ ID NO: 27637 - DNA, 288 bp, Oryza sativa
agcttgattttcatagtgccacgtggccaaatcaagcgccaggtttcggaccctgcaatcgatatataatatttgccggagccgcaacagcgaggccatgaggcccatgacgcgactggaaatactccaggacagctcgccggctgctgctctgcagtgctatatactctcaggctgtgtttggataatggaaaatagggggtgggattgggattgggaaatgaatgaagggttaggattaaatgaaagagggagaatgaatggttaggatttaaagatgtctttttg

SEQ ID NO: 27638 - DNA, 413 bp, Oryza sativa
actcaagcttggttactactgtgatattgaggacacacttatcaaatttctccctattctcacaagggaggatactctatagtcgattcatattcatatccaaacgctgcttatattgtatagtcctagatattaataaaaaggggtatgattgggagctatacacatcattccattgacaatggtaaagattgagtctagatctctcaaagacaacatatatttaactggagggagctaactatttatgtacaaaagatgatcactgatactgacctctgttcgtctttttccttcagagatctctaagcgcaaacggtgcacaagacatgcaatgatgctgcagctcaagcctgaagacttcttatgtatcagtacctcctctaattctacagaccatatgtagatcatac

SEQ ID NO: 27639 - DNA, 284 bp, Oryza sativa
agcttttttgttctaattaagcacaattttatggtgtccgttaaattatagaacaatcccagatgtgtgaaagactgacagagtcttctcatttcaagcagatatttgatctctttgatcttaagcgcaatggtgttattgatttcggggagtttgttcgatccctcaacatttttcacccggaaacgcctttggcagagaagattgcctgtaagaaataccctacttcagcccttccacattgcattgcatatgggtaagttgtacttaattacaatcttctt

SEQ ID NO: 27640 - DNA, 284 bp, Oryza sativa
agcttgtttcttctcatggtcatgctatatattgatagccaatataatgtgcacaataaatacttgtctgtggatgcctagtcacaatcggcacagctaaattggccggcttggggtttatatataatttgatatgtgcacagtcagctttggagcttctctctttaatgtgtatatataattatttggctattgatgacgcaatatgttgcttgcttgtgttctcaattcattggacataaataatgttaatcacttgcttaatcgcaacttgatttatgatc

SEQ ID NO: 27641 - DNA, 331 bp, Oryza sativa
  unsure (1)..(331): unsure at all n locations
tattttcacccagngaaaccacttttagtcgtgagcatttatcttatcatggcgggagaacatacacgaaagaattgctattaaatagatttcccttaagcactggcatgatgcaagccccgcacgaaaccgaccggcgattctgttccgggcgagggaaataaatcgtagcatagggagcctgaaaggctgattattgtttgggattgggccgggcaggtatccgttgcctgccaccgccatgactttaatccaagacatgttgtacagggcttgtggcactaagctggagagctgattgtactgcatgtctagaatctctagttgagac

SEQ ID NO: 27642 - DNA, 289 bp, Oryza sativa
agcttttggagtgtaataaaaacatagaagtattctctccgttctattttaagtgcagttataaattcccgtatccaacgtttgaccgttcgtcttgcttaaaaaatataaaaaaattaaaaaaataaatcacatataaaatactatttatgttttatcatctaataacaataaaaatactaataataaaaaaattaaacaaacatagacgattaaatattggatacggaaatccgcaactgtatttaaaatggggtggagggagtattgaacagagctgttctaaaga

SEQ ID NO: 27643 - DNA, 287 bp, Oryza sativa
agctttacagttttctaccagttatactcccgaagtcattttgtcaaaggatttgaattggtcttccttctgataatttaccatatttttagaagatcgtatgtgagcactgtggtacatgtgatgatcacatactcaacgtggtttatggcagtgacttggctgtttgcaccttttctttttaacccagctggttttgcttggcgtaagattgttgaggattgggcagactggacaatatggatgaggaaccaagggggcataggagtgcaaccagaaaagagctg

SEQ ID NO: 27644 - DNA, 389 bp, Oryza sativa
  unsure (1)..(389): unsure at all n locations
taagaagctagtgggggataactttatagtaagagaggattccatcactgtgcgcttgttntgatcaaaattaagggcaatttgctatgcatgatctatagatctagttgattgccagacaatccgacatacctgccataaccgacgtgaaacctaacaatgaaataggccaattatctcagcaggaatcgcatgatcatgctcacattacaatgtgtgctatgctgtattgtaagcactaccccgatcggtattgcaattgcatgtcatcttgcattatggcttaatgtgtctcatccaaaagaagaggaatattttgcatcaattactttgcggttgtcctgttctggccgcaacaattttttatgggtcaccaaaattttaggaga

SEQ ID NO: 27645 - DNA, 284 bp, Oryza sativa
agcttcttcgtttttctcgttgcccgcgtgccctcttctgtccaacggagggttgactaccactagcctcctcctcctggttcccctccacatccctttccacgtgcccctgctggttcccctccgcatccctctccacgttcccttcctcgttcaagtactggtttggatcctcgttcccctcttcttcattccagtactggctgcttccctccgcaattgtatcgtacaatatctgttcctcatcgcggtcagccatctgttgatacaagaaacatctgcta

SEQ ID NO: 27646 - DNA, 342 bp, Oryza sativa
gcatttattttccgcttttgccttccaaaagaaatccgaactgttatcttggatgccttcaacgaactgaatcctgtacacgggttttgccgagtaggttccatttgaagtccaccgacacataatcgtgtcatccatttgctcttgtaaaacgacctgctggatttggtgccataaggggatgaactctatgacttgaactgtgggggtcattcttcgcatctgtctcaaccaacggatgtcttgaagctcctgtgccaccgttttagtttgtctttgtgctatctggtagagggaagggtatagctctttaggggatgaccccttaagccatttgtcatg

SEQ ID NO: 27647 - DNA, 287 bp, Oryza sativa
agcttatgtcctattcttccctccgagccgtcggatcagatccaacggctccagatgcgttcaggcgcgaaacgggattcccccgttgcccacggcctactgtccttatggaattttccgttttttttttaaaccgggaatttccgttgtgctcgatagagggaggcctggcagggccgtcttaggccgtgcgggccgtgtgaccgctcgtggcccgtacttcttatggcccagtccactttgactcctttaatagttagccgaatctaatttatatgcctcaacca

SEQ ID NO: 27648 - DNA, 394 bp, Oryza sativa
  unsure (1)..(394): unsure at all n locations
tctcatcacagnatgggtctttagatactttcttccgtattacttctttcattntaaaatataagagattttgattcgatgtgacatactccctcagtccaaaaaaaaccctggttttcgtgtccaacgtttgaccgttcgtcttatttgaaaaaattataaaaaaattaaaaagacaagtcacgcataaaatattaatcatgtcttatcatctaacaaaaatgaaaatacaaattataaaaaaattttatataagacggacagtcaaagttggacacggaaacccagagtttgctcttttttaggacggagggagtatcttagtagtatgcatctggttatatactactccctccatcccataatacaaatgattntgagtttttgcttgcac

SEQ ID NO: 27649 - DNA, 290 bp, Oryza sativa
agcttcgccgttgttgccgctctccggccgtgcatcgccgccgctgccgcgccgtgaaaccgccgctgtcacgctcgccagtgccgtccgcacctcggccgccgctcgcttaccgtgcgccgtcgccgtaccgctctccccacacaccgctgcctactgccaccttcattcgccgctagccgccgctagtcctaccgtcacgccactccgtcgccaccatcagcctcgcgaggtcgaggactgcctcgtctgtcacaccctgattttcgttacaggatttataaattatt

SEQ ID NO: 27650 - DNA, 381 bp, Oryza sativa
  unsure (1)..(381): unsure at all n locations
gctgagctttaacaaaatgataaaaacccagctagctcagttagcatccttagttccttcatatgaaactgggaggattccggggcaacccaacttctccactgaaaatgttaaggcgatcaccacgaggggagggaagtccactcgtgatccgccgaatcctaaccctgcatgaacaaacgagattgcaaaagaagcgccatctagtgacttcaactgacaaggaagatcagccagaaaagaccgtacagcatgagtactacgacacacaattggtgctgttttcttaacggatgaggaaaccgctcgtggacgagcaattcgctcgtttggttgaagtaatcagaaaatcacatcaangtcccgttgttgacactatgc

SEQ ID NO: 27651 - DNA, 283 bp, Oryza sativa
agctttgttttttctgtctttctcctcaggttcagtgattctgacctgtccattcgtgtataaggccaggccaattaattggcaagcaaaagataaagagaaaaaggttgacacctggtgtgcaataattcagaatttattgggtcttccaatcaagaacctaccgtgttaggatggcaagcaagaatgtgaggacaggagcgatattggagaaggcagtgacgaaggtcgccgtggtgtatctcaaagcaacgaagatcatgtactgccttagagctgccct

SEQ ID NO: 27652 - DNA, 283 bp, Oryza sativa
agcttgaatgactagttatgtgcattacatttgagcaacagaccatggaaaaacaagatgcagttccatttttcaccttttgttgacaagttaattagtggacgagaataaaataatataatgttttgatagatactataacagaatgctttgatgatactccctcagtaaaaaaaaagtgactttcagacgcatgcagtaaaaagttactaaaaattttagctgataatatctcaatgaacaattggacattatacatgcatctttatttgccataaaaggt

SEQ ID NO: 27653 - DNA, 368 bp, Oryza sativa
  unsure (1)..(368): unsure at all n locations
tgagcccacaatctgaatggctcttgagtatctagctctgtgttactttgagagggagatggcctggcaaggatggaatgaatgttgggaaaaagcactcgagtcgcctacatatatataggacatgccaagtgggtctcaaccaccaccgccatttctttgagggttctttttttctacacgcgcggccgtaagcgaggagatacccagcttatgcgacacctcttgtttggtgattccgtaaaagaacgatcaagggaggagcttgagcttgagctagctagctagtgctcttgttttggagtgtatccaaagctcacggctaccatgcatctgtntttcagacctttgaccatgcatgcgcggtt

SEQ ID NO: 27654 - DNA, 288 bp, Oryza sativa
agcttattttttttgttaacgcaggagaagcttggaagtagtagcactaggtcaagcaaagggaggccagcaaagaaacaaaaggctgaggtagaatcgaagaacatcaaagacatgttccggagggtcacaaggaaaggaacgtgatcccatattatttatagtatgacttggttctgatttcgccatcgagacctcgcaaggcgcttcatattattgagggaaagctgaggttttcagattaaagcattgtttatgcttcagaagcattcgtgcagctaatggaat

SEQ ID NO: 27655 - DNA, 340 bp, Oryza sativa
ccggagagtcccatatcaccggagaacagatttaatagatgcctgcccgcaatgcaagcacaccaattccaaacaaccctttgagcctgttgaacctatttaaagctattgtgtgttttcaactattgcatttattttcgaatggcattgggtggatttaaactattagtttgatataagccttttgctgttgagtaccttattccttgataccttgggctataatttgactaattgagctttatttatttatactggttcaactagatattagatataattgctgggccctgcttataaacagatacacattcatgggataactaatgccacactatta

SEQ ID NO: 27656 - DNA, 286 bp, Oryza sativa
agcttgtatgtattctagtcttttcatgtgatttagattttgctttcaagggagataatgcatgacacttaaattctatacttgaattaagcaaatatgcaatgttgatgctagcatatggtttgatttataaatgctttatatatatgctttattgacttgttattcctcaaatagctttaattgctcattgtgaaaaacagaataaaaatatgagaaaaaaataaataccgaatccttggaaacagtcttgacgacaaggacgtattcgatgtgagcaaaataa

SEQ ID NO: 27657 - DNA, 285 bp, Oryza sativa
agcttctctttaccatttgttgtggtcaaggtctcccagaactctgaggtaggaaagaaaatgatgttgcacctcatgttaactactgattgtattttgcttttgttttttgatagttgatgtgattaattgcaggaaggcttatccctttcagttcaacctttgttgaggatctataataagagtgacttcccccttgaacttcggtttcagaggccacagaaatcaagcgaggaagcggcatttgtcacagttagaagtggagacatggttgatgaatctact

SEQ ID NO: 27658 - DNA, 345 bp, Oryza sativa
  unsure (1)..(345): unsure at all n locations
gggagaggaaggtgtcattggaaaggaatagattctatctacttctctattggatnnagatgggtgtctatgtgtgggggtttaaactagcagacctctctggaaatgagatgtttttttcttttttggaaacataatacagactctgcaaactgggctggcataacttgaaacttatgaaaccaccacacccctttgtgtacctccgaaaactgggctggcataccttggaacttatgaaggcaccatacacatctcgttgttaacggatacatcacctaccattaaaaaaaattaacaataaacgcgagcacatgtgccaagtctagcacttgacctctggtg

SEQ ID NO: 27659 - DNA, 281 bp, Oryza sativa
agcttttatcatcgtataaaatttcttgagcctatttttttcattgtttcttccgcgtttctcatgtggtttattcaaactaccgttcctttagttttctttgtttcgtgaatcttcagtttgtacttgtgctcgtatcaaaatcttgtattctttttctatttgtttttttttttttaatcctgtgttgccttaaaccccatttgggctgcaaagctttgttggttactttgaaatataaacatgtccttataaacttaattatcgtgaaattcattagt

SEQ ID NO: 27660 - DNA, 386 bp, Oryza sativa
tgacttggtgcgaggaggctgtgttaacgatgcctgcttttggttaaccaaatgaaggaccttctttgtgatatacccatggacaattcacggcatattgcccttgctctctacaatcctgacaaaaggggacattctcttctggcattggaaactcattgacctgagtggcagatgctctatcaaacacatactgattttggtcttgacttccaaccaatggtagctgtgaaccaagcagcatgcttggaatggaccaagggtgtacccttgtaactctcttgagctagtggtggatggagttgaaacttgagttactgaggcatgctgctgcattctttccttttcctgtaaacatctgtacaggattgtggagagagaaacag

SEQ ID NO: 27661 - DNA, 284 bp, Oryza sativa
agcttgactttttcagcgggcgactccactccacaggcaaaccttgacggcagcaacggaaccaacctctctgagacggctccaactgagaagaacttcaactctggtgtgggggaaatgagagagagagctcgagtgagggtttttatgggcgagggaggggcggaaacggctggggatggcccctatttggccggcgacgtgaagaggtggaggagagagagagggtgttgggggatttcaaatccccaccacttgcgggcgcgcgcacgcgggagatgcgg

SEQ ID NO: 27662 - DNA, 372 bp, Oryza sativa
cggcaagaatcagaccgtggtctttgttgcctttttccacgcaaggcttcgttttccgtgcacctccctggtgccggaaatacttcatcttttcgacgtcgagttgtcccaactcagccctttcgccctgagtcggatcaatatcttcgactgggcatgccgaactgcccgggttgagccgaccgccgagctgtttggggcgattttctacgccatcgtcaactcgaagacggtgactaccccagctggcactcagaaaaccgtcttcggaagtgcgaacttcaacattcgcccggagcgctctgacatatggccagagaacgcgtccatgcccaagtgggatcgcactgtatgtcaaatggtctacctgtg

SEQ ID NO: 27663 - DNA, 308 bp, Oryza sativa
caccgggatccttaagtcacctgagctgcagctggccttttcttatgcaccgatcatccaagttggggaactcgtggatgatgggctgcaggagggcgagcttgtcgtccctgtagtagaggaagttgatgagggcgctgaggacttgcacgaggcggcgcgggtcggggcggaggaggtcgcggagcgtgaacccggggaactggatggactcgaggaaagcgctggccctcttgtggaggcggagtacccggatgccctccatgtagtgctccgggttgtcgagcgacgccagcgcgtcgaatcct

SEQ ID NO: 27664 - DNA, 288 bp, Oryza sativa
agcttcgcattatttttctctccctcttcctgcagacactacaacagttgcttaattcagattcagatagtagaaaaatgtagaggcaaccaagcaagtaaagaaattcgtacgtacgtcgaacctagaaggatcaaacaccgttgggttgtcgaaaacatccgggtcgtagtggagagacctggcgtcaatatttacaatccagtccttctttatgtgaaaccctgtatatacatacatgcaatgtcaaaattactcagcatgtcaagtgtactactttctccgttt

SEQ ID NO: 27665 - DNA, 446 bp, Oryza sativa
  unsure (1)..(446): unsure at all n locations
gacacataaaactcaagctgtattgtaagaagatgctatcgtttggctctaatagtatctgtatctattatgtttctttgaattggacaggcttctctatgtttagcactcaaccacctttcaatcagccgttcatgtggcctttccttaacttttttactgaagctagttattgcttggcagccaaatactgaaaacgatgatggtattacgcctttgttgtctgctgttgcagcgggttccctcccatgctnggatattctaattcaggtacacaaatctaatttcaagagtaaaataccaaaatctggtgcttttactataggatattatccacttcgatgccattcattggtcatatnggttctggatgctataattccttgtttagtaatctggcttgtgcaatggnnggtcagacaagnctcattttcgtgttattgatt

SEQ ID NO: 27666 - DNA, 288 bp, Oryza sativa
agcttgcagatttttttgtttattatgtttgtctgcttttgtttagtatcattgtatcaattctaaaacattagtagctcactctcttttttcttttcatttgaaaatagccatctagcaaacagcaatcttactggtccattgccagacctaactggaatgagctcactcagctttgtgtaagtgatgagtcaaaccttccaatgtgaaaaacaagatttgacctgcaattataatactatgcaaatttctggactgtttcctcttctgacctgaaacattgttaca

SEQ ID NO: 27667 - DNA, 340 bp, Oryza sativa
gcaatcactgaatactattgagctataccgcaatcactttgtaaggtcaataccagaggtcttcgcttgcttctccaacctctctgttcttcagctattcaaaaacgactttcaaggatggtttcctcccatatcttccacacaagaagttgagaatgatcgatctttctaagaatcctggcatatctggtaatctgccgacattctcacaggaaagtagcttggagaatctgtttgtcagtagcacaaacttcacaggtacgattaccagatccatcagcaatctcaaatccttgaaaaagttagaccttggtgcaagtggcttctctggaacgctttc

SEQ ID NO: 27668 - DNA, 287 bp, Oryza sativa
agcttggtttattttatttacttacctttttactttgatttctaaactttattcaaatcaacccaaaaacttgtgctattaattggataaaggtcttaactccctcctttcacttgtctttagatgctgcgttacaagcctgagtacctgtttggtgttgagggttttgttcaggagttgcgtacgatgtcctttgtcattggatttgggactgcccctttctatgcccagattcctcatgatcgtcatgaacagaagtgccgagtcaaagtcaccttgaacagcaa

SEQ ID NO: 27669 - DNA, 436 bp, Oryza sativa
  unsure (1)..(436): unsure at all n locations
tacttctcgtctcttcttgtccgcgtagcctttctgacgagactgggcggctttcaacttctctctgatttcagctaccctttcttccgcttcctttatgaatgcgggtccaactagtgcacgctctccaacttccgaccacatcagaggagtcctgcactttctcccatagagggctttaaatggcgacatgcccaagcttgcttgataaccgttgntgtatgagaattctgcataaggtaaactctgctcccagtccttgccataagtaaagacgcatgctcttaacatatcctccataatctggtttactctttcggtttggccatcggtttgtgggtgataggcggagctgaaatccaatttgggcccatagctttatgccagctcttccaaacctagaggtgaactgagttcctcgatctgaaacaattct

SEQ ID NO: 27670 - DNA, 287 bp, Oryza sativa
ggctgtagcgcctgtttactgccgcacacagcgcacgggagcacagaccagtgccacaacccgtcggtccggcagtacgtcctgttcgaaccgacccatagtttacacgggaaactctcgcgattccgtccgttttggcctccacaaaccgggagcttcttcgaaggagatcacagcacagcgatccgcgaggtgccagccgaaacttgccagttacccactggcaaccgcgcggcctggctgcacggccgcaccccgtcgccttccgttccctcccccacgagccc

SEQ ID NO: 27671 - DNA, 342 bp, Oryza sativa
  unsure (1)..(342): unsure at all n locations
gctttncaagagcttcatggagctcaggagcttgcatcccactggccttcttctttaatacaacatctttcaatggcttggtgttgttcataaatgcaataactgtctgagcttccagagcatggatacatcttcttaaagtgtcaactttgtgttgagccttggatatcaatagtaaaggtccaaagatggtgggaagctgttaactgcagcttgattcactgaatttgatggagagttggggttggcatctgtctgggacagcacaagtcttggaacagtaattgaatcaagtggaacaacacttatagctcttacaaggactggatcgtgaccccaact

SEQ ID NO: 27672 - DNA, 285 bp, Oryza sativa
agctttgttgtctctgtttttccagcaccactttctccactgactaatatggactggctgcggtcctcactaaccatagctctacaaaatggagacagtgttactccatactctatagcataaattcccaatgcaggctttccatgtatacctgtatgatgcatctgtaacagcgaaaacatgtggactcaattcaccaaactgcacgcctctgtactgctccatcatgtgcatatcataaagatgaggtagcttcgcaaaggggtttactgcgattaaaatacc

SEQ ID NO: 27673 - DNA, 285 bp, Oryza sativa
agcttttgcttatttcatctcatgcaaagttttgtcccttgctcagattttttaaagtcaaactttatggttgttgtgcatcctatatgtagatgtcggccatgttgggtagctaatcatttttcttatgtatataaaattaaaacttaaaatattaatacatttactaattttgttctaataaaggaattttaggatacatctggataagtaatgctcatataaatccttaaagtctcttatatttttcgacgaactaagtgacatttgttactagactgtaca

SEQ ID NO: 27674 - DNA, 288 bp, Oryza sativa
agcttatttttttttttaacgcctgagaggctagtatatatgatggctatggctaacaaaggtgggactgcaaaaaatccgaatgttcaagatatatattaaagctttatatacatgtttccgaaggatacatagtgccgaactggaacgcatatcatacatatatatacttgaatctgattaaaacatctagacctataacgcgtgcttattattatcgacgtaaaggtgacgaatacatattataactttgtgaatgcttgacaacccttagtgcacttgatggaa

SEQ ID NO: 27675 - DNA, 287 bp, Oryza sativa
agcttgcattttttgcggggagaaccattcccgtaaagattgcagcatgtacaatgtagggcaagatgccacaggcgctgatgttcgtcgcgttccaaaggggaagtcgaagaagaaaaataatccttagttcgctattatccttggtggactccctactttgaagatcgttatcgttcaatttatgtttagtgcgtctgtaattttaatttgaactttcttgcacttttattacccgaatctatttgtaatggccttgtaattttcattttgaactgcactgcact

SEQ ID NO: 27676 - DNA, 285 bp, Oryza sativa
agcttgatcatggggacatcgctctgcaagattagtgccacaaatacgagatttgcagtatttatgataaatataagcatctacaaccattcttctaaatatgttagaaatgaaaaccggaagatggttgtggtcctcgcaaagcgacgtgacactaattccttatgtgagcatgaatcctgggggattttgaaaaagaaactttcatgctcatatgtggaatgttttctctcgtcctcgagagtcaatgtcttaagcttgtccgtggcctgaagattttcgttc

SEQ ID NO: 27677 - DNA, 280 bp, Oryza sativa
gcttgtttttgttcgtaagcgtgccagttgatcctgcaatcaacaagaaataaagacaaagaaaccacggttaaatctataaacgatagctgatcggctaattgccgataatatatcatttatctttgagccgatgtcatatgtgaatcgatcggtagtcatgaataagtaataaagaattaaatctactcgatcggctgtagatattaacaatatataatccttatgtcaatatgtacttaaatcaagtgattgggatagatcggtcgccatgccgaga

SEQ ID NO: 27678 - DNA, 380 bp, Oryza sativa
gtctaatcatgtattcatgcactatcctaattgatacctatcttattgaaatgcccatagtaaatatgatagtatcaataacattcttcatcgcagtatcacaatttggctccatattaaactagaggccgggagtgatatcaagatggttatcttgatttcaataaaagcttgctttcttttttgtaaaaaaaaaaaaaactttgctccgtgttaacagtataccgaagaattgacagggtagagggatccaaaacggccccaagttcttagcaattgtgcagtggtgcacacgaagtttacacggccttaacctgtcagtcattcaattaagaaggtagccagactgaacatgccccaactggctgtcattgtggata

SEQ ID NO: 27679 - DNA, 284 bp, Oryza sativa
agctttctttttctgtgactctgatcactccaattccaattccacaggcaggcagaacgatgaagcgtatcatcgttcatcacgaccgatatgactatcagaggtttcatagccgtcctttctttgcctagcactagtagtgaagcaattgcaagtctttgcctgtgcatatcaataggccgtatttctatctaatattaaaaaagaaaaacgacgatgagcattgagcagagaccagaatctcatcttgcccacctttatttttttacaccgccgacctccaa

SEQ ID NO: 27680 - DNA, 287 bp, Oryza sativa
agctttccaattattataattcactatttgataaaatatatttataaatattaaataattaatatcaagatgatgcataatagtcaacttaaaaatatgttaataaataaaattagtattgtacagaagagtagatgtaataatatttgtctctagcatgtcttgccactgtaacaaccacacaaactaattttatgtgatgtatcaaatgaatggatgtataggaaaatactagtacttatttaatattcgatggccatggcttataggatatttaaatcaagtgt

SEQ ID NO: 27681 - DNA, 285 bp, Oryza sativa
agcttgaacgttttatctgcacggattttccgctgggaaagggaggaatccagaattttcatgactaggaatttcgggtcggcgtcactggagaatgcggagagggtacagtgtgcagcatattttgctgaggagatatcaaaagggttgttgtttgagagaacagaccaagttcctgctctcgctgagcttatcatggctgggtttctgttggactttgatgttcctgctgttcggtttctgttgaagttcaagaacgtaaggctgcttgaggacgatgaacag

SEQ ID NO: 27682 - DNA, 238 bp, Oryza sativa
tggggtaggaggtgaaagaaagaaggacatacactgaattcaaattgaattctgcctctatgcgggcacccgcgcgcgggcttgaaagccgtgaaaggggcgggcgacgtgggcggcgactttggggggcgtgtgggcactgaatcagaagaagtggcaacgagggcggcggttgctgccggctggaggaggaagactgtgtctacaggtgggccccacctgtcggtgacccggatag

SEQ ID NO: 27683 - DNA, 289 bp, Oryza sativa
agcttggacgctttctagctctcgtcgctgtcgccctcggccctcacacatgacttagctcgctccaattatgtcctcaccccttctctgttcgaccaaattcctgataatttcttcctgactgattccaacagagaatccattaggttggcagtccagagtgttaccttgtacagttgtacggccacccttttccacgcttgtatgcggagttccagacacacgaggaaaggtaaaagtcttgtggtgatccaggattagattcagcttgtgtagagcttccgtgaaa

SEQ ID NO: 27684 - DNA, 194 bp, Oryza sativa
ttgagcatgatatgccgagcctaagaacagaacaccagcacttgcgaataattcttgttttatgctttcattttacatctgcacattttcttctcatgaaccagattgtggatcactatgctagggttgcgaaaaaaaactgcacaacttggcgatcattgatcctgaaagtatagtaggctctcagtaacatt

SEQ ID NO: 27685 - DNA, 288 bp, Oryza sativa
  unsure (1)..(288): unsure at all n locations
agcttctctttctgattnagggaaagattgagcaagaatgagtacaaccacagtactcagcaagccacaccggcagatgcatgattaatgcaagggggggtacaaggggataataataggggttaggttttgcagtaaacagcatttaaaagtcacttagttgcccaaagccattttgtaaagacgatcctagagctacacagtattattaaacaaggccgtgacccctcacgaacctgccttaacccaaggcctacgatgattcggaccgaactggcaacccgacct

SEQ ID NO: 27686 - DNA, 244 bp, Oryza sativa
aggacgagagcattctttttctccggcgacggcggggaagaaacaaaggacaacaaacaggggtgccaaacaaccgctgtgagccgaccaataccctcctataggactaggcatctccctcacccgtaagccgcaaccggctcccccccgaggcaagtccacccccaaacccgaaacaggagaaccaaatcctcaggcgcaaggacctctcccagcctaaagtgggcaaacgggccggccaaac

SEQ ID NO: 27687 - DNA, 287 bp, Oryza sativa
agcttgtcttttcagtgcttttttttctgtgtgtttcctcgataaagttttaatctaaagaatttcaagttgttgaagttccctaagatcaaagagtattccataacaaagtactagcagtagctatattttgggacataaggagtaacttctttatcgtatctcgcctcattatgatgcagtattgactcaaaatttgacaatcttagctaaaatttacagattgtgaaatgtaccttctgatgcagcttggatatcatctccattggaatccctaatgtggagaa

SEQ ID NO: 27688 - DNA, 436 bp, Oryza sativa
acacataaaactcagctactatctagccgacaaacgacgcatgcctactgctttttattgcacgtagctgcctgtggcgtagctttctgcgatcgtcgcacgttagcctgtgctcatcatttacacacaactatgacagcatgcatgtgattgcggccggtcgtcgtgtcttgaaatgtggtccatatgtgtcgatcgatctttatgttgggatcagggatctttatgttttcgaatcatatttggatttgttgtcacacacctgcgtctgcatgcatcgatctggatctctaaataaaaataggggccgttatatatagatttagcattgaatgggtctgcacatataccgttataaaattatcatttttttaagttaccattacagctcatatatttagaaacatactattccctccattctagatataactaa

SEQ ID NO: 27689 - DNA, 284 bp, Oryza sativa
agcttgattttttgctcgtcccgagtgaaggacgaaaggaaacaaagactgggttgttgatcaggagttgctactatgctgcatatctcaaagatacagccgcaaggtatatgtactctctctcagattaaataatctttggcacggtggcttacccttacccctgattcccacgagacactgcttttctttgccttgggcggttgaaagacagaacagcaattagagtaccaaccacccggtctttattcaactctagttccggaagttttcaaatgatttta

SEQ ID NO: 27690 - DNA, 255 bp, Oryza sativa
tggtttactgaatcaaaccctcaccaagagggggcaatagaaatcgagcaaatctccccttttctcatggaagaaacaattgaggctcgccatcaaactatgtacaaatagccagcgatggaagcacatacgtgtgtaatacaactacaaggccatgaatgttctctaagaatatgtgtgccaatatggaatcaatgtctacagcatggatttggcgaatattgtgtaacaaatcaatgcactaagttcatactc

SEQ ID NO: 27691 - DNA, 285 bp, Oryza sativa
agcttaccatggtgttccattgctcaaactcggaagaaatatttttaagtatgctgtcacggtgagctaaacctatttcaatagttgccttcaactctgatatttttccagatacctataaaaatacagagttgcaaatatttcagaacagacaataactctgacttaaattatacaattgctataaaacatatgttttgaaaaatgcagttggaaacaaaaagagatcaatttaagcatgaatagtgtgaataaacaaaataagaggaactatctcatccaaca

SEQ ID NO: 27692 - DNA, 325 bp, Oryza sativa
  unsure (1)..(325): unsure at all n locations
tctcaattccctttagagaaagcaagagaatatggatgttatgaaaataattcttcccataaaaacatagttgtttttttcattctgtgtagacataatttgtttgtagtattaatcagtactacccgtttatggtatagatacaacattctcttttgttaagtgaggttaatcattaaaaaaaaggagagaatctattctacaccactgagtttgttcgagtncaacnatttaccatccacattgtctttttttatattattctggagacttagtcatatggtgtacaaacaccatttgatctggacctatttttccaaatatc

SEQ ID NO: 27693 - DNA, 284 bp, Oryza sativa
agcttgtttctcttagacataattaaccctaacgtggtatttgcctatttgatggggtcacgtcatgtaactggattgggatgaccaattttaaattttttttgtgttgtttatcaatcataaaattcagggactatttcttacgtccatgcctatatgcctgccggacatatgtaatttctggtctatgcaactacaagctatgcaactgcaagcttgtcacacagaggcataattaaccctaatttggcagtatttgcctatttgatggggtcacgtcatgt

SEQ ID NO: 27694 - DNA, 287 bp, Oryza sativa
agcttacatttgtgaacctcttgaggcatgccaagcgcagcgtggcaagagactttaagattcaatcgaaggacgaactggaaaggaactctactgcagccagagctgcgtcatctgaaaatatgcctgaggaggacgcggaaggtccagatgctcctcttgaaacaaatggtgatgaagatccacaggccagtgcacgcagtgataacacagttgaagattctgaatctgatgaagagggggaaagagtcttagcgagacggaaaagagctaagacgaacagcatt

SEQ ID NO: 27695 - DNA, 387 bp, Oryza sativa
tctaacagcttcatcggttttttaaagaaatatcaaatctaaggaaaaatcagaggtacgaaccatgcgatttttaaggaaaaaaaattcacacgagatacatatatagcgaattcgatctgcagtaacatatactccctccgtttcgaaatgtttgacgtcattgactttttagcacatgtttgaccattcgtcttattcaaaaaaattaagaaattattaattcttttcctatcatttgattcattgttaaatatatttttatgtaggcatataattttacatatttcataaaaggttttgaataagacgaacaatcaaacatgtgctaaaaatcaaaggtgtcaacatcttaaatgaatgatgtttctataagctcttctacta

SEQ ID NO: 27696 - DNA, 286 bp, Oryza sativa
agctttttgttttttgccatagattatctaagatataatggccgagctgattcattcagagtctcaaaattaaatgtttacttggcctattaggccaccacatcaatatgaaatgaatctatgcgtagacaatgcaagtcagtacaaaagcacatgaaaattttggacagaagttaaaattgtactacctctttctcaaaattaatataacaacttaagttatgattttggacataagatatacgatcaaaactcattatatttttgagatggaggtatagtatga

SEQ ID NO: 27697 - DNA, 405 bp, Oryza sativa
acctatgaaactaagcttgaggtcaccacatgtcatatctctcaatataaagaattattataaaacataagaataagaaaaagaaatctaactgtgaattatcacttaaatccgctagatggggttttatatatctattaacactacctcctaagctcccctagtgtacgtacgatgtgcggagtaatagtactgttttcagaaagtgtaaaggacaagtactgtttgctaaaaaaaaaggaaaaaaaacaatactaacgtggagtacgtatgtttgccgtcggaaaaataaaagagaaaaataatagtaactgtccctgccgatccaaaccctcttgctacggggttatcctctatgttttctatatatattagttagagcaatatggcaatgcttttaaaaaa

SEQ ID NO: 27698 - DNA, 283 bp, Oryza sativa
agctttttttttttcgagtgggggattacctctcaacatagtacaccatttttatcaagcccagcccattaccctgccactgtcttcttagttaggccttgtgtccaggcccaaatctctatcccgtcgctagggttaattttagctctgatttctggctcatccacaaagatggcccagggtttcaggctttttaaacctggccgaaaggtgtgattaattttcttggcctaaggtctgacaaagtccatttgatgtgcaatttggaataagtttacttttg

SEQ ID NO: 27699 - DNA, 416 bp, Oryza sativa
  unsure (1)..(416): unsure at all n locations
ggaccttgaaactcagctttagtctctttgggtaagcccaaattgtttcctcattatgtcngccacgacatcggcccacagatgttgctgaactgctgcctgcgaatgtgttgcatgggttcaaacagactgtattgagacgcaaactggggttgagccagtccccctggctgatactgggcttgcggggaaggaggctgatattgataattcaagttgaccccctggtaattatgaaggtttggctgaatattacatgcccagtgttccggaacaacttgaggcattactgtgccattcggctatacgtggcgaaccaagtgttctgggacaacttgacttaaatattggtgtacaggctgtccaccaagcgtcgcaaacccggccgatgcgctcattgagccttggtgctgaat

SEQ ID NO: 27700 - DNA, 368 bp, Oryza sativa
gggtacactcgcgtttatctgtattccgaagccaccctccacgcagatcattgtcgagctcctgtacagcaacccaaccaaagcggctgcattgccaatgcgccgggacgtcaacccaaccctgtgttgtgggagcccaagaccatgaaagaagtgcggtggcgtgatacctgcatggaaaaaaaaccggaccggggtccacccgctctgatcgccgggtcaccagtcgaaccgccgggattttatttattaatattactagcaaaaatgtttgtgcattgcaaccggtgaaaaaaactctaatggaaatatacggtttacatgccaaatcatgtcaatgacaatggttgtaatttaataaacaacat

SEQ ID NO: 27701 - DNA, 61 bp, Oryza sativa
aaaccacgaaagcaacaaacaaaacccggaacacccacaacaagaaaggacaaccaaaaaa

SEQ ID NO: 27702 - DNA, 459 bp, Oryza sativa
  unsure (1)..(459): unsure at all n locations
aactgcaggctatgcaagcttttatcattctggcatcgagctattttgtctatgacctcccctacagnatcgtcaccgcagtagagtttaaccaccaaattcgggatggattggtgtggttcctctacgcctaggacaccagaatatcgaaccatgaacgatgaaaggcatgagagaaatattggctagtaattgtgaagccccaatttttgactggaagggacaccanaggcctctgcccttcctctctatctatccaagagatggaagggcagagcttttttttgtgtttttcattttttcatcaaagagttgaacaatgaagatagatggcaagtgcctgaacgatttgatcaggtcgtgtaggaacaaggttcacatcgntcggtcgttaggatgcctcagctgcatacatcactgcacttccacttgacacctatttaaacggatcgtctcgcc

SEQ ID NO: 27703 - DNA, 416 bp, Oryza sativa
  unsure (1)..(416): unsure at all n locations
gcttncttgacgcttactccagataccattttatcatcatgtgctaaagatgatgaggagaagacgccattcatcacaccctttagtgttttctgctacaccaagatgccttttggattaatcaccgcgagcaacacatatcaacgtgagatccaaggggctcttggtgaccaactccgatgatatgttgaggcctacatcgatgatgtcgcggtcaatacaaatacgcgtgacacactaattgatgacctcagagaaacattctataacctccgacgacatcgtctcaagttaaacctacagaaggcacgtttggagtaccatcttaaaagcatacccttgtaagatcaacgccatctagaacattgaaatacccaccagactcacagaatgttcaacttgacctgatgtatagc

SEQ ID NO: 27704 - DNA, 313 bp, Oryza sativa
ttgcttttgtgttgcttgccccttgccaccaccttgtgagggatgtctgcctcacaagaatgggtattactttggaaagttggtgtatttggatatgttgtgaggaaaagagtgttttatcggtgatatatatgtctgtattgttccagccgttgtgtgcacagttatataagattcataatctcgttgttttagcgtacattcgatgtattccttgtaataattcgcttcccttgacagttattcttatgtgccggttctgctgttcttctcttggtgaattgccccggcgatctgcgtgtaagcattcttt

SEQ ID NO: 27705 - DNA, 445 bp, Oryza sativa
  unsure (1)..(445): unsure at all n locations
agctngaagtaaaatccatttcattttccttcatatttgccagatcaaaggactgcatagaaacagaataaacacaagatgtcaagtacaattccgtgcattggaaggacattcgagcacaaaagaagtagtattcattatgaatgttatctacaccttcagacggtcaaccaaatcacaattatctcttgatctgtatttcaaacctcaacaaaaagacaatactgaaacataagtgcataacccagttgaagcatgtaggtcatgggacttacattgagaacagctgtctctgtcacaatatcttcagaagccaatatatcaacaacaggaaatctagctgaattccctgtcacttctttgccaatacatgacatatcanagccatacacattttcccaaaatggcaagcttgtttcacctttcccaaatccagcaccaaact

SEQ ID NO: 27706 - DNA, 409 bp, Oryza sativa
cttgagtatttcttcttcgagatttcctttgtcaatacttataattttaagaatatcatttaactctttgatttgtgacatcaagcgtccctcttcagaagaattaagcaatagtatttcgtgctccaatccctcgatgaccttagatttgtcttccagcattgcttttggttcactaatcatcatagcttcctcttccaacatcactttgagattgttgttttccttgaacaactctgatgacaaactttcagaatgttctaactcagaccttaagattaagagtgcagctccattttcagccagctcttcctctaacaccttttggtggttcagtatgctttccattgcagaagttttcttttcaagttctctttgaacactgacaagggcatctgatatttcatca

SEQ ID NO: 27707 - DNA, 53 bp, Oryza sativa
tttaaacgtcattgatcccacctttttctactttttttcaaattttctctact

SEQ ID NO: 27708 - DNA, 442 bp, Oryza sativa
  unsure (1)..(442): unsure at all n locations
agctngnctaattacttgctttgggggaaataaactttgcccataatagagataatttcctcttatgttcttgaggaagcatgtgagaatgatataacattgttgcctctcctgctgaggactcttgaggaagaaagatctgctgtatcttgtcctgaagctttggaaattggccatccaacaaagctcatgcatgcgatttcttccacttgtgtcatctgctacggcgagagcttgtgccgtttgctacccataatacgaaaggaaatccggtttatcgagtacaatggtttggtcttatattgtccgccttcatgcatttttgtgctttcctacaaatttttctggccttcatgcatactggattctgatttgtccatttgatcaactagaaaggaagcccgcgcagatgcgcgggcaatttatttttttgttatagaaa

SEQ ID NO: 27709 - DNA, 436 bp, Oryza sativa
  unsure (1)..(436): unsure at all n locations
taggacaatgcgaatgaatgtgatcaagaccaccacattctttgcaatgagctggaccatattttttcctgtacctaacattgttcatagcttgagaaatcttattagcagccaaagccaagtcctcgtcctcgaactgttcgagttgctcatcggacatggcatgaatcaaagcaaggacaatagaatttgatgaagaagcacctacatccaaagaagtcgatgaagaaaccaaagcgctagacttagaatcaactttatgagaaagaatattcatctcatgtgttttgagtttgtgtaaagcgaatccaaagtcaaagtagacatatcaacagactcttgaatagatgtgacttttatctcccaaatagacatatcaagaccattcaaaaagtggcgaanatcctcagattgtgtatagttaatatcctaagca

SEQ ID NO: 27710 - DNA, 402 bp, Oryza sativa
  unsure (1)..(402): unsure at all n locations
agctnggatttggatgagatattactatcttctgtcaacaaaagacatagttttcagcatgttgtttttgttgtaaccaaaatttctatactgcgaagattggatgtacaacagaaaatttctcttatgccgcaaagctgcatgccatactcttatttgccacatgatttgttggctttgtaaaaatgccacaaagttcagctgtatactcgtttatctgccacactttaccattttaacccaccaaatgtgcaattttcccttcttctgcaccctctttctctcttctatgagtttgagaatggagcttggccgcacgggctggtgcccactgtgtttggcccaacagaaaattatatcttaaaaatgtatgtctctctatgggcttttacacccaggcct

SEQ ID NO: 27711 - DNA, 407 bp, Oryza sativa
tgtgctaaaatttctagaggttagtctggtcaagacctcttcttggtaatatttggggatttttctcaagagcagtttattttttgaaaattcaaacaagttcactgtttttattttaatttgaatcaaattttggatgctttcatctttttaattgagatgcaaaacttgtgagatttgtgaaaggttatttcaagtctctaccacttattttaattagttttttttgttatgtttattgcatgcaaatgcgttatgaggtgcatggaaaatccaagaacaccaaaattaacttcaaatgacaaggacaagatcaaaatcaaatttttgctaagttttcttcattttctttttttttagcttcaaagaattcttggtatgttacaattccgattatttctcgcatt

SEQ ID NO: 27712 - DNA, 462 bp, Oryza sativa
  unsure (1)..(462): unsure at all n locations
atcctctgagtcacctgcggcatcaagctancttggagttgaagcctctttttgggagagccacgctttccctgctatccctattggactagtcttttaacctattgaactagtcttttaggaagattgggcatttctccgagtgggtgtgcctatgaactgttggggtccggacaatcttaaattattgggcctcggccaaccccacctgggccggattgttatcatttggtatcaaaactgggcccttgttaagggggtgctaatgatgatgacatcttccactattacccgctggcaaagacaccaaagtcaggcggtgaccgtgtgagcctctgaataatcaacccttgctaaggtggtgggaatgatgaatgacattctccactattacccgctggcaaagacactgaataatcagcccttgtttacggggtgggaatgatggacatcctccactat

SEQ ID NO: 27713 - DNA, 422 bp, Oryza sativa
taaggtcggtctacttggccggccccgccctaatggtattctttagtacaaacaaatattcagaacaacccttttaaatggcttttgtaagttattttcctgtgtaaaatacatcaaaggtggcatggtattgtttatatattagcccattctattttacgagaaaattccctatgtacctatgagtttccgttgaatctcttctatctctaaattttgcctcatcctctaaatgcccttaggctcttgagttatttttatcccctctatatccacgaagttagttcaatgtgagttgaccgttatatttttttttctaaaaatgactatattgtcatttgtactttatactagctacattaaaaaaatataaatctcattatgaaaaaaccttgctctataataaaataaaaaaaggatat

SEQ ID NO: 27714 - DNA, 433 bp, Oryza sativa
  unsure (1)..(433): unsure at all n locations
agcttctgaagtccatccattctgacccctatactcaggagtgttgtgctcatgcaataactcaacaagaatcttctctagggctgtgttccaagaggctcttcttttttctacgcaagataagaattgatgtataatctacatttaataatttcaaacatgaatttcacatgttctataattgcatacctatcggagaacctccatgcttttttgtaagatgacctttcggagagttcttcttttgtgcagctttcgctaaaagcatggtcaaccttggagaacctcttagaagcatattaactgagaaaggatgcataacacaatattcataacaaaagcattgtagcaaatgtatgtcacatgcaaccaccatagttcatttataacataatatntgtaatatgtcgtagttattacagctcacaaaaca

SEQ ID NO: 27715 - DNA, 430 bp, Oryza sativa
taaagagataacgaaattggactaaaaaacagcacatgatttacaaaaaagcacctctaaagttactgctgcacatcaatctcctactgtatgtttctttatcatatagattgattttcttgccttatttttttcttattgtgaaaatatatcatatttcttgtagaccttcacactattatgttgcccaggaacaagaagatgggaacatatcggcacaaactcaattaccagcagagaattcttgtagacaagaagatgggaacatattagcacaaactcaattagctgcagagaattgttgtagaagaaatgagaacgatttttaaggatatgagttcatcagtagctacactgaactactgatggtagacttctttgtacaattccaattatcttgtattttaagaaattttagaaacgatttgtt

SEQ ID NO: 27716 - DNA, 411 bp, Oryza sativa
agcttcagctatggagagaggattgttgttttattacaccaactcaccccacgcgggcgtgctactcctactccttcacagactctctcttcctctcttggagttgtagccgctgcccgacaggaccctatgccctcgcgttggggatgagtttcggaatttattcccgaggagacgaggactcactcaatatctggattggccccgatgggcgttgtgctccaccgtttcaaacaaggttatgaattctgggggaagatctggaccgtcggatcggtggagcgggtggaggggatcgctgctttggctgctggtgggatccgaccgtctgatggtggcacccattttgaaatgggccgggcttgcgtggctgcgtctgcgtgccacagggactttttaccgctttttgct

SEQ ID NO: 27717 - DNA, 431 bp, Oryza sativa
taccaccaatcagcatcagccagcagcggcctcttttctttctttagcgcaaactgtggggactataaccagaacttgcttgcctcttctagatagctcttcttttcatgaaaactacgtaatgcaagtttgcaactagccagctactcgtactgatcaacaagcagtaccagcgaaactgccaccataaggttcagaaatagttttcaaacacaaaatctgccaatagaacagacaacaaaacctgatcaacaattcagaattgcagaatttggcatctgaattctgccaatatggctttcatatcaggatttcagaattgcatacaactcctttaacatatcagatttgacatcagaaactcatggggaagtaacatccgaagttctttacaacaaagattatacagccatacatgatacagctgatat

SEQ ID NO: 27718 - DNA, 435 bp, Oryza sativa
  unsure (1)..(435): unsure at all n locations
agcttctagtctgtggaaggttcnttagattttatgaagcacaagacacgggcgatgtatacaggttctggccgctgagaagcgtaataccctactcctgtgttctggaggatctgtgtatgaagaagctacaaagagctggagagtcagagagcttttactctagaaaccctctcctttggttctcaatccagcctccatcgttctggatcccttctctaagtgggcaaggtcctccttttatacctcaaggggataccacatgcaccatctctctcttttggtggggacttatcctatcttccccccaacttgacttgccttctcttcataaatggacggagatttgtatggttgccgtcccaatgaccttttgatgggacggcccatacctacctccacttccgccggaagcaggcgcgacgtgggaacatg

SEQ ID NO: 27719 - DNA, 418 bp, Oryza sativa
tctctactaaaccatatgctttgatcataatatttcatactctagtgcttagcatcttcctttttatgcagcacataaaagccttctctgcaaggagtatatgccctctctccccaaatgcatcaatatttgcagaaaagcactcagagtttaactgataattgaacttctcaaaccaacaccacgcttgctcaagcatcccagcatcgacatacatcctcgtcacagctgattgtgtgtattcatcaatcaccatgttcctctcatacatttctttaagaagagcttgtgcttcaatgaccatgcccttgatagagtatccatacaagagagtgcggcagctcacaacatctggaagcaaattttcagctttcatctttctgaaatagtactccgcaacatcaatatcattgatatc

SEQ ID NO: 27720 - DNA, 358 bp, Oryza sativa
  unsure (1)..(358): unsure at all n locations
agcttgcaagataagttgaaacagtnggatacaattatttatattttgcacttttgaacaacaggtttctaagaaataaaataaaacaaagttataaaatcaacatgctaaatttatttcattgcagcaagattaaataaaccaatgttgtaaaacttttgctggtaaatgagccattaatatagtaatagatgtacggtactaataacacaggaataataaataaatttttaaatgagaacaattaaaggaattataaactgcatgtgccattaagttggtttaattataaaagaaagagaggagaacagttctacttttccaatatttttagagggcttctatgggtaaccatttg

SEQ ID NO: 27721 - DNA, 426 bp, Oryza sativa
actcagcttaggtgactccgatcatattcgggcatggcatgtttattagcgtcatcaatatcaggaagcaagagatagagagcttatatgttttcttgtgcaagtcaccaaacaagtgaacagccatcttcgatcgtcgtggggcatgccgccatgtgagatacttagccagctatgacgacggcgcggatgaatgacacaaaatagtttaaagtagtattccagtaacgtttggtaaaggtgcctcactatggtgctctctattggtattagaaatcaatctgaactgttgatttcatttgatcgaatagttcagatctatttatattaccaccctagatagcggtagtaaaaacgtggaggggcattattgtcagaaaaaatggtgcgaagggtatatcgtatttagtattgacaaactttttt

SEQ ID NO: 27722 - DNA, 451 bp, Oryza sativa
  unsure (1)..(451): unsure at all n locations
agcttaacttttctataaaaaaagaattntgtttttatttatgaaatatagcaattcattttttaaagaaaaagagagtgttttaatggttcttagatagacaaggaaacatacacttaatttatggtgtgccgccaattataccttaagctcgggaaacaataagtagtcaaaaaatcataccgtaaatttagttcatgaaaacccataaaaactctctgaaaaatattgctccctcggtttcttttttatggcgtttattcaacatcgtacattntatgatgaagggagtatatttaattccataacctctactagcaaatgtatttttccaaacacctaggttttatttttttcgtggtgaacaaaaaatcatgcttttactgcttgtaaaaatagcgagacaccttataagtcttaagtctagtatatcatgtgaaaatcgattttt

SEQ ID NO: 27723 - DNA, 428 bp, Oryza sativa
tgcccatcttctggaatgccttccgcttgagcctatcctttgttttatccggaaatgtgaaccatttttccattgccgtccaagctcgctctttctcggcttctgtgaccttgctgatatctttatggaggatcccgaagttctcacgtgccgtcagcctgcagcagttagactatcttccaatgacagtcttgggcgccgtgggcctaccactagcgtcaacctctcttataacttgcactgtggtcagccatatattttgtgaccggtgatttctactcgacctacttgcacttgtcccgcccgacatcgatgtatgttgttcctgcggcaattttgcagcacaaacagaaggcaacatatgctaaggggtgctagctaaaatttatgtggtcatgtggtgaaaatttatcctataaattaccatg

SEQ ID NO: 27724 - DNA, 407 bp, Oryza sativa
agcttcaccggtggatcagcgctcatcatccatatttggatcttgagtccgctggagacttgctatatctaggtggttgcttgaaacctaaatttccttggggttgctagcctggtaagggaagtggttgaaagagacaaattctttcagagtttcctcaacgaagggcggaagcagaagcaactaccccctccctacaatgccgtcaatcctggtcctcgttgcaaacccgcatgcgcaaccgccgctgtgatccgtcacctagcccctaccacagccataaggatcggtcccctaacccctaccaccactgtcaccgttgcgagcggagagtggaccggacattcgactgtgagggcggtggagctcctatgttgccccttctaccgccactatgaaaaggtgga

SEQ ID NO: 27725 - DNA, 392 bp, Oryza sativa
tattcaagggctatccaacccatgaacaatctatccaagatactcaatctttctctgggagaaagggctcacactccaaagaatactccaccggacataaccacatgaggctacccaaacctataagaattgcccacatctctctttgtttaggacttgagaaaactcaccacacttggctagacaagcccacaaaatacacctacatgcatatgaactaatatggcgcaagatcatccacaagctcgcttcatagacccctcttgatagtacgacgcctatctaactaatccggtctacaccaaacatcaagaccgggaaaagactaatataacattcttagctccattatacctttgccttgcgcatacaaacttgggtcaagcttgagt

SEQ ID NO: 27726 - DNA, 262 bp, Oryza sativa
agcttggaagaaatggaagtcgaagctcttcaccgtgtatgtcaacccgcccggcaatcatacgccgttcgatgaataccctcaaataaccgaagcggtgtgggaggaattctgctctctcaagaccacccaagagtttagggaatccagcgaggcacatcgcgtactgcaacagcggaatgaacacccgcttcggctgcgcaccgcagggtacattggccaggtggcaatatgggccccataagatgcatccgttgttcat

SEQ ID NO: 27727 - DNA, 400 bp, Oryza sativa
  unsure (1)..(400): unsure at all n locations
tcctgggatagtgatcaggaagaagcggntacatgttcaaaaccttcttagaagtgggatgacttgatttcacgtgttgtgagttcaagatcaagtttgcttctgaccacatatgagcagttaaagatcctaagggagaagttgcttgatatagaatggggatatgctgtattggatgagggtcaccgcattaagaatcctaatgctgagattactcttgtgtgccagcaattgcagaccgtgcacaagataattatgacaggtgcacctattcaaaacaaactttcggagctttggtctctctttgattntgtgttccctggaaaactaggtgtcctgcctgtgtttgaggctgagttttctgttccaattactggtgggtggtacgctaatgccacac

SEQ ID NO: 27728 - DNA, 438 bp, Oryza sativa
  unsure (1)..(438): unsure at all n locations
agcttcgntgttagatgtgattntactctgttctctgtttactatcttcgaacatatcacttggttcataactgggaatagctcccacgaacaagcaactcagattcactttctttatgttcagtttactttccgctattctcttcatgttgtcatcagttagcactcaacgtattcctttacacctttagccttgatgagttctttcccgttggatcatctcccaggacgtggcgttgcctggtaaccggtgcttgcatttttcactccgtgtagcatccgataccgagtggaagatttcactctgtgccttcatagaaacacttttacctaggtcatcttgcttacttaatgacaaggtgactgttgcggggcaattacaatcaggggtcttccgtgagcgatgcagagcatgtttctggttatcaatcacctgtc

SEQ ID NO: 27729 - DNA, 436 bp, Oryza sativa
ttgagaagagcaacagaacccggaggctgccgctgctgctgtgtattaatagttagcaggtcccacccaaaggcgcagcagttgcgcatcaactgaggtggcagaaaattcatcatcggtccctaccgccatcgaccacataacggtaaaagtcttgtccacaatgcatgaaaggcttaacgaatccatatgttatataatattctaaaaaaatttgatgaatctatcgcaggaacaaacgagctgcaccctcacagttagggtgatgccgaccttcaaggttccggcagccgagggacttgcgtacaagctgaccccaaagacaacagtgcatggggcgcaacttatggccaactgtgcaaaagttcaagtagactcggtgaagcccgaattcgagcttttcctactcaagtatccagcgaacgacaaggtccta

SEQ ID NO: 27730 - DNA, 380 bp, Oryza sativa
  unsure (1)..(380): unsure at all n locations
agcttgaacgacgagtgcgatggcattgcttttttgcacncattnggcagctagattgggtaggcaaagcgaatcatagaaagaagcacaggtttggaagcactgccagccaatgcagtggagagtgtagaggatggtaaattggctgaaacctgaatgaatggagaagtacttgagatgttggctacagaatcccaatcatttatctccatgagaaaaaaagcccagctatgcattttttcccatcgcagtaaagattgccgttgcacaggagggctccagtgtgaattgattttcatgccgggacagataggacatgtcatgttctaccattacttcttgctccaagcaccaacagctatttggtagtacaccactca

SEQ ID NO: 27731 - DNA, 202 bp, Oryza sativa
tttacatcttttctgactgctacgagtataatactgcaaacttgtcttgcatccctctcaaagctgcttttatgcaatggattacgttcatgcctgtctggaagataacttacataaatatagtgtgacttgacgcctactcttaatctagagctaaaactctttcagttttgatgatttgctccattactgatttaaatat

SEQ ID NO: 27732 - DNA, 369 bp, Oryza sativa
agcttataaaaaggttatgtccatccacattaaacttccacaagggggaatccttgtctttgttactggacaacgagaagtcgattacttatgtaagaaactgcaaagagcatcaaagcagcaaactgacaagaagactgaaaaagttgagggtgatgagaatggctcgagccaagaagtggtcgagagggaaatcagtgaagcatatgatattgatagagatgagtctgagcaccaagatgacatgttttcccaatatgatgaggatgagagtaatgctggcccaggtgtagattcttcagacattgaaatggaacctgagatggataccgacagtgaggatgatgattctgtttatgaaaccacaga

SEQ ID NO: 27733 - DNA, 430 bp, Oryza sativa
tagtacctggacggactgagcttgatccgtatgaacatatcttcatccaaccgtatctttgtggtacgattagtacaataattttcgccaaaattcgtttcttgggctcacggagcataaattccattaaatcgcatcagtgtaaacgaaacctattcgaattctctctgcttgtcccactcgaatatatttcatctcctcttcctaacctctctttctcgatcgtgatcaagaactaataaaagaaaagcagagtgtgttgggtaatgctaatgttaagccaggatcttgttctggttagcgtcgcagtcgtcgtcgtcgcagttgttctcgcgttgtactgctactgctactatctctcgatctgctccgtattggcgtaggtctgaagataattgtgtggtgagttgctgctatcccaccaaccatc

SEQ ID NO: 27734 - DNA, 408 bp, Oryza sativa
tatttatttctcttcatttctatcacaataagattgtctttatccatgatgagaatggatcagttattaaatcttggatggaaatttcttttacctatttccctgggcaatctcttattaacaacttcttcccaacttgtttcactataaaataagataatacaataacagtaagaatattttcaacacaaaagtcctctcaaacaagagaaagaaacatacctttttcatagatatttcgaatatgttccctatggtaactgggttcatgagttatggtcaacaaacaatacgcgcagcaaggtacattggtcaaagtttcataattaccttatcccacacaaatcggttacctataacgattcactacccctatgaaaaatcaattacatcggagcgtttccgggg

SEQ ID NO: 27735 - DNA, 441 bp, Oryza sativa
agcttaaggaaccaatatgaagaaactatttatctacatatccgtcttggggtcttgccgatatagcatgaactcttcaatcggtcccatcttttaacaactctccttattcgctaacaatagtgttttctgtagaatattttttcaaagagagttgcatcatacccttttcattgatctctaattaatgactacatatgttgacagtaaaaatattgcagctataactggtgtgaattaaactcacaaaattcagagtatagtgtcaccgagttcccttattccatgacttatcatatttcttccatgtcctactacatatggtgcgatgccaacgaaatctaagaacaaacacatggagttaatgtgaagcaagtgaagtcattaattttcttgccaggaaatagtatagcaaaccaacatcttacctgataagtatgt

SEQ ID NO: 27736 - DNA, 418 bp, Oryza sativa
  unsure (1)..(418): unsure at all n locations
ntaggtgctgtgatcgtgcttggcaacttgctacataatgttttcaacagaaagtagatgcgtgcgtgcatcataatgcacaggcatactagtagtacccggctagtagtactactacagagacatactccgcccgtcccataatatattgaggtttagagttggatacggttattaagaaattaggtagaattaaataagaaggggttgtgattggttgataactggaggtaggtgggaaaaataaatggtggaggtttgggattggttgggaagtgaatgttgggggataagttgttatattttgggacaaatcctaagagctaaaaattgctatatattgggacggatggagtcaacagtgacaatctgttcgttggctccgtttgagctggaattgcaagttggtcttggtcgt

SEQ ID NO: 27737 - DNA, 441 bp, Oryza sativa
  unsure (1)..(441): unsure at all n locations
agcttggagttggaagcttggaatctttgtttgttccaggagaaagaagaacaaggaggaggtgagatcgatcgagcangagagggagactgaccgtaaccgaggaggatggcgttgagcgacacgaagagcgcgcatgtgaagacgtatttcccgccgctccgacgcctgcggcgctgcgcctccgccctgcgcgcccactcctccttgtccagctcctcctcctcctccgcctccatcctccggtactcgctcttcgtcgccattgccgccgccgccggcctcatcttgacaggggaaaggggcgttgatgttgtggcaagcagctgcagcattgcttcgctgcgcgctctgcacccgttcagatgtaatgaaggagagcccgaatgcatatgcctggactttcacgtttattttagagtcttctccacgttcgcggcg

SEQ ID NO: 27738 - DNA, 428 bp, Oryza sativa
  unsure (1)..(428): unsure at all n locations
taaataagggtaacgccttctctcccagcctcgatatgaatctacttanggcggccatgcaaccagtgacgcattgcacatccctaagtttgctgggggggcgcatccgctctatagcccgtatcttctcggggttggcctcaattcctcgggcagagaccaagaaccctagaagcttgcccgcaggtacaccgaacacacacttatcggggtttagttttatgcgggcggagcggagactctcaaaagtttccgctagatctgagagtaacatttcctggttgcgcgtctttacaaccaagtcatcgacataagcctcaacattacgtcctaattggctacccagagaaattcgagtagtacgttgaaaagtaggacctgcattctttaacccgaagggcattgtcgtataacaataggttcctatg

SEQ ID NO: 27739 - DNA, 436 bp, Oryza sativa
  unsure (1)..(436): unsure at all n locations
cagcttatccagaagagaccatgttttatgtttatgcggaatggcaagttatctattaattaggaatagtttattagtctccttttatctttaagaaagtgtgtttagtgtcctataaggactttatcctttccttttatctttaggaaagattctttcttgtccggcaaggacttgtatcaacccatgggtataaatatgtacacccagagtctatgtaatctatcgctacgatcaatacaattcggcgcatcgctaccctttttatttctacttttgtttttacgttccggcgaagggataagttcaatgtagcgccggtctacgcaattgtatcgtctacgtctgcgtcgtttaacgctgcatcagtacattcgacctcttggattgctctgggttggatgatatatntgcctacctatttatcatatgtctc

SEQ ID NO: 27740 - DNA, 406 bp, Oryza sativa
actcagcttggaaatgggacccttgacgtcacgacataatttgggtgcattgcattttttttcaaggttccacattattgcaatgctgaatagaattctataatagaggcatctgcctaacagtagatgtgagtacactgatctaagcatgatgcatagaggatggaagccaacagacaaatatgaagcttcagggaagtgatgcaaagcacaaaaattgtggggttcaatggggagaagaagatgctaaagggtgatgtaagccggagaggaagcatatggcagcaagcaatgatgtatgtgtcctcttgatgaaaaaaggttggatgtgtacatgcatgtacttgttccaattgattaagtaacaaagcttggaaacatggagaggctttcaacattgtcatgc

SEQ ID NO: 27741 - DNA, 398 bp, Oryza sativa
  unsure (1)..(398): unsure at all n locations
agcttggaagatgggcaaggttgttttgcttatcctttgtttgaaaacactaagtgatttacttcttgttaagtatgggccgaaaagagacttgcgtctcaaatcgacttaagagatatttttcaacaactcaattggtaatgtatcgacctcccgggtcagatcattacctctcggctcccagagctattncacttgattaatcggctcccagagcctttctcattttctcggactcccagagtccagctgcccagcagcacaacattccgctttcactcgggaagcctagtctatgatgcccgtagacatcccgaatcacacagattcgtttctgaccactcaggtcatccatctgccacataggctgattctggttacgatttccatcccacaac

SEQ ID NO: 27742 - DNA, 304 bp, Oryza sativa
caatccaatgccgacaccatgggtgcatggtcgccattccaattggtgacattctctctctacttggtactgaatactatttaaaattccgaagaactgccgagctttctggattcctgaagaaaaccatgttgactttatagaataagataccacgacctacttgcgcagactctaattctgggaattcatacttctctaacttctgatagtctgactggtgtactcgggaatttgctcctacaaaatgcaagtccgagtagaagctgagacccttcacaacttatttttcaatataatgaag

SEQ ID NO: 27743 - DNA, 387 bp, Oryza sativa
aacttagaaaatctatgagtcaaggttttccaccggcacatcttcaccaaattggaaatttatttgggaatgcctagctccgctaaaaatcaacatcttcccctggcttctcgtcaagaatcgattgtccacaaagaaaaatcttatgaagaagaaaatcgtccaaacagcaatctgtgaaatctgtaaccttgctgatgaaacagcggatcatctaagcttcacctgcccttttgcatcagcttctggaaactattcgtgttcagccgatcatcactgaaactaaattcctgttccaactagaagcgccagcgatcatcccgacaagacacttataaagtgttttcctgctatgcctttggactcctatggaccacaggcatgatg

SEQ ID NO: 27744 - DNA, 440 bp, Oryza sativa
agcttggtgacaatccacttgctatcgcctctgtgtatctcctcgagcatggcattgcatccctcccggatggaagcaggccgctttctcgtcttcttccccgcgacgacatgcttctccttgctgaacccttccttggagcagacaaacctcagcatgatgatggactcgttacacttggaccgccgcgaccgagcaatgcggacggagaaccccacgcgccccgcgtaggcaatgtagaaggtcttggcggcctcgccggactcgaactccatcccaacccggggctcaaggcaggggtcggagtcgaccgggaacaggtccttgcggaccgactgcgactgcgattgcgcctgctcctgcggcggcggcgacggctggtcgacgatctggacgccgccgtgcagcggcatctggtcgacggcatggacgcccagcga

SEQ ID NO: 27745 - DNA, 420 bp, Oryza sativa
  unsure (1)..(420): unsure at all n locations
tcgcgatcttctctttaggagcctcaccgacctccctctggtcttaatcgtagtccagatttctccctcgccgatgttgtcgaggtcgtcttcgcccacgaactcgatcactcgcagcagcggtgggaagcacgccgcgacgaagccggactgcacaaaatcaacaatggcagcagaaggaattcgatcaattcacagattgtaccacacggttagttcttgcaacaagccaacaaccaaatcaactcccacccaaatcaactccaagagacgcaacaaacacacaagaagagaaagaagaggaggagctcacctgagcggcgatcgggagctccggcctggcttcactcagggggacacgcaccacctnccaccgaaacatatgctcgttcacgacgtanggctngacagggacgctgc

SEQ ID NO: 27746 - DNA, 437 bp, Oryza sativa
  unsure (1)..(437): unsure at all n locations
agctttngnttagggtatgttagagtgtattatttataacttaagacagaatctaatcatcctaccatgacaattggatcaatgtaaactaattatgtcctatcctagctaatcctaagcataaactacatatcattgagtttggcaaacgtattacttgtttcatatatgatcagcttggaacacaatttgtggcatccatatatgatcatatggatgctacaaactgattatgtcctatcttatccaatcctaactacggagtacatatcatgttagtaggagtatttactaacattgtgctgcaagtcttgcacggtatgacaagggaagggatagttgcagaaccttccctgtgtgctntgtcttgtatctgccacaagattccaaacaaaggcggccaaatttccccgtcagatgaaatgccagatggatca

SEQ ID NO: 27747 - DNA, 428 bp, Oryza sativa
tgatatgtgaagtaaaataatctaaaaaaatattttattaatattgttaacgcatattggatggatattactatcatttttttttctcaaagacaacaccttaaagtatacgttatgttactttatcagtataaatgagcacaactacatactagtactaagtaaaactaaatactccaatttcttaattaaaatcatggttttacggcagctttaacttaaaaagtcgggcgatacgtgaatactccctccattcataaaagttagacatatttcacatttgagtttttctaaataagttgtttctagttatagtctttatacatttaaaacttaaatgaatagataaattaaatatttgatgaggatcaaggagtcatctaaatacttatatacttatggttgaatgcttgcattcacttattgat

SEQ ID NO: 27748 - DNA, 457 bp, Oryza sativa
  unsure (1)..(457): unsure at all n locations
gatcttaagcaccgcggctgcagctatactattaaatataaataacttttttttccatgtcaaaagtagagatttattgaagagtcattcaatctataagctgtgggtcaagtataaacatgtcctataatatcgacatatttagaatacggtaattaccatattataagaaacggtaatttccgcaagaatacggtaaatacggaaacgatcggtataacagcaaaatcatttccattttcatttccatattttttaccattttcatttttgtttcggtcgattaccatttccatatggctcggccggtagaaagtcgaaaacgaacgccggtcggccggtaattaccgttaccgttttcacccctagttgaaatgctgcaaggattagcgacattatctnttcgcttatacttatgcttattagctaannattaaattnttcaactantaaattg

SEQ ID NO: 27749 - DNA, 406 bp, Oryza sativa
  unsure (1)..(406): unsure at all n locations
ggcatgtnttccctacttaatcctgatttgagaattatctctttttttgctcactagtatctggtagtagatagcccagaatgagcacacaccttgcaagatattttgctttctctgcctcctcccaatctgcagcacgagcctctctgtcgatttctacagccttgtcggttatgacatttgcgaaacttggtggagatttctcttccttgctagcccatgcagctatagttgtctttcccagccgttggccaagatccatgatttcctttcttgtattcatttgtagttcctcctcagacatttccatcttatttggaccaaattcaccaatactgatttctgcattacgttgtggtgttggtgtccgagaggaggttggactagatgctataataggagtccc

SEQ ID NO: 27750 - DNA, 441 bp, Oryza sativa
  unsure (1)..(441): unsure at all n locations
caagcttgtcttgcaaacagcttactgttttttacttcaatcagatgagngaatcgctcatcgctgtggacattcggcaaatattttaaacgatgctggttgtgttgtgcaaacaaatgaggttgcaagccaaagccacctattccagagatgcgcatttcgcagcaagttgtgaatgaagtggcagccctgctgcattctggcatgaacacggtcttctctgtcttccatgacatcgcactcgggaaagactcggtgctattttatcaagtcttccttagcctgtggatcatttctatcattggcagcctgactgatttcaccactttatgttacacaagtaagcagctcccatcattttattaccggtataattttccaacatttagttccacttgtacaatgtgttggcattggaatgattgatcgtaacacgccctg

SEQ ID NO: 27751 - DNA, 63 bp, Oryza sativa
aaactaagcttttccatgactactccctccattttctaatagaaacgccgttgactttttctc

SEQ ID NO: 27752 - DNA, 423 bp, Oryza sativa
  unsure (1)..(423): unsure at all n locations
agcttgantgagatatttggcntttttcggtcttattaaaagagcactgccacattccatctatctgtccagaataaatcatcattccatctatctgtccagaaaaagatagatgctccattattcagttgcactctttgcaattgctttaaagagatcaatcagtttgaggttctctctccactaaaatgaatcatttaccagtaaatgccagtgaggaagttggtttgtataatacagttacaatatcatgttattccaaagaatatcatgatgcttgtaaaacttgtgtagattcttgagcaagagagtattgttttatgcatataaattgatctctcgaatacctctatttgactgtggcatacagactttatctcagacaataagagggtggtgttttgcttccatatcggatcccac

SEQ ID NO: 27753 - DNA, 396 bp, Oryza sativa
cacaagaaactcagctgagctgcatccacagaaacacctcatgaggtttttttattttcagctggaatactaaattaagcctccaaagccgcgtcaaacagacgaggaaacaccgtttcttcagttaagttcaggcccctactgaaacaccgagagaaacacgcggcccaaactgtcggcatccccctcaaccgatcgtccgcgcccattaaccgccaaagactttccgcgcgcgtctacatatttcttcctctccctccgtctcctcctactctcaaaggcctcgttcgtttaatccctctcacggagagaattgaaggggatttggaggggattttctccacctctctcttttttattatagattctcttctcttattttaaatatgtttttta

SEQ ID NO: 27754 - DNA, 442 bp, Oryza sativa
  unsure (1)..(442): unsure at all n locations
agctnttaaattataaaaactataattatatatcatgtttgcatgatgtttaaatgtgatgattgttagtgggtgatgatgtggcatcttgttaattagtggatgatgatgtggcatctttgtatgttaagcataaagagttagtgggggataactttacagtaagataggacatgtagttctgatgcaaactcaatatgcttatatacaacaaatttcacaatatttactccaatatgcgactgcagctgtgtgaaaaaatggttgcgacaaaccttgataaaatgaacaagtatattcactaaataatctggtggtatttcatttatcgtcccttanacagtttgtataaactatactgtaaagttnttaaaaatggtttggatcattatagtactcccatangtcgtatattggtaatttcaccattctttaaaaatag

SEQ ID NO: 27755 - DNA, 430 bp, Oryza sativa
tctaattaaatacccaagttttagaattggaagctacattaactttcatgatttaaaaaagtctttttttagataaaggattatcaaacccggcctctacacctttatggggtgtacacagccaaaaatccgaacacgagtacataacactctccctaataaaagggtacaaaatgcatcaactgacctctcccattacataagagatgacagcacaaaggttttaagaacaacaaacgaagaaaagactaggcttccaatcttcttctaaggttccagccatacacggagaagaattccaccacacgcttctccggcagtttgcaatagttcttaactttttcttcattggttcccttaagaagcaaagatcaagtccttgcccaatgtgttcccatgaaaataacctgcaagaaagatgtaggattgg

SEQ ID NO: 27756 - DNA, 423 bp, Oryza sativa
  unsure (1)..(423): unsure at all n locations
agcttcanattcatattccattcatttctctttctcatttntcttccctacaaagcagcacagtacagttaaaatttttgacatatcctattgagctgatgtcgaagactttgcttaaactccctttacgtctagctattgtcatccaatntttgtatgtaaaaatatagaataccgtctgccttctctctccccaaaaacaagatgtattatctatccacccatttaaaccggtacatgtaatttttacctaataaacaaaattcaagcatccaatatttggctatagattggcatgaatatataaatgattatatttctatatccattcaatcatcgcctccacacattaaagaaagcccggtgcaagaaattcaagaaacttgtatactgaaacgaatggaataacagtacgcatgcatg

SEQ ID NO: 27757 - DNA, 397 bp, Oryza sativa
tctcgggttcttggtctctgcccgaggcattgatgttcttttttagaagattcgagctatcgagcggatgcgcccccctagcaaacttaaggatgtgcaatgcgtcaccggttgcatggccgccctaagtcgcttcatatcaacgctgggagagaaagcgctacccttgtttaagctcctcaagcgctcggggccgttcacttggacggaggaagctgaaaatgccctcagcccagtgaaggcgtatctcagctctcctccgggtctagtcgccccggagccaaatgagtccctgctactttacttagcagcgaccccccaagtagttattgcaacgttggttgtggagcgcgatgaggacaatcctcattctgcgcacccccactctgtgccgact

SEQ ID NO: 27758 - DNA, 394 bp, Oryza sativa
  unsure (1)..(394): unsure at all n locations
agctntacacatacaaactctgtacttattatctttatacagagaaacattctgcatatgaaatttcaaacaaattcaaacataaactccaaaactcaaaatcaccaactatcaattaaatatgtaaatatttctaccaaaaatcaataactcttagctaaaaaatgcaagaaactggtcttacaagaaattagatatgagggaaaaaaaggtgaggtatatccataaaggatcttgtcgatgttgtgtaagatgaagcataagcttggttggcgaggaggaggaaggggatgtcaaccttgccggaaaggaattaaaaccttctttttgcattgctggttggtgaggaggaagatagatacacccccaacaagtgctgtgaaagaggacctta

SEQ ID NO: 27759 - DNA, 425 bp, Oryza sativa
tgtctgatagagattgcgaccaattccaaaattaattatgtcattgtcatgtactacattcttttctgtttctcttcgagataccgcgctaacctatagttataaagttgaatgatagtaatatgaaaccctaatttattccttcttaagaaaaggaagaatagagagtaacgtctggttaatcttgctgtattattccgggaaaggcggccacatctcattttacttgcacacttttgtttgctgaagggttggcgcagcatgatcttcgtctgactaatctgttaacaaaaacagcttattggtaaagattttaaacatgtttttggacttaaagttgccgatgatcttcgatacacttacaaaggatcatggagcattgcaaatcaatatataagtacgacaagtgtaattaccatcagatt

SEQ ID NO: 27760 - DNA, 436 bp, Oryza sativa
  unsure (1)..(436): unsure at all n locations
agcttcagcaatgagatgagtgcatttgttgtcatctttgtatctgcaatacgaaggaaataaaccccacatgatccctacctaaatgactaagccttacatactaatgaatacaaaattgtcctttttggggagggggtgttggtgcttcctcacacagattatgtggctacactagagactaagttttgttcaattgtatgatactatcatnttttttgcttgatacaaattgaatacttacttttcataaagatctctcataagcttctcttgctcttcactaaaaatggaacgacctcgccttttgggggcttcagaattctgagaacctcttgatacagtgttcctatttttttcaatttgaattgaactgaggattaaagaagcaatcacaaattcaaatgtagaaccatgtataaagcacacctattat

SEQ ID NO: 27761 - DNA, 429 bp, Oryza sativa
  unsure (1)..(429): unsure at all n locations
taaactgctgagttgtgatccaaatatatttacacttaattaatgctagattctgccgtagtgaagcggaggcccgtcgccggtaggcttggttcatagccttttatggttccaccttttacgggacggatcgtaataccttttagggntctacctcatatatatatatatatatctcttgtaagccgccgtgcggcattgtaacctcacccaatatagtgaagatattttactggctagcgccccgggctttntctctcctgctttgggaaggttttccacgttaaatctcatgtcttctgtgattgatctgtattggtctttatcggttatttgcctatcgcttcctaacataaatgacaattttgaataactaatgtaacatatttacgtatcatcagttataaatcatcaatttatcattatata

SEQ ID NO: 27762 - DNA, 435 bp, Oryza sativa
agcttttctcattggagaggttccttgttgttgtgaacacttctcttgcaggtatcttgaatacgttggagagaatgggccaagatggtcatgatggatcggctatgcacaaccacaatggccatgatactaatagcagcatcgcagcaagggaagaactggagtacgctgctgacaccgagcatgatgaggagttacttggtcgtccacaaagacaacagcgccggcagcgccatggcatgggcgctccaccacggcgggaggtacgtgataatgatgattctttatgcaagatcaagtttaccattccttgctttgatggaaaatatgaccctgatgcatatcttacttgggagttagccattgatcagaagattgcttgccatgattttcctgagaataaacgtgttagggctgctactagtgagtttactg

SEQ ID NO: 27763 - DNA, 397 bp, Oryza sativa
  unsure (1)..(397): unsure at all n locations
tgcctgccagtccttctttgctggttactagtgtcatattctttgagccatctttgntatcactactgtctaggacacgagtagtccagtaactaatggcaagtgacttgggatttttattcagcattactatctgtcattggattgtgtaccactcatattcgtatatttggccttcctagctccacttattacttctggacagcacaggttcttgatccctgcaatcactgactacgccttccaggtatcctttgctttgctggtaagaaccttataagagcttggttaggaactccatattgctgagaatcgttgaatggcaccactacacctgcgtagtggattattatggataaccttcaccgttctgtttctgttttggtgcttcaatgtc

SEQ ID NO: 27764 - DNA, 382 bp, Oryza sativa
  unsure (1)..(382): unsure at all n locations
agctcgtttatacacccatcattttgaacattattcaagttgtacagtatatatcagaaacagttatacagcatgtcactccactacctttgcatgattacatcactacccatcaaatcagtggggggcttttttaaaatctacttaaaaagttgttcacatgctaaatattaggcttgatttataagcttctaattacggaaaccatgcaagaacagataaaactttgaccgggcaaccatacggagtcagtcccctccagcctaccgccggccgccgccgccgcccatcatcttcttgaactcgtcgaagttgacgcagccatcgccgtcggcgtcgacggaccggatcatccgggagcagtcngcgactgagcacttgt

SEQ ID NO: 27765 - DNA, 431 bp, Oryza sativa
agcttcctccggcgaatccgagaccgtggctttttcccttctcgtctcgtgcaaccacccggtgtgctcgttttcgccggtatcgacgtggtccgctccgccgctcgccgctgttgtccgacgtccgttccgggcggcgtcgtcgtctacctcccgccagcccacgtggcagccacgtatgcgccacgtcggcgccagctcagctgaggttgggacgggccgaccccggtcagcccttcccgtgcgcgcgttccaccgctagccgtgaggctgcgcgtgggcccgccgcatccgttcctccgcagaccgtgcgcgtgcaccgggtaccttccccgaccgcgcgcgtgcgccgcgtactccctacggacggtgagccgagccgctgacaagcgggtcccacctgtgaccgcgcgcggtgagccctggccacc

SEQ ID NO: 27766 - DNA, 434 bp, Oryza sativa
  unsure (1)..(434): unsure at all n locations
ntcattttatcttctatcgaatcttatgcacaacctctttttctgtttgtttaaatctggccataacattttccaaaaacctgttaagtcgcaaccagtggtattaggaattcaaagctacaagttatggtacttcaatttctgagtggctctgtgatcacttttagcaataaagaaaaatcaaggcaaaaagtggcgataggcatgcttttgcatatgcatacacttttgcttgcataagacgaattgaataatcatgctttagctactaagagagagattcctactgctagttctttttttatgtctcttggatattattagttaatgttccaaataaaataacccattactaagacctgcactataaactggatacattgagttagtttctcatactactcaaattgactgtatcaatatatagaaaataa

SEQ ID NO: 27767 - DNA, 444 bp, Oryza sativa
  unsure (1)..(444): unsure at all n locations
agctngaaaagcactcaaatttaccctacttatgtttattaatttggntagcatatgcatattgttctctgaccattctattaaaaaattgtcccataccaagctgccaacaaagtatctcatacaaatccaaacacgtctatactaccggtagtaggctttatcctttttttttagataagggagatgattacattcctggcttttccatctaggatgcacgcggctataaagtttgagttgcaaaaagaaaaaaaagtaggctctgtctgatgcatctcttgttccgattgacaggaacttgctgactggcatttcgggacgattttgcagttaataccagtgaatgtctgatgaacaggatacagaagatgacactacattatcactttaaagtagagcaggaaggaggttcatccacctttgccttctttggattcaatg

SEQ ID NO: 27768 - DNA, 352 bp, Oryza sativa
tgtggcagcttcctctaacgtgagattctcaaagagaagtattttttttcatagatcaacataatagaaaagcacaagcggtgaattgccacaaaataaagaaccaaacgagacaattttgccgattatgaaggtaactaatcttgtttcgtgtgaaattcacataaagtatgttctctcgtctacttcatcttaaaataaactaacctgaatgagatattacctagtactcctataacgaatctgtcaacggtcagaacttgatgttagggcctgacttcaccaagtagcattctcaagttgacacagatgtttcaagtgagaatatacctgtacgacacagatgggcaca

SEQ ID NO: 27769 - DNA, 444 bp, Oryza sativa
  unsure (1)..(444): unsure at all n locations
agcttatggnggcatttgaagtctcaatgtatcttatcaactttccatatgctgctttaactttatatctttaactcatttgacattgtttctttttttccccatatacacaggataaatttgaaatggaaatttggacaagcccaatgttcgacaacttaataagcctgactcttggtgaatggtgcatgtccaacgaattctctcccttactccacttcctttggtactcaccactgctagaggatctcactttgaagctcaatatggtgattcatcaatcctcttttgctctatgatctattgttcccatgcacagtgagaaaacctaacgtcccattntcaattacaggaagtgtgcgaatattgcctccaagagccacccacggcacccccgctggttaaagaanttaccgcttgataccttaagaagacacaatctat

SEQ ID NO: 27770 - DNA, 429 bp, Oryza sativa
  unsure (1)..(429): unsure at all n locations
ntgcggtgatcctagagtcgccaaccacctcgatctagcttagagcttaacctagatgtgttttgataactaaaccggctagcggagccgatttctagataactacccgtctcgtgggcaaaacggaaggttttcaggacaaacctacaaagagatgtcgcactctcgcagcggcggcggacggtttacggcgcaaactgacaaagatggacaaactaagagaaaactaaaagcaatatgaaaaaacgattcgattgattgattgtagattggttttttacaatgaaccggccatgtccattatataggggttggtcttgccctctacaggctctcctccaagtccaactccgggtagaaaccaaaggaaacccgaaacatgccttcccgagcaaggaaacctcaagacccgacgaaacacagtcggac

SEQ ID NO: 27771 - DNA, 443 bp, Oryza sativa
agcttgataagttgttgtcacaggtacgtccttccagatgatcatgcaatcttggaagaggtatgttgtatgccatgagcctgtaagttcaatttttactacaatgatgaaatatatttagtgaccggtttgcaatgtctaccagtttgaagatagagttccagaagatccatgtccttatcttctagttgttatttcttgttctgatgaacacacagtgaaaggcacaattctggtgagcaaccacttgtttggaacataactgtaaggtgcagtgtaaaagataatattgtgctctcgattctcaagtaacatgggctcattattaaacagagtcaaaactcagattcagaattttggggatatgcatatctatataaaacaatgttgatatttgtaccaaaagttaccgaaattgatgtaatatcaaaataacaaaattt

SEQ ID NO: 27772 - DNA, 430 bp, Oryza sativa
tcatatagacgatgagattcaatttaacaggcagaaggtattctgcactttttattccttggtctatgcgttcttacaaatttgaaatgacctgaatggacacaacagacgtcacaaattatgggccggggagcaaaagatgttctgcaattgtttctgccgagtcctatgtctaatagtgaatggaatcggtttgtgaaagagcagaagatattctgttatctctaccatccattgattcaggagggggattatagctttctgctgcacaaattctgttatgccgttgtgattaaaaagagtatcatccctcaactcggctgtgttgtacatccataccaacagaaactattctgagcaaaatataacatacctatttaagtatgtaaacataaactgcaattagtaatcaataggcagaatatgaact

SEQ ID NO: 27773 - DNA, 464 bp, Oryza sativa
cggatccttaagtcacctgcggcagcaagcttaaaaaattgcgtcggaattatcttcgtgtggtcttgatttgaagaattaattgcgacgaacttaatggtgcaatcggatcataatttggataagtaatttaagagaaaaatcagtttaaattagtttttacacgtaaatcgggcgctgacgtcagcatgacgtcagtgcccgatttttctccaaatcatcgggcgcccgagccgtaggcagcccccaaagttttattatttattaattaatcaacatttggtttacacgtgtatttctatattttgttttctcttaatgcaatggaccaaggccttatgcacaaactatgacacgggcctagtcgcccggcccaccacgtccaagtatgcctcacgctctgtctcgcgccacaggaaagaagaaaggaaaaagtccatttggactcccttaattatacgccg

SEQ ID NO: 27774 - DNA, 429 bp, Oryza sativa
  unsure (1)..(429): unsure at all n locations
ntgcgagtctaggactatcggtttggctaggaagttatcttttctattctaagggtaactcccgggcatacttgagttgcccttatattcctcccaggggaatgtactatcattggtacacgtaaattttgggttttccaaccatttcttttcacaaaagcttgtgatatgaaagaatgggaagctcctgaatcaaacagaactattgcgggtacggagttgacagggaacatacctatcacaacgtctggagcatcctaagcggtctcagcttgaatgtggttcacccggcctcgaccaaagttgttggacgcacgagaaccttgtccacttgcctgagagctatgacgagactgagctgncgctggagtaggagttctggcagtgctgccattagcatgccctaagctggtgttggtaggaatctga

SEQ ID NO: 27775 - DNA, 445 bp, Oryza sativa
  unsure (1)..(445): unsure at all n locations
agcttcacaagctnttccatagtcctatactcataagaacagatcaatttttcgacaaataaaatcgaatttttttaaaaaaacgtgctcttttatcttttttacctttagaaacatgaaagctgccccttgtcgatagcatgctttgggccaactgggccgcaacattctgcacatgttagcatcagcaagagccccattgccggttgacaaacgcaaccagcacaggctcctgtttgctagcagggttgccttatcatgagcattagtggtaagttctattgcctgaagtagaagtgcatgaaaattttagaaatacataacatggaatgtactgtttgtctatacgactcacctcaactgcagccatatcatgccttctaattaattaagtaatccaacaaagcataggttngtcaaatagaggtagtatactactagtact

SEQ ID NO: 27776 - DNA, 408 bp, Oryza sativa
tgcctatatatatgcttgataaccctttgagttctttgcttatctacaagttgtctcacttcagagtactgagtactaaaattcagtcatccagtatttcaatggcccaaggagacaatggcaagaaggcaatgccacaggcagaaaacaaagagattgctgctaaggatgcacaggacataagaagacaagcagatgaatttaactcttgggtaaataaaatcatagtaatgggtgatatatattgtcttcaattttaataataattatatttatgctttattttagcttttgcaggaatagaattagcatttttctagaggctgtacacagtggcttgaaatttctggcagatgagcatgcaattaactagctagactcttatcatttgtagactcgtatcatata

SEQ ID NO: 27777 - DNA, 170 bp, Oryza sativa
agcttcacttgtccacgcattcgctttccttatatgccctgcatcatcggcagctatgtgggggtttgcccgaggaggcaattcgccgttgtaaacccggttcgcccgcccagcctcttgtcgtgttaacaactggctatactcgacgaccgagacgacgccgactatcc

SEQ ID NO: 27778 - DNA, 431 bp, Oryza sativa
  unsure (1)..(431): unsure at all n locations
aacttagaactaagctgctcctacacgaaagcctgcctacaaccgtttatttcttagcccgcgntgcgacagatctaactccaatgagtgcactaccacaaggcgtgagtgctcaatttcaatcccagcctctagctgacaagacagaggcctatatctgcgtagtacctttggaagtccgatccacatctgagagatcaagtaccaaaataacaacccgattgttagaaagttaatgtttgatacaactgcagtgaagaagggcattactccgaaaactgtctccaaccaatgcgagatctacctccacattaccgtgcatttacacgaagcagacattccaatcgaattgtggacactggagcaaaacgccgacccgttaaggcctcctgataatcagaacccataccagataccatgcaccaatgctc

SEQ ID NO: 27779 - DNA, 437 bp, Oryza sativa
  unsure (1)..(437): unsure at all n locations
agcttcaatcgcttgttacaacggatgttctctctacaaagataaactaaacaatttcaacaaattaatggagggcaaaagctaagactaatatatctaaaaaatatatttatctaagtatattataaatcttcatctgaaatgggtaaatatatgtataactatatatggactccaaattttagcatgcaacatgtaatagttccttgtaaattaattaacgtctatgatcaggagcaagaatatgactatacgatcaattaattagctcggatgcatcatgcgtgagatatttcaaacacgggtgttattntaatggcgtactatgatcagttcgctgtntggttttcaaaagctatctgctgaaaggcacgttgtgcttttctcctactcacatcccgaactttttgactcggaatctactagaatggactatg

SEQ ID NO: 27780 - DNA, 398 bp, Oryza sativa
  unsure (1)..(398): unsure at all n locations
ttacctctccatgactntcacatagtacactggcctctttatatttcttagagatattttgagttttattgatgcattgcttgcaaaatctacaaaacattttccatatgtaaaatagttgccagcattcttgtgctcgtgcataatgccatgatgttttgaagtgataggaataatcaaaaggaaggccttgattaaagaactggctgctgcttaccatgctgagtgtgtggcatgctgtgaagaacttctgcagcttcaaagaaagtgggaggaagtctgtatctgtccttcttcaaaatggaagataatcctgtgatttgtattcctcccattgttgtgaaacggaacatatataagtatgtangaacacgaatcctgctccttttctgtcggtt

SEQ ID NO: 27781 - DNA, 438 bp, Oryza sativa
  unsure (1)..(438): unsure at all n locations
agcttaaaatgctttaatcctgcctaagttctaatcaaccgtgctgaccacagactctatattttactttactgcttattaatcctgctttattagcagtatattttactcaacaaacacagcatttacctagcccggttcatcgtcggcagccttcaaccagcccggttgtaacttacaaaagcttcgataggtgtactgttttctggagggatcgataattcgatgtagctccaggacaaattacgagacagtgatggcatttttgctacagacaacactgcagctgcacagagcttagttgcaaatcctcctatgccacagcgcacattttgtaagtatatagattaggtatacagttaacgatttctaaggctaagaacggtaggtagagtgcanggtggaacataaattttttttcaaaagacttttagcctt

SEQ ID NO: 27782 - DNA, 429 bp, Oryza sativa
tgcaagatgagttgaaatagttgaaaacaagggcacttgttttgtacttttgaataacaggttccaaaagaaataaaatcaagttataaaatcgtcatgctaaatttattttattgccacaagattaaataaaacaacattgtaaaacttttgctgataaataagccattagtacacgaatagatgtacagtactaataacactggaataaattttgaatgagaaccattaaaagagatttatgaagtgcatgtgccattagtttggtttaattaaaagagaaagggaggagaacagttctacttttccaatatttttagaaggcttctatgggtaaccatttggcataacctatggtcaagggagctctgataccaacttgtcacgcccggaatttctattcaaaattccaaacgcttacatgtgtgt

SEQ ID NO: 27783 - DNA, 310 bp, Oryza sativa
  unsure (1)..(310): unsure at all n locations
agctatcgngagactatgatttttttatntttctatngccaactgctgaactttgatactctaccttgatgacattagctcgcggctgaggcgactatatgtatctccatggctgtcaaacgagaaggtacctttgtgctctttaccaaacagtgtcagttctgatgactatggtgacagtgcactgaattgccaaagtttgacctcatgcattacaagaatacccgaatgttcgacctcagcctgtgcaacatatataccgtgttcgtgaacacatatatctccagcaggtctgcaatgctacttatga

SEQ ID NO: 27784 - DNA, 425 bp, Oryza sativa
aacaaaatatagcttattcgcgaactatgctcggtatatatttttttttttagcccactaatagcttcaatttatctatagtcaatcaattcatacaatagttggttactatactattagtatatggtcacactgtcatacacacattgcatcttggagtctgtgctgaagctggctacagatctagagactgctgctcttctctatcatcttttatctcattaaaatatgtttggagctagctaatagtctactattgtaactgctcttagggctctacctcggtagatgtcatgtttgcgctcgagtttgagcttaagtccacgctatctagcgagtctgagcttaagtttaattattctcttcaatgcatcttctagctcgagcttcacatgtttgccccactaatagtcatgcttgccact

SEQ ID NO: 27785 - DNA, 428 bp, Oryza sativa
agcttaacatgaacgctgggtttattgtcttggtttatagaagaacgtttatttaattaagacggagtagctacattgtatcactctcgagtactttctttgttttaaaatataagtatttaaaatataagtattaaggttaaatagagaacaccccttattaatgaggtgtggttatggataggatagagagaagacaatggaacgatgtgtcgatgttgtgtacgaaagttgtggagccatgctggctcttttttttgccacgtcacacgcagttcatctgaacaatgtctctatataaacccgtcccctgcctgccttgcttgccacctatcccagcgcctcttacaggccactacttatctgggctctggctactcttcgacggcggtcggcgtaacgagctgtagctgagctgaacgcagaac

SEQ ID NO: 27786 - DNA, 409 bp, Oryza sativa
  unsure (1)..(409): unsure at all n locations
cgaccactctagtgtttggcccagagccaattcattcagtcttcaaaagccatttgtcaagggccaaggggggacacaaagatttccatgtcatcatggatgcagtcatattcgtggataggtcaaaaataatcatttcaatggacatatagacaaacaacaagacaatacgtgctctgtcttccgtccaaaatgaactgtctcgtataaataccactcaccagaactacatcaaaacccattccgataatcttaattaaatggagtataaactaaagctagctacagtattaattcttggagactatcatggcgtttccctgctgcattattactgaaagcctgctgcatccattgcagtgcanggcacacaaaaggagcagtactaacgatacagaaaaaaaaactg

SEQ ID NO: 27787 - DNA, 465 bp, Oryza sativa
  unsure (1)..(465): unsure at all n locations
ttaagcacctgcagctgcagcttgngatgcagcctcgtgctagcaactttcttacacaagtagataccctaaggcaagtcaatccccacacatatttggttgctcaatgtgtcgatctcttgctaaggaagcaaatcctgatccaactagctgaaactgcctgagtaatgcacatttcccacacttgcactcaaaaatcacaaggattctgacattattaaggaaaggtcatgtcctatataagtgctagtagtacttggctactccaaaattgagtcgcatcacaaacacaattaaacatcaagcaccaaatccctcgcctaaaccccatgatttcatacccagatcacaaagatttatcacgagctcactccacacgcgaacgccaaaaggaacgggagtgcgagcatactggatgcggccgagcttctcgtcgacggagacggactcctcggagagcacgct

SEQ ID NO: 27788 - DNA, 399 bp, Oryza sativa
  unsure (1)..(399): unsure at all n locations
tggaattntggagaggatcccaactgctcgtggtgcgggtgttcttttttcttctcggacgcgggctggtacaactagaacaggtaacggaacgacccggtcgattagttgccgtgccacgaagcggatcgagtcggtttaatttgtgccggtgggtgatcgacccggggcgccaacctcacgagatgagatcgcccgccgtgctgcctgcctgcacgtagtacggcagcaaaaataatgggtttgtgatgctgccagtggcagcaatccagacgcgatcttcgtcagacggtggacgcggcatctcttctcgctagtacttggagcatgatcccctctctccaagtgctccattgtttacgcgtccaggaagatcttgttctgctcctgttccctgcg

SEQ ID NO: 27789 - DNA, 429 bp, Oryza sativa
agcttggtggtgtggtggtacattactcttctttttattgtttgcccacattttttttagggaataataaaagtaaattattgatgtgtttagatgtgatgtgtatgccgcctttagtgcagtggtgatggtgattgctatcggacacactctcgagtactcccttcttaaaaaaaaccaatctaagattgaatggaatgctttctaataaaataaatctggacagaagctttgtccgattcgttatactataaaatgtcccatttaatactaggttgggtttttttggacgaatggagtacgtgagaagacaatgaacgtatgccacaactagtttgtacttcctccggtcacaattataggtcattctagcatttccatatccatattgatgttaatgtgggaaatgctagaatgacttacattgtg

SEQ ID NO: 27790 - DNA, 347 bp, Oryza sativa
  unsure (1)..(347): unsure at all n locations
tcactttagtctggttatgcttattttcctttctggttatccctgagagaattgtcatgtacaactatactcgtatcttcaatattcacggcttctttggtttagcatcctactaaaacgatgatggtgctaaaacctggacaagtttcaccctcgccaacttgtttatatgataaagttgtgtttgcttttatgccaatgaaaagccaaaactgttgactaanatctagaaagtggnnnattagacatttgcaatgccaatgagttggctttcaactagaaccaccatattcactatttaagctaccaaaatatcagtagggcaagtcttggctccnnttcaaacg

SEQ ID NO: 27791 - DNA, 394 bp, Oryza sativa
tgcagctgacatacgatactggacaattctttttgttctctcccggggaccactcggcatgatgaccgagcggcaacttgattgcatctctgacatcaagatttggggcgtgcgggctgaacagattgatctcccgtcagtaacttctgcttccgttaaactcataagccaggggcccgcgaagatatggttgagctccttgcggtgatcttgaaaacctgtcggggtgtcgaagatgtcttttttctgacgtgctttgtttttgtcagaattcttcgcgcagtcttggtgtattgatccgcgaatggcttgtaaacgaaacaatcattggccacgtggttggagttaggaaggtgccggcattgggagttcatgatcttagtcgacgagatga

SEQ ID NO: 27792 - DNA, 416 bp, Oryza sativa
  unsure (1)..(416): unsure at all n locations
agctgaaccttgctcgcccagtgagaacaaaggactcaattattgtttgttgatcacgagttgctactatgctggatatctcaaagatacacgtgcaaggtatatgtactctctcagattaaataatctttggcacaggggcttacccttacccctgattcccatgagacactgcttctccttgtcttgngcggttgaaagacaacaactatttatagcaccaatcacccaatctttattcaatttttattccggaagatttcaaatgattttgcaaaagaaagccaagttcctcagatgattcactcagtctctccaagtgtatcaatatgaattcctcaccagatttgcctttttgattcctactctaaggtttgatatgtggagctcggtacggatcaaacatggcatacttg

SEQ ID NO: 27793 - DNA, 438 bp, Oryza sativa
gagctggattgatgggagtctagcaaagtgataacttttatttagttgacagacagggctgtttctggagactgcatctattaatcggtttgctccgcctctttgcatccgattccatcatcgacgccttctctcacgctgatccttgtaatcaaacaactcatcagcatggtcttcgcatggagctgctaactgcagagtcacagagcccaattgttgagctcgaaatgccacggtgcgtgccctcactcatctcatctattttctttagtgcatgctaaaactttctttaataacttgtgtggggaatgaattgagttctctactcttagcagaggcccgtagttttttattcaagcaaccaattgatgttatctctcactattctagcagcctctatgctattatatcttgtgcaattctggccaaagaaatggg

SEQ ID NO: 27794 - DNA, 423 bp, Oryza sativa
  unsure (1)..(423): unsure at all n locations
ttcaggctggtataagtataatcagccatctgtggccttttaattattctaattatgcatgtgtacaagattgtccttttttattcaattcagtgatctccaaggttgcatgtaagctttgtccactaaatcatggatccaacacaagcctccaggtgctgttaacctcatctccacatatttagcgacaaactttgtgtgagatgaagatcaaattgtatagtcaaatatattcacttgtggttattaaatttataacacacctacattacctttactttctatttcaacacagcaaactatggatttaaatgctagtaaacagacattgcttttctacagaccatttatgagcattnttggtagaataaaggagttttcatatgtggaaaaaaatatcttgaaactaagatctgatccaat

SEQ ID NO: 27795 - DNA, 420 bp, Oryza sativa
  unsure (1)..(420): unsure at all n locations
agcttgaaacttgngatgaatgcaaaatactgatgataaaaagatttgtgttttcatactatagacgtgctctccttgagaaatgggaacatctaaaacaaggtgacaaaactgttagggagtacttttatgattctaaaatttgtatcacttatagtggtttacaagaatctaatgagaacacaatgactagattttttagagggcttaatttcaatattcaggctgggcttgttaatgtgacatataatcatataggccaattgttcatgcttgcttgcattgttgagcgcaaaattttggagaatccaatggagcaacaagatatgcttgtgcctcctatcactgatgttttgcaagaagttcagaanagtcttcaaaatgagaagaacgatatgtttgagatgtcactttcatcac

SEQ ID NO: 27796 - DNA, 428 bp, Oryza sativa
  unsure (1)..(428): unsure at all n locations
ttccatcaagtactcatgggccccgaaattccttctagatcatctgctaggtccgtttgacgttgatgctgtcaggaggcccgaatctgaatccaaaacgtgtacaacttgatctcttgtcttctatgggccaaaagtgatatggtgagctagaagtatacttggaggtcttggtttggtccccaatcaacttcttcaatcatccatgcattccttacgctcggtctcttttctttcacccaagcaagtacctctgcgaacgaaaacacacaaaactcaatgtgtagcaatgtttgttcaaatatataacaagtaaatctaatatagaacatatgcnaccttggttgctcaatacataaggtggtcatggttatatccgaactagttgtgtcctcatcagcagtacttcggggcatggtttcatgtgt

SEQ ID NO: 27797 - DNA, 422 bp, Oryza sativa
tggagtgtgtgtgagtgaagtgagaatgggagctctatttatattcaggtaatggcggctataactatgtgaattgtcggaattgcccggcaaccgccatcaagagagcatctggagcgtccataccaaaacctggatccaatggtgatcaccaaggctgaacctggattgggccagatggctcctagatttggtctgggcctctttctcactctgccttatccatttctcctgtagttgggcccattttctgatgttttgatggagtttaagagcccaactcttgtatggatagaattcttattcactttagtctaaatttcctcccaactttagtggtttagtacctgcatccaaatatgcaccaacactcgtggaatatgtcagaattaagccctaccactatgttggatgtatcatta

SEQ ID NO: 27798 - DNA, 440 bp, Oryza sativa
  unsure (1)..(440): unsure at all n locations
agcttgacgttgcgaaccactgggtctattatccatgggtaccgccccgggtggaccactcggtcaggatgatccgagcggtcaaacttgataactgtctctgaccaccgaagatattggggcggatcgggctgaacagcattgatctcccgctcggttagcttttgctttcgcttagattcataagccaggggtccgccaacaatatggttgagttccttgcgagggtcttggaaaccagtcagggcaacatcatcatccttcttctttgtcgtgctttgatctccgtcagtcggcttgcgtgcgttcttggcgtattgctctgcgaactgtttgtagacgaagcaatctttggccgcgtgatttgaatttggatgatgtggacactgngagttcatgatcttgtcgaaagtattgactcgcgaacgctgtcgggagga

SEQ ID NO: 27799 - DNA, 424 bp, Oryza sativa
  unsure (1)..(424): unsure at all n locations
taggaggaggagggttcagtccaagaaaaagatgtttcatttctcaatgcaagaatgcaggtgcgaaggggtaggttcattcatgtagccattgatggtctcttggagctcagctcagcctcaacctcaacccaccatagccatggatggaggtgaggaagaagctgttttgtcctgtctgctcactntgctggtaccaccactgttagaaccatgcttcacactctctctcttggttctctctctagagagaagaaananagtntaaaggagtaggagtatgaggagtggcaacaatggcaatggcatcaaatgctgcaattgcccacttcccatgagcagctagagctacaacagcagacctgaggctattgtgctcacctcttcttcttccaccattaatgaaaatgcattactactagta

SEQ ID NO: 27800 - DNA, 440 bp, Oryza sativa
agcttagttgagcctagaacccaattatattattattaactttcagtcctcgcaaactaagtagaaaaaccaaacaaggcaatgataaaccaagttagcaaactaaattgataaaaaatcacactccattattatgatgatagcccccgactgacaacttcaaggagaaaacttgatgtttgacagtcaaaatagggaaatacagtgataaagttaagcgtaaaaacgacgaagatgttcaatgttccaagaattgtcgacgagagtgccgtcttcgcgcttgagtcgatatgaacctggccgggtaacttcagagataataaatggtccttcccatagaggagataacttgtgccgatctcgtgtggtttgaaatttccgtaaaaccaggtcgccgactagaaaggcgcgagatcgaacattgcgattatgataacgtc

SEQ ID NO: 27801 - DNA, 383 bp, Oryza sativa
  unsure (1)..(383): unsure at all n locations
tggattacaaaaatggggattaataatgggtaatttatttttattagtcggctaaatattactacttagttgagtggtactgttgtcacgatccattgttagctgtcactttgtcttatttttcttcctaattatgcaatttgccatcttgtctcattaattgtcttcttttttattatgttctcttttgttgtctaaggaaagacttgtcttatgcatgatctaatagctggctctacatctacagtactaaaatgttttgttttacatatccatgcatagctaatcattccaatatattgaggcaatgatgttagaagcacgtactacatgtattacattacactgancaagtgacaattatttcagttactctgtgtgat

SEQ ID NO: 27802 - DNA, 450 bp, Oryza sativa
gatcttaagtcgacctgccgcatgcaagcttcgattgcttaacgcggatgctctatatgtatcctactaattaacgcgggctcatgttctgtttgaagaaaagatcgatgcatgacagtgacaccatccacgcgggtctcacgtgtcaatttctcaactcaaagtcttcactggacaaaaaggaattatattccacacacacgggtgggctcacacgattaagttggataatctgtggaaattaattagagtaccgggtgtacacttgcactcactatagtcactaagtattgttctttttaatttttttttgaaaacagtctacttcgtagtttcaccaaccacaagtgtaggtcactactggcacttgaggtttggggccggtctttctggatcagccacagtccacgacaaattaagactaatttataatttagagcttaatggtaa

SEQ ID NO: 27803 - DNA, 424 bp, Oryza sativa
cggatttgaatggagagggtaagaactccaagacttcttttttttttatgtttacatactttatcccaagccaccaaagaaatatattgccattctatatatgtagatatccttcagaatacaataactgaacactaaacagtaaaataattagtgaagggcatttagcttccaacttaacctaactatgatatatcaaggttttcttgtctgtacggctgcagtaaatgaagtcccagttgagcatcctgcagtccatggcagccgcggattgaaaaaaaaaaaactctcttcctgaactattaataagtgtgtttttatttaaaaaactttctataaaaaatcaaattatctgttaaaaaccatattattatttttaaatctaaaataataaatatttaattaattataataccttatcttg

SEQ ID NO: 27804 - DNA, 432 bp, Oryza sativa
  unsure (1)..(432): unsure at all n locations
agcttgaaacaaacaaacagcacggtattgtattgttttgcaagnacagagaaactaagggaatggtaattcatcatcttcagaatttcttcacccaattatgggattttccgtcagcagagctacaatttcagtatttcaacacgagatcaccatctaactcagcaagaagctcgaatcaaacaagcaacacagcattgatgaaggcataaaccacgcactgcactaactaactacttgatctgttgccaaaacatatcgctaacatgatctctaactaattaactacttcatctgttgccgaaacttatcacctcacttaggggagaatccaaaacggaggggaggttttcaaccgaccttgctccggtaagcagtgcctgacctgcggtggtgatcccgaccatctcccgatgtcgctgcggtgatact

SEQ ID NO: 27805 - DNA, 427 bp, Oryza sativa
  unsure (1)..(427): unsure at all n locations
tgcgacttgaaaaaaaggcgagaatgggagatcatatatttttgcccacgggggttacaaaaccgcaggtaaccgtgcttaccgtgggggtacggtgaaaagaaaaccacggcaatcttcttaaattcaaataaattttaaaaataatttaaaattttgataagttttacatgattttgtatgatttcttacggttactacgcggtaaccgtacttattgccggacacggtaaccccggtcccgacagtttgagaaaccctggacccagcacgttctggttctaaaccctatggcaggcaagaattaatggttttggccagcggctagctgctgtcacctatacctaatttcctatctaccttgaacccggaacagcaaaggaaagacataacanaaagaagttcacanatttttgtatataaattc

SEQ ID NO: 27806 - DNA, 443 bp, Oryza sativa
  unsure (1)..(443): unsure at all n locations
gacccggatcttaagtcacctgcngcatgcagcttgatgacagattaatatcttactatggcgtcaagaatatatacacatgagattctctcgcttgtttgggctcacatggaccaagccttaatagcgatgtacgaattatctcaaaaaatttttttgagacatttgctaccaaaagcaagctattatacgggtatctaaagttgcacaatgcacaactaaaatggctagtaatcattaaaccagtaaaataatgcttttaataagaacatattatcaatgtgcaaaataaaaagaataaacacagataatcgataaattatcaatgtatatgcaacgacatnttttttactaatcatgcactataacagtctgtatcttcaaggcttaagaaaagaggcaatggaatttgcttcaacgtggaacatagtatacatcttgtc

SEQ ID NO: 27807 - DNA, 334 bp, Oryza sativa
  unsure (1)..(334): unsure at all n locations
acacatagatactaagcttcttacaaagtnaggttaaacattttcttatttttttggtaaaatcataattgcaacataaaatatgggcaataacacagttgtccttgaaataaatggttgannnnnnntttaatggatcatgggtgaaacattaagttatacatgctgaaaaaaatagcaaatgaattatttacaaagtttatgaaatgaacacatatgttaaaacatatgtattactttcatcaaaatataatcatggtatatattgttgaaaagattaaattacaacaaacataatggtgcgatcataccgtaaattgataaatagtttaaa

SEQ ID NO: 27808 - DNA, 439 bp, Oryza sativa
  unsure (1)..(439): unsure at all n locations
ttaatgacgcggctgcagctaattgaaaatcttttgtttatgtttattctctaangcacgcaggctatattatagatgggttcatcttctttttattgcaacacatgatatgatatgctatatgtatgataagctcttatacattaatgaacataatttctatgcttgatgaaatcattggcaaaagggggagaagtaatgtgaaatttttggagaaacaaatgatttgagaagagcttgtcgattgggaaatttcttttttttcaaaagagagagaagttttcttttgaatttttgagcacgatgtgtaacatttgtacgaagtgtgctttttaccacttttgtatttatttgtccaaacaccaaaacattttgatgggcttgccaatgggttcatcaagagggagattgtaaaattaaaggtgtgtttgagtattat

SEQ ID NO: 27809 - DNA, 385 bp, Oryza sativa
aagcttgcaatccaggaacgagcacaggggtctatttattatgtgcaagagaaatcaatgtcattttacaagctatatttataaacaagtgaaatgctttattttggacggatgtttatatttaacaaatcactctggcatcttcaaattgaataataagctcactccaaatcagcaaattcgatcatgcttttgagcccgaaagagccacataatatattagatatatgtattaaaagttatactccccaaaaacaaaaagacatgaataatatgtaggcataatgagcatcattcttatcaaaatagtacacctacatctcaggtgatgctacaatgtgagaactacaaatgtatcatctggcaatctgctaacatttacccc

SEQ ID NO: 27810 - DNA, 434 bp, Oryza sativa
  unsure (1)..(434): unsure at all n locations
actcacttcgccacttatatcatntgtttagtgcaagggatgacatgattggcattgagcacttggaagaggattctgatggccaggctcttatgaaagcacggcgatctgctggatcaatgaatgccttttctggatcggggggaatggtctacatggagtacaagtgcttcttctttccgcttatatttcgtttttacgtcaattatttgatttcattattctatttactcaattctaacttgtgagctcttttcatccagcactggtaaggggaaggctggagcttccaaaaaaccgaaggacccttcaaagaggcattacctgtttaagaagcgttatcaatgatcttngataaccggcgttgttccttcctttgcctatctcatctngcaaaatactgaatacgagttatggttaaggaattccaatga

SEQ ID NO: 27811 - DNA, 127 bp, Oryza sativa
  unsure (1)..(127): unsure at all n locations
accacccaagcgacacatcagnttcgacttcactgcatttttttcctaccccaattaaccaaccaaaacgacacccattgaaggacatcacccaaatttctacacacagttagcattaacaacccta

SEQ ID NO: 27812 - DNA, 444 bp, Oryza sativa
agcttatctcgctatctttcaaacgcatctggtcttatattcaaattcattccgagtcaacgggaatcgtcaaaacaagacagtgctattgctgaaaccgtacttaggccttgggccttataatagactaatcccatctcggaagtgtctcactccacctccacgaattaacacttaaccttaaagttagatctattttcctctacaaatgtctatgtacaccctctagaacatttgggtattgtttagttgcattttgccaagtgccattcaccttgtctctagttctcgctcgattagtcgacgactttagactcagagcccccaatagttgatgtgttgattgccgggtcgattagatctatcacttcaatcgcaactattcatttgtgcttaattacctattcgcaatatttagattgcatcttatctggttcttgcagt

SEQ ID NO: 27813 - DNA, 423 bp, Oryza sativa
agcttttattccatacaaacttcaatacatcttgatgttttataacttgtcgcatttgctctccagaggaggaacatcaagtattgtgatatttatgtaacatggggcggaaaagctttgaaaggagatgagatcttgagctccatacctattcacacgaatacgcatatttatgtgacacccagactgaggggtggagagtacgtaccgcgtaacttatctatgtatatgtattttatcacttcctactttagaggtgtaacaagtgttcatttgcagttaattccaatggaatatgaacgtatggatgaactttttgaccgtgcgggccgtgacaataataatgacctgttctattatgtgaaccttcccccagaattgataacgcttataaagatacatggtgtaactttctaagtgatt

SEQ ID NO: 27814 - DNA, 427 bp, Oryza sativa
tcgcgacaccggcgccgaggacgacatccgcgacgccttttttgtcttctataggaccagaacggcttcatcacccccgacgagctccgccacgtcatggccaacctcagcgaccccctctccgacgacgagctcgccgacatgctccacgaggccgactccgacggcgacggccagatcaactacaacgagttcctcaaggtcatgatggcaaagtcagactctctcttcttccttcctcccatttcatttcttttctgctttcttgatttctttttctttttcttttctccatgtagattattactagcactggaattacaaatcttttctagattatcattatatttcttcttcctatttaatctgcaaatgttgcttctgctgaactgtacataatgtagtgcattcgtcatcagataatcat

SEQ ID NO: 27815 - DNA, 416 bp, Oryza sativa
  unsure (1)..(416): unsure at all n locations
agctnttctcagaataagatagtacacatatttgtttcatcttaaggttggtatatcttcgaaaatccccacttgtataataagtaatttattcagtcattggtttccatttgttgactaaatttacttgtacgactttgcaagttctaccatcttcactgggtataagaacctggtgttcattttcaagattttaaatttcggacacgctttctcctggaactttaattcgctaaaatatagttttgcttacctagtttatttcgaatgtcatgaaaaccatatttcaaatatatacgatttatctgtagacatttttttttcaaaatacattaaaaataactctgactggtaaacagtttttccaaaaaggtcaaaacaataaccaaataaacaggagtatgagaaatgctcta

SEQ ID NO: 27816 - DNA, 442 bp, Oryza sativa
  unsure (1)..(442): unsure at all n locations
acggacctatgatactaagcttagaccgaggcagcggcganatcgagaaggaaccgttcatctaaagtctcatggcgaaggccatggctcggacactctggcttcgccagacaaggacttcgtcagaaggctgtacgggcaaaggcgataaggcgaaagccttagcataagggcgcggacttcgccaagtgccgaacctcaccgtaaagtggcccagcgggccgttgtactcccggaaggtttcgctaagcagatgggccaagccatatggcccaataggaggccatatatgtaaaggatacagtgtgccctcaataatgtccctatcacaagggtaaccatgtaaattccctgtaagacctaaacactaaagggggaatctgtaatatggctataaatagccacctaatgctatgtaatggngggatccaaaaaaatttac

SEQ ID NO: 27817 - DNA, 408 bp, Oryza sativa
  unsure (1)..(408): unsure at all n locations
agctnggacaattagcactagattcaagtttttcttattctgcttacaaaaaagattggcccagctattgaaatactcctgtgcagtttgcgtggttaaattgtcatggaaatcgcatcgactggggaaaaatcagtaaacagcgaattgaaatccaagtttgtgcaagacatgagggggttgagtgacaaggaaaactaatgactaatgaggtagaacaactcgccatccggcgaattggtatcgagggtttggcgccatgattgtgtgcttacactgtcggccactttaattgctcgccgcatgtactggtttgcgaaagaccccactatgacaatgaacagagaaaggatatagattatatgtgaccatgtaagcatccaaagcaggaggtcgacttggtcaatg

SEQ ID NO: 27818 - DNA, 417 bp, Oryza sativa
ggaccttaaatactaagcttctcttcttgcttaccaggaacccggtttggctccaactgtatttcttcccggcggtgccaactattggcatgcgaggttgtcctgaaccgactagttacttagccagcgtgtcccatttcaccttgtggttgcactgtgagtatgatctatgagtgtcccacacgaatcggcccttatatgcgaatacgggacagtgccacataggcacaacccccgcatcgcgagtgttcaaaactcattttgttttcagacacaccgacaccacatgtcgggttttgaaggcttcacaaacctattttccatgttttcgacaaacaacggtgtatgtgggatatttggtatacccgctcaaagagcacgaataccgaggtaccacaaaggtggagcgacaaggaa

SEQ ID NO: 27819 - DNA, 432 bp, Oryza sativa
  unsure (1)..(432): unsure at all n locations
aaactatacactcttggtatcttttcttgttgaaaagtntcaganaagacacgctgatgtccttttcagttataccttatgtccattgttcactaatacaccacttctctgttgaaaaagtttcctgcacatttattgcttagtttttacaaatgctcatgatcatatttctactgtggcctcgacaattacttgagtggattcttccatgatttccgcaatggactatgcttttatctttcgtcaatgtaacatgtttccttcctactttgtgatttttaggtaccacagtatcaccctggatcgttactatggatgccctaaagcctttcacctgtgaagctcctaagcaggtgagcatgtcttagtattatagtatatagttaaccattatttccttgagaatcatcattntatttgtctatggataaa

SEQ ID NO: 27820 - DNA, 385 bp, Oryza sativa
cgctagacagtattccatagtacaccagaggccatttttatatattaggtactccaactaaaaagaaagatgtatgatgggttagctagctatctatcttaacatattgatttaagtaggcgagaggtcccagatgatggaacagttaagctcttggaagtctttgatggctactaatatgtggatgttattctctgtgttggaagaaacgaatgtgcagtaatgtacaacggagagttggtgaaagaggcaagttagataaaagtgatcaacgatgtagatggggatggctaatttaccaataatgcatgtagagaggatgtgtatacatactttagcaagctgattcttctatatggacaagagtctatctactatctaatac

SEQ ID NO: 27821 - DNA, 443 bp, Oryza sativa
agcttgtccccggtggtggcggaccatggttagtctgtccacagtggtggcgggcgaatcgagcccatccatgatgggagtggtgatgccctagcagcaatagagtacgagtgagtttcttttaggttatagaatgattaccacgagcggacctcttataagaaattaaacataatttagcagcctgtgaaagtaactgtttgagtagtcagtaatgtataacattctattataaaagatgtataaaatagttccatgtcagtaagaattagattacttacatatcgaaagaaaagtgccattaaaaaccagattggattgaccttaattaatactccctccgtttcaggttataagttgttttgactttggtcaaagtaaaattgcttcaagtttgaccaagtttgtagaaaaaaatagtaacattttcaacccaagacaaa

SEQ ID NO: 27822 - DNA, 109 bp, Oryza sativa
  unsure (1)..(109): unsure at all n locations
ggatccatctgaagtgactggatcgtgatgctgctgctctacaatttagttcatattgagaagctctttgatactttgatgangacgtgtagcgacccgatgggaacac

SEQ ID NO: 27823 - DNA, 424 bp, Oryza sativa
  unsure (1)..(424): unsure at all n locations
agcttncagcagcgtctccctggccttgattgttaccatgatgctccaaatctggatgggtggggtgatcttttagagcaatttccaccttatctgggttgcagtcaccatgaagctcaaatgatcgcaagctcggaagacgctcaattccagaaatggatttcatctccctgaaactccaaacaattttttccaacttaggattcttgctgaagctgatatcggtaatgtcttcgccgtggatgagaagaaccttgagatgctggaactgtttttccccaagggtgagcttgctttggacatatgacctgcaccggagccggagataccgcagtgctttgagattgccaacaactgccatatcttggtctcctagatgagtgtcgcanagagttaacttcgcaagtcggctgagctccttgat

SEQ ID NO: 27824 - DNA, 412 bp, Oryza sativa
  unsure (1)..(412): unsure at all n locations
aactcagcttctcctgatggttatctcatcaggaatgttttcttgagtataagactcttctgtcaagagggccgtctcaccgtcatttcagcctacggcgctgccaccattatctattcccatatcactacgaacaggtgtttcgcactcgcaaaacctccttccctgaattgaaggtacaaccaatttcatgtggtttataattttataatgggaaacctgtttaaattgttgagttttcagattatttaaaatggggtgcctgtttagattgcagcataggtnaaataataataataaaaaaatactcaattcaagtctaaccccttgatgattatttcaagtgaaagtcagcttctaaaaacgtatatcacctctctaaacatggtgtgtactaaaactaatgagaaat

SEQ ID NO: 27825 - DNA, 440 bp, Oryza sativa
agctagaatcgaagtgggaagggccgtactcttatttagcacaggtctaggacaggctcctttcacctagcgacgctggaaggcgaagagttccaccactcctggaacgctgcttcccttaagcttttctatgtctagaataggtggcacccaaatcgccaacttgtaaaaatgtacatactgttatgtaagcctttcggcacaaaaatgcaaaaaaaaaaagaggaaaatgaaaaaaaaaactggatgtagggttattatccaccttggaggcccgaaccagtataaaatctttgtgtttttcgcctctttacctgtgtgaatgataattcgtggaaaaaccccaaggcaaacgcctaatcagtgaaaacaccaaggggtgaaacgaatcggccgaagcatcgctcgccgaacgttgaaaccgcgagagcttatttctg

SEQ ID NO: 27826 - DNA, 414 bp, Oryza sativa
acggaccttaaaactcagctttagcctgaatcccttttatgcatatctggatctggattctgtataacaaacatataggatgagtagtatctgatataaatataatactcgagaaaaaatcaagtattttaaaatatttataaatatgtatttctcctcttgtcaattttgatttccccgagcagatgactctgtacgtttaaacactctgtccgactagtcatagcccccaagcatcgggagtcggcctatgcatttcccaaacatgcatatgagtgacatgagttcgtcattaatggaacaaagtttcacggatcagaatttactactcaggtacttttgcaattattaagagcagagaatacattatattatctctatgcttttgatttcttccaagtaatacttagcacc

SEQ ID NO: 27827 - DNA, 411 bp, Oryza sativa
tagctacacaagtgcgagaactgggtttgcttattttaatacttagggcacgagagatatgctaaaggagatgctgtgtattccaaaacaatgaccgccggcaccgattggaagcatcccaagacagttactcaagtccgcagtttcttaggtttggcaggatactaccggagattcatcgagaacttcttcaaaatcgctcgacccatgacacagttggtgaaaaaagaagagaagtttgtgtggagcccgcaatgcgaaaaggcgttccaaactctcatagaaaagctggtttcctcgccagtgttaatcttgccggatactcgcaaggatttcatggtgtactgtgatgctatccgccaaggataggagtgcgtgctcttgcaggatggtcatgtggtagcctatgcc

SEQ ID NO: 27828 - DNA, 435 bp, Oryza sativa
agctctttggtagaggtatggaaaatatttctacgtcacatatttcatccatttgagtttaacttttctatggtgggtttctgtgtgctcctaagtatgaaaaaatatcaaaaaataaaagaaaaataaaaaaagttgcacatctctcctctacactagggaggaggaaaaaaatggcgtgggtgcgggagggggcggcgccaacctcattggcgcgtttcccctgccacgtcggcgccgaccagtcatcacggtggtaggagaactgtgccagagttgctggcgccatccaattggaccacggcgcgactctggcgtccaaaaaaggatcatttctaagataagtattttaagagtctaattgtataataaagttttcaaaaagatcaaattgtgacaaattcagcgatgaactatcatgataggtttgatctg

SEQ ID NO: 27829 - DNA, 376 bp, Oryza sativa
tggcatcgaacttgacatataattgcgattttcaccaggaagctgtagaagtttgctccacatctcttcaggtctgtattctccttcccttattgatcatgtcttaacaagatctaaagaacatgttttatgtgttgaactgcactctttgatattcagagcgtatctgtttgatcctgtgaacagaatgcaagcaaggtcattgcaaaaaaagcaactgccatggatggacagcttttcctaattaagcaccttcttattttaagagaacaggtgatacaatttgtacagtatgtcaagtcaaaattttatagcatgcataagttcatcgggcaactcatgtggtactatacatgttttcagattgctccatttg

SEQ ID NO: 27830 - DNA, 399 bp, Oryza sativa
  unsure (1)..(399): unsure at all n locations
gcttgaagggatgaatgcattatttttattattaaaaaaaatngcggntgcatattataaacagcctctccgtgagaaataaaaacatataaaatatggtgacataaccgcgcgggagtactttcataactttaaaatttggatctcttatagcggcttaaaagaaagcaatgagaacacagtgactatatttttttagagggcttaattccgatattctaactgggcttattaacatgacatataatcatataggccacttgttgatacttgcttgcagtgatgatagcaatatgttaaagaacccaagggagaaacatgctatgcttgagcctcctatgactgacattctgtanggagctcataccattcaccgtgaggagaagagaaatatgatct

SEQ ID NO: 27831 - DNA, 426 bp, Oryza sativa
ctcagctctgaaaaaaggcactaacgaacattccatctttggtcttttaatcccatcatagatcaactggcctaaaaaagaagaaaaataagtgtttcatgcatagaaagtgggttcaattttatatccatctggtggatattaagacaaaacttgaaggagaataactattccacattggttccagataattaattacatccttttcatgagaaagcaacaattaacaattacttttgttccccataacacattgggccagctgtacttcccaactatcatgaacaatttgtttaaacaaaaattagctataaagcacatgggacattattcaaataccacgatgtccactatcattgtcagtaagttccaaacactgtccatggattgtagttcctacactataagaactacctcatccaatat

SEQ ID NO: 27832 - DNA, 449 bp, Oryza sativa
  unsure (1)..(449): unsure at all n locations
ctgagctgcagcttactcaactcctataaaaggacttgttctattctgaatactatcggacgcgcccattcgagtataaattccatcaacagcatgcaatgttgctgatgaagctggtacgaaggaaccaacctaaggaaatcagtgtaccaagtgttaggataatctcagagtcagggtaagataacaacaaagtaaacccttacttcctcaggtcctaagcccaacaactaagtttgcagtaactatgttatacatccaaaacatgttaacatgagtgaactacaagtgtgagacaatatttatacctgggccatcaatgtaattagagcaacttgacgaatatagcaactctttcctcccatgtgtggtcctgtaacaatctggcagtactcactattngcatgaagctcggtatcattttggaacaaaatgactccaagtaggga

SEQ ID NO: 27833 - DNA, 433 bp, Oryza sativa
  unsure (1)..(433): unsure at all n locations
agcacccacttgcaccccttagtttattcccantagggcgctctggcacctcccaaggcccggtagcgataatggaaaccatttcactacggacaggcttcttccaatagtctggattaagagatgcatatgcttctgaaattgacttatgaggggtattcaccaaggacacaatgaaatcatcaccaaaagaactaaccggcccttgtctcttactccttcgaggagcttcactggacatcttctcaaagacatgttcatgtgtatgttcaggttgttctggtggtgtgattgaactggtgaatatttcagagggttggctcgaaccactatgtgtatccttcatgggaaaaagctctcaaagaaggtagcatcacgagactccataattgtaccaacatgcatgttcgggacctctgattaactataaaaa

SEQ ID NO: 27834 - DNA, 403 bp, Oryza sativa
  unsure (1)..(403): unsure at all n locations
ggggacaatgagatcgaagatgaccaagtcctccacaatgaatgctacgaggtggtcctcctcttttcctgtgcctgacattacttatagctcgagaaaatctgttagcaaccaaaaccaagtccttctcactgatttcagctaggtgatcattggacaaggcattaaaaacagcaagtacatccttaggagaagtatncaaagaagatccagatgaagacacccaagcagtagatttcgaatctgttctttttgaaagaatattcatctcataggttttcaatttagtataaagaacatcccaagtcaaagtgttcatgtcaacagattcctgaatagaagtcactttaacatcccaaactctcatatcaagatcattcataaagagacgagccatctcaga

SEQ ID NO: 27835 - DNA, 441 bp, Oryza sativa
agcttaacacaatattgtgatggaacaatatttatatcttaataagataatataccagctaataccctagcacagacttatataggcaaatcaatctttataaatatacttcatccgtttcacaatgtaagtcattctagcattttccacattcatattgatattaatgaatttaaatagatatacatgtctagattcattaacatcaatatgagtatgaaaaatgctagaatgacttatattgtgaatcagagggagtatcaaactatgagcggttagcagtttagatagcccagccgataccgaaataacttgatatagctatatggagtgatctgtctatataagtggcaaatatacataaaacttagtaaagaagtatatatattaggttagatcagttgaaactccaatattatacttaattataattgtttcaag

SEQ ID NO: 27836 - DNA, 420 bp, Oryza sativa
tcgtaatcatattaagacttatggtattttacattttgactaatatattaagtaagacgaatagttaaatgtttgtaaaaaaaaattagcggcgtcatatatttacaaacggaggtagtatgcaattatactaagtggggatgatttgtatggggatgatttgtatagatatatatagaattaccacgtagttcagtaataacgtatcccatgggttggcttcatggcccatatattttatttattaattaagccctatatatacgggcccatctgaataaccacacacaaacaaagatttcacataattttcctagaagagaaacaaacaaataaaaacaaggttttactacacgggcttaatgcgatctgcctccaggcccagccaatcaaccctgaaaaaaaggaaaaagtacaccg

SEQ ID NO: 27837 - DNA, 436 bp, Oryza sativa
agcttggattgattaacaacattgaaatatattgtgtttttatttacacgtcgccttaagaggtactaagccccagttctaaactccaactctaaacttgaatttcctcattttccggtatcatgcttccaaagctattaaacggtgcatttttttaaattgtattatataaaagtttctttaaaaactcaaacaacccatttttcaaatctataattaatgtattatgtattaattgattgctccgggttttttttttcgccacttaaagagctcagtacttatgcgggaactaacgaaacctaaggagtaccaaaattggtacctctggagtgagccgttcaacgcattaaaaacgttgttcaatatatgatcattttacatatttatgggtgcacatttatcaaaacatttaatattccacaatttttacatg

SEQ ID NO: 27838 - DNA, 419 bp, Oryza sativa
tcgagatagtgctacttgaagtttgatggaacaataaagaatttttggttttcaaaagaatgtagaggacaattgtattcattcaaagttaagaatgggagattcattttcctaactctgtatgtagatgagattctactggctagtagtgatgtcagtctactacaggaaacaaagaaattcttgtcctcaaactttgacatgaaagacctcggtgaggcatcatatgttttgggcatagagattcaccgagatagaacaaagtatgcattgggactttctcaaaaagtatatatatagaaaaggtgttaaagaaattcaatatgtacagatgcagtgctacacctgctcctatagtcaaaggcgaaaagtatggggcatcgcaatgtcctagaaatcagtatgagctcaataaaatg

SEQ ID NO: 27839 - DNA, 440 bp, Oryza sativa
  unsure (1)..(440): unsure at all n locations
agcttcgagacagnggtacttgaagttgatggatctttaagaaattgggtttcaagagaatatcgaggacaactgtatttattcaaagtttaagaatgggagaattattttcctaattttgtatgtggatgacattctactggctagtagtgatgtcagtctactacatgaaacaaagaaattcttgtcctcaaattttgacatgaaagacctctgtgaggcttcatatgttttgggcatagagattcacccagatagaacaaagtatgcattgggactttctcaaaaggcatatatagaaaaagtgttgaagaaattcaacatgtacagatgcagtgttacacctgctcctatagttaaaggggaaaaatatggggcatcgcaatggcccagaaatcagtacgagctcaatgaaatgaanacaaagccatatgcgtcag

SEQ ID NO: 27840 - DNA, 415 bp, Oryza sativa
  unsure (1)..(415): unsure at all n locations
tgcgagttggcatacccctgagctntgtggcaagacgatgtgatgtttgtagctgcaatttcctccatgtagctctctatgaacgctcgcagttcgtccttattccagtgagtgtgccctccgccagccatctaaccacacaagttgagcaaacagaaacaaacctcagaaactcaaatctaggtagtagttacctttcttagtttgtcggatttgaggaggtcccaatccaacgagcgcacaaccttcttcggcgtgaggcagcggatgaactaacagactgcttcagggttgttggcagctacggatgagagcgcacgagcgatgagctccacatcgtcttctgcagtggctccagacacaacgtcgaagatgtacaacttgctagaatcttggctcgattccaggtcagctg

SEQ ID NO: 27841 - DNA, 428 bp, Oryza sativa
agctttagttgcgccccaagcgtattatgtttttacttgacctgagcacttcgctctatattatgattcaagttgacagaccaaaagaaaacgaaaccgaacctgcatgtttttgtcgatttgcctgcgccgaccctaatctaaacattgtgcgcgttgatccacactgctctagaattttaaagactacacgaactcggttctagtcaagattattactaacttcagctgtagagccttcagtcatctgatgctcagacaatttacacgcacagggccctgcatcaatcttcagtctcacggccaagtcgatcgccatgtcgctgtgccggacggacggtcatttttgataccatattaaaaacaacgacaggaatgtggccgaaaatatctgcggatttcgctttccagtggcccacatctgcact

SEQ ID NO: 27842 - DNA, 433 bp, Oryza sativa
  unsure (1)..(433): unsure at all n locations
agctatgaaatgcattgggattggtttatgtgagagttgttntcccccttgtgcatttgttgcattttgatgtatagataatcagtacctggttttatttccattgtaggaactatttcggatgcaatggttcttgtgaacgagcaccagacagaggcaattggatgtgccactgtggcaggattcatcttattgagaggtacatttctggtgttatcgtggaagcttacttttatcgtggatgtgccactgcttttggctgtgcttgtatgaggaatcatctggacaactcataattggttaattgctttattgtacttccattttagacacgttgcagatgtatttatctgctttcactgggtgccatctcataaggttgatctttgacatgtttattaaaaaacgcaaggttatgctatgagcctggata

SEQ ID NO: 27843 - DNA, 406 bp, Oryza sativa
tcgcctaagtgaacctctagctctgtgatcagtggttgcttttgtaagtgtaacttcgcagtgcacgagtgagctcggcaccggcgatggcagaagcgggtatataaggcggagcgagaggggactgcgcgacacgtgccccggtgaggtggacacgtgtgcctcgggtgagtaggctggggctagtgacacgtacgtcgcccgggagcgtgcgaatgcgtggtaagcggacacgtgccactagcgacgctttgcttaattttctcgcgtgttctgctgctgcaatgttcttgtctcggagactcggatctcgaaattggaattccaacgacgtgtgctctattatggtcaggaactacggataggatcatgcatcttgttcgttgaagccagaacaatgtttggt

SEQ ID NO: 27844 - DNA, 385 bp, Oryza sativa
  unsure (1)..(385): unsure at all n locations
atgtatagacggttattttttccacctatatgcctgtgaataccttgcattataaatcggttgaaatcatgaatctttattgctaaggtgagcctaattgtgatatttttgaatcatgtttatactatagtgtatgcttgttaactagttaataaaattatctccttgttattgcaaaacatgatcatgaattgcttttggtatactttaaagctctcgatgataaaaaacttagaaaataaaaatattgcatttgtgatatatttgttattatttctcttttgcattcttgatgaaatcattgtcaaagggggagaaacatacaaaatgcatgcttcttgaaagggggagaattgattngcttccattttaaaaatagttgatt

SEQ ID NO: 27845 - DNA, 436 bp, Oryza sativa
  unsure (1)..(436): unsure at all n locations
agcttcgagccgccgtgtgcaagctctacttttttatgcgagntcganctctcctttntcccggtctcctccctcgaatcgatcgttccgatcctctttcctcttgcaacttacatgcttatctctggcttttcccctgtgcagtgacgaagacaaggactccttcatgcacctcgtctctcgctacctgatcaggtagatggagattatagtagattcgattcggcatgatttctctccattttttagtttctcgtttcgatttgttgagtttttttgggtgcatttgtagggaggagaaagagatgatcgactggaacaaagttgagcgacccacccctgagatggtggtgccgtacgactcactggtgcangctccccgaggtacgcacgtngttctggatgcctccttcgatttcagcttgatgatccgatg

SEQ ID NO: 27846 - DNA, 413 bp, Oryza sativa
tacgctttcgacgtgattgagcagatgatacaggatcctttgttgaaatcctgatttagaagatgagcgacaatttttggtcaaaaaagaattatgataataacatgggaaattgatatgtaaatgtggactgcggtaggttgaattggtagtgatgattatgcataataaatggaaagaaatgccatacatttggaaaacaacagggtagacaattagaacggaaaaaaaaatcaaaacaacaaatattataccagcagactgagtaagtagtcttcgacgtatagagcgccttgatggcaaatgaaaacttgtatggaaatacaaacatgggagagggcgtcatcagccagcagaacaacgccatcgctaggaatattccctatgaaatagatatggcacaacagaatcat

SEQ ID NO: 27847 - DNA, 429 bp, Oryza sativa
  unsure (1)..(429): unsure at all n locations
agcttatgcacactaagcggttcctccatatttctgaatggctgctcattaaggccctgacaagtgacaaggtcacagactgacagttacttcttgaggtcaaggaggttaatgtagtttatcangattaggttgcaaactgacaaggaagatattgtccgttgtgtttctactcttggtgtcaagtcgatcctcacaggatcacggtcgtggcattgctggtccttggtagaacaaggtanggcaagcgcaatgttgtgatctgggacctttcaaatcagatcctagtgattgtcccctggttataaagaactgcatgttacggttactgcatgattagttaggcataagcatgtgacgaggatcctcgtcgtgatattccgtccatttttcaatgttgatcaagcgtggcagatctcctgctgatct

SEQ ID NO: 27848 - DNA, 425 bp, Oryza sativa
tagcatcaacaaatccaaagagaagctaccatactcttcattccatttcagcacacaacccttagtatacctccgtctaccatccgaatctatggtggtaaaaccatgaacctttaactctatcgagaacaacagtgtactgacattggaatgaaatcaagtcaaccacacatggaatgcacagaaaaaaaaacctacacatccagctcacagcacatcgaatcgaaggaatcgactaccttaccttgatttgggctccatcccttgcagtacgtttcctacccctccatggaaagaaagagtcgtcgccgctgacgccgtagacgccgtcgccgccgacgccgaatacgccgctgctgccaccgtagacgccgtcgtcaccgccgccgaagatgccgccgcagtcgtcgtagcccgcgccgtcg

SEQ ID NO: 27849 - DNA, 433 bp, Oryza sativa
agctttatgggattcacactttctctgtcttgtgtttctgtagtagcacttgcatttttctacctactggttcacaggcgtttaaaggctggtcaacaaacagtaacataccatgacaagaataactaggctattggtatttagttgtgagataattatctgtaaatatatgcattatcatttttttttgtcaaatccttctctttgccttcctagggtatggatatttagataattttccattttgatgtcaaatccttctctttgcctgacacattcaaagatgactgtatttgatgactctttcatgcttacatagctacttatgattgttctccaaagcacagtaaaatatcgttacatccagaacatatttgatatgccatgtcataatttctgcaaagtaatccatacttctgctttatattaatat

SEQ ID NO: 27850 - DNA, 434 bp, Oryza sativa
  unsure (1)..(434): unsure at all n locations
cagctnggaagagaggcaaggttgtttgtttatctttcatatggagacattgtgaaatcactaagtgatttatttctttctaagtttggggcgaaaagagacttgcgtctctgattcgactctaagagatgtttttcaacagctcatttagtaatgtaccgacctcccgggtcagatcattacttctcggctcccaaagccatttcacttgattaatcggctcccagagtccagctgcccagcatcacaacaatccgcttccactcgggaagcctagtctatgatgcccgcagacatcccgaatcacacagattcgtttctgaccactcagttcgtccatctgccacataggctgattctggttacgattcccacaccacaacaactgttcacaaagcacaggcaaacaaatctacgcaacgggaaccacctca

SEQ ID NO: 27851 - DNA, 412 bp, Oryza sativa
actcagctttacagtggcgctggaaccacatatacatcatgctaattttctaactatccatcacacgacagatatttgggtccaaatcacacagattttagattagttggattaggctcatttgatcacttgattagaagagtctatacatgtatcaacatatattaattatatatattgcatatatcttatttggtagatctttacattggaaaaaatattttaccaacccatctactaaaagttacagtgttattacactatatgtacagtgtaatttcactatagttacagcgtaactatagtgtaattacagtgcacttacatgtcatatcaactaaacttacaaatataattgtagttatataggattgtaattttatattttaaagggaaataacaggacatattt

SEQ ID NO: 27852 - DNA, 437 bp, Oryza sativa
agcttcagatcattagcatgccttattgcttactttctggtccgatttgtcggtccttctctgccttgaaatcacttgttgtgatagagctgcactacaattatttgtccggtccgattcccgaattcttggccgatctgtccaaccttagtgttcttcagctttcaaacaacaacttcgaaggatggttccctccaatcatcttccagcacaagaaattaagaggtattgacctcagtaagaattttgggatctctggaaatctgcctaatttctctgcagatagtaacatacagagtatatctgtgagcaacaccaacttctccggcacaattgcaagttctatcagcaatctcaaatctctgaaggagttggcacttggagctagtggattctctggagaacttgcttcttccattggtaagctgaaatcttta

SEQ ID NO: 27853 - DNA, 366 bp, Oryza sativa
  unsure (1)..(366): unsure at all n locations
acancaaacatttgacctgatgtcggatgggttttcggacaccaataaaaaaactaatttcatagctcgcctggaaactgtgagacgaatcttttgagcataattaagcagtcattagcacatgtgggtactgtagcacttatggctaatcatggactaattaggcttaaaagattcgtcttgcgatttcctccctatatgtgcaattagtttttctttttctttatatttaatgctccatatatgtgtccaaagattcgatgtgatgtttttgcgaaaactttttgggaactaaacagggcctcaatgtagcttggaaatctttgaatgttggaaggctcgtctctccgtattctgtaactgatt

SEQ ID NO: 27854 - DNA, 440 bp, Oryza sativa
  unsure (1)..(440): unsure at all n locations
agcttctcgccacanaaacagaagtttgcatgcggtatttggcgattnntaaattgccgaacccggcaaagccggcgagaatcggatgtaactttttttgtagatgtccgtggatatattataagcctaatttcgagtccgtatgaaaaagatatgactggtttaaggaaggtcactcgaatcaaggttctatctcctttctagtggcggcaggatacaaggcaactcacaaaagctatcggcagcagatcaaacacaaatagaaagtgatttggtgggtgactgcgacggtggtgaccgtggtgatgacggcaaaattgatgaaggtggcgatgtgcggtggtggcaagaactcgaaactctaatcgcttgacactaagaccagcagaataacacaaccgatgtaatcgaagactcaacaagccttaactaagcagtac

SEQ ID NO: 27855 - DNA, 360 bp, Oryza sativa
  unsure (1)..(360): unsure at all n locations
gcagctancgcagttttaccggtaattgtttgttttcttgacttatggagcatgagaactgacgggcattacacgtagtcataactagatgattcccgcgctttataccgaaattactaagaattttcaatatatatttcttggtacatcaactggggtaaaagaaatcatgaatacagactattaatattatttgaacaacaaataaaccgtttatatggacatattgatagtaataattaaatttataaaaatgatgatgattataaaagtgggaatgagagggaggatatggaagttgcagagtgatcgatataaataatgtcctgtgtgatgctgatgagtgatattattatgtag

SEQ ID NO: 27856 - DNA, 433 bp, Oryza sativa
ccttaaaactaagctttgttttcaattgtgtacagaacaccagacaaacagatctatcttcttagttcatatctgagataaaaattgttaagtgaggagcaagataaaatctcttcctaacattagccactggctgagtcaagattggtaaatgttaaggatggctgcatttatacttttacaatcaaaatccatgatcttcatccagttctcgaaatctccaatttcctgtaacataattaaacggacgtttcaataaaagaaaaagtggcatacgatcaactaagggaatctacgcaaattgcacatcactatactattgaatttattatgttattccagtgcagtggtgtgcatggatacttgagaaaatgaacaaccaaaatacatcccattttgtttcaatattcggtgatatgagaacatgtaattt

SEQ ID NO: 27857 - DNA, 437 bp, Oryza sativa
  unsure (1)..(437): unsure at all n locations
gcttaattntacaatataccatcaaacaattctttttctttcttatataccatcaccgttagtgaaacgccgttaacggaaggaaaatgacaattttacccctaggataaaattgagattttgcacaatgccatattacatcaaatagtcttacatgataaaaagacatgctggttctatttttcatcaatgagaaaaaatagtggatcatgaccaataaaatccacatgttgcatgatatcctaagtgtaaaatagatattttctcttccttaacggagtttgactaatggttgactagtggcgatgacatataagaaagaaaacaagttgttggatggtatattattgaactaagttntgtcagtggcatatcgtaaaattcatgctttgacgatggcatagaatggattatctcatgatcagatcatttgatcg

SEQ ID NO: 27858 - DNA, 432 bp, Oryza sativa
tacatccgctttgtggtccaacaatatcttcatgggaccattctgtccttcagtagcagcaagatgtaatggtgtcccacagtcagataacgggtcaacataagctccttttgcaagcaatagttttaccattttacaatcacctgaataatgaaaaatccatcgagtatttaatacaaaagaggacaattgtaaattctaacaatctctttctattgcaaagttattgaaacccctttttttccagaagatgtgctacaaaaaccaataaaagaaagtatggcaaaagaccaagatctacacagatctacactttcagcaaaatgacaagccgataaacagggaaaattgaaaatgcgtaggaccaatggcatattttttatgagaatatgtattcctagaaattacaagaaaaccacctcataggaaaaa

SEQ ID NO: 27859 - DNA, 428 bp, Oryza sativa
  unsure (1)..(428): unsure at all n locations
ttacttcactgcctccgctctggagccatcatcgtgttattttaaatgcttacgaacggacgaccgatccagcgcaaactatcggacacttggacgatggacgcaccgtacaactcttttttcagattatgagccaacatgcatattgtctctttntcaataccaaaacctttctctcacataagatagcacacatactacttttgccctctctcccctacacatgcatgcattntttttaataagctttaaatgtttttttccaataatcatctatcaaatttgtgattcgattacaccattaattcattttaattaaatctgtataataagatatcacatgactatattctgatcgaaatattttatttttatttttttttgcaataaatgttgtttaagattttcacattatattatttatatat

SEQ ID NO: 27860 - DNA, 424 bp, Oryza sativa
agcttttccctgtggatgcaacgggaagagtttctggtcacttcgtcggtgcagccgccggccgcctccgtcgccaccaccgcgttttcatcgccggcgccgtcaccccacgccttgcaccgccgcttgcagctcgccaatccatcttccacgtccttctccttcttctccggtgcctcctatatacacgcaaaaaatgtctattagccgggcagaaatgtctacagattcatggattattaaaattcggttaatttgctgattaattactttggtttcgttagcggtagcgggcagcaaggaagggtcgagcgtgctgagggtgaggagggcggcgcgcttctgcttctggcgctcgcgggccttgtgattctggaaccagtagaagacgttcttgccctcgatccggccgtacttgccgagc

SEQ ID NO: 27861 - DNA, 442 bp, Oryza sativa
agcttcttcctcaggtccattgaatcaacctctctgaaaaaattaaatcagaaatgccacttgagtttgatgaatattagactgataagcttagcatgccaataacaactacaaatatattatgctacaagagtcaaataggtttttcactatgatcttttacaaaaagagaaaaccatatcctaccgtatagggtagttaaccatcaaaatgttgttctcgcgacaagaattgttgattgcctctgaattgattccccaattggtgcgctcactttcactttgaaaattcagaacagcagtgataccctgaagccttttgaaatatcagaaacttaatttgataattaaaggacacgcaaaaagcctttcgaagtaccagttatgagatttgtcattgcatatgtgaggaacctaccatagtctctgatagcattttcaca

SEQ ID NO: 27862 - DNA, 287 bp, Oryza sativa
gatttaggaagcacccaattacccctcatataccacacggtgtactgaccgaacacggagagcctgactgaggtactttaggtaactggattatgttataattataatgaactggggcactaactctgaactccccgggttatattacacagctgcaaaattctatggacaatatcacccctgcagcatctgccaatttgcgtgtaagacagatttagaatcaaaggctgaaattaagctaagtgatatttctccatcaaggatgactgagcttggacaggtataaa

SEQ ID NO: 27863 - DNA, 347 bp, Oryza sativa
aaaagatatgatttatggtctcacagtggggggtcccaatgacgcaaggtacaacgaatggatggacacaggcccttccatcgaccaactagcttactgtatcaacaagtacaaaaatgctgtctttgccaaagatcctaagttggatcacattgagatggaggagaaacagaaggtattcaacgcatcatctacaaaaatagcacaatatctattctctatacactgattgcaatgctagattacgaactaccttctgctacatgaatggaacagaaataaaatccttttattagggttacaaattaaatgacatacgccctgcttggccctacattggactatcg

SEQ ID NO: 27864 - DNA, 430 bp, Oryza sativa
ctgcaagcttgggcctttgaagaacgccttgtgtcttgctcctcccacgcagactatggttccggatatcttggccatggtgccccgttctctgacgttaactctttcctgcctgatgatgagttaactggttactacaattttgggaagatatattttgcttatgcataatgcgatgtatttggtacaatgtgctacttttgccaagaaaagaattctttgatattaagaacatatgtggttcccgtccacaatttattacagtttaccacatctaatgttagacaagtttttgctatagaatcgttgcttaggttctactgtcgtaactttgtgaggtggctcgtgcgactacggccgtgtttatgttgtttggcaaaaaaaaaattttgacgtatacagacacccatttgaagtattaaacgtagac

SEQ ID NO: 27865 - DNA, 424 bp, Oryza sativa
  unsure (1)..(424): unsure at all n locations
ntgtgtctctaagagcaagtatagtaagtcctatttttttgcggaaccgtttcccacgtcatcaaaatcctatgtggcggagtgagaagagaagagagagaacggagcgggcttccatgcgctaagccgccgcttcgttcctccccttgatcccgtgcgtctctgccgccgcccccaacctctctttctccacgcgccaaatacccctccctcccgctaaaatcgagtcctcccgctccaatccgtcatgtaaccctcccaaatccactcccatgccaccaaattcgtccccaaatcgcctcctctcaaaccctagaccccaaattcgtcctcgaatcacatcaagatgaggcggcagtccataaggatgtttgcgccggcatcattggaggtcccgccgccggcactaacaccacattccatg

SEQ ID NO: 27866 - DNA, 388 bp, Oryza sativa
  unsure (1)..(388): unsure at all n locations
agcttatgcagagatcattattaaaataatttgactacagnttgggtcttatgtctgcatcacaactggcatgatgtgggtattctagattaaagcatgattatattgtttgaaccaagacgatatttcttcagactggaagctagtacttcaggtcatttttcttccactctttacctattgctaatttgcagttatgcaagtattaatagtcataattttttcaattacatgagaaattaacagttactctgcttccatgcagaaattggaccttcatgggatcatcaccgagaccggaaaacggtgcatgtctttcaaccagttgcttactatacccgagcaggacgactgggaatacagcgatggcaaatcaaccacttgcgtc

SEQ ID NO: 27867 - DNA, 257 bp, Oryza sativa
catacccaccatctgatcaatataagacctcaaatcatttgatattcgcaccggcttgtgccggtttgtaaatggaaaaaaaaatctgatacttgtgatcacactaaaaatccgccatttaaatattctatgtataaaaataacccgatcagtgaaaatacctccttaccctttttttttttttttctagaaaaaggtgaaatccataaaaagtgaccagaaaaaaaagctatgcttatttttttaaaaaatggtaa

SEQ ID NO: 27868 - DNA, 419 bp, Oryza sativa
  unsure (1)..(419): unsure at all n locations
taattaaaagaatagnaggagctaaactattgtcctttgtgtatataaagacacgccttctagtagcacacagcgaagaaaaatctgccctttttttatggtgcaaatggagtaatctactcgagactgttaactagtagttcaaattaatggggcaaaactaccaataatgtgcaggaaactacaaatatatatactccctcagtagaaaagtatattcttggtaaacgatccggggaatgggtaagacaaggaaacatgatggaaatgaatgctgagaaagttgctgaaactacttgagacttgagagttgagaggagatcgaccgagatctttaccttttacgtgtgttgtgtacgcgactatctgcctccagagaatatcgcgcatatatacagtctaacctctccctccgtatt

SEQ ID NO: 27869 - DNA, 409 bp, Oryza sativa
ctatagatactcaagcctctatatcatacaactaattctcgatctgcgtaaatctttttattatttataactaccgtcgaagaccatattctactgtcatttagcttcgaaaaaaatgtcattttggtttatatttctgacttttgcgtgtcattcaagcaatgataaaaacatataaaataatgataataatatagattttatcatcatgcataactttataatatataaattaggtctaccatcataacagtaaaatgaatattctatgagtaatgtttacacaatatgttatttagaaagcataacttatgcaacacaataagcaactataacatctaactcacactactaatatgtgatgaactacctctttagacatttacctataaagaccctatctcctgta

SEQ ID NO: 27870 - DNA, 460 bp, Oryza sativa
  unsure (1)..(460): unsure at all n locations
agcttatgaggagtagtttctttaccacggtggggagcttgtgcttggcggcggcggcgctcctggtcccgctggcgctggatggacatgaggcgcatcatatccagcatccccatggtggtgaggggatctctctccgccggcctttcgtcgtcgccggtcggcacttctcaacgtcacacacaaatatggggaacgagagttataatttgtaggcaagatagatatagatatcagagttataattttaggaaggagcccaagcagtatgcagtagcagagttctgtttcaattaggatgaggtctccctacgacaacggngaaggaacggaacgtgtggaaaactaaaaatatatttatccacggactccctacttccaaanaaaaaccaacttctagttataaatatagacatagtgtatgtctagagtcatagcaataagttgatttttttatgaa

SEQ ID NO: 27871 - DNA, 268 bp, Oryza sativa
  unsure (1)..(268): unsure at all n locations
tagcttatctttctagatgaggatgaggcattgtatctttattgtggggaaggangcatctgccactctcctcggccctcgacaacggatctggcaccgcctgttccatgggcttccacatctgatgcgtacgagccgcgccgcatctctgtgggttcacgcttgcccgcccgaacggacataatatgaatggagagtggattcggtcaaagccaaactaccatgggcgcggccgctcggggattgtgctcctcacctgacaagggca

SEQ ID NO: 27872 - DNA, 314 bp, Oryza sativa
agctacgatggcgatggcggcggcctggtcttctgcgctttctgcggtcaagcaggcagcggacgtggcgtctgtgtccaactcggagggggacgcgctgtacgcgctgcggagcgcgctggcggaccaccagggcgtgcttcagagctgggaccccaccctcgtaaactcctgcacctggtttcacgtgacctgcgaccgcgccggccgtgtgacccgcctgtgagtacacctgccggctcctacaccgaacgcggcgtctttgcgactgagctggctactaacctccggctatggtccctccgttgtgtact

SEQ ID NO: 27873 - DNA, 359 bp, Oryza sativa
ccacacttgagaaattgtatagtacccgaccacaagatccctttatgtcactttcgtgcaaaaattattaaataaccctctcatttcagaaccttggactcttgacttatagaagaatctaatgctataggattatgagcctttgatcgtttgaacaaacacctcttgtgtggccgcactccttgagcatttatacccccttgctagtattaacccaaagaagagtacgaatagtaataggttctaagaatatatgtaggagatcctttaaatctttccctagtgctcatggtattacaatcacaatattatatgttgaaaggatctttctgcaaagtagcaacacctttttgtctttc

SEQ ID NO: 27874 - DNA, 474 bp, Oryza sativa
  unsure (1)..(474): unsure at all n locations
agctngcacttattaagcccgaaggatgagtaacatatggaaacatgtgatacgtgagagtcattttcaccatttctttggattagtcttttntgacaataaagaagtgaaatatgaatagcttttggcacagactattaacaaagtttttttaatatgtattaaaaataatatctcaaaataatgtgtttcctgtgcagttgagatcaatgctttacctcactaacgttactgatggcataaagagtagcaccagcaattacaagtatatcacctttaactgggcttgtaccccctgcatagaacaacatgaccatgaacatttcagttgtacttcatttaggatttaactggtcataaagatgacttccaaaattccacgcacaacttaaattattctccacatattcgtcaagcatgactggagtactcgtattntttaaaaaaaatccattaatctagcaacatattaaa

SEQ ID NO: 27875 - DNA, 329 bp, Oryza sativa
tgcaagttgtgcttcctggacttgtggataagacaccatttcttgtttttctctgagaggagagaggcgggcattcacaagccaaagtgggcaacggctttaccctttgtataccatgagtcattgcggagcaccatactgataaactgcgataagtccatgggggtcgctggggagtacatgcctctcgttgtacacggggtgactatgatccatgaacaaagcactgtcgcgagataagttgcgcagggggtattgtcacagactctattctggttctttgtagtctcacgacacatggtagacatgatgttgacgctgactcttgt

SEQ ID NO: 27876 - DNA, 331 bp, Oryza sativa
  unsure (1)..(331): unsure at all n locations
atctggcgctctaatacccgaattttttntatccaagcacaagcaacacagtattttcaaatgtgagcacgccaaacccacacttttatttataggcaagatgcaacagtgagtctattccatcgaatgtcaacaagctaattggattaaggatggcaattgtgccccgttacccgtgggtaaaaaccctattatgattgggtttgttctccattctatatctatgggtatcttattgggttaaaagctacccatgcccgctttgcccgattacccgtgaaatcttacttatatgtaggctacgagcaaaatccattagaatacataagcc

SEQ ID NO: 27877 - DNA, 450 bp, Oryza sativa
  unsure (1)..(450): unsure at all n locations
agctcgcacatatgtatataaataggttactttttctttgnctatttgnaaaataatattcatacaatgtttatttcaccaaaaaaaaggagtagcttgaaatatgatttattgatatttgaaaccagaatatgtttgatagctatatacttgacaattatcaaaaataggttggaggataatttgactacgaagacatgtgatttttgaacataagcagaattttattgctacttgaaaacataatctatttgatagttaaatattaacagtaataaaatagattggattatagtttgaccacagaaacatgtaacattatactttacttagactcacaattaaatcagagtaacanaaccgtagtctgttcattgngatagaaaatcagatattgagatccttcagtcttttttttctttntggcagaacacacttaaacatcaaact

SEQ ID NO: 27878 - DNA, 231 bp, Oryza sativa
ggagagaaagaaggacaggaaaaaagggaaggggaaaaaggaaaagaaaaagaagaataaagaacgaagacaaaggggaaggggggacaaaaagggaaccagcgagagaaaaaacggaaaggcagggggaagaaaggacgagcaaaagaattatgaagaaaaaaaaaaagagtgggaatgaagtgaaacgagggggataaaagaaataaaaggggggacaaaaaaaaaaag

SEQ ID NO: 27879 - DNA, 252 bp, Oryza sativa
aacagtagatatgagaagggtcgaactgtgcttattttgggatggagggagtatttaatacatccttcatactaccaggagcgattacctaattacctgagtgattgctttttgacaatctaacgtgagaaatgcaactattaaatatgggcaatatagtaaatcttactttctgtaatctgtcccaccaatcttaacaaggctggctttccatgacagagggagtaagcttctttgtattcctcacggaaa

SEQ ID NO: 27880 - DNA, 159 bp, Oryza sativa
ctagcttcagcagctagaatgagagctctggagtgcgcacttacagagttgagaacttgtatggttatgacacccaccgttatgagaaacagcagcccaattgctacaatggctgagatgcttaatatatattttcttgtgacgtaaggcatttggtgt

SEQ ID NO: 27881 - DNA, 311 bp, Oryza sativa
agctttatatagcgggcccgttgttctttttgtatatagggcaacgcgagggttgggttctccagccattgatgacatacaatatcaacgcttatcgcaccgtatgtgagcatttttattgaccaatattatggcttaggctgattatatagtgtggacaataatcacgcggaaggtagagtctctaggcatgtatatacctggatttataccacatatgtcatatattgcctggtgaggtgaaaccatgtgtctattatggactcttgcacatctgttgaaccagtgtgcgcatggagcatgcccaatac

SEQ ID NO: 27882 - DNA, 421 bp, Oryza sativa
agactagcctccatatacttccatttctgttattttgacgctatagccgactgaccccaagtggagatgggacttcctcttgagggcaatatctttgtttctttccatcatcacctgcccttgttgacctgtcttgtaagcaacgaacatctcccagtgatcccttaacttccggattacgtcgcaattccgtgtctgccccttgaggatgtatttcccgcacagatctcccttgaaggtctcgaactgttcttgcattttgttaagaagccactgtttcactatgttctcttacccccagaaacgtgaaccttccacattgtggacacaacatcttttcttgattcccgacatactgtcttcacccccgtcacttgtttgaccatcaccttttgacggcacgtatcttcaaccaccgtgt

SEQ ID NO: 27883 - DNA, 401 bp, Oryza sativa
  unsure (1)..(401): unsure at all n locations
agctttgtcggagcttataccactgtaatatggtgatgtatgggaagcaacaccggttgccatagatgcatggtgttctggatgagatggatttatttctgtttgaccgaacaaagaaaacctcttggatcatgtataaggcatatgtgagttctgggcggatggtcgaggtcaacacaatactctgcatgatggggaagcatggctttggattcctcccgtggcgggtatattcaatgacatgtgagtaaatgccctgtgtctatatcctaattgactttctcattgatcgatctacctggtttacatagcaaatncaagtacggctttgcgttggcactattagtgtgactactctctagattttatgacatctgattaagttgcatatagaccattat

SEQ ID NO: 27884 - DNA, 459 bp, Oryza sativa
  unsure (1)..(459): unsure at all n locations
gtacattcaagagcttggaaaccatgtcaaattcattcctgctgatttcacaaatcttgttccaagcagcacggtatctctcttcccctccctacagttaatatatttcttaggcattgcatgaggatgataagatgcaattttaacatactcactttctatctctaatggaatgacacgcaaagtgttttcatgtcttccccccccccaaaaaaaaaaaaaaacattaacatattccagatccaagaacgtgcactgacctgaagtctaacgactgcttgttgaactctgtctttaaattctgcatcaccatcaaagcgggtcttggacgctctataaacagtctgtaacagatgaccaaatngtacatgatacaaactaagtgctactttgcacctttggcaaggataatacttacacgaagaaataaatctaattggacacattgaaccacattgt

SEQ ID NO: 27885 - DNA, 423 bp, Oryza sativa
  unsure (1)..(423): unsure at all n locations
agcttgtccgtggcctgaaggttctctttctcaagagatgcatcgtgcaagaaccgggttgtttcttgatgataaacaagaacaatgttatgagggccagagagacaaggcttangcttgatcaagggtgatgagggtcgttcagtttcatgaagatggacaatgggttcagaagaaatgaacgaagatacaaacatcacctccttgtacgcctcatgcttgggatgagcctctttggtgctggaattattcagggtgtttccatagtcttcataaagatcacccctgaatcggaatggaatttcctgaggatgaatttcttcttcttccggctgcagcaactcgaatgaggattcagcagttgagtcgggttccgactccacatgcagaggatcctcatggataatctcgacctccgagatg

SEQ ID NO: 27886 - DNA, 388 bp, Oryza sativa
tggtgagttcataattgccataatcttacgatgtacttacagtacatatatggctacgatagtcaaaccaggctcgaattcgaacacaactgcaaaatacaccagcttatatatacaagcaatattgcgcaagtcaagcacacagacagaatcacagtcatctaagggagacggaaaagtgaaccataagactcacctggatctactgtattcatatataccaagctgctctaacatgccaatttctatcttagcagcatccctgtacttcttaaagcctctgatgagcttaatggccaccatttcttttcttatcatatcccacacatcaatacctgaccaaacgcacccgatgttattcaaaaagtttagatgcatatactcgctc

SEQ ID NO: 27887 - DNA, 464 bp, Oryza sativa
  unsure (1)..(464): unsure at all n locations
agcttgcattaaccacctaagttccnctgtcttgctgagtacttaagtaatcacccttgctctatataaatatagttctgcccgctctgaagatgaagttgaagtgaagtgaagattatggttttgtcctagttccctgctgttgcctgtggtgttgggtgttagaccgttggttctgctgctgctgctgctgctgttggtggtgtttgcctcgtccgtgtcgtcggatgcattctcgggctgtctaagctgcaacctaagttaaggtaaataagtcctctatttatttaaggattgcaatgattcataattgtcaccgtgggtaccagcgctatgtcctgcgactggtactgagatcgcggctccgtatgaagcggttcgcgccgttattcctacgacacgctcctatcatgtgccattgtacggcggtgccaggttgggctgtgacaactatgttgaaaaag

SEQ ID NO: 27888 - DNA, 398 bp, Oryza sativa
aagccttgaagaacactcccatcacccctcacagggaagattctctttcttttctgataacctcgttggagacaggtcacgagcacaaaagatcacaagcctccagaaacaaagcaacaaacgggaacatcgcaatcgtatcaacagtacatgaaagaaaaatgacacagaccaccaagagaagagaagaaaataattaatccacctgatcttgtcccccgagaagagacctattttccacttccacttccccttttcagatacacacagccaagaacgaagcacgaactttagattggaggctggaccgctggctggagccagcaccggactactactactggaagcagtgagaaatgggaagccctcttctctctcacacacacacagagaatccg

SEQ ID NO: 27889 - DNA, 464 bp, Oryza sativa
agcttaaggctagtaatggctggtccgattatagttttacagaacttcttgagctgttaaaggacctgttgccagaggggaaagattatgatttcactgaaatcacaaaggccttaaatatggcttggggcccatatgtagaaaatggtggtaggcacaaggagggcaaggacgaactctatcataacaccaagttcgcataagcacaacaggtcagagaccagggtggttttcaataccaacattgccattctaaacgtgctaacctctgatttatcaaatagaaaggtagagatggcttgaagatctcacccatcaatcccccgctatcagaggcgaagtgtgcgccttcattcttgcagaaataatgaacaagagaggacgttttcacgtcaaatagactcatgaacttggctagaataattcttgtgttgaaaaaaaagttgtttatgattcgacttatg

SEQ ID NO: 27890 - DNA, 423 bp, Oryza sativa
agcttgcagagttatacatggccagagtggtatgtttgtatggttgttttaagaagatagtgtcagatagaggtagccagtctactttgaagttttggcagatattacagttagagatgggtacccgtatgaatttcaataccgcttatcaccctcaaacagatggacagacggaaagagtaaaccaaattttataagatatggtgagagcctgtgttctatatattggtggaagttgggataagaatatgccgtacgccgaattctcatataacaatagttatcaagctacgttgcaaatggctccgtatgaagcattatatggacgagagtgccgtacgccgctcctttgtgatcaaaccggtgaacagtcagtttttgggacagacatattgcgagaggcggaagacaaagtgaagatta

SEQ ID NO: 27891 - DNA, 321 bp, Oryza sativa
  unsure (1)..(321): unsure at all n locations
nntgttgactagtgcaattatagccatgaacacacatctgttccatttgtatatattgnactaatatgggctattgtgttgccccacagccaaacaattttataatctgtggcacaattttatatgccgagatatatcctcagaattaaacaattgttcttgttggcattttgttattatatcaatatcatggcgattactttacaagtaagtacgtgttaatgactatcgtangcgtattatcgtggatataatggtttgaaaaggacatgatattattcatataaatatagagtataaattaatacgactagcgtggca

SEQ ID NO: 27892 - DNA, 158 bp, Oryza sativa
accacttaagacgagtcacaaagcggttattttttcttgctaagtgaagcgacgagggacgaacaaaacacatatgtgtcccttttttgaaaatccaattgatagtgtgctattctaaacatcgaaaactcttaatccaaatattgctctgtaaaata

SEQ ID NO: 27893 - DNA, 468 bp, Oryza sativa
  unsure (1)..(468): unsure at all n locations
tgtntgagtcactcaggtaagagaaacactccatttgttttcatattttaagacattgcagttataaattcagaacataaactagaaaccagaagctagaaaatctagcttctaccgtattctcaaaatgtagctaccaaccagttatttctcggaatcttaagctctccgaacaagccctttatcataataaaacactgttgtactctctagctgaagctgtgcgtgcagccttgagtccttgacagctgacgttaaacattccaacggcagatggcatcatggcatacaggcaaagagccaaagatgcaggctgagcatataaaacccttgctggtcaagccgcggcatgactgacaattgcacaaacatgcgtcaaagaagtacaatgtcaatgaaagatgattacaagtcactgggtaactcgagaattgatggctgtgacacccgtcttgatctaggcacaag

SEQ ID NO: 27894 - DNA, 385 bp, Oryza sativa
  unsure (1)..(385): unsure at all n locations
agcttatacgtgcacacagaactgtgagtttttgttgtccatctgccncccattcacgtgtttctttcgaggcctggtacggccgtgatatgcttattagtccgggccctgaataacatgcttatatgggacgtgaggtgaggtgacaattgttatcaagtactcactcatttatatacgtacgacgccgttaacttttcacataaccgttaactgtttatctctattcaaaaatctactataaatatgtagatgaataacgtaacattatattttatttgattatgaagcacgtcatatagaattatatgatatctatataaagaaatggaactaaacaatcactcgaacgttgcgcgaatagtcaacggcgccatgcatttta

SEQ ID NO: 27895 - DNA, 466 bp, Oryza sativa
  unsure (1)..(466): unsure at all n locations
tccaatctcctactaccgttccatccaaactgtgtataatactatgtacttcaaaactgtagcttccaacatcctgcctctttctttcaacttatgagtattgtcattgagcaacacgactatattttcatgctctcataacgttccgctgtaaataacctataaaaatgaattagttttagagaagttaaaaccctgtagtttctgcttaaccatattgctcaacacaaaaaaaagctacaatacccacaaaagattttataatttacactgggttgtatatcattcatgccaactaccacaatgattagcaacaccagtaggcggttgtgcttcataggttctaaacggtaaacagaacattccatgtgagtaacactacttntcattccactttcttttcgccagcggccaaattagtatatatagggtaaattaattagcacaactctggataccaagtcat

SEQ ID NO: 27896 - DNA, 321 bp, Oryza sativa
  unsure (1)..(321): unsure at all n locations
tgcgagcttcatatataagagtagtcttaatattattatctgccactaacacaacaaatgcttaattcgtgaaatggtaaggaggctacttacgcctcctttaatgggtgagctagagcactagctcatgcttgtccacctcatacaagagatagcaaaaagtctacctttctcaaatattgttccatagcacattcgttaaaatgccttgggttccacaattcctctcacattttctttaggagcttatctcttgaagaagagatagagnattctctctccttatcttctatgtcttccacatcagacacaaactgatgt

SEQ ID NO: 27897 - DNA, 423 bp, Oryza sativa
  unsure (1)..(423): unsure at all n locations
tagcctgtgcggtttgccaagggtgcagctctgacagtataactacattgctgtttgaaacaacataccctagcaatgtctgaaggttttaagatttccgaatctgtgaggcattcgagtaagtgatgcacatccaagaacactaagatactcaaggctattaattttactgatgttctgaggtaattcagaaagatagcggcatccttcaaggtctaacttgtgtagccgagaaagcctgcatatatttcgatgcagttcttggagctttccacagtaagataatntcagagtatgcagaagttgtagtttggatattgagctgtggatgactctgatatctgtccctgataggttgagaaatgtcaagtgaagagtatgtcaatttattagggccttcctgatcttagtggctctaaactg

SEQ ID NO: 27898 - DNA, 350 bp, Oryza sativa
  unsure (1)..(350): unsure at all n locations
agcaacaagctcgtgagacatgaggtgtaatgctacgatttcacagaaatcatccacggcggaagacaagttatgggcacatatccaaacatggttgtacggactatgtaggcatagactatatctattttaacaccattatctcataaccacaaacactcacaaactaaaggggctatcaatgtcaacgtagacgttttatgtcagccaaccatcttgtggctccatggaaacgtctagaaatgtaggaaagatctaccttcaatacaccgcttgccaagtgatatattcacctatctgcccgctgctatatagtaagganatgccgttctaccttgtatacactcaag

SEQ ID NO: 27899 - DNA, 395 bp, Oryza sativa
gctatactcacaaagaaggcgaagatctctttgacacttactcacctgttgctagattgaccacaattcgtgtgctactttccctaacagcttcacatggtcttctcgttcatcaaatggacgttaagacagcttttcttaatggagagctggatgaagagatctatatggatcaacctgatgggttttgtcttgaaggtcaagaatgcacagtgtgcaaattgttgaaatctttgtatggtctgaaacaagctcctaagcaatggcatgacaaacttgacaaaacattgacatctgctagctctgcagtcaatgatgtagattaaagtgtgtactatcgccatggtgggggtgagggaagtattctgtgcttgtatgatgacgacatactgata

SEQ ID NO: 27900 - DNA, 451 bp, Oryza sativa
cagcttactttagtagaacaattttactttttttttcttaatcgagaactctcataccgtcaagatattgccgaagttcggaattttaacatctgacactctgaaatcccagtcaggaacataaatcccatatacaagggacaggtagatcacaaggatgcaacatgcaacaatactggtaagtacacagaaccctcaattaggtgcctagaactgaaatctttcacaaatcatgggttacatgatcataaagctcgcataccactgggagaagtacatcctgaaaatcgagaagcccgaacttgactggttctgaacctttgcattcttcgttacgatctctcaaactgcaaccaccaagtatgcaagagcaatcctttggagaataccacaccatctcacgtgctttatgtcaactccataagacagatcatcatgggcacgggagtaa

SEQ ID NO: 27901 - DNA, 449 bp, Oryza sativa
  unsure (1)..(449): unsure at all n locations
tacgttntggtgattgattcctccgtttgatattaacttttatgtccaatgtactcaaccacttcccaattttgtaaaccacctcatcaacttctttacagtggactttcactaccttaaggtgttcagatattgcagctggtttccgcaatggattgtcattctcttctgtttgcatcatagatttagcttcctgtagcacgaaaataaatatcacatttaattaatcatgcacaacaactttaacagtgcagcagttgtaaaaacaaataccttggaaatttgaagagtgagcttccgtagaactggtgagtgttcaagaatacaggctagtgcccacaaattagacagaagacaccactcattgagtaacaaattcttcagcttgctaaacatagggcaccatctcanatcacttccaaaaataatctggataaagtgcaagcgac

SEQ ID NO: 27902 - DNA, 441 bp, Oryza sativa
  unsure (1)..(441): unsure at all n locations
ttagagcacctgcggcatgcaagcttgacacatgttctatgtattgtttgtatatcttctagcaaatagagaatcttatataagctgcagctgtcaaacaaaccatcctatattttactgtgtttagatccaaagtatggatgcaaacttcagtcattttccatcacatcaacatgtcatacacacaacttttcagtcacatcatcttcaattttaaccaaaatccacactttgccgtgaactaaacatagccttgaattatgaaaagttgtagccgtataatccagaaaataaattagaaaccaaaaatcgaggttcatatantttcatcggctgtttcttaaactggccaaataaaaccctagtattattctaagcttctttttcgtagtgtcaaaaaataagtggttcgagtcctccgcgtggtgtagcacacatgct

SEQ ID NO: 27903 - DNA, 410 bp, Oryza sativa
ttacggaacatcagactctgcttctgtgtaagcacgtcaagcttattatttttcttatccacaggattcatgaagtggggagctatgcccattctgtgaggaacttatcaaagattccattagttagacaaaccttctgagaattgtacatgtaccggcatttgcctttaatttgagaactaccaattgcaactcttgggtataatagaatattgccaatcttcttgctacgctatttttgtttgacatccaataaattctggaaataggacagaactttgcttgaatataaggttcatgaaatttatatcttctgaacgcaccaaatgtttactaaattagacattagccgatcatgatttggtgggctagactctacagggacttattgtggtgaacgctaagtgcta

SEQ ID NO: 27904 - DNA, 291 bp, Oryza sativa
tcaaatttttatttttatatcgaaccccaggagttaattcttcagatggcccaaagaactgcgctcatacacttagagaagcttcacactcattagaaatgcccgccccgggcaaaaataattccggtccaaggcagccctggtaatcggtccaaaccttgatttctcgaccccaaccactgccacacacacaacccttcctcggaaccagcattagccggactccgataccaagtggtcgacctcagcaacatcgcaaaagcggtcgggacaacccacccacactttgca

SEQ ID NO: 27905 - DNA, 450 bp, Oryza sativa
  unsure (1)..(450): unsure at all n locations
agcttgcatgattnttcgaagaactatttgtctccatgatcgtgctggacgatgcacgatgttgaagcgagcttgcaacaccccataagcacactcaatatctttctgtttcccttcttgttcccttgcaaacagcttgtgcttctctagttgaggagatcttatagactttacaaaggttgcccattccggataaattccatcagcaagataatatcccgtgttgtattatgtcccattgacagcaaattggatttggggagcttcaccttttattgcttcaataaacagaggggactgattgagcacattaatgtcattgttggacccaggaataccaaagaatgcatgccaaatatgaaggtcatatgaagctatagcctcaacgataatagttggatacctttggtcacctcgggtatattgtcccttccatgccgttgggcaatt

SEQ ID NO: 27906 - DNA, 455 bp, Oryza sativa
  unsure (1)..(455): unsure at all n locations
cttaaaactcagctgagtcttgttggtgttgtggatttgccaggagtttttactatgtcctttgccatanngattgggactgcccctttgtatgcccagattcctcatgatcgtgatgaagagaagtgccgagtcaaagtcaccttgaacagtaatagtgaagatatcccatcagtgatgttcgaagctggaggaggaaactacattcatgcatgtcatgaggtggcaaggatcgccataagagagctccgcgatcgctacagtgattagttggccgacactgagtatcgctaccatcctcaccaaccccagggaagtgaccgtggcagctaccttgagactgatgggattgagaatgatgctaccacaaggcatttggttgagatgctgtgggctatggatgaaacccgcgcggaggttgtgctagcagctcaagatcgtgaagaccggaatcg

SEQ ID NO: 27907 - DNA, 460 bp, Oryza sativa
agcttctcctgtgaatgatagcattatgctgttctgtcttcttatcacagaacctatcaaggatgctagtcactataacaatgccagctatatctctccagaatcaaaatgagcagccatgtttgtggattttagttcgctacttatcatggtgtaatcgaaagtttgcagcaatcatgtaattcataaatataatcatgtctgtaaacagagagcttgctatgtttagagatgattcatgttgatgatacaatgtaccgatgataagcaccttccctttttgtttaacgcagtgccttgtattcgtgtaattagggagaaatgtgtaatacagacaagttccctgaggattcgcttgaaagatgcggatatgtgatcatgtgtattattggttactgaccaacgagacctacggtctcgtgtcgatgaactatattctacctcgaataatcaccacctg

SEQ ID NO: 27908 - DNA, 397 bp, Oryza sativa
  unsure (1)..(397): unsure at all n locations
ttgtgggatcggtatcatcaatctgtatcttgattaccttttcgtgatgggcgggctttggcgcgtgcttcaccggatcatgtgggtcggcctcaacattatgcacagctctgttgattatggccaaatcgccctttgaagcggccgaaggctggagccccttgaccacgatcactcctaccgggccaggcatcttgagcttgagataattgtggcgggaaatggcttcgaacttattgaaagtcgcacacccgaagatggcattgtatttgtacgggatgtcgacaacgtcaaacattatgttctcttcgcgtctgttnttgcctgtgccgaaagctaccagcaattgcgcttggcctagaacttggactgactcaccgccgaaaccacggagcga

SEQ ID NO: 27909 - DNA, 433 bp, Oryza sativa
  unsure (1)..(433): unsure at all n locations
agctntattntgagtatgaatataataatcataatcaatttagtacatgcacgctgtatccaattcagtttaaaactgtacagttctttacattatagtgttagtttttgtttcactcttgccaatccagtttaaatacacttcttttttatgtttagcacatcgactggtgactgatatgattctagtatgtaaaacggtgttcctttttcctatttttctaatgcaacaatgttgagattgctnttgtctcttcccagtcatttgtaaagcataggcagtcattcccagtcaattntggtgcttgttgtttggtccataatcctaatcaaggttgcatcaacaggactcttcctgctggttatttggagggtggagagtctgcagcggaaggagccttctcggaaacattggaggaagcttgtgcagatgt

SEQ ID NO: 27910 - DNA, 450 bp, Oryza sativa
  unsure (1)..(450): unsure at all n locations
agcttaanatataactcagacacggatctatattttatttaacttacgaacttaaaacccgactcagatacgaatgacgtaccaaataccggtaaaaacatcttcaattnttataatagtagatattgatatttcagataatgacacggttttcagaacatatttttactatatattttattatatagaaaaatatgtaaatatttaattttataaagtagttttaagattgatctgtatatcatattatagtgtcttcagaaacaatattttaaaggtatctatatttaaaattctaattgtttaattataacattaataaaacgtaaatattatagaacggatcgaaagtactgaaatatcatgcaccagcaccaaagaanagtaaacagatcaatggtacatttcaatatcgcctctgtgtcttnttttatataacggaataaaaca

SEQ ID NO: 27911 - DNA, 431 bp, Oryza sativa
  unsure (1)..(431): unsure at all n locations
tcttctattcttattggtctaagctttccaacctcatcctctgatctcttgccnagtccactagttgtgatcgcttgctcccggccatcatcgactacgtgtgccaccttcctccacgccaatattttgatttccaaatcttccctatgttctccccctagctcattcaacatggactcaggatcttctagtaatgcctttttggtgataattggctcacacagcaacttcgcaacctacaccatacatcactcaatatataggaaccatatctacattaataaaagccaacatacaatatgaaagaaggctgaaaattaaccttctggagtacttcaagatcaagcttggaatcaagatagacggcaccaacaatggcctcaacaatatcagcaagcacccttggaccctcaatggtgtcaccactatat

SEQ ID NO: 27912 - DNA, 473 bp, Oryza sativa
  unsure (1)..(473): unsure at all n locations
agctntgcaactcgtccactgtgtacttttcttctgtggagtggaacggaagatacttcaactcagtgccggagatgtcaagcaatgttttatttgactcccaattcattgacaacgatgaagaggagtactttacttacactccatttgataaaacagtaattacaatctgcttaattgatgtatctggccttacaaagcagcttctctgggttgaagaattacaagattgggaaacggtgttcatcaaacccaaggcttcatgcgatgtttcctctgtttgtggaccttacacaatctgcaacgataatgcacttacattgtgcaactgcatgaagggcttctctgtgaagtcaccaagggactgggaacttgatgacagacgggaaggctgcacaagaaatattccactgggctgcagcagtaacanaagcacaacaggtttaactgataagttctttcccgtacctagt

SEQ ID NO: 27913 - DNA, 410 bp, Oryza sativa
  unsure (1)..(410): unsure at all n locations
ctgatactngngatgaatgcacgacactgatgagaagactatttgtgttttcatactatagacgtgctctacttgagaaatgggaacatctaaaacaaggcgacaaaactgtctagggagtactttcatgattttaaaatttgtctcacttatataggtgtacgagaatctaatgagaacacaatgactacatttcttagaaggcttataatcaataattcggctgggcttgttaatgagacatataatcatatacgccaatcgttcatgcttgcttgcattgctgatcgcacaattttggagaatccaatggagcccgaagatatgcttgtgcctcctaacactgatgttttgcacgaagttcaccactactctccttaatgagaagaacgcattgtttgagatgctct

SEQ ID NO: 27914 - DNA, 450 bp, Oryza sativa
  unsure (1)..(450): unsure at all n locations
agcttccncttgctaccttggttttgtatgtttctgaagactaatatgatcactcctgcaggaactcattcagcaaatggctaatgtgcaatacactgagaacatgactgaggagcaggttgatgctatggcagggagtgaaacattgcggcttcaagcttcatcactatttggatcaacaagatattctaaggtcatgaggcaacatttcttcattcgcaatgccatgttgaagtccattcactaaagaaatatattttattttgtaggttctgaccaagtctacaaacaaattgagggattctntgcttccaaaagaagaacctaaacttgccattccccttttactgcttattgctcagcatcgatccaagtaaggttntatttaacatcttggaacatcgtctgcaattcttctgtgtcctgcccatacgctgctcattagttatt

SEQ ID NO: 27915 - DNA, 282 bp, Oryza sativa
cctggcaaagtcgcaccaagaatcgctgcatgtctcgcggcgcgcgaccatgaacagcttaaccatgcacaatttgccgtcgccgaggtgcacgaaccatgaagcgtatggcgtttttatcactgcaaagcccttgcacccgcagtgcgccaccactggctgctgctggacggtggaggacaggttccaggcaccaaagacgtcatcgttggcggcggagagaccgaaccataggccgtgctctgggacgtactcggcgcggccgcagaaaggcagcgccca

SEQ ID NO: 27916 - DNA, 414 bp, Oryza sativa
  unsure (1)..(414): unsure at all n locations
agctntttgggatgtatgtcattcggtatgtttgtttctgngtnggatgtgggttccatgcatcacgcattcattcatgtcagttgtggaaatcatggctgcgtgaatatcattagggaaaacaagtgtactttgtgcagatggggtaacggtatgattctgtatcctcatctgtatggtcgatgattgtatccatatgattggataaatgtgccctgctatttgtttgtttcatactggtaattatgttaatcaagactgcctaaatgtggcaattgatattctgcagactttttggtatgatcggntgatgtattgctaccatgggtgtttattaaatacaacacttagtttaagagatacattaagagctatgcagttttgcgattgatatatttgaagtatgaaatatgt

SEQ ID NO: 27917 - DNA, 358 bp, Oryza sativa
gatgggtgaagctgtgcccgatcgtgctgtacctggcatcgacctcataagtgatgaggaagaagaagaagaaccttgagaaagagagcccgctacttcaaaagaagaagaaccatcgcttctttcccacgcaaggcgggagtaatcgcttagatagatccgtggcgtaactcgttgtgttaaaatgcgtggttaagattgcttgtgagtgtgagggttttaatcgatgcttacatcatgggtgggatgaaacacctgaagctagttctttgcttgtaaagagaagaaagtggcagaaagtgtaatgcacttaaagtatcatcaccttaaaggatataaaattaattattaaatactc

SEQ ID NO: 27918 - DNA, 476 bp, Oryza sativa
tgaacgtgtcaaatgcgcaagacgtcaggacattctttatttctatgagaactgacatcaactaattgattctatgtgatgtgttatcccctgccaattttgacttctgatcactcattgcttgttgctagttgttacaacttgtactcctaatcctaatcctaattgaaagataatacaaaaacttgttttggcacaatcagaagtttcagatcacataatataagttatacttctagctagaggtaactcattccattgcagaaccattctgcaaggttgtctccagccaacatggaggcaaccatttctgtcatcctgactgaacttgcaggtagatccatatctttccttgtaagcaaatacctgaatcagcaaaagccggctccaagcgacgatgatagattggagaacctgccaaggctgctgctgcggtttcgcatcatcgtcgacgaggcggaagaacggtgcatcac

SEQ ID NO: 27919 - DNA, 343 bp, Oryza sativa
agcttgcttgagaggtggatcgaaccggttttcgctaaatggccggatcgatcgaagttcgggtactatgctcacggtggaacgctcaacccagatgatggctccctggtcttcagcaatcagatacgcgaggctgcgcgtcgactaacggacgcagtggaagccttttctcagggcacgttccgacccgacagagagaaggacgagctgtcactcgccctgcagactccagagcattcaggacgaacactagggaaaggggtgattccttggaagaatggattcaaggaggacatccacacgtacaggagtcggatgagaagcaagagagataccgaggcga

SEQ ID NO: 27920 - DNA, 221 bp, Oryza sativa
  unsure (1)..(221): unsure at all n locations
aaaactcagctgggtgtagaagcatacaagcgttttttgttttttatgcaagcaacatcaataacctatccagcatgtaattccatgtcaaaggcacggtngattgcaaatactacaatgtaagctataaacagcacactatggtgcctggccttggggggataccatttatcatcagtatgtggttctgcaaaccatggtgtacctatatcattaggtca

SEQ ID NO: 27921 - DNA, 323 bp, Oryza sativa
agcattcataggagactcatcaacatttcttgcttcccagtaactcccaaaaattgggcgatgcttcaccgctacttacacaaacgtttgaccaaataaataaaatatgtttcaccatactaatgcacaatattcttaaactatcaaattggtgaaaatcatattaatcacgattgaaacatgctattctcacagatgacacatgaaacatcaagcttcaacagctgaaacataacacattccaagagtccgaaactaacacagatgaaacaccattggagtatcaagtgcaacatttgcatccaacctaaataaacattcac

SEQ ID NO: 27922 - DNA, 458 bp, Oryza sativa
  unsure (1)..(458): unsure at all n locations
agcttgaggagaatgngacagccatgataagtctggatgaatgctgctgggagatgcaactgcagcagcagcagaaaagggggcaactcagcagcagctggtggttgtccccatcagggtgaggaaagatggatgggcaagtgatgccatgctttatgtaagcaaatatcttctccattttatttgcctcccaattactatatttctagtgaaaatgtttggtgtgcatttttttaatgagttgtatgggtgatgattgatttcaggtgaatgtggagcttgtggacgcgaacacgccttctgagaacatcggaaggactgtttcattcanggagagcagggcgaggacgacgactccggcaccgacaatgcgggacaataggaagagcttggaggcagggacgtaccatgaggtccttgacctgaagcagctgcttgatctggctgacagggagcac

SEQ ID NO: 27923 - DNA, 475 bp, Oryza sativa
  unsure (1)..(475): unsure at all n locations
ctcagcttagccttcngtgttcaattacccaattccaacattgcttattatctctcttgtattgcngccagattggggtggctatgagatgggaagaaataatccctttgattgcgaatataaccattttagaataaaaattattgcacacaaccattacaatattgtttggaaagggaaatatatttattactatctccattctaaaatcacaactaccaaaatgatttgttaccataaaaaaatncgggcatcaatgctaaaatcatggtgatagataaatgttgctgtcattttaaaattattgatagccgatgtaataaatatagcggtaataagttatgcaacgatttttattaaatggaacaaatttcgatattgccacaaatatatatgacagaacatcatattacacacttcacatcgtgtatatataattactgtaccactcatgtgcagcatagttataccatac

SEQ ID NO: 27924 - DNA, 372 bp, Oryza sativa
  unsure (1)..(372): unsure at all n locations
agtcacctgaggctgcagcttaacactacttcggccccanagtatagtgtctcacagtaccccttgggcgaaatactccgaggcaaggaaatcactggccggctcagcaagtgggcggcagagctatccccgttcaacttacattntgttgcacgctctgctatcaagtctcaagtgctagccaacttcgtagctgaatggacaccggtacttgcccccgaccccgagcccgccgaacaattctgggtgatgtgctctgacggctcgtggtcacacaagggagcacgcattgcggcagtcctattttctccgaatggtgtgccgaattggtacgcaacaagactgcagttcgacacaaccaacaatgcagca

SEQ ID NO: 27925 - DNA, 435 bp, Oryza sativa
  unsure (1)..(435): unsure at all n locations
agctntgntgagcctaanacccaaagaagctattaaaatctttctgtcctcgcagactaagtagaaaaaatcaaacaaggcaatgatagaccaagtaagcaaattaaattgataaaaaatcacactccattattatgatgatagcccccgactgacaacggcaagaagaaaacttgatgttgacagtcaagatagggaagtacaatgataaacttaagcgtagaaacgacgaagatgttcgatgttccaagagttgtcgacaagagtaccgtcttcgcgcttgagtcgataagaacctggccgggtgacttcagagataataaatggcccttcccatagaggagataacttgtgccgatctcgtgtagtttgaattttcctcanaaccaggtcaccgactaaaaaggcacgagatcgaacattgcgattatgata

SEQ ID NO: 27926 - DNA, 486 bp, Oryza sativa
ttaagcactgagctgcagcttcttctattcttctgcacgaattgttcttcattatatggtcagcctcgcatgccacaactgataacaattagggcggtgaagtagccattgcaagcgctgatctaagatttatatcctgaatgtcaacaagtgacagagaagccttataactaattctaatatcaaagtaaaatgaaaaatcacaaactaagccaagcagagcttaagttagaaaataaatgattaagctagaaacggaatgttcaccgtacctggtattgacgtttgctgataatcacaaagaactttaaggtaatgtcaacaaaaattaatgcctagtgggccggattgtctcctagcacactgatcaccgactgagattgctaaaatgaggaatataaattactccaatgtgacaaggctaccaaattatgaagtgagttacgagaccacgtggaaagcgtggttagcagctagtcatacaat

SEQ ID NO: 27927 - DNA, 462 bp, Oryza sativa
  unsure (1)..(462): unsure at all n locations
tctcttatgaaaanatntgcacatactgacacaagtgatatataatcatggctcaaactcaactgatagctagtgtcctagagtactctacggacatctatgtagaaatatgtcatgagctctatttctttctttatgtttgagctataatctggttataccttttcaattcggtggaaaataagtacatatagtagaacgtgcttgatatgtctattgtcgttttatatcaaactcaatgatacaatgcaagaggcaaaatagcacttgaaacaaaaacaagtttgaaggaagatgttggaacattgtggtctaagattgtagctacttttgtgccccttctgtgtaacacttgatttttntaatctattaattactcaaatatcatatagccataaatataatgggatatataatcaagcttgtgaccacatcaatcttgtagatggctctatatatatg

SEQ ID NO: 27928 - DNA, 360 bp, Oryza sativa
agcttgcgtatgagagagttatacgcattattctcattttatatgttaatgcctgcaaacaattaatgctccaaatacaagtggaactatgtcattctaaaataaatatgcattgcaaacatagctaactctcgttgatgttagttatattaacggttgaaattggattctaacgaccgtcaatagatgccacctgcccgagccattgatcaccgaattcatctcatatccgattcggtgccagtcgcagtacaaccataccactacccctagctgtagaatgatgaattggagaggcaatgtgctgccatgcttcaacaaaggatcatccggctgaccacatgtgcattcattctcccg

SEQ ID NO: 27929 - DNA, 382 bp, Oryza sativa
  unsure (1)..(382): unsure at all n locations
ccaaccctactcagacagcaggtactcttcatgctctcattttctgtttgcccgcattagtagaatatcatgcaacctatttgattcactagctcttagaagaatcagtggtagttgaaaatttccatttaatggatgttntatgactctaccactactagaatgttcatcagctttaaattcatagtgatatactgatatgctttgtctcacaaagaaaaagaaatcatagtgataccgatcaacatgaaactctatataactgctaatggttgagtgcgaggtctangcgactaggcatcttattttaatgggtgctggtaacttaaagggaccgttgctttttaagtaattaacaatatagatcagtcacatgcaataa

SEQ ID NO: 27930 - DNA, 344 bp, Oryza sativa
  unsure (1)..(344): unsure at all n locations
agcttcgcatncnctataatatttgaaactatctttaatcatccgtggacaatagaatcccgctcttctaagcaaccaattcatcttatgggccgattgatgagttccacaaattccttcatgcacctctcctatagccactttagattgatcatcatctaagcacttcaataaaactccatcaatattccggtaatctaaatcttcaaaccatgtatatttgaacgcttgccgctaaatcttccgatcaaccttaagtgcaagatctttcaaatatctaatcaaaggaattctccaatcctcttttgtttcctgggcacaaacgtccgaatttacaattaatt

SEQ ID NO: 27931 - DNA, 366 bp, Oryza sativa
tacgcgttctcagctgctgcgtgcgatcgctttggtcgccactctgtgtgtgccttcacaatatcagctcctgactcaagctgaagaagatggtcgcactggatggcaaaagcctgcttgtcggcgccaatgctggtgcattcccctgacacggtggttagtgattgcagcacgctgtctcgaccacactcctttctgtaatccaaggtcatgcttgcaagctcatgcttctccaatacttgaaatggagcactcttggggaaaaaattagaaagaactcaaaaacatggttgaaagccttctgactgaccagattgtagactaatgacaatatcaacaatacagatggtcagatcagaatctcta

SEQ ID NO: 27932 - DNA, 160 bp, Oryza sativa
cataatactttgccatgaagactgtgagactgccacaatgcgccctcaacgagaatggagatgcaggatgtcaccttatgactaacttttcttatcacaaggtgctcaatgacattctcatggactcttgcgatctcacactagctgaaccttatttaca

SEQ ID NO: 27933 - DNA, 368 bp, Oryza sativa
  unsure (1)..(368): unsure at all n locations
cggaacaaaacgcatgattaagatgtaatttcatacaatgtaaaactgtacatgaaaaagaactgctngaattntcataacttgtgtctgggtgttcctaaaaaaaatgttccctataaaaaacatgtgtttgggtgtattccggaaaaacatatgaattttaaaattacatattgatttatctgacagataatggagatagaaaggattgagaagtcttggaaatcttaaaggaattaattgtaacaatgagattggaccttatgctgaaattcctctaaacttgatgcataattttcctattctttgagatccctttgcagcacgcctacaatccatatgatgaattatccctttgatttgacatc

SEQ ID NO: 27934 - DNA, 321 bp, Oryza sativa
taaggacgaggctgcagctgaagaccgacctttttttctgtattggcagctgcaatctggtcgacagacgagcatcttcaacaatggcaacttctcgactcaaataattggggactgatagcttatgcctggccggcatgacagagccaccttcataatcggccatctttcgacccacataaatcgtgactcctaaccgtgccggcgagacgagcgaccttataaatcagacaagcatctatctgaatcggccacttgcgactccaataaccgtgactacatacctggagacatacgaacatccttctcatcgcaattttt

SEQ ID NO: 27935 - DNA, 409 bp, Oryza sativa
  unsure (1)..(409): unsure at all n locations
tatagtaggctcttaaccttatgagctggaaagtctaagtttatcaaatatgcagntctttcgtttgtactcatcatcaaaaattatgttgaagaagtttttttttcttacgctagatagagttatgaccctactattaaacttagtacttcaatccattagcctataaatcatataaactaaaaaggcgacttagaaatccaagaaaaaattccctaaataaagaggctctaagtatatttttcttccctcatctcttgcttctaattgaattgtctccttcaatagtaaaattcggatataataagtttgatcacggttaatttaacacatcagtagaaaatcgattttcagaccatcaaaggagtcgatttataccggttttcgaagttggagagtgcgatatacc

SEQ ID NO: 27936 - DNA, 327 bp, Oryza sativa
cctgagctcagctggtggctgtttaattattttaccgagcctaggtgtaactgatccgctcttatcttaactgtgcttctctccccctttcatttgtatcttttaccctattaacgaaataatctttataacagtcgatttttagggggcctatccttagggtcctctgaaattcaggataaacctctaaaaggggctttgttagcaaagggatcaatttcttgtattctccctgtgcatctagcaactccttatcatgtttcatatcagaaaggattacttaaaaatgactgtatgcgaaaagaaagtgttctcgcgttattatcc

SEQ ID NO: 27937 - DNA, 268 bp, Oryza sativa
  unsure (1)..(268): unsure at all n locations
agcttggagaaaaccatgtacaccactccatttctctctctntctctcgctttctttttgcatagttttcttcatgctccatgtaaacaagccagaaaagagaggaaaaggaggcagctcggtgcaattctcgaacgacccaaaaccttgaacaattcaatccttcttcagagagattcagagttgggttcagaatatatatacactagcacgagtgaatagtagaggagacagagatatatagagaggagagatgggcatcgaggtg

SEQ ID NO: 27938 - DNA, 210 bp, Oryza sativa
  unsure (1)..(210): unsure at all n locations
agcttcttgcttgaggtgtgngnagacatgttttgattttattttcttctacacgccggtgatgacggttggaaatgtcggtaacactctccaacagacattgggagttgatctttaccgtccagccaaaccttggatccatctgtgctgcggctggttcggtcgaacccacgggtcgcgcgtacgctgtgctggcccaaccagcccaac

SEQ ID NO: 27939 - DNA, 436 bp, Oryza sativa
  unsure (1)..(436): unsure at all n locations
acatgatactaagctagaattgaactgatgactgtttaccgaagacttttttcttattagntatgttcacttcgctgaacgtttttaattatactgatgcataattttattttaattttctaatttattttaacaccatattacaatcaccattaaataggcaaagaattattttcgaagagatgatattgtgtccgactatttctgagcgtgagcataagcatcagtcgttccacctcgtcgtcatcgacgtccatggtttgttgggtttacatagtcgcgtcacacacactacggatatgcgctctagactaccagtctagctggacccttgttgttgctcccaaacatataagccacttgatttgccgcaatgatatagatccagcaattctactctgtttaattattacaggttcctatttacgttatgtta

SEQ ID NO: 27940 - DNA, 428 bp, Oryza sativa
  unsure (1)..(428): unsure at all n locations
agcttggagatccacattatgtcgaatcaattatttggttatctatttttttgtcaaatcatgggagagaagagttccgcacttgaatcttcaattacgaaagagtgatcaagattacatgaccctagagtcggaaggttacagtgattgaagggggaagggggaataactcctcttaattaaacaaagcccctgtttaagccagcttaagattctcatgaacaactggtcgcttctaaaaatctgaaataaaaatggtgttcctaccgctttggntatagatcacgtgatgggctggatatgcatgcccaatgaattattgtttaacaaaaaagaagcaagttgtctagcataagaaagggcattggaggcacatatgtatgggtcatagcttcatcttctgttcgacgatgtcacacatatgctta

SEQ ID NO: 27941 - DNA, 255 bp, Oryza sativa
tttttttctagcgagaccgggctcctgctttcctaactaggaagaccaactccaacccaacgctcttatgtgccttgcccctccttcccccttggccgacatgatgataaacagatacgccttgctcagttgcttctatgccttttgacactcttgaacactgatacaactgtacggccctcatgctgcgtgaaacatacttgttcacgactcctggactactaaacttcacagttcacagcgtttcacgctcgt

SEQ ID NO: 27942 - DNA, 414 bp, Oryza sativa
  unsure (1)..(414): unsure at all n locations
agcttaaggtgctgcgatcgtgcttgtcaacttgtcattataagttgccaacaatattttcttaaattctcatatcatggaagcattttntttctagtgctgtaaaatttccatccgctatatataggtccgagtcatatacacctaggttttacctttccggaatcctcgggagagtgggtgcaaaaaattcgaatgctgcaatcgcttctccgccgatctaattgtcatctccggccatgtgccgccgcaagccaccatccacgcgctgtgttgttggctgctctggacggcgcaagcggtgtgctcctttcaccacggagatacttcacggattgcgatgattacagttacaccgacgacgatgacgattatgatgacttcgtcgtctccacacccacacccacgacgacg

SEQ ID NO: 27943 - DNA, 462 bp, Oryza sativa
actcagctgagctctgcttcaaggcgaggccgactggctcaactattcttctgtctgtaagctcaatgcaataactctctccgacctcaaagtagatgtgccaactattttcacattggacaaaatccccacctatccacctccatattaaccgaactctctgcattgcataatcttctggaaatatacttagatacagtggacatgtcctcagacgaggaggtgaatcataataactaaatgagaatatcttctgcatatcatgcacaccttcacctactgtgagtgccctgccaacagaaatgatcaaagtgtgccattgatccttatgtcttatgggcccattattattaccggccaaccgactaactatagagatgattgccaatggtaccccgccacatatcttcaaaatgtctggagatacttgtttcaattcatgaggacagttgttctcatggt

SEQ ID NO: 27944 - DNA, 157 bp, Oryza sativa
gaccgccgtcaacgattggaaggcacgcaagactgtcactcagattcgcagttacttggggtttgcatgatactgtcgcttccacaatccactctaaaatctatcctccgaatttggccaagaataattaataatcattgtgaaatcctccacaatt

SEQ ID NO: 27945 - DNA, 403 bp, Oryza sativa
  unsure (1)..(403): unsure at all n locations
agctagcttgagaggagaatcttattctgtctcctttnattggccggatcgatcgaagttctggtattatgctcacggaggaacgcttaacccagctgatggcttcctggtcttcatcgatcagatacgcgaggctgcacgtctactaacggacgcagtggaagcctcttcttatggcacgttcctacccgacagagagaaggacgagctgtcactctccctgtatactccagagcatccatgatgaacacgatggaaaggtgtgattccttcgaagaatgtgttcaagaaggacatccacacgtacaggagtcggatgaggagcaagagagatacccaggctaagattgcagatcttgagtacagggtatcaagctactagctcatcatgccagaggaggtg

SEQ ID NO: 27946 - DNA, 397 bp, Oryza sativa
  unsure (1)..(397): unsure at all n locations
agcttatccaaattataatggtatgtgttttattttccctaanaaaaacccggatgccgcccccctctctccaaaggtcccaagccctatctagtggtcaaaagtaaaaactcagtagggccttgatttttatatagtctttatacattcctacatcctagcagggtttcgtgtatacggagtatatctctggtgcataatgtatactgtatggtcgtatatataagtaaaatggaaaaaggaaatggagatggccgactctaacgaatgaactgtgtttatgtgtagctaactactgcacatgggtgccatgccngcacacggactccagcgcgtgcgcgagcgacgcctagaacacggacatctactgtaacacagtgggcagctttctctgaca

SEQ ID NO: 27947 - DNA, 195 bp, Oryza sativa
ctggacggcacgaattttttttttttttgcaaaaagatctgaaatctcatatcctgcaacattttttccagacaacctctgatcactatatcatccacccgatacacaagatatcgcatctatccgcaatctaaagagtgatacctgtccatatctacattatcataacgcagatcttttgcctaccacgattcc

SEQ ID NO: 27948 - DNA, 430 bp, Oryza sativa
  unsure (1)..(430): unsure at all n locations
ctgcagctggacgggggatacaatcagagtttttcaaccatggcgaggcatcgaaacagatcatgcattggcggcttctgccacggcggcggcggcgtcctggttccgggctggaatcttggcgatctcttcccatcctcttctacctccagcttctctctctcctttccagaaacttctagacacttgtatcagctagctagtttgcttctctcttttcccccaaaatacttgtgagagttgtattcaagcttgttgttactaattgggagaagagggttcctaacaatctggtatcagagctcaccaatccccaccaagctcaccaagcaagctgccatggaaagtgaggacaagtttgacatgctcttgaggatgctcgangagttcnagcgaatgctggaggaggcatatcatagaatgagagctg

SEQ ID NO: 27949 - DNA, 354 bp, Oryza sativa
  unsure (1)..(354): unsure at all n locations
agctaatgatagaggtctttgatatatgtgtttattcctncnacttcgaggacaaacatggattcgatcgatccgctgcacaaattaataatacatcacatagctaaatattatagagctacgtacgtactaactcggattccatgagttaaaattgcggagtgatatatcgtacgaaactattctggacctcctattctctccccactcccaccaaccaactttatgaatgcggcaatatttatatgtaaccacattttgtataaaatacaaataatttggaccgaatttcggacatagcggtgacccactgccccgaaacaaaggcattgaaaccctgttactgcaaaatac

SEQ ID NO: 27950 - DNA, 452 bp, Oryza sativa
tagcttgtggcgtctctattactctccgctgcattcttgttagacttttatgaagactgtaagacgtgggtctgaatgtcaatattgtcgtttgtgtaccccggctggtcctggaccgggatcttaatgcacattcttgttgaaattctattcgggaattactaagcgtgacaagttggtatcaaaaccgaccttgaccgtaggacaagccaaatggaaaaacctaagagccctctgaatccttttcatagcatatgttctctgcaattggatgtgttccgggaaaattgggatctgctcttgtggttcaagggaaaaatcttggtcgctcgtttaagtgagatttgtcaaacaggtcagtccaaggatttagttatactgctgaaaattttttcgtcagtcagtcggatcctgtggggaaatgattatgtatagctatgaacatggttgca

SEQ ID NO: 27951 - DNA, 424 bp, Oryza sativa
  unsure (1)..(424): unsure at all n locations
agctatacttgtccgcgcgtccgctttcgttatagccctgcctcgncgtcgaccttttggggattcgcccggggaggcagttcgccattgtaaacccggttcgcccgcccagccgcttgatgcgttaacagctgactatactcgacggccgaaacatcgccgatcattctgcaggctttggcttcggcctggtcgagggtcaacactgtaaaagtagagtgtgaagctatgtcaaaagtcaaataaggcgaaataacacagcacagcagtaaatagcaaaacaacagtcttactggtcgcccccttaagaagtatcangttcggcaaaccgtcgacctcttcgccttgttcaaccgcgacttgccatgactgggagaggngaaaattctaagcatacaatatttctccaccaagtcaccgcagc

SEQ ID NO: 27952 - DNA, 406 bp, Oryza sativa
agcttcactgtaataccaggcactccgccgtttctatactcttgagaaggatgaaaagaagataacagaatgaaacaccacatttgcagcgatgagcgcgtatattcctctgctgctcctagatatttgttcaccacctgtgctaatagaccccgttcgtttctattaggaggtgttttagggctgttcactttcatgccattttcaaccttaccaaattttagtaaaattgtcaaaaaagtggctacatttagtttgctgccaaattttggtaactatataagaaatcatgccaaaagttaccaaaattttagcaactatgacattagatcggggtgtcacatcgggtattatatagggtgtcgtatggggtgtttgcgtactgataaaaaaactaattacagta

SEQ ID NO: 27953 - DNA, 402 bp, Oryza sativa
  unsure (1)..(402): unsure at all n locations
tctaaagtttctaaagttgtccatcatcattattntaattatcctcattatttcatattctaaagcactataatattaagggtaaattggatccatgccttgcaaatgtgcgtattcaaataaatgtcattacaattcatctattcgtagtcgttccactaaaantttacaaaataggaccatgccactgtcgtcacgttttccatccatctccttttttggttcattgtcttccttctttttcccgtcttcttcccttgagcgatattccctgcggcgggtggttgctacaacaatatggcgatgggtatgaccgtgccactgtggtgagcaacacggcatgaccgtgccactgtggtgagcaatgcngcacagagcaagctgtcatgcaacaacagcagt

SEQ ID NO: 27954 - DNA, 466 bp, Oryza sativa
  unsure (1)..(466): unsure at all n locations
agctnggcccttggatntaatcacanacacttacatctcttcatgtaaagtcatcaacaatcaaaacaaagtatcggttaccagtcattctcgccggtgagatccacccgcataggtggagcaacgactcgcattctcgccggtgagatccacccgcataggtggagcaacgactcgcggcttaacgctccaaaagaaaacttctggattnttcttgaaattttccggcaagttgaaaccagtcatgtactaccctgtntccataagaaaagtgaaaacaaccaaggttagcctgcatatgacagtgattatatagaggtaaatataaagtattagtcatggtaatctctgntataaatcctncccggcaacggcgccagaaatgttgttggtatttttaacgacgttactagaaatataattcccagcaatagcgcacaaatacttctggtatattatgcgtaca

SEQ ID NO: 27955 - DNA, 467 bp, Oryza sativa
agcttgactgccacggggagatctagggactctttctcttgtctgctgccctggtctccttcgttcccaccctcatcctccgctcgggctactccgctactacctctttccgctcccgacaaggagagggacgacgcacttcgtctgagagcctacatcgacgccgtcttcatccctcgtagcaaacgcgtcactgaagcatggaggtcctgctcacctaagcctcctcacttcctcggtggcctcctcaacggtcactatggtgtggggagaggaagaggatgcggccacaacgatcacgtggaggcagacacattactagcgcgcctatgtccagctcaccagtattctcactctctacactgtctcctcgatggttgccatggcatggggagagggaagaggagccaactaacatcagcacaggaagctcaatggcgtgccacggtaagctccgtgtgctgcta

SEQ ID NO: 27956 - DNA, 438 bp, Oryza sativa
  unsure (1)..(438): unsure at all n locations
agcttatctntatccacgcacgccggcctcattcttattctggcgctgcgtccgactcacgctgcttctgcgcgcgcttccgctgatagccgattccccacataacatctatttatatggagcggaataagccccaatatagtgaaggctatttaaacctaacatgcatcagttacatgtgtagtagaggattaaagccttgatggcatgaagttggaggtcttcaatggcggtgggactgtgggaggctaacagatactccctcggtattttaatatatgacgccgttgactnttatacaaacgtttgacctttcgtcttatttaaaaaatatatatatnttataattatgttattgtgatntgatttatcatcanatgttctctacgcatgatataagtanttttatatcntacatcaaattttgaataaaatgag

SEQ ID NO: 27957 - DNA, 385 bp, Oryza sativa
  unsure (1)..(385): unsure at all n locations
tctagaggaaaaatcacanaactacatggtatcagagctgtggttcttgcgacctctccgacgcgaaccctagtcggcggcggcgctgtgaccacaggggttctgcggcgacatctactgctgaggcggagcggcgacgtctgacagcggaggcggagcggcagtgttgacggcggaggcggcgacggctgctgcagaggttctcgacgcgagcagcgtgaaggatgagcagggcgcacgctcgctggttgagctgcgcaaggatttggtgcagcacaagctgtagggagcacagcggctgagagacgcgcagctgttggctgttngatcaacagagaatgatttggcgctattggctattgttgtgcgttccactggtggtgac

SEQ ID NO: 27958 - DNA, 465 bp, Oryza sativa
  unsure (1)..(465): unsure at all n locations
agctnggtaagccgagtgagccgagtaacgtcttgttgtttattcaacgccagacaggacggtccttcgtgcccggagagaactagacaagaagcatcgcatcccagaccattaggtgttgtgagaggacatacattgtgagagcgccgcggatgtcccttacccaagaattattgataagggtagaagcaactgaacgcaagggcacggtgaagtgaaggtcctgtactaaggaggccaccgagcgaccctcaatctacttatatgtccaaaagagagtcgacgcgccatcacctggcacgaagaatgtggacgccataaacatgtcggacgtgccgtcaactatgtcatgtttgtaacagattatttactcgatatgcactacaaattaacatcttagaaaaggtagattttacaaaactatatatttaaaatgtagtatcacacaactacatatntactaca

SEQ ID NO: 27959 - DNA, 448 bp, Oryza sativa
  unsure (1)..(448): unsure at all n locations
nggctttcgctcagcgtccttgataaggattgaacccctgttaactattgtacacctgaaggttatcgtgctattgctgcatcatgtcgctgatgttggcgaattgagcatcagcagattgttgccattcttgtgtttgagctacgtgttccgtgaggttgtactggatttcccctatctgtatatcaagggtgtccattctcctaatgatttcactcaagtcccaacgggaagaactcgagcgccattcacttggagatggaggcacaccacttgacctgtgaggttaattgtccncccattggatgtcatgaggcgcatgccaccgatcctcactggcgcttgccaagttagacttcgagctaggcgtggacttggttcaccggtgcattccagtggtgccatctgctatacatttgccggtgcgagatgataacttctcgtcatt

SEQ ID NO: 27960 - DNA, 293 bp, Oryza sativa
agcttagacctgctggccgctatctttattctattgttacgctcattagcagacagacaataatgtgcaaataaaactcttatatatgtgttcttagtgataaaatgcaaaggctgattaaactaccatctagagaaacctcacacacaacttaaggttgttcaactttgtgttataagcatactcataagtcataagatgacgctgctaatgttaaattcccagtggccaacaaacttgttcttatcagtgaagaaattaattcatatgaatgaatgacggagtattggagc

SEQ ID NO: 27961 - DNA, 439 bp, Oryza sativa
actcactccaagaaaccgggacatgattatattttttattgctgctgacaaaaacaagcattttccagaacttagtacagcacacatacataatccatggcgatctaatgttaaattatctcaaagtaaactggtcgctgttggacgtggctatgaatctggagaactaatggctacaggtgggacactgctgtacaaacctagcaaacttgactgcaaggaactcatgacctccacttgttagatcacaaaggtattacctctcatttatttagtactatggatagattatgaatgcggctggtctatattggttatatgcatattattcacgttgaaccgccctgtaataaaagatcatatggaaagacattaatagtgcagcttacaatggaatctgttatgcagcagttgttcaccatcatttcattttgataca

SEQ ID NO: 27962 - DNA, 430 bp, Oryza sativa
  unsure (1)..(430): unsure at all n locations
agcttattataggcctcctactgtctgatctaatagtgcatnaccactcatgcacaaatgataaactaccactaaatattcagcaattacaagcttcccagntacatgtgtgttacatctgaatcgtccatcctcttcatattccccccttccttctgtgtaggcctccatttgagacactacctgccttttcttcttctcctaaaacagaacatgggtaccatatatattataccatgatctgctgtgcatgatctgctacatgtttcaacatagatgcacataccaaatntttttggaaacgactcaagttagcactgccttggcggtgagatggccatgtcatatttctcctccgtatnctatgagcatgagagctagcctaccattcaggattacaccacttcaatcgtatcaacttccgccacgc

SEQ ID NO: 27963 - DNA, 392 bp, Oryza sativa
  unsure (1)..(392): unsure at all n locations
agcttcccggattagcatcgcttttatcttttttcgctgcattncgcaaacttttctcattattgtaaagacgctgatcacgtatgtcaacaacttgtcagattgtgtaccctcggctggttcctggacagaggatttcaatgcacacttctagcttatataattctgtgtttgagaatttcttgggcgtgacaggacttgcgctcacacaattccgtctcggattcaaagccatgaagcgtgagcttatggccgcctntccgactcatgatgtggcacggaaggcgcgttggtccgaggtgaatctcacctttgatcagagcgaccatcctacagtgctcgcttggggtgggaagttggttcttgtggtcttcttaaccatccacaacgtc

SEQ ID NO: 27964 - DNA, 455 bp, Oryza sativa
  unsure (1)..(455): unsure at all n locations
agcttatcgtctcgctgagacgtcctcttgtctctgttacacacagaaaaattcagctcctctggctctgtctcatgggagagaagaagattatccttgtttgggccatgcgacagaagaagattagcccttcatctcgggcctacgaacgctgacagtgaaacagcttttctccggagtaaacacgagctggctggctgagacctgngctgtgtttagttcagcgtaaagtttagattttggttaaaattggagatgatgtgactgaaaagttgtgtgtgtatgatatgttgatgtgatgaaaaaggactgaaatttggatccaaactttgaatctaaacacagccctgatgagatccaaggccctcaccattggacgatgcanggctacaggaaatggtgggagcccggatcggacggcgacgagacagcgtcgtgctttacgggctggtact

SEQ ID NO: 27965 - DNA, 448 bp, Oryza sativa
  unsure (1)..(448): unsure at all n locations
agctnttanatctagcattctattcatgataagatgctaaccataatgcacagaaaacagagagtggagatattggaagttccacaaggactggttcacagtcatcagattcaaaaaagaagcggaaaggtgacgatagctctgaaggctcctcaaaaaaatcctgcatggacatggagcaggctgtggtagtgtttactggtaaggatggtgatgtcttgaaacgttttgttgatacattcttgttggaatggaactcaacgagtgtgcgccatgaggccaaaagtgttctatttggactgtggtaccatgcanagagctcatttaaggagaacatgttaacaactctactgcagaaagctagtatctacccatgtatggacagaacatcattgagtacactgatctcattgacattgttactatgaaaagctcatgaatctactgc

SEQ ID NO: 27966 - DNA, 448 bp, Oryza sativa
ggcgagatgtggattccactagccaggatctatctttctcttatcagattgcttgtcacctcttccttaacgtccttcatcgatccaacaagacaactctttcacgaccatctgagtaccgttgccactatggttatctggattttggattcatctttctatttgtttcttaatagctgcaaccatacatgatttgccatttgggtagagcatggaccacttgtgcaactctagttgacaggattgcattctaagctctttagattcaatggtgaactccgctgaaatcctttgccgagtctgataacgcttatatacaccaaaatctatggctcagcaagaaacctctgctttgagccgtttccgtggagatagccaaaagagattgccagcctgtcaagtggtacacacgttgaatgccgtccaaggatgtcaagtagtatgcatg

SEQ ID NO: 27967 - DNA, 462 bp, Oryza sativa
  unsure (1)..(462): unsure at all n locations
tctaagtcacctgcggcatgcaagcttcctagatactgtttctccttcttctagtaaatcctctctatcctaacctatcttttgcttggtatccttggatgaactggaggaagatttgaccacacacgttcccttggattcgatacccttggaatactccgtaggggaagtgctacattggtatattcgcgcgcttgcggatattatctgtgaccgtattaaataccaacatcgcgcttattgtaaatggcatgattctcactctcattctactaatgattgcaatgtgtttcgatgataggttcaatcggccatagatgaaggacgatngaagttcaccgatgggttcaagatgaagcttaatcatgatccttctctggtgaatacaattaattccaatgataagaaggtgttgattctgccggagcaagccgaatctactaatggaaaangagtgatcat

SEQ ID NO: 27968 - DNA, 319 bp, Oryza sativa
ctcagcttggaataataatcccgagcttatgtagtctattctttttttgtgtgaataatgtgtggtcgtacttcgtactcacatgcaccatgcagcaacaaaggtcatgttcatcttttcccgacgattgactgcgtgaagatcagcgaaatcaagcgaccaaaaacgttcgtccgctatgaaagcttcacccagtgtttgaacatgtaatggcatgaggcctttcttgctggtgtacatgtaccactaatgtaaccttctcatctctgagagaaaattgtgtgcgcgaacgccacagcacaggcgctctcgtggatac

SEQ ID NO: 27969 - DNA, 454 bp, Oryza sativa
  unsure (1)..(454): unsure at all n locations
agctntangcatgcatcaatcaccaccacattaaactgttatgttgtccatacnccatttntataaccgatacatgagaaggcagcaaacaattaaactaggagggtgccatctagtttaatctcgctcgactaaattgttctcaaactctctactactagctgatgtgatgctcccaatttcagcactcagggtctgatccaaaatggctatcaacttttagatgttcagacgtctagtttcgacctgtgggagctccaaggatctccaaagcacgatttctatcttacacattgcactattcttacaaatcctaacaatatatgcagtgaattacagcctacaagatacaaatcattcaaagtagctctcacctgcgacaaaccggnggcgctgcagcgacgcgccgaacacgtaagggctgtagttctcgcggtcgtagtagtacgccatg

SEQ ID NO: 27970 - DNA, 275 bp, Oryza sativa
  unsure (1)..(275): unsure at all n locations
agctnttactcatactcatcagtgattgacttgtgactatttatttnttgaacaaatctggttttcttcataccaatcaatatatggtatagtacggaatatatatgatctcagatattgagagagagtataacgccatgcacgttatcttggagagaatagagaggggggggggggggttcctcacattcccgatataatgaattctcataaactatttcatgcgcttcatattttattactaatttggttttaaaatatacagtacaatatat

SEQ ID NO: 27971 - DNA, 447 bp, Oryza sativa
tggattataatgatgtaattatagcgagatgttcatttgttatacatatgttcagccaagataaaacattaaaatactgtaggtaacaggaaacaatccacaataatatatcattcttctaacttaccgcttcttcagatcttcaaaaatagttgttgcacctctatacatctgaaaaatacagacaaatattttatcttaaaatagctatatcatgagaggttaaattggcaacccattcttagcctcaccgtggttccacagtcaccatcacccactgtactatcccattcatataagttatccttgatattgataatttcctttacccctgcttcaatagcagactccagaatacacccttgcttgcttaactgctgaggctcagtgagaatctgcatataaatcatcgtaattaagacgttctatgtggtaaccgatggactg

SEQ ID NO: 27972 - DNA, 381 bp, Oryza sativa
  unsure (1)..(381): unsure at all n locations
aagcgactgangcatgcagcttgagactttaagtccactgcatatgttggggtttgttataaagcacgcccgcgggcacaatgcgcccgctggcaatgggcatgagcaaccatccttacccgttatgtaaaaatgagtatacccacgggcacatataatctcatgggcatgggtatgggtagacactacccgtgcccgtcgcgccctattttcatccctagacctgggtgatactctggtccttgaattttactacagcatattttttatgtctaaatcagtccttataagatagcttttggggttaaaatggttctaggacgcacctctacgttaatgtactgtacgaacagtgtaagacgacttagggacaaaaaaacc

SEQ ID NO: 27973 - DNA, 472 bp, Oryza sativa
  unsure (1)..(472): unsure at all n locations
agctntgagataaagctagaaattatataagtcaaatatattctgaaaaacaaagtgttgagcaccacatctagcaaatgctagaagcttcccatctggcatagtagtacatggtatcttctacctaggatttgtagaactgaatggagtgatcaagcggaaaaaaaatccagaaaaaaatacatatgaaaaatattatgatttctaaaattttaaaataaattagataatgtctattaaagtcctctgaaatttatgtgttataaattaactctaaataaataggacgaacaatgcatgcaccaatagaaaagggaaaaaatgtacgattataatcacataccctttatttcatcaattatgtttaaaataataataaatttattgaggaaaagtcttgcattcgaacactttgtctcanaaccaggtcacacatttaaataatatataaatccatcgattattagttcgt

SEQ ID NO: 27974 - DNA, 472 bp, Oryza sativa
  unsure (1)..(472): unsure at all n locations
tgggcttctatgttcacattcatcgcccaaggtgaggcctatcatgcgcttagtgatgcaatacctggaaagggaagcaacgctccaggacttcgcatttagtttcttcagcatcaatgaagctaataatgaagtttatggtcagcatgttgtatcaaatccctctgtagcaaccaccataaccactctttctggaggaagatgacggttgttgcagcatgtattttctatatgatcatatacaattttacatcattgtgtcgactgtaatacaatgttgaaaaaatactaataattgttaatccgcgctcctgttccttgtgaaatacaccaaagagcttgttcaaatgttttcgctagcacattacgaaacacntgtagaactttgtcacaaaccagaaggagaaatctatatcgtgatgcacgaataatccgnatgttaatcaatntacaaaaatcctcgtactatcca

SEQ ID NO: 27975 - DNA, 465 bp, Oryza sativa
  unsure (1)..(465): unsure at all n locations
agctntntagctgtgtcaactcccccaagtctttatcttttcggtcctgtgcttcaattgcatgtaatgtctgcagatttgtgaaattcgaaagaccctttgggatgcaaacaccgtggcgacttctaaaatccctccatgacggatcattgattctctcaacaagtaagtgcctcagactcttcagcttgactattccttgaggcagttcttgtatgtaggagttgaaaatatccaacgtcaataagttggagagcctctccacggacttggggagaaacttcaccttcgaatggcgcanacccaaatagcgtaggttgaaaaggcatccaacagcatctggcactttttcaatcgccagcccacgtagttctagtacaacaatgtactntgacttgtctgatattgacttaattattctcaaggatggcatggccttatcaaatacaatgcaagatcgaagac

SEQ ID NO: 27976 - DNA, 450 bp, Oryza sativa
  unsure (1)..(450): unsure at all n locations
cttatgaccatcaatggcagccgacaagggggtcagcggttgctatgtccanangcagtcgttctccatgcactggcagtatgaggtccccgagccattgccgtcatgtccgactaccgcaaatgccgcagggctgcagccagtcgccttgccggcgtggtgaccaaatcatcggtaaaagctgtggcaaaagatgatcgacgggagaagaagaggagttcgccgtggaccagtgctgctgctgtctcctcctacgaacgggctcaccggccactgccactcccttggaagaggagatgaggggaagagaggagagtanaattggccacttacatgtgggccctatatgtatttttaataaaattttattctcgctgactagaatgcgtaaaaccatctatccatactgccatgtgatctagtttacctgggtntacaagtcgaggcaag

SEQ ID NO: 27977 - DNA, 347 bp, Oryza sativa
  unsure (1)..(347): unsure at all n locations
cacgaagtatgaagaacagcgctgttatcttttttaaacatagtagnatggtgaacaaaacgtcagcataatacatgcgaacataaacatctctgaatatcgtctcggactgtccaagattgaggtatttagttatgcctacaaagacgttctcaatcattagaagcatgtttaattaaaacactataggcacacataacctcttgtctctctgacaagacatgcttttgaaattcactatccaccgctagctcccacttaatgtaagcacgaggatcatagtttccctcgaaataaggcagtgcagatatgatcttacctagaacatcatcacttacctcacaatg

SEQ ID NO: 27978 - DNA, 398 bp, Oryza sativa
  unsure (1)..(398): unsure at all n locations
agcttctgtacttttgctggcaaatggcatataactcttgcatctcatggacgcttctgtgttgccgttggccagatagtatctgtacattatctaaaaagtttgtatctgtaatttctgtgtgtagttgctgttggccacttgtatctgtaagttctatttctgtgtccatgttttcgttcaaacataattatgcgagtatagtcatgttgttgcaagctgcatgttcattctgatcagactcccttgtcgtaatagctatacattgnacctctctaattgagctagctcatgcatggcgtcttgtacagcgcatttggggcttagaacttgggacaatgttggacatgacaacatcatacatggcaaatctgcgttgtataagttttgactgggac

SEQ ID NO: 27979 - DNA, 428 bp, Oryza sativa
  unsure (1)..(428): unsure at all n locations
agcttatctgaacacaactattctatcttatttatctcttancgaagggtgggttgtattaattagctgatcaagtggtgctaattgctatggccttgtccttaagtgacatcagatcaaactgagataagatggttagtgatcaaagttttgggagggggtcagctaatacctggcctgaagaaagagtgttgcacttgcacccctgcaccatatatagactgcactgtgtggggccttcattttatcttaattatttggcgtgtgtgacaattaggagtaagattgtatatttggtgtagatgatgagatcctgtgggtctttcctaatcctacccatcattagatatttaatccatggttagggtaatttgtaccatcttgtcctcatattgcacaagggacctgttcttgacaagggttgtgtt

SEQ ID NO: 27980 - DNA, 348 bp, Oryza sativa
acttaagcactgcgctgcaactccgatggattggttatttttttacatacctggaaacagaagataagaatggctgccccttacatataagaaaatgggagaaggttaacacgagagctttcttattaattttccaataccatacgcttcccaaaatggcaatcttgatccaagatctcacttcttagagccatgtatttggttgaaaatatagcagatgcccgaatatctacaactcactatcagtaggaaaattttgcactatcctgtgagacccaacatgaaaactgatgacgaggtatctttaaaaaaggtattgaaaatattaacccaatttattgatttaaa

SEQ ID NO: 27981 - DNA, 430 bp, Oryza sativa
  unsure (1)..(430): unsure at all n locations
agctagggggagggccttaagtctgatatgttatttgaataagccggggagatttggacacaggcaaacagatgtgctgttagctagctaactctagctagctacactccataggattgcaattgtgctattgaggggcatggtgtccggttggtgtcatgcatgagtggtcatgcttttggtatagattcataagttgcaacatcaaattatagatttcccccaaccgatcgaagtagctaaaatttctataaataattntaaattaattacaaaatcctcgatcatattatatatgggtttttatttgctaaaaatggggttcatatcctctaccataatgtcactaccattacagacatttattgacgtgtgtagcaatagaagcatangacccatatacttgtgactgtaatgatagtggtattat

SEQ ID NO: 27982 - DNA, 464 bp, Oryza sativa
  unsure (1)..(464): unsure at all n locations
ntatttagactcagctgattacatcaagatgatcttatattattagtccaccaaggttgttattatctgtttattagcaacggaacgggtataatattagactgccagctttttgggggtggtgtggctgaaactaaagtcagctttatagcaatgagtgatacagtgtgtaccaatcatatagaatgaatggattggcttttacttcataaaatcatccagtttcttaagaaacatcacaattttgtgtcgcatttgtgctaaatattttagttagtgaaactcgactgtattaatttgcagatggaaatacatgtcaaatgctgcccttcattcaatcttctacatatagtctacgaaaagtacgtatataatgggttacatagtatcatcgtacatatgtgcaggaccaagttgtaatgggttgtatcatcattaagcaatgacccgtcttgcgttatact

SEQ ID NO: 27983 - DNA, 76 bp, Oryza sativa
aaccaattggtgttgaaattggcttacaattcttcatcttgaaccgtctcaaaagagccatcctatactctcgttg

SEQ ID NO: 27984 - DNA, 281 bp, Oryza sativa
  unsure (1)..(281): unsure at all n locations
agctccatgacagcagtcattcttctgttatggtacccagttctttggatgaactgtgctcactggatcagctccctattttacccactgacttaattcttctgcaaaagataagaatacctactactcatgccatatggaatacaagatgatntatatactttgtatttcctatattccatgcggagaagacaattttgtaagtgccaagatcaactctgtctacaagattttgttcttttgtaaaacaagtctgctttcctcagtaaacaacgatgtga

SEQ ID NO: 27985 - DNA, 473 bp, Oryza sativa
gcgacactatacaaaacccaacgtcacctcattctccatgaattaggccgtctgctttatctcatatcgcggtatctccagggtttcagaacaagtgatcaactcttgccgaattccaccaactcaagcaaagccaggctgggtagcctcttcgcggattcactcaagagcgatccaatccttgcccaagaattttacagcggaatcaacgatttccgaggatcacgaagctctgataccaaattgataggattctctcgcaatctctcgatcagctcactcaagaacaagaattatcgatacgatcaacgagatcgcatcgcctccgccgccaacgccgccgttcgattgatctccaaagatacctttctgttcttacaagtgttgtttatattcaacacactctctctcactggttgctagtcccacccagcctgtcacagaaccataccagctatacttacaagccattc

SEQ ID NO: 27986 - DNA, 410 bp, Oryza sativa
  unsure (1)..(410): unsure at all n locations
tgggcgcaatgcaatatactatgcagggtgcagggtgctttctatggttagtgtgaatgagtgatctgaatgaggagacctcgcctgcaaccatcttatatggactcgctctctgctacctgattccttgagttggngggcattcaagtatgcctgccaaatgagcaagacaggctgcagcattaatagaaactaaacacccctctcttacacacacacatacacagatgattggtgcacatatgtaggtgcagagatcgattaaaggcataatgcgtgcattatatcgaccagaagataaaagccagcataaactcgtcttctctttactatcttgagttttcttttctaactctaccaaattatccatcagcatgagtaggtcaatacagcattaattgtaccattcg

SEQ ID NO: 27987 - DNA, 447 bp, Oryza sativa
  unsure (1)..(447): unsure at all n locations
agctcggaagagaggtaagaggtgttctngcattattctttgttnttgaaatcanctaagtgattgtatttctttctacagtttgggatcgaacaaggagactttgcgtctctgattcgtacttaagagatgctctttcaacacactcaatttggtaatgtacccgacctcccgggtcagtttcattatcttctcggctcccagagccactttcactttgattacagcggcttcccagaaggagcactttttcagtttttgcggactcctagagtccnagctgcccagcagcaaagcaatccgcttccactcgagaagcctagtctatgatgcctgcagacatcccgaatcacacagattcgttgttgaccactcaggtcatccatctgccacataggctgagtctggttacgaatcccaatccacaacaactttttacaaagcaca

SEQ ID NO: 27988 - DNA, 361 bp, Oryza sativa
gacacttgaaactcagcttacgcataattaattgcttggatcctaagtgtggacgtcttatcttgaatatctgcatgaacatttaggcatgccaactatatagaggaatgattcaattcaaagcctctcgaccattggaacgaacgtaagaatagtgatagagtccatcagtagcgtaagcccactggctttacctaaactctctagctcaactaattgcagggtgcacaactgttccatgctcagaacgcgccacctaccggctaacgccttgtagccataagcattaatacgaatacctcactatttatcttactccttaaaagaaaacattccgtaagcctgcacataagaatgacat

SEQ ID NO: 27989 - DNA, 469 bp, Oryza sativa
  unsure (1)..(469): unsure at all n locations
agcttaatacanagtaaacttttagaattcttatctttatacaataatatctctcacatcggatattattttttagaaccgtattcaccataatgctctaaaacgatgttacaatgagacaatagtcatgttactacacgatgatcgagataaaaatacttttataacattgctactgcagaaagtagtcgtgttactgcacattgatcgtcgtgttactacgccgttccaatgagacgagaacttaaaaaaaaaagtaaatctcaatctttagagagcaatatctctcacgttatatatttttctaatccgtttgcaccatgatgttcattaaaaagtgtttaacaaagatagatccatcatgacctattttcgatgttgttactgcgataaagttgtcatgttacatcacgatgaccgttatgttactgcggaattcctgcgagacatgaaccacaaagtgatgagc

SEQ ID NO: 27990 - DNA, 419 bp, Oryza sativa
  unsure (1)..(419): unsure at all n locations
ntcagtttccctgtgggcacctgattagtgtcagttgattgaaattcttcattgaatgcgaatgtctatgtaaactggaatttgtatttcaccaaagagatagctaaggaaaactgatgattttcaacatatgaacatgatagtgaagccgacgcaactttggcaagtttgctggtcatgatacattaataatcattagaaaaaagtattcttcctctacagtggtgtgctaatcaaattaatagaatattttatagaatatggtattttaacctaatgcacttcttccaggatctataaacttagaggcttgaattactctagtttggctaacctctcaaggttcaagctgttcgaaatttcaatcatttgattgttttccaatttattctcaagctgtaaaatttaaaggcacaaca

SEQ ID NO: 27991 - DNA, 384 bp, Oryza sativa
  unsure (1)..(384): unsure at all n locations
atacagttatgatatgataacaaggccttccgaggccacacgtaccatttcttttatttataaactaagcattcgagtagttatatatattgatcagcagagttcagaatcttgatcccatctgtttcttttgaccaagaattttgattaagtctcatcctaaatgataataagcctcctttgaattggaggaaaaatataggaaaaacaaatgaattgaaaatctacactatntatgcctttgatctcgatggatgagaaaaggaaaaatgtaggaaacttttctattcctatgattctagaggaaaaacgtaggaaaattaacatccactctaacctctgtgtagaattctattgagttatctctctcatctgattcctatg

SEQ ID NO: 27992 - DNA, 279 bp, Oryza sativa
  unsure (1)..(279): unsure at all n locations
tgcanagaaagaaactcactatcgtcatctgtcgttgtgtggctaaatccggacgtagaagccctagatccactggctcttatccctagagtcttcactatcgcactatggaaaattggaaagaggaagccccgccaccatcatccttgccattgcgtggctagtaattagctcaagtggcagcaaggcggaggagaggacaaatataaccaacagcgttgtctgttgatcgccacccgtgtcacttacgagcgacgtggtaggcggnggggagggggg

SEQ ID NO: 27993 - DNA, 348 bp, Oryza sativa
  unsure (1)..(348): unsure at all n locations
agcttgatgtaccaccgggagtcttttgatgttcttcacaacttgcttcgagtgacctacctccacctagacatgaaccatataaggaggaggcgagagaccataagtgagaagcggagctggcggagggagatagatgtcccctacngctggtcgcctccatctgatcgcatcatctctccacctcctcagcggcgctggacgttgaggccgacaatgatggggatgcacttaatctgccagcggcgagcggagcagtggagcagccagccttgccttgtgatttggaaatctgatttatgcnatgaaccaacccttcttgatcctttattcggatatgcttatcct

SEQ ID NO: 27994 - DNA, 461 bp, Oryza sativa
  unsure (1)..(461): unsure at all n locations
ggacctataaaactcagcttcagacaggactgccaccacctgtggttgctacttcactgcggcggtgtggagaattatcagaaagaagatggtgcaatgctagcttccaaactccggcagatgaggagaacacactggctgactggtggttggcaacaagacgctgtttccggacaagctacagaacggattttgatagtgcattcatgctaatttgttggttgatttggaaggagcgtaatgcaaaaattntccaacacgtgtccaaaacgctggatcaactggcggaggatattaaagaggaaattgctgtctggcgggtggctgggattttctcccaatttcgcgagtaattgccatgactatctgcggngtttagccctgctntcttttctcgttcttggttggatggngtccttcactggctaccgcggtattgtactgtcattgtaacattttac

SEQ ID NO: 27995 - DNA, 365 bp, Oryza sativa
  unsure (1)..(365): unsure at all n locations
agcttgcaaaataatatattattatggatactatttcatgttaancaaaaccaaaatactgctccatcttcaagtgccagagcatcttctcagccttcaactgaagaagagtgaagtaacaaaatttacaagtggcaaactacatctattccataactactctgctgcattatgagtgtgtttagttaacttcttaagaacctactactttagtgntatcagaaagaatgtttaaacattttcattggacacaatgtatggatattacttgtttgcattaatgcgaagtactggtgctaaaagtcctcttggtctgatctcatggtaatccaatctggcgatattgctttatgaattttctaaat

SEQ ID NO: 27996 - DNA, 454 bp, Oryza sativa
cagcagcaaggtatcgcttcatattggtggttggtcattctcaaggcaggatagatacacaaaagtgttctaagttcagcaaaaaacagtaggacaattactgaggccgtcacgatccaatagtggtaattgcatgcaaaacataactaccatccactattaacttatgatttagtacgcgcgtacaataaaagatattctgctgaacagctaactagacaagaacatgtgcgtgcatgtacacagtattatctgatgatctacaccctgaatttcataattcatatacgtgcatatttcaacattggtgaatgttcaagggaattaaaccttatgatccttgcgaaacgatgaatttgacatgcttgctctatgattatgattggagcagccagagtcgcttctttttctacctgaacgctgtttacaagagaactggttaaatcatatatct

SEQ ID NO: 27997 - DNA, 403 bp, Oryza sativa
  unsure (1)..(403): unsure at all n locations
agctgaactactctatatattgcccatcctcatcagantacacacccaaggatataataaatgaagaaaaaacccttatttgcttcacacttctcacattctgacattcttcaaattttcggacctgaggcctccaatattatatttctttttttggcttggagtaccaccattgccacaatctcgatgaactgggccccttctcaaaacctctcaatctctatcctttgcctgcaacaataaccagaacttaacccantatatcaaagtcatgaactggatggtcggttaacagttcgcccacaaaaccaagatcatttccaaatgtccatatatggatcacaaggctgcaccattactatcctcttcattcccccatcaaactcgtgaactcagacattga

SEQ ID NO: 27998 - DNA, 369 bp, Oryza sativa
tggtgagtgataactgaagatgagctgttgcatgttatcactttcaatcaataattcaagaacaatggtgcattgtcataagcattgctcatggtgaatctgaaaatgctcaatctggagcctgttgccaaatcttgaagtagtgtgacaaatcaatgagcttcattaaaagtgcaccactaaagaagtgcgacaatcaatgaactgaataggaatatattcattgaagttgaacagcaaccttgccatccatggcgcccagccgcccagcacttggctttctcttcaaccgtgcatctttggctcaatcccccaattgtctcacctgaaacaccaccgcatcgacgaagccacaagctctcaatccca

SEQ ID NO: 27999 - DNA, 384 bp, Oryza sativa
agcttactaaagacctattagtatgtcttatactctccacccgaggggtagtctacagacggtctagtaccaaataagactctgagtgaaacttgcttgcacaagacttgcaattcaaggcgtagtccattgttcaagttgtgagtaagtgtagcttggagttctaggtggatgttcaaccttaattggtctccatcgaaccgctggtatataaacagtacattggaaaaggcaaatctcagtgggattttgagatttggtgggggattgttggaattaatgaatgggccttagcccactcgaagaataattctttggaaaatcacacaagcccacctcatgggatggcatgcatgtggagtttagtaccaccttgcttattct

SEQ ID NO: 28000 - DNA, 445 bp, Oryza sativa
cggacactatgatactcagcttgtatcatagtcgaagcctatttggttatactaaatttattggtcaagcggtatgttagagacgtcgcaacataatcgttaatctttctcttattagataatccacccgatcacacatatcaattggcttgttaaattagtaacagtgattgtgtgcttgtgtacctttttgtagcaaagtccaattgggttgattgatcctacatgttttttcatcagatactactcatcctgcatatttatttcgcaggatccgaatccagatgtgcatagtatggattcatggctataagcttatctcctacgcttcaggaatagatcagtcagaacatcaccgccggcttgccttcgtcgccagcaactggtgtgctcgcctatacgggtgggtggcctattatgccgtccgtgatgggcatctacatct

SEQ ID NO: 28001 - DNA, 247 bp, Oryza sativa
gagtatatgagcaccaactttacattatgcttatgctgtgcagaatatactgctcacttatctgtgagaagcctcggtgccggtacagactgtggctatgcgattactttatgtcaagaccatgataacacagtagtatatggcaaatcagacgaggggtctagaataccggatacccacaatggggggtaaatactgcggaggataagtgggccgctcgatggggacaaagtattaccggtattac

SEQ ID NO: 28002 - DNA, 436 bp, Oryza sativa
tgtgaccataaacaaagcactatcgagagatagcccgaattactacgggaagtttcttttctaatgaaaataagaaccagcttttacgatagtatgcaccttccggtattcttggtcgctaactatttcatgttgatattaagaacgagggtcatgcaatgcctaataacacggtaactatatcaactatacactttggtgatccttggtgttagaacacactttataagagactccaacattagacacttgagttttgatgtcttgcgacacacaagatcaactgtggggtgttggtatttcttaacgacattacaagagatataattcctcagaatggcgcagagatactactggatattatggtacaaagtcatatgcagcgccggattaccttgttcatttacccggagtatctcacagttcgtattattaa

SEQ ID NO: 28003 - DNA, 276 bp, Oryza sativa
cttaagtcacctgtggcatcaagctgagtagtacatcagacttgttttcattgagctaaagaccttatccattggtgcaaacacgcgcgacacctgttccatcaacaaaactatatgagtattccagagctcacatcaaaatagctctgctgaagacactatttaggtggcacaaagtgatcaacattgtcattatatcagaaagggtcacatgagaagaaggtaccactaataggaatgccttgacaattcactactgctatctaatgttacact

SEQ ID NO: 28004 - DNA, 302 bp, Oryza sativa
tgtgcatcgactacaccgaccttttcaatgcttgtctctatggatccctaccccctgcctcgcatagatcaaatcgtcgactccactgcggtgtgcgaccttttgtggtttctagatgcatactctggttatcatcagattcgcatgggtagggaggatgaggaaaaaactgcgtgcattacccccggaggaacctattgttatacatgaatgcccttccggttaaagaatgcacgtcctacttttcagcgtactactctaatttctttggggagccaaagacgacgtaatgttgaggcgta

SEQ ID NO: 28005 - DNA, 275 bp, Oryza sativa
agcttgccatttttctagccccacacccatatactttctcatggaaaattaatatagcaaaagttacagttgtaaaaagtccatatgcactatagttacggttgtaacttttgtagtttctcactgtaactgaatgtaggtagttagattatttttatttactacatgtgtcatgactaattttttatatataaatttgtgctagatgaaattttctacgaagatcagatatgatgcataataataggtaagcatgatattctaaccttcaactg

SEQ ID NO: 28006 - DNA, 423 bp, Oryza sativa
  unsure (1)..(423): unsure at all n locations
atgacttggaagttttatttataagcactgcattccgctcggtaattggtccaaaatattccaaacaaccgatgcttattacacatgtcattaaggtgaaaccaaactacccctatgccttgaccttttttaacagaagaaccactaaaataattcttccaggtattaacttaactaggcaaacatcttcctcataagcaatatctacatgatggtctactataaaatcacatgcaatttggcctctcatagatttcaatggttcattagctcaatcatantttatcaaagcatatgcccacttgccaattctcccacttagaattggcctttgcaacatgtgtttaataacatcggcttgacatgcaactatgcatgtactagataacaaataatgccttaattttgtacaagcatagtata

SEQ ID NO: 28007 - DNA, 309 bp, Oryza sativa
agcgtattaattttgtttctgggacaagttacctagggcctgcgtcagaaaaatactccgactcaacccggcgacggactagtaccacagaggatggcctcctgggattcaacaaaaaagatcgattttgaattttagctgaccaaagcccgtacagttattttggggaataagtgcccactccgacgttcctgcgaatcgaaagaaccccctactcctggctggattcccctgacacctaaaagacttcggctcaagcataactggatgaaaccattcgcatgttccaaagttgcataacccatcaat

SEQ ID NO: 28008 - DNA, 270 bp, Oryza sativa
agctttatttatcgccttttgaagtgatcacatgactataaaaagggcaacatggccattttggaaaaaagataacggtgaactaacggtatgggtataaacgggatcaagacgaaatctcagaggtatacaagggatgtgacaaaattcaagggcatgcaaaggatggagcaaacttttaggggtatgtaaggaattgccccatttttcttttgcaaactttgttcttgctccctttttgttatgttcttgttcgggctaaccaattgc

SEQ ID NO: 28009 - DNA, 357 bp, Oryza sativa
tgaactggccagcatcatggcatatggtgttgaggcattgtccaatatatattggcactgtgaaatgtagtcactgttcttcgagaagcacttgagggtgctttctgcatgtgctcgctcagcggagtctctagaattgtaaagcttttcacataacagctctaactgtgctaggctctccattgatgacatgaataaggagctccaatttttcagtagaccaagtatccaatgttaatatccacgaatttgcatgaatgttcgtcacaagcttatagttaatgcactatgtattcggttcaacacgaaacttgaaaagtaccacaagagctttgaagctgaaatatatgattctag

SEQ ID NO: 28010 - DNA, 277 bp, Oryza sativa
agcttatgcaatatctggctctatgtgaccataccacttgccttttgtcatctacttattaatttttcccatatatgtttgaataatgggaatgaaacaatcagtttttctatcatttattcatgcataacttctgctaattctgatatttaaacattttgatagtttcattttcacagtaatgcaaaagctgaagagactctttactcatgatgttggaggtgaaagtcaaccttttatcttgtcatgcttattgatgctagcatcatctacaatt

SEQ ID NO: 28011 - DNA, 452 bp, Oryza sativa
gggtgttagcagtcaaagaggaaaatacaagaaataatgcctaagcataatatcgacgaaaatgctcgatattccaagaggtgtcaacatgagtaccatcttcacgcttgagtcggtatgaacctggccgagtaacttcaaaaattatgaacggtcctttccataaaggagataacttgtgccgatctcgtgtagtttgaattttccttaaaaccaggtcttcgactaaaaaagctcgtgattgaacgttgcggttgtgataacgtcgcatcccttggtaataccgagccgactggatcaaagctgtttcacgggctttctctcatcggatgagatcatccactcgggtttcttcgtagcgctcctctctgtagttaccagatcgtaaagactcgaaatctacctcgcttggcaacattgcttctgaccataaaccagaaagaatgatgact

SEQ ID NO: 28012 - DNA, 372 bp, Oryza sativa
ttgcgagtctaggactatcggtttggctaggaagtcaactttctcaattctaaggttaacttccgggcatatttgagttgcccttatattccttccaggggaatgtactatcattggtacacgtaaattttgggttttccaaccatttcttttcacaaaagcttgtgatatgaaagaatgggaagctcccgaatcaaacagaactattgctggtacggagttgacagagaacatacccatcacaacgtctggagcattctgagcggtttcagctcgaatgtgattcacacagcctcgaccaaagtgtgtggaagcacgtgaaccttgttcacttgccttgatgctaagacgagactgagctgccgctggagt

SEQ ID NO: 28013 - DNA, 254 bp, Oryza sativa
aagctagtttttttattgtcttgaacaaaccgccaagagatgtcctcgaaacagcccgtggaggaaggaatgactcggaacccaaaccaagttgacgtgtttaaaagaatgccaaacctatactggaagacaaaccatgtaggatgtgttatataggccagggaaagcatatgaatccgaagtattcatcaaagccggacttagatatttggggcccctgaacgaaatgctaattgggccctaaaaatggaaaa

SEQ ID NO: 28014 - DNA, 279 bp, Oryza sativa
agctttgtttttttacatgtgctctgaacaccaagtggtaattggggacctccacgctaattaattggaaaagaccacgtctttaaatatttctatatattggtacacaatcatggtcaattacatatattcttgcaccggggataaagctttcttcatcaggcccattggtaaaaaatccacccatctttctattatcccactatctactaagaaagaattctggccaaagagttctatttaatctaatcttcgatcaacttgtcagccttgaagccc

SEQ ID NO: 28015 - DNA, 273 bp, Oryza sativa
agacttttctatgggaaagaatatcaaagtagatgagacaacctgaatggcaacatagtcctttctgttcatgggcttgcggatgtctgacctcgctatgaaaaaatgccaacgagacagccaagtaacagttgacatccataggtccaacactatgacaaacaaatggaccacaatgcggaccgcagagatacctataccacggggaacactaaatcgtgacaccaaatggttcaatttgcataacaacatgtatagcaccatcaatcatgc

SEQ ID NO: 28016 - DNA, 124 bp, Oryza sativa
agcttcaattttggtcaaatacttggtcacatgctggtaatgctcatctagaaagtgatagtcttatactccctccgtcccatcttaagtgcagccattagttttctgattctttaattatttt

SEQ ID NO: 28017 - DNA, 325 bp, Oryza sativa
cgggaacctttaaagtcgacctcgcagccagcaaacttatttttgtgctcacatttacgggcaataattttgggaatagaccaaacagccgatgaatagcaagaacaccccgtaaccaacagtctactttcaaaaacatgtcagcttctattttttcgaacgatgcctcggatagcatatttgcgtgcaccgcgttgtataacacagcaaactgcattttgttttttgtgggttgaaaattatattataaaagctcaaatttggatttaagatcggttctctaataaattgatatatccaaagtttttttgcgcaccgtttataa

SEQ ID NO: 28018 - DNA, 456 bp, Oryza sativa
  unsure (1)..(456): unsure at all n locations
tcctataccatggtggaccacgccatttatattaaaaacacaatgtgaggagcccgtattatcgacctatcatatcagcccctactgaggtaaatgcaaagagagagattgttgaacgaatttgtctaagaaatcgcttggaccgagcatcgtcatcaaactttagtagtatagctaaaacagagggaggatgtttcaattcaggcaggtcaattctacctcccttgcagcaaaggttgtacacaacctttctcttggacaccanagatgatgttttaactcntttttgataccaaaacacagcaccacagtatgggcactcgtgtgttgtgccaccataatatgagcgttcacgatagagagctacaagttagccacatcaagggaacattgcaagtatgggaaaaggacatatatggctaaaagtacgatagttaacctttgagtgattcaaca

SEQ ID NO: 28019 - DNA, 240 bp, Oryza sativa
cttttaatatttaacaagggggaaaaaaccctaaccgtagaaaacacccactggtcaaggctgaaatccgcactccaaaaatttaaactagtttggcaactcggggaaagagaacaaaaattgtaaaacgaaaataatgggagattaaacgaattcagaatatctgcacaagtaaaatatacctacaaacttaagggtcattatttggtgccctaggactccttgcaaccaagacaaacc

SEQ ID NO: 28020 - DNA, 262 bp, Oryza sativa
  unsure (1)..(262): unsure at all n locations
tggggggagacatcgnttcaccctattgaggagacacgtatgactattgcatattctcactttaccaacgcgatttattatacttgaaaactacataataatttgctaattataaatatatccaatgagataggatacgctatagtctaaccatgtaagacaagctagatctctttgacgtaatgagaaaatacgtgatctaattttataactactgataatatgggtgacttggtaaatactctctctgacgtgaaatata

SEQ ID NO: 28021 - DNA, 266 bp, Oryza sativa
agcttgtgcctttttatgcacatcaatgcatatcggtcggatacaagtttctattaatgagtccatcaaagtatctctctcctttttcatatacaaacgaaccttgttctggctggataaaaccttcacctatccatctccatatcaggtcatctctgccgatgatataatcctccggaaatatactgagatacataaaacatgttttaagacgagaaggcatatcccaataactaagagatattatccagcgcatgtccttcaca

SEQ ID NO: 28022 - DNA, 401 bp, Oryza sativa
acagcttagatctgatactacgagtggaattaaggattctgttgtattctcacagtgtaattctccaagcacaaggagttttagaaagaaaggcacacttcaaatggagaataactcatcttttgtggatgctcagagtgattcaatggaggatacaaataatgaacattcagcaacagatggttgtgatagttcaaggaaagaggaatgtgttgatgagagtatattcaggcaaaaaactcatggcacgtcctggaaagtgattgagcaagggcttctattgtaaggattatagatttttggaaagaacatgttggtcccttgaaatgatcagcttcatatgaattatttcactaccttctacttcatcttaatatttgtatactaatgcccaactaact

SEQ ID NO: 28023 - DNA, 267 bp, Oryza sativa
agcttttaagtttattgtgatggtagccattcacagtgaatgggaatagttggaggcggaagtggcgatggggaattgggagtaaaggaggacaacgacgggccaaacctgtgagggtagatgagtatgcacggttatggttatgctatgaatgtttaaaagaaaattttttaccatataaaacaggaaccatgaaatgctgaacagcggtacaagatttggagcacagcaaactggtttgacaaacttgggacaacatattttgaa

SEQ ID NO: 28024 - DNA, 353 bp, Oryza sativa
gctggccagtgtataagacccctgtacgatgttgctagagattttgtgtgattttatcttcagctttgcatggtctaaaaattctagccacccactgaaccctggaaaaacagaactgcaccctttagcttaaaaattcttgaggtcttaaacttgcctaaaattcctaaattttaggggggtagatacctatcagaaacttattgtgaaaaatttctttttacacccctaaaaggcttttacccctgtgttgctgggttgctctgtcagaactgaaactaagcttcttgtcttcttgatctcctttccttaagttctatctagaatctggctaatttgtaatgctccttgga

SEQ ID NO: 28025 - DNA, 265 bp, Oryza sativa
agcttttcttttttatgggtgaaaatggctgcacacctaacctagttacatacaacataatgattgctcttcaggccaaagcaagatattatgaaaatgttgtgaagctgttcaaggacatgcctgttgccgggtttcgtcctgacaaaataacatacagtattgtcatggaagttcttggtcattgtggtcatctggatgaggctgaggctgtgttcattgagatgaggcatgactgggctcctgaagaacctgtatatggtct

SEQ ID NO: 28026 - DNA, 222 bp, Oryza sativa
agcccaactattatgtcctaggaggccacacatcgcagactgcgctcaattaacacaagaaggaggcacggagtaagcggagaagcacaccagggggaaaaaactaacctctagcggacctgggatccaggaataccgacgcgtaataggataacctacgcatgggaatcctcgggcttcagaaaaaaatcccacgttaccgaatggcaatgataaataaaa

SEQ ID NO: 28027 - DNA, 375 bp, Oryza sativa
cctatctgtcgtatcgtgataatattatatggatcattctgttactccccaatagcatacatgctgattaattcccgtacaagcactctggataaccccaacctcaattctccgatgccaatactccaacgtcaattaatattactagctgtacgagtttcgagatatcagaaagaaggaagtgcattccaacacacactatctctcttcgcttatacaatacagcttgaactaatggcttcaacctactcccaaaaagacgaactgaccaattgtctaataaaaagtccatccgctgtacggagattaaaatgatccttccgtctggactcctaacaatatcacatggcattccttatcctctcatacacatct

SEQ ID NO: 28028 - DNA, 104 bp, Oryza sativa
actacaatgcccaaagcaggtctacacacaatgggcgatatcgcagcaaagggcggcctagccaatgccgccgactggaagaacacctgcagagcccagctaca

SEQ ID NO: 28029 - DNA, 317 bp, Oryza sativa
tttctgcgtactgcgacataaataactccgaacacactgcttaattgacaaataaaaacggctataatacttccacattgctacgaaaaattaagttcattttcgagaccaaaccatttggattaagacatgtggagcttatacccaaaattaatgaccaaatatgctccccgcgttgaagcccaaattcacactaattaaagcgaaccgcggtactttctaaccctaatttaatggacatatgcaatgcacgggctaattcaatgatgccaccgacgtttattacacacagaatacaggtccctccacaaaacaaa

SEQ ID NO: 28030 - DNA, 275 bp, Oryza sativa
agcttatgtacttttattaaaatttggaggtagtgtgattagacccaaatgtgttttactgatttgattttttttgtcccattcgactgccacatagacaaaaacaactctattttagaccaagaggggataaattaaacggttttgatggtataccaaatttgtaagatgggtgatgtttttggacgaacatattaatagttgagggggcaatatatatagaagtattccctataataaatgagtgacttatcattaattgctagtagtaaata

SEQ ID NO: 28031 - DNA, 303 bp, Oryza sativa
actagcttacatgcgacctaagggggtcacaacaaatagttttcttatattctcccctttccggtctattatctcctatactcgagcccaacggtgctccttccctctatacgctcgagcggagcggcactgaggcgtttagcggagcggcggcctagacggcgacagggtcgggcggaacaaaggcgagcggagaccgtgctggggtggccgggcggagcgtttgtggatctggggaccacagccgtggcggcgacgatgagacaacggcggcgggcttggcatggaggccactcactccgc

SEQ ID NO: 28032 - DNA, 275 bp, Oryza sativa
  unsure (1)..(275): unsure at all n locations
agctaggtncattattattatgtacataataaaagtgtaaaacaccgaataacttattacataactccaggtgcataaacacaggacatggcccttcactgaaaacatagatttttgaacaaatggagaattggtaaatgatgtttgagaaaagcatctagtattgaacatcaaattaatgagaatgctgccagggacctaaccaaaataaatacttaaatgcagtctgaatttgctgaacgtgtcgaggtgtaaaggtatatctaagtatctaa

SEQ ID NO: 28033 - DNA, 451 bp, Oryza sativa
  unsure (1)..(451): unsure at all n locations
taagcttcatatgctaggtaccagaattaacggaagtttctttttcattaaaaatattgatattgtcatacatttgttgcctggcccaagcaaaagaattcactcttgtgaaaatttatctttaggctagataatttttcaaaagcagttaataacaatttcatattcttcgctntctctaaatcatgcttaagaaaaataatagtatcattagcatattgtaaaatagataaaccatcatccaccaaatgtgtgacaactccataaatctgaccatcaacttttgttctcttaattaatatggctaacacatcaacaactatattaaaagaactggagataacaggtccccttgccttaaacccttacaagttttgaaatttaccctcacttgatcnattactttaataccaacatgtcttcattgaatgaaagaagcaatccaatcaca

SEQ ID NO: 28034 - DNA, 267 bp, Oryza sativa
agcttgctggtttattttttggtactgaaataacataagcatgctatcgtgaaaaattattttactgttggtaagctcccatgtttcttatgtacatgaattggttggttatttgcaaaattagaaatatatcctataagaaagctatctgtaatggtcaaaattctggcactgaccttggtgctggactgctgttgcatttgtgatgataatgctactggtatacttgatgggaacactagttaagaagtttgagaaagagttgat

SEQ ID NO: 28035 - DNA, 457 bp, Oryza sativa
tcttgtggaaaacgccgtctttcccaattttctccaaacgccaaacgtcatcagctagtgcaggaggatgatgcttcttgtaaactgaaacatgaaaatcttatcattaatttcttctttaacactgcaaggatagaactgacgaacaggttgagcatgaaatgaataccaataaggacataccttccccacggtgatccttcacgagaaaaggattgctgacagcttcctgcactctttcttcgatggagctggcccgagagatcctctcaccaagtctgaactttctgctccttatccagctagagttgtccgtgaaagaaatgtcgcggatagatgcaacacctttctcaagcacaatgatcacctcgccggataacagtggcctcttgcctttcctttcaaagactatgctctcgctgaactccttctcggtgactccaagcgctcgtcaacg

SEQ ID NO: 28036 - DNA, 301 bp, Oryza sativa
ctatagaacactaagcttggagaagatgtcttaggtggagtcctggcttataccccagatgagcgcctgtgaagatggagccgtacgcccgctaattcgctgctgtttagttccgaatggcatgcctgacacccctttgtgataatggaaacattatcgaaataataagaggggcctttatattatgtttgtgtggccgaacccggcttgtcctgggacagcgattaatacactaaccttccggaacaagcgatataccggtcgcgacaacaaaatcccccgcttcaagaatctcgacccg

SEQ ID NO: 28037 - DNA, 482 bp, Oryza sativa
  unsure (1)..(482): unsure at all n locations
acactatacaaactcacgcttctgatggaactcatctacccgactgtgagtatgttatatacatgtgtcaaaggactatcttggtgcccatnccatggcacagcataacaaggggcaccgggaccactgctgtgatgcaaccccctgctttcggtaatggtattctcggcactgaagctcgaacaaaaagctgaagcactgtaaccgattattaatctgcagaggctgcaatgcagctctaagacaccacgttatcaaacagtaacatgaatagaactgcatctgcatagttagagacacaaatcctagcatgatagaacaatactgtagtggagtagtaattacagtgagcattagagcatcagttgcaactgcaagccaaacattcatcagtaagatcagtctgccttagtaatcatgagtttgacacgcattacatcatgccacgatatgaatataataattctgtaatgcaagtgtac

SEQ ID NO: 28038 - DNA, 306 bp, Oryza sativa
agacaacatgaaatatctgaataggttctgccttttgaattcttgatcaacatactgtactaagaccctcctcctgccccaaataaaaacttctatttgcacataataaacataatttcagaccaaaactgtggaaaattaaatatctatgatcgattttgctattcaaaactagccttaaatgtaattccagaccaaaacaaaacctgcaaccccatcgtttcccttatattatactacttatcagtgtggcttattacttattagctaccaaacctatttataggtgacagtttatatacatat

SEQ ID NO: 28039 - DNA, 267 bp, Oryza sativa
agctccattcttttttttgcaggaatggccccggccgtaagcacaccaaaagatgaccaagctcaacccaaagtgcctcccaagtccgacatcacgaaccaacagacctaaaagtaaacctttattttcccaaagaaaaccacgagaacactctcaacccacgaaagaaaaccaagaacattatccccagaaaacattacttgggggaaactaagcccaaaagaacccagaatctttactcgagcccactctagaactaaaaagggc

SEQ ID NO: 28040 - DNA, 278 bp, Oryza sativa
tgtctttagcaattggctcccttcctctaaagatacgcacccgtgcataatccctgtacggcttttcttgtacaacttagcttcatgcataacatagaatttgcttcgtatcgaaatccggccaccctcatcattgccatggtggagatcttgaaaaatcaataatcttatgaggggcgttatgcagtatgctgcaaccatatcttacggatcactgcccgcaacctgactagtactttgttaggtactggcggagtataaacgtgtcgacgaaaaca

SEQ ID NO: 28041 - DNA, 287 bp, Oryza sativa
agcctaaatatcttttttcaacaagaagaatattcatgggctggcatttccctaaccaacagtatgggagaagatcaaccattatggtttcaacaaacctcataaggggcccgggaagcattaatttttatgaccacaggaaaataccttcgccccaaaaaaaattcctctgtttgaacaaccaagccgaaacgctatcctcttattgtaaaaaaaacaaccccacacaaaaatatagggcgcttaaattatccaaccctttaattataaataaaaaggtatgaaaa

SEQ ID NO: 28042 - DNA, 407 bp, Oryza sativa
  unsure (1)..(407): unsure at all n locations
tatatcccacagtgtgccacgcaaaagaggcagaaccggtacacttaattctagcagccttaatcatttgagcgtttaaaaaatcatattcctccaaatgtntttctactgctagctcacacataacataagcggcggcatcatacttaccatgaagactatgcaacttatattctacccttgttagatcattatcatgtacctaatatgtgatgcgtgaagaagtcgctatatatccttgatggtgaagacgatgacgttgaacatgaccatcttggtttcccttgcgcattcctgccatggatagcctgctacgaaacacatattcaagaatatacacgcttcctataaacactaagtagtggcagttcaaaactcacacacactctagctcttagcaagctctt

SEQ ID NO: 28043 - DNA, 248 bp, Oryza sativa
cagcttatctcttcatagagagggagaagcacacccacgcacacatacatgcacgcgcctctctgtccctctggggctctgactggctggctcccttgaggggccgaccacgaggcaacacgggacaacacatcaagcagagaacgatcgccatgcccagaccaactcctcctctcctctaacgaacgagcgggtgagcatgcaagccgcgccaggctgcccaagtgccaaagagccaaccgcgcgca

SEQ ID NO: 28044 - DNA, 463 bp, Oryza sativa
  unsure (1)..(463): unsure at all n locations
ttaagattttgactacaatcatttttctaaacattaaatattatttaagagagtcaatatagcagatccgctgatattgttaagcccggacgacgaagagcatttgctatgcagatcaataatttttcacacgtatggccaatataatatcataatagcaacatgggcaaatggagccgccaggccgcccgattagaggtggttccgttgcttaagagagagtttgtcagccccataatctttcgcgcttagcagacgcaacaaaaaaaaaaatcgaaagttcagttttaaaattatattttatgtttcttattatagcttatttttcactgtaggcttttaattcagtaaaacgcatatanttaaagtttgcatacaaattggtttttttctaataagtgctgcgtcttataatgagcagtgggcaaacgactagtaatagtctagtacatttttttctttt

SEQ ID NO: 28045 - DNA, 271 bp, Oryza sativa
agctaggggtattttttaaaggctagagatatattttgacatttgtttatgacatggtaaacacttttcgtccaaatactacaatgctttgctgaaggtgtatgccaacaaaaagctttttgacaaggggaaagagctagctaagcggatgggtgatgaaggttgcagaactaggccctatacattggattcacttgtgaagctttattccgatgcaggagaggtggagaaagctgaatccatattgcataagctatcatataagaacaag

SEQ ID NO: 28046 - DNA, 392 bp, Oryza sativa
atgggcacacaaattttacacattgtacaggtgaaataccttccatctatggtgggctggaaccataaggaccattacagatattttgccacctgggaccggccaaaaattgcacccgacaaaagtagacctatgtcgagtgcaaaatccaacccatcacacgtgaacaaatacctgggatgggcctcaaccgatggcctcacctggtatgaccttctgatggaccatatgtgatgtgcacttcaacatgtcactggtgggccatcacaagtgggccgatctaacgtagtgaatattccacggcttagtagggcaactgtactgctgtactgatctgacgaattaaattaaggtaatgatcgaccaagcaaacctctccagtgccaccgtaa

SEQ ID NO: 28047 - DNA, 449 bp, Oryza sativa
  unsure (1)..(449): unsure at all n locations
actaacttaagctcgcactccaatttatcgagaatattttgcaaggattcaattcaccaggtacaagtctattccaatttgttatgctaattgagagtgtggcatctaaatcattttatgctaatcgaatcacatacttncaaatgaaccataaaccgatatgttattattccttaagaaatatggaggcttgtgtctgaacatttctgaggaacaatgcatagtaacgagcacaaacattttcaagtcaaaactttccaatatcaaatatgtgcatctggcaagtaacataagtggttacttcacatatctggtgaatatcatagttcctcttatattcattaatcgtgtgatgttttctccactttgtcatgtaagaattatttggcaacataagttcatgttagtatggtattcatctaaatgatgtggtaattaatttgtatatg

SEQ ID NO: 28048 - DNA, 413 bp, Oryza sativa
  unsure (1)..(413): unsure at all n locations
tctagattntctttgaagttttccggcaggttgaaaccagtcatgcactaccctgttttcacaacaaanagtgaaaacaaccaaggttagcctgcaaaggaaaatgactatacagaggtaaatataaagcattagtttaagtaatctctatcatgaatcttccccggcaatggtgccagaaatgcttgttggtatttcttaacgacattacgagaaatataattcccagcaatagcgcagaaatacttctggtatattatggttatagagttcatccgcaagcgcacagatataccattgtagcatttcacccaagagtattccaagggtatcgtatntattttatcccgtgggaagatcatgtagagagaactcaactaataatttatatattacttgccataatcatatct

SEQ ID NO: 28049 - DNA, 292 bp, Oryza sativa
  unsure (1)..(292): unsure at all n locations
acctgcagcatgcaagctaaagggttttattggaactngaacaggtaatgaattatccaaaagaatatgatcattcaatggattacattcatttacatgcaaaccacccaatacgtaaattcattatgcacatatagtttgctctgcctttatatttttgttagtgtggttaggtagtcaaaattccatacttaaaatcctctgcttattatttatgacaaaaccccatgttgaaaatttttgacaactttatctgggtttaatatttgctacctgctagttaagaagatat

SEQ ID NO: 28050 - DNA, 376 bp, Oryza sativa
gcttggccgcacgtacaccaaacacacacttatcggggttcatctttatgcgggcggagcggaggttctcaaagggtttcgctagatctgaaaataaagattcttggttgcgcgtttttacaaccaagacatcgacatacccctcaacattacgtcctatttggctacccaaagaaattctagtagtacgctgaaaagtaggacctgcattctttaaccccaagggcattgatgtataacaataggttcctacggcggtaatgaacgcacgtttttcctcattcttcctagccatgcgaatctgatgataaccagagtatgcatctagaaaacacaaaaggtcgcaccccgcagtggagtcgaacatctgaactat

SEQ ID NO: 28051 - DNA, 446 bp, Oryza sativa
  unsure (1)..(446): unsure at all n locations
taagatgtagccaaaattttttgctgtgggaagattaacttatttatttttttttgagaaagagagcagccctctcccatttcattaatgaaaagcagactaccatcggttcattacagagttcataaaactaaaaagaaaacaaccatccaccctgggggaaacacacccagtaatacagaaaaaacacacagaattacttcagaagattaacttaggtacaactggtttgctaaatcctatagtattattgaggatataaagaatgatcaattaacgtctaaaggtggtgttggatgcccacttttccaacccctctctctcgtttttcgcgcgcacgcttttgaaactgctaaaccgtgcgttttttacaaaaaagttctattcgaaagtcgcttaaaaaaatcaaattaattcattnttgaaaaaaaatgctaatacttaat

SEQ ID NO: 28052 - DNA, 425 bp, Oryza sativa
tcatgaatagaaaaatcaaacaggggcaactgacacaaattagttactggctgaattggctcttcaagagcagagctaactgggtgtaggcagtaccaaagtaaagccccatgagttttggctgagatagctgacagccagagctattttatatcattgagctctgctgagttatttgtctacatggatgccacatcgacataaacttatacatgtaaatgctacataagctaaaacatatgtagtttatgcaagcaagtgatatgactccagcaacatttgaagaggagagtgtcccctttgttgtcctaatctagtagattttatgatacaaaaggaaattaacctattatgtgagatgcaaatcggctcttattggcatcccacgtctgaacttttttatcttgcctagtggaactagagac

SEQ ID NO: 28053 - DNA, 266 bp, Oryza sativa
agcttttacctttatggagtcagtggtaggcgggggtatattaagggttgtacactgaagtgggatatcgagtacggtagtgttaacagtaaaatttggtaagcctcaaagagaattatcacgtcgccaatagtcggattcctgctatattcggttaagaaaattaatatattaaaggaagattatctagaagtgaccgagttccaggagaatgcgacatggtagtttatctattaattaggcaatatttgttagtgtcccataag

SEQ ID NO: 28054 - DNA, 272 bp, Oryza sativa
agctttatgagttctaacatttaggaatattcttgtgcttcggcttacacccaagatacaatggtgtcttaaaatctgccaccaacatactgaacttctcgaaatccctctcgctatgatatgggtctttaacatcacgcaacatatctgatagagtttgagggtccacatctatggcatcaccgcctgatggagaagggacaaaaatgccatctcaaactgctgggtcgttcatgacatccagtacttcatcagctgctacatccggtgac

SEQ ID NO: 28055 - DNA, 270 bp, Oryza sativa
agctacgcaatttttttttttgacaggggcagcgcactcaatatcctcttcaccaagaccttggatgatatgcagaatccttggtccgagctaaaacccaagcaatgcgccttttcacggagtaattccaggaatatccgcaactccactcgggcagatcacactcccggtcacctttggcactcgggaaaactttcgcacagagaatatcagctttcaagtcgccgatttcgagacagcttaccatgccatactcggacgcccggcgtt

SEQ ID NO: 28056 - DNA, 273 bp, Oryza sativa
cctttgtacttaaaaccgtggtacccaaaatgttcatggattccgttcccgcaaagccgtttatctgcgcttgtttaaacttctgatttgataccggcggtctgtctgttcactgcgcagaattcactccctcctaccacctccatgtactatgaccgagacgtgtcgagccatctttgctattgcaaccgtgggaccattgcatatagctagtatgctacctgccacccacacaaacgggctattcccaaattccaggccaaagctttgatt

SEQ ID NO: 28057 - DNA, 463 bp, Oryza sativa
  unsure (1)..(463): unsure at all n locations
tactgtgggttggacatgcgccggtaacgctagaatggttacgactgcgtgaatgatgctccggcgacggcaagaaacggtatggcaacggcgtcgacccccttccagactccggactgccaagaagagaagtggaacggctcaacgacaatctaaggatgctacacgaacgaggaactgcgccgaagctcacccgagagcgaggaacggacgacgttggccggcggccggacttgaggaagaaagagaggatctccttgttggctgctcttcagcgcgattcccttcgcaggccttatcctagaaccttggcgacgctcatggcgcagcggctaagtcggagatgcaccggatcatcgggaacggcgaagcgaccgacggcggcgctctggacaccgangacgccgacgagctctacggaatgtgtttgatccatggaaaggatctatagaacacgttctta

SEQ ID NO: 28058 - DNA, 302 bp, Oryza sativa
cccgggatgtttaattgattgaaggaagagaggaaggaattttttttttatataaaagaaaagggagagtgtagttaaagaagggagatattggaagaatataagggagaaaggggtaatgaatttttaatggggataaaaaggtgaaaggataatgattggaaaaaaaaatattaaaggaaggaaaaaaaaaagttagaataaattaggaaaggttgaagaaagttaaatttggaaaaaaaaattagatggaataccagggaagggagctaagttttgaagaaggagattaagagtaaatt

SEQ ID NO: 28059 - DNA, 379 bp, Oryza sativa
gctgaagagaatacacacgtgaggcaaatatttttttttgggcttctacttcccaggacggaataaaggatggacacaaagcaaactttgcgaaatagacggaaaggactgcacgctgataggagactgggcctacagtgaaaggacttttcctaattcagcccgaaaaggaaaggtgaatataattacttttccaattcaaataaacactgaaatgaactctgaattgttaaaaacacttatattgctcaaataattgcaagaaaaatcttgacaatacttggaccctccaagcatttaacaaaattataatcacaccatctaatgactaatttaatatgtggataatcactgaaatttctttgtatgaataaaatca

SEQ ID NO: 28060 - DNA, 293 bp, Oryza sativa
ccgggattcataaaaccacctgcaagcagcaagcttactttcaatccaacgggccaccacggccaagaaggacccaacgaggagtgacacaacgaaaacctgcgggctctctggcacaattagggcccgcagcctcagggagagatagaaaagagagtaaaaaggaataaaggaaaatcactcctgtacgatcgaatcacaccaactaaaccaaccagaggggggtgaatggctgggaacatagtaaaaaaacccggaccgggcatccaaccgcacggacccttggttcatcg

SEQ ID NO: 28061 - DNA, 397 bp, Oryza sativa
gcgtcctactaattgctacttctatctccaacttccaagcattattaaatttaattaaatttaacaaacaccacacagtttgcctttatactctcaatggtcatgtacttcttcattaaactcaactcttttgccgttgtgtggaactgtaatgatgcacgctgttagtgacatggtcctcaatattgatatttgttaactttcagcctttgtggtgaaggccttaaacataaatcaaagtatcatgagcaagcactaactgggaaactccataatacagcgatccaatgagttgaggactttatttgtcactacagaaaactaagatacctgcgtgagtctaaacattcaatgtgtgattaagctaaacgaatacctgccaacttgtttcatattc

SEQ ID NO: 28062 - DNA, 442 bp, Oryza sativa
actacatggatcacctctaccaatgaatgaatcgcttatcacattaatggacatctcctatgttggacgtggtgtttgacgtaatgctctcttttacatgccggttttaccttaagtgggtgtgctaaatttagtgcggttggttatgctcttttgaactgaacaaaggaatgatcccgcgttgattgatgaatgctgcaagaacataatctatatgttagtctgaattcagtatgtaatgaagatgtttgttactaattaataaatacgaagtaaacaattaactgaccactaatcatgtcagcttagatatatgcttataattatgttgcctaagtcttaccttaattggtctgtggtcaatatatgtgagtataccacactagtttgttcttcagcatgacctaatttaagtgtgagtagattatacgagtaaattgga

SEQ ID NO: 28063 - DNA, 277 bp, Oryza sativa
agcttgtgagtttttggtgtaagagctttcagttataatgtaataatgaaactcagttaagatcaataaaagtttagttagtaaaaaattaattccctgtcctaagtagttttccgctggttctcttcttgtgctcctgtctatgctagatggtgcttactcgcagcaatgggaatggtcccaacaacaacaacaacaacaacaacaacaacaatggagagaatcccacgcttgcccaagtcctggctcaacaggcacagctcatgaatatgatgat

SEQ ID NO: 28064 - DNA, 210 bp, Oryza sativa
ctaggagtggcgtcacgcccgaccgcttcccttgagaagggcgatcgccctggcataacgccgggggctactgtcggtgatatgggaccgggagtatcgtgactagaggcttgaggcagacacaatcgcccacgtggcctggcaccttctgggacgtcgggcccgagggtgaggtgtacgccctcctcctgatttccccgaggggggggg

SEQ ID NO: 28065 - DNA, 261 bp, Oryza sativa
aacttttttattgccgcgtgagcagggccaactagagcaaatgaccatgaagggtccaccctgcttcacccaagaactccactacctgaacaaggaggacaggctgcaccgttggctgggggagaaacacagatacacggtgtaaggagtggagttcatcaaacgacgacgacgggaagagggagatgacggaccttcgctaccgcaccaaatacgaggccagcgaagtctatgagtatgatgacaacgatgatgactatg

SEQ ID NO: 28066 - DNA, 286 bp, Oryza sativa
aaacggacttaaaattagcttgtggaagacaagcccatttttttccccattcacgaactgtgaggttcaacagatcaatcggcaaagaagatcaagatgtggcagacgagtcctctgcctaatcggctgcaatggggcaagggtgcatgaagacatcctatggatcttatgggcaatttaatacctgagatgttaactgcatgagtcagggtaaccggttgtcagaaataactttgaagtggattagttatatgcagcgatggacaatatatcgtgatatccatat

SEQ ID NO: 28067 - DNA, 270 bp, Oryza sativa
agcttgtatattttaaataaccaggaaactcatgctccatttgtgaccatgtcgaaaatgaattaagagcacggaaactatacccatggaaatgcacaagttctgtccaaagaaagaggaaacaacgtttaacttaagcaaatcattactaccgaccctaccacattgatcaacaaattggccgataagctccattggtgttctagcatcctcacctgtgaattttgtgaagatgggcacctcaaatccttgcgggtatgggactgaatc

SEQ ID NO: 28068 - DNA, 271 bp, Oryza sativa
accttatctatccacttaactcgggcagaatccaccaagtattcaagagatcaatcttctcgactacatcttatgagaccataaccagggagtatccacttgttctcgtatttgcaaattttgtgagcattactcggttgtgtcttatattgaacctctaagggtggaagaagctcttaatgaatccgattgggtgatatcgaatcaagaggaggtgaacaattttacccggaatgaaatgtggactttggtggaacgaactctgcaaaat

SEQ ID NO: 28069 - DNA, 229 bp, Oryza sativa
cagctaagatttttttctaaacacctaaatgaaaccaagaaacatcaaaaaccaagaaaatcaacctgactaatgagaacaaaaagccgtacatcacaaaaatgcaagaaaaaaataaaaccaacatcagtgaaccaaggaaaaaacgcaaggcccaaaccactaccaatcaaccctcatccaaaggatacagaacaagaaagcaaaaactaggcttagtacatcccca

SEQ ID NO: 28070 - DNA, 475 bp, Oryza sativa
  unsure (1)..(475): unsure at all n locations
tctacactagaaagtggctttccacaagaatatcattcatattaacttctacaatgaactatgctttcttttcttgggaaagttcatggcaaaaagaaaatgagaaaaggagggaaaggcatggctatgaaaaaaaagaaaaaaaagaaagaagaagatggaaataaagcttgtcctaaaaacattgagcaaagttgaaaagaaaatatagccatgccccttccatgatcatgccaagagaaccaatttggagagaaagaataggaaaaaggagaatcatttctttattccagcattccacaacatatttccattttcaaccacaaataaagacccttgatctaggagtatgacggatgatcttcttgagtccatatttctgactntgcaatatatatgatgcaagtatgtcaccagtttatccctaccaagctccacataacagccttagaatagggatgaattctggcatact

SEQ ID NO: 28071 - DNA, 269 bp, Oryza sativa
agcttgccactgtttactataactaaagcttgtcgtgggcatccccatggctgcgcctagctttgctagtgattgcccaattgatttgtttggtcctttggttgagtttgtgaattaattcctctctgaaattgtggtggatttgaaggaattgcactattgcagtgtttgattcaactcaattatctgatgattgtggaaaaggaatttctcctcttttattttctctccctcattctctctctctttgctatttcttcaagcaagcc

SEQ ID NO: 28072 - DNA, 334 bp, Oryza sativa
aaaattaagaactcaccctgagaataaaggctcgcaaatccttcagcattccttccctcttaaacataatcaatctcatcaaacatgtgcctgacctgttgaacagaagggtcaaaagccttaagcaaactatattgcaatatatattaacggccaaaatatgggaaaacgtgtctataatggaaaaacataatatatggcaagtgcaactaaatttgtctgaaacaaaatatattacagttgtcttaatgagaccatctattattagtcctacaataccaaacttaaattctggattgagatattgacatggtgtctattacattattttgac

SEQ ID NO: 28073 - DNA, 431 bp, Oryza sativa
aactagctgagccaatgatgttgcagaatcttacaagctacttggtttacttctctccgacacctatcattgaaaggttgcacgggagtccacggggaactatatcttgcaaaccattattggcatgtagcacgtcaatccttggattgaagaaattgacctgcatgaaacgcctctgcatgttgctggtaagaccacaaaaatttatgagaaacttggtcagaaagggagttcggttgtaccaaatgatttgctcgatttgccactaagtgcacctacttgttgtcaagttttctcttgggcaagaattataagtacccttggcgttgccactgttcctactcttgtaattataatagaataacgcactattcatagtttgcgtgtcaccttcttgtttactgtcatttgtgtaaagttaactattaatt

SEQ ID NO: 28074 - DNA, 312 bp, Oryza sativa
cccccggaaaaataaaggcgaccggacagcaagcaagacagagaaattactttcccagacataatggagccggagtctatgtatgcaaagggcacgcgcaggccatggaagagtaaaaagaaaaggaacaacgaaccactcatatgtgcccaggaattaggagcaaagaaatatccaaacactcgagtgacgaacggcccaaatggaaaaggtggactgcagagacaagctcattgggtcaagctaagctaaggggctagcttcatccggctacccaagatcgaaaaatgcgggatgaccaccggggggcac

SEQ ID NO: 28075 - DNA, 341 bp, Oryza sativa
acgacggagactacgtaacaataaaccattgcatcagaataaataccgccgatatggtaccatatgcaccatatatggtaacttaggtatcagaaatgacacctcgtatgtatcacattcggctcatatgtactatgtacatgacataaaagctagcgcggtgcatcattatgctctgtgttttataaataaaaccacaattgtacacttcttcattggttaactaatctttacccaattataatctggatccaccttgaccatcgtacataaatagtgaccaccaagcctagagaaaaaccatgatggcctatggcagatactgttgggggtgactatcc

SEQ ID NO: 28076 - DNA, 291 bp, Oryza sativa
tccacctgcaagccaagcaaggcctaatatcctgttttaatacagaaggcataccaaaaaaccacaaaaaacaccctcattaaagaaaacaaacttaaaaaacagctcaaacacgggatatgaatttttcaaaaacgaaaaaacttaaaaacccaacttaaatatggatgacataatagttgagaaatactcctctatgcaaatgataaatgtattcccaggtcttaaaaactgcaccgtgcagatgataaaattatgggggcgctttggaacgcaatatgaaccctttcc

SEQ ID NO: 28077 - DNA, 386 bp, Oryza sativa
  unsure (1)..(386): unsure at all n locations
atcgcttatgctgccttgcgcggcgtngacgaggtcaaacgctgttccagccttgaaaatattctgactagtgttggctttcataagctttccataagttgtattaattgtgattcaattcttagcaggatctgcagtctcaaccagtagatgaagtatcaaaactgagaaaggaattgcaggatacgttagtgatgtatgataaagcttgtgaagatctcgtacatgccaagaaaaatgttagtgatgtgtgataaagcttgtgatgatctaaccaagataaggttaagttcttttggcttgctgttggcttgagttactgtgaccaggtatttacattactatgtacatgaagatatctatattcatatatataaagtgaatgt

SEQ ID NO: 28078 - DNA, 254 bp, Oryza sativa
  unsure (1)..(254): unsure at all n locations
atanaaactcagctcgagacatgaaaaaagagcaaccaagttaatttatgcctcctacacgaccgcatatgaacacgtagttgacagagagggaggtcaccgtgcacacccacatggtgaagaccaccgtcaccacggcgaggcaggagccaggccgccgccgaccgctcattaagtaaccggcgccgacgacgacacccacgaagaggaccaccggaattatgaccaactacggccagcacgataaggtggcg

SEQ ID NO: 28079 - DNA, 235 bp, Oryza sativa
agatatccccaaaaagaccccgtaacgcaaacgacgggaccaaacaaaacaattcgggaaccaccaatatcaaacatggacacaataaaggtggacccaaagggaacctaatcaaaacgaacaacacctccgatgggcccctacccacaaatgcggaaaccggctatcaaagccaccgaccggaaaagagagccctcatgccaaacctaacgcccgagttagaaaaataacgccc

SEQ ID NO: 28080 - DNA, 162 bp, Oryza sativa
gcgcatcagacggccatgtgacatgactatagtattagagtcaaggagtcacttgcacagctcaacggaaggctgcgtattcatctcttttgatcgagcctggcaccagaggagaaaaagaaagcacgcgacgcaaacatcgccgcgccttcgcgaaccctg

SEQ ID NO: 28081 - DNA, 263 bp, Oryza sativa
agcttactgttttattaagctgaattgctgaaaaactgtgttggtgtaactgacctcatataaaatgtgaattactttctgtgtggtgttatttttccgatggtttaacgttttgcagattttagtcagatttcatatttactaaatcataaacttgcctttgctgagcttttcttttccccccggaaaagttgcattcaacattctgatctctctgttattttgtttttgatgttgttttgtttttgtgttttttttttgaa

SEQ ID NO: 28082 - DNA, 353 bp, Oryza sativa
  unsure (1)..(353): unsure at all n locations
tgatggagcacagaccgattgatactttatttgttcttgttaaactatttccggtacctctatgccttagaccggaattgttagngatcctctacctgtgagatttattgatgttggcaaaaagaacgggaacagtgttattattggggattctcggtccaagaatatgattaaaaatgcgaatgccgaatatcataaagttgctaagggtgagttatctattttccataagaccaaaaagccgaagctcacttttgagatgcttatggctaagtacaataaaggattatccggtcaatgatttgataattaaacttgtgattccgaaagaccaagatcatcttgtttaaaaa

SEQ ID NO: 28083 - DNA, 266 bp, Oryza sativa
agcttgttagtttttggtggaagagctatcagttattatgtaataatgaaactcagctaagatcaataaaagttaagttagtaaaaaaataattccctgtcctaagtagatttccgctggttctctttttgggctcctgtctatgctagatggtgcttactcgcagcaatgggaatggtcccaacaacaacaacaacaacaacaacaacaacaatggagagaatcccacgcttgcccaagtcctggctcaacaggcacagctcatg

SEQ ID NO: 28084 - DNA, 272 bp, Oryza sativa
agcttggaagattttttatggaaaaaaatgctgctttgtaaaaaaagctaaaagcaggataatacaaaaaaagagaagaaaataagaaaagaggaaggagtttgggaaccagaatttgataaaccaccatgctgatacttggaggtggttgtattggagatcaatgaactgtcgtcacattgagcaaacagttttcttcagtcatctgaaaggacttgctgaaatttgaaataacttccatggatgaggatcaattgtcaaatagagcattt

SEQ ID NO: 28085 - DNA, 388 bp, Oryza sativa
actcaagcttccgagcatcatgaaaagggccgaattgtacaagaacgtcctgtttataaaatgtacaattccatataataggttctgcgcctggttaatcagaagggtatccacaatcacatgggcaccaagaagtgccattgtatcttcccatcatcaagtcaagaatcaaacctttttctttcatgcatccaagcaaggataagaaataaaattgcctgggttagccacctcatcgaaattattatacctccactgttcttgttgcaaaccaagcatcatctggagttttcggcattataaccataaaaaaatttaacaacaagcacacttctctccataataatcagaccaatgctactaaacatgtgccctggtgttattggga

SEQ ID NO: 28086 - DNA, 278 bp, Oryza sativa
gaccagacgagggaatttagatgtgctccaccttcacttcactagacaaccacgagtgtgaattgtaaccaaacggtagggggtaataataaccgtggagactaacgctttgctgtggtgaccggatctttcaggcggtggggcccaatggcaatggcagcgggagaaaggtggggccactcgcccgttcgctgcttcgccggtgaagataaccaattagacaccctgcgggttgtcacggagtggcagtacactaccggtgggactgagccactgac

SEQ ID NO: 28087 - DNA, 67 bp, Oryza sativa
atcttctaccccccacccgaacccaaaaccacacacagcgagggagcgaacctttttttatttcccc

SEQ ID NO: 28088 - DNA, 451 bp, Oryza sativa
actaagcttatcctcttcgcgaatacgccgtcccgcagaccagctttccctggtacactcagatttggtcctacgaaaacggtgcctacagctacctttacctcgttgggctctccggtatgcgagtcggcagcaacaacctcaacatgttgggtgcggggtcgggcggccgaaacccactcgttgcgtacctcaacacctccgtgcccatcacctttctcgagaagaacgcctacgaccttctaaggcgggagctggtcagcacggtggggtccgacaccgtggacggctctgcgctcggccttgacctgtgctacacgagccagtaccttgccaaggccaagttccccgccatggcgctcgtgttctgggacggcgcggtcatggagcttgcaccgcggaactacctctaccaggacacggctaccgggctggagtgcctgacgatact

SEQ ID NO: 28089 - DNA, 462 bp, Oryza sativa
  unsure (1)..(462): unsure at all n locations
ctaagcttgctaggtagctcctgtcacagcctggtatgatgatggtgtgtgctcactgctgagtgttgctcgacgctcttagctggtgaatcatttatatttnttaatattttctgacacgtttatatttcttcatgatacagttagaagtaactccttactgggtgcagaacatgataatatattttattcagaagtagcagacatcacgaagatgaagtatgagcaaagagtaacactctactctttgtgcctataatctttcattgatcaaataactgaattcttgtgcttcgtatagtctgcaagttcacctttttgtggctatcccaacatatttgttaccttttctgtttggcagctacatgttgtttcacgcatcttggttgccattgaagtatttgtgtaacgtataaactgtaataagtatgaggtgtggtctggttcttattttgctctctt

SEQ ID NO: 28090 - DNA, 278 bp, Oryza sativa
agcttcttaatttattttttaaatcaatagaaaagtaaaaaaaagatgtatcacataagtaaagtttattcttccaacacgattttatttcacataaatatgggtataagagatgagaacaactgcatgcagatgtctgagaaagtttgaagagcgatgtttgttgagaccaaagatgatgggccctatggttactgctcgattttgggatggataggggcggtgcggttagcgagatggaatatagagcggcggcaacggctgccggtgaagagatg

SEQ ID NO: 28091 - DNA, 262 bp, Oryza sativa
agtcaccgtacattaaataaccgcacgactaatggccaaatggtcactttgaaaatgcaaccactataagaaaatacctttcgaacgatctatgctggttactcagatctaacggctcccaatcatatatcactataatagttcatttgaatccatcgctgaatttatgccaccaaactaaacaaacgtacttccgtgaattatcacggagctatttgaatagaaatgcaattcattataacattagcctctgtttgtataa

SEQ ID NO: 28092 - DNA, 436 bp, Oryza sativa
tgcctcttcctccgccaccgccattacgcgcatgtagtgtttagcttgcctcttacaccgccgccgccgtcgcgcgcatgcagtaaccttgcctccgccgtgggaagccaccactagcttgccagattcggcgtcacacaaatctgcggtgaagtatctcaattcgtcggttccatctgcgacccatctgatcttccacacgcagcagcaactgtcgctgatctgccgaaacaattgaagcactttacacgcagttggagtcttgaagaaatcgttgtaagtttgggcatttatggtttttcttttttttcctcttctttacgtacgtgaagccggcacaaattattaggcaataaattgatttggtacagttagcacttagcaatacccatcttaactgtagaatctttttcctcttagacaactgttcacaacc

SEQ ID NO: 28093 - DNA, 258 bp, Oryza sativa
  unsure (1)..(258): unsure at all n locations
atatanaanantgaagntatgtaaaaataatggtatgggctggagacactactctttttccataaactcatggccaatgctcacaactgtcatagccccattgacaatataataccagcaacattggtaaactggactgtagctgaagatacggacaagaattacatcggactatacgcacagaaccaagatatgaattgtgtcctgccgcttctgatataaccaatttggaaaccgctgacacagggaacccatcta

SEQ ID NO: 28094 - DNA, 272 bp, Oryza sativa
agcttatgttgttgaactgaaggagtattagctgtgatcaagaggtagtttctacgaacaatttcgataaactttttttgagcattccgtagcatctatcagcatgtagacgtgtattttggttggcagccggctggaattaattttatcttatgtttttcatgctggcctgatgttcagttaattcaaattcctgtatgaccagttttttgcgcaaatgtttcaaacatgcattatatttttttccttttttgtctgatgtcttatctgtt

SEQ ID NO: 28095 - DNA, 433 bp, Oryza sativa
tgagggtcggcacatcataacggaagtggaagaagatggacgtcctagtgccccggccgaagccgtcaagaactatgtacgtcacagcggttgggttgtgcgggataacgtgcctgtcagtacggtgtactggcgaagaacaagggcacgcggagatcatgagagctttgtcccagattcggagaaagagatgctgtggaccacaatgctcgagacattcacccttcctgcgggtacagaggacaaagtgaaaaggtggactctgaagaaaatggcagaacagtttcagagcttcaagggagatctataccagaagtatatactgaaggggcagacaccgaacttcgacacattcccaaagctaagggatcactgggacgagttcgttgcatataagacaggtgaacaaaggcaggcgatgatggaaagaaac

SEQ ID NO: 28096 - DNA, 270 bp, Oryza sativa
  unsure (1)..(270): unsure at all n locations
tttttttttaaanctttcagagaaaggaattcctatttatgaaataaaattgttttttaaaaatatgcttaaaatatgaataattggcgcaagtttgggcgtgagtttgatgtaaaaaaattaaagtgcagacaatgccttgggtatcctctcttcattccaagataagggcacttaatatccttatagtgatggtggtatgtcaatatgtacttatatttagggtgcgtttagttcacgctaaaattaaatgtttgaatgaaattagaa

SEQ ID NO: 28097 - DNA, 242 bp, Oryza sativa
  unsure (1)..(242): unsure at all n locations
atgaagataccctatatttggaaatacagatgaagttcatctcatgaaaaagattatgataagaatcttgctttacacccattttgttaggtgattattgtagaacaaaaatttgtctttgttttatgccatggccaaatgcaatgcttgaaaattcttacaggagggtgcagacaacaactgcgtctaccggaatgtggtgcaccacatcgccngagagttcacccaagtgctccaagatg

SEQ ID NO: 28098 - DNA, 268 bp, Oryza sativa
agcttgagctttttttttataggctctattgcactatattgtctactagaataggacgaaagttcagtagaagaagtcagaagacttccggaggagccagttatggttctctctcttcttttattctgtttattactctgatttcaatataatattcttcctgagtaatttcaatttatcttgggagaattatctcttggttagttcctaaatagcatatgggattattgttcactataatcaactaaaatatagtgattactttggt

SEQ ID NO: 28099 - DNA, 432 bp, Oryza sativa
ccctttattacatatgaaacaatatcaagtatgttttgacaatgaaaccccattcttaagcaaccaatttatcttacgggccgattgatgaatatcacaaatcccttcatgtactactttcctaacaactttagattgatcattatctaagtacttcaacaatactccatctatttttcggcgatataatatatgaacgcttgccgccgaatctttcgatcaaccttaaatataggaattttcaaatatctaatctaaggaattctccaagctatttctaactcatgggcataaatgtttgaattaataattaattcggcattttaatcaattgtaacgtgccccccaacctcctgtctgggattggtcagaccggccacgcaatgccggtcagaccgccctgtctggccggtcagaccggtatgcaaagcc

SEQ ID NO: 28100 - DNA, 273 bp, Oryza sativa
  unsure (1)..(273): unsure at all n locations
agcttggtangttcattttaccctnatgccaaatatgcatgctggaagatctgcacaggcctatggatggtcaagattgctggtgcatatgcacctaggttcataaaatctggaactacaccttttctgaaaaatcatccgcaaagaatggtagcactgttgattcttcatagcgtcagatgaaggcattttgtggtgtaaactatggaacacacatgggatgatatagtttgcattgcaagtagcaacgtgcataataatgtcttcaagatg

SEQ ID NO: 28101 - DNA, 441 bp, Oryza sativa
tgcccgccggcacatcgaacacacactattcggggttcagtttcatgcgcgtggacctaaggctatgaaggttttagctagatcctgaagcagcgtgtcttggtggcgcgtctttaccaccaagtcatcgacataggtgttgatgcgaaaacacaacgcctatgagatctgcttaactccagtgcaggtccaaaaagcttgcctataggttcgtgagcatgccagttgatttgatcctgccatcaacaagaaataaagacaaagaaaccgtggttaaatctatgaatgatagccgatcggccagctgccgatgacatatcatttatctttgagccgatgtcatatttgaatcgatcggcgatcataaataagcaagataagactaaatctactcggtcgactgtagatatcaatagtatttaatactttcatcgatatata

SEQ ID NO: 28102 - DNA, 273 bp, Oryza sativa
agcttttttgttactctatcctgggatatctgaacccctgcttaaaatatgattatcacaagcaatatataaattattagtcaagtcttctctacattatcttcccactggataaaataaatacgatacccttggaatactctcaggtgaaatgctacaatggtatatccgtacgcttgcggatgaactctgtaaccataatataccataagtatttctgcgccattgttgggaattatatttctagtaatatcggtaagaaataccaacaag

SEQ ID NO: 28103 - DNA, 243 bp, Oryza sativa
  unsure (1)..(243): unsure at all n locations
tcgcgcccagaagtaagatattattattgacttaaccggttcatnctantacttagcttctaaactcagatattaaccttgacgacgatcgatacttattcgactacaacaaacacaaaagtcatattaacttgagacacaacattatatattgaagctacattattctcttgccctttgagttttgacggagatgatcgacgatatgcatattaccattcagaacgtgatcgaactaccctt

SEQ ID NO: 28104 - DNA, 371 bp, Oryza sativa
gctacatatgggcataagggtgagacttgtattagttaaagcaccacacaagtccaaatttgccagttaaggatatcagtaccaatttgtttaagtgaagtgcaaacttattggctgggtagaatatatcaaatgggaacatgcaattatatttataaacaatcatcccaattaaataagctggatctaatatagcactctattactatatcaatctacaaaactacggtagatcactgtggtattttaacgacctttaaaatataattccacaaggccataaactttggatattaggtataagtcattgcagccacggattacattgagcattacccagagattctagggatcgatttttttataccggg

SEQ ID NO: 28105 - DNA, 273 bp, Oryza sativa
gaagcttggactgttttttaataaaagaaatctccaaagtattgggcctacgccatgcgcacactgctttaacagatgtgcttaagtccctaaaagacacatgggttcaccacacctgaaaaatatatggcatatggggcgcaaaatccgagtaaataaacctcataaaggatttaccaactgcctataaaatgaccaaaatatataaccagcccaagccataatattggtcaataaaagtgcacacttacgtggcaaaaaacaatgatattt

SEQ ID NO: 28106 - DNA, 435 bp, Oryza sativa
  unsure (1)..(435): unsure at all n locations
cgtgtgttccactggtcaatatatgtgtagacgaactaattcatatctatatatgggaaaatacagactttcggtggtttgtggtcaacggagaagtcaacctcagttttgtcgaccgatatcatgtaacaagatgggttcacattgccgaagctctggattcaaagtcttcgttcaacaaaaatattaagcatgcttagttttaagacaattttgaatgctntgtgctttgtgtgcctataagtgcactggaatgtaataatgctttatttaacgctgaagaaccataactatgtgatctatttaacacttcaatttaatggttaacgcagtttgggttcagtttagtgtaggccgtaaatcgtgatgagcagatggcttggcggcgcatcgatgatagataaatagatatgcaacccttttgtgtggaactct

SEQ ID NO: 28107 - DNA, 442 bp, Oryza sativa
tatcctagagaagaatcgaagcagtaaccttactcgactgtagaatacgctggagaggatgagaagctctcgatagtctcgcatgttaaaagtcccaatcccaacacaacagctgagctctccaagcgttgtctgtgttgcaagcatttcttgtgctctctcgtccagtgagtctgagctttgggcacactgaccaaatgcaaagcggagagatgccggccgctccgttcaacggccgcctcttcaggttcctgccgccgcaccgccgttcgcagggcaacgacgtcgccgccgccgccgggtggaaccgacccggcgtacgcaccgccgtctaatgtaactgtgtttgtgttcatctcactctgtgcgacatagaacaaagttaatactcgctccattcataagagtttgacaccatcgaatttttaaatatatttaactg

SEQ ID NO: 28108 - DNA, 272 bp, Oryza sativa
agcttgatcttttccatcgggttgtgccccctgtgacagaacaacgccatgccctttacaaacatgaaattctcgtgaattgaacgtcctcttatgaaggcggactgagtgtaaggaatgagctctcccatttagcctgccagtctagtcaccataacctttgtagccaacttggagaagctgtgaattagactgatcgggtggtagtccttcaaaagggccgggcgcctccttcttagaaagaaaaataatcattgtcgaattaaacatgt

SEQ ID NO: 28109 - DNA, 268 bp, Oryza sativa
gagcttgtattgttctttgctcaagaaaaatctatggatgatatcaagatttagctcacccaatccaccttggtcttttggtcgagcatatataatgcccttttggtaacctatatatctttctcctgcctattactgctccagaaaaagctcgatcggaaggaatttagtctttgaagtacacctcacggtatttcaaaaaaggataacactaaacatgggaaggcttgaaagaactgagtttagaagaaccaatcttcaaccatag

SEQ ID NO: 28110 - DNA, 455 bp, Oryza sativa
  unsure (1)..(455): unsure at all n locations
acttaacatacatatagcatatcatgttatgtgtngcaatatatagaagatgaacccatctattatataataagcatgccttaaagtataaccatgaatcaaagaatttacaattcagcttgaatcaacaattaaaatatatgatttcatacaatttataatgcaacatcttaacaagcacatatgttgaaaaataaacgcttaacacatatacctattgcatttatcactctttcttaaataacctttagcacaacataacaaagagaaattttaactttttcttttgttgagcctttttctcatatttttctcttttgtttattctgaatacgtccctgtccgcaaagactgattccaaggaatcggcacccattattttactcacatcgaatacgtcattgtttcaagactgtttcaaggattccgattcatttatcatatctaatctcttt

SEQ ID NO: 28111 - DNA, 293 bp, Oryza sativa
agctttttctttttttaggagaccatacgaggatgagcatcaaaaagaccctaaaagagccgctctcaagataaacgaggtggagagggcaataaacccaaccagaggcgttggactaaatccactcacccacaaaaaaaaggagcagacgcgtaacctaagaaacacgagcagcccacaggcactgaaagacgaaccggggacaaaagcgaacggggaacaaagctgccggaacgaacacaacagcggcaagatgaggagaaccgacacgcgccgtaagaggggaaataaaa

SEQ ID NO: 28112 - DNA, 368 bp, Oryza sativa
cgacactatgaatactaagcgtggatacactaacattgacgccctttttcttctaaatttggggtaaaaatgagcacttcaatggttagcaccatctcatcacaggccatatcctccaacagccagtatccgcgaagagttaaacacaaaaaactaataccacggtgttaccaacacggaatacaatgcattccggggttgctacactgtacgtaggacgaatttcgaccaaaataaagcacattttgtactacctacgaccgtatgcactaacatctactaagatccagagttccacacagataaacactcaatctctacacacaagctactgttaaagcaagcgacaccttgagcactaatcaacc

SEQ ID NO: 28113 - DNA, 294 bp, Oryza sativa
gcgggctggcagcctaaccattttattgaggctatctttcaaaggaaccaactaagcgggatgatccccacgccgatcacaataatgaacaaccttcaagaactcaatctttccaacaacaccttggctggcaccatcccaagtaaaatcactggattaacaagtctagttaagctgaatcttgctaacaatcaacttgtcagtcctattccaagtaccatcggtagcctaaaccagttacaagttgtggtattgtcccaaaactcgttgtcttcaacaataccaattagtttg

SEQ ID NO: 28114 - DNA, 281 bp, Oryza sativa
tgatcgttcttgctgagatttttttatcaacttggtttacgtcaccttcattttattcatgtgatgtatgacgtaaactatcacccttgtttacgtcaagtgtagctgggatgtcctcatcaatttgctaagagtagtatgtgggatgatttgtcgcaggaatgcaagccagcaaaaaacaatgaaaaaaaagaaaatcgggactaagatgccacgtggagctattatctttagttccggttggtaacaccaactgggacttaaaaacacacatattttag

SEQ ID NO: 28115 - DNA, 276 bp, Oryza sativa
aattttatatttttcaacggtgggttaagtgtttataaggccttgcggacaaatcaccacatttactggaattttattaagaatttggcaacctagaagctgcttttaaagggggtatgtccatctgactagaacatcccaaggacttgtgttgataaaaaaaattatacattgtttagaaaatggaagtttgtattgaacccaatcaattacatcacggtgcctctgcataactaagatacacacgaccacactcaacaaacaaaaaatggagaa

SEQ ID NO: 28116 - DNA, 275 bp, Oryza sativa
tctgattgcagggagttgcgttttttgacgtgccggcagctatggttctcggatttgggcacttgtcggcgaaatgacccattccttgacaattgaagcaacagatgtcttcccggactcggcattttcttttctcatttcgattcctctgtcctggcactggagttaggctgaaacggtgatcttggcggagatttgtgttgccttgatgcttctctccgttggaactggcgggttggttggccatcttctttgtcagcagaaaactgaattga

SEQ ID NO: 28117 - DNA, 280 bp, Oryza sativa
tgccatagtgtacaacaatttatttttatgagtttgaccaaattatgtgagttgtggctagatttatttttacggacattgtagcaagttgaccttaggcaagttgcagttttggttatgattattaggctcatgtttgacagtcctgttttaaattcttctatttgatagcatctctggaactaatgtttagcattttatgatgtgtcataatgactttaacctgtcgtgtacaggtaaaagaggaaaaggttaaaatcttggtagaattagcacaaac

SEQ ID NO: 28118 - DNA, 261 bp, Oryza sativa
cgatgcaaaaattgtgaatgaaagaactcaaaatgatattctcttgcttttacgggattcctttcataataatctttaaaaaatatatcccttggtaaaaacaagagatttgtacataacaaaattatgtgtctcatttctaatcctagtggcataacaaggctgaacaaacgtgcgtgccaggatgttgctgttttagggtcaggatttctcaagcttgatggtacatgatttcccttttagctgacaagctcttagttt

SEQ ID NO: 28119 - DNA, 276 bp, Oryza sativa
tgcctgcatccgcctctcccttttccttttttcgccgcgctctcccgtgcctcctaccgccgccgcgccgctcgccactagcgccgccgcttgccgccacatccggtcgcgcgccgtagccgctagagccgccgccgcgccaagccgctgccgccattagcattgccgccgcgggagccacctcggtcgccgctcggtttccgctaaaccccaccggagcccgggtctcctcgcacgacggtgagctatccattctccttcgtctccggccaacaa

SEQ ID NO: 28120 - DNA, 297 bp, Oryza sativa
gaccggcaggcacgcaagcaaaccgttcattttgggaacgacgaccgggggcgccagccactccggatggacaacccctcggatgaaaccggcccaccagaagacgcgccacctcctcgcggatgaaggcctgacgatccggggcctgccgccgcactaactgccggaccggccaagcgcccggccgcacggagagacggtgctcaaacaccccacaggggaccccgggcatgaccgccggactccaggcgaagacgccggcgcttgcccgcaggaaggagacgagcgcgcccccct

SEQ ID NO: 28121 - DNA, 278 bp, Oryza sativa
tgtaaccggacatgctgcttggatcttaacagcagctcaaactgaccaaagttatcacaaaaagtacatcagatctgcaataggactagccaaaaaaaaccttgataatactatttgatcatatagcacacctacacagaagaatgcgacaaaagcaatcgcaaagatggtcttttgagtgctttgttctctggagtctgaaaactggaggtgtttttgccgatgcacaggtgcgaatgagcgtatgaccacacagctttgggttcccatcaaaaccc

SEQ ID NO: 28122 - DNA, 189 bp, Oryza sativa
ttataattttttttccccaaaatttgggattcccatctggttgaaatcgatatattcaaaagtcttgatatcttaatccatgctacaaaaaaatggccaggcctgttttataaaccgaacatatagttttcatgttgatactttcattttgtttgcaaacctctatgttggtacttacaattgggtttc

SEQ ID NO: 28123 - DNA, 275 bp, Oryza sativa
taacgatgatgatcacacttttataagtacaagaatagctgggactatgtaagttttctttttgatttccataccccctttccccccaaatttaatttcgatcgtgtcccaagtctcattgatctacaataggaagtctttaaatgacatgacagttagaacttagataaaaatgaacattgcgacctttatgtatggtttatggaaactctgagggtagctaatatagtaaaaaaccgaaataaaatgtaggatcctacaaggcacgtagttgc

SEQ ID NO: 28124 - DNA, 258 bp, Oryza sativa
aaaaagtcccatcaacctttgcaagggaccttggaaggaaaagcaaagtcccggttttaaccccgtaaccacccccctacccgcaaggccgggacctattcctaaccctggtttgcaaggccaccctcctttggagtccggtgcctcataagtctgtggaaataatcccgaacgaattttccggaaagaatcaaacaaggaaatgccaaccagataggagagaattgagttcgccatagaaactggcaccaggcacag

SEQ ID NO: 28125 - DNA, 193 bp, Oryza sativa
agcttgctttttatttctcttgaaggcctactcaaaacccaaaatgaagatgttcgcctgaactgtattgggttggtataattcttattttttcttcaatatagaagttgatttctaacaaaataaatacattacattcgcatgcatgttatggacagagaaaaggtactccctccgtcccctaatataaggg

SEQ ID NO: 28126 - DNA, 277 bp, Oryza sativa
tatctagaagacaaatttttttatttcactatatatatttttggagctaacatggcaggttctcaatcaagttgccatggtgaaaatcatgacgaaccagatgcacctgccacatgggctgaggtgttgcaaatggggaataatattcttcaagtgatggaacggttgctgaatgcacgccttccggctgccagtggtggggtggttcagccaccgcttgttgatcccgaggatgagttgtggatgcacattcggttgatgatgatgccgatgacca

SEQ ID NO: 28127 - DNA, 279 bp, Oryza sativa
agcttagcttgttccttattcgcaaacattctcttcatgcgctccgcaattgggagatactacaccacctttgctgggcctcccctctttgacttacttccttcaccttcactctttgctcgtttgtatcttgatgccccacagatagggtagacattcaagtcagcgtattccttgtaatacaaaatgcagtcgttcggacatgaatgaattcttctgacctccaggcccaacggacataatacttgctttgcttcatatgtcgtctgcggtaaattg

SEQ ID NO: 28128 - DNA, 275 bp, Oryza sativa
tccttattagctcttttctctattttctctctgttgctagcagtcagtttgccacggcagatatggagccaattaatcttttgccttgtactttgtttcaggtgatgcatggaaaaaagatgcaacggaaagtagggagatatgctgctgttggagttgtctatcttttgcttggatgtttcatgtcaaagaaattattcgtagatggaacacctagtagacttcaaattaaacatctgtggtagacttagctatcaaagttatttattactgtc

SEQ ID NO: 28129 - DNA, 281 bp, Oryza sativa
agcttgtcacttctttttccggatctacacgcacaggagattagccgggcaacgaacgcagatgccagcaggcatggcattagtaacgagaccagaggatattgaccatacctaactaccagagaatatataacatgcaatgcatatatgctaggactatatatgacggcatattttacctatgagaaaacttagtacgcatacgaagcagaaagttcagcacgccccagacttctatgactgcttacgaaaaagtggatgtgcctagtcgctctcctgaa

SEQ ID NO: 28130 - DNA, 285 bp, Oryza sativa
tacttatctaatctgaaattttttatgcatgaagttggatccccaagacatatactaatatttgtgtgcaatcagtcgtccaaaatagagttgtagtaaaggttgtaatagttcttgcttcttcatctggccttttctctttttcttttcttcaactattcatcattggagattaactatgtttcattgcatttcattcacatgtacccggtgaatgtaagtcaattaaccagaacggtgcacaatttgtcaggagaacattgttttgacttttaacctcccccc

SEQ ID NO: 28131 - DNA, 272 bp, Oryza sativa
tggaagtgtgtgtgagagtgattgaagtgaggtccttttatagggcagttatgacggttgtgagaaggggaaatgtccgaactgcaccgcaaccgtcattgggagaacatctggagcatccacgccaaaccccaggatgaacggtgatcggggggttcggccgaaccagagggttcggtcaaacctgggctgggccctcctggcctggccttcggtcggtggactctcgggaccttcctctattcatttctcggagttttcggttgatttac

SEQ ID NO: 28132 - DNA, 274 bp, Oryza sativa
agctttttatgttttctgcactagggggccattctgggatagctgctacttatcaacggattaagaaattatttgcttggcctggtctcaagatggatgttgaaaattttgtgaagcaatgtcaagtttgccaacaggccaaacatgaacactgtcggcttcctggactgttagctcctctcccaattccaaaagaggcctggcaggacatctccatggattatattgaaggtttaccgcgctctgatggctataatgcaattttggtggtggt

SEQ ID NO: 28133 - DNA, 283 bp, Oryza sativa
  unsure (1)..(283): unsure at all n locations
tttgccttccttccaaaatataaatcggtaagcttgtccagatttgaatagcatatgcttatttttcaataacagaattttgggaagtcaatgaaaatatactaggttcagatcataagatatgttcaagaggaccaacaaaagttaacttagtttgacaagaacattggaatttccctacacaaatgtactagcaactagtaactacaatgtttcatatttttaattacataagacctgtccatgtggttaacaatctttgtttatttggaanaaacctttg

SEQ ID NO: 28134 - DNA, 282 bp, Oryza sativa
  unsure (1)..(282): unsure at all n locations
caatttttttttttcccnccccccaaagggaattgtaaaggcctgaatcgcttgttcaagaattccccaacttggcaatacatggggactaaagtgatggatgcgaacacatcaggcgcaataccattctctttcattttaccctagaatcctttctgcgtcttccacatgaatcgctttagagtgaagatcgattaacttacagtaatcacgaatggttgcaccaaaggattcatcagccagcaaaatttcagcaacctgtaaattacaacacagcataca

SEQ ID NO: 28135 - DNA, 286 bp, Oryza sativa
taagcactacttccaggcccatatagtcatagtgccaccacagtaccctttgggcgaaatactccgaggcaaggaagtcaccggccggctcagcaagtgggcggcagagttatccccgttcgacttgcattttgttgcacgcactgctatcaagtctcaagtgctagctgacttcgtagctgaatggacactggtattcgcccctgagaccgagctcgtcgaacaattatgggtgatgtcctccgacggttcgtggtcgcacaagggggcaggcattgcgaggccc

SEQ ID NO: 28136 - DNA, 265 bp, Oryza sativa
ccactttttttttaaaagggccaaggatggtctgtaaataaattgaatgcccaaaggagtaaaaatggcggaggccctccttcttttaatccaatcaagaaaagtgaataaacttacctaaaaaattcacaactccaagtaaccttaatcatgaaaagaatatatcgaattaactttctttgaaacataaccgtgagaatatctgcatatgtagtttgaaaacaaccaaacagggataacctagttctgccaaaaatattatcac

SEQ ID NO: 28137 - DNA, 276 bp, Oryza sativa
tctcgggttcttggtctctgtctttgcattgaggccaaccccgagaagattcgagctatcgagcggatgcgcccccccagcaaacttagggatgtgcaatgcgtcaccggttgcatggccgccctaagtcgtttcatatcaaggctgggagagaaggcgctacccttgtttaagctcctcaagcgctcggggccgtttacttggacggaggaagctgaacatgccctcactcagttaaaggcatatctcagctctcccccggttctagtcgccccg

SEQ ID NO: 28138 - DNA, 297 bp, Oryza sativa
gacccgcaggcaggcaagccgagaaaactgtatagaccccgcacacaccagagggggagagacatatatgcaaggcgaagcaccaacacacacacaaagggggagagagagagagagagcgcaaataaaccgcacgataagacggagccagaccacccaaaccacgaaggacgccgacggagaccgaggacacggggacaagcaaagccataggaggagcgagggcgagcacaaaaagaaacgaccaaactggaagcaaaaagaacggaacaccgaagatccgggcaagagcaagca

SEQ ID NO: 28139 - DNA, 280 bp, Oryza sativa
tgatgtaggcaaccaaacccgttttatgaatctatgtagctactccaacaatgacatcgagcccttggttgcatttatcgcagtgcaccctagcgtcgctcccaccccatggcaccatgcctcattcaatgcaatgacaagaacgaggatggatggcaattgttgtttgcttgaatatgctaacgaagtcgtgataaacgaatgagaagactcgtccgaggggatctagatcaatctggcggcgatgcacaatgacacaagaaaaagccgaagacttaaa

SEQ ID NO: 28140 - DNA, 292 bp, Oryza sativa
agccttccagcctaaccatttgtttattccaaaggttcctgatatacaacctatactttggttttaaaaataaaaattttgtttgcttttgcatccatatgtagcatctacgtgaaataacctagaccaaaaccatatacgatcgatggaacaactttttctcattaattttttccccttaactatcatattacctatgtgttgcaaaaaaaaaagtagaatgtcatcaatccattttactatcacttatatacatacatctctttaatttatgtttatacctttgatctga

SEQ ID NO: 28141 - DNA, 276 bp, Oryza sativa
ttggatgaagaagaacttagagaggatgttgatcaagctgcagccgaaatgagtgacccagaagataaaacaccatcggcttctccaaaacaaactcctccaactcctactgctccagctcattttaggagggtaaattacttgtttcaatcatccctttttagaataatcaaatttgaacagccaattgcttactagtcttgtacttgcagaagaagaaaactgccgtgaagaagaaatcggcaacaatagcatcaaagccagctccaccggtaa

SEQ ID NO: 28142 - DNA, 283 bp, Oryza sativa
  unsure (1)..(283): unsure at all n locations
agcttacaactgttttattttgcagngcatacctgtgcccattccaaccatctccagagtatgcatctagcaaattctgctcctgttttattttgataagtaaatatcttgctcttttttccatgcgactgacctcatcactctcatcatttttccttttctgtttatgcttcctccttgttggccctgttgcagactttccggtagccgcatctgaaccccgccgccgcttcagaggactgctatggtgtttgttctctatacatttcgccaggttagcgct

SEQ ID NO: 28143 - DNA, 283 bp, Oryza sativa
tcaggaaatcgtcgccgtggagagtcaacccaatgatgacggcatgtgggatcggtttgagctactgatcaggccctccgcccgcgacatcggctggtgcggccaatccaggccgaactcggcaccgtgtccaacccgtacacagtcagcatgatcctggtgatatattaatccacgtcctaatctaccgcatgcatggaatctctactaaggacgcacggcatgacaaacaaggtaattagtagattaattaatttaattgatctactaatttcgtagaata

SEQ ID NO: 28144 - DNA, 248 bp, Oryza sativa
ttttgaaccggcaattgtgtgatgtgggtaaacaaagacaatatacccaaattaacgtaaatggccgatttactctatggagcttcctgggataaacatacactaagaaatttgaaatatagttgttgtaaagatagataacaatttaaagtataagtttattgcctactattgatccaaaatgattggaacagacacaacaaacgcacgcacaaagaaatattgagtttttgttgtacgggttattc

SEQ ID NO: 28145 - DNA, 279 bp, Oryza sativa
tgagtgtgtgtgattttttttctgccactacctagtagttaataggaacgcacatatttttgtgtatgtttcttgtttgctactaaccatggcaggattgcgcacggggaaacgagatgatcatgctcaacatcaacatcatcaccatcaacgagatatagcgacttcttcacgcatcacatatgaggtacatggtaatgatcttgcaagggtagaatctaaattgccagtttttgatggtaagtatgattctgccgcttacgttaattgggagactag

SEQ ID NO: 28146 - DNA, 281 bp, Oryza sativa
agcttcttgatgctgggcccaaggggcgccgggcccacccggccggggcatgcccgtccatgaataagactggacaaagaacatccaaccaaagaaccaagcaaggaaatcattgatgtgtaagaatttgaacaccatttgttcatttgttgctaggtgttttttcatgtgaattctatctttgagtaaatttcatacgaactgcatgtaagtttccatagctaccgaggaattccggatttatgattttgctttgtataattatgcacttcaaggcattt

SEQ ID NO: 28147 - DNA, 274 bp, Oryza sativa
tcagcacattttttcctttttaattcttctttcttttggactgtcattactttgcatgacaattgatattctttgttttttccagcccaacaaggttacaaacaaggcacttggtgcacctttagacttggcattaaccagctcttctgtgtcctgtgtgaagctgttggttcaggtatagctctccctgctttatatggccgtaggtttctctaaagtggtgggtgtagtttacctctgtataaaagcatcaattataaggagaaaccatatg

SEQ ID NO: 28148 - DNA, 279 bp, Oryza sativa
  unsure (1)..(279): unsure at all n locations
agctngtttttttctttacaggtttccaactcttgagaagtccggttcaactggagacagacagagaaaaagagatcagttcacagcaactgacatggcatgattggctgttatttcatcaatataaccacatgtaaagtttcagcgttagttgctaaacttgagcaatgctgtttatgctgaaaatgtagcaaataatgagcaaattcataaggaaaataaacaatggaaatatatagaaggaaataaacctcaaaattggttgggaaattatttggt

SEQ ID NO: 28149 - DNA, 274 bp, Oryza sativa
tatcactctcacttagtacttttcttcacttcgccgctcacttcatttcaagctccatttcatctttcacctagattccatcgagaaatgcctaatgtagactgctaatttggccttctttaagctcagattttcgtttaccatcgcattgtcccatttcattggcttcaatttgcctcttcttgatttccccaatgttaatctgaaattcagagcatcttcagctcaaaccaattctgttcagcttcagaatgttcgaaatccccctttaata

SEQ ID NO: 28150 - DNA, 278 bp, Oryza sativa
  unsure (1)..(278): unsure at all n locations
agctttattaatttttcaaagatgatcttgagaggttgaagaatanaatcaatgagactttcagagataccaggaaagatactattgtgatgccttcaactaagtctgagttattacaaaacgaacgtattattgcgcatattgctttggatactaatattttgcaggcatctgagaacaacaaaggtaatgaggaagagaagaaagacgaagaggaaaaaaacctatacatagctccacgcatgcttgaggaatgtttaattgaccaagtgcctaca

SEQ ID NO: 28151 - DNA, 283 bp, Oryza sativa
ttcacaatcccttctatgcttttatcctctcttcttgctctctaggacctaactctatccaaacttgaaagccctgattcgttctggagttatcaagtgagcgactatctcattcttcagattcgcgcgaattgaaaagcaggcactgtattgaaataagtagactatcccaacaattttactaatcttgtactacaccagcaggtccccccaggccccaggtattccatcatgttgagttaaacaaaagagaacacaagtagagcagacagtgactttaccc

SEQ ID NO: 28152 - DNA, 283 bp, Oryza sativa
agcttggaattttatggaacacctctttggaattcttttagatgttggtgctggcaagattgaggttcaggaagaagggctttttggaaatttgctttattgcgtgctggcaaatttagaaacaacgaaatgggaagatttttcagaatatggatccttcttttgatagctggtggaatgcttctaagaatgagattcttctagatatgtgtagaatgaatgatccacttaggcaattggtctctgattggttacaaactttatagttctttagggaggttgt

SEQ ID NO: 28153 - DNA, 278 bp, Oryza sativa
tgtcgtagactgctttggctttattggtcttgccaagtcctccaaacccaaagatggataccatcttcggttttctaacggacacatcgatttcgatcttcctcttcttggtcggcaaatcaatatccaacatcttcatgagctcatccatgggcccctcaattccaacaagctctgccaatgttttgtacatactcaagagacgaggatcgacagttgctgggcctgcaggattgatggcaatattgtcgattgtgtacctcgcatgcctggtagcc

SEQ ID NO: 28154 - DNA, 254 bp, Oryza sativa
gacttggaaatttatttcaggggaaacgggtacctgtggtgggcacgcgatgccgatgcgttgccgggcgccgtgtggggttacgaggcgttcggcaccgcacccgtgagcgtctgcctttcctttcctcctgctccttctcgtcgatcgttggcctcggtcccctcctatcccggcccggtgcattgcattgcacctagctgctacactgagttatatactttctatgtcctaaaatataataactaggatta

SEQ ID NO: 28155 - DNA, 273 bp, Oryza sativa
tcttctctagttcgacattatctattatttttagatctttctaaaataatcattatataattaagtgtcttttcatttatttgtgtaagaaataaatggatattgttgaatatacaacatgtatacaactaaccaagattaatttatgtcggtataattccttataacatttaaagcgggatgcaatctgcgaaacacgaagcaacgcaacaccctgatcgatggaaaataattttagagccatggaagttttgttgtatttgatctcaacac

SEQ ID NO: 28156 - DNA, 307 bp, Oryza sativa
gggaacccctcaaatcgacccgcaggcaagcaatttttatgcatcacaaaaaaaaacaggccccaatgagacaaggcagaagaagaagaacacaacaagcccatgaaatgaaaagagaaccccaagatgaggcaaatgcaaccatgtctacaatatgcggaacaagaataaacctcaaagaataggaacagcgaaccagagaattcttcttctctggtcgaggttcttagaaaaaaatcaccatcatagttgtttactatccaaaccaatgcacgcaccgtctagcatatatcagattaacatatgc

SEQ ID NO: 28157 - DNA, 272 bp, Oryza sativa
tatacaaggttaaaacctgtttctctgctgacattttatcgaactcatcgatacagcatattccacggtcagcaaggaccatggcacctgtaaaccaaagggtcaaaattatttgataggccactttatgtatgtgccattaaattagtcaagaaaaaaaatactaccagacccacttgcatcctactccctccgttccagaatataagcatttctaggttttttttagcaaataatgaagttaagggaaaagattcccttttagtcatctc

SEQ ID NO: 28158 - DNA, 256 bp, Oryza sativa
aatatacgaattttggaggatttcaatcatataggaaaattttctataaaagcctttgaaataaaggaatgaatcctatgttatccttttgaattcctatggaatggacaagcatatagagattttgaaagaaatttagcaagagctctaacctcttaaaaaatttccttcaagtctatcactcccattcgattcctgcgtttttttctacggtacaatcaaatagtcattcctgtatttttctgtatttcgcaat

SEQ ID NO: 28159 - DNA, 248 bp, Oryza sativa
agatgaagctactgtcgctgccatgttcataaccctgcatgcatataatttccggagcaagagattccctgtgtgatgaagtccactccactccatcccagtgcattattattcggtggatacctaactttcttaccggccattgacaatcgaggccttcctagtcctaccctacggcacacagattattggggaaaaaataattatactggctaataggagaaaactattcgttgaccggtctaaca

SEQ ID NO: 28160 - DNA, 129 bp, Oryza sativa
aggaaaccagcccgaacagccagcaaaggccccaaaaggaccgcccagggaaaaaggaggggggggggcaaagacagccaggaaggttggctagaagccgcccccctttaaaagaggcggaaaagccca

SEQ ID NO: 28161 - DNA, 279 bp, Oryza sativa
ttctgatgtgaattcacaccttgtactttgaccatatagatggccaaaagtctcttcaaaagaattagccaaaatcatgccatctggtagaaggtgcatggtacaatagttagtgataaaacagaactgtaaaaaggtgtttactggtagaatatcatcaaataactcaccatataatatgtttagtggtggcttgggataattcttttcggttagatagtcattcccacacctttgtcctggtgctgcacaaggagtggtcggcaatgaaatacaatt

SEQ ID NO: 28162 - DNA, 286 bp, Oryza sativa
  unsure (1)..(286): unsure at all n locations
cagcaagcaagcgagcgnggcaatattgacaagcacacggagcacgggcgagcaggcaagccaagcgcaaaagccccacaacacaacaacgcacgccgaccctaccccacggcaaaaccaagggaaagacacacgcgccggaaacaccaacacacacgagccggggacaacaaaacaccaagcaccaagcaaacaaaacaagaagcaaacaagaaaacgaccaaagacgcacccaacacccacaaagcaagccagcaagagccaccactacacagcacccggcaac

SEQ ID NO: 28163 - DNA, 276 bp, Oryza sativa
tgtttctttgggtatgacttttttttctacatgggcatgttcatttattctaattctcaaagtgattatcgatttgagtaatcgtgtctatttgaaggtttccttgcttaatctcattgcaatatcatcaacatgggcaacagtaattgatgtcatggataatgaggtatcatttatagctgctctaaaacttatttgcaattacttacaactgattacttttgcttctgatatccttattactcttttaattcaatcaggttctagattgtttgg

SEQ ID NO: 28164 - DNA, 282 bp, Oryza sativa
cagcctccaattttttttccaaggttggtgggggcttccttccaatgagctctgccttcacctccattgctgcgaaccctggtaaccaaggggccactaagtgttgcgcaacttaaggagaacaacaattcaggaaaggggatggtgtgctgtctcaaagggctcatcggggatgatggtggataggcatgccagctcggcgggactcatcgacggcgacccgcgctggttctggggtcgagatcaaggacgtcgtcactcttggcaccggcgtggaaaata

SEQ ID NO: 28165 - DNA, 279 bp, Oryza sativa
tctggtaacagttgtttctttatgaagctttagtttctcagacaatatagattcttacctagattttaagaatatgtagctataaaatacagaaaatgaccatctagttgtttatcaaaatcttaaaaatttctctagtagagcctcagcttctcagaatcaagtcgtaaaaaaataaataataattatgtagatttctccggagtcacaatgtgatgtcggatttcttcggccggagctttgccgccgaggaggaagccatagtaccagcacattcga

SEQ ID NO: 28166 - DNA, 285 bp, Oryza sativa
agcttgctcattatcgcctcatcacaactaagatttgagaaccattaggtggcttcacctggccaccagcaattcatgatttgggatgttacgttcagcgccatcgaatatgttaaaactgtcacattgaaagttaatagtaagttgtgcacatggaaccaacattgctagaaaaaatgtgagcgtaataactgctgctgaaacaaagaaatatgcaagatttacccccagattaaatttccactctgcaagaatatgattgtttagaggcataagcttttgcaa

SEQ ID NO: 28167 - DNA, 281 bp, Oryza sativa
tctcatgagaaatggtgagttttttttgtgaaggctgtagctcctcatacaagacctccaaagaagcatgatccttctttagagccttgaacttgacaatctccttctcactataagcatgaagctcctcaaacatactcacaagctcaccataagaaacatcatcacaatcattatcactctcactatcactaagagatgttaccttagaagagccctttgccatgagacaaagtggagcgaagagtgatggagcctccttgatggcaacaacggccata

SEQ ID NO: 28168 - DNA, 274 bp, Oryza sativa
tgttggaacccgggagatacttatttacgttccattcaagcagatcacacatcctgttttacctttaatttgacctgaaactgaaaacattgttagataatcgttaatggtcacgaagatgatggccttcactgtgaagtattcccttaggtactcgtcccacactttcaatccctctttccataaatcagccatatcttccaacaatggttcaagaaatatgtcaatatcaataccaggctgacggggtccctgtatgaggatacagagtagt

SEQ ID NO: 28169 - DNA, 302 bp, Oryza sativa
ctgggacccaaaccacctgaggtctcaactgttatttatttatgcaaaacccttttttggtttttttactggcaatactggcccttaatggagcccacataatataatagccgctaaagcctatcttctttggggaagaatcaccataacaacttcatttttttttggtactgtctgctaaccgaaccctcgaaattaccaaagaaagaacctattttgctggatccatggtctgagtctactatgaataatttattggagaacattaatgttgatctgaagaagttcgctgtaagttgcat

SEQ ID NO: 28170 - DNA, 278 bp, Oryza sativa
agcttcatgcttgcacttgcagacattattcaaggtcgaagatatggtcaggtagataatttgttttgctaattttgattttttttaaaaaaaaatcatgtaactattttgttttgcataagctatgaataactggtttaggatttattttgagaataaaatattgcttatctttccctttgttaaggtttctaagcatttgagaaaaatatggattaccaccttccgagcaatggatgatattaaggaaactgtgcgaaatgctggtgacagtttgt

SEQ ID NO: 28171 - DNA, 274 bp, Oryza sativa
tgagtgtgtgtgattattgttttgtcactacctaaaacctaataggaacgcacatatttttgtgtatgatttcttgtttgctactaaccatggcaggattgcgcacggggaaacgagatgatcatgcttaacatcaacatcattaccatcaactgagatatagcgacttcttcacgcatcacatatgaggtacatggtaatgatcttgcaagggtagaatataaattgccagtttttgatggtaagtatgattctgccgtttactttaattggg

SEQ ID NO: 28172 - DNA, 276 bp, Oryza sativa
agctagtttttttgtttgccttcaacacgtataaaaagtggcatgctggcacctcttaatgaaaaatgtttataacaaaacgaatgttaaagtcagctcatgagttaaccgaagtgacatggatcatggattaatctagactataactgcttttaacttatgggtttcggattacaagttgctcgatctgacagtacaacatataatcagcgaaaaaaaaaacagtcgaagcatcataaatccaaatcggcaaatcaatcaaagacgagtgagaca

SEQ ID NO: 28173 - DNA, 284 bp, Oryza sativa
agcttgattctgtactcaatcaatcatcaaaacaaattcaggaaccatgtgctttaaatttggaagcatacagtatgattctgatatggtgtacaagtaagaaggtctaaactcgtgtttgaggtgaaaagtatgttaggctgttaacgtagctggtcccaggatattccttaagaatcgccaccttgattgctactttatttcaaactcaacaacactacataagtaatgtcatatgtaaatcaaggcaagaagttaaaacaagtataaagcacctgcacacc

SEQ ID NO: 28174 - DNA, 282 bp, Oryza sativa
tccacatgattctattctcttttcaattagggagtgtttgaagagaaggggattgaggagattgggaagatacgcaaaacgaggtaagccattagctcatgattaattgagtattaactattttaaatttcaaaaatggattaatatgattttttaaagcaactttcctattgaaattttttgcaaaaaacgcaccgtttagtagtttgaaaagcgtgcgcgcggaaaacgagagacaatctctcctatctccacctaacgaacactcccttagtagaccgg

SEQ ID NO: 28175 - DNA, 262 bp, Oryza sativa
accagaaaaaaattaatttggttaaactaaaaagactaataaaaatacaaggactttacacttgggggtgttcaatcctaacatacattattattttaagcactataataatgatcatagaaatagtaggatctaccttaatgatatccatgaccataaacacggtaatgatctttatattctcggtgccgaagtatgttttagagtagagggttgataaaaaaaaaatgggcctaactgatttcagccagctagatatgca

SEQ ID NO: 28176 - DNA, 271 bp, Oryza sativa
tgatccatgttgcatttgttttttttcctgttgccgttggcgacgaacatgaggccgagctcctcccttcatgactagggcgcccctttccctagatccagcccagatgtaacgcccggagcttagcgtggttggattccacgggataccgtagtgataaggcaccaatggtggtcggggaggttggaaagccggcctcctgctattgcatctcagcgaagcaactgagagccagggagcgaaaggcggagaggaagagagtgagatgcga

SEQ ID NO: 28177 - DNA, 274 bp, Oryza sativa
agcttataatgttatatttctgggtatgccaaatttgaattttgacatttcattttagaattaatttacggggttcttttttgatttcgtcgctctgcgtgactggctaagagtatatgggtaatactatattgccttgactagattgtattattttcggaacagctaagaattattttatcgtaggttagagccgatccatatggacaattgaattgccctgttactgttttatactcttttaaaagaaaatatggacaattgaaaagaacac

SEQ ID NO: 28178 - DNA, 273 bp, Oryza sativa
tatagtaagcttatagctacttgctcttagaaaacgcataatgtactaatatatatctatcactaattaattaagctcttagaacagttacaatagcagactattagccagctacaaacatattttaataagataaaagatgagagagaagagcagcggactacagatctgtagctagctgcagcacggactccaagacacaatatatgtataacagtgggaccatatactaataatatagtaagcaattattgtatgaattggctattagat

SEQ ID NO: 28179 - DNA, 290 bp, Oryza sativa
  unsure (1)..(290): unsure at all n locations
tttgcaggctanaccttattttgtttatgngacaaacatgctttactattgactgattaaacaataagtaggctccatcgatcagctagttggctaacggtggatggcgaaaacaggcatggacagctagagcttgagctgtatgcctagcttcacaatccacattattattatcttgaaaagtgctatataatttatgaaaatatttaggcttttattaatccacccttcctagtgaagatttcctgctccaccactgctgacggtgaagtaaacaaagagtaaacacc

SEQ ID NO: 28180 - DNA, 307 bp, Oryza sativa
cggagggcttccagccttcccctattcctccttaattcctgtgcccttcacggcccggcggcgtttccccgccgtaagcggcgggggaccggtgcagcgcccgatgccaagctcgcgcttgcctcctcatccttgagcgccttcaccccaatactttcttcgtcctcgcctcgtcgcgtcgctctgtcttctcccctccctgcctctttggttgatgtcttcatttcttcccctttcgtgcgaatgggaccaacggcggatcaagcgagggcgccgcagatcgactggcggcacagcttctccccat

SEQ ID NO: 28181 - DNA, 276 bp, Oryza sativa
tatgagcgccaagcgtcatgtgtttttcccgatgatttttctgggagtcatccatttggtgacatttttggtgatgtaagagttagacattcctatttttatttagtatctgaaaaacctgaaggttttcaatgtgacttcactctatcttgaaaccatgcatgaggcccataatttgcaggataaaatatgttgtgatatgcctgattgattacctggtactttggggcttcaaaacacaaggggaatgggaaaaactttatagaggttatgttg

SEQ ID NO: 28182 - DNA, 282 bp, Oryza sativa
ttaaaatttctcaaagaaagttgtttttgtcatgccaaaattccttgtgaaatttttttagtatttatatacaaatcggaggtgcctaaaaggttaataacttcatcctccaatgatttttgttgttatattacttttggagctatgtttcacacatttttttttgtctccaaaactttgttgtaagttgatgagagagaaaatttgtgtgggcaagaagaatatatacaaactttgtttgtttacttaaaagaattttattctcatagtttaaaatatgca

SEQ ID NO: 28183 - DNA, 282 bp, Oryza sativa
  unsure (1)..(282): unsure at all n locations
catgcaagcttggnatgattttagcatgatgctaacactgcggacgccgcagacgtccaaaagtcatcacatccactaaaacataaaacacatcatcatccactaacaataattacatatcaaatctcgtgcaagcatacaacatcatcatctacaatttgttgaattctacaaatcaaaatacaagcatatttaatcatcacccccacatcatttccataatattttaacatatctatttattatttttataatatttagaatatattcatacatatattc

SEQ ID NO: 28184 - DNA, 274 bp, Oryza sativa
ttcataagttgttcaggctttttttttataaattagcgacatctaaaatacattctattagatctaacattgaatatattttaataatatattttttttgtgttgaaaatactaatatggttttcctttccataaacttattcagttttaaagaaatttaactattaaaaagttattgatcatttaattaatactactacggtttttttaaaaaagaattataatatgaaatggacggagtgcgtgttctccgatgtgaatacaggacaaattc

SEQ ID NO: 28185 - DNA, 284 bp, Oryza sativa
  unsure (1)..(284): unsure at all n locations
agcttctctctttttgatgaggngaacgattttgtccagtgaaatcggtggggatcttgctgctgatgtgattctgggatagttacttgccaaagctgtgtgatcttgtttgggagctgtgacagtgtgaccaaacaaagattatgggtaaaatgcatcaagctgtcactgtcttcagtctctactggacggttaatagtttggtcttcgaaatcaattatgacagataagagagaaaagatgccatgtttgtactggttggttgcaaaccccatcaacagtga

SEQ ID NO: 28186 - DNA, 280 bp, Oryza sativa
tcgaggatacagagaaggttttatgatctcgccgcctccgacgtcccccacggcgagcgtcgagtctgtggaaggaggtacgacgacgacgaccttaccagcaacgacgtctccctgattagcgtggagactgtgggaggaggcgtcgtccccatccaccaaggagctcaccgagcttggccaccatgtcctcttgaaagcttcgccatcgtctcctcctaggcatgtgttgttgctccgtgctcagggctcaactctcggtttgttgcagtttggtgtg

SEQ ID NO: 28187 - DNA, 276 bp, Oryza sativa
tacacacgtaagctggtttttttttcccagatcgatcgcataaaaccaggggctcgcatggctaataatctgcgcctccgatcgataaagctatcccgccttttcgagttttgctacccatgcgccccgccgccctcgccctctcttcccctattctttatccgccgtcgccgagccgcctagcggccgccgtctcgcctccgcacgcgcgtcgccagcgacgagaagacgacgacccgtgccgtgcgccacccgcggcttggacggccgcgcgct

SEQ ID NO: 28188 - DNA, 299 bp, Oryza sativa
  unsure (1)..(299): unsure at all n locations
cttaagcacctgagctgcaagctgttttttattttgntaaaaaaaatggccatcccatcccttctaaagcacctttatgttaaagaaaatgctgaatcatctgaaccagcttttgaaatccgaactgtggtaaacagcactacttccacttccaagggacaaacaagtgatcgcactgtttcatcacaacttgaggatctgcttgataagaatcttggtcttgggccaactaaggtgttaggcagaagctctttgctcagcagtaattctgcaagcgtggcagatgacattgatgatct

SEQ ID NO: 28189 - DNA, 273 bp, Oryza sativa
tctcaaagccggtttcattttttatgtactccatccagattggctagccaacctagtcatggtgcggaaggccaacgggaaatggagactgtgtgttgatttcaccgacctcaacaaggcgtatcccaaggatcactttcctcttcctcgaatagaccaactggtggactcaacagccggttgcgagttgttgagcttcctcgacgcttactccggttaccaccaaatcagcatgtcgaaataggacgaggagaagacagcattcatcacgcc

SEQ ID NO: 28190 - DNA, 270 bp, Oryza sativa
agcttgattgttttggagtactaccttggaatttgagaagggattcaaaatttggaactcttgcaaaaattcttgagaaatttggatgttcgacgcaaatccatattacatagagggaaccacaaccatatttatggacactataatttaaactccggtggatatataaaaagaagtgtacatcgtctcaattattaataggtttgtacagagaaaatttgcttaattagaaagagataagtactcttttgacagttctgactgtttaca

SEQ ID NO: 28191 - DNA, 268 bp, Oryza sativa
agctacactttttatccgcttatgcacccttaggccttaactcagcagctcagctcacgtgttcctctctccctctcatgctcaatcccaaacccaaaccaaacttgcttagcttgctgcctaaagtagcatgatgcacgcagccaattatagttcagtgaaatcacatgaaatgcatgattccatgtgtattttctctgtctcctccgtgcaaccatgaactttgcatcgctgtgatctatcatcatccatgggccatggttgattg

SEQ ID NO: 28192 - DNA, 284 bp, Oryza sativa
  unsure (1)..(284): unsure at all n locations
agcttggttcatangtttgcaaacaatagtagcgctatgttgttgaatacagactttcacagaatcttgcttggccttggcgtacaagcctcttacattccaattgaacagatacacattatcctgcgacatagtgtaaatggtctactatcacagcccaaatggcagaaacacagccagtgcagctgggagaaacacagccagaaagggggtagggggtagacctcatcggtgactctgattcatagttgagaggagaagcagcaagcaacatagtgcacagg

SEQ ID NO: 28193 - DNA, 281 bp, Oryza sativa
tctctgttttccgtgacgggttttgaaggttcccaaccttcacaatcaaacaccgtcttagttccttggccagaaagatttggtagaaaggtaaaattacttgaaatcgatattgatacttctccagaaccgcaacacaagcggctcctgaagaacacccaccaccaaggaagtagtactacttctcctgttgcctctcatttctactgcatattttttattccaagaaattgaagtgttcacatgcactgtgtagagtcctagaaacctacaacacagat

SEQ ID NO: 28194 - DNA, 242 bp, Oryza sativa
aattaataaatactccgcgaatgaaagtccgttaattaacgatcacgtcagttaatcacatggaccggaaataaaatagcaagctcaagtgagctgcaagatgccaggtcctgacacgaggacatggtcacagatcttgtgatgggtcacatgcagagcgctggtcgtacgccacgccgggggcagcgccaccgtccaaaatggatcaagttcacacgattacgtatatactacggccacaa

SEQ ID NO: 28195 - DNA, 271 bp, Oryza sativa
ttccttaagtactctgtctttttaaatttatgataccactgttcattgtagaatttgaattagcttttatctgacattctcttttctggtttaggtggttgttgctccaattctattaggttcctctatacaaagtgcattcccatcagtagttaaatttgttactccttttgcccctcttctagcggtcttaacttcatcacttctggcgtgcaggtttgagttcttgtaacatgttatgttattggattttgaatagctgaaacagcac

SEQ ID NO: 28196 - DNA, 269 bp, Oryza sativa
agcttgttttgtatgttggtatggtgaaaaaatttcatcaaaaagatgcaggtaaattcaaatttgagcgcaaaacctattgtgaattataaaaaagaaaaaagattaaatggaatgggccaagtatgcactgttcacgaggcccaataaggcccacaatgggaggaaaatatctttggaagcctctgcttcgtttctctggcgaatcctaccgtttttcccctttctcgcgtagctgcgctcaggaccaaaggggcaacggcgtgcgc

SEQ ID NO: 28197 - DNA, 283 bp, Oryza sativa
tgagaggtggaggaatttatttgcgtaacgcttggaaccgaaagggataagctgtagtatgaaaacccttccggcctattattgaacccactccgatggttatttatctcctaactgatggctatatggtgatgttttatcaccttatgtcacaatcttccggggctactcctatgaattgcatgcagtcgatgcacctaatctgttgtatttttaatgccttcacatctcttgaagctagggcacatggggatgccaaggcggtggataagtggaatcatct

SEQ ID NO: 28198 - DNA, 288 bp, Oryza sativa
tttccagccttaaggaatgtcccagaactaaaactggatcttatgagcaaaaattgctctatcaatcaccatctactttagacatatcttctgaaacttttttcaaatccaaaagtccagtatcttcctacaaattagtgaattaagaggagctctttgtgccgaaaaagaaagagcagggcaatatttcaaacttgcattcgaactgcgaaatatttatacaaaggaggagagatcaagataatgcagcagggttggttatctaattggctagtcaaacatgaggtg

SEQ ID NO: 28199 - DNA, 281 bp, Oryza sativa
tgaggaaaagtataaaggattttttatcgtgaagaaaaagaaaaggcaatcctaacttttcttgtaaaaatatgagtctaaagagtaaatttagaaatttgataaaaatattaagttttttaaaatgaattactaccagatcttacctaatagttgtacattaattaattagaagaattaacatatacaaacaaaatagaactacatggtttataaccaatcaaaaataccaaaaagatctaaaacattcgaatttagagtctcattaatctcaagaccag

SEQ ID NO: 28200 - DNA, 234 bp, Oryza sativa
taccagccacccaatgagaaccagaacactcaaagagttgaaaaagacacccgcacaaactgaacacaaagggggcccccaaacttaagtacacattggcacaaggttgaagaaatcgaggagatacttgcagcacaagtccccctcaggggagaagactaaagacgtatctcactgaaaagataaggaaaggctgtgttcagagcaatgcgcagctaagaatatcataaggaa

SEQ ID NO: 28201 - DNA, 277 bp, Oryza sativa
tacttaattcttgatcactgttgttttctcctaagatcactccgagatttcttaacaagaagggatgtttcgatatcttgtaccgcaaatccgcaatgctacgccgatttcccctccaatgctcgtcagcctttgcagcaccttcagtgatgactttgctaggaccatttgttgtgccccattgttttttatgacaatcctgaagtttgtgaatcctatgatctttggaatgaggtcagttactctatcaatttctacacagttattttgatcacaa

SEQ ID NO: 28202 - DNA, 277 bp, Oryza sativa
tagagaagatccaaccatattgtctgctgctctaaagaagactttggaggagaagtatttaatcaccctgtcatactatgtagtatgggatggtaggcagatggctttagatgagatacttggtggctgggagcaaagttttgaggtagtgtatagttttaaagctgagattgagaagagatctcctggtagtatagtggagatagagtatgatgtgattaatgagaagcataggtttagtaggatgtttattgctttgaagccttgtataaatgga

SEQ ID NO: 28203 - DNA, 276 bp, Oryza sativa
tttgctaggtgcatccgttgttttttcatgcattggagaccgggaatctttctgggcgccagtggaagctgtgatgagaagagatgggccaaatcttgtttatgcagcagctgctctctccttttctcgtgcctgctaatggagcccacgtgcttggatgatgcagtcgtcgtcgccgtcgacagagaggggctcgagcctgagatcaatgttgttcccttcccctaatcgctttcgtttttttgttaattgctttggttttgttctcccttttgt

SEQ ID NO: 28204 - DNA, 276 bp, Oryza sativa
tgacattacgaaccactgggtcttttaccagggggtaccgccccgggtggaccactcggtcagggtgatccgagcggtcaaacctgattgcgatctctgaccatcgaagatattggggcgtgtcgggctggacagcattgatctcccgttcggtcagcttttgcttccttttagactcataagccatggggccgccgaaaatatggttgagctccttgcggtggtcttgaaatccagccggggtgtcgccgtcgtccttcttccttgacgtgcttt

SEQ ID NO: 28205 - DNA, 237 bp, Oryza sativa
gtcgtcgctgaccagctcatcacaaaaactaccaagcagctgcgacttcccatgacggacatcaaccaaagccaccgtatcgtcgcttcctgcttatggctggtacctatacacctagaaagcgactgcaacgtgttatcgttgccaagctacattgcaccccaacaacaaagcagctctgactccccctagcaaaatcaactaagagcatcggccgcctactgcaaagcaagaaac

SEQ ID NO: 28206 - DNA, 276 bp, Oryza sativa
tgggctatcccatactatttcttttggttggactgtatacgaaatgaactgacattgagtgaagtccttaggtcggtttgggcgcactctccccctatcggtacacaactaatcatcatatgtgcaccacttgaggcccaaccctaaaatccatgttttccaccattttatttatcaaatacttcatttattcatatctgtcccaaacttaataaaatcatttttcatgttaatatgagcccaagtgataagtaaaactattctaagcatggctaa

SEQ ID NO: 28207 - DNA, 279 bp, Oryza sativa
agcttcttcataatctaatctagccaaagcattaggtcatcacattccacaacttgtgagaaagatatacacctgcagagaagaaacaaagatctcccggattaatgaccatcattgcaagaaaaacaatgaaaagatactgcatcaataaagccatgagaggtcaggtgatgtgcaggccacacctctatctgtgggctgtggctcccacaaaagtttgcagcttaaccagcagaagccattgctctcctgcatgcctgcattgcattgcaacaatgc

SEQ ID NO: 28208 - DNA, 276 bp, Oryza sativa
tggttggggggaaagctgtttttttttctccgactaatctcatctgcatttcttcctgtggagaaagaatcctgatacatggtacacatttcacaaaggccctgcacatgcaaagccatcggtatcttagttatcacccgggatacaactggaaatacctatactttgataggcgaataagtatgatcagttgaaaaaaatggagcctcgttatattacccaatcatgtaaaaggggagatcactgtataaaacatgcttgattggttgtacgtaa

SEQ ID NO: 28209 - DNA, 268 bp, Oryza sativa
  unsure (1)..(268): unsure at all n locations
agcttcttctggatttcttgntgntgaagtagtcggtcaatatatattggaacttttcgacaacactcgcaagctcctgtttcgaatgactctttgaattgatgatcttcagaagccaaaatgcagcattttgggctacagaagcaaccgtggtgtatcgtgaccgcgatgccaattttagagctttctccagcaaacttttagagtcctaatctctacaccatcacccttaggataatccctggcttagaatatccttttctgcaat

SEQ ID NO: 28210 - DNA, 274 bp, Oryza sativa
tcctgcccccgggagggcttttttgcccccaagggaggagcggaggctttggcaggtggccctgggcttgatgattccgaggcggtccgggatccccccgggacctccgaacgggtgcgccctgagtcaccagcccctgacagcacgaactagccccgccgaaaggtgcagcgacccgtctacttcgtcagcgaggcgcttcgagatgcgaaaacccgatatccgcaggcccagaaaatgctttatgccgtcttgatggcctcgaggaagttgc

SEQ ID NO: 28211 - DNA, 255 bp, Oryza sativa
cccccgggggggcagagaggatacccccccccccaacccaagaagaaacgcggcaactaccaaacccaacagcccaggaagccatggcaggagaacctgaccagaaacggaggaagaaacccaaagaaaggctctcgcgaaggccgaaggcaattgaaaaaaacaaagctcgcccagaaggatcgatagctgaggcatatagcccgcaagaacgagcaaatccccgcaccaagtacccgcaaggggtagaaacaa

SEQ ID NO: 28212 - DNA, 276 bp, Oryza sativa
  unsure (1)..(276): unsure at all n locations
tacatgaccaggcgtcactttttctcacacaagnttaccatatgccgactagaggggtccccaaccaacaacaggttacgtcccataccatactgtgccaagaatcccaggggtccttcccgacaccacccctgcgaattcacatgtctctccggatcaaggcttccctgataagctagttattaaatcaggggtgtcccattccacccatgtggtcgaacttgacttatgtttggatgaaattattaggaaacggttcttaaatgcaaaagcggt

SEQ ID NO: 28213 - DNA, 283 bp, Oryza sativa
  unsure (1)..(283): unsure at all n locations
agctntactgtttgtttccttnnaagatgcattgtaccaactcctaaaaagttaagtaactgcggtataaaaggattttaaggtattgggcacttgatcacgcgcactttggcctaagcaaaaagtgcctaagtcccaaaaagaacgtgacatgccacacctgaaaatatgggttgcagacatattaggcctaggccaaaaaatatgccttcgacaccctttaaaggatgacgcatgtaacatgctcccgagtaataaatcttccgggtaatatagaccaagc

SEQ ID NO: 28214 - DNA, 282 bp, Oryza sativa
tcagtagatagatattaaggccatctgctcagaggttcgctatttagttgttaaggggcaactatcaaattaactggcaaaggacagccaaggaaaggccattttatttatattgactaactagcaacacatgagacaaggtctaatttgttaatatcagtcctagttaatcaacttgcatgtccacttcgcaagtaggcaaccacccttcatcatttgtgggtaaaaatcattaattattccatgcatgcagtgaacacttccaatctttgaggccattta

SEQ ID NO: 28215 - DNA, 272 bp, Oryza sativa
tatggttcaaggcaagatttttttgtcacgagctgatgtattgttttattatgctttattcgattctaaatcacttactagctgctttaactactttgttccaatccagtatgcaattggattcctcctgtcccctgttgtgaacgtttataatatgcaaaaattgctaatgcttctgatgcttggagaactaattaatgctatttcttcatctgttgagaatttttgaaatatttaccagcttaactttgtaattgtttctttagaggaaa

SEQ ID NO: 28216 - DNA, 275 bp, Oryza sativa
agttttgcaattgggactcaccacctggccctgcgcgggctagccacaggtttccctcctcccacgccatcggtgccactagatgtgttgcgctcttcacctgtagcggcggccgggccatggccctcatgggtgcctgtgcgaggagaaaagagaaaaggggcaacaactgcctgatcgtgtgcatgggctgaagcctacgtgccgagccaaactattgggccagtccaaagtgcaaattatgaatacatggtgttaagcctggacggagctag

SEQ ID NO: 28217 - DNA, 234 bp, Oryza sativa
gacacagtgcaccgcccttttcgcgagcaccacaccggccaacggaaggcagaatacccacacccgcctcctaacgggacccccgcaaaaccccaaccacgcgcccctgcgggcccccctccaaaacccccgccacgaacccttccacgctcaagcacaggaccggaacctcggaccccaacactccaaagcagcaccggctgcaaaacccgccacgatcgcaaagaacaataa

SEQ ID NO: 28218 - DNA, 255 bp, Oryza sativa
aagaaacttagaaatcatcgaatctggatcccatatacgtgaaattgggtgcctgtagccctcttctttcctttaacatatttaaccttgttgaaagtatacttgctattttgttcccttaagacacccatgccaaatattaatcccctaatcttttagatatgggtacatgaattaagaaaatgaatgaccttgtcctgtagttagaaaatgatacttcatttattaatgggggataccatgaaattagcaagg

SEQ ID NO: 28219 - DNA, 281 bp, Oryza sativa
  unsure (1)..(281): unsure at all n locations
tgcaatcaagaagctcaacggtgttatgtgtctgatggagagagaatttaccgcagaggtagaagcactctctatggcacaacatgacaatcttgtgccactatggggttactgcatccaaggaaactcaaggctcctcatatattcttacatggagaacggcagtctagatgactggcttcacaacagagacaatggcaggccacttctcgactggccaacaaggctcaagattgcacaaggagcaagccggggcctttcatatatccataatantctgc

SEQ ID NO: 28220 - DNA, 280 bp, Oryza sativa
  unsure (1)..(280): unsure at all n locations
gcagcaagccagaccaaaataatgacaaacccagccgacaggggcagaagaaacgggacagaaaaccgaggccacnagacaccagcacgcagaaagcagacagcgaaccagctacagaccgaaccgaagaggcccaaagagcaagaccgcccctataagaaaagcacaccgggcgacgcatcagacgaggagaggagctaccagcgcagcggcggcagcagcagcgggaccagcagcacgaaaacggcgaagcacgaggggagcagacctgtaacgaacc

SEQ ID NO: 28221 - DNA, 282 bp, Oryza sativa
ttcatgacaaggcatttccattgtctcacaggtttaccatatgccgacgagaggggtcccaaaccaacaacaggttaggtcccagaccatactgtgccaggaagcccaggggtcctccccgacaccaccccggcgaatccacatgtctatcggcatcaaggctctcctgataagctagttactcagccaggggtgtcccattccacccatgtggtcgtacttgacttatgtttggatgaaattccaaggaaacggtccttaagtgcgagagcgggtaaaccc

SEQ ID NO: 28222 - DNA, 278 bp, Oryza sativa
tccttttcttcaatgcaagcttcttttcatgagtgctcaactggttgcaagaacaattaatcagggatggttataagcttaagcagctgctaagcaccaatgcagtaatcttccaatccaattttaaaaatattcaatatgaagtcttcaaagtttttaatcgaagttttcaatttgaaatataaaacctttatgttcagtaactttcaagttgatactttctattcaaactttcaatttgaatagcaaaaactttatgatctaaaactttcaacggc

SEQ ID NO: 28223 - DNA, 283 bp, Oryza sativa
  unsure (1)..(283): unsure at all n locations
tcaagcctggnccgataatctcccagaagaaaaatttaattaatggacctcaaaggggtaatattaaatagaactacatcccgtttgaaaaccacttaaaggtctatgattgctttaaaaagaaaaccatggcccataaaaaagaatcaagaaagctcaataaactgctaaaatgaaaattaatgaattcaccctaagccattgcataatcaagacgtgcctgccccgcacgctgatatgatataatggcttcttgagacattcccatggtctggaaaaacaa

SEQ ID NO: 28224 - DNA, 277 bp, Oryza sativa
tggaagtggcacatagacattttttttttccccagaaaaaaaatatctgtttttatgggcttgctaaacttattctattatgataattcattctggctttaggagggggacctttgtggacttgaacaatttttttgtaattgtatacagttgaactctagttttccaatagcatgtgtacaactttgttcacttacaaaaatgtttcttgcatcacaagtttcttttacatgaaattgcagggtgtgtggctagtcctactattgctaatgtggat

SEQ ID NO: 28225 - DNA, 276 bp, Oryza sativa
tgtgctggtggagggggtgctgttgtttgtctccggcgtgctggcggcggcggcgaggacgctgcctggggaggagtggctgatgccggaggccggcggcgtcgtacggacggtggtggagatgctcgtcggctccaagtccggcggaaatggcagcggcacctgctgctagctatatctagtttaattagggacagattcacgaagaaatagtagtagtctgaatatatatatatcctccgtacgcatatatgttatcaaaaaaaaatttagcaa

SEQ ID NO: 28226 - DNA, 277 bp, Oryza sativa
  unsure (1)..(277): unsure at all n locations
agctggacactattttttccgntnctacgcacaaaggaaataaccgggcaatggaccccaaaggcaacaggtttcggcataataaccgggaccgcggaaaatggacctttattacttaccgagaaaatagaacctggcaaggcataaatgcctgaactaaataagacgcatattttcctatgaaaaacttagtacgtataccgagcagaaatttcagcatgccccagtcttctatgactgcttccgaanaagtggatatgtctagtcgttttcctga

SEQ ID NO: 28227 - DNA, 271 bp, Oryza sativa
tgtgtggtggtggaacattttttcttcaggcgtggattcgcaagtggtgagcggcgggtgaaaacccagtccggccttggttgaaccgacaacgatggttatcccccctcctgagggcgttgtcgtgctgtctcacccctctggcgacctcgtctgtgtccctttgttggcttagttgcggtcggtcacgcttagcggcggcctgtccggtgttagccttctcctgggcttgtgtgatggggatgtcgccgtgtgggtggtggtatatttt

SEQ ID NO: 28228 - DNA, 270 bp, Oryza sativa
  unsure (1)..(270): unsure at all n locations
agcntatagtatttcataancacagcaccgtgtgggcctgtttggtccattttctctgtacagccatccaccatggccagcagccgcaggatatgctttgagattcgaacgtacacgtaactgccccgctcgtatcactttctgctggcgccccagaatacatgccgtgggtcccaccgaactctgaataggttttttttttttttgagaaaactgaataggggcttggttttttgtttcttccccaatccccaacccccggatccaccg

SEQ ID NO: 28229 - DNA, 286 bp, Oryza sativa
  unsure (1)..(286): unsure at all n locations
tgcttgccagcnttattatttgcgacaccaaaactcaggggggggatctctgatccgccataaagcctctcatgagccgatgagcccgacaactaataaagtcgatttgatgttcataaaacggtgcactgttcccgtaaaaaaaaaacaaccttagaagtcccctcccaggttaagcaaaggatgtgtttagttcacacccaaaaattaaaagtttgattgaaattgaaatgatatgatggaaaagttgaaagtttatttatgtaaaaaaattttgatgtaatga

SEQ ID NO: 28230 - DNA, 274 bp, Oryza sativa
tgatttgaatgttgctggtctttcgtatttaaaagctaaaacgagctgcctcgaatagctaatataacagatataaaactcaactaaattatatacttcctccgtttcacaatataagtcattttagcattttctacattcatattaacgtgtctagattcattaacatcaatatgaatgtagaaaatactagaatgacttacattatgaaacagagaaagtacaaattagataaaaataattatgcaaaaccatgttatgagcttatataaat

SEQ ID NO: 28231 - DNA, 281 bp, Oryza sativa
agctttcagattttcagtccatcctttgcctgtatcgttgaaagttctattgaatcggaccagtttttttcccccgaaactcaatgaagcggcttcttatccttatttctgtcctaatacatctagttttctttcctaatacgttttgattttttatatataaattgtgtcctatatattctatattttaagtcgtagacttttattagctttacaactctggtatcatctaatctgtgcatagatctcaaccataataataatataatagatttattttt

SEQ ID NO: 28232 - DNA, 282 bp, Oryza sativa
  unsure (1)..(282): unsure at all n locations
tccgctgtatgctttcaatgttattccgaaaaagccgtcttcgcaggaggatgcttccaacgatgagttctttgtcaatctcctgctcggcctggtaaatactaaatagaagcttacactttaaatttcgcacaggagaagttcaagtatttgttctgtattgcgcacaactacgaaatcttgttagctctctggagagctactgaggcaattagataagatatttgccctatgtattatagtagcgttcggttgtgcagttttgggtcatcaccagntttg

SEQ ID NO: 28233 - DNA, 259 bp, Oryza sativa
  unsure (1)..(259): unsure at all n locations
aaaggggaangctctctctccttcaaagagctttaatccgatggagctttttcctaaccctgtaattttggattgtttggtggattacttctctacccaagaagttgacagcttaattaagataattccaccagacaaagctcctggcccaaatggttataatgggttttttcttaagaaatgttggcccatcatttctcaggatttttataggttgtcagcacactttcatgtgtgctatactgatctgcaaccgctt

SEQ ID NO: 28234 - DNA, 273 bp, Oryza sativa
tgtagactttttgctccactttttttgccgtagcgggtaaacgggcacacacccgcgggcacaaggcgcccgtgggcaatgggcatgggcaaccatccttacccgtcatgtagtaatgggtatacccacgggcacaaataatctcatgggcacgggtatgggtaggcactacctgtgcccgtcgtgcccgattgccatccctacccgcggcccagcagtgtcagctccgcgctccccgcgcccggcggcgacggtcatgacgacgagatctgc

SEQ ID NO: 28235 - DNA, 94 bp, Oryza sativa
gggggcggaggcgttttttttttttcccccccaacacttaggtaagttcttgttaaaccccccaccccccctccgtatatcaatatccactaca

SEQ ID NO: 28236 - DNA, 273 bp, Oryza sativa
tcagtagatagatatttttttcatctgctcagaggttcgctatttagttgttaaggggcaactatcaaattaactggcaaaggacagccaaggaaaggccattttatttatattgactaactagcaacacatgagacaaggtctaatttgttaatatcagtcctagttaatcaacttgcatgtccacttcgcaagtaggcaaccacccttcatcatttgtgggtaaaaatcattaattattccatgcatgcagtgaacacttccaatctttga

SEQ ID NO: 28237 - DNA, 289 bp, Oryza sativa
cagcctgggccgttattatttgaaaccctctacgttggatgccttaccacatcgccaaaatcgtttttggagatttaggtctttggattttcttccgcccattgggcatattatatgcctagcacacatcatggtgctcatcccttggcaagaagggtattggatgcatggagccagccctacataagaaaatttattggccatattaattgaaagtacttacaagtcactaaaacatgaattgactagtgaattttatattaccttttgttgaccatagatgaaaact

SEQ ID NO: 28238 - DNA, 279 bp, Oryza sativa
  unsure (1)..(279): unsure at all n locations
tgcttcagatgatgtaaagtttttttttgtactcaccgnatgcctcacctatctgtctttttagaagcaacttacaaagatattccaagtcacacttgttctagctaagagtttatcgtctccccaggcagttccacccgaagggaacacttctctacggataccgattgtccagacgcctatacaagatgcaggctaaaaacgagaacaaaccgaagaggtttctcctatagggtccttagcataaacacttgtctagaacaaacgtgcaggaatacc

SEQ ID NO: 28239 - DNA, 256 bp, Oryza sativa
  unsure (1)..(256): unsure at all n locations
cccaaaacacagcgggaagaaacgggcnccccaacccacaacaggcgcgaccaagaaaggggcaaagacgcacaggaccacaagaacggaaggaacgacgcggaaagacagcggacagcaggaggcaacgcgaggagcacacccgggcaagaaccggaggacgccggacagagcaaagacaacgagcacgcgcaaaggggagagaaacaaccggagcacaaacaagaccgggaggagacgggcagcaaggtgcaag

SEQ ID NO: 28240 - DNA, 281 bp, Oryza sativa
ttgagatgacatatttggggtttttttggcacaactctagctcccaactccaacttacctagagccggagctgtgccaaatggtccagatccttcgtatttttggagtagagttagcagagttgctcctataaaaatgaactaggggggtggtgatggagttttgctactccacagctccactctatccaaaagacccaataccttttaatttttcaacatatttgtgcaaaactaccactgacctatcccaacacacctcctcacctctcactccccgtt

SEQ ID NO: 28241 - DNA, 174 bp, Oryza sativa
gacaacccccacaacccccaaccagagaatccccgacaaacgccacgccagccagacaagcgacacgcaccaaatacaaaactcacactaagagaaataagccaaccctacaagggagcgggaaaatgggcatccacgagtcggcaaaaatgcaaggaacaaacccagaaggga

SEQ ID NO: 28242 - DNA, 278 bp, Oryza sativa
taaagcatatgcagtccaaatttattatcataagcatggcctcaatcaactatcaagcccttgatctgctccatcttcagcctcttcaaactcgccttcctatcattaaaaacatgatattgttagtcaatctgatattcccatactttcattttagaacctcagaatagaaccaatacaaacaacaaataaatttactttagaaatcatttgtttctccatttcctcaaaaacaaaagagcaattggtgcttggtgtgtaaacgcacctcaaaccta

SEQ ID NO: 28243 - DNA, 280 bp, Oryza sativa
  unsure (1)..(280): unsure at all n locations
agcttgaactttttttaacggggnnaaaaaaaagtggacacctggccctccctttttaaaaaaaataaggggttcctttggacgggcgcaggtatcgccttgttcgacaccggcccctgtaaattccgtactccggttgttttgccggcgctctttaatatctggatttggttaagtaaggtgaaaattgtcagctggcaagctcacagtgtgctgtgaaccatgcataattggggtcaatggtgatcagtccgtgtattgggcattggtcctcaactta

SEQ ID NO: 28244 - DNA, 278 bp, Oryza sativa
tataaagtgtggcattacattttatatggcaccttatggatgatagctgcccctcatccttattaggaaatttcaggaaaagatgacaactcactgcatacttcaatacagagtctcccaataattctagacgctccatagagaaatcctcagagcacctaagcgttgtaatagcttccagaatctaaagaacatgtgccaatatatcatttcatattaaagaaacagaaaatgtatgtatagaagagagaggtataagcatctataccaggaaactt

SEQ ID NO: 28245 - DNA, 283 bp, Oryza sativa
  unsure (1)..(283): unsure at all n locations
agctngatnattttctcaatcgatcatcaaaatgatttaggaaccatgtgctctaaatttggaagcatacagtatgattctgatatggtgtacaagtaagaaggtctaaactcgtgtttgaggtgaaaagtatgttaggctgttaacgtagctggtcccaggatattccttaagaatcgccaccttgattgctactttatttcaaactcaacaacactacataagtaatgtcatatgtaaatcaaggcaagaagttaaaacaagtataaagcacctgcacacc

SEQ ID NO: 28246 - DNA, 279 bp, Oryza sativa
ttctaatgctatttatgcaattttttctggctcaaatgatgattggtaagcttttctactttttagatgctataggaagctgtacagcaactgtcccccctgaagattgaaaattagttctccttatttaatgtgtctactatttatgatatatctgaattttccattttctcaatgttttgaatattgatgtacaacttgtctctgataaaccattgcattagttgctccttagaaggagttgttttagttatttgccttccacagctgaagttttga

SEQ ID NO: 28247 - DNA, 257 bp, Oryza sativa
  unsure (1)..(257): unsure at all n locations
acaagggccccgggggaagaagacaaaggccagcccgaccgagcagagccgcaggaggcccgacaccgacaaccaacacggaaaaccaaccangaccagcacacgcaccacggaccaaaagacacgngaagagacggaagcggaccagcagacggaccagaaacggcccccaaccaacaacgacgaacacccaagaacacgcaacgcccggaagcccaacacacgcccaaacaagcaccgcagcaaacaaaaacaca

SEQ ID NO: 28248 - DNA, 278 bp, Oryza sativa
caacctttccaatatattcccacttctctctatccacaaatataagtactttaaactttacaagaaccaaccttaaaggaccaatttgaaccattattatttttaaaattatttaattttttaaaaaaagtgcaatgtaaggaaagttggttaaaggataaatctaacaacatccttttaaggccataaattttaatgatttttttttttggctattgatagttaagtcaaaacttagcactcttataataaaactagaggattgccccaaaagatat

SEQ ID NO: 28249 - DNA, 274 bp, Oryza sativa
taatgagttagtgggggatttttttataataagataggattaacataattatttaaaatcatcgcatgcgggaatattgtatgacatgtcaaataaaatttaagatgtgtttcatttgtatctaaatgactttgacaattatttattttttactataagtaatttgcaccatagagagctttttatggcttgaggaaaaaaaagacataaaaaccttaattatctgctatcgatatagataaggcataaactctcaaatgcttttaagaagact

SEQ ID NO: 28250 - DNA, 225 bp, Oryza sativa
cgcaattatcaagcccggagccgaatatttgccatataattccttggagattgtggatgaacctgaatgggtacctcccttcagactaaagtatgcatatttgtattggagacaaaggggccccatgtttcctaaatggctccaaacacaagttgatattattgaacttgacataacaaacacaagtataaaagatacctttccagaatggttctggacaacagt

SEQ ID NO: 28251 - DNA, 279 bp, Oryza sativa
ttcttttatcttcaacattttatttagctttctttgttgttgcttataaacaccattgccacttttaaatttgactataaactagtagcatagcgtattgctggctgatttacataatgtatctgttggcagttctacatggttattgcactaacaaatgtcttttttgtttatttaactttagatctcgttgaccaagttatgcacactagctttccaaatggtttagctctgatgcgtgggtttttcttctggttgcaggtaacctcattaataatt

SEQ ID NO: 28252 - DNA, 277 bp, Oryza sativa
taaatgagcagctttgattttctgatacaacatatttacatatcattaatagtaggtcataaatttcttcttacatagtgatgtgacactttcacaatgttgttgcagcgaataagggagtgaaaaaaaagttttgcatggagatttttaacatatatatgtctaatacgtatgtcatgtgatcaaactcatccaacatacatgcaaattagatgaaaaaccactttgcaaaatcaccttagggggttgtataaactgtattgtttagtttgggggt

SEQ ID NO: 28253 - DNA, 279 bp, Oryza sativa
  unsure (1)..(279): unsure at all n locations
agcttttggatagtgaaaatantangttcccatcgttctcttggtttttccttgtgcggccatgcatcattggacgttgtagggtaacaagtgatgagtatttttgtttagaagtgtggatgttttccactccaccttaaacagtgctactacaatgtcaacggcccacaaaattatgcgtgattttatttgtcagggcatctcttctaatttgcagtgcgttgataatcggcctggtacataaacgaggacggtagattttaaaattacaaagcacac

SEQ ID NO: 28254 - DNA, 274 bp, Oryza sativa
tcacggaaagcatgccaaggatcaaacatcttcagcgactgcatcccccaggcggacgcaagagggattaccatttcaccggattttggaggatgatcagtaggtggacgctgtgagggaaggcgcagatgagctcatatcataactcgtggtcggtcgctcgtcggagctaacccctccgtccgtcgtcgccggtctccgggcgggggatgcggtggtgggtgcaaaagcgggggagtggagagggaggagcggatgtgtagaaggcagtgga

SEQ ID NO: 28255 - DNA, 253 bp, Oryza sativa
cccctcaaggccaggcacggagaaaccactagcacccgcgcgaacaagcaccaaccgcgcccaagcaaacaaacacacccccacgaaggacgctagaagcaaaccaacccaaaggcaggcaaccaaacccgacccgcgaaaacaagccaccccaaacacaaaccaggcaactataaaaaaccaggcacccgaaaaccaacgcaacaacccaacacacagccacaaaagaaccaccacaagcctcggcccgaac

SEQ ID NO: 28256 - DNA, 271 bp, Oryza sativa
tcagttacctgatgatgctcttatccaccctgtgttccatgttagtcagctcaagaagcatctggggaagcatgctattcccatgtccaatttaccctcagtaggaccagatgggcagattaaaacagaaccactagcagttctacagaggagaatggtacccaggaaaggagttgctgtgactcaatggttgatattatggcagaatttgtctcctgctgaagccacatgggaagacgcatcagtcattcaagcaatgtttccatcgttt

SEQ ID NO: 28257 - DNA, 276 bp, Oryza sativa
ttgtttccaacatttttatatttcacacacttaaattaaactatgatccgaataaacatatcatctcacgtattacctctgcattttaaatatataacgctgttgatttttacaaacatggttaaatatttgtcttattcaaaaatcttacgcggctacataagatataaatcatgtttaaaggatttttagtcataaaacaactcacaacacaataaattatatgtacataatttttttaataaaacaaaacattaaatatatgttcaaaagtca

SEQ ID NO: 28258 - DNA, 281 bp, Oryza sativa
agcatgcaaatattttcttggcagcacaaagggaacaaaggcctcgagagcaaacgccaagggcaacatcctaacaacgggaaaaagtcagaaggccaacggaaggaaagcagacatggccttcctatgcaaccacagcaacagcttgccctacactctgggctgacgacatagctaaccaaataacccgttagtactgatataaaagggcctctttgcaaccacagcaacagctcgccctacatgggcttctgtatgctcgactaaacttgttacaagac

SEQ ID NO: 28259 - DNA, 279 bp, Oryza sativa
tatgcatatttatggatcattttgtgttttacaatctcatacttgtatagtgcactcaattagttttttcactattttctttgaacatttctctttataatccttagttgtgtgctggtgcagtttagtactactactctattcctcacggaacgtgtaggttaaagtaactggttccttgtactgtggttcttttttccaattaggtttgtttggatactgaaagatgcacaggagaaattggttaccctgttgttcttaatgtgcatactatacttg

SEQ ID NO: 28260 - DNA, 278 bp, Oryza sativa
tgtatcgagctcgagcctatgtatgctagctcgctcgagctcggctggttgacagccctagtcccatcttcaatcgggaaaccaccctcgaattggatgcgtacaatcgtgagtttttgttgtgggcaagtattggaagggtgggataactgcaaaagcaccgcttctccatggatgcaagtggggtgagcaagcaagttttttcatgctcccccgttgaaaaaactcccctgttttcatattataagtcatttgatttttttagtcaaagttcttta

SEQ ID NO: 28261 - DNA, 157 bp, Oryza sativa
cccggaacacaacgaagaaagacgggcgcacagaacctctgggctcgagaaaacgaaaaccgcacccatactggggaggacctaaacaaggagccgccgggaagaaccacaggatcacgtacgagcaggaggacaacaaaacgaccgggagaaaccg

SEQ ID NO: 28262 - DNA, 277 bp, Oryza sativa
ttactgcgacttgtgcaatattttttatgtttttgctccaactacaattttttttttgggactgaatacaaatatttcatattgtcaagtagtgagtagatatacacaaaggatgtttcatatctgagttgcatttctcagaatagcgatataaagcaagtggtacagtatacctgtaaaatcttgccagacttgcttttctgactttccagggaaataacttccaacatcaacaacagtagtcacccccctcattagggcgtgtctacttgcccta

SEQ ID NO: 28263 - DNA, 283 bp, Oryza sativa
caagcttgctcatttttttgttaatcaactaatcaagttagttatggcgaagaatgatcgttatagttcaacggcagctgaacttctaacagaaggaatggaaagcacatggaaagtatgtttaggcactgatatgactcattttttgagtgatgtccttttccaaattgaatgtctaagcagtgcaccttccaacaatgctgtctataaaactgcagttgctgtcacaatgcgggaggcattggttggtactctcttgccaagcttggctatggctgacata

SEQ ID NO: 28264 - DNA, 276 bp, Oryza sativa
tggtcaccacaggcaagacatgtttctgtctaactggaactgttaagagaggctagaattaggagagcagtgaaccacattttggctagattggtcaactaggaatttcagagggaaaaccatacacgttctgtctatattagctattcatttgttaaagatttgagtgcggcatgtggtgtgtaagtatgatgaggctacattgactggaatccttaatacaggatatattgcctttatacgggatatatattgcagctgaaatgttatactgtt

SEQ ID NO: 28265 - DNA, 217 bp, Oryza sativa
ccagagaggatgcccccaaaaacaatgccacccctccgaaggcgggcaggggcccaaccacaaggaagcaacacgcctgagccggccccaatacggacagacaaagtgccgccgagccctccgaaaagcgccgcacactaatcccagcaaaaaaaaggcacaccgatcaaccaacaaaaacatggggggacaccacaatacaatgataaaaaaggac

SEQ ID NO: 28266 - DNA, 276 bp, Oryza sativa
tgacagagagctgcattttttttccaatggccttcctttccccatctgctccctcttttttcatgagcatgatcccttgtaatggactagtcaactcaatcaggactagtgcacaagtcaatacagggatgactcaacttgactttatgacttatacaactatagtttacaaacaaccatgtatttattccttctttttcatcttgcccaccccccccctccccccctctgttctgacagcaagatcactgagtgcctcctgcagtaggcagagcc

SEQ ID NO: 28267 - DNA, 277 bp, Oryza sativa
agcctgcttatttctgaacgaacgatggactgcaggctgtcggacgaacgaagagctgaggtagcagaaggaggcagctgctgggaacaatggagcccacggccggccatggatcacagatgttactcgatcgatcctacagtaaattagtagctagctgcaatgcaaaactagtaaggtaggtcgatcgatcgatggaacgatggagatcggaagatggatcgggattggcgcctggctattgtgttttgctagtactgcatcatctgcatcatgt

SEQ ID NO: 28268 - DNA, 282 bp, Oryza sativa
taaacaacccaaatcagagctcgaccagttgcgtctcgccgtggcccacaccgagacgcgttttaacagcctagctcgcagaagtgatgtgctgatgcaggtgtgacacatccagtgatgaggacaaaaaaaatgtcaattttatttttgtgctctttcggttagttcgtcaaaccggggcgaatggacagcggcaatagttgttaatcttctggggttttttttctttctttttttgcgtatctttcagctcgtcagatgtgcagctggaatggcattttg

SEQ ID NO: 28269 - DNA, 288 bp, Oryza sativa
gaaggcttgcaagctttgcgctgttttgagggggacggaagtatctatagtggaccaatacctcactggactaataacaacaacaacaataacggttcaagacaaaaaccggagaaggggggtcccaacaaattaatctggcttaactttcttccctccctttcttggggacaaggacagggccggcaggtacgcagcgggccagattctacacgaattctgcacgctagttgcatgcaaaagccgccttgcgagttgcgagttccgacgtacggttacctctgggca

SEQ ID NO: 28270 - DNA, 278 bp, Oryza sativa
tgtttatcatgtttatcgttttatgcttgtttttcgaaaaaaaaagaaaaaaaaactaactagccaggaccagcgatagatgggcctccctctaaatgggcccagaaagcccactaatcccatcgcattcgccatttcgcctccactgtggcggaaatatctcctccgcttaaacccccacatcgccctagccgccgccttccccttcctacctcgccgccgccgccaccgccgccgccatggccgccgccgccgccgccatccgccgcccgctctct

SEQ ID NO: 28271 - DNA, 279 bp, Oryza sativa
  unsure (1)..(279): unsure at all n locations
agctttgttattgttgaccttaacactaataccccccccccnacctncccaaaacaacaaaagcagttatgcagcacatctttgtgcatattcaaaatgagcgcgttcttaaacactcaagcaacagctagcattcttatgttattgggttcaaaacgatatgggattgacacttggaaataaaagcggatactgaacagccaaacacacagcttatactcagagcaaatttacctagatcagtcatatgattttaaatgtattatggacaaatgtttg

SEQ ID NO: 28272 - DNA, 275 bp, Oryza sativa
tttcacaaggccagcctgtctattaatttgggcagcaatttcattatgaggaagaccagcagcataaaagaggggaatcttttggcctcgagcaatggagttcatgacatcaatggttgatatccctgtttggatcatctcttctggataggttctttcactgggattaattgaacttcctggaataaacatcggaagacattattaatattatcagaagagaaatataagtttagccaccatccgtactgataaaagaacatgcacttaactat

SEQ ID NO: 28273 - DNA, 281 bp, Oryza sativa
agcttcttttttgtacaagagaggagagagtaccgacaactctggcactcccccagaacttcccatcaatctttacttattttctcaacactactaaagtgtagcaaagtatgaaagtaagttgcactccactttgttgtgttctttgagagcgtcccctatgaatcgtacaacaaaagaaaattaaacagaaatggggaatcatacaacaaagggaacataaagaaacaatcactactacaaacaacctcacatagggataggcttataggtgtcggttt

SEQ ID NO: 28274 - DNA, 300 bp, Oryza sativa
ggacatatagaaactcagctagaaatgggctcgagctcttttcgctcgagccccgagctttggggagcctaacacgagtgccctcaaataaccaatacagatgaaaggaggctgcatgcatgcttgtcgagtaccaccagcactatctcatacatgaaatgacaactagtagtactattaaattgagctgcatgcatgctagtacgtactaataggctagggctgcagagtaaagcagtactagtacgctagagcctgcacggtgcagccctgcacgctcagagtttctatacagccccc

SEQ ID NO: 28275 - DNA, 281 bp, Oryza sativa
  unsure (1)..(281): unsure at all n locations
agcttttatctataaatncagcatatatttttgcacctctttgctgcagaatggtgcatccatatcagaaaaccttactgtttgaacataactacaaggcacttaactggggaaaaggggctcaaatagatctatatgaaaagggagaaaggtgattgcatgtaacaaaccttggcgtgttcaagttcttccaacacaagaacacctgccccttcccccataacaaaaccgtcacggtcctgcaacacattgcatgcaccaaaatcagtaagatcactttc

SEQ ID NO: 28276 - DNA, 275 bp, Oryza sativa
tttccttgccatgccggctttatctcctgtagtcggccgcactaagcttcgtcggcgatgtgccatcaaccaccaaggtgtctggacactacttccaccagctccgccatgattactccttcgttgacattgcggactctgccatagaacgacgcccgcttccacggtcttttcctcccgtatcaacacacgggtatttttctagtctttaattatatataagtagtggtgttggcaaataatagaaggagatgcgcctcaacatttgtagaaat

SEQ ID NO: 28277 - DNA, 273 bp, Oryza sativa
  unsure (1)..(273): unsure at all n locations
agcttgttattggcctgaagnnggtttaccgtgggaaagtaccatcggctcgagaaggattgctatccaagatgagttaacagccgatgattatcacaatctcatggtggacgagtcaaaagagttggttcagtctaggatgcgtgttgtggaaaaagtaacaaaggataaggagataattgctcgtcattataagaagaaagttgtgcccaattcttttacagaaggcaagttggtttggaagttgattttgccgataggaactcacgacaa

SEQ ID NO: 28278 - DNA, 270 bp, Oryza sativa
tcactccactcaacttattattttttcctctgcatttcttgatggaaacattcgaaccttttcttggaggttgatctctgctagctctccatggacattaagctaaatggtaaaaattttcaagaatgggaactttcggtttatatgcttcgaatgttaattggccaagcatgtcaactcgcagatgatcctcctgatgatcgaacagatgcaactaaggttaaggcatggagaacatgcagttgatcctgttatggaataaatattcat

SEQ ID NO: 28279 - DNA, 279 bp, Oryza sativa
attctttttatttaaacaactccgcatgcaaacgcaatgcaaaaggcaaggaaccaaacgctttgcttgcgaataaaatcatcagctcaggtcagagccctgcatgcatgcagcactactcctgaaagacatacacaaaatgtttttaaactctaattagttaactgcaaaatttctagtttgttcactggctagtgatgtgttatatgcttaatcatgaccgagaatatgcgtaatcatcgcttaattttcataaccagccaattgactttctgctcc

SEQ ID NO: 28280 - DNA, 362 bp, Oryza sativa
  unsure (1)..(362): unsure at all n locations
aaatgggcggagtgagtgaatgtagtggaagcggaggtggtgaggggagtttaacctcgggagtcggtggatggatcgctcggatcttctgcggcgtaaatacgcgcgagtgagcttgttgtgtgacggtgtgagggtgagatgggacacgcaacgcctcgctgtcgaggggtacgtcgcctatcactganagcacaacgccgttaaatcctggataattcgcctatcactgaaagcacaacgccgttaaatcctggaaaattcgctctcatggngagtcgaacccaggacctcaggtgctactgaggctcttgtaaccaccaggctacanggcccgtggttataaatgaaatactctatct

SEQ ID NO: 28281 - DNA, 83 bp, Oryza sativa
tggtgaactttggttatattgttggcacactaatatcatatcattaattatcatattaccgtgctatgtggagtgtgatgatg

SEQ ID NO: 28282 - DNA, 461 bp, Oryza sativa
  unsure (1)..(461): unsure at all n locations
tgatgtgcatcgactacaccgaccttaactatgcatgtcctaaggacccttaccctctgcctcgcatagatcagattgtcgactccaccgcggtgtgcgaccttttgtgttttctagatgcatactctggttaccatcagattcgcatggctagggaggatgaggaaaaaactgcgttcgttacccccatatgaacttattgttatacgacaatgcccttcgggttaaagaatgcaggtcctacttttcagcgtactactcaaatttctttgggtagccaaataggacgtaatgttgaggcttatgtcgatgacttggttgtaaagacgcgcaaccaagagaccttactctcggatctagcggaaacttttganagtctccgctccgcccgcataaagctgaaccccgataagtgcgtgttctgtgtacctgcgggcatgcttctctggttcttggtctct

SEQ ID NO: 28283 - DNA, 460 bp, Oryza sativa
atgtgcatcgactacaccgaccttaacttggcatgttctaatgacccttaccctctgcctcgcatagatcagattgtcgactccaccgcggggtgcgaccttttgtgttttctagatgcatactctggataccatcaaattcgcatggctagggaggatgaggaaacaactgcgttcgttacccccatatgaacttattggtatacgacaatgcccttcgggttaaagaatgcaggtgctacttttcagcgtactactcacatttctttgggtagcctaataggacgttatgttgatgcttatgtcgatgactcggttgaaagacacgcaaccaagagaccttactctcggatctagcggacactcttgatagtcttcgctccgcccgcatatagctgaaccccgataagtgcgtgttcagtagacctgccggcaaacttctccggttcttggtctctgc

SEQ ID NO: 28284 - DNA, 471 bp, Oryza sativa
  unsure (1)..(471): unsure at all n locations
tcatgaaactcatgctctatttatgaccatgtagaaattgaactatgagcaagtttactataccatgtagatacaaagtttgacaaggaaagaggaaacaactttaacttaagcaaatcatcactaccagccttaccacattgttcaataaattgaccgatatgctccattgttgttctagcatcctcacctgtgaattntgtgaagttgggcacctcatatacttgcgggtatgggaccgaatctacatgttcaagatatggcctttgataagtatacatagctactttggattctatttcaccactatcccgcaagacattgtcatcatctnttccaacatccacatgaccgatttgtgattcagtcttaggtgaacaatgctattcactntcacttgtgatacaatccgaaccgncacttagttcggctatatttncaatgatgttattctctaagctagcacacaat

SEQ ID NO: 28285 - DNA, 178 bp, Oryza sativa
tacgctcaggatggatcattatatcataccaccttttctttctaccgtcgccgactggtgtttccgcctgcacggttggcctttatgccgcacgttgtgggcctctacgtcttcaccgaccggcttgccttcgccgacgtcgactggtgttttcgcctgcacggctggcctttatgcc

SEQ ID NO: 28286 - DNA, 265 bp, Oryza sativa
gactgaagaaccgtaagttctatccctacttcaaggattgcatatgggctatatatgggactcacgcgccttgcctggtgccaacacacagtacatgcaagacttgtgccgcatgggcatgaccacacaaaatgacatggcttgatgtgacttccacatgagcgttacattctgaatatccggatggcgctggttcgtacatgacatgatatgatttgatgatgcacactctacatacaacacattgtgttcacatcctcctaca

SEQ ID NO: 28287 - DNA, 235 bp, Oryza sativa
  unsure (1)..(235): unsure at all n locations
tcatgcactctaggcgttcatgtttctagcagtgagaggaactctggcgctcccgggaaagagaagtctcacatacatattaaattatgtgtcaagttaagttctctctctcacacactcatggcagtcctaccaatggcgacaccgatgtatggcacgcctctcggccctaccctaacgcgatgtcccaccgnagcgcacctgcctcactcaagggtgaaccatctatacaggg

SEQ ID NO: 28288 - DNA, 383 bp, Oryza sativa
agctttatgataactacatagacaaacacttgtctttagcatattgtatatttgtgcgaagtacaaaatccaattacttcaatatattatcacatcacgcaatcaaatacgagcgatatcacacaaaatacgagagatagttgagtgttcaacagacaaacagagattttcttggaccaacaagactccatttaaggggtgaaagcaaaaggacacgatcatgggccgtcagtggcagagaccggatgaagggaggcgtgggtcggtagaaggcagcagggaaacgtaaatgtggcaatcgacgaagcagggaacagagtggacagcacaaccggacagaccacaggactacaggagagagctgaaactgctatatgagcatg

SEQ ID NO: 28289 - DNA, 416 bp, Oryza sativa
  unsure (1)..(416): unsure at all n locations
aacaaaattgttatcaaaatcagacccaagcatagccaagatagtgaaatgaaggaagattgtcatgtttatagagttgggatgatctatgtgacaattaattgtttgttttttaaaaaacaatagaaattttgatagagatggaaatatttgagttgcaaatatgcgtgtcatatcaggtattatatagggtgtcgcatggagtgttcagacactaataaaaaaaactaattacaaaatccgtcagtaaaccgcgaaacgaatntattaagcctaattaatccgtcatttagtaaatgttactgtagcaccacattgtcaaattatggagcaattaggcttaaaagattcgtctcgcaaattagtcgcaatctgtgcaattaatttatttntggcctatatttaatacttcatac

SEQ ID NO: 28290 - DNA, 320 bp, Oryza sativa
gagctcggcggatgggacctcttctgtggcacatctgcacagtagcgatgcatcatcattcagcgcgccgatgtggatgcacagtgagaccactgccactctgtgataatgtgtcacgccctataaatcgtcttaaatgaaaatgcatattttaaatcatttgtagaaattattttaatagcctacaacattaaccctaattttcttggaaatgttgaacataaaataagccttataatactttattgaatactatgcttgctcctctattttctagatatttctgggaataatttgaacatgggaagattttaattatt

SEQ ID NO: 28291 - DNA, 249 bp, Oryza sativa
gaccggatcttaagcgactgcagctgcagcttgtctgtattatatcaaacaaaatcttatgtctgaaccaggtctataggccaatatgtggccatactgcccaagaaggaatgcactcacatgtacaagtacagtgtgacatgaacaaagtataggatgtaaaatactacttataatgatagctaggagtatggattcatctaccaacactcgaattcagaatatagtccccgtctaatcaaaacattg

SEQ ID NO: 28292 - DNA, 265 bp, Oryza sativa
gcacgtgatatctgcttaaggagttgctgtggaccccgaaacagtgaccgccgtcaccgattggaagcaacccacgacagttactcaagtccgcagtttcttatgtttggcaggatactaccggagattcatcgagaacttttccaaaatcgctcgacccatgacacagttgttgaagaaagaagagatatctgtgtggagcccgcaatgcgagaaggcgtttcaaaccctcaaggaaaagctggtttcctcgccggtgttaatc

SEQ ID NO: 28293 - DNA, 427 bp, Oryza sativa
  unsure (1)..(427): unsure at all n locations
ctcttattcttccatcacggacatctagatcctgcacttccttccnctggataatattattcagctctcggaaataggacttggcatcgatgataacatcatcttgtacatccatcacatgatctgccacagaatcacctcctggctccatcgccctgctagctgccatgagaaccaatattctctcgacatacttgattgttccagagatgaacatcagcaccaatggcgccaagagctgcttgtccgggtgccatgacttgaccatgatgtagatcgctagggccacttgtgtgacgagaccgatgaggtgacgcttccacagcattgcatcctcaatggagaaggcagagatcgtctcctggctaccaaggtgcagcagcaggagatgcgtccagaggagcacgagctgatgatggtgtggatc

SEQ ID NO: 28294 - DNA, 384 bp, Oryza sativa
  unsure (1)..(384): unsure at all n locations
cctgacngtactattgaaaagtacaatgtctctgctcgntgctaagggctatactcttaaagaangcgaagatttatttgacacttactcacctgtngctagatagtccacaattcatgcgctactgtccgtatacatctaacgtggacgctgaccgggctctcactgacgtgaagacatacctcattattgccccagtccgatgacgagatctatctgatgaacctgagtgtttgactggaaggaccccacagcaaagaatgcaaagttgttgaagtctttgtatggactgaaacaatcgtctaagcaatggcatgagagatttgacanaacattgacatctgcacgctttgcagtcaatgaggcacataaatgtgtgactat

SEQ ID NO: 28295 - DNA, 411 bp, Oryza sativa
agcttcataccctgtagatagatggctacctagattatatatgcgaaagcttaaccatcagtatgattactagtagtatatagtagtcgaggtaatatcagtattatgttgctagcgcacaaaatgtactcaacgacaggatgcaatcaacgacgtgttcattcaaattcgtcctagtttgtgtacgtgtgcgtacgatcgatgtagaccggtcctgatcatccttctactccactgtttctgctggatcattgatcggtcaggcggctgatgcttgtggtgcaacgatgaggtttgccgtttgatcgaccgatcgatcgatctcggctggatcgcagctggacgtgctggcgaccgtctaccggcggccatgattatatttcattggcgtgacgatgacgatgattgatg

SEQ ID NO: 28296 - DNA, 212 bp, Oryza sativa
tcgcatagatcagattgtcgactccactgcggagtgcgaccatttgtgttttctagatgcatactctggttatcatcagattcgcatggctagggaggatgatgagaaaactgcgttcattacccctgtatgaacctatttgtatacatcaatgcccttcggggtaaagaatgcaggtcctacttttcaacgaactactcgaatttctttgg

SEQ ID NO: 28297 - DNA, 296 bp, Oryza sativa
agatccgacacgccagcttctcggtcgcgggtcttcacaaccaagtcatcgacataagcctcaacattacgtcctatttggctacccaaagaaattcgagtagtacgttgaatagtaggacctgcattctttaacccgaatgacattggtcgataacaataagttcctatgggggtaatgaacgcagttttttcctcatcctccctagccatgcgaatctgatggtaaccagagtatgcatctagaatacacacaaggtcgcacgccgctgtggagtcgacaatctgatctatgcg

SEQ ID NO: 28298 - DNA, 219 bp, Oryza sativa
  unsure (1)..(219): unsure at all n locations
ctaagcttcatgaaagcataacagaatgtgactaccacatatattcaacactttttctatccatgtagcattctctgttatctcgtgatgtgataactttgtacttttaaataccaaatgtgcatatttacaaaaaaaggatattcttgtgtaggtatgtggttttcaagtatacactcaaatttatagagatngcacgtatggctatgaagtaaatct

SEQ ID NO: 28299 - DNA, 370 bp, Oryza sativa
  unsure (1)..(370): unsure at all n locations
gactccaccaagaacacaactgctggtgacttttcatctcacatcgaccgattccgagactctgaagccgatattgactctatgccgatgatgattntgggcttacctaattttggcgttaacaggtatatggcactttgattgtcacaaaatatgttaatgcaagaatcaactccacaaatctcatcaaacaatcctttcagccaaactgattccttacatgcttcaacaatatgcatgtatactgcttcagtggtagactgggcaacaacatgctgcaatggtgccttccaacttacagcacaactaccaatagtaaacacataacctatgagtgaccttcgcttatctaaaatcagcataaaatctg

SEQ ID NO: 28300 - DNA, 261 bp, Oryza sativa
  unsure (1)..(261): unsure at all n locations
gtgcaatgcatcaccggctgcatgtctaccctaagtcggttcatatcgaggctgggagagaaggcactacccctacttaagctcctcatacgctccgggccgtttacctggatggaggaggctgagcgggccctcactcatttgaaggcgtacctcaattctcccccagtcctggtcgcaccggagccagatgagccgntgctactctacctggcggcaaccccgcatgtagttagcgtggcgttggtcgtggagcgcgca

SEQ ID NO: 28301 - DNA, 285 bp, Oryza sativa
acctcaacctagtgggtgtatgacataaacttgctcttgtataaaaccatgtagaaaatcacttgtcacatccatttgatacaatttaaaaccttctgaagcagcaaaagccaacaaaagtctaattgcctcaattctagcaacaggagcaaaagtttcatcaaaatccaaactctcaacttgagtaaaaccttgagcaacaagtctagctttatttctcacaatcaaaccatcctcattttgtttggttttggaacccacatggttccaataatattatgtcta

SEQ ID NO: 28302 - DNA, 236 bp, Oryza sativa
attacaacatactattgctataaatatcaatctagcatgactgtcaaaagaaattgcataactacatcatgacaatcaacaattacattttacacatgccatgaacgagtacacatatcttaccccggaagagaatgcacttgggtgcatttttaaatttttcatgctacaacactaatgcagaatggccaaccaagctaggtgctggacatgtaaaatattaacaggcccactgc

SEQ ID NO: 28303 - DNA, 404 bp, Oryza sativa
  unsure (1)..(404): unsure at all n locations
ttacttaccttctacttgtattgtctaaactntattcanattaatccaacaacttgtgctattaatnggataaatgtcttaactccctcctttcacttgtctttagatgccgcgctacaagcctgagtatctgtttggtgttgagggttntgtccaggagttgcgtacgatgtcctttgtcattggatttgggactgcccctttttatgcccagattcgtcatgatcgtcatgaagagaagtgccgagtcaaagtcaccttgaacagtaatagtgaagatattccctcagtgatgttcgaagctggaggaagaaactacatccatgcatgtcangaggtggcaaggatcgccataagagagctccgtgatcgctacagtgatcagttggcagacactgagtatc

SEQ ID NO: 28304 - DNA, 361 bp, Oryza sativa
  unsure (1)..(361): unsure at all n locations
cactctcctctanattctaatagtatattgtttattagttgncacttgtcangtagttaacttcgtttgcaattntaagtgattttacaattcttttgaagaagtaccttgaggtactatattttctaatgtaaaatttgatacctcccaatacctctggtactatgatgtaccaaatttatcactaataatttataccacttagtaccttttaaggactgaaaaatttctcttgcatatttatagcatagcangaattggagtgggngtggaaatggctctgaataannggtgcaaaagaatgtataaatgtacaccattagattatatggaacaagaaattattcattctacaggctga

SEQ ID NO: 28305 - DNA, 203 bp, Oryza sativa
ttgaaattttaatcgaacaataccaacagatataaaaaaaaggagccaatcctgtacagcatagcaatgagaaatttgaattgtgttttgcaattacttcctttctatcctagaccagcacgtcccccaatcactgccgagcgtcccgacggaaccgccacgacctggagcaagattcttagttccgaacgacccgttagacc

SEQ ID NO: 28306 - DNA, 316 bp, Oryza sativa
cctggcgcgccagatgacggagcgtgtggctcctcaccgtgagactgcgcaagcccacctttgccggttcggccgtgggccctgtgtgagaatctaagctcctagtctgtggatagttcgcgagaatgtgaaaaacacaatacacggatgatgtattcatgttcgggccgctgagaagcgtaataccctactcatgtgttctggtggatctgtgtatgaagatgctacacagagctggtgagccagagagctcttactcttataaaccctcttgtcctttgttctctcgaggatctactctcagatcctacccctt

SEQ ID NO: 28307 - DNA, 394 bp, Oryza sativa
  unsure (1)..(394): unsure at all n locations
agcttgtttgcttatgccttccaacacaattattctctttaacttgntttatagntgattatctattnttcttgtctattttctatatcagaatgatatacatantaaaatttacaacaaattgtttttgcttcacttttttcttctacggcttatcgattgtgtagctcaatcaatcagagctgattntaagtttatagtcatggacagagtatttcgttcccatttatgtgctgcatgtttgcgtggcacatacctatgctgtgtgtttagttggatccaaagtttggaatttggttganattggagatgatgtgactganaagttatgtgtgtatgacaggttgatgtgatggaaaaggactgaagtttggatccaaatttgatctaacac

SEQ ID NO: 28308 - DNA, 266 bp, Oryza sativa
ctaatccccccctcccccaattcctagactcccatccgccgtatgagtgctcgacttgccttgcatgaccctcgagttcacaccgtcccttgtcgcggtgcaccggctgccacgcacttacgacacctaaacctatgccccatgaccttacccacgccatggcgtcagaccttggttccactttgtctaaacccatctgttgccctggttctacccctcaatgtcgatgaccgagctaaccttccatgtcctggcatgttcgggaa

SEQ ID NO: 28309 - DNA, 473 bp, Oryza sativa
  unsure (1)..(473): unsure at all n locations
tgcaagctntcgtacacaatatattccttgtanatgtggtatgctgggataattcaagaatccaaagaaggcccggccattcttgtggactgacttataagatgatttgtcgctgatagcaagttctacatcgtcttagtaattccagaccatacatcacacttgggaaaaaaagaagtggtagcaagggatatactccctccgtttcaaaatatttgacaccgttgactttttggcacatgtttgaccgtttatcttatgataaaaaattatgaaatatgtaaaactacatgtgtacatganaatatatttaacaatgatataaatgatatgacaagaataaataattacttaaatttttaaataagacgaatggcaaatacgtactataaagcaacggtgtcaaacattttgaaatggagggagtatatgactttatatgtacctcacacaccactgcacccaatcacaca

SEQ ID NO: 28310 - DNA, 355 bp, Oryza sativa
  unsure (1)..(355): unsure at all n locations
ctttatgttgcatcagntaagtttgatctattaagtaacgtgtagaaccataatatctaactcgttttataattgctagtagagatagcatcagagattcagccgatcttacctggtttagtcatcttgtttccttgtatacttacttgatatgctaaacctgccctttatattaagatatcgcttggtcagaatatattaagcttgttgtaatctattaggtcatcctgttattagattgattntggttcagtatatttcatcttcattgatatcttggtacagattagtatcggagtactagccaatacatattaggtttgcttcatcggctatgctatgaatctatataatc

SEQ ID NO: 28311 - DNA, 425 bp, Oryza sativa
  unsure (1)..(425): unsure at all n locations
ataagcgtgccagttgatttgatcctgcnatcaacaagaaacagagactaagaaaccgcggttaaatccataaacgatagccgatcggctagttgccgatgacatatcatttatctcgaagccgatgtcatatgtgaatcgatcggcaaatatgaataagtaagaaagaactaaatctactcgatcggctgtagatattaacaatatatagtccttatacgacgcagaatggcgactctcttctctggcgacgtccatggcgactctccctatgagatggtcacgccggcgccacctactggatgggatttctccccgggggattccatccgcgatgaagtttgggagccgtttggttcaccggtgcactattcctctcactttagccgttctccttttcgaatagtggttgatgggtcctcgtc

SEQ ID NO: 28312 - DNA, 281 bp, Oryza sativa
aggaagatgttagatcaaaatacttagactctgatactcacaaacaacgaatctcgccacgacgttcaactcgtgagaacgcacaccgacgtggcgagactccgcgcctgcttttactgaactctgcagcgatactaatgcgctctgcatccgtagtctgaggtagaaggcaacacagaactactccccgcggatgctaacattcacgagagcagtgccagatctccagtattgaggcaagagcatgactacggtctaaatataaccactggtgaaacaac

SEQ ID NO: 28313 - DNA, 484 bp, Oryza sativa
  unsure (1)..(484): unsure at all n locations
gcttgcactatgacagtntgtaatattgggcagtttgttnaaagacgataagactgctagctactatcataaacatgaatgtcacaaaatctggtactgttgtataaattgcgttcaacagcttggttgtcacaaaatgacttctaaaacagagaaatagaggatttaatttgtgttaggtgctttcaagcatgtgcaaattttaaagttgagaacttttcatatacctttgatgagttggagacattttacttgtttttatgcctatattcttgtgcaattagctatgtaaatcgcgtggtttactcacgtttgtttttttctttattacatgaagatgagatgttaatataatgatgcgtccaattctctgctttgtgatgcatggtgtccaatatttactcgagtctgaagtagatctacaagatcttngtcagagatcttncaggatatgatgctangctgataatagatacaatttcat

SEQ ID NO: 28314 - DNA, 280 bp, Oryza sativa
  unsure (1)..(280): unsure at all n locations
tgaagctctgactataccttgacaggatatgaagatattactaaaagaacaagtgacattatctatatatgaggtcatttaataataaaaacccttcataattacatgtgcatgttagtgagactaccaatatttatgctgctcagtcctcaccaacccatctgagttacagctgtctagtaaaatacctgacactttcaagtccgtaccatgattctncaatnggtgagctattcaatggtatagataagatcacatataatgtaccactgagctacca

SEQ ID NO: 28315 - DNA, 408 bp, Oryza sativa
  unsure (1)..(408): unsure at all n locations
ctttccttgaaagtttcagttgggggctactatgataataatggagtgtganttttatctattcaatttgcttacttgatttatcattgtcctgcttggtctttcgacttagtcaatgaggactgaaggttnttaatagtttttgcgggttttatgctcaataaggcttgacaaaggcttttaagatatcagaagctaagtatggaacaccaagcatagcataaattcatcagtattgtacaaattaaacctccatcatcattaatcatcaaaatcattgttatatcaatcagtatcagttttttcatcatcagaattatcagacccagtcggccgaaggtcgacatcttggaatctctcaaccacgtcagcagcaatcttgtcagcggcttttatcgcatcattgat

SEQ ID NO: 28316 - DNA, 413 bp, Oryza sativa
gctcgctcttaacaccaatccgaaccgacatcctttctatatgcaatggccgaacaactgtgttttggcgaatgtatctatactggtgcacatcaattgtgcacttgaacattaccatgaagtagttgaatgtgatgctgtgcacacgcaaacatgtaatattctgctatgtacaccatggcgacacgttactgattatatgcatcatggtaggttcataccagtactttatatagaccatgataagaaaaatgatgggatcccatgtctgctgaagatattatgcgtgatgatactgctattgctgacaaatacaaatgtgagagtgatatataagcccgatctcgtggcgtgaaacctgagacaatcaatatgaaacctcattgctttcttgcttctaagtatgatattac

SEQ ID NO: 28317 - DNA, 193 bp, Oryza sativa
  unsure (1)..(193): unsure at all n locations
gaccaccgtgttcgccagccactccggttggttttcnttactgatgaatccggcctccagaagtctcgccacctcctcgcggatgaaggctngacgttccggtgcctgccgccgcactttctgccggaccggccttgcgcccggccgcacggcgagacggtgctcaatcacctccctgtggaccccgggcatg

SEQ ID NO: 28318 - DNA, 295 bp, Oryza sativa
actcttcttatgatgctaattatacataatctgagaattctcgtcactttgtgaatggtctcgacatgtctatttgggagatgaaaggtatatctatttacgagtctattaacatgtctactctgactgtggattcactctataccaaattgaaaacacatgatatgaatgttctctcttccaaagttgattctcaatcgagcgctctatattcttcttctgcctctctgtatattgatgcttcttcatcgaggcttccttcttgctgttttatgccctatcggtatcactccac

SEQ ID NO: 28319 - DNA, 387 bp, Oryza sativa
gatgccctcccggagctgatctaatgaggaaggatgaatgacgatgccgctggtgttggtgttcagagtatctctgactaaatcgcttatctctgaacaagggaaggaggaaggacgagtattgtggatttcctttgggttgggaatgggttgaatccatttttctgcacttggtttgggtttgctctgcgagtggattggattggtatggtttctgcaagctatgaattggattggaatggtttagaagtgtactgtagagacaagtggtctggtgcggttctggtctggatctcagtccattagcaggcttattatcatgggtattcaggtgaatgcaattatttctctgctagatgaatcagtggtggacgcatgacacaactg

SEQ ID NO: 28320 - DNA, 375 bp, Oryza sativa
  unsure (1)..(375): unsure at all n locations
agctttgtttcaaatggtcaagctcaagcctggtggatcatatatggccgatcatcgcatgcggtcccttaagccagccgcatgcgataatagacctattatcgcatgcggctgtcttaagcagccgcatgcgatgatggatcttctcatgtggctaaggcacccgccccccgtggggcggtcgttgcaggcgcccccgcaggccgtcatgggaggtaccgagggctctgtgcacgaaaacgatctatggtgagtcgcagtcacaccanaaactactgcccaggatcgaattgtcactatgccaagttggattaacacattactcatgttacgccgtgagtgatatcatgagaacccggtccaatgcctgatcac

SEQ ID NO: 28321 - DNA, 488 bp, Oryza sativa
  unsure (1)..(488): unsure at all n locations
gctcctcgctgcacctcgttgcccgcgtgccctcttctgtccttctgtggntgtctaccactagcctcctcctgctggttgcgctccacatacctttccacgtgcccctgctggttcccctacgcatacctctccacgttcccttcctcgttcaagtactggtttggatcctcgttccactcttcttcattccagtactggctgcttccctccgcgattgtatcgtacaatatctgttcctcatcgcggtcagccatctgttgatacaagaaacatctgctaagtcacgagacatttatgttgtaacaatctaagtcatgtatgctaagtgtaaatgtcgtacattagaaccctacacaaccttacgtgctaagtctaattacaaatcgtgatataagctaagtctatgtgacgtatattatacaacacctagctagtaatatgatatactaaggctaataccaataaatgatcttatttaaactcaa

SEQ ID NO: 28322 - DNA, 399 bp, Oryza sativa
  unsure (1)..(399): unsure at all n locations
agctctgcatgtcatccncttctcttggtgttgactgtcattattgatcagcttcgaccgtcaatattaccaaaatagaagagaactagtgatgcttgcaatgcatatatctgttagaataataatattccactagtattaggtataataaccttgtgcagagaatgacaataaagtggaggagaatcgacatcaacttagacgataaatcaatcggacgatatcaaaaaccagacttatgtatgaatgggccaagaactcataattgacacgacacactgtgccaaaattcacaagtctatggagaggaacaccagaggaggtcactagccaacttgtgggctggttgggccagcccatggttcgggttcgaccgaaccaatgccaacgctgatggat

SEQ ID NO: 28323 - DNA, 454 bp, Oryza sativa
  unsure (1)..(454): unsure at all n locations
agcttcacagatcatataatacnatcaagtgttgtttattaagcttcatgttgctcgataacccagtgcttgctaagcggtaagcgttagtgataacctatctagagcgaggcatggagagcctgaaagacatggcaaatgtccttcatcccctacttggccacatccctgcagaagaaattaatcaaggttgtaccagcacagctagcagagcactgcagccgggtcacacgtggtggctgttcatggtggacaaacggaggcatatactacctccgttttttaacagatgacactgttgactntntctcacgtgtttgaccatntgtcttattcaaaaaatntacgtaattataatctattntggtatgaagtgtttattactcatagtactntaagtgtgattatatcttatacattacatannaattttgctcatgggagtgaatacctc

SEQ ID NO: 28324 - DNA, 400 bp, Oryza sativa
  unsure (1)..(400): unsure at all n locations
cgcacaggatggaacaattaagatgtatgttggattgccatgcatgaactcaatatgcaaatcactntgtctagaggatggttagacttactttgtagcattatgagtttatgactcttcagtaccagcaatctataacttgctgctcatacatgctatctcttgtgcctgttatgtgtggtggccaaatttggtgtcaccattggcaggatggactggattcaagatangagttcatgngtactggctagtttggatggagagatcttgccatttgattatgtgttcaaccgtaagaattacatcaccaaatttctggctactgaagaccaccgctctggtcgtttatctatatctcatatatgactaccatacacaagttcaaatatgggttatgact

SEQ ID NO: 28325 - DNA, 377 bp, Oryza sativa
  unsure (1)..(377): unsure at all n locations
aataatgcatgtaacagtcttcgcacagcacatgatcacnaaagcaagtctctgcatatcaaatgcgtgtaacagttgaaggacagagtcagcacctgacacgcaactccacagtaccaagcaactcgacatacggagcacttcctcacgttctggagcgaaaaatgtcgagtggagccacagaatcttgttgggtaaagcgtaggctctgcgaataagacttctctgagaccagaaccccatatatatcgcgaacagacctatccactatgaacgatgacacatcactacgtggctaaccttcgctggcttcgcgacgtcggacagcgccctgcttgtgcacatgacacgccgcttcatcaaaaggggtggttact

SEQ ID NO: 28326 - DNA, 128 bp, Oryza sativa
ctgcaacttggattccgatgattgattctaatatctctgatagacgtccacccgtttcttgcatgccacctatatgattatgaaaatattctaacaaaattcacaagataggttaatatgtaatctcc

SEQ ID NO: 28327 - DNA, 179 bp, Oryza sativa
cgcacttaaaaaccaggagtctgaaccttaagccccgggcgagacgcttgagctaagccacgaagcaaaaacatgcaggtcaggggccgtcaatgacacaatggttcacacaaatacgtgagaacactgacataccgatgtgaacaatacaagcacacaggaaggcacacaagggacca

SEQ ID NO: 28328 - DNA, 403 bp, Oryza sativa
  unsure (1)..(403): unsure at all n locations
aagacaganacctctgatgttttatcatcatgtcaccgaggaaagaatcatttctatggtgatgacctggatgcggaggaagggaggtgcagcaagcattccgcgcaagggattgacactgaccaccttgtgagggatttgatggacaaggtcttgctatgcaatggtgagacatgctcaaaaggtgttaaggagttgcgtgaggctctgcagcatgatgtggcgaaacattcatgcggaggccatggcaaagggtccagccatggcaagggtcgtggaaagaaacaacccaagaaggaggtggttgacctgaagacccttctcatccattgtgctcagtctgtggccactgatgacaggcgcagagcaactgatctcctgaacagatcaagcagcatgctca

SEQ ID NO: 28329 - DNA, 89 bp, Oryza sativa
gctaaccgttatgattgatcagctgcacaataacgaatacttgttttgtgctgcagtctactacacatcagatacgtcatgaacggcgg

SEQ ID NO: 28330 - DNA, 456 bp, Oryza sativa
gttgtatcatgtggcataagtattgtttatatatagttagccacaagtgtggcaatgttagctctagttatctgagtatgacatgtgggacctaagggtaggaaagtgtggcatgacacaactgtggcattgaataaacacagacaatgaaaagactcataaaatttctgaaagaggtgattctcagagtcctgcttcagaattggaagatgtgttcttggtgaaaacatcaaagcctttaaaagttggtaagcttatatgctcatgtgcttaattaaaggaagggaaaacaatgctcaacagtcctacaatgtgcatgctgtctcagaagtcagaacatagaacttttcatgaatgagcacagcaacctttgatagtaccagtatttgttgttagtttttgctcaagataagataaaaggcattttctggaacggcgctgtcgtgctagcttcat

SEQ ID NO: 28331 - DNA, 499 bp, Oryza sativa
  unsure (1)..(499): unsure at all n locations
gcatgcaagcttagatactaatccccatgaccaaccacccagtggattatcaacggaagtaggcacttgtattcccataaccatgaaaagaatattccaaactgaatgtgcaacatgacaataaaaaacagatgttcaattgattcttcagagttacagaagcaacacttaccttttcgtctccttttaaccaaattgtcttttgttaagactactcctttgatataccanaggaaaatcttaatcctaagtggaattctaagtttccagattatcgactttcttggtaccacattatggtacataagagccttgtacatagaactcaccgggaagactcntcttccattggcttcccatctaanaatatctggactattagataagttaaacaagaccatntagcataccagcttgtatcacgcattcatgttatccnccaccaaagctctactaaaggggcacattagaggaacatngcccagtacatcgcttactc

SEQ ID NO: 28332 - DNA, 346 bp, Oryza sativa
gcttatagcacatgaatgagattccagccgcatgcatcagcttgatgcttctctttccaagccccttgtaaggccgccaatcccttcattctccattatgcaatacagagcatggaagacattcttgtagaccttgctgccgcctaccgctccgacctgcatttgcttgcgagctacctcgagagggaatgtggcggtgctcgagatggcacccgcggctgaaccgatgagaagagtcgcgatgttgctgatctcctactgcttgaatgtcttcctgtagagcttcttcagggtgtcgtacgcatagtaattggttgcagcgtatggcaccacgccgatcagactc

SEQ ID NO: 28333 - DNA, 307 bp, Oryza sativa
  unsure (1)..(307): unsure at all n locations
ctgctgttgtacaaatgtataatccagaaattcatgagctactgtgagggaataaaaacgcaggaatccatgtagctcatctggttataatatgtaagactcatcaaacatactataaagagattaataattaccaccctnttcttggtattatctgagctggttggtgaaatgaagagtggagcataacatggtgatttggtacatcgacattngaatgatcatatcaatttccaaatgtgaggattacattgcatcgtcacgatgcagtattgaaaatcgtcggactatacaagttgctcctcaa

SEQ ID NO: 28334 - DNA, 320 bp, Oryza sativa
  unsure (1)..(320): unsure at all n locations
tatctgcagatcctgttgtaccacctgaagcatagagaatattatattgatggtaatgtaacataacaactgggttntatgcaacttgtttggctgttcaatagttngtgtattaccatctattgcatcattctttggcaaaggtgcagacagcacattccaaatgaaaggctctctgaagcagcttttctctgtttcctcatatttctggcaccgggcaagtgttctcttggcaaagccaatgcaacttgttttgcagccttattagcagctttattgagaccacccttatgactagaactaccacggccaccctgtga

SEQ ID NO: 28335 - DNA, 410 bp, Oryza sativa
  unsure (1)..(410): unsure at all n locations
agctttttgttggtttagtgattcagatcagtatgtgtgaatttcacatgaantttgccaggttatattatattcgaccatacattgtggttcttgcacatgttggagacctatgcattgagtactgttttagtttcttaataaaaatggtgcctgcagcttatacttctttcacctatcctttattaatagatacaagaacatttgtttcaccacttgaggagaagcctgacaattgtcatataagcagataaccttgctcggtatgtgtgatgttcaactcatcctatanttttcataatttgttgtatatctcttttctgatttcatattccaagtacatcttatgcgtatactcctacatttngcanatataataaagttacatgcgatatttgatatatattgat

SEQ ID NO: 28336 - DNA, 389 bp, Oryza sativa
  unsure (1)..(389): unsure at all n locations
agcttgtcgtcacgccacacaccattanggtgtccttttgtgatggtggagagctccttgcagtggactcggcacatagcaacattgtgcgaataactccgccactgtccgagtgtatgttttcttcttgccatcctcagctcagcgctctccttggtattttaaatatgaatgtaatatatgacatnggaacatttttggtgtgtcatccagcggactggttttaggagtgatcagagtttgttccttctttccccacaggcatgaaactttaaaattagctntgttaaacatatcagtggctaataagcatatatgcaaatattttttttcattttcttcttatgtagctctaatgaatttatataccaacttttaaataattgata

SEQ ID NO: 28337 - DNA, 415 bp, Oryza sativa
  unsure (1)..(415): unsure at all n locations
tactcaagctnagtcggatcatattaatccttattaaaagacgaagatgattcgttttccgcgcgagccgaaaaactatatacacagcatgttgtggatctttctaaatataagtcaatgatctacttgtaaaatcctcttcctcacaggaaagctgcatagatagaataagacggtatatttgtaatatagctctttaattaaaagtgtacattgtaaaattatatccataaccttactgtcttttcttaataggctaagcgaagtttctagataaagtgaatacaatggctcggatttcttcttgctatcttgtcttcatgtggatccagtgactattattctgttgatcatgtcggtcatactatattaagtagcgcattgagcaactataaactccctctctatcaaatat

SEQ ID NO: 28338 - DNA, 415 bp, Oryza sativa
  unsure (1)..(415): unsure at all n locations
agcttgtcgtcacgccacacaccattagggtgtctcctgttgagggtggagagctccttgcagtggactcggcacatagcaacattgtgcgaataactccgccactgtccgagtgtatgttttcttcttgccatcctcagctcagcgcttccttggttattntaaatatgaatgtaatatatgacataggaacatttttggtgtgtcatccaacggactggttttaagagtgatcagagtttgttccttctttccccacaggcatgaaactntaaaattagctctgttaaacatatcagtggctaataagcatatatgcaaatatttgtttttcattttcttcttatgtagctctaatgaatctactataccaattttaaataattgatatttccatganaataatgtcatctat

SEQ ID NO: 28339 - DNA, 293 bp, Oryza sativa
catccgatatataggcgctgtctcgagcatgttcaacaagatcgccgtcgagataagccttgcatgcatccataatgtgcggcgcgcaacaagtgaagtgctccttgacaaaattctcgaaatgcttgatcaaggaaaagaaagaactatcaggttacacatcttatgtcttaaaggtgtgactcttacagctgacttgggtatatttaaaataaacatactatactcttgtgagatccagttatgtacatgaagcattacaaactaaagctatagcattcttaattctgaac

SEQ ID NO: 28340 - DNA, 447 bp, Oryza sativa
  unsure (1)..(447): unsure at all n locations
agcttttgtccaaacagaatatcaaccgataattattggatacactcatttcgtccgaacggtttaccattctgtagtattttccttataacctttactgtactccagtaaagatatttactgaatgtggggacattcctttacagcggataatagtgacatcacccactgaacctgcaataattatgcttttctcccgtgtacaacgcgagtactctccccgtctcccgtgtcccgtccgtggaaaagcaaaagttntgggagtttggactcatcttttcaatccgcaacttttcgaagtgaaaaccgcaaacctcttctgctgctgaccccctctcagctgcaggtctcaagtgttgattttgtttcaaattaaaattgaccgtgatggagagacacgttanggcgttaaagattctaatgtttcctttaaaaatgaacctttga

SEQ ID NO: 28341 - DNA, 288 bp, Oryza sativa
  unsure (1)..(288): unsure at all n locations
gttctttgggctgctgttctgctngttttactgngaccagtttcttacattactaggttcatgaagatatctatattcatatattacaagtgaatgttttaattagtatttctccatgttactctgatgtttcagattaaggttctttctagtgagtgtactgaggaagcgacaaatgtgcaagatgcactacatatggaggaattgttgaagcataatggtgcagatgagaataccagacatctatatgctgttcagaagttgagatggcaaaaactttgttcgctc

SEQ ID NO: 28342 - DNA, 320 bp, Oryza sativa
  unsure (1)..(320): unsure at all n locations
agctngatctatgcncactcttagacaagcaacatcctgaccgggaggtataagaacaatcacgtggggagcattcgacgcatcgactatggatataccatattcccgcgatcatacacgcaagcgttaactgactacaccagatgacgtagcattatcgaacgaaataggactgatgctaccatcaagatagatatgtgcccattctcgagctaccagcacatatgttggatanttaaagaaacgaacgtttatcgcacagagaaagcgcggtggaaagaatgggacagaccagggcactatatgtctttacacgaaca

SEQ ID NO: 28343 - DNA, 236 bp, Oryza sativa
  unsure (1)..(236): unsure at all n locations
actcgtagtactatcagctttaaacattatatgaccaatatgagtatgagtatccaatggatgcatgaatctgatctgtatgcatgcatgcttgtactattattactagtagaggctaggtactaaaagtactagtagaggctagggcctgccttcacgtccacgccatgatctgcttttattcacctntttcttgtgatatgaagcatgtactactactctactataggggtgga

SEQ ID NO: 28344 - DNA, 449 bp, Oryza sativa
  unsure (1)..(449): unsure at all n locations
agttactgagcatcaactttataattttatatgatatgaatgtagggagcaccttgaaagaagcataatctaagattaacaaagctaccatcagctttatggtcgcatgttgagttntaggagttagtgggcatcaactctatactaaggcaggatatgaatgcactaagcatccttgaaagaggcataacttaagattaacgaagtcaccgtaaacatcttgttatagactgataacttatttgtaacagataccatgtaaataccaacacacttgtgttcacgttatgacatgaaactaggtgagtaggctccatcaactacgcttatggctatggatgaaaacggtatgataacttttcggattccggacctactttcgaatacaaatctgtcggttggaatgttctcagaaacgaaaatgaattctgaaataatttctcgaaaca

SEQ ID NO: 28345 - DNA, 372 bp, Oryza sativa
  unsure (1)..(372): unsure at all n locations
accgttcaaacacacaattcttgccatatacaattccgacaaacgacttccggaatatgtggtcctcaccgggatgaaatgagccacttttggtagtctatcgactatcacccaaatatagtcatgtgccgatgacgttctgtgtagaccagttatgaaatccataccgatntcctcccacttccattctggtatgctcaaaagactgaacaaacctacgggtgtttgatgttctgccttgactcgctgacaaaaattacatactgctacatattccggtatctcacgcattatactcgtccaccaaaatctgttcttgagatgctggtacatcttattactacctgtgtgaatggagtataaagtatcatg

SEQ ID NO: 28346 - DNA, 435 bp, Oryza sativa
  unsure (1)..(435): unsure at all n locations
ctaacttcttaattggaagaactctatgatctttatttgatcgttaaatagattagnatctcttgtagggaaaaggctgcattttctatgagtagacctttgattnttttttagaaatcctaattattcttaaagtgtggggaacacttttaagaatatttataaaatcgggaaatacttttaaaagtgtggggtacgaatttatgtatatttctaanatcaggataaataaacagtcatcatgaaattatcgttgcctgaagaggcatcactcttttaatttaatagagggaaaacacctatttcgagacatgtcatatctataggagagctactttttnnttttaaaaaaaaaactcatgcattttattatatatagataactaggtacatatcacatgagttatccctagcgngaaatcaattgcaagtaaa

SEQ ID NO: 28347 - DNA, 465 bp, Oryza sativa
  unsure (1)..(465): unsure at all n locations
ctttattccaggtactgcaggagggggaactgttgaagtgaanacgtttcctttagttcttcgagtcttaattgaggactgtagtacttagtcttaattgttttcttgagacttggaagatttgctttgctcggctagttgaggacttgaggctcaaatgcttgcctattttgtgttgatcaaatatcctctccgctatttntggagattgcctaatgtttctttaagtgcgggtaatattcttatgtgcttcatagctcgtagttaacttaatatggtcgttttttcccctccttttcaggagctgcaagcaatgaacgttgttccacgattgaagttaactgaaagataacttgaaatacgatggtcaagcagagctcaagcactgttggtacaagcttttgcagcaagaatgcangcttgtaacatgtcgacgacagcnatgaacgtctgaacctatacatc

SEQ ID NO: 28348 - DNA, 253 bp, Oryza sativa
  unsure (1)..(253): unsure at all n locations
gtggattaaatcccttcggtgttaacatcttcacagggctgatgacattgacaccatggatcattctttatcgacccaaagtttttgatgcttataatatgatcattctatgtatttatccaccatggaccanaagatatgaaatgttgcatagtattcatacagctttgtaatatacatcatgaatattagattcgggattgtagaaaccattcctaattcatacaaatctgactaatagaggctcacttat

SEQ ID NO: 28349 - DNA, 416 bp, Oryza sativa
  unsure (1)..(416): unsure at all n locations
agctttattngtgcgataatagaccccgnaccatttcaatcaactacagctttctacaggaacagagccatgacctaactgaccttgaggaccctttcatagaagatgaaataaaataagcaatctttcacgcaagatcagataacgccccatgtcctgatggcttcacaggtgcttttttcaaaaaatggtgggagattatacaggaagacgttgttctggcgataaatcaggtggctaaccacgacactcgaagcctttggttactaaactcggcctacattgccctcttgcctaagaggagtgaagcacttcgagtaggtgattatagactgatcagcctcattcatgcctttgggaagctcttctcaaattattagcatacagattggcccctaagctccaacagatgatct

SEQ ID NO: 28350 - DNA, 337 bp, Oryza sativa
taagagtgcttgcagaaacgccgcatgaccatatttgcagagtaataaatcttaattttatactatagaagatcctattttaaaaagaccctctattttttcctactggagtacatatatatattgttaggtcttatagctttatcttttactcgtgcatccgtaagtgtatttttaaggtaacagtatctaaaagattattctgtttatagttcttgtttatcgtactgcatactctgatatatactttgtgggctttataactctattatcgcatctattcatgtgtatgtgatctttgtcaatccaaatccggtaattagttctcttgatacac

SEQ ID NO: 28351 - DNA, 381 bp, Oryza sativa
agcttgttctcatatgagacgatgccaataccattctttggaaccaatatcaagcgtgcaaatataatcgcgacggtggtccgaaccccaagtctcctacttccttcaccagggcctaaaaccataataaaccacaagtatggacttcagataaacatataaattgcagaagtataaatgtactaaaagcacacttcatattgcagcacggttctaatgagatttgagaatacaagatgagcttaccgtcaacaagattgccaccaacggcaagcaaaatgcacggaatcatagcttccctgaaatatataaaacagcattgttagcaagagatggttttaaatgcgaaatcatattgtattacagacactataagcatat

SEQ ID NO: 28352 - DNA, 347 bp, Oryza sativa
  unsure (1)..(347): unsure at all n locations
tctctctgcttactaagtcattgtaatcactgtgctnctttgtctttgcggactctaattngnnngattcactttcgtagaactcanaatagctattcaagttattaattntgtctttaagcttctggatttcttcttggagtaaacctccctggagtagttgcaaggcacgtaagttggatataaattcatcatacagcagaagggtgattaaaaaatcacatgactggtcaagttgagagcataaaatacagcttaacatattacataatgtattaaccaagctataatataatacaacataacctgctttcggtttgataaaagcacacactcaagatcatcaa

SEQ ID NO: 28353 - DNA, 402 bp, Oryza sativa
  unsure (1)..(402): unsure at all n locations
agcttattctaacatagattacctgcanaacattgtgtccgatgcagtgatatcagatttagattcacatttcttcctattagggactataatcagattcccacatcccatgattccacataatcttattacatctttgtgctaccattatactagatctttcttctttgttaagacactcaaaattacatatatggcacgagcgtcacgttattgaccagatacttacaataacctaagaactaagaaaccctcaatcccattatcagttaagagcggagttggtnttcttcatgagaagacaacaacaggctcaaatgcaatatctaagacatctgtcaacgatgtcatcagtgatgacactaaacagccctgaaccttacttcactagcagaaatttct

SEQ ID NO: 28354 - DNA, 238 bp, Oryza sativa
  unsure (1)..(238): unsure at all n locations
tctcttactgaaggggggggggagaaagatagagcaagantttgtttatcacagtactcagcaagccacactcggagatgcactattaatgcaaaggagtacaacgggataataatatatgggttaagatttgcagtaaacagcatttatcagtcacttagttgcccaatgctattttgtaacacgatcctagagctatacaatattattaatcaaggtcgtgaacccacacgaacct

SEQ ID NO: 28355 - DNA, 458 bp, Oryza sativa
  unsure (1)..(458): unsure at all n locations
agcttcttcaaccttttctagaatctcggggagcattctgcagcctataaaacatacatgcatgcatttctttgggtagatcaagtctatagcacgacatgcaccaccacccgaaaacgttttccgcccggactcgccgccggcgttactccgatgtccactaaccgagaaaagtagagggatggaatcgcaataatatgaccttcatnttgtcttttggtcgcaccctcaaacgagccaccgtttgtcgctggcaagcttgagatcgagctcggccatggcctgccctgtctctgcccgactggagaggaaggcagggactntgttttgaatatntgaacaatcataggggtaaatatgaaaacatacaaaccaatgacatgtggatccatggacctaagtgaacttcacatgaaggggcctgtcactnntgtgccaaaaaaaaaccttactaaatt

SEQ ID NO: 28356 - DNA, 205 bp, Oryza sativa
  unsure (1)..(205): unsure at all n locations
catactctntctccttcagcggactttgnctgatctatcactgataaaangtcggccatgtacctctatntacagtatgaaattactatcagcattcatcgctgtgacatagagaaagttaggctactgcacaactgggaaatcaacagacaatataccttcaaatcagaagattctggcatggtttcaaagtaagacttgagtg

SEQ ID NO: 28357 - DNA, 395 bp, Oryza sativa
  unsure (1)..(395): unsure at all n locations
gcttgtgatcttgtcaactaagacatcaaattgttctngagacttgatcttgcggtctgcgtcaacagattcacattaatgaatcagcatgtagaagataatggcttttgaagtattgattattggtaccttcaacctcctttaaagccgaatccctctgtcttgccagctctgccttgtcattttccagagtttggatatgcttctctagttgagatatcttggcagcttgcactacattaacttcggttaatcaagggtacaaagataacagcacanattagttgggcagagtttgcgcgatacctttgatgagccactcagttcgaaattggactcctggagctcagcaatccgatccctcagatcgtgttcattcttcttggcaagttctc

SEQ ID NO: 28358 - DNA, 193 bp, Oryza sativa
tcctttatctttagaaaaagtgttaatgtcctattaggactttatctttttcttttatctctaagaaagcttctttcttctccgaaaaggacttgtatcaacccatgggtataaatatgaacaccacgggtctatgtaatctatcgctacgatcaatacaattcggcgcatctgcaccttttaccttttctac

SEQ ID NO: 28359 - DNA, 436 bp, Oryza sativa
  unsure (1)..(436): unsure at all n locations
gcttctgatgtgcatcgactacaccgaccttaactgntcatgtcctaaggacccttatcctctgccacgcatttatcagattgtcgactccaccgcggagtgcgaccttttgtgttttctagatgcatactctggttatcatcagattcgcatggctagggaggatgaggaaaaaactgcattcattacccncataggaacttattggtatacgacaatgcctntcgggttaaagaacgcaggtcctacttttcaacgtactactcgaatttctttgggtagccagataggacgcaatgttgaggcctatgttgatgacttggttgtaaagacgcgcaaccaagagaccttactctcggatctagcggaaacttttgaaagtctccgctccgcccgcataaagctgaaccccgattagtgcgtgtgcggcgtgcct

SEQ ID NO: 28360 - DNA, 364 bp, Oryza sativa
  unsure (1)..(364): unsure at all n locations
atgcccgctatcatgacaatgcattacgaaagccgactcttgntttccttatgccgacgagacgggtctgtgaccaacaacaggataggtcccagaccatactgtgccaggaagcctcagggttctccccgacaccaccccggcgaatacacatgtctctcggcatcaaagctcccctgacaagcgagatacgtacgtcagtggtgctccactccaccacagtggtcgcactagacatttgtntggatgatattccaaggaatctgtccctaagtgcgacaacgagaaaccgtcacctcgatacgtccccggttcgcgtgtctggaaattcatttacttcaaagctccgaccatgtgtcgtttt

SEQ ID NO: 28361 - DNA, 428 bp, Oryza sativa
  unsure (1)..(428): unsure at all n locations
acataactacacatataaggatgccttcttcatgtnactgcaatcatcagccatctggaatgccattagaagcaatgtccaatattgctcaaattgccacatcacaccaacattgttatacatctgtatgaacaatgcaccgagtaacatgaacttgatttctttgacttgtataaaaccaatatatatataatggattggtaaatgccacgctcaataacaaaatcaataatttgccaaatatgccttgatgctcttctcattcccttctggatggatgcaatctcgcggacaggacaggtgtaacaatctgatgcataacctacttttgagatttagaataaacatgatcaccaacattgatgtaactgctaatggatgcacagcatgatgatatatatagtgtgtcatggtttacctgatatatg

SEQ ID NO: 28362 - DNA, 325 bp, Oryza sativa
tatttatattgtaatgttttttgctgcttttaccctttatactagctcactaaataccaggcccacaacgctggaagattttttttcacattataaacaaataatgacgggtctattgatgggaatggccaattaaccctgggctgctgcccactttgataccatgtttaaccggctgtaacaattgattcaaacgtttgtcttcggcatgaccaacatggtcgaactctacattaaacacagttcggctttctcaaactcttagatgtctggctgatgcttaatagtgaatgacaaactgattatcacttactgagatgttgaa

SEQ ID NO: 28363 - DNA, 442 bp, Oryza sativa
  unsure (1)..(442): unsure at all n locations
ctgcagctttatgacatggcatttcgaaagccgacacttgttntccatatgccgacgagaggggttccataccaacaacatgttacgtcccaaaccatactgtgccaggaagcccatgggtcctgcacgacaccaccccggtgaatccacatgtctctcggcatcaaggctcctctgataagctagttactcaaccaggggtgtcccattccacccatgcggtcgcacttgacttatgtttggatgaaattccaaggaagcggtgcttatgtgcgagagcgggaaaccgtacacccggtacgttccccgggcctgggctctggaaattcatctagatcacaagcaccgacccatgcgtcaggtttgacaagtcttttgtgaactccagtgtacccacgttgtacgtcaatttatgcttgacgcgaccgtcatattcgccaga

SEQ ID NO: 28364 - DNA, 457 bp, Oryza sativa
  unsure (1)..(457): unsure at all n locations
atcctctagtgatacccgtctgcatgccagctagcatatgtgtgcatatgtgggtgtatgatcttgatcatagagcatgaaaagtatcttctctagtcacaaggatttgacaaaatgtaatggaattacaagtaaccaaaatgtatatggcttaatcaatatgaatattttggctctggcaggaattcatatcacatgacgaactttcaaaattatcagtttgaanaataaaacatccggaattcaagtcaaacttagaacatgattatgtatagcaactcttatttactatctcatatctcgcaacaacctagactcagatcagcanagtgcagctcacttacctcacgttcctggataatngtaagctacccttattcaaattttgagagagtacttaaccatgaacccatatatgagagatataaaacagagcaactattcatcatttaacatg

SEQ ID NO: 28365 - DNA, 257 bp, Oryza sativa
  unsure (1)..(257): unsure at all n locations
agctgctgcaatttctcggagaatctatagttcttcatattatttagcttttagttcatattgtgagaaattataattgtattatccanataataaactagaagtcagaaactcgaaattaaatctagcttttctaactacctaccagcttgttcttataattttaagctcctccaaatatactcggagatggagttcatattccaaaaccataagagaagattccatagccatagctggaaaaccctacctaaagc

SEQ ID NO: 28366 - DNA, 372 bp, Oryza sativa
  unsure (1)..(372): unsure at all n locations
ttcttctcctgctgtttgtgtttatgctttacggtctacagatcattctgtctaaggcacagctcaaagcatgtgccacggctatgttatgcaaacaacattcagccaggaaaaccaaataacattatgatttatgtccagatttatagttntaggaaatgtctcatccgtccaaaattccttatattttgaaacggaggtagtatgaattatgaaggcatcaatgaaaaatccacattattacttgaatagattctgcatacatcaaccatcatgtctctgtctgcatacaccatcatgcgaattaatgcgcatgcaaccatgcataacctatagtctctacattgcatcaatacttccactagtactgct

SEQ ID NO: 28367 - DNA, 321 bp, Oryza sativa
gttgagaaaggcattgatcaatgggataaattgttcagcattccatccagcatgatgctttgcttgcttcctggactgattactaaagatagctaaggttacccctctctcccaacaccccctatgtttttgtgaagactaaggttggtgatgtttgatccaggactaaacttatcttatattagacctatttagagtataatatagacactacaaactaatactaaataaagctattgcagataatttttaagctaataaccatattaatatattactgacatacatagcaatacggtaataggctaaaatcgctcggat

SEQ ID NO: 28368 - DNA, 387 bp, Oryza sativa
  unsure (1)..(387): unsure at all n locations
agcttgtcatcttcactttgtgcttggagtactctccactcatcgcgagcttatccgcgaggccactgccaaaatcagtgaagtgcacaccatcccagcttatcacctttgatcctggctcgcagagatcatcgcagccaaatttccctggcttgaagttgtatggaggcccaccgttgccgcatcacaccatcaacggccacttgatccctgaacacacaagaatgtgagcgaattcagatgcaatatatgaaactaccataaagttattcatgaatgtgaacacaattatccaaatgttctgaacttntaaagatgggagagtcataccatatttggtgtggttggcgacgaagtcgtacttgatggcanacatgtcngtgtaca

SEQ ID NO: 28369 - DNA, 184 bp, Oryza sativa
ttttaaaaaactcctcattatgtataaatgcagcaacttaaaaggtgataagtcattaataattaacaactctaaatcagatagaaatgaattaacttaataattcataaagtcacttgggtgaaaacaattaaatttcataaattgggtaaataacaaggtgccaataaataataacaaaaac

SEQ ID NO: 28370 - DNA, 424 bp, Oryza sativa
  unsure (1)..(424): unsure at all n locations
tgctgcatgcaagcttttgtgagctacttcctgttgcatgttnattttctttattgtgacaatggactcatcatctagctggcctgtgaagactataccaaagcattcactccctagcaggttatcatcactgaagtttcttgttgcgcggacaagttcatggtatgagattaactggtaattcagcaagactgcatctgagggtagtggcatctttcctggcttattcacttttccttcttaccaacatacacaagcaaaatgctaaaataaaaaatgccacaactgcaggtaatatgaattatattagccgttgtatagaccttgagtgagttctgctctgtcatgattctattccttggctcggaaggccacatagtgccttgtttcccatcaatgactagacagtgatgtttgagaacac

SEQ ID NO: 28371 - DNA, 450 bp, Oryza sativa
  unsure (1)..(450): unsure at all n locations
agcttctgtagtactattcatagcaagaaaatattatctattatctatctatctatctatctatctatttctattatctattatctatctattatatattatatactaaactaaaagtccattaaacttcctaaaaacgctctgaaaccgtcaagtggcaccctataaacactcacaagtcgccaaatggcacctaataaataaaagaaacccaaccatccatttntacttaaattggtggattcattattttagatggttagatatattttgtaaaaagaaaaaacatccggagccaacatccaaaccaacgtacaaaagtacgtaatagttntagattatatactgacgaacgtacttactatacgtacatccatcttttccttccttattttctattttaagaagactaanataaaaattacttttacaagcaaaaagaaaatcaca

SEQ ID NO: 28372 - DNA, 103 bp, Oryza sativa
gagaatcggcaggaaagggaccaaaagagcgacggacggaaggggaggaacagggacacagactggtaaacggaacggaaatcgacgccacctggaaggagcc

SEQ ID NO: 28373 - DNA, 457 bp, Oryza sativa
  unsure (1)..(457): unsure at all n locations
gcttgaacacccctcnttgatgtcctttgtatctatggctngcaaaatatctgcaccaatagcaaatagcagaggagacagaggatcntcctgcctaacaccccttttgcaagggaaaaactttcctgggaccccattaagaagaactgaagttgaagctgaactgaataagagctgaaccaactcaatccatttgggtgggaatcccattgaagtcataatctgaatgactgcatggtgctctatcatgtcaaaagccttttcaaaatctagttntaagagtacaatntatctcttagactgcttgcattgatgcagatattcataagcccagcctaaacaatcttgaattgtcttagttntgatgaaaccatattggttttgtggaccaactgaaccattttcccttgtagtctatttgtcatggcctttgagaatgatttactgaactattcat

SEQ ID NO: 28374 - DNA, 431 bp, Oryza sativa
  unsure (1)..(431): unsure at all n locations
agctntaatgtttctgataatttaagcagatggtgcatctctagcaatagatagttaagttgttttaagagatcattcaaattatcatcccataatgatctagaaaactcaattatatttttatgaagaatttatggaatgcagcattaaaaagggtcgcatctattattctactcttatgtatatcatgccaaaacgtatntttcacgtacacaataactaatactattataatcgaatagattatcctgcactaaatcaaattggccgggccgtcatatttatggctgacagcgataccggtgatgcgttctttccttctcacgcgacattcattgtgatcgaagtttcaacactatggtacagtagcatcgaaaaataagattattaagcagggaaaattctacgtttttgtcacgtggatatgtgct

SEQ ID NO: 28375 - DNA, 490 bp, Oryza sativa
  unsure (1)..(490): unsure at all n locations
gtttaatcctaatgtaatacttcaagctctggcaacccgctgttcccagatgtctctctactacgtacccggacagggaggtcttaagtgctcttgagggctgtcaccacctctacacccacctcaaacgtactgtgggatacacaacaattactggataataattacctaaacaccacgtctaagcaattaatatctactntagtgtatataactcaccaaagcaatcactatattttagttgattatagtgaacaataatcccatatgctatttaggaactaacccaaaaataattctcacaagataaatctaaattactcaggaagataattctattaatatcagagtaataaacagaatanaagaagtaggagaagataccgacagctccggaattcttccgacttcttctgctctactctcttnctatattatagatacaaatagtacaatagagtctcttataattcagctcaagattggaagt

SEQ ID NO: 28376 - DNA, 459 bp, Oryza sativa
  unsure (1)..(459): unsure at all n locations
tccacttctgtcagaagtgatatctaccaaacgacagtagagccactctgtgtagaaagcagagcagactatagtgatccgtaaaaaatgaactagagagatacgggggggttcggaacgctctataactccactatagactcagctcctaaagttatatttaggagttgaaaccctactaaacatgtgagaaaatgcacatacatatacctcatcaatagaaactccactttggcccactgtggaagtcccttcacccataacctacatctactattcgattgatatggaactagctaaaacactggnttcccaaccacatcgagagataatgagcagaatggaagactttgtgtggcatacatgcgatggaagcgcatgctatgcctctttcttattctctccccactcataaaaatctacttacatatctgcatccaggatgcagaacattctgac

SEQ ID NO: 28377 - DNA, 462 bp, Oryza sativa
tccgcatcaaacaatagaacactctcttttggtacaaaatataaagaacaagctatgtctcacctgacacgatttttctcatcacagaagaatggtgttgatgactgataatcatctgtcccaaagtacctatccccaaactcacccatcccatggatgacgcggaaatcatcattcagaccaaactcgatgtctgatgtcacgatcttcactcttggaaatctcttgctgaccacatgcactccttgaggagcctgtaacaattccaacagtttttgtggtaagctcaatggatatcaaccgccacacaataacagcgaacgtgataagttccaacatagcaagcatgtacagcaatggtcataagttccagactgcacttcgagaagtaacttgtagagatgtatccactgtgccctccattaacttgtcagcaatttgccgtacaacagatacagaaag

SEQ ID NO: 28378 - DNA, 328 bp, Oryza sativa
  unsure (1)..(328): unsure at all n locations
tggaacgaccaccgtgttcgccagccactcctgttgtttacctcactgatgaacccggcctccgaaagtctagccacctcctcgcggatgaacgcttgacatttacgggcttgccancgcacttttgcagaccggccgtgcgccccgtcggacggcatgactgtgctcaatcaccatcctggggaccccggcatgtccgtggtctcatgcaatacctcatcgttgccccaagaaggaagaacgcgtctccttttgcatccaaaaaccacgaacgtgggtctggatgggcctcgccaagcaactcctgaccgacctgtccatgtggcat

SEQ ID NO: 28379 - DNA, 458 bp, Oryza sativa
  unsure (1)..(458): unsure at all n locations
gcttgtcttgtagacgcgtaccaggcaggaaatctgatagcatatgtttgcaactgtatgttgatgggcatatgaccatatgttggccccaactccagttcccaaatcccaagctatgtgagcgatggatccgatttggatgaaattaagcaaccgtaattatgcagccaatgcgatggcacggcagcaaggtgtcattaatggtggtcccagcagataagataattntgcaacgttgctaaacactactttgatccatcattgttcatccctccaccatcgtaatgaccttcactccttccaccaccgtcgctgcattcgtccaattgtcactccgtcatcatcacgtggccttagcgtcagaatcccttatcgtatattcacgaacacaactntaaaatacatatgaggtgaanatgatcgataaattcaacctatatcattattatatacatatc

SEQ ID NO: 28380 - DNA, 52 bp, Oryza sativa
catacgcacgaacttgcaaatccagaccatggttgctttttaggagttcatc

SEQ ID NO: 28381 - DNA, 149 bp, Oryza sativa
acctcaatcttatgagtataccccatgcgcttacatcccctcgagtgttatctctgtgacatctgatgacgccctctggctctggaaattatctctttcttccaccatggatgtaaatggttcggtgagattaacggtgtgtgctgcta

SEQ ID NO: 28382 - DNA, 254 bp, Oryza sativa
tacgtcctataaagagtactatgtgaccgtacgcacaattgatgttctactactgtccgtaatgccaccgaaacacgaatgctcacacagtgaacattatgcccttctcatttgactgaatatgagcgcttccaaccatatatatgcctgaagatgacatcttctcttatctcacgctatgctctatccatcatccggcagccccactttgaccacgtatcttgaatcctttgttattgactacctgctctgat

SEQ ID NO: 28383 - DNA, 60 bp, Oryza sativa
ctgttccatcacctatcaatcggccttgttatgtggccaggacacacaatgtatcagctg

SEQ ID NO: 28384 - DNA, 284 bp, Oryza sativa
  unsure (1)..(284): unsure at all n locations
agctttgtgctcgaattgtcttgacttccgaactttatgaagctttcttctgtgcctctatgtgtgacaactaatagaatnggtgagattggtaggagaattttgatacaccgattgacaaccaaatgccgcatggcgagaggagacaatgtgcctgttgtgattatacaactttgccttagggtttgaccatttggctcaacccacagacaagttggctctgttaccactttgtctcgcaactggatttaacctcaattaccaaactattctgtgtattatat

SEQ ID NO: 28385 - DNA, 321 bp, Oryza sativa
  unsure (1)..(321): unsure at all n locations
cgtacccgcgatcctcttagtcacctgctgcatgcaagcttgagccaagcctttaatactgtcgagttttatatagactcagctcgatcttgactatcgagcttgatctgttagtagaaaaatatatattttaagaataatcttttaaaaaaaataacttctaatttatcatattaatttaagaggagaaaataaaataaatatatgatgcttatacaaagtacattggtgtatgggatgcatacaaataataaatntgattccctaatttattatataacaacagaaatcatatattgtgtggcattataagctcaaact

SEQ ID NO: 28386 - DNA, 175 bp, Oryza sativa
aaagttgaaaaattttttaattttaaaaaaaagggggggggagggaaaaaaaaaaacagaagagagaaagagggataaaaaaaaaaataaaaacattgaaaaaaagaaagtacgagaaggtagaataggaaaaaaaagaaacgggaacgacaaaaagaaggggaaggggagagga

SEQ ID NO: 28387 - DNA, 451 bp, Oryza sativa
  unsure (1)..(451): unsure at all n locations
agcttatctctgctgaactcaccattctggatctatcacccatggaacttcagaatttatttacaccagatgaccattggtgatagtccacacctacatttaagtccaagcaatttgatttatttatntttcttaatatgcactaattatgttctgaacacctctcaggctgtgttcattcaaaggtgttgggaactaatctctcgcacactataacatagctatccattaacacatgaataattaaatattggtaattntntttaaaataatttttcttaaaaaaactttaacaaaagattacaaccttaactgttctgtttgngaagcgtgcttacggaaaacgagtgatgagttagaaaattactctctttgtcccaaaataacaacttcgatgaatatgatcatctaatacttaatgtgacatcncatgtcagattgaatactggat

SEQ ID NO: 28388 - DNA, 411 bp, Oryza sativa
  unsure (1)..(411): unsure at all n locations
atcttaagtcaccgttgctgcaacttacctacaccttgttcacttcattattggtaagactcttgagtttaaatgagatgctcgtggagatggcattggaaggagtgttgatgcatgatggtatacctgttgcatactntatcgagaagttgcatgggcctggtttgaataattccacgtatgataaggaattgtatgctcttgtacgttccttattagacgtggcgtcattatctgtggcctaaagaatctgttattcactctgatacgaatcgttaaatatttttctctcccaaaaagaccgagcaccccagggaagacttgtgcgatgaccctttctgagtgttgcaacctgttttgcctcttgcgccaaacaccctaaaattctttaatatgccaatataaatactg

SEQ ID NO: 28389 - DNA, 369 bp, Oryza sativa
ctcgcatcctgccgccattgttggtggagcacatggccatgtgagccttcaaggagcaaccaaaggggtcgccgccccaaccccccgcagacgccggcgaccgcggcggcggagcctgaggtgtgggaggatctctccggcatgccgctcggagccgacctgatctccggccgccggagaggatctgatggggacggaggggagggaggcaaagcggcaaaagaaaaaggactactttgtaaatctcaccataactaacaagggtatgtctataaatttatggatcgctatcattcctggcttttttggtggtggaaaattaatcacagaaaatctacgactagcgactcaaaccagcgaattcctcgc

SEQ ID NO: 28390 - DNA, 405 bp, Oryza sativa
ctagattattgtgtgtataaatacccaccatgccacccctttctttgtttagacttgcaaacccaatagtctatgctctaataatctacgatagaaacaactaaccgtttattctactacaaattataataatatagcttatagtaatctgacttaataatttagagtataataatttcaaactgaaagaaacatggccttagtgctgtgcgcttgtgtgtgcttgtgcgaatagatgcaccgatcttcatgtacaggtacgaatccctgatgtcaactggaaaagtatgtcagtaatactgatgactttcaacttgaacaccatctcataatactgtgcaccaagcatcctcgctgtacagagtgtccgactaatcatcacatcaagaacgtcgttacagtttc

SEQ ID NO: 28391 - DNA, 90 bp, Oryza sativa
caaaaaacgggaaaaaacccccaggagcccaggggaaacccagaaacagaaggacccaaagagaccccaccccgacagggggaaaaagga

SEQ ID NO: 28392 - DNA, 362 bp, Oryza sativa
cattattcgacagtggttcactattctaggctctctaaacatatttgagccagtgatgaatcattctttctacaaccgggcatactatgctcatttattctggaaaaactgggaaccgatgtggaaccatatccaaatctatctcgcaacaaatgccaagctacttgctgaacaccacaaccaaattcttgatataatctgcaaaaataatatccaagacaaacaactagctaaagcaagttgccttgctattctagccataagctatagaactgtggactaacaatatgaactaagtgtatctcaagcttctattcatgtcattcataagatctaaatccaattatgtacacatatatctg

SEQ ID NO: 28393 - DNA, 284 bp, Oryza sativa
tgccaggacccaacaagagtggcattattagattatgctgattctgcaatattctcacctctttttactgtataacaaatcgtgttctgaaatctcaatgttcatacctataatttgataccatcacaacgaggcatattttatatatcatttttcaagccagtcaactctatatattactgaatctgttcaacataaataggattctgggcactcccttgatttgcatatgccagaatatctgaatccttctcactttacaatctcgcttttatatatatcat

SEQ ID NO: 28394 - DNA, 416 bp, Oryza sativa
  unsure (1)..(416): unsure at all n locations
tcttatttgtgctaaatgaattagccacttgatctatntgatgtttaggtttgatttccttattcccaattaacattttgcaggaagaatagactagaagtaatgaacatggtagtccaaaggtgaagaagtaatgttttatagttaaacctgacgatccattgcagacatcttgcgccgtcactcccgtcagctagtgcagaattgggagctcccttgtagtagtattacaggcattcaatctatttgtgccatctagtgcaaaaattgcgtctcttgccctctgtaacgctatnttatctttgtacgtgggtaagcaaaagcttgccgtgataaaatacagcgaattatttattatcatgctgcgctctagcggtttcgatctaaatataatactacagctacttgctctatac

SEQ ID NO: 28395 - DNA, 356 bp, Oryza sativa
ttgccgatgaataccgcacctggctggtagttatgttctgcacggaagaagaattaacattcctccatatttctgctgacgggtggagcctatctatacaactacatgcatgcgattcgtcgaaatgtgggtctcgctgttggcgctatcctctgacctctcctgccggcttaatattcatgtcgggtatcatgaactgtatttcacattagacaatctatgtatttgtcgcattgtttatccatcaaccatgcatctgaatgtgcatatatctaacaattaatataactgcgaatttatataatacggtctataagtataaaacatgaaaagatattatatttcggaaatagcta

SEQ ID NO: 28396 - DNA, 216 bp, Oryza sativa
atgctgttgggctagtcctgccaacattttttccttgatactgttgaggatcaagagatacatggtgcagacagctcataattgtttacctcagatatactacagatacagggtatgttactcccatgtgctgctgaacacttggagtggcaatcatttccctacatatatctgtgctaagctagaaatttactatatggtaactgctgtggatat

SEQ ID NO: 28397 - DNA, 390 bp, Oryza sativa
agctttatcatcatatagatgcaaaacatgtattcttgtagagaactccacatactgatactacttatcatctgaattttattcttaaacagtaaggctcaccaatttaccttttcattatttctagataatgtccaatttaccttttcatacgaaataagatatatctgtctcttatatggcgcaataaatgggataccagtgctactctttttttttttttgaaaaggggtacttgccaagtatcatcaacttggattaatttatccacatactgaataattgaccccagatttgctttctaacaatactcacaagatactataatcagaatgaaaggatactaccagtctaccattacagatctatgtacaagctaaattttgttga

SEQ ID NO: 28398 - DNA, 374 bp, Oryza sativa
  unsure (1)..(374): unsure at all n locations
catgcaagcttgttcagaattataagagactctattgttctttatngnatactagaatggggagagagtgaggtagaagaagccagaggaattcatgagttgtcggtaatcctatccttatttttgtaccttgttaattactctagttcaatagaaatatctttccgattaattacaatttactttgtgagaattattcttggttagttcctaacagcatatgggatcattgttcactatagtccattaaaatatagntattgctttagtaagttataaacactagagtagttattaattgcttaaacgtggtgtttaggtagttaaatttcagtgagtgctacgtaccccacagtacattataggtggatgta

SEQ ID NO: 28399 - DNA, 123 bp, Oryza sativa
ctggagttaccccactgccaccattctctggctaatccttgggaaagcggcgagatacgtgtcgtgatgcgaatctatacgggtcaaaaacgcgatgatcctaggatctcggactcgatacgt

SEQ ID NO: 28400 - DNA, 341 bp, Oryza sativa
tactacgcttcataacgttttgactaacaatagacagagaaagatccatggatttaatagtttcatgcctaaatatctaatattatctctaatctggatattcagtagtaagttagtaactatgcggttggtttctgatgttacctctgaaactactagtagaattctaccttctctgaatagtaaaacctcatggataatactacacaaaaatgaaagaaacaacagtgaaattaacaaaaggaattggataaacagtagcagaattaattatgaatggcacgcgcattaataaaaagggtggtgttcatgagcgatgactctgcctgccattcacatga

SEQ ID NO: 28401 - DNA, 391 bp, Oryza sativa
  unsure (1)..(391): unsure at all n locations
cttaaccgactgagcatcagctgtcttttattcgtagtggaatatctttatttccagattattaatagttgactgtgcctatntgatctcgatgagtacacgacctatgatcagataagtaaacgcacgcccattgttggaggtgctagctacaccacaacctgtattgaaattctttgacacgataaatgcaatgtcctcggaattcttagacacatatactaacataatacataatttcactaattcaatgagagaacagtaactttcaaagttgactgtattctaagctgtaattggtgaaaactttcacaaccttcttcccataattggacattcatttcctccattaatctaagatctatatttactggagagacgtaccatatgt

SEQ ID NO: 28402 - DNA, 367 bp, Oryza sativa
  unsure (1)..(367): unsure at all n locations
cttgatccacttcaattggtattacatgctgcatctcacatatcactctgtatagaaaagaacatttgatgtatacaactagctgaatggatgtgccctctctgttcctttattattgctcatgtatccaatactacattngatggaatataaaagcctgatttattgcacgagcaaataaccttctcgatgttgctctatggacaatgaatatcaactacaaaattcctatttgcagtgtctaccaatgtaccatctgaaaagggcggtcatgctactgctgagttggaaatggggctctcctaccatattattggaagatccccatgaatgcatgggcagttatattttgaaatattgaatgtct

SEQ ID NO: 28403 - DNA, 224 bp, Oryza sativa
tgctgcatcaagcttcttagtcggtaaaactatgtcgcgttattaaataggtgtctctcgaaaaaaagaaaaaaatcttgcccgaaaaaaaaagaaaagccgttggtttttcaccggcttttcccactttgtttgccgcgaagatcttttttttgccacacctaggctttggtatttcgctttttttattcgagtgtcacggccgctcccggcgctttgttttt

SEQ ID NO: 28404 - DNA, 382 bp, Oryza sativa
  unsure (1)..(382): unsure at all n locations
tgcggcggcggcagcccggtgtggcagcggctgagctcggggacgacatgagagagcttgccnaaggtcagccctcatgctgctacttcgcgtngnncacgcacatttagccgggagacgatgaggggatgacgagcggtggtgaatgacacggagcanggaagcacagcgcatcaagggctatgagacgactaggggacgaccagccgtatggatatggccgcagctgggacgggatccgccggtgtgcgcgtcactgcctggcgccgtgacgttcacggtcttagtgcggccgtcgtcgcttgatccaacagataactcgatgacatcgtcgtcgttgaggctccgatagccatcgaacttgacggaggactggtggatg

SEQ ID NO: 28405 - DNA, 328 bp, Oryza sativa
  unsure (1)..(328): unsure at all n locations
aagcgaatttattcaccaatacccgggctgaggggacacaaatcactgacataattctgccccgggaaaaaaantnaacaccacacgcccggccgtttcatgaactgggaaacgaacaacgttattcatgcgcaaacaagagaagaaaaataggcgaaacgcggctcataacaatgacaccgcctgtccaactaatgctctcatgatctcaccaataataattccataaaaaaaatatatgaagaagcctggaaccagcctgcctgagccttacactggccttgatcttgtgtgacccatctatatatctgacagacaggctcacacg

SEQ ID NO: 28406 - DNA, 365 bp, Oryza sativa
  unsure (1)..(365): unsure at all n locations
agcttatacattttaagttagatagtctcttagttagtggatagaaaataaagaatcttaatctggagtttcgaaagtctggatggctntntnggtcctccttcttttgtaagacttggtctttattagaatattcttctttatactactctgggattgtattacttttcgaggttatgaatactaactttactatatatcccagtcatattgattatgatgctaacttatctaagaaatgcaatggtgtgggtataatgatcgtgtatacgatgaccttatatcatgatgatgatattagaggagtatttggttatttaagcgtagtggttagaatactagatgtcattantttggggtatatg

SEQ ID NO: 28407 - DNA, 438 bp, Oryza sativa
  unsure (1)..(438): unsure at all n locations
atttgctctagttatccttgggagtatatgctangtgtgnnttttttttaacaagcatggctgagtaagctatttttgctcttgatattcttctctccttgacatacatacttttattaatatatttcagtacggaagggatctttccttctgtttatgtcgaaagacagaaaactgacatgtatcttgactacatttggtaacctgaccgatccattacattcaacggataaaacaatttgagtctcctactataaatgtttggagtgagacttaaagcacattcagttctaatgaacatctcaggagatgcaagcgtcttacagagtaatataagcagtataatgattgatgggctcaacttaagactggatctagatgtgtgtgaaatttcagttaaatgtggtcaatatgaatccactctatataatgacagta

SEQ ID NO: 28408 - DNA, 436 bp, Oryza sativa
  unsure (1)..(436): unsure at all n locations
agcttagagagctagggttaatacatatgaatactagtttatattaaggccatactcgtttacaaaagcgaactatcccaaagaagtagtgcaatgacataaagtgggtgaacttattttcaactggatagtagctaacgatatcatttaactttgcaataaatcagaaaaatgaaaaaaatgagatacatataaaaaaacaacggtatattttaccaaatcgatcgacatattattgtgcacgtcttgcctccaacaccaagtgtgtgcagttctaaccattggtggatcagtttaccttntctttttcttttctaaaatggcaggaatgctagctgctccgaggcctgctggtactctagtatatgcaccaagtgtcatagtattttcttagaatattntgagccgattgtggcgtcattaagtattgatcatg

SEQ ID NO: 28409 - DNA, 416 bp, Oryza sativa
  unsure (1)..(416): unsure at all n locations
tccaacctcgactctgcaggttatgggctggtaacaggcattgcggacagaaaggaacgtgaagaacttgcatcttgctggcgtgcgagatttccaaataatcttgccgagcgggcatgatgttctgccgaccgaaatgatagagtaggcaaatcgcatcgagaagtcagtacttcctgggtcaagagaaatcccggcgaccatgtcctagagcgcaaggtattcccccaatgcttggacagacagagccgccctaacatcttcatccaggaattgcacggagggcggcagccaccatgatgccactcagcttgacaatagagaaaagaattggagatctgtactgcactgatcctncgtctggcaaccaactgtcgcaccanaacgaggtagaggcttccgtccccagcaatact

SEQ ID NO: 28410 - DNA, 456 bp, Oryza sativa
  unsure (1)..(456): unsure at all n locations
gatccttaagcactgcagctgcactgtgatgagagtgcgggctgactttgtattacttctaggttggcactgtcacgaaatgacccattcctgacatgaagcacnnattcttcccggactcggcattttcttttctcattttgattcctctgtcctggcactggatttaagctgaaactgtaatctaggcgacgattggtgttgccttgatgcttctctccgttggaactggcggattggttagccatcttcttcgtcagcataaaactgaattgacaatcttttggtacatgatcagttccttcacaaaagacaacaatgatcctgctcgttggacacctgtcaggtggatggtcttcctcacaatgaacgcatgtagtggcacacgagctgtcaacatgaccagattctcacaacgagagcatgcctaaacgtacatttcatcttcatcatctg

SEQ ID NO: 28411 - DNA, 493 bp, Oryza sativa
  unsure (1)..(493): unsure at all n locations
cactctatatagactcaagctacattatcgaacctagagatgaatcagctccatgctcgtagcaagcaagaatgggagttcatggataacctagctaattgcaccgagctacaagtactctctctngagaagaatcaaatggaatgacaggtaccaagttcactaggcaatttttcagttcaacttcagtatctttacctgtggctcaatagattgtcagggagttatccttctggcattgaaaccttccagacctgataattctggcactgaatgacaactggttacaggttctgaccacaatggcttggacgtctcaaacatagcgagcctacagtgtcctaaacaattgacagggatgtccctcctcctttccattatcacattgaggacttttctaagcaaatcattcatggacatactcaaccttgaacctcattcttacacatcacattccatacatcttatggacggccgagaatttcaaatcaca

SEQ ID NO: 28412 - DNA, 429 bp, Oryza sativa
  unsure (1)..(429): unsure at all n locations
agcttcgcttagtccccatcattaacgtacggtcttggcattcaaagaccggaaacgagagagaagaacacaaggggttagtaaccaaaagagtaatactacttcatatacaaccaaactgtcttcgcaccatacgatacaagccatttaaactggagctggcagaaagtatgggcgtaaatgagctaacttgcgacgtcaccttcgactaactggcatccggctgtggaaacacaaaaatggacgggaagagtcggttttggacacgactcactgcaaaaatcatctcgcggtgtgcaaccagaactaggaatantccactggagtcatgaacctgattcttctagctatgctanatattccatctcacggagttaccaacatctttcagattacgtatacgtccttcactcataatacagactactc

SEQ ID NO: 28413 - DNA, 445 bp, Oryza sativa
  unsure (1)..(445): unsure at all n locations
ctgataatatgtacgcatgtgcaaggcttacctgctntattactccatattggatatttattcctggaacaaacaaaaccattatcccatatatcttagtagaatattgtgtgccagactatatatatatatatatggctcaatgcattgtcaaaataaaaatatttcattgatgggtgctagcatcactgaaccgatggaacaaccacccaatgttatttgcatagggatgagaccatacatgtagaggtcttataattacaggatgtaagagtaagcacactctntctattctttcccgcgcttttgttgtatatgaaattgtggaacggcttctatgtcgctatcgatggagggtgtcaatctattttagtatagtttaaggatatcacacacaccacctttatatatacgttacgtttcaatatacataaacgtaaacgcg

SEQ ID NO: 28414 - DNA, 207 bp, Oryza sativa
  unsure (1)..(207): unsure at all n locations
ccccaaaaattaaattaatatctaagagggcacatgagccacatatcttaatcgtaactaatatagatattagaatcttttctcgccgcacatctctagtatcacacgttttcgtccgtcattatgcgctaattntcatccgatgcgctacttttcgaatctggttcgattctggttataataatgcaccacaagcgccaaacagat

SEQ ID NO: 28415 - DNA, 404 bp, Oryza sativa
  unsure (1)..(404): unsure at all n locations
gaacccacatatctagcaacaatactaccatcatgagccttcctaaacatataatgagaatcaaacatgcatgtcttataaaacctaccaccggngcaatcattcaccaaatgcccaacctcacgacacttggagcaatacttaccattgctcttgacaaaacgagtggcacggtgagaaggtttcttacccttctatagaatgaatccaagtccctccttgctaaagatgcatcgctgctcactcaaaatcttgtcaagagtngtcttacccttgaagcacctctccaaactcttgtngaagctggccacttgctccttaagctcattgttctcaacaacaagtgagacatcacaaatcgaaacacaagagctagagctaggcatatncacaagatcatcaca

SEQ ID NO: 28416 - DNA, 453 bp, Oryza sativa
  unsure (1)..(453): unsure at all n locations
agctagtctcanatatgttcagtgcctgatgatgttattgagaattaagtgtttccaccagaacatctataatgatacacttcgtgaatgagatcaacttacangtcccatgtaccaacaagaatctcggtaccagctgtagnaagagcttttgctattgtccagccatagccattatcatcagcaacttcagcaataaatgctctttacctgtaaaaaaatgcaacaagttagagacttcatgattaaatatcctttgggttgtgctaaaatatacatttccttcagtaatgacaagttagtagcactttttatgcgtgcgaagagtcagtgcatcactcaaatatagaagggcaataccaaaagagttaaccatgttcactcatgtttaatagtagtaaaaagtttacattataataataacagacttataacagatgattcaataatgca

SEQ ID NO: 28417 - DNA, 428 bp, Oryza sativa
  unsure (1)..(428): unsure at all n locations
tcaccttggtgatatctcttcatccctctcctctaactttgcttgcttgtgccgctattggtctagttgatgtatgtgcctttgattacatgtggtagacttctagatctagatacttctttttgtgtgcgctgctctgtgcattntcggaagttccgaaaatccctttggaagctccgaaaattcccagcctagttccgaaaattactgcttccgctttacttatagttttaaatgagcctattcacccnctcctctatgcctaattgaccttntcaattggtatcaaagccctaatctctaattaggcttaaccgcttggagagatcatgtcgggtcaaacggcggactggtaatgatggtgaaagggagctaggattccttttgactatcccttcacatctacatcttatgtgagtacctacaat

SEQ ID NO: 28418 - DNA, 336 bp, Oryza sativa
agatcgcacaaagactggttgaattgttgtgccctaatcgagcacgggatcatgggacacctcagcgaacttgtcttttcttcgggagcttgtggagtacgacgttgctgtgttgtctgtcagcttcaccacctccgttggtgggagcgagctcttgatgttgagtatgtccttgagataacgggtgtatgtgtgcatttggatagcggccaacaatggcatgttgatgtgaatcttttggatacttcaacaaaacgagcaaactgttcgtctactgacgggttcctaatccgttggggaaacagcagcaaccgcgtgtagcagactgctgcggac

SEQ ID NO: 28419 - DNA, 435 bp, Oryza sativa
  unsure (1)..(435): unsure at all n locations
agctatcatagcatagcatntgtgtcctttactgtttattatgaacactacctgactttggctgcaactgaaataacttctgtaaagtgctatcagttcaatctccaacagaaggtttctgtcggaggggagctaaataaccgaaattttggatttttttctcgtaccaaaatatatactctcaccgtcccaaaatataacatgctagagcttaaatgggatcctacgaatctagacaggctctgatacatctaatccggtcctaagttgctgaagatggattataatctctctagtggacatcctaagttgctatatattttacgatcagtagatgaaccaaatgtgaaataagaaacgagggcccaaagcgtgatttgctggcgatgaacttacctgtaacagaagtaccacgagaatgcacatacagtgctt

SEQ ID NO: 28420 - DNA, 396 bp, Oryza sativa
  unsure (1)..(396): unsure at all n locations
ngagctgctattcggtgatggcagtggcgagagatggaatagataccatctccatggtgagaaacggcacgcatcgatctcatccctgactaatacctctccatcaagacaacctcaatgcatcgcctncctgagcattgaggaaggtggagctttgccgtaccactcgcgcgaggggcttgaactcggcagtggttgtgctgtataggaggagggatcacaggaattaatggcgaatgaagggacatagaggactccaccacccgtagtcaagcatggcattgtggcgaatgggagttgcagtcatggctttcagtggagatcttggccttgggtgagctcgagccgatgacacctnctttgtcacatagctctcccttaaccaagctcgatgtc

SEQ ID NO: 28421 - DNA, 300 bp, Oryza sativa
  unsure (1)..(300): unsure at all n locations
gcttctccaccatctcgctgctagccaagntggtgcatttaccttcatcaatgatcatgcggcaacaacgctctttgacgacacacttttgttggaacaacgtgtgtnnctgattttggctccgcttctncatttgtgcgcctaagacacgctgcacaatgaggctctcatagtgatccgcaaatgcaacctcaatgtgctcttccggtggctcattatctgcatggtcagccgcaagcaaagcaagtgtatcatcatcgaaatcactagcagaggagtactcacccatcgtttttacta

SEQ ID NO: 28422 - DNA, 468 bp, Oryza sativa
  unsure (1)..(468): unsure at all n locations
agcttggcgaagcagntttgattcctgccggatgttcttttctatcaagaatttgaaggtgtgactgaattactgtgaatggagatactaatattttcccttctcctgcattcgcatgacgtatatgggggctgaaaaatgaaaaaaaatgaagctaattttgaactgaactctgcagtcctgcatcaaagttgcactggactttgtttcccccgagaatgttggtgagtgtgttatgctgaccaaagaatttagacgacttccatcttcccacagggctaaagaagataagctagaggttagcttggtgtcaagtgaaatttctggtgttagatgtggtgactgacttgaattttgattgtgccgtttacagatcaagaagatggctctccatgctctgaatgaaggtctaaactttctggatccttcttcctcagaagggtgacattcattccactgtaaacataa

SEQ ID NO: 28423 - DNA, 279 bp, Oryza sativa
tcagctattcacagatgagaacaagaatagagttgcttctaatacagaacaaactgactaaggatgagcgtaaggatatacttgacgtatgcgcattggagtttgatattgtaaaggttcgccgcttatggtgtctataaaggtagatggagtgtgcaagtgtaagttttaatgtgtacgtgtgtgtgcccaagtgaaatcagttttttactgaaactgagtaaaaggtgttaaccacggggtgtcatgtatatgtgctgtcatgcggatatatgacac

SEQ ID NO: 28424 - DNA, 420 bp, Oryza sativa
  unsure (1)..(420): unsure at all n locations
ttaagncacctgaggcatgcaagctttcgattnttcgtatcagataccacgcagtttatatatctattatactaaccacacgaggtcctggtaaatatcagtaaatcaaacaacgttgttgcaaagcaacnnaagacacgtcgcctcggatcctgtaagagaacgggtacagttatcgcaaatttgctaagtgcctggcatgagatgtatgggggatcggaccaacctttctgagggcgcagtggaaaaccacggtgttcttgtcgtcggtggcactcgcgagcttcagcagccgcgccgcgaaactgttgctggagaagtggtgcgaccccccgatgtgcgcctggtaggctctatactcgtccctgcaattccccaccacacatagaatacaacgaactatctcattaacgtcagtca

SEQ ID NO: 28425 - DNA, 379 bp, Oryza sativa
  unsure (1)..(379): unsure at all n locations
tgtgggctggctgcacatgtgcatctgatccggctgtgggaccttctccactcaccatatgaatggtgtgatctggatcaacacctacgaattataaggagtgcgagaagcgagataagaatcttgctcgagtaagcagaagtttgaacgaggggtcaggctgtttacataggcaacgaatatttcaatgtctgatgtagtcatgatcaagagaattacagatgaaaacttctatggaattcacatgtgagagactaatgatgatagtgcatcggatgactatgccatagatgctcgtntatggcatgttaacatacttagcgtgcacaatagttggtagtacatgagagatacttgctctctctcataaaggaacaat

SEQ ID NO: 28426 - DNA, 328 bp, Oryza sativa
gagctagaagtgaatttggatagctagatgttatctcacttctcaatcttcaggtctcaatgcacatatattaaatataatatgtaaaacgcagaatatgtgccaaacaaacgtgagcacactgagcagtgtgtttcataaaccaagcaaatagattcagtgaaaccgcactattggtttatcaatatttcaaaatatgagcagctccatcattatagaagacagctatactaaatgttccataatgattaatttcatcatgtgaaatacagtaagtaaataagtagcaacagataaatacctcatgcagttcaacaagttgatccct

SEQ ID NO: 28427 - DNA, 492 bp, Oryza sativa
  unsure (1)..(492): unsure at all n locations
ctaagctacatgatggatggagtaaaactaccaagttgccaggtcttccatcttgctaactntntacgttgccaaaataactagtagtcctaatattaattatagaattatntttcaataccaaagacaccctttatctttctagtagaaaactccttatggcgcagagttgttttccacttattaaaattagtcattaaaataaagtaatttggagaacagcaactaagtaatagccttaatgtctaaatatagnttatcttagttttaaccatggatcnaaattgggtgctccactttcttttgggtaccagtttggaatgttntaacaactacatttccactttatattgngaacgattggcctaaattcaacattctgtaaagagcatgcaaaaatgttgaaagtaggtcattctacagtttatgtagtagattgtacggcgttgaaccaacagtcaactgatatattgtgcctgcgaacattaaacg

SEQ ID NO: 28428 - DNA, 308 bp, Oryza sativa
  unsure (1)..(308): unsure at all n locations
gacatggtgcgtgcagcagcatggtttttttatatcccagaaagtatgtctttcagcaattgtcttcctttctctaaagatacgcaacgttgcaaaattnnccacacggctcttcttgtataactcaaaattatgcataacataaagtttgcttcgccttgaaatccgctcggcttcattcttatcttgagggagctcttgagaaagtaaaaatcgtatgaaaggctctcgccagtcggtgtcaaccatagctacgtcatgagtgtccgcatcttgagtagtatctttatgaggtacggtcggtgtat

SEQ ID NO: 28429 - DNA, 389 bp, Oryza sativa
  unsure (1)..(389): unsure at all n locations
gcagcagggcactatatttatttttttttgtgtgtgcaaacacaggtgcttcttaacttttgctcggaacaatgtgnggcctagctcgcactgcgggcaatggcttctgcaccgtccctactgctcctgctgncggttggatcctcatcggcttcagttttgccgcggccttaaccgtcgtggcgatcgctgtgttccgctgtgccgacgggcctaaagacagcccaagaatgaagaaagataagcgccgccgccgcaaggaagacggtgatggtggcggctgcgaccgaagcgatggtggtggcgacaggcccgacagcggcggcgatggcggtgatggcggcggctgcgaccagcctaggtaagacgaagtaacacgtgtgctatca

SEQ ID NO: 28430 - DNA, 418 bp, Oryza sativa
  unsure (1)..(418): unsure at all n locations
ctatcaaagctataatctagtttagcaacatggggcataagtcaataagccattctctatcagtgtcagttgaattcgtccccatagcgacgatcaagtcttctttcttttaaaaaataaaataaaactgattcgacgtgcaagtcttgtaagctcattcgcgcaaacatcatatgtcattgtaacaatcatcagttaagctgaaccggtcccatgaacctgacgcaagcttctcaaattatataacggcgatttgaacaacttagccaatttcactctttcgttttctatgcacacgctgtttaaactatnacagagttattttttgttggcaaaagtttcttagaaaagttgttttaaatatcatactatctatttttaagtttcttgactaatctacctatataactcttaggat

SEQ ID NO: 28431 - DNA, 476 bp, Oryza sativa
  unsure (1)..(476): unsure at all n locations
agcttcaacatagtaaataaaatatggcactttttgtacaggttatagctctaatctttaattagataccctaagagttaatcacctagtattggttaagccaaatctatgtgtagaagtatttaagatgaactctagctatgaataaaccaaaaataaaacttgttagaccagagaggtcatagttccaaccttaattcccaaagacttagcaaacttaactcataacaatttctaggttggtaggttaagtaactaacatagaccatccctatntataaaatatgtagtaaaataatataaactctaaaattatgaactaagattagattagctaactaaaatactcattntatacatcactagcaagttagagcaagttctggacctaaatctccaaaaccatgtacacatagagactatatgcctagaacancgtataacttggtaaatacataaagaattcatggtaactc

SEQ ID NO: 28432 - DNA, 390 bp, Oryza sativa
  unsure (1)..(390): unsure at all n locations
gtggaccgagtgccaagaagacatgctcgangagaagatggagtattggaccatgccatttgatgggtcgaagaggctttcangcactggagctggnngttgtttgatctccctgactggagaaagattgagctacgtattgtggatacatntttctgcgtcccataatgtggcagagtatgaggcgctgcttcatggattaaggatcgcgatctctttgggcattcggcgtctgatcgtccgtggaaaatctcagtggttgttaatcaagtcatgaaagagtggtcctgccttgatgataatatgactgcttatcggcagaaggtacgcaaattggaagacaaattcgatggacttgagctcactcatgttcttcagcacaacaacgag

SEQ ID NO: 28433 - DNA, 436 bp, Oryza sativa
  unsure (1)..(436): unsure at all n locations
tgaacttgagagcaaacatggagatgtgttgtataatgtgttgaatggagtgaagatccttcttccggccggttggcttaagtagtgcacccacnannggcaaaacacgacctgtggggcccactaaccattgtctcgaaaagtgaggcaaccgaccgttgcctggccggttcggtcgaacccctggtgggcccaaccggccccactttcngccgttggattccaacggtcagtgtggtcatggcacaataaaattntgttgagaaatttattttgggttgctctgaaaaactcatttgaagaatttcctcaaaattcaaaaaacctaaatgcaaatttgaaattcaaatatgtgatgatgcacaatatcgaattgtngacagcaaatatgccgataccataccaattacctgttggcgaaagtcgcgtcatttaa

SEQ ID NO: 28434 - DNA, 302 bp, Oryza sativa
ctagtcttcatctttgtacctcctagacactgctcttcccctcacggacttcctcttgtgtgacatcaagttgaactgaggttccccatggtctgcgccaactgttgtcgatggacatatgcgtctatcgaaggacagacttcatccataggttggaaatgaaagtggaaaatgtcctgatttttaataattggatcttcttacatgcacttggggttatatatataacagcgagtttacgtgggtgcccttatgacaaggtcacttacaggggtaataacaatattatagctcagatacac

SEQ ID NO: 28435 - DNA, 460 bp, Oryza sativa
  unsure (1)..(460): unsure at all n locations
agctnntaaagatagtacactatgttacacaatagattatactatatttctagacaagacccccttttaggttataggtggacgtaattggttgcgtttgcaaaatcgactgcattttcacatcggtttcttaagaggtccatatgcaaaaatcaatttatcagacggacaataacatatctgcataaaanaatgagcctattttcgcagacaagtttattaaagatttgcctaagagtctgacttaactcatcttttccctctcaacactttaaaatttttaaactcatcatccatatcttctttccatctctctctcagcttctttccttctcattatctctcgcctcctctcctctcactcactggtcggcggcgaatggtggccggaaggctaccttgagcacttggcggcagacggtggcnggatcgcgtggccccgcacaaccggtagtagtgg

SEQ ID NO: 28436 - DNA, 357 bp, Oryza sativa
  unsure (1)..(357): unsure at all n locations
ctgggatgtgagcacaatggatcgcganttgcgagtcgctttctatctttgtctgggccgcacagcgggaggggaggccggatttatacaggctgtgggcggcgatgataggtgggatcctgataattctcgtcagttcaagaatgcactggaaaacacctgatttggagcctggccgcctgagccgaatcatcgagtgccttccagaacttttggccctgtggatccaatcggcatgggactctggttacagatntactatagccgatttccttctgcctgttaatatagaaattgccatgtatctatcgtgaactatagttagatttgttcctacttctatatttaaaaaaatat

SEQ ID NO: 28437 - DNA, 459 bp, Oryza sativa
gcaagctaggaactgcgactaaattggagagatgtttttattctaagtaaccgagaaaaagaaagcagtatgatgcgagagaaaaccgatctaatgatgaaaagggggacctagcacgatggggacttacctcagcgtatttggccgatggtgcggcagatgggctcgcggaagttgacatcgtcgcaagcggagatctggctggggatggagtcgcctgagaattgccttgcgcattggaagaatcgtcggagagagagagggtaaagtttcgcttaagcggtgaaaacggaagtcacggtgtgagatttctcggggataacggttagtatttaaagcactagagtaaccggtgggaaaacggtagagtgcgaaacttgcttggagtcgatacacggcaaattctgaacattatcaaatatcccggacttggggagcatgtgttaacgaccaaatttg

SEQ ID NO: 28438 - DNA, 410 bp, Oryza sativa
  unsure (1)..(410): unsure at all n locations
tactcagctacatgtcccaaatatgagatcttggggataaacttatctgttattagtatgttggctggcttgacatcaccatgtcgtatggtacgacttngtgatgagtgcatgtaccttagaccttcagctgattcaattgcgatgtttaggcgtaagcccaacgggagagggatgttggcatcaccatggagaatgtcttgaagatttcccttagcggcaaactcatacaccaacattggaacatccacttncaagcaacaaccccanaagcttgataatgggtatatgcatcatttgcgattggatgatcacttcatttgtgaaatcatcctttcgaagcttcattacctcaattgacgtcttcacagcaaccgtagtattgtcttcaagagtccctttgacacctt

SEQ ID NO: 28439 - DNA, 450 bp, Oryza sativa
  unsure (1)..(450): unsure at all n locations
ctgcagcttaacccttatatcatctagcatttcaagagttatctctcttccttcttcatctttgtggtcaaatatcattcttggagaaagtgcccctacttnnttggagtcattgcttcatcgccataaaccaatctgaaaggggtcatgccagtcgaccttactaccgtagttcttagtgcccacagcactgatagcaagtcctcaagccattttccttttgctgatccttctaacctcttcttgatagcttccatgattttaccatttgccctttccacagctccatttgtctgaagatggcctacagaggcaaagttgatttgcaaattaaggcctttacacatgtctttgaaatttccagattcgaattgctttccattgtcacatactatttcctttgggactccanatcgacatattatgttcttccaaacaaacttttgtact

SEQ ID NO: 28440 - DNA, 392 bp, Oryza sativa
  unsure (1)..(392): unsure at all n locations
cagctgactcatttactggtttgtcattaaatgatctgtgagtaatacaggaaactagtttagtgctttaatatgccgaggcggcctcaaagatcagtacaagcaccagatccaaattacgcaattatctgagaacccactaatactgctgtgaatttctgtgctaacctaaggtanatgaaatttatctacagtattcctagcaatgttcaacctatgcgtttatggtattggaagttggtagttggaanagtactctgtgcaaaaataatgtacgagcgaagcagtgaggacaggggcatgagatattacccaatatatacacgtgcaacctcaggggtattcaatactttcccaagagaccacatcaatgcaccatagactcttataag

SEQ ID NO: 28441 - DNA, 429 bp, Oryza sativa
  unsure (1)..(429): unsure at all n locations
agcttgccnggcaaagcgcatcaagaagcatgcttggactgcacccgatggtattggcgcagcggaattggtttcctctgtcgctgcgctgcctttcctttcacctccacctacatatgatgctgaggagatgttgaggtaaaaaccgacctaagcattttgttttcaattaatgttgttgtggataatagataattgttcagttataatattataaagctgtagttatatatatgtgctttggatttgctggcatatagtcctgtgggatggggatgctgtgaaatgatgtttttattgattgatgataagattggtatgcttcaagaaaggttagttttgtgaatattatgtgtctgggccaggatttttaatccccccatataatccccgtatgcaattgaatntcaatagttagaaagttaacat

SEQ ID NO: 28442 - DNA, 407 bp, Oryza sativa
  unsure (1)..(407): unsure at all n locations
ctttagcgacctatgatactcagcttcgattcaggatgtcacaggatcacattcttctggtgttgaaaggcacctggctatacattccatggacaaatttctggttctagccatttatctctacatggcaggccaccagttttttcatcgggatcaacagattatgagatggatccatctaatatcaattctagttctgttccaaatgagagccagtatggaattcctcaagctgctggatttgaaaactccgttgcaccctcagacagaatggtttatcatgatgacgatgctcttcgaatggaaagaaagcgcanagtatggtttttcactgactttatgttaacttgctcattattccggatatgcactagttgctgatgtgtgatcattntcttaaaacagca

SEQ ID NO: 28443 - DNA, 324 bp, Oryza sativa
aaacacctgctgtgaagtgatgaagtctttgattattgactttacctaccaaggtttaaattctggtgctcgtgaatattacgcacatacagataggcgtttaatagaacatttaaaagagatcagggatgtattgccggtgtgcatttgcgaggtgtaagtgttacccgtgtaatgatgtgtgcatatgcctctgccacataattattaagaccggaccggtgatcaaaccggtaagacactcggttcactgagttattggttggaccggtccaaccaccggtttattgcagttcaaatagatatgtgttataatattatcac

SEQ ID NO: 28444 - DNA, 335 bp, Oryza sativa
  unsure (1)..(335): unsure at all n locations
tcttatatttattttctcccattctattctcatggccctgaaacgcccgcgtattgcgccatttgttgctccctcggtggtaagagcacaacctctctcccatctacatgaacgattctttgcttagtgtggnggctaaattttctagccttatcctagccttaagttgagccccgggtgccatcgacgcccgggaccccatgtgctggctcttccgtagcggctggctttggtcccaccggctggctacggtactcngnctggctcaactgtggacagggattgctggctctagagttttcgctctcacactcgtgcgaaagtaatcgtccatg

SEQ ID NO: 28445 - DNA, 185 bp, Oryza sativa
cggtgatgcacactgtggcggccgccgccgtccggaagggatccctgcctcgctacggtttgggtgggaatggggaaagggatcaagagggggttttgtgtggaaattggtaagaagaagcttattatagcgtgagcgaaacacagctcaatctttttttttggctcgatctggtctgcatttct

SEQ ID NO: 28446 - DNA, 463 bp, Oryza sativa
  unsure (1)..(463): unsure at all n locations
actactagacactaagctntaggataactgtcanaagttgcatctgcagatgctaatagcagtggtcatggtgacagcacaacaaagtctcatgggttatcacanatgatattntcaccttaagcacacaatccaactccacaatgaaaagtgctaccaaatacccaaagggttaacaaaacgtctatggatggtggtttatgggtacaggaactcatgaaattatgacaggatcgacacagaccagataataaaacctgactggcggngacgaagtttgtgatacaattccttaatggttgtgactctgtatgttttaagagaatccttgttcctacatacccaaaccgatcataactgagagttcagtagtaatcacatggaacaggtgaggtttacttcgggccgatgttcttcagcgcgcagatctgctcctctcccatggcagacataacagtcacca

SEQ ID NO: 28447 - DNA, 445 bp, Oryza sativa
  unsure (1)..(445): unsure at all n locations
agctntggaaactgcagaacactccggtagggtcagaggacaatcgtgcacgacggattggatggtaaggattccacaggaagcccaatgttacaagaagcgcgacacctataggccaagatgcgccagaaaatcatagatcaagtcacacaacaagtcacctaacagttctacagtcttgccgcacaacatcctcaagccttccttgacctggttcctcatggttcacagtcgatgctgatcccaagctctgtcgggtcagtaaaaaatacaacctacccggtagatagtataactggtccgacaccatgcagccttgtcgttctgatagggagagcgggaaaaacaaaggaggttacgtccggattggcgataccgggtagatagttccataacagcctaatttcggcggactacgcaagggttcaagtcgcacgtgttaatg

SEQ ID NO: 28448 - DNA, 454 bp, Oryza sativa
cgtgagttgtgtttcgacgccacgggcgaccagcaccagcacgccgtggccgccgctgctcccgacgacgccaagctcgccgcctccctcgagcggatcgagaaatgcggcgtcgagtcgctcctcctggacgtcgtcggcgagggcaagacgcgcgcggcgctggatcagctcgtggagaagtgggcactgccgcgtcgcctgcagaaattcaccatgaggagcgagcactactacttccccaaggcgccgcccaagatggcccctcacgaatccctctcccacctcgagatctccatagccgagctaaggaagagcgacgtcggcgtgctctgcaccatgccttccctcttctacctcaagttgagcacaagatcgtctccgctggaggcggatcagactgtggtcatcaccaacgtgggattccagtgcctccaggtgttctggttcaagt

SEQ ID NO: 28449 - DNA, 378 bp, Oryza sativa
  unsure (1)..(378): unsure at all n locations
agcttacgcatagatagatagatagatagatactgtgattttgtctatcacctgcttcgattgcttgcttcacatgctgacaattgattcgatccatctttcttggcnnaaccgcatgcagagattgcaggaacagcttatatctgatccgaatatatatctggttcagtatcaagaaatcgagctacatatgaaaacttcatttctaagctccagcagctagcgtgatatgatagtgtgattgatatttgatactctcttgagagagacgcatacgatcgaatcggatgcactgcacctgagctaagctagctcaagctcgctcgatcagctcatgtacttgttgagcccaagaaatggcgacgaggatgacgaaca

SEQ ID NO: 28450 - DNA, 511 bp, Oryza sativa
  unsure (1)..(511): unsure at all n locations
ctaagcttggtaggacataacgaccaatctagttagtacaaacattatctgtaatctaattaaagaaattagaccagacaggttggaagagttgtaactactatgcacgcaagctganagtattgatcatgtcatgctctagagttctatagctaaggtggtgtttggatccaaagactaaactttagtccctgtcaaatcggatgtttggacattaatntggagtattaaacatagactatttacaanactaattacataaatgagaactaattcgtgtgataaatcttttaagtctaattaatccataattagcacatgcttactgtagcatcacataggctataatcatggattaattagggtcaatagagtcgtctcgcgaattattccatgggtatggaatggttcntgcaatagtctacgtttaatactctctaatagtgtcanatatgcaatgtgacacggactaatccanacaaaccctaaatctcctctggccttgtatgtg

SEQ ID NO: 28451 - DNA, 148 bp, Oryza sativa
tacagaaggggaattttattttaattaattttttatttacagaaatattatattggcggaaagatttacaaaaataaacccttgccgcctttatttgggcggcaagctgatgtggtacacgacgttatcacgacgccgtgtgcatttt

SEQ ID NO: 28452 - DNA, 376 bp, Oryza sativa
  unsure (1)..(376): unsure at all n locations
atatattataagcctatttcgagtccgtatgaaaaagatatgactgttttaaggaaggtcactcgaatcacggttctatttcctttctagtggcggcaggatacaaggcaactaacaaaagctatcggcaacagatcatacacaaatagaaaatgatttggtgggtgactgcaatggtggtgacggcggtgatgacagcaaaattgatgaangtggcgatgtgcggtggtggcaagaactctaaactctatatccctaacactaagaccagcannatatcacaaccgatgcaatcgaanactcaacaagccttatctaagcagtactagtgaaaaggcacaatggtctatacgattcatggaaaactaatctacta

SEQ ID NO: 28453 - DNA, 220 bp, Oryza sativa
  unsure (1)..(220): unsure at all n locations
acccgttaagagtataaatggactatatctctttaatgggcatagcattctggcaatgacccaagcacactagatctaaatacctacgngcagcaactggaagtagtaaccatagtgcagcatcatcctagtggcctaacaactgtgtttatgacctctttcaaggtgctggagggcagaatctcaagttcaaggtttaacgggctgagcaacttctctg

SEQ ID NO: 28454 - DNA, 477 bp, Oryza sativa
  unsure (1)..(477): unsure at all n locations
gtgaactggtttttcactgttcctgatgtgttgatttgatccacttgggtagtgttgatctgtgtcctgaacagctaaccaacaactgcgaagatatcgatggggttacaacttgtgtgtgtgtgtgtcttaagggagtaccatcaaagactcgaaggactggaagtctggaactatgacctgcctcaaccgcaatgcatgtgtatcagcaggtggttaatcgtcacgtcttcctgtccaggttttgtgtggttaaaggatgttatccgctgtccaacaacgggttcagttagcaagtgccaaccagacaaccatttgtgctcaaatatccgaacaagcctggaagaaatatccnctatagtttttaagatttgacctattagttnttaacatacgnttgcgcattcatgtattttaaatanatntatgtaagatgaaagcattagacatgtaaagtattttaataatcaataatca

SEQ ID NO: 28455 - DNA, 399 bp, Oryza sativa
  unsure (1)..(399): unsure at all n locations
gcttacattgttatgaacagtacactgtgttcgtattatagtgtttctttataggaaaattttgcaaggttccttaaactgttaacccttttccttctcgannaanaaccattcattttgtatcaattgatgagactcgttctctctctgaacaaagcccgtttgataatatattgcacaaggttagtcctcatgcctctctttgcatgcatgaaatcaaaaacagtatgccatatattagttaggttttggtaaacaaccatattgtgccttttgtcactgccttaatcttatcagatatgttaaaaactttttcctgatatgccatgctgcctaagatantaatttttttctgagtgatttcccttttttatcagcttactgacaaagagtggcagc

SEQ ID NO: 28456 - DNA, 407 bp, Oryza sativa
  unsure (1)..(407): unsure at all n locations
tgtataataactactagtggtataagatcaatatgcaatctacagttatattagtnataatttagtgtgcaactaatgaagatggtggacaagctgtcacctggaattccaatagcagtgagctatggcggcaagaggaaccttgttcccatggaaatgtgcatgcacaaagcgaagcatatggtgaagatggccatggacttggaggtgatgtgcttgatggcgaggaacccctcattgcgggcggtggcaatgctcttcctggctccatcggagacccgctgcgccaggaaatcgagcaatgagcggacggtcttggcggtgactctgccagtgatatccagcacaaactctgcggtgctgggcacgtgaagagtgctcgacaccgtgtacatgacgcatccatg

SEQ ID NO: 28457 - DNA, 371 bp, Oryza sativa
  unsure (1)..(371): unsure at all n locations
acacatagatactcaagctcattagtggtcagggctcgcgtcaagcttgagccttgacttggagtcgcttgganantngctattcctaggtggtgattagtgggcgttagccgctgacatgtgggtcccatgaagtccacattgactcagctntgacatgttagctaaaaccgggcataatactgccttagaacctcggacgatcctgttttgtatattgagggacccgntatatatgaatttgctacacgtctatcngtgtgatttttcttaggcatttcacgtttttttagtcgcaccatatgtgggccaagatttatgcaagatatggtggggctgcatgcatggataaggccgcgtgttggatgctt

SEQ ID NO: 28458 - DNA, 456 bp, Oryza sativa
  unsure (1)..(456): unsure at all n locations
agcttctttnnttttgcaagtatctgcttctgaattgctgatcgaatcaatgcctgaacaacatattgatttttttttcttcaggtgacagcggctctgcnaatcaacggctcgagtcgtcgaacctgatacttggcatagacttcaccaagagcaacgaatggacaggtagatttttttatgagaaataaatatattttttcgataataatgtcctaactgtatcttcaccaagaactccttggtccttgctcgatctgatctgattatttcaactgctcatgttcttgcctgcattgctctgaaagttctgaattatctgtgtgtattcaaggaagcgttcgttcagtgggcagagcctgcacaagatatgcagcacaccaaatccatatgagcaagccatcagcatcatcggcaagacattggcaccttttcgacgatgatatctcatcccat

SEQ ID NO: 28459 - DNA, 306 bp, Oryza sativa
  unsure (1)..(306): unsure at all n locations
tctgaagatcccacccggnnntaggcttgccgacgccgtagctggcgccggacgccgtctagaacgccgccgtcgccaccacaacgacagcgagcaatgccattctttccaagctcacnannggaggcgtattaaatggatgtcgaatatattcgaactactcaattaatggcactgatcgatcaatgatcaatctaatcgagagctgatgggaattgttaagacgtgtgatgactcatatgtgtctcggtgcatatatagcgttgatttgatgcagattatggtcgctgaacgttgctggattct

SEQ ID NO: 28460 - DNA, 439 bp, Oryza sativa
  unsure (1)..(439): unsure at all n locations
agatgcagatttgtggcttacacaagctccactatatattatttctatagncgagatgtatttgcctgagcgagtgatgcggcaatttgggcttcgccaatccattccaccaccttttcgacctaccctacaggcgctgcatcgtattagtcgacgtggcagagaacgtgagaactgggaagagacacatcatgagtacattcangaatgggaagcccgccggcagcgcatatttccagagtcagagcagtatgacccatcgtcttatgaggagtacctgcattggtactcanngagtacacggcggtatcttgtaccatcaatcagtgatgatgtggaagcaggaccttcattacagcctgatgattccattgatctgcagtatcaagcccaggctcctatgatccgcatagcagtaagcctatatttatctattcag

SEQ ID NO: 28461 - DNA, 360 bp, Oryza sativa
  unsure (1)..(360): unsure at all n locations
gagcttctcgggttcttggtctctgcccaggcattgatgttctttccgagaagataccagctatagagcggatgcgcccccccatcaaacttaaggatgtgcantgcctccctgcgctgcactggccgccctaaagtcgtttatatagaggctgggagagaatgcgctacccttatttaagctcctcaagcgctcggggccgtttacttggacggaggaagctgaaaatgccctcgcccagttgaaggcgtatctcagctctcctccgagtctagtcgccccggagccaaatgagtccctgctactttacttatcagcgaccccccaagtagttagtgcaacgttggttatggagcgcga

SEQ ID NO: 28462 - DNA, 358 bp, Oryza sativa
  unsure (1)..(358): unsure at all n locations
cataactctggctatcaataactntaaaatatttagtttaaaggaactataacaacatatatagatttctctttcaaagcactataatagaagtaaacatacatttatttattgaatatattataataaaaaaataaggtcaaaagatatattttgtagaccgtgtcattgtccataacgtcatgaaaccggagggaagtagaagttgtatattntatgatggagggagtagctaactatagaagtaaaagatgattttaccctcattacttctcatgctatctctggtgggtcccatcactcactaactcttggaacatgtacctcatccatactacctaggggtggcaatttcccg

SEQ ID NO: 28463 - DNA, 387 bp, Oryza sativa
  unsure (1)..(387): unsure at all n locations
agctttanatcgaaatcgnaaaatttgccgagatatattatcttgttattcatgaacgctgtattggagatacttttcatgccacgatatatgttagaagtgttgagatnttgctatgtaagaacaaaatcatttntaaaattttaatttccgttggagataatttttatgtcaaaactgtgtaatttgtttatatctactatacatctgattaatgttttcgttgaacttatatataggctccaatatgcatttgaatttttgaactattacagcttttagaaaacatgtgtttccttagatgccaaagaagctctgcgtagatagaagtaagatgcttcgttagccatgcgtggagagagatattcagattcaatgccgaacata

SEQ ID NO: 28464 - DNA, 60 bp, Oryza sativa
cacactatagatactcagcttctgagtgcaacgagacgcgtagactgacgcgcaggcagc

SEQ ID NO: 28465 - DNA, 270 bp, Oryza sativa
  unsure (1)..(270): unsure at all n locations
agctagngcgcggagggtgaggacgaaggggtagataacctcttgatccacccgccggaaaagcctccaccgaatccgcctgccagaaacaacaccgncgccgncttcnnccattcgccagcgggagccgccgatgccacagccaccgtcggatccagcccacgggagcagttaacgccatcgctgccgcctcctctgctaccgacaagggagagactgagaaggtgggggcggggatgagagggagtgatctagagggagagagaggga

SEQ ID NO: 28466 - DNA, 466 bp, Oryza sativa
  unsure (1)..(466): unsure at all n locations
tacanaaagactagaatacatacaagctatgctagagacanataaatcttcatagtattgctagcatgcacaagaaaataccatatgaatcaaacaaagctctcttttttcaattttcttattgtcaaaattttgcttgataaaaccatgaggtacaaaatctcaccctcaaatcatgccaaaaggatgaattattcccaattctccacgaagaanagcaaagtgatcagaatccaatggtttgatgaaaggcaaaattngctacaggacactcaaaaatgtgtaattagctatgggacacctcanagatgtgaatttacccgaggaccagttanaagtgtggtatattgcgaatttttttgagaattaatattattnntatggaaaatcgcgaaactagtggctacctgtggaaaatcgcanaaatggggtcctatcgaacaagtgcagttcgataggcgactta

SEQ ID NO: 28467 - DNA, 416 bp, Oryza sativa
  unsure (1)..(416): unsure at all n locations
agcttgtccgccagtgcaaaaaggagctcctntgtattctggtaaatcaaggaaaatagaagtgatacaacagaaatgcggctataacttatttcattgtatacaatactacctctatccaatggtgtggacgtgtggtaacaaaatcaatactgacacattattagtttgtggggtataagatgctcagtacttatgttggatcctatcaagaaattggtaactctaattagaaaaatatataaaagttaaatgttcagggaaaaaaataaaggactcatgttaaataaaatgtagtgaatggaccgccattagaggtaggtccatgctgcttgagtgccaaaaaattaacttatgatggtgagtggtgagatgaaaggactacatccatactgccaaaacaataatccctacgt

SEQ ID NO: 28468 - DNA, 489 bp, Oryza sativa
  unsure (1)..(489): unsure at all n locations
tgaatgtcttcgatgatntatattgcactatcacttacttnttattcatcgactcgtttctcttgtaaattctacagtgtgcctgccgctcgtgtgattctcaaataattacggttggaaatattttcaaacagcaagtttcgaatttgctcgatatctttgtttcagatctgctcanatttcattgttntcaattaacatgtgtactactccctccgtcacttaatataaggtattttgatatttttgcttgcacttcgttgacattcgtctaattcaaaaagttntggaattntatttgtgacttactntattatctaaagcacaactntntgttcttatatttgcacaattnntttaaataagacgtgtgcatanacaggacaacaaaatatcaaaatcccttgtataagggatgganggagtaatattttgcagttgtcccaaactcatatatttcttgcccttaaatttaaagctactttctgt

SEQ ID NO: 28469 - DNA, 441 bp, Oryza sativa
  unsure (1)..(441): unsure at all n locations
agcttcgggtatccagatggatggcgtcacattctttgttgttatcatgggacgcactcataatggtcttgttgtagaaggccaccaatactttgactcnatggtacgcgaccacaagatcaatcccaccatggagcattatgcatgtatggtggatctatatagccgtgcaagcaagctggatgagacaatgagccttataagagacatgccattccctgcaggtgcaatggtatggcgcacattgctaggtgcttgcagagttcacaaaaatgttgagcttgagaagttttccgcagataagctgctatcgcttgagccacatgattcatctacatatgtgcttctctcgaacatttacgcggctgcaggaaagtggaaagagagggatgaagtgaggacgctcatggactatagaaaggtgaagaaagaagctggatg

SEQ ID NO: 28470 - DNA, 401 bp, Oryza sativa
  unsure (1)..(401): unsure at all n locations
agcttactaaatataacccatgtgcaccatctttacgtttgttaatgaaagaatgggttgcaccagaatcaaacaatattactgccggtgtcnagttgacngggnaacgtgcccaatatacacctctggtgctgactgcgcctcctttggagatgcatgattaacacgggcctgaacgaacttgggttcatcacgtcttggcttcgggcactttccaaccgtgtgtccgggtttgttacaattgaagcagagtttgggtttttctcccaacctcttgggctgttctggcagagctggctgaactgattgggctggaatcnttaatgaactcggagtatggttgaggccgtgctgctcactgttgttgtgactgtcaacatggtggttcttgtgaagctacc

SEQ ID NO: 28471 - DNA, 441 bp, Oryza sativa
  unsure (1)..(441): unsure at all n locations
ntgagaagagcaacagaacccggaggctgccgctgctgctgcgctataatagctagcaggtcccacccataagcgcagcagttgcgcatcaactgaggtggcagaaaattcatcatcggtccctaccgccatcgaccacataacgtggaaagtcttgtccacaatgcatgaaaggcttaacgaatccatatgttatataatattctaaaaaaatttgatgaatctatcgcaggaacaaacgagctgcaccctcacagttagggtgatgccgaccttcaaggttccggcagccgacggacttgcgtacaagctgaccccaaagacaacagtgcatggggcgcaacttaaggccaactgtgcataagttcaagtagactcggtgaagcccgaattcgagcttttcctactcaagtatncagcgaacgacaatggcctatcact

SEQ ID NO: 28472 - DNA, 469 bp, Oryza sativa
  unsure (1)..(469): unsure at all n locations
ctacatctgtagccactatagctngcaacacttataagctgaatataaaacatcatattcggcttgattattggtacaaaaatattctaaacgaaccgatgtctcanagcataaaccactgagcgaaaacaaaactacagctataccttgtccttccttaccagaagaaccattaaactaaaccttccaaggtcaaacactaagcaagtaaacctcattatcataagcaacatccacatgatgatctactnataaatcaactgcagtttggcctntgatatattntaattgttcataagccaaatcatgttctccccctcaaaaatggcctttgcaacatatgtntaataacatcggcttgacaagcaactatgcaagtagtagataacaagtaatgttgccacgtcgaaaaagcatagtatagacataaacgaagtctttctatanagtcattcctcgttttcgcatc

SEQ ID NO: 28473 - DNA, 443 bp, Oryza sativa
  unsure (1)..(443): unsure at all n locations
agcttgaccctccacgggtgccttggttgttctttatagctagcagaagttgagtntgggtggccataactcccgccagagtggttaagtccggtgtctgaactcgtcattcttgagtgttgcccgacgtcagcttgccatctgtgtaagttgatggagtaagtatcctaattttctaactagctcctatggctttatcccattaaaggagttgtgttgatatgaactttgttttgcaagcatggtggaataaactcatttataacacaacaacaatagatatcataaataacatcacagagtttcacaaatagtacataaatcatgatgcaatcgactgcatacatacgcagtccaaataaggttcgtccaaaagatacaacgaactaatcatcaaactactagtcaatctaggtaaaggagggggggtgtctcgcatacta

SEQ ID NO: 28474 - DNA, 466 bp, Oryza sativa
  unsure (1)..(466): unsure at all n locations
taaggatcactangatgcgtntgtggcatacaagactggagcgcattggcaagcacagatagaanagaacaaagcctatgcagctaagaagaaataccatcaccggcttgggtcaggcggatatggaaaggcaatccccaagtgggacatagtggaagctgacttgatagcaaggtgtatcgagccggccacggctaattggcctgagcgatcgangaactggttctatgcacacggtggatcgctcaatccaggtgatggcttcctcatattcggcgatgagattcgagatggagcacatcgacttgcggatgcaattgaagcctctacgcagcggactttccagcccgacagagagaatgacgagctcaccctctcactatataatcctgagcatccaggacgaacatgangaaaaggcgttcttccttggaaatatggattcaaagaggacatccacacgtat

SEQ ID NO: 28475 - DNA, 420 bp, Oryza sativa
  unsure (1)..(420): unsure at all n locations
agcttccttgatctggaggaggtttaatttgttttgttgtnancaaatatccgctagtagacttgtgttatgattaattgattttcttgcagcngtntcncctattctgtatcgctaagttttctatcgtacaaaccacaatttttatattctatccaaaattcaaatcaatgcatgatgcatcgtttgaaatgattggatgcaaccatacactgcatattttagttgaacctactatgataaacactatgcatgtgtgctctgcagctaaacaagattttatttagcaacgtgcaaaataaaaatgaaatgaaaaaattctgccaaatttctcanaagaatgcatactatcagcagatatgatgaatagaattcaaatgttctaatcagagaagcagacagatggaacataacagaaca

SEQ ID NO: 28476 - DNA, 388 bp, Oryza sativa
  unsure (1)..(388): unsure at all n locations
tctcccacaatgttntcgcaccccttactaactactctacaatgtctgtctgcatggagcgnagcaactatgctagaacgtggaaccccatgtatgaggacacaccgatgcaacaaaatatctaaatgctagtagtaccgtcaagtgagccgggggtgctagatgcatatcatatatttcggcaattgttggtggaccttgctcgtcgggatccttggttgcaagcagccggatgcgagtctgcgatgagtaccatgccatgtattgttcgtaagtgttgtggtcgaatgagctgttactctggacgacatcattcaaggcctggaccacgcctctatccatggggtcatccttgagtgcatagatcgacgatacctgttgtcagctt

SEQ ID NO: 28477 - DNA, 62 bp, Oryza sativa
gcttgaactaggccatgcgaacaggaggattcactgttttaaaggcaaaattgctacggaca

SEQ ID NO: 28478 - DNA, 384 bp, Oryza sativa
  unsure (1)..(384): unsure at all n locations
agcttattaactaaacccgacaacgtatcccttgttatattttttgattcngntcgatcggctaaccctgtgcaactcggactctggcgatcctggtcacagccgattnngacttcgagccgatcctactctgtttctggaacgatctccatctcgaactccggctcaattccttcttcatctccgatacttagattaccaaatttggtcgttaacacatgccccccatgttcggaatattggataatgtttcagatttgccacacgtcgactccgagagaattacgcacacacttgtttccgaccggtacgcagtgctttaaatattaagcgttacccttgagaagtttcacaccgtttccaccgttttcaccaccgaagcaa

SEQ ID NO: 28479 - DNA, 310 bp, Oryza sativa
  unsure (1)..(310): unsure at all n locations
aagtctaaagtcggtccctcaagtgtcccacactcctttgtgtantttntntatttataattatttttattaacagttttacaacaataattctccattctgaaaattgacggaagtagtcgcctaccgccctctgggagggcgattttaaaaatcgccctctcagagggcggcgaatatgacgtggcagactgccgttcgctctcgggcgacgggccgcaacgaaattagcagggcggccncttgtcgcccttcgctagggcgatctatactgtgcggggggccgnctgcaaatgggcggcgagggggg

SEQ ID NO: 28480 - DNA, 357 bp, Oryza sativa
  unsure (1)..(357): unsure at all n locations
ccctaagtcacctgcggcatgcaagctttannaaaaggattacgttatcgccacctttttatttgtttttgattcctcacgcttgatcgtctgttaccgaaatgatgcgcccagctttgtatgatactgtgtgnaaggactgtacgcatggttttatggagagaacaatctatgagatcgtttaggtgcaaatcagatgttgttggatagaatgtgcaaaagagacatatgctttggctaatattggacaggctttttcaactaatagcatntaacaaattaagtgtcacacacgctaagaagaatggaaaaggttcattaacaaaagtggtatgtggctactgcacagtacacaca

SEQ ID NO: 28481 - DNA, 472 bp, Oryza sativa
atattaatctaatgttagctcttcatataacttgaagtacataacaatatctgcttgtttagaatagttcatcccatatatgactaggcctaaatatcatccagcatgaaaattgaaataatgagccacatgaacagaacttgaatactgtatttcaagaaatgaagcaattactcatcatgaaaatacaactatcagaggttaatgtataaatgacataaaaggacagcttgccagcatttgcatgctaagttatccttatactacagatgccaatttgttgatccacaacacttctaatggaaaggaatactgaacgcaattctacatgataactacattggaagtctactctgattgccttacaagcattgtctatttaatagcatttggttctttatctagttgaaaaaaattagtaacaagtgtaaaagattggtatcaatgttaagatacaggttcatataaataa

SEQ ID NO: 28482 - DNA, 463 bp, Oryza sativa
  unsure (1)..(463): unsure at all n locations
agcttcttatacaatataaaacagagaaantagcttgttttatgttcaggtaacatggagattgttagacatgacgctcatggttgactgatggctagacagtccanngaccggctcaatatgtttcttcagaggatctaagntttttttttggggtaagctttctgttgcgtgccgactccgatcacaatacatggaatggaccttccgtttttatggattcagcgcaaattcttggctagtgaaagtgaaacagctagctccacagtaaggctcagtttatttcgattggatcatatgcgtcaaaaaatcctcaggaaggatacaacttaaagaaaatttgatggtgcttaaacaacacttgtatacgattctcatcttgatcgatcggtcggtcggcctgactagctacaatcaatacctgttgtaagcttatcagcgttcctcaaacaaacaaacatac

SEQ ID NO: 28483 - DNA, 449 bp, Oryza sativa
  unsure (1)..(449): unsure at all n locations
tccactgaagtagtcacggtggtccatgatgtccggcttgttgttatgccttgcagtagcacggcagcgttgcgattgtgcttggccctgcagctccttgatggaggaggcgccgcacgagatgagcttcatcagcatcgccgacgtccgcatacgccctgccggagtcgtcgccgcttgatgctggtgcgtgcagccatcctcctnctggtgcttctgcttcanggtaacaagctgggtggtggtgtcgtcagagctgcttgaagacggtggaggtgatatctcatcaatgccaattaaggactgctgcgccgccgccgggacagggacagggtcggtggtgcggagatagtcggcgaggtcaaaggatgtcatgcacctcctgtgctgcgtgggcgtattggagttatggtggagcagcggggagcccttgaggacatactcctcat

SEQ ID NO: 28484 - DNA, 439 bp, Oryza sativa
  unsure (1)..(439): unsure at all n locations
cgccagctagacaaatgtgtgaaagacatgttggtggaactctgttgtatccttgctattccgactccaaaagcaaacatcagaaaggtatataatgtcttgttccccctttccaacgtgttttttttgttagaacagagatggaattcaagaccttattgaatagtgatttgctagtcgctaatatagttcataactcatgtaagaagatattgtggcaaagctgttggatttcattgctgaacctcatgctatggctgattccgggcattcggatgatcaggcaagatcaagatgtgataacttggtttggtaatattcctgtctgggtgtttatattcaccgccacttacagttgctattagttcttgaatgattgngaatntaccatatntttctctgtgctctactttcttctgctttctaagggtcgaattct

SEQ ID NO: 28485 - DNA, 464 bp, Oryza sativa
  unsure (1)..(464): unsure at all n locations
tctcataagctnggatgcaatggtttctatatcatgcattagcctttgtgaattctcaacagccttctcggcgtccaatataactgaagcagctttcatgcaagtacaagtagtcttttggggggatggggattctgttcccttcagaattcctttgcttgtacgggagagggaactcctgccattgtgtctcctcgtcttgccacaatcttcaagaacgatctttctctctgaaagaataatggccgcatcaataatgggaaatagcattaactactcttataaacaatattagaaacactacaaacagcatagattgcttactgagcctttggaccccgcacaaatcaataccagtcaaagcactgcatagcttctcctgagaagtcggngacataatcttacaaaatataatataagggacaataagtatggcagatttattcataccattctttgttcaa

SEQ ID NO: 28486 - DNA, 305 bp, Oryza sativa
  unsure (1)..(305): unsure at all n locations
ataagtaattattaaccttgatatagagtagtggatttgaattcatttttattttaacaacaaaacaataccattacagatctcccctcttgtttacaatacctaaaggcaatgtgcaatcaccatcatgaagaaagacaaaaaactaaaatgactattntgtctagttttttcatgggtgttgaagaggtattgnggatgtctcacttggtgttattaatttgctctacctctgagtatcttaataataagagaaattctaagatntgccattaacaaacactagctctataaatatgtcatta

SEQ ID NO: 28487 - DNA, 423 bp, Oryza sativa
  unsure (1)..(423): unsure at all n locations
actcagctaacgntctcccctcacgagagcattatattagctgctgatttgatgcttgttctantaaaacatagcactaattctgaaactcanagcatacgaatcctacaaatgatgattggccatgtgtgcccatgtacattcatctcacatgtagacatgtacggctggagtgattattcattattaagaaaataaaaggagcccatgtacattcatctccatgtagggctggatctattatccattattaagataataataggagacaaacgaatgaagataccgaataacgtgtatacctttgtgaattacgtataagctttcaatgagactttacagatggcggcttacctatagcggacaacggagcggaagcgcggaacacggacgcgaattgcggtgatgatcaccgcggatcga

SEQ ID NO: 28488 - DNA, 441 bp, Oryza sativa
  unsure (1)..(441): unsure at all n locations
agctntaccncagtggacacagacctaatctcattctttcttccaaatacctttaagaagtattcatgaagacataaagatcaagtcttacaacaccacctntnnccaactattcagcacaatataaatttacaaatcctttaatagcatcttcataataatagcttataggtaaagttaagctccacgaatatatagaaataattggtgtaagataaaaatcaaggcgccttcatcgacaatttggtgtatgagcatgatgtcgacaaacaagagattgttcgccctgaaacctggaatgaaaatgagatgctgtacgatgtggtggacatggagctctccctcacgtacgacatcttgtacaccaaggcagtcaagggccacacatggagtggttatgccatctagttcaacctccatttcgtcacatctgcaatggtc

SEQ ID NO: 28489 - DNA, 407 bp, Oryza sativa
  unsure (1)..(407): unsure at all n locations
actcagctcgcaaccctatcgatggggagtgcactcatattctttcttctatacctagatgatatgcagatcccgcgctccgagttaaaaccaagcaatacgccttttcacggagttattccaggattaatccgaactccactcggccagatcacccttccggtcacttttggcactcgggaaaacttccgcacagagaatatcagctntgaagtcgccgatttcgagacagcataccatgccatactcggacgcccggcgttagccaagttcatggctgtcccgcactacacttacatgatgatgaagatgccgggtctccgaggagtcctaaccctacggagcgacatcaagcaagccgtcacatgcgacaaggagagttgcgacatggcccatacccgcgagat

SEQ ID NO: 28490 - DNA, 443 bp, Oryza sativa
agcttacccttggcaagatacaagattgctatttctatctcagaactcagacttataaatttggtaaactaaagaaagactgtttagcaattaatgacaaacttactttaaaccttcatggtgtccgggagacaataccgatgagtactttttgttccccccatcgcgagatacaaatatctaaaacagcagggtactatgtgtcagttcaagactctcaccttagttgtgagaaaaaaaataaacaagcatagtgactcgggagtactaagtcaaaagattcaagattttataaacaggtgctgtcataaatcttgtatggagcccctgatgggctcgatagggtggcccacatccatggaagtttatatacatcgataggaaaaataagtgtgtaatagctggcgaattgacaagaacttgcttactgattacaacactca

SEQ ID NO: 28491 - DNA, 422 bp, Oryza sativa
  unsure (1)..(422): unsure at all n locations
tactcagcttagtcggccgaaccgagcctgtgccgcctgccctccttctccatattcggtcgtctcagtgttccgtttccgaaattgattgatgggatttgttgccgntattcttaatcttgccttcccctcgagaaatcgaagaaatcccgtggtttatctccccgaatcggagcggttntgatctcctatcttgccggcgaaccctaactcttccgcggccaatccccgccgtgtccgagccgatctcctccctctttgcctaactcttcgttggctccgcaaggacgagggctacctcggccgccggttcccttgcgccgaagaccaccggaagctgctcgccgacgcgaacccgagcgccgctgccttccatcgacctccagccgtcactcaccgttgtttccaccatcgncgagctt

SEQ ID NO: 28492 - DNA, 457 bp, Oryza sativa
  unsure (1)..(457): unsure at all n locations
agctttgagaaattatagctcaggtttgttctctttctggcgttgtcctgtgacatagccccgcgcccatggagcagacagcgtgcacacgcgtgtnnncccaagcaaaagagaaagggctctggaccancantancaggctcaggctactgtgggcctatgtgggtatgaaggttggtggatgggaaaaaattctaacacctataccaaacaagggctcaccatatatgatgttatggcaaatgtacttggactgcaatgggccaacatgtacccaaagcaacggccaacatgttcccaaggcaactacaggaacaatgcagataacaccctatagaagaggttaaatagacagctagcaatggtttacaccatgtaagtatgttccactctcaccacatactctctctcatataagggcagaatttgagcatcaacatagttctcacacacatgt

SEQ ID NO: 28493 - DNA, 317 bp, Oryza sativa
  unsure (1)..(317): unsure at all n locations
ggaccatngtcggagccgaccggtcccactctagctaggtgaccttcttccgccccagcaaggctgggacgtcgctcctcctctggccgccgtcggtgtcaccgggacccgatctggctggcgggaggccagatccatcgtcgagggaagcagatccgcatccggcatggccggatccatcgtgccgaccattcggtctgcacctcctgcgacccgccgtcgccgagaagccccaagtgtctccgccgctggcattctcgtggagaagctgcgcccgctgccgtctcttgcaccgtccggtttgcacagctgtcggc

SEQ ID NO: 28494 - DNA, 470 bp, Oryza sativa
  unsure (1)..(470): unsure at all n locations
atgcaagcttaatatgcaaagatgccacagtatcttcttttatctagatgncatatcatcatccactaattaacaagatgccacatcatcacccactaacnnttntnaacctccaacatcgggcaaacatgctataactttataggttttataatttaagagctttttaaatacaagcatgttaaattatcatccaacataattcacacaatgtttcaatgcatatctttattatgtgttatgatatcttatatacttatatagctcatcttcacttaactaatgcttaaatgattaaactatggtacanattatctttctcctttgctcctctaattaaatcatatcacatcaattggttttagcctttagatgattaatcaacgggtcagactatcttcctacttttcttcttcatagagtataccaccttacgttttccgttcgaatcgtcattctacatactaatt

SEQ ID NO: 28495 - DNA, 206 bp, Oryza sativa
  unsure (1)..(206): unsure at all n locations
tcacanaacaccgaggacacacacgtgctacattattaacaattttatacaacaaccgctattatccacggagttagctgcacaaagatcattgaccatatcctggcctcaacaaacgaagcccatactctggcttgaaatattgtccaggcagatggtctgccggactgctctctctgctttacattttgacagcgtctcgtcta

SEQ ID NO: 28496 - DNA, 456 bp, Oryza sativa
  unsure (1)..(456): unsure at all n locations
agcttntccaggnttcatcttaaatttaatgttctctcttttgaaaagatctcgatgaagctctttgatattattagatgcttgaagaaaagtactnanagnaactccaacatctcatgggcagtttgaagatgagaaacacaatcataatccgaacgagaaatcccactcaaaagaatattgtgagctttgctattttgttcaaaatcagtttttaaagcagcaatattaattcgttcagggaccacataaggatgagaaacttttctccaaatatcataatcctcagccataatgtaagattgcatcctattacaccaatgagaaaaatccgttccattgaaaacataaagcttagttganaacttagcagccatggcananactctagatcggttaaaatccataggagaaaacanagctctgataccacttgtaggatcgaatcacaataac

SEQ ID NO: 28497 - DNA, 371 bp, Oryza sativa
  unsure (1)..(371): unsure at all n locations
ttagcaccttgatctcgcttaggggcattattcgaattacatatgctacccctatttatgagtacccaatgccgattgctgatcaattggttgatgctgcctcangacataagattataagatttatggatggcaacgcacgttacaatcagatttttatggcagaagaagatattcacaagactgctttcagatgtcctgtgcaatcggcttatatgagtgggtggtgatgaacttcggctcgaaaagtgctggagctacgtatcagagggccatgaattatatattccatgatctgatcggcttggtggttgaagttacattgatacatactcgttaatcaaaaaggtagataccacatagccgatttg

SEQ ID NO: 28498 - DNA, 248 bp, Oryza sativa
aagcactgagctgcagcttgacttttggtattcacgaagcattggttttttttgagctgagctggtttcttgcctaattcttgcctgcttgctgccatccattcaatgatgcccttccgggatgttgctctccacttggacgccaggatgcttccagggcaataaaatcttgttaagactctaatcacatggtattatcttcgaattatgccaaagctgcggcctttttattttcttttatacttaac

SEQ ID NO: 28499 - DNA, 397 bp, Oryza sativa
  unsure (1)..(397): unsure at all n locations
cttaatcacctgaagctgcagctttcggtctggtcttgccgagcatttattttattccgagaagatacgaactatagagcggatgcgcccccccagcaagcttatggatgtgcaatgcgtnccggctgcatggctgccctaagtcggtcatatcgggctgggagaaaggcgctaccctatttaactcctaaacgctccgggccgttatctggacagaaaggctgagcgggtcttcactcaattgaaggcgtacctcagttctcccccagtcctggtcgacccggagccagatgagccgctgctactttacctggcggcaaccccgcaggtggtcagcgcggcgttggtcttggagcgcgacgaggacaacccttactccgcgcatccccaccctgtg

SEQ ID NO: 28500 - DNA, 473 bp, Oryza sativa
  unsure (1)..(473): unsure at all n locations
gatgggagcagcagcaatgtgttcccgttccgtggagttaaatcttgcgtttgtctccttcttcagatcctccgntatactccctatgtctcgtcccagctgcccagatcttcgcgcggtcggtcggcgcgttcgttcggtggcggcggcggcggtggaagactatggttgatagaggcgatgcgaggcgagggttcgcttttgggctctctctgtgtgtttgtgtgtgtaagtagagagagagagctccctccggctccctagataaagcacagcacccgaccgctcaactccagtagtccactggagggagtggagtacttccctaattaatctctctccccgatttcttcttctctctctggagtctggactggatgagtccttgcttatccaattgttactcctgctaatctgattactactgtatagtaactgctatgctattctgcatccctctgcccgtttttttt

SEQ ID NO: 28501 - DNA, 398 bp, Oryza sativa
tgaagaacgcatggacctggcagagggacgtaaaagatgcgttaacactgcttctccatttccaaaagtgagaaaggaaacatacgtagccttacggcgttcggactgacacattttaccgtgtaagtgctggagatcttcataaattattgtagatgagcacttgcgttctcattcgtcttgccatagaatgggcttgcctgcgccatagttatcaagctgctcttcaagtcgaaatcggtgtcaccagtgttgacagtcggcccaaccggcatggtgtcaacagaaggagcaacgaactcgcgcagtgtcttctccggcatgttcctgaaacttggtggcgattggatggctgggttctgtgcggagagttctttctgggaccaacaacacgaggt

SEQ ID NO: 28502 - DNA, 406 bp, Oryza sativa
  unsure (1)..(406): unsure at all n locations
agctngcaatccaacanaacagctctattcttccaagatatcattactcagccactcagggaatacatagggaaggggtgaagattaacagaacaaaaacagctgttggcaaatatctacatataataggcttcttccgaaattctgtaacataaatgcactgaaaattgtaggttgcagatgttgccatgttggccattcctggcctctggcacaaaacgaaaatcacatcttttattttagatacaacatagaacagatactccaatacagggaacaaaaatttgagaatactgttgatagaagcggtacaactaatgtcccatcaaaagatttttacatccatgaatagcacagaacatatatgtcatccaaaataacagggacaaaacgcagcagaagaagc

SEQ ID NO: 28503 - DNA, 352 bp, Oryza sativa
  unsure (1)..(352): unsure at all n locations
tanggatgtgcagtgcttcaccggctgcatggccgccctaagtcggttcatatctatgctgngagagaaggcactacccctatttaagctcctcanacactccgggccgtttatctggacggaggaggctgagcgggccttcactcagttgaaggcgtacctcagttctctcccagtcctggtcgccccggagccagatgagccgctgctactttacctagcatcaaccccgcaagtggtcagcgccgcgttggttgtggagcgcgacgaggacaaccctcaccccgcgcatccccaccctgtgtcgactcgacccgggagagagcaaggaggagaggcccccgagccgaac

SEQ ID NO: 28504 - DNA, 453 bp, Oryza sativa
  unsure (1)..(453): unsure at all n locations
gcttacatgtaccatgccacatataaccactatttatatttcatatttaatctcatgcaagtatacaacatgatatacaatttatttaatactaccaatcananngcaagcatatacaatcatcaccttttatattatttgtacaatattttaacaaatctatctgtcacttttacaatatttaacatatacttatcaatactaaagcacgggtatcaattgactgataaacctgatgtttctttttttttcttttgacttctaacttgattgtcaaaaaaaaatattgagaattgcttagtaatttccgcagcaaaacacgggaaatcacctatttacttttacatatcctatccaccgctaacttgtctcgttgggtagcagctttacatcgctttttgataaatattgatgacatatgtcattngatgactcctactgatcccagaatgg

SEQ ID NO: 28505 - DNA, 435 bp, Oryza sativa
tatgagaaactctgatctatgaaccaatcttgttgtatttctttgtgatctggcattaagacgagagcagtgtacattactcaaatttcatgtattatgacagcatcatagtcgtcctagtaactctcagtaatttaatcaccatgtggatgaacagctatgcagcgatatgccagtatatactcacatttcgtaaaacaacagatattagatataacatttcaaacgctgtatattctgtattatggaaccagcgcaggatcatccattgagacaggcgttgaacaaacagtcacatatcttatgatgcgacagtatatctgtagaagcatgcttcattgccttcaagaactggaattcaagatacattgtacattacaggtatttttgtttggaattccagcctaataggcacctataaaagactgaatctcc

SEQ ID NO: 28506 - DNA, 490 bp, Oryza sativa
  unsure (1)..(490): unsure at all n locations
ttacaattgtaaattctgcactgctagacacaaanattattattattcttgcacacatttagtgttcaagtttnttnttaccatgagcctcaaataatcttaagttagcttgagatgtactgaggtgttagagaattcatatacaaatcgattgaattcacatactactttaattcgttatgttttctttgaaactggtttgtcaagtcaatacataagcctaacttgtgcaaattgtgatcaattaattaatttcaagctaattaacaagtcanactaatctactattatttgtctatgtaactataacatcatagcttatctaaatttacataaatgacaaacataacaatcaaggaattgcacccatgacttcttcactcttcctagtggaagtgaaacacctggcgattcagcagtgtactattaattnttcatagaaatcctgtacctcaaactatcttatcatcatctgtgatgtctatccctg

SEQ ID NO: 28507 - DNA, 433 bp, Oryza sativa
  unsure (1)..(433): unsure at all n locations
agctttccaaaatagagtatatgcgaaccattattatatttttgtcataataaaantttgctccgctttctcaataattntgctccgctcctcttgtcttnctgcnccctagtgcacttattgtgacgttggatctgtacgtcgtcgcccctccaaccctagagacctcaatttggcatgctttctgaagttcaggtcgcaccgtcagacatcggtgagttcttacgttgagatccaatggctagggaacttgcatttggggaaatcatagtaactttatatatgagcatcagagcttgcatacatattatgtaagtgaccttattggttgggggtaatattgcatatacttcatgtagaanatctttgagaatttcatgacatcaatatgcaaatatatatggcaaaagtcaaaaaaaaaggccctaaactt

SEQ ID NO: 28508 - DNA, 319 bp, Oryza sativa
  unsure (1)..(319): unsure at all n locations
aatggcatttgcattctttttagtattatgtatttccctctccttntttttcttttgcanaagaaccagttgtgtgcccatttgatctcagaaatcagaacctgtcagtactcagtaggttgtagcaaggtgggtgttgatgttggcaacattgtcgcatgtgaaccacaacaacctaatgaagctggagggcttctgcatcaactcggaaaccggcgactgctacctggtgtacgagtacgtggagaacggctcgctggacctgtggctcatggaccgcgaccgcgcgcggcggctggactggcgcgcgcgcctccac

SEQ ID NO: 28509 - DNA, 456 bp, Oryza sativa
  unsure (1)..(456): unsure at all n locations
tgcggcatgcagctgggcttgcatgctactggcgttattttttttcatcactggacataacggcattgaacaagtttttgcagcagagatggaagtatagcagcggcnannaacgctgcacccatcacatgccttttgtgagctgggatgaaagaaacgcaccacagtactatacatatacgttcttgcatttaagcttacacataatattacatgggtttgacttttcggctttacttggtctttgtttggtatggaaatgtcacacaaagaacactaattttcgtgttttaaagaaaatatacaaagtagttgtcatgaatcttatataccatcgtcaatgtggttgcggattgcttatatcgtcatcagagtgctgtgaaagcagttggttttctgaacgatgtattatcacatgaanatatntcatgtttctgatgcttgctcgtataattt

SEQ ID NO: 28510 - DNA, 408 bp, Oryza sativa
  unsure (1)..(408): unsure at all n locations
tactaagcttatatacgtgttgttaccaactattctattggatttgtaaagcttcttttgaaatagacgatttctacagctacatatgaacattctcctatactcttgcagattgacttcaaccgtctctagaaacaaattgccgcaatcgaaccattctaggtcaatctggtttcctcanagtcagaacacacaggcaccttagttaaacagcgtgttagcctatgggctactccataccataactatacatgtaaatatcactcgcaagatagtcaagattatgttaatatttcacagttagttgtcaatccatcacaatcgagtgcacgcgaaagtaacagaagttccatttcggtggtggtctttggttaagaaactatcagcctcatctatggatggttttta

SEQ ID NO: 28511 - DNA, 460 bp, Oryza sativa
  unsure (1)..(460): unsure at all n locations
agctntatggatgggtatacgggatacaatctaatctttatggccgaagaagatatccataaaacggctcttaggtgtcctggtgcaatcggcttatctgtgtgggcgcaatgacttttggcttaaaaagtgctggagctacttatcaacgggctatggattatatatatcatgatctaatcggctggttgggtgaggtctacattgatgatgtggttgttaagtctaaagaaatagaggaccacatagccgatctgagaaaggtttttgagagaacaaggaaatatggcttgaaaatgaatccgacaaagtgtgcttttggcgtatcggctggtcagtttttgagaattcttgttcatgagaggagggatgagataactcagaggagtggtaatgcaatcaagaaaattcagcctccagaatataaaaccaagttgcaagagatgatcgacaagataaa

SEQ ID NO: 28512 - DNA, 417 bp, Oryza sativa
  unsure (1)..(417): unsure at all n locations
tactaagcttcttatagctatnntgctatgtgaatatcaatgatgtatcctactttatgttacactcatcatattntacaaagcagtcggtatatcacttggatcatattattcacggattcacaccgcatatgctacatattaatatttagcgcgcttggttgactacaattatcgaaaccactcggtgcatctagtcgatgcacctgactatatatttcaacccttcacagtcttcaaatatggtaatatactcgcgagaccatggcaatatgattgaatactcggcttggagtaatctatttcgagagaagatatcttttcgactgtgaaggctcaagggctactggagatatgggaccccatcccaacggatggtattcactagtatagggatactatatatagaaatgaaca

SEQ ID NO: 28513 - DNA, 449 bp, Oryza sativa
  unsure (1)..(449): unsure at all n locations
taagtggagtgagcatgaagcttgtgcagctaaggaagaacgctcgtttatttttacaaanaggaaccttgaatcgctccgcctccataatatagtggcatctccagctggnnttccaagcaataacaattttgccaacttgaggacacttttactacatgaaattgatggagtggatgaacttgagatttcaaatgggtcgttgggaaagttttaaagttttcatgtgggaaaaaaaaagtcatgtgaacagtatccatgaccaagagagaatcatatccggcagggacctatactttccacagttatgggtattcagagagaaacgaaatgccagctatgtacatccagcttgacgccccatgaggccatgatatcacagttcacaggcataatctttacacaaggataaataaaatcttatgtatttgtattatatagctactatc

SEQ ID NO: 28514 - DNA, 438 bp, Oryza sativa
  unsure (1)..(438): unsure at all n locations
tgtgttcctgatgatagtgcattggcatgttcttactggccagattggatcatggcctgcaagngagtagtgactatagttcagaaaagtaactcgacttctctgtctgggaatggtctttccaatatttattacatcgaacagaattacaatttcctcacaaaaaagaaagtacaattagaactacatcttgagaatttccaatgaattaaaatataactctttagaattattggagatataagtctgatgcattttacaacagtgtagagaacactatgcctattggcctgttgacaattatttagttctttttctggcttcttttcctcctctctccaagttatatatttgtcgacaagagacagacatgatctaagaaaagtgctaccaactaatgaggcacattgcattgagcttacacaagccatttgagtg

SEQ ID NO: 28515 - DNA, 423 bp, Oryza sativa
  unsure (1)..(423): unsure at all n locations
agcttacccttcggagacccaagacacatctgtgtattttggggatccgcgggtcctcaccggcttcttcgtcgccaacttcttccggagcgacntctcannaaccggagccgggctcacggcgttattcgacgcttggtctgggtcgcgcgccggtctaagtcgccgccgccctcgctgcagctgagtcgccgccgcccctcgccgtagctgggtcgccgccgcgccgcctcctcagtcgcagctagggttatgatggatgtggtgcagcaacgagaccgactgggtctggttcgaccggacctagtcgaggataatgcagtggccaccgagggcattctccgcatatagaaaattttctcacgtgctttactctgaaaataatanaataatggccagagtgtctaccagctatattaacac

SEQ ID NO: 28516 - DNA, 473 bp, Oryza sativa
  unsure (1)..(473): unsure at all n locations
cgagctgcaagataaccctgacctatagagggtcacttcaatgcctatgttgcacaagctcatcatcataggctggccgaagatgatgacattggagggtgtgcctgaactactgaagctagcgctggatgattgcgacatggaacaactcccgagatacctacagcaaggtgtgagtcctatgcatctggtgttggactgcagcttagagctgctcacatccatagcccttggagaatctggtcctgagtgaggcaagtngagccatgttcagcatgtcaaggcctatgctgaccaatgagacgataatatgaagtggcatgtgttatacacaagagaaccctacagtttcgagacatatatcggtgacagcccttcnttcaattctggaagtagatcagcccagctgcttcttctgattcctgccataatactctttctccttattntaccatgtctgtccatctttcact

SEQ ID NO: 28517 - DNA, 430 bp, Oryza sativa
  unsure (1)..(430): unsure at all n locations
agctntgtggctcctcttgttcgatttctctctttagctgcgccagccagattccctgacacgccgccgtcatcgccactatgtactccgcctccnngaaagagcgcgaccaccttttgcttgatggactgccaactgaccgggttggcgcccaggaagaagacgaccccgctggtgcttttgcgagtgtcgacattgcctgccatgtctgcgtcacagtacccgacaagctcaggtggcatctccatcctattgtagtagcagccgaaatcaaccgtgccggcaacgtaacacaagatgcgtntcaccgccacgtcatgctcggaggttggaacttncatgaagcggctcacgtacccaacaaagaacgcgaggtccagccgcgtgtgaaccagataccgcaagcagccgacgatgctgcggtactggg

SEQ ID NO: 28518 - DNA, 292 bp, Oryza sativa
  unsure (1)..(292): unsure at all n locations
cgctgccatcgataaggtcctagagaacatacatgtcaagctagatggctntgcttctgctcttcacaatcagctgagcttcaataanatgatagaaacccagttagctcagctatgcatcttagtccctggatatgaaactggaaagattccggtgcaacccgactcctccatcgacaatgttaaggtgatcacaacgagaggaggtaagtccactcgtgatccgccgcatcctatccctgcaggaagtaatgtgatatcaaaagatgcatcatccaatgactccgctgac

SEQ ID NO: 28519 - DNA, 491 bp, Oryza sativa
  unsure (1)..(491): unsure at all n locations
acactctganactcagcttgagntgaactttacagttaacagaactaattgaaatcccatattctatatactgcagcttcattaatcgctaaattgtgaaggatgagacatctgcggagaatagatcttctcccctatagttcctagtccttctgtcatcccacaccaccgtggcttcagagtccctatgcagcttatcgagtcaccatcctttgggaccacgtgagaaagcgaagcaaggtctcatatgctgccaccgtgtgaatgtnataatgtgggctaccatgtctagcaaaatagtgatacatgccggcatcttgttggcgctagagccccacactcgctgggaagcggagtaaggtgtatcactcactgttcataataccaacagttaccacagcttgatcttatctgcatgtcctaattcactggatgtgcatatcgatgattacaatttttcacatttgaataacatagtataaatctcatcc

SEQ ID NO: 28520 - DNA, 441 bp, Oryza sativa
  unsure (1)..(441): unsure at all n locations
gtcgacctgcaagcacgccacgcttgggtccaaaaaccaagggactctccacttatgtttatttatacttagccattctgctagctatggaaaattggaagccatacatcccacaaggggaaattggtattctgacaacaccaccacaacctaatgcatttgtctgaacaatggttgcataccccttgtgaacaaaaagcttttactaagctgttgggcctttaatatagaatttgttatcgaaagggattatcaaatgcagctgctgatgctctatctcgcaaagaactacctgattcagcccagttagcaacaatatctgaatgtattcattgtgggtcaagatattctctacgatatgaaaggatgcttttccacccagtcattgtgaattaactgtatcctaaaaangcctgatttcagtatgcagggaattttaaa

SEQ ID NO: 28521 - DNA, 493 bp, Oryza sativa
  unsure (1)..(493): unsure at all n locations
tcacctacatacttattacatatcaactgttgtctnttccctntccgggagagcaacttgaataagcacttactaagtagagccacattcttaatgtccaaaacattgaattccaaccccccacccccttgttccttggggaggcacttatnttctctgaccaccacatttccagtaaacctggagcgataatacttaacctttgtaagtatcccctttggtatggcatagaaagacatcatatatctcgggaggctacttaccactgaattaatcaatgttagccatccttctgtggacaagagttatccttaccaactactttgatagatttcaaagcattttattacattcttacaatcggcatttcttaatctcctatagngaataaggatacctagataccggaatagatatctaccagtcgaacaaccaatgactccatgtattcttgtaaactcgtcgcttacctagcaattattagttttatgaa

SEQ ID NO: 28522 - DNA, 463 bp, Oryza sativa
  unsure (1)..(463): unsure at all n locations
agctagaaacaggtctggtttagttctaaactttttctgtttatttttaacttttcggtcacatcgttccaattttaaccaaactttcaattttagcgtnactaancnccccacagcttgaatttggggaataattaataaaggaaacttttgaaaactgtcgattgacaagcataggagggaagatagttgaagaagctttactctataataaaacttaattaatgcatgctttcattctagaagacctggtccctacctaatctttaaaaatgtagatttagacccctaatcttgataaatataagacgaaaggtccaaatttaccacaaccacattttagaactgacaaagaatgccatgtatagccacatttcaaggaaaccccttcgatcaaaatttcacacaagccggccataaccttctattanntatctataatatataaaagtcccttaacatc

SEQ ID NO: 28523 - DNA, 390 bp, Oryza sativa
  unsure (1)..(390): unsure at all n locations
cttctgtatgctgtcgcatcaactagcgatcctgctctttctttgttcagctntagacgtggttccatcggtgttgcacaggtgttgcagccggtgagcccagccttctccacaatacgcgacgcatacgctgcttgctttatagcgatgattccagcttcttgatgtacctcgatcccaagataaaaactcaaaggaccaagatcactcatcttaaattcaggcttcatctgctctctgaatcccttgatcatgccactgncacccccgacaattaccagatcatccacatacacaccgactagcagtcgtccactgccatcgtcgcgcgcgtacagcccatgctccaacgggctctgctttgagccaagtttcttcagtgtgcagtct

SEQ ID NO: 28524 - DNA, 375 bp, Oryza sativa
  unsure (1)..(375): unsure at all n locations
tatataagcatatttaatgatttaaaagttaatgatgaattactgatcaaacatgatatcttttctaacaaataaagttaagtttcaatttttatatcttggttgtggctaacaaacgataaaagcttttgattgggaggcctagtccgagcccaatcgatttatcgtggcaaattcatttcttaaaattgggtcaaaattaacattctcagttttttaaagcttgtgggccgacaaaaagaatgtaaaaaaatgaacggtccagatgcatgatctgatgcctcctgtcactgacacgtgtcggatggattctcangggttactaccggtgcacgtatcgcaacgcgcaaggcttgccggcgaccaagcaagtgc

SEQ ID NO: 28525 - DNA, 386 bp, Oryza sativa
ggctgatatactaaaacgattgatgcgatcataatatcttaccttataaccaaagttagcccagagttattaggccgttatgtgaaaacgtagaaaacaatactgaagaggtcgatgcttaatctccaaccctcctaaattgaaaacccaaaataataattcgaaagggttcgattccaccttaatcatcaatatgggccaaaacttccgtgtccgtcgtaactatgggctgttaatctagcccacattctaggcttggacggttcactatggaatggcctgatgcaccgagggatttggatgtgccactggactaaatcaccactgcgaccacctgagagataaccaattaaaaaaggaataggccaatgggtgtcaagtttatc

SEQ ID NO: 28526 - DNA, 436 bp, Oryza sativa
  unsure (1)..(436): unsure at all n locations
agcttctgataaaaaacgggtggttctagcgagtattgtttatgagtacctttacgctttgccgagatgtaggggccatttaagattcatttcttaatacctaccaaaatgaactcccgcttntatcatctctttcaaattgatgttccaatatcttcttgtcattntttccacacttcctcttgattttttcttttttttcatcctacctttccattacgaaatttctttcttttcgaagattaagaaagagccgaaatagcttgaaataaataataattgttccgatggaaccttctacatggtataagcataaccttaatgaattaactaaacttcttttaaattaacatanaatagananctaacctcttagcgtctagagcaaaaatctagttaaagtaaaaatctgtttatgttccttaaacatataatg

SEQ ID NO: 28527 - DNA, 435 bp, Oryza sativa
  unsure (1)..(435): unsure at all n locations
cgaccttagaaactaagctttattntcgtgctatcctagntgctggggtagttatgcatggttgaaatgagccttggaatggtcttaactgaatattcagacaaaaaaaaataagaaggaaaagattccattaagacagntatgnagttgattgagtttcccctacttgaccaaacaagttccaattccgttatttcaactacactaaaagatctttcgaattggtccagactctctagtttatggccccttctatatggtaccagttgttgtttcattgaatttgcttcattaataggctcacgactcgactctgatcgttatggattggtaccaagatcaagtcctatgcaagcggaccttaatttaacagccggtacagtaacaatgaanatggctccctctctagtgagattatatgagcaaatgcctgaa

SEQ ID NO: 28528 - DNA, 490 bp, Oryza sativa
  unsure (1)..(490): unsure at all n locations
tgagattntacctcttctgaagagttcaattcctcgagctatattatgatggcgggcatgagaagaaagaatagatgccaacaatgccttcaatgaagcaagctggaagactgctatgcttgtcntcccaactgcagatgatagtttgtactcgtaccatccttctgtgtcacaagcacttctagctatgttaattaagagcaagtccacctctgccctccagtgatctgtcctcagtgaacccccctgctncaagtgatacaatgaatattacatcttacccgttgcgatcttactanatacatganacaattgtaaataccagccgagggccatacggtcagtcagcaaagtactgactggatgcaacagcaatctaaatacttcaaaacagtatagcacagtgacaataatccatgattagacaataattatctccaacggtggtatgcctgtaaccacagtaccatgatgtaccacggtgacagtg

SEQ ID NO: 28529 - DNA, 469 bp, Oryza sativa
  unsure (1)..(469): unsure at all n locations
gtcacctgaagctgcagctttaaatctcgagtgaaaggtatacttttttgaaagntcttaaatttgagatgaatagttgaaagttttaaatttaacttcaaatttggttaatctgctacttaaaaaaaatcttccaaaaaaagaaaaaaattatcttaattaccatcgtgatctaaaactaacatgttagttacgttagatatactcgtcttaaggaaaaaaccaccgaaaaaatccaccggtatacgcgataataaaaccacagagaaaatagaactccgganaaaaaataaatctactgtggtgaagaaagggaaaaaagaanacccacccccaggctacgtgcgtgttgccggtgtgcacgcgccaagcggcaatccctgcaactgcaactagtggaattcgagaaacgcgtgaaggttgttgatggatgaaatcgtcattccatccatcgtattcgtgaatgccg

SEQ ID NO: 28530 - DNA, 391 bp, Oryza sativa
  unsure (1)..(391): unsure at all n locations
agcttaaagccatgaatacctttatgcatatctgtanttggatcctgcaaaacaaacatataggatgagtagtatctgatgtaaatataatactccanaaaagtcaagcagtttatgaatacgtattntttctcttgttaaatttgatttccccgaacagatgactcattacgtctaaacactctgcccgactagtcataaccaccaagcactgggagtcggcctaagcactttccaaacatgcatatgaatgacatgagttcgtcattaatggaacaaagttgtacggatcggaagttactactcgggtacttttgcaattattaagagcagaaaataaattatcttatctctatgctcttgaattattccgaataatacttagcacctt

SEQ ID NO: 28531 - DNA, 493 bp, Oryza sativa
  unsure (1)..(493): unsure at all n locations
cacatagcgatgttgagtccgcgccgaagatgcgcgaatatgacatctctccaaaggcgctcggaaccaaagaacatcctggccgaactcggtgaattggtatcgatgtgccctgtaagcatggactccctcagtacagctcccattacacgaaacggatagtctccaatgaagagagggacgctcgtttgaatgccgaacttaatgttgaggtcattcaagaactataatctagcatgaatgcaagggtggaagaaagggttaacatggtgctcgccgacatgaatataccccgagtcacaacacctgctgtgcaaccaacttctcgtatacaacacgacgcgagtccgtcacagcatatgatgagttgtgcattcacagaggtgcctgncnctggtctcccgatcgcaccactagctgctgtggaccacatcgaggtaantattgttatccgatccatatctaatataagacattcacacatttcaatatt

SEQ ID NO: 28532 - DNA, 434 bp, Oryza sativa
  unsure (1)..(434): unsure at all n locations
agctttcatgcacaagctaggaggtattactattatctctgagtgctgctttaagtctcttcttttgcaggcaacctgtgatttcgttcaatctacgattctctgatgttaaatctcagtggcatgaaattcgattgcgttttgcagacaatgatccaagcaaagatattccttctcatctccatcttcggagacgaataaacatggacacttgatgcagaagcctgtcttggagaaacatctctgatggatggacgaggcaattcagcagagcccttctttgtcatgactaccatatctgtctctctgcacaactcagatcttctccacaggtaactaanatagttaagagcacatgattaagcatgcattaaactagtcaagtactctccttttggcagcaagctcgatcgagcttatcgtaatccctgtgc

SEQ ID NO: 28533 - DNA, 474 bp, Oryza sativa
  unsure (1)..(474): unsure at all n locations
caggataagatctaggtatctacgttttttttgaagntgacaaaactatagaataatatagcaacatatgtagcctcaaatataattcattaatctatcgcgcataatttttaagatatttgtttgcgtgaagatatgtacaacattcttctatatataaactgatcaaacttcaataaatctaacttagaacagtcattgtcactcgttttctctcgtcgagtgacgtccatctaatgtccgaaaaacaagatacgagtgagtgtaccatgtatgtgcccatgccatgaattgttggaaagagtctcacaaaaaagacaaggaactctacctaggcatatgccaaataatcacaatagatgtctctagtgtcccagtgaacatatatagctagccctactggataaaggagatatgattctgcacattggatngcaacaattcatgtggcgggttagtcttccgcgatctctg

SEQ ID NO: 28534 - DNA, 454 bp, Oryza sativa
  unsure (1)..(454): unsure at all n locations
agcttgtacaatgaaatttatgatgattgtttcttattatgtacaattatttaaatatctgctccagcttctgtagcggcgctgctacaatanctggagcaatacgcgcattatattctgcagaatacccctcacacgttgtaagcttggagcacatccaaacaattcatttgtggttaggactggaacagtacgattctgtgtgtgctcaaaatatttggtggagaagtctcagtcccttgcttttccaaacaggntattctcacttcataacatgcanaatgcgtcaatctggaacgcgaaccacatcacgatgcaatcgatgtattgacattctgaggcaagaaaccaactatgcgttcatctacgaggttacctacgaaagattactgtagctctttggctctgtcatttcgccaaacagttggcgggctctgtcatttcgtaaacagtt

SEQ ID NO: 28535 - DNA, 416 bp, Oryza sativa
ataatcacctttcattcactttgaagtatcaaggctatggcattattagcttgtgctatcttcggcacagatcgttcccagctccatcttggagatgggtgtgttcaggtgcaaccaagtgcgacttcagattgaatatacaatattttcatgaagttgtttcatgagcatgcattttcaaatgagagatgatactagcagttctcaaggcatgatagagatacaaactgctgatattgcggaaacttctgccattcacgaggctatagttattgagttggagaagaactggccctgtgatcctggtgtttcagttcagcatctctcatgtcggcaagggtccattctttgatcgacttggggacaatcgaatttaatgcggaggaatgtctgatcctcatggccggatcacgatg

SEQ ID NO: 28536 - DNA, 223 bp, Oryza sativa
tttgtagcataaagaaactgctatttatatatccaacatatctctggtggaagtcagtgaataagacattttttggagattcgaaagtccccaccgcttcaaaatgccaatgctcatttggaatttctttatggaaacacaagaaaacacacgtatatgtcgaagttcactacaccaaccgtccattactgaagctaaaattatattgcttattatagacttt

SEQ ID NO: 28537 - DNA, 350 bp, Oryza sativa
  unsure (1)..(350): unsure at all n locations
tcttgagctngatgaggattacttcttggaccgactcaacgaagcttctgcattngcaagattcaactactaccctccctgtccaaggcctgaccttgtgttcggcatcaagcctcactccgacagcaccctcttgacgattcttctcgtcgacatagatgtcagtggcctgcaagttcagagggatggcaagtggtccaacgttgaggcaactcctcacacatggctgatccactaggtgacaccatggacgtaattgccttatggcatccaacatccaaatacttactctctgaatctgcagacattcagtacttcctccgcttcatattataagactatctagcatt

SEQ ID NO: 28538 - DNA, 460 bp, Oryza sativa
  unsure (1)..(460): unsure at all n locations
agcttngcggccgggagcggctgacacatgggccttactttctagtcttgcgttttgttcgcttgctaattcagatcctactctaaagctatcggtctgatgaaatgcctaatcatgcggggaaggctacatttggaacgcagtgattttacaaaaaaatttgctgtaaatttacgaaacaatttcagctacggctagtaagatctgtaaatcgctcgtctcctctggttggtttggattttggtgtacaattttgtctgtatgcttgtagtgttggaaacttgctcatgggctgatctgaagcatctgtgctgctctccatnnttttttatttnntgtggttgcagagtgcagatagagttccccaagatcgaagtgaggtacgaagatctgacagtggacgcatacgtgcatgtcgggagcanggcgcttgcaaccatcccaaacttcattgcaacat

SEQ ID NO: 28539 - DNA, 449 bp, Oryza sativa
  unsure (1)..(449): unsure at all n locations
tgcatgttntgagtcattacaatttcaaatatcatcctatctaatggaatcaaatatatgaaagctgcagactggagaacataaagcatacctgggttttctatgaatgaaacaggaaggctccatcagacatcctcctttgcttaatagcataacggcgcactcaattagctccaaacctcangataaatttaacattactgcaagagattcttacatgataatctctgcatagctggaaaagctccannngaatatattttgtgcagtcgcatagtgaatcatgtacagcattgtaggaacagggattgttttaaaaataaataaattccatacatatcatatttcgatttntagctcataagaatctgaatgagaacaccttcttaacagaatagcctaaattaaggaacaacttattgagagatcaggaaaaacttactactctc

SEQ ID NO: 28540 - DNA, 355 bp, Oryza sativa
  unsure (1)..(355): unsure at all n locations
agcttcttcgctgcaccttgttgaccgagagccctcttttgttctaaggaaggctgactaccactggcctgctgctactaggtgggcttcacatctcttntgcacgtnnnnncagctggggcccctgcggataccttttcaagttgccttattagttaaggactggtttggatcctccttcctctcttattcaatgtagtactggctggtgccgtccgcgattgtattgccaaattttggtcctcattcgggtaagccatctgttgatacaagaaacatctgctgatttacgagacatttatgttttaacaatctaagtcatgtatggctagtgtaaatgtcgtacattataacc

SEQ ID NO: 28541 - DNA, 425 bp, Oryza sativa
actaagcttccaagtctagctcgtcatatttcttccgctgcatttgtaatcttttatatttctgtaagacgcggatctgtatgtcaacaattgtcgattgtgtaccctgtctggtcctggacaggggtttaatgcacattcagcttaaatattctggttcatgaatctctaggcgagacatcctagcttcctacacgcccggtaatcccagctcatcccctcttccaggcgatcgatcctcaccctcccgtacgcggtaagcctaccgctacgccaatcaacgtcgtcagcctcttccgtctcgccgatgggatatagacctcgcaccaacgactttctcgctttcgtctccccgcgccgacgagagtggcgtcacgacccgattcccactttctcagttctcacgagatatggacatttcgcat

SEQ ID NO: 28542 - DNA, 447 bp, Oryza sativa
  unsure (1)..(447): unsure at all n locations
agcttggtaagtaagagatattctatctgttattttatgtcacaacatgctntccataaagtccatgtgcaactccataagagaggagtgaaaatccatttgtgctcgcatgtacaccttgaatattctatatagttcaggggacaacgaaggttttgacgtggacatgtactatagaataaaataattcaactttgttgcattttaaatggtccagaacttccagattctagatgccaaaatacttctagaaaagatatattagcatttttttcttaatatcaggtcaattggatgtggatgatctttggataaagaatcttataccatgagcggtcgctctcgcaatatgcacatcgacgtttggactgatggtgcacgcatatattattatgtatggtgttttactttcttgttntgtaatacaaattgacaactgcacacatg

SEQ ID NO: 28543 - DNA, 413 bp, Oryza sativa
  unsure (1)..(413): unsure at all n locations
tactcagcttcagagctggacatcatttgcacacatagaacttaatttagatctcacggatatgacctaggattatggcgacataagaactttcgactatatttgatctatatcaagattcatgcaagtttcaatgtatgcactatagtggacgattaatctgttgtcatgatttacctaacactgaatgttaagttgagaactggcttgctctatttgatcacactgatatgtatctatgaacaacgttgctgtttcagtgtggataatgtacaactataagtgagttgattctttgaccttcattgcccttataccacactcaagtatacttatatttccgaaatatatattccaattatatatttttattaccatttngctctgaacagggntaacaagaatatttatga

SEQ ID NO: 28544 - DNA, 479 bp, Oryza sativa
  unsure (1)..(479): unsure at all n locations
ctcaagctggatganagcattcacgcanagcaaccttcgatgcagttgattatgccataatgccatcanctatactgaccggggacgccagaatcagcttgtcgattccgcggctatcgcaagctatcatcgtgtgcaccgagcagtgcagacaaattgttccatgtcgcattgatcaacagagggaggtcatcataccgagtggaaaggggtatcaatggaagggagatcgctcgccgcgcagtctctgacggcttcccggatattggctgcaccaccgaattgatccgcttcgtgggggagattgggagaagggaaactatatgtgttgggttggggctctgaagccatcgtatgtattgtgccggtatgctgatgtggttgaaaagtgggcccaatattatactaatgttagctgtgccgaactaagccgactcgcaccttggcacatggactctgctgactattgtttgaatgaa

SEQ ID NO: 28545 - DNA, 418 bp, Oryza sativa
  unsure (1)..(418): unsure at all n locations
agcttcgagccgccgncattattggcccgtgaatttctttatgcnaagagcaagcctaagaacaaggggatcaaggagtggagcatctggggcctcctgcncnnnagcgcagcaccaccaacagtgtgggtgccactgtcagtgcgttcgccggcgaagcacgggcggcgccaccggagctccgggcaaggggttacgacggtcagatgctccggtgcaacagcagtcgtagcgcaagaagctcattcagtggaattggaagctcattcaatggcggcaggttggtgatgaggagggcagatgaagttttgcttgagaggaatttcagcgccaggtactcttcgtcttcctcctgcaggtatcagtttcacaaagatgattactccaactccattgccacaattctggagctggagct

SEQ ID NO: 28546 - DNA, 380 bp, Oryza sativa
  unsure (1)..(380): unsure at all n locations
atcgatgcagccagcatgtgcaatgcaagctcccccacaattattgctccgatactccaatcgccatctgcgaaatgctgtcgctgntcctgcctacgagcgagagagagaatctcatctcgatgcttgaacaagtaatttcccggttctgaatccgttcaatcatccaggaaaaatgtccggaattccaggtcaagctaatttctctaatttcttatcctgatcagaattatagtgagattcaggggaatagagatctgctggctntttcatcggataatttcgctgaattgcgttcgcgaaanatataattcgctgaatttcgtacagcggatgatgaggattgaaaagggtgggtgctgcataagcgagaggtggtg

SEQ ID NO: 28547 - DNA, 487 bp, Oryza sativa
  unsure (1)..(487): unsure at all n locations
cgatatccatgagtgcatcatacccaactacaccaatctactccttcttcctatcatacgaattcttaaagatatacactacgcatgtgggctgacacctgcagctgataccaaatgaagtggttgtcttcatctgtctattaaaaactctgctgtgccgatacctggataccacccgtgcagcagtcttatttatgctgccccttgtgcccaaaaccttcatagcctgcagataaattatttttcatctcatatatagacaatactacatggaccatcgtattaaaaattcacatatacttctgcttgaaaaaaaacagcaacactcatatatgatggaagatgaagacaaaaactgcgancaaatccacctatggtaccccttattaaaaaaaacatgtcactgaaagaaagtcactatttcaaagttagagaaattactgatgtaaaatcaacattcctcttatgtaagtgcaataacttctcg

SEQ ID NO: 28548 - DNA, 403 bp, Oryza sativa
  unsure (1)..(403): unsure at all n locations
agcttgcattaaacacctaaattctgtgtcttgtttagtacgaaagtactcgcccttgctctatataaatatatatagttcctccgccttgnagagaanaaaagcgaagtgaagattatggtttcgtcctggttcccanccatcgcctgtggtgttgggtggtagttccgtggttccgctgctgctgctgttggtgtttcctcgtccgtgtcgtcggttgcattctcgggctgttctgagctgccacctaagttaaggtaaataagtcctctattctaaggattgcaatgattcatatttgttaccgtgcgtaccagcgctaagtcctaggactggtactgagatcgtggttcgtaggaagggttcgcgccgttttctagacacgctctgtcagtgccgtgtc

SEQ ID NO: 28549 - DNA, 472 bp, Oryza sativa
  unsure (1)..(472): unsure at all n locations
cgttcgtactccatcaaagcatgaatgaactatatggnncggtcanggtgcgttatcggcccgccactggaagtaactctgactgtgtctatccattggacaaattgacattctcttgcatcctnctatgtacatccattggtgggatagttaagttaatgatatgactgaggagtgatgaatagaatagttgtattaccacgaaatcatcgtcgacaatgtttggacacaacgagacacctttgtcctcgagttcggtgccttacggaccttatgacctgacaacggtcaccacaacgacactccggacgctcacggcacgtggagagtcctatgggatttacctgccattctatagcctcagcagcaattcgaccgtcatgctcatccttncgccttatgtagtccgatcttggttcactacgtgggatgcacgtgtccgtcgtttgtggttctcatgctaccactcatg

SEQ ID NO: 28550 - DNA, 458 bp, Oryza sativa
  unsure (1)..(458): unsure at all n locations
agctctttagacaaaatntattcctaaagtgacatctattttgggaaggaagagagtggacttgccaattcagcttacatgatcaacttnanccngctaatagtcggctataaccagctataagtttatgtggagaagagagaactagaanaataaataatgttactctcgtagaaaactaactctttacatacttcaagataaatataataaatatataggtcagagaaagagatcgaagaaaagaaagatcaaacaatcttataatccatctactatacataactctgaactaatatgggcctggttggggagcttaagattatgagaatctgtgaaagctgaagttcccatcttctgacttatagtttatcttctagattctacaactatagcttcttagaatctggaaaaagctgaactggttatggaaaacttttagtctaagagaagctaca

SEQ ID NO: 28551 - DNA, 434 bp, Oryza sativa
  unsure (1)..(434): unsure at all n locations
agcttctctacacaaccgaagcagtgttcagcaatgaaatttantccatatatgtctcatttcttcgaaaaggatgcaatgtatctagattaacactggnnaaagcgcataactgctacatatatatatcggaggaattactcccttcgtttcacaatctaatagtctagattcattaacatcaatatgaacgtagaaaatgctacaatgacttacattgtaaaacgaaagaagtagcactaataggagcgaccgctcggtggcgcgctccgccgcaccacaccgcgccgactcggcgacgttgaacagcatctcggaggcctggatgggcgtggcggagatcttgggcgtggggatgcgctccacaccgtgggacctgttggcgacgcaccagtcctggatgacgtggcggatggcattggtggggacaaggt

SEQ ID NO: 28552 - DNA, 211 bp, Oryza sativa
  unsure (1)..(211): unsure at all n locations
gtagtcctcagcaagcgctgcgcgtggatatgaatattgaacacaaggacttctatctttgcagcgacttattcttgcattatgtcatgattaacagtagntaatcaaacctggttacatttgacaaatggtaacaaaagcaccttagcagcttaatttattgccacctgctattctgaaatgtctggataatcctatatggtgttctgag

SEQ ID NO: 28553 - DNA, 459 bp, Oryza sativa
  unsure (1)..(459): unsure at all n locations
agctttntcgcttcagagagagaaactttatcggctttataataaccggatactactgtcaacaggatcgtcaatagcatgggccgcatgccttggacgatacacggcatgctacaaagtttgcagtcctgatcttgcgacatatgtggtgtgcggttggctacgcacgcgcatcatggcccggccgactgcttcgatagccaaacagtccggtcagcatctttcctcgatctcacagcgacataatcaggggcttcggagcagctctcttattacatgcatctactcatcatcaccatgtattgcatggctgcctgctacaagccaaccaatcaagaatccttaatctacaggctgctaccaacaatcgcatgcttgagaccgatcgtccaataagcatcgatcagtgcatatgagtcaattaatctactggagcanatacagatgcatgcttgcaca

SEQ ID NO: 28554 - DNA, 263 bp, Oryza sativa
ctggatatactaccatgttcatgcaaggttattactcagtctctttcatatagaggtaaatatcttttgtcggtcactaatcattgtgttcaatataacagatctcataatacaagctgtggtcttacccactccttcgcaactcacccctctcgtgttccgagcacgctcttcaaactactatacggtgcgtgtttgcaaaaaaatctatacaaagttgcttaagaatatattatccattttcaaaaaagagctatactaat

SEQ ID NO: 28555 - DNA, 445 bp, Oryza sativa
  unsure (1)..(445): unsure at all n locations
agcttgtccaagtntgtgcttcccataatcccactttctttatcatcgccatgttgcttaccatggctaggtaatcttcacatgacattccatattgcgatggacacataacataataaagctgntaattatctgtgattaggagatgtccgcatgacagaatgacaatcttggtggttgtagcaagcaaagcacaatcatgttactagaagaatttccatgctcttttcactggaccttatagtctcctattttgcctcgggcacttgaaatggtgaccatgagggaagaaaatattactagagggaatgattattcttctaaggacaaatatgtgtgggctagtgtgctttccgcttaaggacaaatgttgcaattttccttgcagaaaatgtgtacttctcttataaaatcaagccatccctgatagttgattctgggtgag

SEQ ID NO: 28556 - DNA, 445 bp, Oryza sativa
  unsure (1)..(445): unsure at all n locations
agcttncaaatacacttatttctctcaacatagacattattaattaaatctatgtacattaatattaccgagaacctaccgttctgatgatagttccatctaaaacaatcagaagaacgattcaactggatatgcacaatagaagcgcacaactcatgccgatatgcaagattctgacgaactaaagctcttctgaaagcaacattaagtggaacagaacccatgacagtagcaatagaagacgatctccttcggacaatagcatataaagatggatatttatcattcaaggccaagttgcctagccatttatcttcccaaaatctaatttgttccccatcattaacaatccaagaacccatatctaaaacgtactcttgacttcatgagccctgacaaaaataagattcaccttgttggtttcaacttgggtatagacttatat

SEQ ID NO: 28557 - DNA, 355 bp, Oryza sativa
  unsure (1)..(355): unsure at all n locations
ctaagcttcgccgccgccgcgggatcggatggcgtganactctacgcgaggatatagatatgctgtggcgcgcaagagcccgagacgggaggagatagtacttagtaccagttgaagagaggagtacctcgatgggtctctgctgggtggagcccacctccgcggtgatctgacatggctcgctgtgaccgtggggctctaccgcggatggatggggcccctgctaatcacatgaaaatcaccatatttccatggaaatgagaaatctaccccacacaatgcattaaaaagtcatatctgatagttttggaccggcatatatcggtactaccttatatttaaaaagactaactat

SEQ ID NO: 28558 - DNA, 462 bp, Oryza sativa
  unsure (1)..(462): unsure at all n locations
agctntacctctagttgaagatcgaaaccgatgcagctcaacccgaaagctagaactcgtcgaaagttaacgaaagtaaaagggtggcgatgcgctgagaatgtattgaacgtgtgttggttgcttacattggttcgggctctatttatacccgagatacaaaatatgtcccttgccgacacgacacttatctctaacaaactctaagatacaataagtctttgcgatagactnttgcccaaacatatctctaaggaaattacataaaatatcctaattaattgaaacaattgcccaaaccgagagctttatctctatcgtggcaatccttgtgaagcactttgaacgattctaanaacagcctcgaagctgtcttcatcgtaatcnggtgcattgcctccatcggctgtatcgactatcctctgtccgatccatcccagccaatgtacactccagccgata

SEQ ID NO: 28559 - DNA, 253 bp, Oryza sativa
  unsure (1)..(253): unsure at all n locations
catcgcacacaaactaagcttccaccatatcaccggggcgtggacccacagatgccttctgtatatcatggaggaggtgtctgtcgtcgtcggacgagactcatttgagaagtatcccgttcggcgctttcttgtatagatcgttgccgaccatgcagtagaatnttgctttatggggtatattctcaggctcttgatcatcatcgagcagctcttcgctgttgatgaaattgatcagtgggatgcgccagtc

SEQ ID NO: 28560 - DNA, 351 bp, Oryza sativa
  unsure (1)..(351): unsure at all n locations
agcttcaccttntatatatatatatatatataaaccttcttgatgtatatatataaaaaggattntatcattcttgaaaatgtatttgaagaaaaagggaagataccaacaagaaacggaacttacgcttaacttcgtcatctattagcaaaatagacaaaatatgatacatttcagcaccttccgaggagccagagctgtcagggtcatggtctcatggagcctagtgttgatttgccaaccaccaacttgttaaattagcagagtccttaagatctcgactggtctctctgagtggcgactggcgactggccacctgctgatttgagtactactagtagttttccgttt

SEQ ID NO: 28561 - DNA, 419 bp, Oryza sativa
  unsure (1)..(419): unsure at all n locations
agcttgtcctgtagacgcgtgactctgacccggcttgaaatcagaggagcatggttgcaactgtacgtggatgggcatatgaccatatgtaggccccaacttcaattcccaaatcccaagctatgatcttcagcaggcagcatcgatcgagagcgatggatcggatttggatgaaattaagcaaccgtaattaagcgaccaatgcgatggcagagcagcaagaggtatcattaatgggtttttttttagaaaatagaggtatcattaatgggggcgtttacttgggtgaaatatttactcaagatctantttttagcttaagacatgatcatcaattctaaatacggaattgagataattactgaccagatgaattgaagntntgctaatttcttttgattcttctggtggccttcttg

SEQ ID NO: 28562 - DNA, 129 bp, Oryza sativa
gtgtcacacgatttcaataacaaacaattacacatggcgatgatacaatgtaaaaaacaaaatgtaatcgtctctgtcttgaaaacaccaaactgcaaatgttcgtacactacaacatttaacttgtac

SEQ ID NO: 28563 - DNA, 266 bp, Oryza sativa
  unsure (1)..(266): unsure at all n locations
tatgcggaactttgttcacaacagttatcacgtctgtctacagatggcaccgcctgaagctatatacggtcggaagagacgcacacctctcttctgggatcagacaggcgaacgtcaactgttcggaacagaagaattatcggaagcttaagagcaagtccgaatcatcagggaaaggttgaggattgcccagtctcgacagaagagctacgcggataaccgncgaagggagctcacttctgaggcaagagattacgtgtatattc

SEQ ID NO: 28564 - DNA, 173 bp, Oryza sativa
ctactctgtctgccagattgaatcatgtattcattctgaaaaaagtcgaaatatggataagagccgagaagggttatattatgaaccgtcgattctaaaattcagattcatttacatcgaatggatagctgcagcaatagagttggatcaaactttctactctctgcatctac

SEQ ID NO: 28565 - DNA, 430 bp, Oryza sativa
  unsure (1)..(430): unsure at all n locations
agctntcttgctttcacgaggcgtactcaaccatcttgttatgctggagggcaaggataagagcacgcccaattgcttcagagctcttgggttcttggtgcggactgtagcagcagcagaagcagtagatctggaggggtcagcgaaggcgttcatcaaatgttatccagtgaggagccttcaggcccctcttgctcttctatccagggtgtgagcgctgttccggcgacgtcccccggcgagtcgccggcgagccaggatcccacagatctggtgcaaccgtgcgccaaattctctataaggtgagaaagaggaaccttaatttgattgatatgatttagtcgcttgggggataaggattagcctcgggtgcttaagttcttgattgtggattaattattggatgcggctttganggatcggattgggt

SEQ ID NO: 28566 - DNA, 325 bp, Oryza sativa
  unsure (1)..(325): unsure at all n locations
ctcagcttatactgtgctattacacattctgagctacactgatngtgctatgttcatttccttctctgaagctactatagatcttttgccaacgtgcggagccgacgttctctcctgtttcctgtccaagccaataagactgaagatggcatatttagagggtgtttatatccacgggtgtatagttttggcgcgtcacatacggtattatataaggtgtctcatggtgtggtctggcacttataataaaactaattcagaattcggttgtaaccgcgagaccaattattaagcctaattaatctggcattagcaaatgtttact

SEQ ID NO: 28567 - DNA, 429 bp, Oryza sativa
  unsure (1)..(429): unsure at all n locations
agcttatagtatcgcagatcgcatagcctcacttgtttctgcctccctcccagtacaactctcccaagtcccaacacactctgactgccacaactgcctgtgcacatgtgaaacatgcaatgcgaaaaaaaaaaagtagaaatagtactaataccagttctaaaaaaaaaagtactactaatagcggatagagcagaagtgtcacgtactggaaataaaatacatgctagttgttcgcttagattatttgtgcctactagtctgttctaaaagaagataaaaccctatatacaaacctgacacgcatatatctaggtttataattagaaatgattntttaagaatgcaggggtacatacgaacttgattgttcaaaaccacagctgacatgtacgtgaaaagaagcaaacaaaatatggttaatatttt

SEQ ID NO: 28568 - DNA, 408 bp, Oryza sativa
  unsure (1)..(408): unsure at all n locations
agctacggatggttctgatgagttagcaactctatggaaacaagcattattgcttctcatctgaccagttccaagagagaagtagccaagtatgtagaacaatcccaaaactgcaaacttattttactggatatatatactctcctttttagcattttctgaaagacccaggtctgtattgcaattggcatggttgtgttcatcggaatattgaatgtcatatcgaaaagaggcgccaacctatagctatcaacaacatggacaccatggttcagattcataaatttggtgatcatggatgtctaggttcagaaatnnttggatttatgcaaccaagtctgtagaatttcaatctagaaaacacatttgcatttcgtataatgtataaaataccaatttaccgtattt

SEQ ID NO: 28569 - DNA, 444 bp, Oryza sativa
  unsure (1)..(444): unsure at all n locations
agcttgacacttcactaccggntctctcgaaccatatgattctcgctaaaccctccttaaaacatacttcttccgtttcaaaatgtttgacgccattgattttttagcatatgtttgaccgtttgtcttattcaaaaaatttaagtaattattaatccttttcctatcanttgattcattggtaaatatatttttatgtaggcatataattttacatattttacaaaaagttttgaataagacaaacgattaaacatgtgctaaaaagtcaacggtgtcaaatattntgaaatggagggagtatatactatatctatganaaaaaggttgaagctttggcctgggttagttggtaaaattctttgctcctgcgtgtcacatcagatatacggatacatatttgaaatattaaatgtagtctaataacaaaatannatacaaatt

SEQ ID NO: 28570 - DNA, 269 bp, Oryza sativa
  unsure (1)..(269): unsure at all n locations
gagtagtanactagtaataatgcactctcagtgcaactacttctcgcagctaatatgtagccaaatctttatgtatggtgcanagcctagataagccctttccatttcctaaaagaaagcctacagaagccttgaatcccaaatgttagatggatctggtcaaccggaaactaagtgacaattaaattaacagcgaccaaaccaaatcggagcacgatcaaattaacagcagtaatggtccccaggcaattggtgccgaccagagcagt

SEQ ID NO: 28571 - DNA, 439 bp, Oryza sativa
agcttctctaatgaaccataagccatgattataatattgtaaacacaagagcttaacatgttccttttgatgcaacacataggagccttctctgcgacgagtatatgccctctatgcccatatgcatgaatagttgcagaaaagcactcatagattatctgataagtggacgtctcaaaccaacaccacgcttgctcaaacatgccagaatcgacatacatccatcgcacacctgaatgtgtgtattaatcaaacaccatgtgactctgatacatccgtttaagaaaagcttgtgctggagagaccatgaacttgatagagtatcgatacaagagagcgcggcagctcacaacatctggaagcagagtttcagctctcatcttcctgaaatattactgccgcacatcaatatcattgattcgtgtgatagcgagatcag

SEQ ID NO: 28572 - DNA, 272 bp, Oryza sativa
gctcttcttcgtgatctgagattactctattataattgattctctatagagctggatcttgatctgcttgcgttatattatctccatctgtctcactcttctccatgtccatgacttgttctcgatcatgatgctgtatattgttgtaacatggttcttctagagcaagacacgcgattgtctcctcttctcggagccaaattctctatccttagtaacagttcgggtgttgtatctgtcgttagttaacccgatgggctaaatatgagtca

SEQ ID NO: 28573 - DNA, 105 bp, Oryza sativa
  unsure (1)..(105): unsure at all n locations
agcttaaaggtaggggcaccttctatccgttgtactccctccgtcccatagatagacaaacactaggtttccgtgtccaacgnntgtgctgttcttttataagat

SEQ ID NO: 28574 - DNA, 273 bp, Oryza sativa
  unsure (1)..(273): unsure at all n locations
ctaagcttgcgctcgttgtcagtaaggcacggttggcgccggcgacgatgattgngtctagctcttcatcagtgtcanccatgaagcgaacacaggatgtctacgatgctccagcacatcacccgtggtgactgtatgagtgaanacgccttgaccgtgctggccggtgtgatgaccgacggcaacgatgccttgatatctcccaacagaccaccgaacctcgtcatcagcgatgatccgccacccttgcgtgtatgctagctgaaatggtga

SEQ ID NO: 28575 - DNA, 64 bp, Oryza sativa
  unsure (1)..(64): unsure at all n locations
aactaagctatacgatgtcttcnacccacacattgctctaacactgtatcacttttttcgggac

SEQ ID NO: 28576 - DNA, 317 bp, Oryza sativa
  unsure (1)..(317): unsure at all n locations
tagccagctcagtgtaagaggcangtatcactaanatcatattactatcaatgtgtttacaaaagtaaactatgagcttgcatcctactaaataaatattttataaagctaaaattcatcactggacaatctatgagaatagattaactacaatttatattaaggaacataatgtccagaaagtccaacatatttggatttctgtaaaatgaacccaanagcaccacaactcattcactattgccaaatactagataggtgcccattgcaacagcttaggtggagggcctcgtctgcacaagtaataggatcacttc

SEQ ID NO: 28577 - DNA, 464 bp, Oryza sativa
  unsure (1)..(464): unsure at all n locations
agcttaacgcttacccacgtgccagctagaaatctatatatggcctttttaatgtggccctttaaccaaactaaccaaactactccctccatctacttttgatagtaatattttatcttaacataatggcttaggataagtaattctatttatcatccatttaaatatgctactagttattcctcgtaaataagcaattcatttaaataagcaattcttaatggctatgtagccaatcttgtgtggaagatgaagagtcacacattaaatccgagaaagtcattaagagtataggtggttggattgaaatatgcctatcaaaagtaanttttntatatttaanaatatgtctatcanaaatagatgaagaatagtgttgagattgatctggacctaaaggttaaccaaacaattntaattccattaaaaagaaaatggaagactaaagttgataaacaaatcgg

SEQ ID NO: 28578 - DNA, 331 bp, Oryza sativa
  unsure (1)..(331): unsure at all n locations
tatcgtcngcaccaaagaagtccagctctgctntatagctaaccatatacatgtagtgcgtatagtagtaatatcctcatattatctctaaaagctatnttatcttttaccggacccacaattctaatttgataggctcatacatagaaattatctcttggcaggcacgtgttaactagcccgttgctttcttcacctatgcgcctgtgcaatcgctcgcttgcctctctctcatctcatctccctcatacacatatgacttatatgacgtggctctggacgtattatacctgctcttagtgtatatattacagtggctgagagatgtgag

SEQ ID NO: 28579 - DNA, 463 bp, Oryza sativa
  unsure (1)..(463): unsure at all n locations
agctnttccaagaagggtctcagcagttcatgacatatagtcatatagaatggattntatacattgagagcaagatatgacttatgagaagaactagtgagacattcttgaggctccagaagtgtgcaactcggacaagttgttctaggggtggttcagtgtaagtttttcatacaataattatttcaatcaaaataccaaatatgaaatctgtattaaggttgaaatgggaaaccagttgattactcanagatagagaaagaatccaaacacatcaattgagttacaaattgagatttgtccaagaaattgtttaattgaatactgctatgatattgaaaatacatcaattgaagagagtagtgatctgagaacagtatatattggaggacttgaatgctagtcaggataacttgtatagagctgaggtagcaaaagtaaaacaggataaaaactgttatct

SEQ ID NO: 28580 - DNA, 254 bp, Oryza sativa
  unsure (1)..(254): unsure at all n locations
ctcagctaccaaacacttatatctgtacggggagaagtaaggtaccatttactctaaacanactcaaaattagaatcggtagattatactctaatctgcgatagagtaaagtatttgttccttacacagggtgcagcctcttgacactcctgccatgaacagacccacttctattggccggcggcactatttgggcaccaatcagatcggcctaccacggctgaactgatcatttttaactcctaaaaaaatat

SEQ ID NO: 28581 - DNA, 434 bp, Oryza sativa
gtgcaagctggtgaactggatcctatataagagcaagaatggtaaaaaatgattaagaaagttgcatacttgggccctgtttagttcacaccaaatttccccccaactcccaactttccatcacatcacatcatatccaaaactttcctacacacataaactcctaacttttttttaaactaccaactttcttcaaacttctccttaatttcagaaactaaacacagcctgttcgattctctctcttgaacagaagagatgactttatgcggtcgctgatggaggcccttctcggcagaagaagcctggcatgtgacaaacatttattaaatcatcatttggtaaagaaagtccagatggaagttaaaaagtcagggagctatgcttagcgtggaaccactgaccttctcaggctctcagcgtccatgttccct

SEQ ID NO: 28582 - DNA, 330 bp, Oryza sativa
  unsure (1)..(330): unsure at all n locations
gcgtgccgggaggaggggttctaaccctttctccttatcacagccttangtatgctgatgacgtgggtattagataattatgtggagccaaatntaataccatacctaattatattaccagtgtccgcttaccagagtttcgttggttggatgtataccgcttattgataggataaaatgtaaaactatatattgatatatgcattgtaaaaaaaattggccaactcttgatgaaattgtgtgattatgtgaaaatatatattaagaattaccttagtttcactatgaagataagtctcactaatatgctttgacaaaataaaattgcat

SEQ ID NO: 28583 - DNA, 456 bp, Oryza sativa
  unsure (1)..(456): unsure at all n locations
agcttcggcctcgggctcttcgttcgttcgtcgtcattggcgattccccctccctccggccgccaaaggtcagtgacgatttccctcccttctctccctctcctctgccatcgtccccgccgacgatccgtgcacgccacggcccaacacatacggccaaaccctaggtgcgattcctctccccctccctcctttgcagctatgcacccactcgatctaactnntacttttaattgtcactcggaaaggaagtttttttaaaaatttntttttctccctcaacaagtttccacatcccctatccaggagatntttgaaatttgtgatgtttactagtatttaccaatcccacactctctggtactaatccgaatggcgttgtcctatattattntacatgctctgngtttatctgagagttggtggtttgctaccctcagggttcaagttagtatt

SEQ ID NO: 28584 - DNA, 446 bp, Oryza sativa
  unsure (1)..(446): unsure at all n locations
taagcttaattccatggttaacacaatgcctctgcgttgtgccaactacatgatcatctctgggttcttccncatccagcaagcagcatcagatattgtcactgaaggtgttcttccactccatctagcagttgagcatgcctgtatgcataagtacatgttgaggatagtttatctgatgaccacaagaatctagagcatgacttanggtgaccatatcaacaagctcatccatctgctgngcctgcttgagatggtttggtgcctgaaatatgaccctacattntcatcaattattgttatactttggtcagcacatgacacaatagtaatgaagtttattctgttttattatgcctcaaccggttctcgaacaaatataatttgtttggtgagtgtaacttgtgagtatatatagtgtccttactctgcattgtaaaatctca

SEQ ID NO: 28585 - DNA, 452 bp, Oryza sativa
  unsure (1)..(452): unsure at all n locations
agcttctcctccgcactgccggctagctcttcctctcttcggtggagcttctnctcgcgcatgtccccatcctcacaacgccggcaaacctcgacggctggatccacatcagccaccgccggcgctcgtcgtcccctcgttgccttccgcaaggtgatgttgctcctgccgacgtggggaggagccgccggcatggggaagaggagaagctcgccggcggcggaagatgaaggggatggacggcgcgtgaagggtgtctgggcggtgtgacttgcgaagggacggagtgtcacggaatggaacaattcgcgtcctcagtggtatgttctgaannatgctgcgaatgggtggtaattcctgatggtgctgcgaatngaatggtatattctgaanattctcaagaataagaagatgaaatnggattgggatggagggcgaaccacangatgtgg

SEQ ID NO: 28586 - DNA, 262 bp, Oryza sativa
  unsure (1)..(262): unsure at all n locations
tatattntgagagtgctcattttcttcctttctgctccggcttggcccgtgcgccacaccttctcctccttcggtttctcttctcggcttctcgccttcttttccgccgtcgcgcgcgatccagttcagttcagatccacccccctctgcctctcctccggcgcaggtgcgctgattgccctctgctacactccgccgccgcccgcgtgatgcgaccacctgccctcgagcaggcgccaccattggacgatgagcccatcaa

SEQ ID NO: 28587 - DNA, 350 bp, Oryza sativa
aagcatagcatctgaactttacatgtcacatgccacttgagtggaagatcacgggacagtaatgggagcatttccttgacgagtgcagaaatctacccggcaatttgttgagcagatcaatctctgaaatgggcttccaaaggagagagggctcgacagatgtatatcggctatgttcaggcaaccacagtctggatggacgtatttatgtatatttgaactgaattcgttgacaggcatcaaccacagaaaaacatgcaatctcccagaatacattcaatcggatagctcagcctgcccggcaccgctgtcgggttcgtcgcacgacacgacacaccgtctcgctcttg

SEQ ID NO: 28588 - DNA, 291 bp, Oryza sativa
gagaacccatatatagacgttatactactctagccatattatgtagtcagcgctgctcgcatacttacacgagaagagtcatggtgcataaaatctctccgcgaaaccataacttgaagatggaacacaaataatactagcaaaatgcgtcgaaaatcagaggactgtgctcaataatattcttcacccaacactatatcaactactgtataggataatttactgtatacatcaccaatgaccctgatagcggtggcaatcaaataacactttagatccgacaatactccg

SEQ ID NO: 28589 - DNA, 441 bp, Oryza sativa
  unsure (1)..(441): unsure at all n locations
agcttgtacctgacaactattatttatgaggcttagtttacatcttttggaccaaattctcagtgtttggagtttatggttggtgtggacacaattggaccaaccatcttttgacatgttatgccatgtatttatttctctgtgtctgcattcaacataccaatttgaccaatatgtgcctttctatggaccaaattgaagctntgactcctactacagttttttcacttgaacatatatcatatgaaacatgggcatgatactttattttcctgtaagttnttcatatgccgatttaattacagtgttgaacagttccaactttttagataatttgctattagcaacccactagagaggccttgtgtgattgctaacgattcaccggtgcacatcaattatgcgtcatttacagggcatattcacctttgcttttacatc

SEQ ID NO: 28590 - DNA, 291 bp, Oryza sativa
  unsure (1)..(291): unsure at all n locations
tcttcaatacatgatgnngttgtgaggtgttangattaaagcattcttggtccctgtttcaactgccagcatgacgccagtctgtggttgcacactatctggatggnggacgattctttatgaatatagaatccctttcattcataggttacaggtctacatttatagaatatattcacttttctatacgcactactggatttcatataaattaatgcctccttgagactattgtttaattcaagcctttgttattacaaagaataagggcaattctctttgacttcatga

SEQ ID NO: 28591 - DNA, 441 bp, Oryza sativa
  unsure (1)..(441): unsure at all n locations
agcttcagnttggcttctttgatatcttgtttgcatctcccgcgtactgnacatgtaaatatgagtgcgcactgatcattgtatacaaatcattntttaggatgtattatgctctacagactactggagtacaatatatcagcttcgcttaagctatctctaaaggtttgttaagacttaagagtcgccacgggatttgtatcattgtatggaagaaagcgcatggtaccgangatgagaacggnggaacatcatgcggaaaactggtgtggaaggggcgcgtttgtgttgtttggtatgcgatggacaaggctgagctgcatcaccatcaaggcatcaagacctgcatttgttttcttttgtgncatcatccttgctggactcgtncttaatttgtattcccacgatgttatttgttcagttcttgctatattggacaaa

SEQ ID NO: 28592 - DNA, 374 bp, Oryza sativa
  unsure (1)..(374): unsure at all n locations
tgtcgccccagcatagcagctccgactctacccacaacagttattctatnagagtgatgaacacccaatgtagcaaggaacgaagccaaggtagtgaatgcctcgtcaaacaccctatgctggaagagcttctgagacatngcatgagtccaccaaatgctaccgttgtgcgcagagggttcttggtgttatgaggggtcaatgccaggacgacgcctncaaggaggggaacggcgccaaatggcgtcaccgtcgtcatgccagcccatggccatggcaaggctttcgccagtgatcctctatcaaaaccccacacaaccatcctgcacaacgacaatcaccggaccactacgccattccttcaacgcccaagc

SEQ ID NO: 28593 - DNA, 441 bp, Oryza sativa
agctttgggggttttgttgatagtcattatcaatcagtttcgaccatcaatattaccaaaatagaggagaactagtgatgcttgcaatgcatatatccgttagaataataaacttccactagtattaggtatactaacctcttgcagggaatgacactaaagtggaggagaatcgacatcaactcagacggtaaatcaatcggacgatgtcgagaaccagacttgtgtatgaatgggccaagaactcaggattgacacgatgagttgggccaaaattcacaagtctgcgaagaaaaacaacggagaaggccgccagccgaaattgggctggattgggccggccccaggttcggccgaacctccctcgcctccattggatccaggttttggctggacggttgagatgaagccccaatgacggttggagggtattaccgacca

SEQ ID NO: 28594 - DNA, 478 bp, Oryza sativa
ctgccgcatgcaagcttagcttagcgccttagccactcaaccacttcccatgctgaatatatttgcgattaacaaaacggaaaggggcactctgcaagtgactcttgcttttgtagtcctgtacatatgtgccgtgctactctaatctctgtctgatttcctttggattctggtgataatagtaggctttgtgctgcagattattcgcaagatgacgtcgggcggactgtggcaataatcgtaagcatcttggcagggctggcgatcctcgtggtgttcatctctttccttaaaaaatcatgtaagccccttgacttggaaatcctctctgttttgttggctttggagagaccactactagatgcataaatagtaggagaatctctgtatctgctcctctggcacgttatctttcattccatatgcaagcttcactaacctgatataaacatgatgtatcactctaaactgcaggcta

SEQ ID NO: 28595 - DNA, 184 bp, Oryza sativa
  unsure (1)..(184): unsure at all n locations
ttcacacataagcgtagctctgttccatatgtttgaatgatgcacctacatcgttaatggtatataccatgtgtgtgtcatatttcttaatgatgccaagtaaatctggcatggcatctntgccatttccctgtgtgttnctgatcttattatgagcatataataactgtatcaaaactatttc

SEQ ID NO: 28596 - DNA, 394 bp, Oryza sativa
  unsure (1)..(394): unsure at all n locations
ctaagctctgaccttctcagctcccaagagagagagatcagcattgatccacanttgctccggncgctcaatgagtgaaaatctaagctcttcttaccatgctaatgtatattctactaaaatntattatgcttctttgtccttgtgactttaagaggaccactggtccaacactgcgtttcacgaaagggatattggacccctgaagaggtataacatgtgaatgtcagcttgcgtttctgttgatgaagaatcccttcatgtgcacgttcatttatgatagttgagaatcttgttttttgttactgtgatacatctaatgtgttatctgggaagactgnacctggttaaaagataaaaaatttcacttcattggtgtgtattcctccttcaa

SEQ ID NO: 28597 - DNA, 379 bp, Oryza sativa
  unsure (1)..(379): unsure at all n locations
agcttttcaatntgctatgtgctgggtaganntttcttagaagcttcatgaaactttcgatcaaatctatccaagtgtggagcgctttaagaaagcaattttgaaattgtggtccgtatcttgtcaagaaaacgtagaagcaaagttgaattgaactgaaagcaaccattctttttggttgcatgtgtttgaattcaaccatgacaagtacatatttaaattcgaaccaaccaggggagagcaagaaactcaaacttctgagcgaatcaatcaatgtttgatttttgtaatctgatagaaacaaggcttttgtcatgagcccatcgaaattattgtttcttctttacgtttctgcaagatcatgcctatactttgacaa

SEQ ID NO: 28598 - DNA, 273 bp, Oryza sativa
  unsure (1)..(273): unsure at all n locations
tctcaagtatcanatctccaagaggaggaacctcgaaaatcaatgtgttgtatatatatcatgcacaacaccgngatcagcgaagatggtctgtaaaatgaatacataatccaagtctaatacggtaatatggagatacaatcttgacttagctaaaccatgatgttgtataagctatatatctacaaacagatacttctaaagtattatacaaccagaacctccatctacaaaatatatgcgtgttcttagttctataactattgcacattc

SEQ ID NO: 28599 - DNA, 330 bp, Oryza sativa
  unsure (1)..(330): unsure at all n locations
cttaagtcacctgcggcatgcaagcttncaagtgtccagttgcactgttaaccaagacagatggaaactcattgatttcttgtggatgtggattgttctccttggcacagggtgcttcaaagtcaataaccacaaaatattgaaattcctgaaattgtgcatcacgagggtaaccttgagggggcatcttgaatggaagatattgaactctactctcaatacgaaaactgtggtccctgtttatttgataaaattggttatctaaagtgaaggatgtggctgtcccggcatttggtaatcaccataaataaatggataggcataatattc

SEQ ID NO: 28600 - DNA, 425 bp, Oryza sativa
  unsure (1)..(425): unsure at all n locations
actatgaaactcagctatacaagccattatntagcaagaaacaagatggttcaataggagccaatgattatgtgcaaaaagnttcagttcagttacaagatggttcaatatgagccaatgaagaatcagtcattcagttgttatatactccttgtccttggtcctctggcagctctgcatatctgaactgaatatatgaaacggatactttgtcggtagaacagctgcagataatctgttagtcaaaaattacgttctactaattatcaagttcatatctggaggttgacctgtccttttcgtccttgtccnnccaaaaatattatagatcaaaggcagcttagccgtggaatcaactgaaaacacttggtgtactggcaatgaattgggtcatggttaacacaagcatattacacatattatct

SEQ ID NO: 28601 - DNA, 461 bp, Oryza sativa
  unsure (1)..(461): unsure at all n locations
agcttcggatgtgcatcgactacaccgaccttaacatggcatgtcctaatgatccttaccccctgcctcgcatagatcagatcgtcgactccactgcggngtgcgaccttttgtgttttctagatgcatactcaggttaccatcagattcgcatggctagggaggatgaggagaaaactgcgttcattacccccataggaacctattgttatacatcaatgcccttcgggttaaagaatgcaggtcctacttttcaacgtactactcgaatttctttgggtagccaaataggacgtaatgttgaggcttatgtcgatgacttggttgtaaaaacgcgcaaccaagaaactntactttcagatctagcggaaacttttgagaacctccgctccgcccgcataaagctgaaccccgataagtgtgtgtttggtgtacctgcgggcaagcttctcgggttcttg

SEQ ID NO: 28602 - DNA, 266 bp, Oryza sativa
aagatagcacagtgatatttcaccacatagcatatggaacacagatgggcgctggtttgtcaaactcctatgtaaatacatacatttgataactaagtgcatgtcaacaataagatacatggaagatgcggaaaatagaagacacatgagaatcataatccaaaatatcaaaataataggccaaaagtacatgtgttgcgtatctttgtaggccaggtttgttattccacaaatatattatgccttacaagtaactagtaaacata

SEQ ID NO: 28603 - DNA, 472 bp, Oryza sativa
  unsure (1)..(472): unsure at all n locations
gcagctgaggcatgcgagctaagcattcagcctctcccataggaagagatgatctctatcagcacaatcgaaaggagggccgaactgttctagaagcataatattcggtttacaataatttcccatcacggacttgattattttatcgtcttgcaagaagttcacatcatcaacaactaaggggaatttcggtgtagatcaaatgttntacaagaatattcactagtcgtgtntatgcatgatttctaatcgaagggactaggttatcaagaattcaccaaagcatgatgattacgaggaaccgaaagcatttgatggatatcggacaggacgtaccttccattaattgtcgccggcggtggtatcagggctgggtcccggaggacaagtcatcgtcgacggcgagtaacctgtcgatgtcgaagaccgtcttgattgggtcgacggcgagctcgcctgggcctggctcgcg

SEQ ID NO: 28604 - DNA, 290 bp, Oryza sativa
tgactgaacctctcatttaagtatgtagtgagccatctgcactattctacactcaataaaggaagtgctagatgatattccactacaagcataaatggaagtggtggcgctgcatacattaaaacattataataaattatagcagaactatgccaattccgatagctctttttaaagcacaggatatgggaaagaaacatgaggaatgcaccaacttatcaaggcatatatttacatgggagactacatgccagttattcaggtagacataacctcttatggccataatt

SEQ ID NO: 28605 - DNA, 397 bp, Oryza sativa
  unsure (1)..(397): unsure at all n locations
agcttattccgaatgagattntctcacaaatttcctttcactctgtttcatcaggntacatgtcaccgtatctttatatacaagacgagaaaccattccatgctagtgctgtttgtgctgcagcaatacattcaattactgttccatttagattgcaacgaacgggcccgagttcagacttagcacattcatctggtaatcttgacattggtgaacttctgcacattttatctgatcaaggtcggcagaatatggttactgctctggatgtagcgatgcctgccccttctttgacaggtacacaacataacatatgccctactgttataccaacattggatggaaatntaatcttgcttgctaattgcacacnatctaattgcagatagagatgcta

SEQ ID NO: 28606 - DNA, 285 bp, Oryza sativa
  unsure (1)..(285): unsure at all n locations
tactcaagctcctagtgtnacaatcgagactccagctgctgagcaagtgtactgtgtctcatctgcctcaccttctaagcagaccgcatggcagcaccatcatcgtattcccaagtcatcgtgttacccccaatctagctaacactccatagacggagtgccactaacccacttgtggctcgtcttacggctatatatgctctcgcaatcaccgtgacagtggtggcttgccggacttgggcactcacatacattgttgttgtcaacacacaaacactcgacgca

SEQ ID NO: 28607 - DNA, 448 bp, Oryza sativa
agcttcggcgcctcagcttcagtgggatgatctgctgtgtctggcttgctgctcgcactgtcgccgtcgtcgtctgagtcactttccgacgaggaggaggacgaaccgctgctggaagaggaggaagagccactgctgctcgagcgaggagaatctgggaacttgttgactgatacaggggagacgccgccagtgacgtcgatcaactcgtcatcctcttgttgcttcggaagcggcgagaactcatcgatcaggggagagacgccgccgcagactgtgacctgctgctgctccaatggcttcgctgcagcttcagtgggaagttcagagttatcagggcggctgctcgcactgtctccgtcatcgttagagtcgctgcctgaagaggagcaaccgctgcaggatgatccagatgagccaccgctcgaagatgaagatgatgacgatc

SEQ ID NO: 28608 - DNA, 297 bp, Oryza sativa
attgcacaggaactaaatctttacataattaatcgtctgaattgttcactatgaaatatgcctaactgtcaatcgatacgtttcccttatacgtacatttgagcacgccgcacttctaagtaatgtattccatacgaaagtacaaccagatggtacaatgtttaaagctatatagtatagtagtaatattttatatgcgttccaaaatgacacatactattagtacattatgaaactaagggcttggttactctactaccattctcaaccttaccacagtttgatattgctatattt

SEQ ID NO: 28609 - DNA, 403 bp, Oryza sativa
  unsure (1)..(403): unsure at all n locations
agcttctggcccagtaggtccataaaactcactctgttaatctgtattattgaaccagacaaaacaacaagcgataaaaccaaagacagataaagcgcctaaactataagacaagtaagcttctccagaccatacaaatgcacggcgagcccatgcgaagggtttggttaagatatgccaaattccgccaaatacacaaatgaaacccaaccatacatgtcccgcaattatatcttctaaatcatccacactaacaatccaaccctctcccccaaaaggggattntagtaaataaccaaatataacaccggggctaagggtcaaaatggtaatttttcttacatctcctcccccaggagcccaggtatcatatataccgncaaaataaagagctttgagtact

SEQ ID NO: 28610 - DNA, 419 bp, Oryza sativa
  unsure (1)..(419): unsure at all n locations
agcttcttcaaacaagggcattctagntaccacctattgtttctaaatccatcttggttttcatggaagaggttttctaaaatggctttggaattgctataggtataggtggcaccaggatacgccaggcgaattcatctgtagctatggttcagggtaagttcacctttctttaaatgacaaaaaggatgcgtatcttctgtaaaagggatgttatgcgattttcctgcaagtattaacatgtgatattcttcanaaatatttattacacgtgctagttttaagaaattgcatttctcgtgaacagctgggcagacagccagtaggacttgcatactttcacctagttgcattacanaatacatgtgcagctctttgtttatatgagtngcatatattccatgtatctntgacttggc

SEQ ID NO: 28611 - DNA, 259 bp, Oryza sativa
tttcttaaaaaaaactatgtgaaatcattcacggctcttgaataaatgtatattcaaagagaagtgagcttatgtgcaactattcagaagcaatcataaacacatgaatgaagcataacatgtttattatgttttgtataggacaacagaagcctagatgggcttctgtgaactgatagcatgatacagccgaaaagtgtcaatactacaaggaataatggcaactattaaattcacctaccttcttaaacactgcggc

SEQ ID NO: 28612 - DNA, 442 bp, Oryza sativa
agcttcgtcgacaacagcgtcaaccccggcatcaactcttgagtttctacttcaacaatgctggtgtggactcaagtcggcgaaatcgtcttcctggtttacaccatggtgccgatctcaactggtccatcaatgaccagaagcgagaacgccgtggttacaaccctggacggctccatgtcgaaggatcctcccgcagaagtggagaacggaacatcgacgacatccgagcctgagaaggatcctaatgcggccaaatcttgtccttccgacgagaatcacgagccgacaaggacaacttccgaggcgacaaagtcctggtgtcatatccacaaaaccaggaaacacaccttacaagcttgctgggtatttctcgacgcctgcaaagagcgtggaattcaacgtacttctctaacccgtgatgtctattgtcctattcaca

SEQ ID NO: 28613 - DNA, 338 bp, Oryza sativa
  unsure (1)..(338): unsure at all n locations
cagctgtcataatataactactatagatagattttacggtatatgtaagttgcatccaaaataaatgaagcaacgcgaatatagttttagggaaagactnttatacttctattcttagttgttcaaaaactaagatganaaataaacaaaccaatttttttttaaaaaaatccaaaatcaactctaaaagtaaaattcaaatctagctagcaattcagtttatatgctaacgagcagccaatggcaatcaatatcattcaatatactccctagattcattaggcaatcgcatatcattcaatgaatctaatgaggtctagattcattaatatctatat

SEQ ID NO: 28614 - DNA, 443 bp, Oryza sativa
  unsure (1)..(443): unsure at all n locations
agcttcaatgaactaatgatgcccattgcacagttattagtaatactagcagaaatggaacgacaccaacgccgctggtaattccgctcttttccctgtaagcactcatagcaattcaatctagctacaaaacctcacttgaaactctccaagaaaccaaatcaagcagccaaattgtcaccagctaagaagtagtacaaggaacagaagagatcagaaaggggaaaagtgcaagaagaaacaagaaaccatcgcacctcgatcgatcgacaaattggaagccaacccgatcaaatcgcacccaggattgagtgagtgatatagggcaccgaactcaacaagccttacttgaatccgacgcanaggaggagagagcaccggagtccgaaaatggaggtcgcggctgcgcctccgcgtctncgccaagggaaaggaacgggtcg

SEQ ID NO: 28615 - DNA, 219 bp, Oryza sativa
atgataatagagaataagtcttgcgcaagggtactaaaggttggtagacacgcagtatggacatggttatgcggtagtttgggatctgtcttggtcttttggttatccaacaaggcagtcttatttagaaactgatcataaagagatcacaaattcttgcagtggaatcatggaatagaatatataatctaataatgcaactaacaaatagaatacata

SEQ ID NO: 28616 - DNA, 366 bp, Oryza sativa
ctgcacgcatgcaagctattctgcaacttccttcattgatggcctattcttaccacacattttcaagcatctgttggccaactcagcaatctcttcaagaatctccatattctcctcgctcttaatttgatcatccaagatttcctcaagcttgttctccttgacagcagaaaggaacctcacagataggcttttctcatcctctatcccgtcaaaatataatggtttctttctcgtgagtagctctaggacaacaaccccaaaactgtatacatcactcttatccggtaatttccatgtttgcatgtactctgggtcaaggtacccacgagttccctgcacaaacgtgacgaactgtgcatcatc

SEQ ID NO: 28617 - DNA, 174 bp, Oryza sativa
  unsure (1)..(174): unsure at all n locations
gacactcagatactaagcttgacatgaacgtncgtgtagtgtgtcaccgcacgctagctagttctctcttatactatcacggcgcagcctgctcagttgtctgacgcgcgcggtccggctgcgagagatgagacagccacctaactgtgatatgattaccaactgtggccaagt

SEQ ID NO: 28618 - DNA, 433 bp, Oryza sativa
  unsure (1)..(433): unsure at all n locations
agctntagctgaattataagaggctctatngtactatattgtatactatattangaaaagagtatagtagaagaagtcggaagaattctatagttgtcggtaatcttcttatatttcttttattctggttattactctgaattcaatataatattcttggtgagtattttagatttatcttgtgagaattatctcttggttagttcctaagtagcatacgggattattgttcactataatcaactaaaatatagtgattgctttcgtgttttataaacactaaagtagatattaatttcatagacgtggtgtttaggtagttgttatccagtaattgctgcatatcccacagtacgtttgaggaatgtgtagacgtggtgacagccctcaagatcacttaatccttcctgtccgggacgtagtagacgacatc

SEQ ID NO: 28619 - DNA, 255 bp, Oryza sativa
  unsure (1)..(255): unsure at all n locations
ctgcttctgctngctgctagctcccgtagattataatataacatcgcctatataatccctctattgtataatataaatcattctcacacttctcatactcatcataatattaaagaatctagatatatatctatctatggtcattaccatcaatataaatgtggagaatgcttcaatgatttataatgtgaaacggagagagttataatcttattccgattaatcattatacgatgggtcggttagctcacactc

SEQ ID NO: 28620 - DNA, 462 bp, Oryza sativa
  unsure (1)..(462): unsure at all n locations
agctntagtagttatcgacttcatccgttagagagacatttatgactatgtttaacggtgttatcgtattatccggtagaagtggtatgtttagactatttatacatagatgtgaaaataagggatggacatcgagttaagcagtgtagatgattctgtagtgtattaataatatataatttattttagtggtattaatgcagtttcatttattaaaaatgcacatagcatttaaaacaataacaataggggagtttatatatgaccacgacaaaatgatttttatttaaatatgagagatattcttattcttatatttagtagtatattaaaatataccatctattntacagcanatatatttctttcttattgtaagataatttacattcccttacagtggatataatgatatatgatnntatgtactattctttttcttgaacaacaaataagatgtca

SEQ ID NO: 28621 - DNA, 403 bp, Oryza sativa
  unsure (1)..(403): unsure at all n locations
agttttcaataaaattatacatgaacacatatatatgctttatatatgcgtctaaatttatatatgcatgctaacgaatatatagatcaaaaatagaacggctaatatggnggtggcggcgacnncccccccccccnccccccctccncccccccccccacncccacccacccccccccctcccctcccctcacctcatctcccccctcccctcacactctcccccttctccctcccccctccactcccctccccccccccccccctcctcccccctccctttccctcctcccctccccctccccccccctcccccccctccactccctccctcctcttcaccccatcactcccccctcccctctccctcccctctccccttctcccaccctctccccccccc

SEQ ID NO: 28622 - DNA, 269 bp, Oryza sativa
  unsure (1)..(269): unsure at all n locations
cncaaacagttatgtccaatgtgcggactgtctagaccatgcatctttctattttaccagcaccaatatgttcgatggtgcgtgtcacgcccatatattcccgcatagtatgtcaagcaggatgagcactataatcccggtccatgaccggncggtgtacacgaacgacaatgttgatattttgatccacatcctacaaatatcataataattttacatatatgcagtgggataaatcaaagacaacaggagctaaccttgactttact

SEQ ID NO: 28623 - DNA, 456 bp, Oryza sativa
  unsure (1)..(456): unsure at all n locations
agctnggacaaaggtttacatcggccgatccattggttgaagtagacataggtgatggaaccaaaccaaggccgacttttgtgaacaaaaatatgagagccgattataaggttaagataatcgagctacttaaagaatatgttgattgctttgcatgggagtaccatgagatgccgggtcttagccgtgagctggttgagcatcggcttccaattaaaccgggttttaggccttataagcaaccgcctcgtcgttttaatcctttgctatatgaccgagtcaaagaggagattgatcggttgttgaaggcagggtttattangccatgtcgttatgcggagtgggtttctagcatagtcccggtggagaagaaggggagtggtaagattagagtttgcatagattttagagaattaaataaagccactcccaaagatgaatatcctatgcctatag

SEQ ID NO: 28624 - DNA, 399 bp, Oryza sativa
  unsure (1)..(399): unsure at all n locations
agcttggnttactttatntactttccttctactttgatttctaaactttattcaaaataatccaaaaacttgtgctattaattggatagatgtcttaactccctcctttcacttgtctttagatgccgagttacaagcctgagtacctgtttggtgttgagggttttgtccaagagttgcgtacgatgtcctttgtcattggatttgggactgcccctttttatgcccagattcgtcatgatcgtcatgaagaanagtgccgagtcaaagtcaccttgaacagcaatagtgaagaggtcccctcagcgatgttcgaagctggaggaagaaactacatccatgcatgtcaggaagtggcaggatcgccatatgagagctccgtgatcactacagtgatca

SEQ ID NO: 28625 - DNA, 435 bp, Oryza sativa
  unsure (1)..(435): unsure at all n locations
agcctaagcgccgacgncancatatatgccggcgctgtcaagcggaccccacacgtcatcgggtcaagggaatcggtccaccgaggaccgtgaccacggagtggcgcggctgagcacgggcacggctcatgccggcccggctgatcgacggctcgcggcggcgcggactcctgcggcgacggccggtgcatgtgagaaagccgcagtgaggcgcggcaaggggatccgggcggcccaggcaagcggggcgagggcaagccggccggccgacctaacggtggccgcgcacggcccggagagcgccggcgagcggcacacgcgcggcatcgcgcacggtagacagaggatggaggcaaagaggaagaggaagaactcaccaaagacgtggcgacgatgggcggtgaaagactgaggagctcggcgtctgtgctcctc

SEQ ID NO: 28626 - DNA, 250 bp, Oryza sativa
  unsure (1)..(250): unsure at all n locations
cgtggcttaagagaacccaaagatagtatcgttcgccttcagctagatgggcttgaacgatattgccaacttgatagatagcaggtcattacctctttcgcccaaactttacattcttttctgactgccaagtataatgctctcggaaatcaccggacaatatatctcgtgttccttgtgaacctattcgctacgaagtatgcagtcaacattgaccttttaacaccatcatgntcaagcacttcatgaa

SEQ ID NO: 28627 - DNA, 449 bp, Oryza sativa
  unsure (1)..(449): unsure at all n locations
agctcgaactaggttcagaacctaatgctgcactatatagttgatctctagtcaaaccagcctacaaaagaacaaatgtagtattattctatcagaactctcaatgtcccaaaatatagcaacttcacctactcccccatcccaactaatcacaaccatttctcatctaatttctctacatgtttcctcatctcaactaatcgcaaccattcccaatttaatttcacctctttccttaatccccaagaataccagaagttcttatatcttggatcagagtacaatttatagaacaaaaaatatgttcagaccaaattcaatcaccaagagaataagtataacataataactaacaatacttatcacaatgatttgaanagataaaaataataaaaaaaaccactaacttttatgtcttgaagctcatccttcatggtctcatatgtgct

SEQ ID NO: 28628 - DNA, 423 bp, Oryza sativa
  unsure (1)..(423): unsure at all n locations
agctttntcctgacaccattactcacattagcacacgtgttgcatgaacaatgtaagtacatgtaaatcttttgattatttacctgctcttgtaatggatctatgcacattacgtgtagattttttccagaataatcagctcagtgtatgaatttttccaggcagttttgtcagcttactattgttgcctctatttctagtgacccaagttgacctgtcattgtcaaatcacttaaattgcatcttgcttagtctgtgataggatcattttacttatcggttgggatgttatttctcctgcaggggttacttagcaccagagtatgccttggtgggacagttaaccaagaaagcagatatatantagtttggngtccttgtccttgaagtgataagtggtgaaagcagtagcaaatcgacttg

SEQ ID NO: 28629 - DNA, 348 bp, Oryza sativa
  unsure (1)..(348): unsure at all n locations
caagcgacgcactgtgctagactgcaagagcatattgggtctcacgagggatgagatcacagccgcataaggccatggtggctcaagctctcaaagatcacaaagaatgtgttatatgtgatgaactcatgatccacacacaaccactacgaataatattttcgtgaatcgggcacttgagcattttggtttgttccctaacataagtttaaatataaactatatattatacttgaaatatcgagtgaatggataattcggatgtctatccntccgatagctagaaatatcttgcatgtatcggtcagctatggtctatggctactagtcacgcataaccatcagcac

SEQ ID NO: 28630 - DNA, 441 bp, Oryza sativa
  unsure (1)..(441): unsure at all n locations
agcttggttgctcccagtgccccgtctctatccatttcctagcgctctcactttctagccaaaatgcttaagtcagagttacagactacccacgactggttccaaaaaccaaaacggtgtgattttgttgctgcttgtgttatccgaattgcacacgggttggatcaaggtatagcagatgcgatgggcatgaatattctntttctactgatcaagtggccagaagagggcctgcgctctgggctatgggagttcccatctgttcttgtaaatgaagagactggtgcattgaacaggagaaagaggtggacaaatgtgaaatggagatccagtggtgatcctcaaggaagatcttggtcaacatgttcatattgtctcacacaatcgcttgacgatgttngttgagctgatgattctgaatctgaaagtaatcatctgttg

SEQ ID NO: 28631 - DNA, 360 bp, Oryza sativa
  unsure (1)..(360): unsure at all n locations
acactatacaaatactcagctngatcatgatcctttcccggtgaataccaataatttcaacaatatgtatgtgttgattggtcaaggagtggtcattggagagcctaagccaaagatgatggtgccaaagaatccggatgttgtgtgttggaaggagaatatgagcgaagtttcaagttctaaagctcctaagaggactaaggtgaccttcgatatgcttttgaataagtatgagaagcaaggtggtgagaaagctcgcaacaaaaggagaagaccaagatcacctcctatggagcgatttggtcattcaccaagacagtctgaatcacctacatnatcatcgtctcaaaacatgtcatg

SEQ ID NO: 28632 - DNA, 447 bp, Oryza sativa
  unsure (1)..(447): unsure at all n locations
agcttgaggctggagagaagatgcaatntaatataatctagcgatttacttggtatgatggcagatttcgagttgcaccaatttttcaaattttttttactccaacgctatgtttaaagcatatggcccgggggcattctcatctatttgaatagattctctctacaattgagatgaaagtatcctctagcaaattactaatttcctaggatgccactactacctaaaccctcatacgggacaacttaatggtactggtttatctaanaccgacacttatgatcccttcccacccctcgaacgtgtctacaattaanagccaacatctttgatccctcataagtgccggttcattaaaaaaccagcactaataaaaatcaacacctataactctgctataattgtcgattaatagaanaccggcatcaataattattagtattggtg

SEQ ID NO: 28633 - DNA, 439 bp, Oryza sativa
  unsure (1)..(439): unsure at all n locations
agcttgatttcacgtgacaaatatagcatttacctgattcgggatcttgtttacattcttacagatgactagattctcgcaaactatcaaatactataaattagcaccctttttttatcaactagcattgcttgtgttagcttgcaggatcaaataagatcgactgtttgaactttctgtatgacaaattgatgaaatattgtcataaaccacgtgtttatgacaaacagttcatcgattaatgtcttgttcacggcattcctcaactgtgtgtgctggctgatgcgtgctaaatctcatataagatggngatttgttcgaggttagagaacctgattagtgataaaccgataactnggggcagccgtccaagcctattgttacagagtactactgctgatggtgagcctgaaaaacacggtagtacagtaccaacgtc

SEQ ID NO: 28634 - DNA, 374 bp, Oryza sativa
  unsure (1)..(374): unsure at all n locations
agctntgcagataaccaaaacaaaactggactaataagttggttagatcattaccaagtgcaggtaaggcctcgagtcacgttggtatcggccagtcaattgctgacaaacttcttttgccctctgccattctctctacaggattaaacatagtatcactactaactaggtgattcagatcacttacagagcttggaagttagagttgagacaagaaaagtttaagagtgaatccggattactttgcttaaactgagttaatactggatcatagaaatgtnacctggtgatcagtacgtcagtgagcagcaagcccaggtcaagcttcctctcggaatcgcgcgacgccgaccactccttctgcagcaagctcg

SEQ ID NO: 28635 - DNA, 432 bp, Oryza sativa
  unsure (1)..(432): unsure at all n locations
agcttgtcgttntatttttgactgaccaaccttatatcagtaggtcattctaaaatttatttgactgaaccagcggacaacgtggatgcttaattatgggggcttcaattaattaaacacgctgaagagccgagatttactaattgcatcataacctcgggtcgcgtttttttggttttattgtgaattgagggagatggcacagctaccaatgtgactaanagcagtgagtccatttccttattgaatgactagcanaatgatgtttgggtacatgtcttcaaggtctcgaggttagttatctgtactgtactccgatccgccagccacgctgatcgaacacgtgactatgcactcgcgcgcaatcttcgcttggcaagaagcaagctagctaggcatcacctaatgacttccttcttgggtatattcggg

SEQ ID NO: 28636 - DNA, 266 bp, Oryza sativa
  unsure (1)..(266): unsure at all n locations
gcggtgaggcggtgcgtgcagaggaggcacttggcgatttctgttatccatctccttcattgatgacgccttgctcttgctagctgccatcttgtgaaaagacagnggggaatcctatctgcttctcctaactgccgcataatggaggagtggagaaatatacacagaagagcgaacgacgaaaaggaatggacaactggcgggcctcacatgcggacttagtcgggtagactatgttaatgtgccccatgataacaactactctc

SEQ ID NO: 28637 - DNA, 321 bp, Oryza sativa
agcttgcctccctcttccgctagctttccttccaccgtcaccgtactctccgcatcgcgctaggctggagccatggaatccagccgccgccgccggcaagcaacccggggcagtcacgctcacgccgcggggatggccgcgccgcgccaccacgattccttccgtgtcgccgcctccgcctccgcccccctataacccgcggagctgcacgctgcgtgcggatggtccggaggaggggcgacgacgacgccgcggcgcgcgagctgaggggaggaggatgaggagaatggaggagtcgtctatcacgcacacgcccacctg

SEQ ID NO: 28638 - DNA, 431 bp, Oryza sativa
  unsure (1)..(431): unsure at all n locations
agctttcctggcactgttctgactcacacaaacttctttttcttcttgagtagatgggtcattggtcgagctatcttaaagaatccttcaatgaaccttcgatagtatccggccaaacctagaaaactccgaatctcagtcacagatttgggtgccttccattccgtaacggcctcaactttggcaggatccactgctactccaccggctgagaatacgtggcctagaaaagtgacttcttttaaccagaactcacatttactaaactttgcatataatttatgcttccgaagtttctcgagtaccaactgcaagtgctccgcatgctcttcctcgtctttggagtagattaagatatcatcgatgaatactaccacaaanttgtccaagtaatccatgaacactttgttcataagattcataaagtatgc

SEQ ID NO: 28639 - DNA, 348 bp, Oryza sativa
  unsure (1)..(348): unsure at all n locations
ccaccaaattcgggaaggattggtgtggttcctctacgcctaagacaccagaatatcgaaccatgaacgaggaaaggcatgagataaatattggctaataattgtgaagccccaattcttgactggaagggacaccaaatgcctctgcccttccttcttatctattcaagagatggaagggcagagctcttttttggttttttcatcttttcatcaaagaggtgaacaatgaagaaagatggcaagtgcctgatcgatttgatcatgtcgtgtaggaacaagggtcacatctgtcgttcgttaggatgccttanctgcatacataacttgcacttcacttgacaccta

SEQ ID NO: 28640 - DNA, 418 bp, Oryza sativa
  unsure (1)..(418): unsure at all n locations
agctntgccgtgacgcgtctcatgtgttgggacgagtctcatgtgttgggcagtcgcggagcgcgggtaaagtgtacacccactgcagtgtgagtaaaacaaatctattcgaatagccgtgctcgcggttattgagcaccgggacatgtattacacttggctagactctaaattcttaacttgtgtgggatgggatattgcatgatgattnttatgctngtggagccacttcctgagaggagggaaggtggacgtcctcaaaaaaccatgacgactcaatggtgggaagctatccttgagatcacaatggatggtggacataaccgtcgttgtttaaatgtgaacactggtactataatttgatcagtcaatgctaggtcttaagcttgtgaaaagaattacaaaactggctttgcgc

SEQ ID NO: 28641 - DNA, 453 bp, Oryza sativa
  unsure (1)..(453): unsure at all n locations
agcttaacatgtaaagatgccacatcatcatccactatcaagatgctacatcatcatccactaacaatcatcatatttaaacatcatacaaacatgctatatctttatagttnttataatttaagagcttttcaaatacaaacatgttaaattatcatccaacataattcacataatgtttcaatgtatatctttattatgttttatgatatcctatatacttatatagttcatcctcacttagttagtgcttaaatgattaatctattgtccaaattatctttctcctttnttcctctaattaaatcatatcacatcaattgtttttagcctttagatgaataatttacggtccaaactatctccctacttttcttcttccataaagtcataccaccttactttntacgtttgaatcatcattctacatactatntaaatntaaattatcat

SEQ ID NO: 28642 - DNA, 391 bp, Oryza sativa
  unsure (1)..(391): unsure at all n locations
agaataaaaataatatttcagtcgatatatctctccatatactgcanactcaaattgttgaagaatcggtgatgtgtttcttacccaacaaaatatgaaagctatggatcgacggcaacctgatgtcatggtgactgagaccccagcaagccagcacccttgaccacataggaaagattccctactattgactgcatttacaccagaaaggctatatatatgaatttatgatngcaattnttttttctataccacacatacaaattttcatcatatattttcgcttaacaaaaatgatatatgagcaaaagacgacgctttatatggaacatatctccagaaactctgcagattggaacaacaaaantgggaaaattgacctgatctcaat

SEQ ID NO: 28643 - DNA, 419 bp, Oryza sativa
  unsure (1)..(419): unsure at all n locations
agctttgaattggagtttttcttaatcaagtgtttgttagtaaacttttntctgttcccatattttgattttttaggtacaccaaataaaataaattttttgaggggtccaaataaaataaatttaccattgtgattntatttccaggactatcgcagtacatttcactaacccattccatgtgagcacacgcgtagtagataagtgctatgatggaactctactactgcaggtacaactctctgcacaattgttcactgagacacttcatgtattgatagtcattcagtcttcttggattcttgaatcccaattngtatttttcttggtgtccaggtgatattgcattctgaagtgaaggccactctgcatgtaaaggatatatggttggatctgcaatctggatttgaacacacagg

SEQ ID NO: 28644 - DNA, 375 bp, Oryza sativa
  unsure (1)..(375): unsure at all n locations
ccgagatattcatgctaatggttcgacatggaagcggttactccaaagaagagactgacagcttgatggaatcgctgtccgaggctgcagntgaaatgtctgatcttgagaacttcatgcttatatctcgtaataacagagacggcacanagactctngatttcattgtgaaagaagcaaaggaggaactcatgcagagagagagagagctccagaaacgggagaggtctaacttctgtaacgganacccgacttattattgataaaatcataaccattcagcctgtattatggtaacttgcatccttattgtaaaatgtcagcagcctgaagaacatgtaaggcgcgcagttgtcggataatgaacataacact

SEQ ID NO: 28645 - DNA, 437 bp, Oryza sativa
  unsure (1)..(437): unsure at all n locations
agcttcaattgcaagtccactaccaacacanattttggccctttgctccgcatcaatgttgtagagctgcttcgacacaagggaaagagaattcagattgtttgtccttgcaatcctcttgagaatatttatgatcagttcctccgagagatgatccattgagaaatgcagcaatgctagttatgtaatttcaaagggtagcaggtgtccagagccctggataaaattgatgaaatcgtaatgaatcacatgaatacaggatggaaaattaatgtgccatatttatactgatgaaatttaaaactttttgcattttgctgtacgtgtntgtgcttcacgattcgatttaaagaagtaacctatctattcatccacganatgattaattaaggtagaaactctgataatcagttaacatagagcaactnttcaaacct

SEQ ID NO: 28646 - DNA, 272 bp, Oryza sativa
cacctaagttcccgtgacttgctgagtactaaagtactcacccttgctctatataaatatatatagtttctccgccctgaagttgaagatgaggtgaagtgaagattatggtttcgtcctggttcccagccgtcgcctgtggtgttgggtgttagaccgttggttccgctgctgcttgccgttgtgagtgtcgcctcgtccgtgtcgtcggttgtattctcgggctgtctgagctgcaacctaagctaaggaaataagtcctctattatttt

SEQ ID NO: 28647 - DNA, 439 bp, Oryza sativa
  unsure (1)..(439): unsure at all n locations
ctgcacgcatgcaagcttgtatcactgggggcgacatgggcgaagaagaagttgagagtattctagaggttgtgaaaaagaacatcgatatcttcgcctagagccctgacgaggtggggggtgtcccggcggatctcatcatgcatcacctagcagtcaaatcgaacattaagccaagaaaacaaaagttgcgcaagatgtctgccgatcgccaagaagcggcgaaagccgaagtataaaaatggcttaaggaaggggttatccaagagattgaccatccagagtggttggcgaatccagtgctggtgcggaagtcaaacggcaaatggcgcatgtgtgtcgatttcacagacctgaacaaagcatgtccaaaagacaactntcccttgccgcgaatcgaccagctcgtggattcaacaactggatgcgagctcatgag

SEQ ID NO: 28648 - DNA, 457 bp, Oryza sativa
  unsure (1)..(457): unsure at all n locations
agcttactctaaatagaggttgaacagcaaanatctttgtatgtccgtactgtttggcttgcatgtaatactgcagattgtagcaccttagtagacatgttaaatagatgtccgctgtctgtcagcattatctattaatttcttctgatctttcttcttctataggtacacgagagcaaaagagaaaggagaagaggatagctaaagaaagggactaaatgacaacgttgtccaactactcatcattgtaggcactacattgttactgttgggaaacaagttttgggggtgttggatatcattnttgcaatngaagatagggttataatcaactgtaccagcatcatatctgagcatcaactgtggcatgcatgatacccaccagtntattgatctgatggttgctggatgcatgaaatattttcttcaaccacatacacctgattgattgatctta

SEQ ID NO: 28649 - DNA, 200 bp, Oryza sativa
  unsure (1)..(200): unsure at all n locations
gggtgcacggaggacaccncatcaaatggttgtacatggaagagatgatgattggaccttgccacatgtggagagctaatctattgtcacccgcaagtcgacattctgntggaagctcacatacattgaccttgcatctaagacatatgtgaccttgagctcccgacttttattttctgttacaagagcacacggagata

SEQ ID NO: 28650 - DNA, 461 bp, Oryza sativa
  unsure (1)..(461): unsure at all n locations
agcttattgccaacagtataccaccaaaaagatgtatatccagtacacttattactatcagccttaatcatntcagcattagagaaatcatactcgtcaaattgtttgtctactgctagctcccaatcaacataagcggcggaatcatacttaccatcaaaaactggcaaaatagattctacccttgtaagatcattatcatgtacctcatcagcatcatgttgatcactcctcatgtcgcgacgaagatgtcgatatggagcacagtcatccccaattgtcttgcgtatccctgccattgttagtagaaaacaagatacatgcacaaaaatatgtacggctctatcaactactaggtagtggtagctcgaatatcacacacacttaagctgttaaccaagctcttacaagttcttaccaaagcatgcggaatggtgacatacaccgactcaatcaagcat

SEQ ID NO: 28651 - DNA, 105 bp, Oryza sativa
tattgggcgataagatggtcaattaaaaataattgagcctgccacaagtttgagcttaataaaccaccatatgctgtttaccgactataaggataggattctcaa

SEQ ID NO: 28652 - DNA, 458 bp, Oryza sativa
  unsure (1)..(458): unsure at all n locations
agcttctagccgatgtgagatatcttcaagtgttcttttcacatcgtcagatagaggagctagaagcttgcttgaagtatcttcttctgcctcatcaaggtaatctttgatgtcaaaagagaagagatcggctagaacctgcaggtatagtttcaagaangttgagagctaagtcaatatagccgatctaagttcttgaatcanaaggaaacttactgggatagtangagcagctggttgttcttcctcctcgatgtgatgactccccacagccgacggagtctagttacttgacgattgctgtacaggaggtgaaagaggaggaggaggctgtanaatagacaagtgttatagagagtncggtgagattgattaagtaaaagaattaaagatatcttactggtggagccgacttgataactgtcgctgctggtttcttcttcacagcagttttcttc

SEQ ID NO: 28653 - DNA, 187 bp, Oryza sativa
  unsure (1)..(187): unsure at all n locations
actctttctatgcttccggactcctgatntctactctattcctattccaccagctagatactactatactatacctgagagaaatgatagagctatcgcttgaggtgtgtgagtgaactgagaacgtgaagtcctcttatatctgaactatgatggttgtgacggctagaatgggctgtaataccct

SEQ ID NO: 28654 - DNA, 465 bp, Oryza sativa
  unsure (1)..(465): unsure at all n locations
taagtcacctgcggctgcaagctttgcgtgtcgtgganaaaaatcgctaatgatcggcggcctgtgtcttgtctgcaattctgtatgcgatagaatctgccactagcttctagatatagcaaattgcatatgaaagaatttgcaactagctgacttacatatagcaaactagctaaaagctatgcgaagtgtctgcatgtaaaataatgcgctgatacacatcgtatccatgacaatctgatcgatcgccgatgaacgtatgcgtgatgaccgagacatatatatgtagcagtgatgaatcgatgatcgaccaaatagatgtttaatttctttggtagatatttttcaattgcgcgtcaatatattagaagaaaatggagttttattacatgacacaatcagctagactagcttatgtcaaaggaaggggaaaaataacttanactaaagcttaagaagaactac

SEQ ID NO: 28655 - DNA, 410 bp, Oryza sativa
gcagcaatgcagcatcacctgacgaagagacgaggaaaccaggcgttacagaacaagcagtagaagcccaaagtcttgtcagccaatctcctccaatcttccagccccaactcttcggccgtgctttcaattgtggaaatcggcatggtggaagcatgaaaacctcggtcggagatcggtaggcggaggcggagataccgtctcctcccggccatggctagctggctccgtaaattggaagttccaagcacgcacaagcaatgcaacactcgtggaaatctcctactcctgacagcaatgctgcagaaaccggcgttcttcatgcgtgtagcttcaccactcttgtggatgcagagctagatgtggatacaacgctatttacactgtcccgatgcctcgtagtcctaagt

SEQ ID NO: 28656 - DNA, 421 bp, Oryza sativa
agcttcactccttggctctacaatgagccagacatggagaagatagtggcctacttgtttgagagtactgccactgcacatgctcaccgggatgtggcatacaagcattatgtcaatgagatggactgcttacagcctcaacatgtaagtacttccaatatcacttctagtttgacatttacttctttaattgagatactaaccaacgacatctcttcaacttttgcagattgagtggttaccataccacacaaatgaggcttcaagcctgaccctgaactcaatgtgcaatcgagactctgactacttcatgtaccagtgcccatttgattgtttctgggcagttgagtaccaccttccgcaccgtgtcatgcgacagttcgggaagaaacaagacttggccggtgaggacatctcaact

SEQ ID NO: 28657 - DNA, 362 bp, Oryza sativa
tcagctactaagataccatggcacagcaaacgctcggaatgatggaatgagttgcaccagaatcaaacaatattattgccggtgtcgagttgacgggaaatgtgccctatatgacctctggtgctgattgtgcctgctctgcagatgcatgattgacatggtgcctgaacgaactttgagtccggcacgtcttggcgttctggcatgtaccaacccatgtgtactgggctcgttacaaatgaaacagagatacggcttttcttcgaactccttgggctggtttgactgagcaagcacagctggctgaactgattgagcttcattcattattggacttgagtcggattgatgctgtgatgctc

SEQ ID NO: 28658 - DNA, 401 bp, Oryza sativa
tcacagaaccatcaaggatgcagtcactataacaatgccagctatatctctccagaatcaaaatgagcagccatgtttgcggttttcagtccgctacttatcatggtgtaatcgaaagtttgcaccactcatgaaattcataaatataatcatgtctgtatacagtgagcttgctatgtttacagatgattcatgttgaggatacaatgtaccgatgttaagcaccgtcccttttcgattaatgcagtgcctcgtattcatgtaatgagggagaaatgtgtaatacagacaagttccatgaggattcgtttgaaagatgcggatatgtgatcatgtgtataattgtttactgacataggagacctatggtctcatttcacaggaactcgtgtccaacctcg

SEQ ID NO: 28659 - DNA, 398 bp, Oryza sativa
  unsure (1)..(398): unsure at all n locations
agcttagccactctncganntctcataatatgnnttttatactttttaacagcgnggcacgaacgaaaattttatacactatatatgcttttaataacatccaacacctttatatttaatctttttaataattaatatccaattaatcatattctaatcatggctcttgtttatgtgcagaaccataatctaatataaagaactcacccttaatcctaacttggaaaacataaattgcgcaaaaaatatttcaaccaaagcaaaatagcttgaccaagtagtaagctgttttttgagtttgtcaccctcccaacatttgcatcatatatatccaaaaatatatctttnttttcatattcctacatgctttggtatcncaccattgatgacgcatccaa

SEQ ID NO: 28660 - DNA, 252 bp, Oryza sativa
  unsure (1)..(252): unsure at all n locations
tgccgtgacgcgtctcatgtgatgagacgaggctcatgtgttgttctctctcagatngcgggtaatgtgcacatccactgcagtgtgagtataccaaatctattccaatagtcgtgctcgctgctattgagcaccgcgacatgtatcacacttggctagaccctaaattgcttaacctatgtgggacgggatattgcatgatgattcttatgccgatggagccactttctgagatgctggaacgttgacgtc

SEQ ID NO: 28661 - DNA, 447 bp, Oryza sativa
  unsure (1)..(447): unsure at all n locations
agcttgacttggagtgaagaggctgtgttagcgatttctttcctgctaaaccaaaggaaggcgcttctttggcatatacccatggacaattcacggcatagagaccttgttctctacaatcatgacaaaaggggacatgctcctctggcattggaagctcattgacctgngtggcaaatgcttgatcaaacacatactgattttggtctagacttccactcaaaggaactgagaactaagcagtatgcttggaatggaccaagggtgagccccggctaactctattgaggccatttggggattgagatgaaaacttgagttacttgacgcatacccgctgacattctgtcctatttctctgttaaacatctgttacacggattgaggcgagagaggaaacatgccatgaaagaatgaccacagctagagataagacctaatagaact

SEQ ID NO: 28662 - DNA, 229 bp, Oryza sativa
  unsure (1)..(229): unsure at all n locations
gctaagataccaaggcgagntcatactcctggaggaggcatgaccatctttctctactgcccatctgtgacagatgaaatgcaaggttgatttttccaccaacctcattcttctcgaattcaatgacctanacgtcatacttggaatggaatgggtgacaaagcacagaggagtgattgattgctccactcgcaccatctaatgtgaccaattgcaaaggagaggtggt

SEQ ID NO: 28663 - DNA, 443 bp, Oryza sativa
  unsure (1)..(443): unsure at all n locations
agcttatctgccatggcatcagctcaatccttgccttgatgctgatntctctgggatcagatcagcttctgtctgtactaagacctggcgtgacttgtgtatacatttgaggcatgtactataggctatcggttgagagaaaatggtcgtatttgtttgtgtttctcctgctgccctgccctnttggatgtagagattgttagcgctctatttgtttcaccctagagtgtatagtacaattgtacagcaactttcttttaaactaagcaatatcatccgcgcgttgcccataaattggatccattgccattactaatttgtccgtttcaaaaaataccattaataaaccgaggctgtttagattgttgtcaaaataaaacttaacannnatttgttaagtggcaatattactaanattttagcatgattttttaatgtatttt

SEQ ID NO: 28664 - DNA, 333 bp, Oryza sativa
  unsure (1)..(333): unsure at all n locations
atagctnggtgagatgttcntatcaacattttccnctttggtttattgcaggaatntaattccaagctctcagaatttggtttagcaaaagcaggtcctactgtggataagacccatgtttccacacaggtcatgggtactcacggatatgcagctccggagtacattgcgacagggttaaatttaattctttgctctgaataaatcatgggaagtcttttctgttatatagcatcnggttaaactatgatcagacatatgactgccangtgctactgaagctttgaattatctaaaaatattgctaatgaagcttggtgtcattgcttacat

SEQ ID NO: 28665 - DNA, 439 bp, Oryza sativa
  unsure (1)..(439): unsure at all n locations
agcttgctcggtctcgatcgaaataagcttgtgaattttattgatccgtgctgtgatttgttcttcttcaggtgcagagtgcgaggaaccctccggtgcatcaggagacgcagacagtggagagcatggtggcacgagaggcctggacatcgccatggattgaggtgttgcatgaggattcctatgntttggggaggaagctcgaacgtgccatcttcgaccagctcattgctgacattgtgcaggagctcttcatctcacaaaatgcagctgattgnattatttttccccttcttcttcttcttcagtaaatggtaacaattagtagaaaccaaagcagcagatttcagagtggaacatgtacatagtggttttatntgtaacanacaaataaaggagaacattgtattagaattcttaactttggtattggaaaagt

SEQ ID NO: 28666 - DNA, 305 bp, Oryza sativa
  unsure (1)..(305): unsure at all n locations
tcggcattatattaatccttaatcatgacttgtgagcatctgcttctccttccttcttgcagctctagcaagcaggcctganatgatgtactactcatatgtactcgtatagcaagagtaagcatgtaggcataaaacaaatgctgctcctcggagtggcctatttcttcataaagtattgacaagcactagtacttaccttgctggttgacaaagaatcttcacgcttttgaagctatataagagctggngctttacatcacatggcacacacatgacaccactgctnttgcactgtcttttct

SEQ ID NO: 28667 - DNA, 363 bp, Oryza sativa
  unsure (1)..(363): unsure at all n locations
agctntgtaccgagcgagagagccgtcggagtgaaacttgtgcttgaagatccacttgcccatgacgatgttagcacccggngggcggtgcaccaagcgccaagtgtccgtgtcgatcaaggccttgtactcatccgccatggcagcacgccaattgggatcggcgagcgcgctgctggagttggtcagaaccggtgagatagcggagtgggaagccgccaggatgaagcggtcgacaggcctgagggagccggtctgggagcgcgtgaccatgcggcttggcgggggcggcacgactatgggaggtgccggtgcaacgtcaaagcgctgtggtggcgtggtctgtcttcgtccatagacgtg

SEQ ID NO: 28668 - DNA, 359 bp, Oryza sativa
  unsure (1)..(359): unsure at all n locations
gcttagacgcggccncatctacagccactgtgtcgcaatgcttagatttatggcntcctgtaataantgaactcggtcggccgggccaacccggcagataaaaaaaggatattgtactccaacagtgatcaaatgcggtggagcagagctttcgtgagtctaatctccgcgacgagaacgcatatgtataatggttttgcggcgggtgcgttctgcattacaggccaacagtcaaagcattccaactccgcgctctcctgtctataccactcgcttacatacaatccaaaccttcctgccatttggatttatggcttgctttcttctcttcttgtttgctcttcccaaactcagaccct

SEQ ID NO: 28669 - DNA, 229 bp, Oryza sativa
  unsure (1)..(229): unsure at all n locations
agatggcacagccacaagccanaatcaagcgtcgcagtatctcttgcactgtgagaggcgggaaagggctaccggtgacgaagagcaagccggactngagctgctngaggaacacgacacacttacccatgtacctccacgcgagcaggatcaatacccgccgcggcgagaaggttaccgtgatcactcgcacgaactaatcaacagactaaaatcactcatgaacacc

SEQ ID NO: 28670 - DNA, 403 bp, Oryza sativa
  unsure (1)..(403): unsure at all n locations
agctntggagatgctatctctttttacaacatagagtacagcataaaatgtttacaagagctccgtcggctgaccagactaaggtatctgcgcataaggacgccttttggaggtgatgtaacaaggttcgagaggtacaaggacgccttttacatgactctcgatgagttaggtaaaaatagccttcaatcattacatgtacatgttacaaccaagttttcagatacattgatggattcatgttgtagtagtgctcccggtcttagagagctttctacttctggcgttggaatatcaaaactttcggagcagatgatttccctttctaatcttgcctatcttgngatcttctataatactagaagcaatgatcagaaagatatcaacctccttgggtgatacc

SEQ ID NO: 28671 - DNA, 456 bp, Oryza sativa
  unsure (1)..(456): unsure at all n locations
agctntntcatatccatnntatttgcatgattntcatatccatcttaatttctttttataattattctgtcacaggagaggcctccattgctgcaccactcacctggcatcaacgtctgaagatcgctctcgactctgctcaaggtatatacaagactgcacagtaattgcacacacctgaaaacatgttcaaagcctgacacatttgaccaaaaattggacaaatttcaactgtccatggatattgcaggattggagtacctgcacaagtcatgccagcctccattgatccacagggacgtcaagactcgcaacatcctcctctccggcgacctcgacgccaagatcgccgacttcggcctgaccaaggtgttcgccggcgacgtcgtgacccacgtcaccacgcagccggccggcacgctgggctacctcgacccggagtactaccacacctcg

SEQ ID NO: 28672 - DNA, 365 bp, Oryza sativa
gacatcggtatgccacgtggaaatactttctcagctttcatgacacttctacactggtgagcagcctctgcaagttaatgggttcaatagttatgatatgcatggagagaaatgattatgtagtgaaagttagcacttcatacccactggctttcctaacttctgaagagacattgacttctaataaatggcttcaagaacaagactggcagcatgctgcgatcctgaattcgatgaatctgaacggaatttgttcttcggttgagggtggttttctgaaacgatggttgaagcgctggatatcacctgaaatctttccatctatactcgcaggcagctctacaatgctctctggattccagtct

SEQ ID NO: 28673 - DNA, 462 bp, Oryza sativa
  unsure (1)..(462): unsure at all n locations
agcttcacagtatctacaacaccaggaggggaacatctacgtgagcaacttgatgtaacacgagtatttcctgcttcagcacaagtacaaagtgcaatgcattggtcgctaaagaaatgtgcatgtcctggctttntacaattctgtgcttgcaacaaaaaaaaatgctagggcatcacaatatggaagacaatgcatggcacatgccaactactaaaaaaaaattattcctcgcaaaaaaggaagatgagaatctcccagtgacccaccttgtaatgcagatggacagcaagtaacagaatggtcctattgagatggtcaaagagcattaattcatcataacctagttgatttctctatttgcgtgattctaaagtagaacagcatccatccacagctaaacccgattgcagcaacaataaacaaaagaaagtatgtccctcaatccacataaccataata

SEQ ID NO: 28674 - DNA, 227 bp, Oryza sativa
  unsure (1)..(227): unsure at all n locations
caactactgagatgagcaacctcacggttgcacccgtccgtatttacccgtcgagaaactcgcaataaccgaatcggntcgggaggaattctgctctctcaagaccatactatatgttagtgaatcaagcgaggcgcatcctctactgcaacagcaggatgagcacccgcatcgggtgggcaccgcaaggaacatctgtatgaggctaattgggctcaagaaaatgc

SEQ ID NO: 28675 - DNA, 359 bp, Oryza sativa
  unsure (1)..(359): unsure at all n locations
agcttaattgcttcaaagactatgatcaggnttcctctactataactcattggtctccgaactcgccaaaggccctgggttcgaatccacttcaagatttgaagtcctgtctcagttcatgctcgtctaagaggctggtcgccctacagttctttttgtttggcaagctagtgaaaagtaagctctcttgctttctcctctggagattcatataggtcctctcaattcaattctttaccgntcgtaccttccttcaactcatttcagcccagtggagtgaaaaagctaggaaaagaaaaggagacttaagcgaggaagtagacctagttccgttttctactttatttagccccctcagt

SEQ ID NO: 28676 - DNA, 442 bp, Oryza sativa
  unsure (1)..(442): unsure at all n locations
agcttgggggggtttgttgacggtcgttagcgatatgtttctatcgtcaatattaccaaaatagaggagaactagttatgcttgcaatgcatatttatgttagaataataatagtccactagtattaggtttactaaccttttgcagagaatgaccataaagtgaaagagaatcaacatcaaatcagacgataaatcaatcggacgatgtcaagaatcagacttatgcatgaatgggccaagaactcagaattgacacaatgaattgggccaaaattcacaagtctatggaaaggagcagtagaggaggccaccagccaaattgtgagctggatgggccagcccctggttcggtcgaaccagtgggttcggccaaacccacctanaccaccgtggatccaagttttggctggacggctgagatgaagcctctatgacggtag

SEQ ID NO: 28677 - DNA, 220 bp, Oryza sativa
tggacacacggtgcaccccttgttactcgagatcgctcaagccccactctgggtgaagttgagtccgggctgcgcgacttctgcgacggctgccccgcgacggagacgcgtaatactctatgacccggctgctgcgctcaacagacgggcgtgccccgaagaacaagccttcattgcatcaagacccatcggggctgaaggccggcagcaccctgacgac

SEQ ID NO: 28678 - DNA, 444 bp, Oryza sativa
agcttcttatctttaagtatggttatgaaaatgcctgcatggctctctttccttgtgggagagaaactgcttatctatgataactaaagagtagtgattggctgcctaaactaaaatctaaacgtattactgcgtagtctattgaagtagaaaactaatcccaaaaaaactatgatcctggcaatctgactacctcaactgctagttggagagtggcttggctacctggactgctcaattctgttcagaccatcagcctatttaccatagactcgatgagaaaaaataattttctatgtcacaccatgccccataaattcacaaaccagaattccaagcagaacgtgcattaaaccactatccaggaacagctagggtagttgaactaagcatggctaagcaattcctaatccaacatctagtcatgttacatcccaagtttac

SEQ ID NO: 28679 - DNA, 435 bp, Oryza sativa
  unsure (1)..(435): unsure at all n locations
agctaggactaattcgcgagacgaatcttttgagtctaattactccatgattttgacaatgtgatgctacagtaaacttttgataattatggattaattaggcttaaaaaaatcgtctcgcgaattagctctcatttatgaaattagtttttttattagtctatgtttaatactctaaattagtgtccaaacatccgatgtgacatgggctaaaaagttttagccccatctaaacacccctaatgcaaaaggagagagtttctgtccaccagcacagagaatactattcctgaagaaccaggacaganaacccagaacacccatgtcttgtgtcttctctaccgctgcttccttgctgaaccgatagatgctgcccgtccatgccaaaacatctccctcccacaatctcccattaaagtccaattagaaattatg

SEQ ID NO: 28680 - DNA, 448 bp, Oryza sativa
agcttgtgaataaagaaatgtgctggtaacaaccactatcataacacaaacttgagataattctcattcatactgaaaggatcagaacacaattctaaaacgggtgaggaaaatttaactaacaattgcagcaattcgtttttttgcacaaacaattaaacacttcagcagtatgtgggcaactgggcacctactttacacttaacaactatgtttgtaaaagctagataacagataccatatggatataacaggctcaaatgtacatacagaaggcaaggatatcaccttatcattaaaagggtcaaaattgctgttcggcttacctcattgagaaaaggttctaacagacgcagctgaagatcggttccttcagctgctatggcgcagaagaaaacgcttgaagttcctatgtggtagaatctgcagaaagaagatcagaacatat

SEQ ID NO: 28681 - DNA, 280 bp, Oryza sativa
agcctataggagaatttggtaaaagacatgtttagctactgcatatgagaatcatatgatatttgattcagacgattaatatagacaaaatatatcagagcaattccaataacatagctgtgctagtagctccaataatatccacatcaagcatttaagttaactagtaagagtagtatatatacaatagatagctactgcatccgtcccacaatataagcgatttaagagttggagtacggtattaagaaaggagctagaagtacatggtggagggttg

SEQ ID NO: 28682 - DNA, 430 bp, Oryza sativa
agcttggcgaaacaagcattatcttaatcttaatttatttaaataaaaccaaagatatttattttgagatgtaaactttgaaaaggctaaaaataaagatgctccaatcttatagaactcaaacaagaaccggatataaaacttgtcacaaaagattttctctaatattttaaaattttaaaattgaaatggttgaataggaagggaaagaaatacaaatgattaaaatagatgggggaaaaacaaataggactttagccccaaaatatttagcatggatttttgatggttcgataataggctaaaggagaatctggattttgaataaaggaattgaaaatgggtttcttagctcaagagcaatcactcaagtatttgtgataatattgttctttgtgccaaggatgtgatcaagccatatagattatat

SEQ ID NO: 28683 - DNA, 421 bp, Oryza sativa
  unsure (1)..(421): unsure at all n locations
gctggcaggggcctgttggacaacatactngtgcgtggacaaggcttccagaaaggagtatgcgtgcaagtcgatcgcaaagcagaagctcgtcattgatgacgacgtggagttcatccgccgcgagatcatgatcatgcaccaccttgctggccatccaaacatcatctccatcccgggcagctacgaggatgccatggcggtgcacattgttatggagctctgcactggcggtgagctattcgaccgcatcatcagcaagggatattacacagagaggcaggctgctgatgttgcccgcatcatcgtctctgtcatcgagtcttgccactctctcggtgtcatgcatcgcgacctcaagcccgagaacttcctcttcgttagcaacgaggaggatgcgccactcanactcattgacttt

SEQ ID NO: 28684 - DNA, 433 bp, Oryza sativa
  unsure (1)..(433): unsure at all n locations
agcttgagcactgtggcatcttttcttgctccattattgttcttttcttcacaaaggagtctctcatttatcatggaagctagatgcgccaagtagaccaattagctggctggtctccagccagctttagaagtattgattgatatgatatattgtgcatgttacctctacatctataagttgatgatgtggtcaaaattagatgtagcaaagaccaaccagctntagaagtattgattgatatgatatattgtacatgttacctctacatttattagttgatgatgtggtcaaaattagatgtagcattcatctcctttataaaacttgcccttaggctgcgttcgatcttcctggtttgagaaagatttttgacacacacaaaacttgaaaaatggattaatntaatttaaaaaaacttctattataattg

SEQ ID NO: 28685 - DNA, 444 bp, Oryza sativa
agcttggtggcatgccacctagatccgcttgcggcctcgaagctcgcgcctgtggtcttctcggccactgccatggggtgcgaggcggtgagatgaggtgatgatgaagcattaatgatagaagctcgccggccacaccacctagatcttctcgccggcctcgaagctcatcgcctacagtcttcttgggcaccaccatggagcgagaagcacccgttctcaacttctcattgatgaagatgcatagggagagagagaagatagagaagaaagagagagcgagaaataagaggagagtcattgacaagtgtcataactaggtcaatgagccacatcagcgaaaactatcctcaaaacatcatctatatagttatgttgtacgcagtttaaacgttcaatagttagaaaaatcagtgatatttgtgatggggagatatgaattaa

SEQ ID NO: 28686 - DNA, 409 bp, Oryza sativa
agcttctccaccatctcgctgctagccaagatggtgttgctacctccatttatgatcatgcggcaacaacgctctttgacgacacactttgcttggaacaacgtgtgtcgctgattttgctccgccttctccatttgtgcgctaaggacacgctgcacaatgaggctctcatagtgatccgcaaatgcaggcccaatgtgctcttccggtggctcattatctgcatggtcagccgcaagcatagctagtgtatgatcatcgaaatcactagcagaggagtactcaccatcgctgttgactaccaaaactcgcttgctagggcaggcacgctgcacatgcccgaagcccttgcaacggcggcactgaacatctatcattcggcctgtggatgccattgaagaaacactcg

SEQ ID NO: 28687 - DNA, 434 bp, Oryza sativa
  unsure (1)..(434): unsure at all n locations
agcctgtgctaagttgtgttctgatgctagatgggaatagtggntagcctatgccatctcttcagttacgtccgcatgagaagaactaccctactcatgatcttgagttagccgcagaggatcatgcgttgaagtttggcgtcactacctctttgggactcatacggaggtgtacacggatcacaagagtttgaagtatatatttactcagccggatctgaacatgagacagcggagatggttagaactgattaaagattatgacatgggaattcattatcacccaggacaggctaatgttgtatcagacgctctcagcaggaaaggctattgcaatgctatggaagtacgacagttgccatgggaattatgcacggaatttgaaagattgaatatgggaatcgtcagcagaggttttgttgcacattagaagc

SEQ ID NO: 28688 - DNA, 272 bp, Oryza sativa
tgtttactagatatggtgtgatgacaagaatgtgggctggaaggagactgcaaccacttatgttgagacgctatatcttgccaggaactacttgtactctcatccggaaggagacttaaaggccaacccagcctactgtacatcctctcccacccctcactgttgtcctttctttaacaagcatacactggacggcttggcatagtataaatgtctggcacagtgttttccatctacttggtactcacctgatccatttttctcccacgccc

SEQ ID NO: 28689 - DNA, 451 bp, Oryza sativa
agcttatcacttccaaaaaaaactcatgtagaggctcttttgtagaggtgccctctaaaattaggagtttcaaagtgtagagacacattttagaggcattttaaaaattgcattgaacatttttactctagagacactttagagacatttttagctaactttgttaattctttatcgtagaggcatatttctggcataatgtgaaaatggtgaaaactagagaatcttttttggaagatggtgaagtactgtatatgtcaagacaatgtatatttgtcccttcatgtcgaaaccactagtgtcccccaccaggcaatggatggcgccggcaacggtggcactcggtatgaaactgaagtcgcagatgtgccctctaatggagtatacattgctttcttctacgagctctagattcgcacgcagatgtggtctatgttgcagtcatctagat

SEQ ID NO: 28690 - DNA, 395 bp, Oryza sativa
agcttctgaagtaacggagatggtttcaatgcttcatgttgtagaacctcctgattgtcgcttgcgtgtatcccgaggcggacaagatgaaacatattggtgattgccacaaacagcttggcacaatggcggccttgtactttgctgatgcgaaatgatctcaaattcaccagagcaccaaggtaaaagaccatttcagaactagcttccatcagtaataaggtctgcaaacatcccaaagaccataaaccagtaggtgcaggtatgccaacagaaggaacaaaattcatagaagtaatcactggtttcacagtcacaataagatgtgtcaacttagatagccttataatttcctctggtaggttcataatattgcttttccaagcattcaacac

SEQ ID NO: 28691 - DNA, 233 bp, Oryza sativa
  unsure (1)..(233): unsure at all n locations
gctttgcgttccgccgccgcctgaaactgtggatggctgccgttgcctcgtctntgctgggaagaagcgccacccacatgatacggctgtagtcgtctacgaggaggatgaagtagcggntgccacttggagttggtggagtgatgaggccacatatgtcgctgcgcatcatagcgagtggatcggtctggcggtactcggcgctctgcgggatcggagctcaccgatgcttg

SEQ ID NO: 28692 - DNA, 429 bp, Oryza sativa
  unsure (1)..(429): unsure at all n locations
agctntggagggcgacagaggtgtatttgngtatattcttctgcgggagaaggcaagaaacatagacagaagcatcagcataacaaagaagtcaactgcaactgtgcaacaggggatggtagcacatcgcttcacgttctacttaggctacctttctctctgctactctacttactcaccatcagcagtatagtatacttatcaagagctgaaagccaagccattaccaatacctagtcaacaagttgacctattaatgactatttggcaaattgcctcctagggactcaaaatttactacttactcccaagtaacgactatggctgtagatggttatatgaaccacaccactactccctgtaaaactattctttgcatgtgttccactataagtcaatttttgtgaggtgttgattaaagtaactaat

SEQ ID NO: 28693 - DNA, 429 bp, Oryza sativa
  unsure (1)..(429): unsure at all n locations
agcttgtggctggtagtaaaacatcgatatttctttttagatatagngcgancctcaactatttctcgcgatatcttcttacgaagttgtgttagggcatctataacagcctctggtttatgtgggcaacccggcaagtagacgtccacaggaattaacttatcaactccccgaacagtactataggaatccgtactgaacattccaccagtaatagtacaagctgccatagcaatgacgtattttggttcaggccattgctcatataatctcactaaagagggagccatcttcattgttactgtaccggctgttaaaattaagtccgcttgcctaggacttgatcttggtaccaatccataacgatcaaagtcgaatcgtgagcctattaatgaagcatattcaatgatacaacaactggtaccatat

SEQ ID NO: 28694 - DNA, 446 bp, Oryza sativa
  unsure (1)..(446): unsure at all n locations
agctnggatggacctgttcaagcatgtttatatatttcatgagatangttagctcgcttttggtaacaagaatgagatttcagttaatataatgtggaaatagaaagcacacgagaagtacaaaattacaatttagcatgtaagtaacatttttcagattacaaaattattatgcagttccacacaggtgctagctcttcctattcagaccctacatcatgtcagagcgtacacatgctgcaaaccttaataagaacaaagttgtcaccacaaacctatcaaaattactattattatatgataaaactccataataaaagataaagtttggaacaagaatttgaaattgaggggattatatgaaaggaacagatctgcaggatggaaaatcaaggatctaactgaatatgtaacagactacacatccaatacatggatattcaaat

SEQ ID NO: 28695 - DNA, 263 bp, Oryza sativa
  unsure (1)..(263): unsure at all n locations
gcgagctntactgcaagcanatagatagggggatctgcttaaggggaaccatgaataaaactgtgtggaaggagatcatgaatacagggggttgaaaaatatgtggacctttatacnagaaatgcgtacagacactaggttaggccgcatgcctaacggtaccgtcgttgcttctgagaagtggtgggatgacaacacgaaggtacaanaacttcaatattaagttctgcactttcattcttgctctttcccatgcatctgac

SEQ ID NO: 28696 - DNA, 309 bp, Oryza sativa
  unsure (1)..(309): unsure at all n locations
tcacctctgatttgctgtcatacaccaactcctgtactntttggttctatcatcttaagcctatgctctccaatcactacctacttctagccgaatcaacacatntgtatcattataatcaatagtgttcacatgaataggatcatgatctatcttcatcttaatacacttagttaatatcaatcgttcttcttctataacctattgaacctgtcgacgaaacacattatattcattactagtttaagaataagatacatgccacttacaactagaatgacatttcatttctcaaatgaggtatgacat

SEQ ID NO: 28697 - DNA, 442 bp, Oryza sativa
  unsure (1)..(442): unsure at all n locations
agcttgaaatagatatttattaagcactatgtgtttcattgatattagtgcgctaacccaagataatgtctattgataaaaaggaaaatagccaaaacaatgtagctcgcagatcaaaagcggacaaattggataagtctagtgtttgatcatgccatacgctatttgaattctagtggacactactaaattaccgacaagttgaaacgacgctgctactgatacggataatcaatatttatcatggatataaaataaaacgagagaacatgaactgagcataactttntttatactcaaatctacacatttagattcaaattcttaaacagtacgggtgttcgtatttttttgctaattattattcatgtggaaggtcacaagaataaaatgtctagtgataaaataaccagtttctttatacataggagtgatttatgcc

SEQ ID NO: 28698 - DNA, 349 bp, Oryza sativa
  unsure (1)..(349): unsure at all n locations
aaactagctgatcgtcacgacgccggngaacncctagctggttgcgcctgcgagggcgacgcctcgcgaaaccaagccgctctccgacctcgacgaccactgggacctgcgctacctgcagccaagcctcgagttcttccgcgtggtcgacggcgatcgtctgccggcgaggccagtggacggcatcaaggcggccctagcggaggccctcgtgtactactacccgatcgccggccgcctgcgggagctgcccacgggccacatgctcgccgtggagtgcaccgccgaaagggtggtctttgtggaggcagatgcagacgtggcgttggaggacttctgcgagccgctg

SEQ ID NO: 28699 - DNA, 457 bp, Oryza sativa
gtggcaagctttcgccgattagtgcaatgggttccgtcttctgtatcgacgacctcgtcttcccacccgggcagacgtttcggttcggcagcctcgacttcgtcaccaacaacttcggcaagatttctctccttgactcggaatcagaccagtcgggagagaatcgacttccagtcccgtttggattcccaaacgcggctgaaagttacttcaagaccatctcgatcgagtcggcttcaaaccactcggccgagatcgcattttctccaacgacgccagatcaagatgatggggcttacccaccgatcctgatgaagctccccgacgatctagcggccgtcttcaccacgacagcgtcttcatcccgtaggcctaggcggaagtcggcttcaacaccgatttcgcctagcttcagggaagtcggcggcatccttcaaccactctgcacgggttcgac

SEQ ID NO: 28700 - DNA, 368 bp, Oryza sativa
aacgcctaacatggcctatggttatgtgaggattcgatccttctatgtggcatgaggtaaccctgggtcatcttgggaaaggctttgttgcgaacctccgataccgacgggagttctgaataagttcgtatcttgtgggtaaagtgtacccctctgcagaggttaactaactgttcgaacagccgtgcccacagtcatggtcggatgtgaggtggttcccgatgcgtagatttgtttgtctagtgctatgtgacaagttgttgtggtgtgggaatcgtaaccagaatcatcctatgtggcagatggatgacctgagtggtcaataaacgaatctgtgtgattcaggatgtctgcgggcatcatagact

SEQ ID NO: 28701 - DNA, 443 bp, Oryza sativa
  unsure (1)..(443): unsure at all n locations
acctctgagtcacctgangctgcagcttacacctctccatgctctggccttttatccttaacaaccttccatattcatttggatgggtaagtggtcagaaattaatgtgtacttaacaaatcatcttcttgtgtcaattagtttttgaagggaggtggcaaaagtgatgtacttacactagagtccattatgtataagttgttctgtgttaaatgatctcttaaatgattcttgcctgaactataacctgttcctgatcatggtcttgtatactttcgctgaattaaacatcgcagggaaagaagaatccttgtactgaccaagagtcagtaaaatcattccttgggctagtgaggcatgctaaagagatgaanattgataggtaatgccataaagatatcactctactttaaagcttgactattgccttgatcctgctcata

SEQ ID NO: 28702 - DNA, 414 bp, Oryza sativa
actataaaaaactcaagcttacggtctgtgttcatgagatggagtgcataaatggagctaccaatatctgcattcggcacctttccacccttaacaaggttgatgtccatatctatgggtgctcacttagtcacaaagaccaatgatccagacggctgatatggtagatagcaatgccaaaaatgctgctttcttatcaaagccgccgttatgcgctttcgaaccctgtacttgcaagtttgaacttctaaaacttatggaacattggaactttcattggcttatacaatagaagtcacctgaaagataactaggacttgtcgttcattcgttcatcctctagttgtactagtcctacattctttttcatccgcaaatcttgtaattatattaatcccattaataatgtatcct

SEQ ID NO: 28703 - DNA, 539 bp, Oryza sativa
  unsure (1)..(539): unsure at all n locations
tctgagtcacctgcggcatgcaagcttccttgtagtaagccaccactctagctaacatgtatgtcactaacctaaatgttggcatcaagaagcatctgttgccagagatgccacgagtatccgtaggcgatcaagatgaggttcgtagtctcgggcttagaactacacaacggatacaggagtggctatctaaacgtctgccaagcggtccatcatccagctccagcatcagccatattgaaggctagccatgcaaggatagaacttgaatttcactggcgcccaggttcatcatagttgcttccagcaggggatggttntagaaaacaaaatggaaactgtaaaaattggagcactattttcttcgctaattagacaatcaaattatgagaagcgttgctggtgttgtggacaatcgtgcttgagaccgactcaccacgtttaaatttgattccaccatataatgtgaatgatcgtattgggaggctgagtgaaaatcaaatcttagtgcaacccacacngcccatcgctatgtcact

SEQ ID NO: 28704 - DNA, 475 bp, Oryza sativa
  unsure (1)..(475): unsure at all n locations
ctaagcttccattagttgatataagctgaaaggactatcataaactaagtntggtcaattaaccagatgcatcaaggctagaaccacagtanggaaaagaagttgctgactaacaaacaactcaccagtagatgcaccgctaggcacagcagccctcgcaaatgttccatccgagcagcaaatatcaacctggcaacacaagcatcatatnttagtaagaccatttagtngccaaaaccattcaaaactattgatttagtccaataaaacaaacgaattctgtaacaactgtatgctcatatcatgaaatcctggaacaaaagcccaagcaacacgatatctaacacgggcaatatgttcaaagcaaccatctgatgagatatagcgcaaattcaaaatcatagcgcagttcgatgtgcaactaatctctatgtacacagcagtagattggatctagtagggatcgagcataact

SEQ ID NO: 28705 - DNA, 521 bp, Oryza sativa
  unsure (1)..(521): unsure at all n locations
acctgcngcatgcaagcttcacgttccccattatgtaccaacttcattgattttgtcattagagaactttctttgggacattgagctatcaccatcacaatgttaggtgacagaataagatctctggcttaatattgaaaggctatgttaagattcaatgactagatttctggtgtactgcgcttggntatcccccgacccctcctaatactgtctgctggcaatgggttgcactgaagcctttttctatctgaagtgtcaaaactgtcatattgtggcagaactgatgctctctagcctcccagttctttttacaagttgtatcttgtcatctctgtaatagtaccatgttaaggaaccctgtaacttattttcttcctgtcataatatataaaacggcagaactcccgccttctctaanaaatatgttgtagttgtcagtacgcttccctgtgatggctgatcttatccatggatctcgccatgcactcatggagcatgtatgtttatcngatgctgga

SEQ ID NO: 28706 - DNA, 406 bp, Oryza sativa
  unsure (1)..(406): unsure at all n locations
ntaatcacctcgagacatgcgctatatcatcatacatgtacactatacatgctagacataatcaattgcactaacaatgacacttgtagcctcaatccatggcaccggaccctctggtgatctggtctactactacgtcaagattagtgaatcattcacacatactattgcaaaagatataccaatatgttctggaaatgaagctaagtagcataactagtaggtgagaagatgcgtctctgtctggacctcagtacagtatactacatacaaccttgcttcatagaccatacttgcctggagacacacaagtttctattcatcattcttaacatttcctaccaaccgtatatatatggatgtacacgacacgtcatacagacacaagatacacatattgtggcct

SEQ ID NO: 28707 - DNA, 120 bp, Oryza sativa
caacatactctatctcggaaatcaaacgcaaagacgttcaaaaaaaaaaggaaacagaacattactatactacaattctcctactacatatatccacgtccactagagaacacgagccca

SEQ ID NO: 28708 - DNA, 448 bp, Oryza sativa
  unsure (1)..(448): unsure at all n locations
ctggtcgcatcagtggtgccatctgcgttgagacagacctgaccgtggtgatgtgtttctgggcagcagaccacaacggctaggagctaatgtcacgtttgctgaagctatactgaaggctgattcctgtgatattcaaagctgaatcatggcttctctttgcaatatatcttgttggaatcggatgtggaattagggttctctcatttgatgtgtcactaaagctctttgaaattatagtagtaattactgaatatactgcggacggcgactactagacatttgtatcttaatcgaaaagaaaatgacagcttcagtgcaccgagaagcgggagtgagatntaatggttgtcatggcgatgcacacatgacactgatgctgactaagccgggataagcgcagaaggtttgggtgctctcggcgagacaactctaacctggggtggtc

SEQ ID NO: 28709 - DNA, 441 bp, Oryza sativa
  unsure (1)..(441): unsure at all n locations
gcaagcttggacttctcgtcgtgcacaagttgtctattggtttttattgtggcttcaatatccttgcgctcccgacgttcggctagtcttagcctaacttctctccagcttgaatggatgctgctcaagatcaacggctggagtaaggatatcggctagctcatctgggaatagagcttggatctcgtgtaaccgagtcctgatcggcccacagtttaccaccaagttgtctagcgatgatgcttctagccgatgagagaagtctttcaagggtttctttacattttcngacaagggaactaaagacttgctggtggtgtcttcttctgtttcttcgtccagatcatctttaatgtcgacagagaacagatctgctaaggcctgcaagaaggaatttgaaatagatgagtatcagcatgattatatggccgtataaatctt

SEQ ID NO: 28710 - DNA, 483 bp, Oryza sativa
  unsure (1)..(483): unsure at all n locations
actaagcttacaggcacactcaacctgcacttgacagtgccgagaatacanacaaaatcatgaataatggtttgcaatataactgcattgtgggcggtggcttcttgggccgtcngtcaagcctctctgcattggtatctcaaattactgaatngctgtangaaaattaaacagtaaaataggtgtgacagcaactattgtacctattgatgtttgttgagagccaacagcaactgattgctcaaatgataggtgaaacaggaagaacgtgaaaacatacatgatcataataccccaaaaattatgcatattacatacgctaatcaagctgtatcagatngtacatcggaaattcattcctgaagacaattttttatacataagantactccttcgttggcttaagtacttttgatataagtatgcacaaataaataatgatagttcataatatttactagacaatggtcaacttacagtaaa

SEQ ID NO: 28711 - DNA, 352 bp, Oryza sativa
ataacaactcttggctatgaatctagacacacagctcttcagatccatagctaaaaatgcttatattttaggacgaagggagtagatcatcgagcgagaatactataagctagattataataagccgatatagaataagcagttagatgtttggttctccgacatattagatgttagccaccaataatctaaaaaagtacctttcgagtggattactaatatggtttataaattataataatctatcattaataagctatctgcttggtttagcctacttctaataattcagaatataataatgctagctgaatcaaacaggatgatgcgctggaattagtattggcagcta

SEQ ID NO: 28712 - DNA, 437 bp, Oryza sativa
  unsure (1)..(437): unsure at all n locations
tgctgaactctgcctcgagacagagtcttatgcctcctccatatggcatngtaatccttagtagctcactctgctgtggcttgtcctggatttgccattcaactttgatacatgttagagttgaaatgattatgggattcatgagtattgctatatactctataatcaacagcttagctccaatataattgagtttgtcactgactcgccacctccatggattgaattctagtgggtcttcaaacaatgctgggtttagatcaactgccatggggcttatcatgactagccacccagctgggattgttagcctgatgaaaagaaaaaatcattcaataccatntccaacacttgacatactattttgttggtcactcattctctatatatctacgatggaaagttgtacttcacttcacattctatgtttctgaatt

SEQ ID NO: 28713 - DNA, 430 bp, Oryza sativa
  unsure (1)..(430): unsure at all n locations
agctntagcagccaccgcgctactcgtttttatgatgacaatctaagagcaccaagtgacctactctcttgacatacccactgaacacaggcgccgctggacaccatgccgtacgaaagaaacgataactgtagtagaccatgtggtataatgaccagaccaacacattaagctagtctagtcatccttggtatgaaatatttaggtgatctcatccaactatatggatagagcagcaaccaactctgggacacgacggttggtcgtgccccacatctcttctcgcctcacggcgattctagtaacggacgcgatggttcccaaaccatcgcgtcttctattnaccgctctcttcccgctatatattgtaaccattgttatcaatanagaatcgctcacttcanttcctacattcttgngtgtaattctc

SEQ ID NO: 28714 - DNA, 406 bp, Oryza sativa
  unsure (1)..(406): unsure at all n locations
ctatcagcaactataaatactagctccttttgtctgatacctggacacctcgcaatggcgtgacccgtatatacacacaatcattcactgcgaatttcaggtcacggcgacagttatctgcataactttactgccaggactgtgccacacttagattatcccgaatgattctgactttagcttcagcttctctcaggatatcagtcccgaacacttggctgtctccaacttggtcccacaatagcggagtccggcacttgctcccatacaacgcttcataaagtgccatttgtatgctggctngatagctgttattgtaagagaactcagcatatgggagactcttatgccaggacttgccgagatctatgacacatgcgcggagcatatcttctaggatctggtt

SEQ ID NO: 28715 - DNA, 452 bp, Oryza sativa
tagcttgcgagctggcggtggagctcctcccttattctcagctaggtccttctgcagacggtacaccttgctctccaacttacaaatcctgccacgggtccagttttccctatcatgagctgctttctctcgctccacgcctactgcatccatggcgctaagcatatacacggcgtgcatcacagaggcgctaccttcaccttcgggacagttgtaagttctatattcttgaccatgtggcttgtgtgggtgatactggaaagctgatgactctaactcctcatcaaagcgatgacgtagctctccaatggccaccaaagctgtttcctgacaaacatggctgtacttttttccctcagcttcaaactttatcgacggaaggtcttcacgatcactagtcagacgtacgcgaacacgacacttctcctcgttggggtcatggggaatctggc

SEQ ID NO: 28716 - DNA, 382 bp, Oryza sativa
  unsure (1)..(382): unsure at all n locations
tagcggatgcaccattatgtaaaaatattctcgtaggagatatctaggggactggtccaatcattctagcaagctagtgccatctatcctatgggaccacctaaatgtacaaatactccctccatactcataaaggaagtcgtttaggacaatgtttaagtcaaactctgtgaatataaatcataaataactctcaagtngntgagtttgaaaatgtaaaaaatatataaatagatttgtattgaacaatactttcatacaaatatacatatatcancttttaataaatatntttatagaaacaagacagttaagttgtgttttgagaccgngtcgctgtcctaaacgacttcctttatgagtatggacggagtatacctta

SEQ ID NO: 28717 - DNA, 345 bp, Oryza sativa
attcttgctttcaagaacaattggatgtacttaatgaggtaacaacgttgtgtgtgagatttactacaatggcaatttatttgaaacagagagagtactgatgaagtgagcctatagattaagtttacaagattgtcctctagtgatgagtttactttaacacttgtaaagagcattggcttttatataactagaggataccccgcgcgttgctgtgagacttggctcacatcaagttgttacataggaggtacactcttacgaataaacggcaccaacaaatagctgtgttggagaaattattttagcaaccctatgcaaaattgtagataatttacatacacc

SEQ ID NO: 28718 - DNA, 335 bp, Oryza sativa
  unsure (1)..(335): unsure at all n locations
agcctctatattatgtattctatcatacatggcagataaatattctggatcaccttctactgttaggcgtggagagtcagtgggcccctgtagctctccgctgtatggtgagttacatataaaccattaatagttctattcagttctattacttaatctgtactatcgagcatatttgtgctcttttcacaactgaccattattnttctaggccttgcgatgcattggtaatttggggtaagaaatcctcagaatcttgattctcttgcgagcaagcaagttggggaagatccttatgttcagcctgcactcagtgcaatcttttctataatctt

SEQ ID NO: 28719 - DNA, 396 bp, Oryza sativa
agcttggtcagatgattgcaagatatctgttggttatctaattattactatactccaacattgtattcgttgaacaacttaattaagtgttgccatagttttacccctttcaatagtctttcaaagcgcggctttgactatattaataattccatccaaaaatataagtattgttgtacttcgacattgtcttaacgatgctactttgactaacaatattcgctaaagtaaggctgctttctacaacatgtgagagagagaagtttgtctcgttagcggagtgttggtttacactactaaacagtgtgccttacactactaaaatagtaaatactcaattaatcatgcgctaatgacacacctcatgttgcgaatcttctcaatcttctcttttct

SEQ ID NO: 28720 - DNA, 330 bp, Oryza sativa
  unsure (1)..(330): unsure at all n locations
tacaccaaaactaacnctatgcaccgtctgacatctttatcaatcattttcttgatcactctagtaagcagatagaatcattgagctgcttccaattatcaagctttacaggcattctgtgcactgaaatacccatacttgcatggatcagtgactccagatattgttcgtattagctcgtcctgcaagcgatataacaaatagcaacgtgtctgctaatatgtcgccacatttaatctgctgcctgaggaaataccattcaactgaacctattcgatcgttcataccattaacattcatcttctgatatctcatatactacacccttga

SEQ ID NO: 28721 - DNA, 507 bp, Oryza sativa
  unsure (1)..(507): unsure at all n locations
tctgagtcacctgcngcatgcaagcttatctntcttgcttatcttcttttcccaggctctacctttctggtcaccctcctcatcatcatctgcttcctcctctgattcagacataaccatcttttcaggatcctcaatgtctgcatcactagcatcatcatctgtctcatcatcgtcatccttgtcttccacatcgtcatcttcaaagcgctctggatgctctctgcactcttggatcaggttctcatactgcttgttgttcttctttagtttctgtttcattgcattgagtgcctatgcattgctgctgctcatcttcttcttggcctctttgtttgctagggccctcagcaggaagtcctccagtaatacaagagccttgcgtacatatttgaactgtggggattattgaccgaccacctctcagctgttgtgactctcaaacttctgtaattacccgcattgactcttgatgccatcgatcaacgtattcactctatggctatc

SEQ ID NO: 28722 - DNA, 377 bp, Oryza sativa
  unsure (1)..(377): unsure at all n locations
ctcagctactngatgataaatgatgtttcttcaatactcttgctatggcagctaatctggacaactcgatctcagactaagatagttccttctgtncctgaattgaaagaagtcaatgattaagttcatagaaagcacttagtcgatatataggagtttcatatgaataattctgtccctgcaagaattgaggacattcctgcactccacacaagctaagtacacagctagaaaaaaaatagagactcaaacggtgggaatggtctgtatctatgcttaaaactcattgcctacgaactatagcaataaaacaccaacatagttctaaacttcaaaatagtacacaggatgacacgatggtataaaccaagctaaac

SEQ ID NO: 28723 - DNA, 456 bp, Oryza sativa
  unsure (1)..(456): unsure at all n locations
agcttctntataattatttgctatgtgaactntcatatatgttgtcaactntaggttgtacgcatcatantttgccaagcagtcggtatatcacttggatcatattattcggggattcacaccgcatatgctatatattggtatcaagtcacttggttgactataattatcaaaaaccactcggntaattggataatttattccttgactatatgtttagtttgttcagctaatcacatagttgggggctacacctattaggtgcatctattcgatgcacctgactntatttttcagcccttcacagtcttcagatttggaaaagtactcgggagaccatggcgaagatgattgaagcactcngctntagagtaatctagttcgagagaagaatatattttcgactgtgaaggtctcaggggctactgtggagaatatgggtaccccatacccaca

SEQ ID NO: 28724 - DNA, 518 bp, Oryza sativa
  unsure (1)..(518): unsure at all n locations
ntcttgctaaggatatgccataccatannaaacatatngaccatcggataaagagtttggataaagaatggccacattaataaaagaacacanaatggctaaacatatggggatttccagaggtttctagtgcctcctcttagacacatganacanatagagagggggcatagactatgaagggaaaataaacacaggaggcttccaatgattccttttgtaaacatatagtataagttagctaaatctatagttggttaggccaatatattntgtaaataaattaactgatgtcataaccttctttaaagctaagctaaactaataaaccatatacacaagttcttaaactggatctaagtcgcgcanagtgcgactatgtggctagtgtaatcagggatatatctagcagttggtaaaaccaaactgcagaaatcaaagactttaagttgcacatgaagcttatcactttagtaccgttaaattatntccctgtataattttctattggatgtttc

SEQ ID NO: 28725 - DNA, 402 bp, Oryza sativa
  unsure (1)..(402): unsure at all n locations
agctttagaggaggccccggaataagcggattntatttcatgcgatacatcctgnngnngnggataatgaacagagtcctagatccgaaaataatgcttgtacacctaaatttagttntctctccacagggaatggaatttctgtttcttttaggtatggncagattcaattctcgtacatcatttagttacttttaccgacaaattacatatagtaaatattntactccagacattacatatagtaattntttaattgtcaatatactgatatggagattgcatttttatttttgcaagatgtccggatgcatctaatcatatatgaatcacatgtattagagactaattacacacaaataatgcaataacacatcggagagatcaaataacaggacaacg

SEQ ID NO: 28726 - DNA, 474 bp, Oryza sativa
atactaagcttgaataagagcaccttgctctgataccaatggaacgcgcagagatgtatcctagaggggggggtgaataggctttcctgaaattttctcaacaatcgcagcggttaaattaacagggcccataacctcctggtgaagaacaccggaactttctggcagagatgagcagcctggaacttccggagttcttgagccaggaacttccgggcaacagagaatatcaaaatttggggaagtaaaacaggtcttagctatagacaatcatgcacaaggttgcacaagatgtaaatcacaagataccagcagattctaacacagaacatgcacaagagagacaaaggcgatcttttcccgaagttcagatcacacagatactactcttcgttgggtgctccaagagcgggctttgataaccccttgctcactatgcaagatccagagagtccaagtttcactcacactcta

SEQ ID NO: 28727 - DNA, 452 bp, Oryza sativa
  unsure (1)..(452): unsure at all n locations
ccaaaaactaagctgtggtgaaatgggactgcgaagctaatggtgatatctanatgtgctgacttctgcttgcaatttctagggcccctcctaacattcctgatgtgcagatcccanaggacctggctgttcacgttgctcactcgctgagatgtgagatcaatcagggctctgctacctacagggagagtggccaacggcgtgacctgaagagacttctgaatgtctgccagattggctacatgattaccctttttagccttcattgttaatggatctcttcgaatgctaatatcctatctggtctcttattacgtggcggggttgtggtcacttgttttgagctgtgcaaaactgcctgattcatagtatatctggcacaatgacagttcccattacactgtccaatcacttatcttgcgcttaggctgacacggccagctgatgaagat

SEQ ID NO: 28728 - DNA, 383 bp, Oryza sativa
  unsure (1)..(383): unsure at all n locations
acgaagcagacggaaacacagatgtatctcctgctcacgttccgggatgaagaaaggcaccatgccaaaggcgtgtagctcaccattcgtcctctctcccgtagtgggtaggacgccaggattcgcggctccagggccttcaaagaggccatgcatgcaccggcgcagccatagntatcttgcccctacatgtaagcacgataaaaagaggagacattttgtccagtgtttagagttttcatggactgtgtgcatttgtatgcccgtcttacgtccaaattagagtgagcgcgtgcaccctgatntcaaattatgtacatcgtgcactaagtccggtgctgcattgtanagtctagtgcgtcatctgaaatgatctacaatgt

SEQ ID NO: 28729 - DNA, 353 bp, Oryza sativa
  unsure (1)..(353): unsure at all n locations
tcagcttagagcatcctcagcagctcatctattatgtattttccatactgccatccagatagtcgtangagagatacctactccatattacttttcactctaacagagcatctatattacatcctctatataccaacatcctatatcttactaatattgtacaactaccacatacttatcactactctaaaagaaagaactccgcatctgtatgtattctctaccgccgatctccccacctttctttcttctctaccaccagcgccgagaggacggtgaggatgatggccaaccggatgggctgcgcactcggaggagcggctgggcaaaagggcggcgcggtcggatgagcg

SEQ ID NO: 28730 - DNA, 329 bp, Oryza sativa
agcttcggcttcgtaggctgcggaggttgtgttgtgtctaatattcgatcctaaaccctccccgggagccccttttatatcgcagatgtggaggtctcctcatagaactcggaggtatcagaccctatacgatacgccaacgacccagttctgcccgagtaggattcttcccatctgtagatttcgtgaaaagtttccttacgatatacaggaaatatccgcatgcgcgtgggtatgccatatcgatatgtaacgtatatcgaagggtaaagggtatgcctaacccgtaaccctgacagtagtccacgacttctgcttataatgaactc

SEQ ID NO: 28731 - DNA, 197 bp, Oryza sativa
  unsure (1)..(197): unsure at all n locations
aagcgcatggcaatacatctgtcgccccaatgggaagcagatgatcacaccatgttnggaatgggtcggggattatctcttcttggggagggacagcttctgggaatacattgagggtaacaggtttgctccttgcggaacgatcctgagacacgcgtgacccgaaacctgcgttctggggatttcacaagattcac

SEQ ID NO: 28732 - DNA, 375 bp, Oryza sativa
  unsure (1)..(375): unsure at all n locations
atatactaatattgactataccatgctagtgctagnntaactttcacagaatatgtcatgtacggtttagtgcaatattgttacaagtaacaatatagcaataagtgcagtaagcaagctatgataccttgagtccatgataaaagggagcgatgatagtttactatgtcttttgttcaccagtcaccatgggtccatggcttgtattgtagactaatggccaacactaactncaaaaccgctgatgacatatgtgatactccaatcactagtttaaggaaagaaaaaacaatgtcctacttacacttgcgtggaataattggaactcacagataatagagataactangtcgcgtcatctacctaacatattga

SEQ ID NO: 28733 - DNA, 385 bp, Oryza sativa
  unsure (1)..(385): unsure at all n locations
ccctctnttcatctatgggcatgggataaccatactgcttctttaggattctctctaagagtgatattttcaggtgtgaaaagtttggtatctcaaatatttcgcacaatatttgtttcttcccatccaattcatattgagagcaagggataatangttgacctgagcatggcaagccaaaaactgcattcacatcattaggaccgaatggcaactcctggttgacatctttaacaatagcgcatgatttcggatcaactttgctcagtagccatgcaccanactgcctgtttaccttagtaagcttgatatccaaaagtccatcanactcaacttcaccaatcaactccttctttctatcatcgaattctttaatgatattcac

SEQ ID NO: 28734 - DNA, 351 bp, Oryza sativa
  unsure (1)..(351): unsure at all n locations
catacaacagtaacgtatagagatccccaaatcagctgcggcagaatgcagataccgtgactagtatatctcataaacttaacgagcagtacaatttctgtacattggtttatcaataagtcaagagtagcatttgtgtaagaagagaaaaataatcttttacggtggcgtttattgacattngatccctggagccgagaagactagtttatctcatccgtgaaaactatttgtcactagacatcaacgtctcgctgaggacatctcgtttgaatttgctaataagaaacactcgtttcctgtcaatggcgattcgtttactagagatccgttcattctctgaacttctga

SEQ ID NO: 28735 - DNA, 378 bp, Oryza sativa
  unsure (1)..(378): unsure at all n locations
agctngcatcttganaagatttgtaaactatgcttcatntgngaccatgcagaaattgagctatgagcaagttaactaaaccatatagatgctaaacttgacacagaaagaggaaacaactntaacttaagcaaatcattactaccggccttaccacattgatcaataaattggccgatatgctccattgttgttctaacatcctcacctgtgaattttgtgaagttgggcaccttatatacttgcaggtatgggaccgaatctacgtgttcaagatacggcctttgatatggatgcatagcttctttggatctatttcactactatcccgcaagacattattagtcatattttcaacatccacatgatcaatttttg

SEQ ID NO: 28736 - DNA, 430 bp, Oryza sativa
  unsure (1)..(430): unsure at all n locations
agtcacctgccgcatgcaagctntacctagttctaaggctgatgggaataagttgtttggtgttgttatgctcgcaacgaaatgtgacattgctgaaatatcagatgatgatatgtgctatttcttgatatgcaaacaagcctttggttctttagatgatattgctagttcgatacctttcggaagatcgggaaccctagtacacatcatatagttatgaatatcttttaatgtgtaaaaatatatacacatatacaaagnttatatacgatgtatacaaagcttatataggacatatatgaactttgtatatgatgtatatgaactttgtatctcatatacataccgtattaaaaaatatataaaaagagaatgcatcacatatacaaagttngcatacgcatatacaaactttgcatatgtacgaata

SEQ ID NO: 28737 - DNA, 501 bp, Oryza sativa
  unsure (1)..(501): unsure at all n locations
agcaccgccgctgcagctgtcagcaccagcccactagagaaaattttcgntatactatcttatactttatacgaacggaaattagataggttaagtagtgcactcaccagttcctgatagacgacggcatcacttttgttctcatatgtgacagagccgtccgggttgaccttaccccttgcccgcgcgcagttgcgagctctttgttcagggatgtctgaanacggngcagggacattcgctactgcagcggctgcatcttcttgggcccatattgcctccttgccgatgtaccctgcggtgcccagccgatgcgggtgctcattccgctattgcagtaggcgatgtgcctcgcttgattcctaaagtctgngtgtcttgaagagcgaattctccccaccgctttggtatttgaggactcatctacgacgtatattgccggacggttgcaaacttgtgagagctctacttcattcttcaactttgccatttatgaatgct

SEQ ID NO: 28738 - DNA, 323 bp, Oryza sativa
  unsure (1)..(323): unsure at all n locations
ctcaagcttttagctacaaaagctgttgagtaactagggatgacttgatttattatatncatcttctaggcgtactatatgcctgtttncatagtacatagtcatagcccaagctatatgacttatttattaccataatccttataatacttgatgggtaatctctagatgttttatattcagatgcctgtcaagtgtgtccattcgtgaactctctagagcgttaaccactccgatatcttttattggtgcttaatatcagtcggctaacatgcctattaatgcaccgcgtatgcttttgacatattatgcaccattgtgtt

SEQ ID NO: 28739 - DNA, 470 bp, Oryza sativa
  unsure (1)..(470): unsure at all n locations
agcacctgccgctgcagctaggactcacagtgcagatggttgggttttcttgttttgtggcacctacctaccatcagagccagccgtacgtgatacacgcatgtagcagcagcagatgacgatggccatacaatcacacgattgattgcgaattgcgatgatgaacagcggcagctgctgctggtccagccaagaaaattatgagcaaaacaacaagctaaccagcagtagcaccaccaaaataaaataatgttgaattaatgaagccaggtactgcacaaagatattgctaggaacactcgctatgtacatatgtaggcaggtacataagcatccatcccttccacanaattaagctaatcaaacaagttntcagaatccagagtatccttgtcaaannatatataggagacagggacatgacatattctatattaatattntgaagcatgtatattgagtaagctgaa

SEQ ID NO: 28740 - DNA, 428 bp, Oryza sativa
  unsure (1)..(428): unsure at all n locations
ctaagcttgaacacatgatgaaacaaaggttggttgaaggtatacaacacacattactcctgaaactgatggaatacgactactgtattgaatacaatgctgggaaggagaatgtggtggcagatgctctatccaggctaccacagggaaaatcagaagaggaacaatgtgatgccattacagtagtgatacctgattggatcctgnacattcaaagaagctatgagggggatatacaagctcataagatactgagtataataggaactgacagtgaccctgatcagcaatatagctttggaatttggaattcttagattcatatgaatgatttatgtgtgggatgaaacatccattagagctgatttaataaggactatcactgggtggctcttggaggacactcatgtatgagagctacttatcac

SEQ ID NO: 28741 - DNA, 456 bp, Oryza sativa
  unsure (1)..(456): unsure at all n locations
agctnggagagaggggcttcgtntacgtccccgccttttttctttttctntgtgttcttctatgcggcccatagacttctctcttctacttctttattttttcttttatactccctctgttataaaatataagacgtattaactctggtcatagttaaactatgctaagtttaactaaggttataaacaaatatagtaatatttataatactaaattagtttcatcaaatcaataattaaatatattttcataatacatttgctttgggtgagaatgtactattatttctatacaattggtcagttgatcttgatcaagtcaaaacgacttataatctgatacagatgaagtatattgtttcaatggataaacgaatggctctgttcctgtagaatactggcgtctgattgcattacttttgtagtgcaataaaaacacaattataatttattgat

SEQ ID NO: 28742 - DNA, 299 bp, Oryza sativa
  unsure (1)..(299): unsure at all n locations
ctctacaggtattaataaaccttaactagtatatatatattcataggttaaattaataatttttgtattaacctgtaaagggaatgtttcggctgtcggggctacggctgcngcacgaactcaccgtgcgcagccacagcccgttgcagacggcctgccgaacactntcaagttgaattcatcatgcttttgtgaagngagatatatatattaatcatttattatttgtaaaaactctatactattaatagtgacgacgaaaacagtgaaccatgaggttaaaaagtcccatacttcat

SEQ ID NO: 28743 - DNA, 421 bp, Oryza sativa
  unsure (1)..(421): unsure at all n locations
gcttctgcatatctttttcctgccacatacgttaattctagcaactttaaacaacaggataggttaatntgattcactggactattcactggatgtgaaaatgtccctcgtaataacaaagaacatgatcaaattatgaggtttttaacagttaaaattatcatagtgaagttagaatgaagaataactagttcaacttcatgtatgtttgcttgttacatgataatatatcttcgtattgaaatgaatttctctgagaactatttctggaaaaaaataagtattttagaagcttttataggtgtgacccattgataaaggaacctctcagaaagaaacagagctctcaagaaatccaacataagcacagatctgatatagcatgctatgattntactagccacactcaattggcactact

SEQ ID NO: 28744 - DNA, 285 bp, Oryza sativa
  unsure (1)..(285): unsure at all n locations
aagaattctaggaaagtaaccatgtctgtccttatatgtatngggcggatgatgattctgagatagctgcagccgaatgggtaaggagtaaaaaggttataccatgccaatgggtgaagaactcanggaaagaggaaaggtatgactntgatataaccaaggctgacaagaattttgacttgctactccgggagaagcagaattcaacttctgctggtcacgccatttcaacggctgaagaattgagtaagaaaaggtattgcaagtggcataattctgggtctc

SEQ ID NO: 28745 - DNA, 392 bp, Oryza sativa
  unsure (1)..(392): unsure at all n locations
aaacgatggggcgttccctcgacacaaacatcatcttctatcaaactataaactaattgtgtcaagagatgcatggtaatatgatattgttttgtgtgtggatggagcacaggctatggggctagagatgagccctccagcttttctgtcgcttaataatancctgatcgaagtggatgcgggtttcagcggcatcaactatgcttcagcatatgcggttatgtggaaagacttgtaatagtcaaacattccggcttcgatccgtgtctactggctaattctattccaactttctaactcaccttcctcgtttccgtgtgacactatatcagatgctaacgtatgtttcttaaaaaaagtatattagagttgttaaaatcatattattattt

SEQ ID NO: 28746 - DNA, 293 bp, Oryza sativa
  unsure (1)..(293): unsure at all n locations
caaccccaggatgagctgaccgaacccacaaccacggacacncccccggccaatgtagtttcctccaagggggccgccaccaaggccacgacagacccaggaaaagcaacgaccaaccaaacacagcaaagcccgcggacaacggcaagccaatgccgcccgactctctaaccccacaaacaacgcatgaggcgaccacgagacagacaagatccagctcaacccacagaggccatggcagacaccaccccccaacccgcacccgcacaaacgacacgcagaaaacccaccaa

SEQ ID NO: 28747 - DNA, 141 bp, Oryza sativa
aactgtacccacataacacagccccactacacgttctcgtgcgccgacatgccatcacgacataccggaaagaggccgtgacaggacccttcgcataaccccctctagacgatcgcaccacaccttagggttcgcccccgt

SEQ ID NO: 28748 - DNA, 416 bp, Oryza sativa
  unsure (1)..(416): unsure at all n locations
ngctttgagaagagagacagattggatgattttggtttttctggacaacccactcagatcatattctcacatgataggcggtggcgtctggtgggaaaacaaacacaggaataatggaaagagtgaatcctgcagagctnttgaggagcaacgagagagacaagaacagagactaattgaagctatgatatatgatgcaaggagagaggatgagctcccgagcgctctgactatagtcaagacaaagaaaaacatgaatttcgagatgatgacctacttgatcctaggccatacaacaatgacataagggtacctgaaagaggtcgagcggcaaagagacgtaccccagctgatatgacagaatacacaccaccagctaactgcacagaggaggagaggtacttgtctcaaccctg

SEQ ID NO: 28749 - DNA, 415 bp, Oryza sativa
  unsure (1)..(415): unsure at all n locations
tgatgtattactcaattctttacgaaatcacatcaatagttgttctatgtaatcaacttgtagcagtgtgttcacttaagatttcaatagatatttataaaattatggcaggcattaattactggtgattggttggtatactgaggttgtcaatatttataataantgtatgccttaacttatctacagtgttggccaatgagataaaaccacaatttggctagcagaaggcaatcacacacgcgcttgattgagtcatgatggaataggaatctataggatgaattgtgctaccgctctagttatacttatgatatggcaagatgatggaatttgcttaacctaacaaaccttaagtcactcgcataccgctcctttcaagtgatggtagggtatatgtggagtatatatcctt

SEQ ID NO: 28750 - DNA, 292 bp, Oryza sativa
  unsure (1)..(292): unsure at all n locations
ctatactcagaaagaaggcgaagattnttttgacacttactcacctgttgctagattgaccacaattcgtgtgctactttccctagcagcctcacatggtcttctcgttcatcaaatggacgttaagacagctnttcttaatggagagctggatgaggagatctatatggatcaacctgatgggtttgtactcgaaggtcaagaaggcaaagtgtgcacattgttgaagtcnttgtatggtctgaaacaagctcctaagcaatggcatgagagatttgacaaaacattgaca

SEQ ID NO: 28751 - DNA, 500 bp, Oryza sativa
  unsure (1)..(500): unsure at all n locations
tctctgtntatcttgtggattgatcgttttgaaatagatcaatgttnactgtatatatgataactttagtaaccaccatgcatcttgttttgaacagttgaggcatgcatcacctctgaacataatatgggaggcgactgcgattagatcttaatgatgatcatctgttacagataaaaatctgagggaattatgtattgcactacttacttcatgagtctgttctcaaatagatgaagatctagactgcacgtctgcaaccttgataccttaantcacttatatatgacacatgtcaagttgtgacatgttagaaaaaactgaaaatagcaatagtagatttgtcatgtaaaaacttatggcaattaatccacattgagacgtgtcgattcctacctcactaaacacaaggtggagtttattcgtacatgactatattaagttgcatttctggaatgtgcaatttctgacctgagtttatctgctattgttaggacttt

SEQ ID NO: 28752 - DNA, 314 bp, Oryza sativa
cagcttaccctgctgatgatgcctgaaacaagctagtttctgtacctgcaagaatcattcagtgtgattctgtcagtgatgcacgctaacgcgagtaattatacgaggtttagtgggggtaattaatactcccttcgtttgtttcatattataagacgttccattactcatattcatataaatattaatgaatacatatatatgtctaaattcattaacatataaatgaatgtggacaatgctataaagtcttataatataaaacagacgaagtaaaatgaataattacttgggttgatgttgacgagcatgcc

SEQ ID NO: 28753 - DNA, 507 bp, Oryza sativa
  unsure (1)..(507): unsure at all n locations
tgcggcatgcaagcttgcttgctacgcgtgcggcgtgcgcgacaccatctagtctgttatagcgaccgaccgaccgggcgggcatgaacagtgcatctcataccgggcgggcatgaactgtatacacgcttccaggcttccagcaacttcagaacagtgtacgcacctgtgtcgcgcatgcagggcagggcaaggacagcagttcgtatagcttttttttttctttcttttcttggatgaacacgtacgtacctgtgaaccgctacaaatctttccccttccattatacagcgaggaggttgagggcttgttctaataaatcaaagctaaatacaaaatatgaagtttgatcaacgtagatttttatattgatttcanatcgtaaaaaatatataaaacttacctataatactttcattctaaanatgtttgactattaaaatagggaaccatgggactgacactggtttatgttctggggtgaagatcttattatttagtgtataa

SEQ ID NO: 28754 - DNA, 415 bp, Oryza sativa
  unsure (1)..(415): unsure at all n locations
acctgccgcatgcaagctntatgtatcatgtgtaacatcaatatgtnctgtttattattttatagtngttcactattctagtagtttgaaacatatttgatctagtggtgaagcattctttctacaagtgggcaaacaatgctcattatttatggaanaattgggaaccgatctgtagtcatatccaaatttatttgtaaacaaatgccaagctacttgttgaacaccacaaccaaattcttgatataaactgcataaaaaaaatccaatacaaacaactagctaaagcaagttgccttgttatactagccataagctttaaactctngaactaaatatatacactaagtgtatctcaagcttcaattcatgttattcaaaagatctaaatctatctatgttcacatatttcagc

SEQ ID NO: 28755 - DNA, 410 bp, Oryza sativa
  unsure (1)..(410): unsure at all n locations
tgcttgtgtaccanacaaccaatgcagctgcaacaatgatatttgatgccactgcatcctgacttgtctcttcattcaaatagccactcttgattttcaaatgattcaaccatgacttatctcaaagatacaatctctctccacatcttctttttcgcttctactgtcataactagatacgaagcactctgaatgcagaataatttgccatctgatcaatgtacgaactggaatcaaatacttgttttctgcaatgacgggttggggatatacgtgagctgacagagaacatggacgtcaccattcgacatgtcagaagatgttgccaaagctaccagaagctgtaaatcataagaattgcattacttggnttccattcgcactagctgatctatttgcacacattgtct

SEQ ID NO: 28756 - DNA, 478 bp, Oryza sativa
  unsure (1)..(478): unsure at all n locations
agcttggcgaagtctaattttaggatcaccgcggtttttttctcttatgacagcactggactaattctgttgcatgaatgaaggtttcagaaatatgcctccccttgagaaaacctgtctggtctagctggataatggagcttaattctttctgcagtctgaaactgagcacctttgagattattntaagcgagcagttctgcagggcaatcggcctgaagttgcaaggtgcaggtgcctttccttgctttttggatgagcacaatgtatgccctgttgatcttgtccaggtcaaggttgttgtagtagaaattatgcatcangttgaggacctgagggaaaataagattccaggcagcctgatagaaactagggcctattccatccggacctgnggcactgtccttgtccatttgcatcacagccagctntatttcttccaactcgaagagcccagagatatttatctgaataatct

SEQ ID NO: 28757 - DNA, 372 bp, Oryza sativa
  unsure (1)..(372): unsure at all n locations
cttttatagctgttttgctatgtgaatttcaataatgtagccaactntaggttacactcatcatattttacaaagcagtcggtatatcactcggatcatgttattcanggaattacaccgcatatgctacatattaatatcaagtcgcttaattaactattattatcgaagccacttcggttgggtggattatttactccttgactatatgcttggtttggtcacttaaccgcatagtcgagggctacacctattaggtgcatctagtccatgcacctgactttattntcagccctccacagtcttcagatttggaaaagtactctggagaccatggcaaagatgattgaagtactcggctttggagtaatc

SEQ ID NO: 28758 - DNA, 483 bp, Oryza sativa
  unsure (1)..(483): unsure at all n locations
catgcaagcttgacagcttcanaaccatcctgcatgtttagatctatgattaagtatacaaacttggcacatagcagaatgaaaaagtatgatgcttcaattatgaattccatcttacaggtattaacaaaagatcgatcaaatcaaaccattgtatatatgttcacccccatgataggcaaggaacccacgtgcttattgtttcaaaacaaaatatgcatgattntatgaacatgacaaaggaattacctgaaaacaccagcaaatgcaagtgcagtgtattctcataagctgagactgcatgcgacatctacagagtcaattacatattggtctcaatcacgtgcacgcagtgcttctacagctgcaaggctggacgttctccatttcgcaatgtaagacttttagcattgcccatgttcatttagatattaatgaatctagacatantgtatgtgttagatcattaacatctatatgtat

SEQ ID NO: 28759 - DNA, 349 bp, Oryza sativa
  unsure (1)..(349): unsure at all n locations
ctcagctatgagttactacagatggtttgtccacgtacaattctaccgagctgtctggaatctgtcaaacaatccacgtatctcatccagtccgaaattgatttagtgtttgggccttgtaagtttgtcgtgcgcttaacctaacgtggtgtgcgccctacggcaacccctggaacgtcctaatcatacttaatcagagtccgcatcgtttaaatcggttctgcttatataatatgttaagacagtttcccgctaatcggttgtggaacccaattcagtgcttatcattcatagcaattgtgtgcaatcatcttgtcttgctctgtctttgttcncatgcacgattacc

SEQ ID NO: 28760 - DNA, 424 bp, Oryza sativa
  unsure (1)..(424): unsure at all n locations
ctgcagctgataaagtttagaatcatgactggctggaatatcaacacagcatggagcaccagtattgtacaagctatgcctccatttgctacatttatgctcagtcagaatcagtcctttcatcatcagagttattactactcggctgaagatcggtgttgcggaattgatctacgacgtcacttgcaatcttgtcagccgcattttgagcattgctgataagatcaagagcagcctctacgcttgtcctgtctgcaaagccatcaatggcgtcaatttcaatcctcgggtacaaggatttggtcatcgccaatgccgtgctagctcccatactttcagctttcttgatattcttgaaatatacatccggagcaactctcagcttgtcgaanaattcggttgcgtcgagtacactcggaccact

SEQ ID NO: 28761 - DNA, 386 bp, Oryza sativa
  unsure (1)..(386): unsure at all n locations
actcagcctaagagctcccagcagagcattcgaatctggacttctatattgctatttgaatggtcatcccacaaagattcctgctctatacctttacccactacaatagatcatccatattacagcattcatatcacactaatctatattctactaataattgttaactacccatatatatctaatgatcttttaagaggcatatatttacaatggcttgaataggtgttggttccatttaattgcaggtaccaactttgagaacactgtgtaccacctttaatccttctttaaaaccacgtcatccacatataccttatcctctcactaaacacaattcagaacaaaacaaaatccaccaaattcatcgctcctgngagaccaac

SEQ ID NO: 28762 - DNA, 440 bp, Oryza sativa
  unsure (1)..(440): unsure at all n locations
gcttcctggctcaactgaaagttgagtgattctcgtcgtgcgtccaacgatcgatcgcaggcgcagcctagttgacaacaatggatttgctctttgctctcaaatcttatcctctacagctctactgcgaccattgctagtgtcattgaagaagttgcgacgactccacctccagtgtaatctttatttgtagttagaacagatcttgtaatgcttgtggatcatctaataacgacgcggtttacaaagcaattcggtaactgataacagctttggagtggttttgtcgatgcatagacatgattacatctccgttatcgacgaaaacgagtgaaacccgaaaaaattttctaccaaaaaaaaattgaatttcagttcaatntattgttaagcttgaccgatttaccgattcgtaccggcttgatgagtcgatattgtga

SEQ ID NO: 28763 - DNA, 397 bp, Oryza sativa
tctcgggctggagcgcgcgatgatctggactcgggtgaggcatccggtggcggcgtgcctcctcccgtcgtcgacggcgaggaggcggtgaagctgcagcacgactctgacggcgagcgcctcgccggacctgacgccgaggtcgtggcggagcgcgtctaagtccatctcgctagcttcgccttcacggcgttgaactggaacgcgatgtcgaacgcctccgccttcttggacagcaccgcggccatgttcgcgaggaactccttgctgtcgtggacggcggtgatgcggaggtgcggtgggccctcccggcggtcgcggaacgcgtggaacagcgcgatccactgcacctggttcgccgtcgggccggagatgtcgacgacgtggacgaacctct

SEQ ID NO: 28764 - DNA, 322 bp, Oryza sativa
  unsure (1)..(322): unsure at all n locations
cagctggccaagtggctgaggctatacttgggacgcggcttggggcactgttgccactgtcggctgtccgacaaagtacattggtgcctgcaagacttgcggcggagcgggcttgggctgcacttgcggatagacttgaggtgggacanaacctgccgaatactggaggatcggtgccgaagcaacctttgatcgccttgccgcttcgtacgtntggtgctgatcttgcataaggcgaagcatgtcttggagtcatgcccatgtatgccgcatgccctccatatcggcttcggcttgtgttcagggtcggagtagacttgga

SEQ ID NO: 28765 - DNA, 371 bp, Oryza sativa
  unsure (1)..(371): unsure at all n locations
tgtgttgttggagctgaccatagcgtcactatctcttacacgccgttgatgagaacgganggatatgtgtatgtatggtggatatccagccaccacgagcttggggtggccagaactgtgcgtaagggcccgtctgacatggaacgcggatggacttattcaatatggcgagtgcaggctgcttcaatgatggagagcggagcacttctactgtaccatcactctgatctagcctacacaaggttggctgcaacggagacagggagggtgatctattctttcactatggtagagacgataacctgttacatgatctttacttgttcatcctcttctattctcttctaatgcatgcacatgatatgtgtaat

SEQ ID NO: 28766 - DNA, 351 bp, Oryza sativa
ataagatactcagtcagagctgctcccgtataaggagcgaggtatagtaatgtatcaggggaatccgccatttcagctactacaatagtgtattccatggccccctcttcatggaaagtagttactacttgagctactgaggatgctctttgaccgatagctacataaacacatattacatcttgccctttttgaatgagaaatgtatctgtagctactgctgttttgccggtttgtctgttcccaataattaactctcgctgaccgcgcccaataggaatcatcgaatcgatagcaataagcctcgtttgaaggggtcatatacagaacgcctgtaattatacccggagc

SEQ ID NO: 28767 - DNA, 381 bp, Oryza sativa
attgaagacaaagatgatacagttcaaccttctgcaggctgacattcttatactggtctttgaagatcgaactctctgctgtgttgaacatagacattataagtgtgtatttatgatataagagattccattaccagctctctgcatttgttcattatgcttgtcttctccaccttgatcctcgaatatttagctcctcgggtagttaggtgttggagctgagccatgtacatgtccagtagagttttctgtgttatggcacatagatcattctattatactactgttattgatcttggattgtctgtctgtgtggcactctctagctagtgttattttatatctgagacaatcacatctgggcgcatattcggatgctat

SEQ ID NO: 28768 - DNA, 418 bp, Oryza sativa
  unsure (1)..(418): unsure at all n locations
agcttgggggnnttaatgatggtcgatatcgatcatttgcgtcccgcaatattcccaaaataaaggagaactagttatgcttgcaatgcaaatntatgttagaataagttctattccactagcactagaattctaacctcttgcagagaataaatataanatggaggagaatcggtagcaaaacagacaatcaaataatcggacgctatcaagaatcagacttgcggacaagtgggctgagaacatcaaattgacacaaccaaaacagtccanaattcacaagtctttggaaaggagcaaaagaggaggccacctgccgaaattgggctaggtcggcccagcacatngtttggctgaacccgtcgtggctccattggatgcannggtttgatggacggctgagaatggcttcctatga

SEQ ID NO: 28769 - DNA, 513 bp, Oryza sativa
  unsure (1)..(513): unsure at all n locations
ctaagcttcgatagaacgaaatggttctaatgttatttaatggacgcatntaatactgagacatttcatggggattgaattgattcgtacgataaatctctactcttcaatacaactattatttaaattgtgcatacatgcatttgtaagccgttgttatgcccctatatgtgaaatgagtttgtgggatcaacaaacagattttttactacaaaaaaggataaaatatctgaacatggtaactgcgagtaatgcaccactactccatctactttcccaatactattgtcatatctacataaatatcacagcaggctaaccataattgtacattggattagagaataataacaattaagagccagcgtcttgtagatgtagatatggataatgtgtttcgggacacacgggtggtatgatggttggaagctacttttttacgaccacctaacttgcaaaacatgaaatgctattcgcgcgcgcgtgctgcgcgatttcagccaacagctacca

SEQ ID NO: 28770 - DNA, 412 bp, Oryza sativa
  unsure (1)..(412): unsure at all n locations
acctgcngcatgcaagcttgacaggcccacacttgtcttatatcttagttacactgngcactgnatctacaataacactgtacaatcttagtgttattattntnttcttctatagacctgagaaggctcccccaaacagagcctaggatactagataatgtgaaacttattccaccagaggtagaaataattagtatgcattagtagaaaatattntgatcaacgttgaatatatctatgctaatgctagacaatntgtaccagcaattatgaaacagttacttttgggcattacaaaactcctttttttttcctaaacctagtacaacaacaacanaaaactataggaggcatgccatcttatatatatatattgttgtgttaacaatctgatataatcttattcttggga

SEQ ID NO: 28771 - DNA, 348 bp, Oryza sativa
  unsure (1)..(348): unsure at all n locations
cggcgagatcgtcacgaccatccgcacctatagtgagcactctgttcatgatcctgtncttcttaacgagctcgcttagctcgtagaatgtactatgctgcacgtttatgtacaagaaccaactcttaattacatggagagatggagtgagcactatttctggatcgtaaaacaatcattgatataaactctacatggagtgagcactctctccgatatgcatatacacactagatattaactctactaagaggaaatttactacgagcttgttcgattataatcacatagcaaacttgatgttaacgattggatattactttgctacaataaattactacttgaatc

SEQ ID NO: 28772 - DNA, 460 bp, Oryza sativa
  unsure (1)..(460): unsure at all n locations
agctntacactgtgctacactacatatgcattcctttattctaaaatagtctcctatagcaaggcttagatgttgaattctaagtccctaattgtgaccgtcatctttcaccctgacagctatgttgttcatgctgaggttaatgctatnttaaatacaaaccatgcttcagcggctggacaggtttggacttctaatctnctacaaacttaaagcatctcattaatttgcctttataagctaagaataatcttgtgttatcttctctatgcagaaattatatgttaccatgttcccctgcaatgagtgtgctaagattattatccaggtttgtttctggatagaatcagtatcttagagntaacatgtatatttgtcatcacctcatttaaatactctcactttgaggaaatgcattataacaccatatatctcaatcatacacttcataaaacctaac

SEQ ID NO: 28773 - DNA, 378 bp, Oryza sativa
  unsure (1)..(378): unsure at all n locations
agctggtatgtccttaatgagttagcgtaatgcatattctgncttatcgttgaagtgatgtgttgcggcaaatgagcaaatggtattttgtacccttttctttttgcttgagtcaataggaaagccgcactattaagagggatgatgcattgacaaatgagcagtgatcaaagtgctcaaaatcaatttttaaaagtgtttctcctcagttatagagttctggagtttttcggagttttccgaaagtcattttcggactttccgaanatgactatgaagggcaaaatgtttctgtgtattttctgacttgtccgagagtgattntcggacttttccgaaaacatccagaatgatgttntggctatgagtattttcgga

SEQ ID NO: 28774 - DNA, 427 bp, Oryza sativa
  unsure (1)..(427): unsure at all n locations
tactaagcttaagcacttgnggaagaaagggtcctcttgtcgaacggtacaatggatgtcaatgtaccgaggacagctcttattaaggtgcctatgagcaccaattcaccatccgtgttcagcagcggctcaagcaaatggaaggaggaccacaaagtattggattcttgcgagtncattacttattggaagctctgtactggtgaactttctcctaatctctagtatgccttttggtacttattgtagtatcacctcgaggaagagaacccagttatcgcaaccgtccaataactctggattacctccaaagatatacacttacagcgagctggaaaaggcaaccggtggtttccaagaagtactcggcacaggagcctttggtgttgctacaatagacatctgcaagaagagtttgtgactaaca

SEQ ID NO: 28775 - DNA, 369 bp, Oryza sativa
  unsure (1)..(369): unsure at all n locations
agcttggaaaatgtttagggagccgctttacttcattatagttcctgngaaganggagccgcangcccgctattccgctgctgtttattttgaatgtcaggcctgcagcgcctttgtataatgtaaacatcatcgatataatagagatgtgtctattatatcatgtttgtgtggtgtaccccggctttttctgggacggcgaataatacactagcgttcgggaataggcaattatcccggtcgcgacatgtctgagggtacagttcttgctaatacaagtgtatacatgtcaactcatgagactcttggcgatatcattggcaataggatgtcttttcaaactctttgattacttctcgatctatggtc

SEQ ID NO: 28776 - DNA, 403 bp, Oryza sativa
gtagaacacttggtggcagacatcaaagaggaggtcctgatctggagagcggccggaattttttcttgcggagagtagcagcatgttttttggccccctgtaaatagttttcctgttctttttcgaggtttccctcgactcgacagtataatgttgtgtatattgcattaccctcttttatcttaatgaaatttggtcgacttccttccgccgacccagcaaaaacaggttggaactgtacaatttgagtaaaataaatagcagggaaaatggaaaagatgccaatctccatctgaagcacaatctaagtgaactagtactttcttaaggtggtagtatattttgcatgcctgaaaacaaaggatgcaacgaggaagaagtgttggagtctcttaaacctcac

SEQ ID NO: 28777 - DNA, 449 bp, Oryza sativa
  unsure (1)..(449): unsure at all n locations
ctcagctcacanatgagggtgagtccgcgccgaagaggcgcgaagatgacatcctcacanaggcgctcggaaccaaagaacatcctggccgaactcngggaattggtagcgatgtgccctggaagcatggactctctcggtacagctcccaatacaggaaacggagagtctccaaggaagagagggacgctctgttgaaagccgaacttaacggtgaggtcattcaataactagaagctagcatgaatgccagggcggaagaaagggttaacaaggttctcgccgacatgaatataccccgagtcacaacacctgctgngcaaccaactcctcgtgtcaacacgacgcgagttcgtcacagcataggagtagttgngcatccacagaggtgccggcctctggactcccgatcgcaccactagctgcagtggaccacattgaggtaattg

SEQ ID NO: 28778 - DNA, 430 bp, Oryza sativa
  unsure (1)..(430): unsure at all n locations
acctgccgcatgcaagcttaaccccgaggcgattcgggtgtccggttgtgtatactatttctcactgngcgctnngatatatcttgaagctcgcttctaattcaactgtcacaattcttgttttctcgataacttccaatcctaaacgctcctccatagtgaaatcatggattttccttcccaatgtgctcaggttcatggttctgttttaaccatgacagcaggaggagtgatgatatatcatgaaattcatggccagactntaagattgtcttcagaggatgtggatgccgagaaacaccctctggttttggatgctcgctgacgccacaaaatgatcttgattttgctaaagaataagagtgtactatggaagaatacgtcttttcttccaagatattacgaatacgctttttacatcaagtacgtt

SEQ ID NO: 28779 - DNA, 91 bp, Oryza sativa
aacccccccgcctctttacaagttatacccccatttttttttttttcctgtacccactcggggggtgtgtcgactgaatctaccttcaact

SEQ ID NO: 28780 - DNA, 479 bp, Oryza sativa
  unsure (1)..(479): unsure at all n locations
ntctcctagccctnttcatcaatggactcctgacgtctaccaatgagtgtggttcgtccgacatatacctacctctatatctatctctgacgtgtatgggttttgcacaattcatagattgcataagagaatgcttctccctccaccaaacagacttttaccaaagttatcggatctttttgtcaaataacaattaaggtgaagcagggtcaggaacaacgaatctctttatgattaacagatccattttgcaagctcgttattacgggtagcttctactaagaattggactaatgaccgatacaatgcttgaattatcgaccgagatgctacatagtgtgttctcatacttcagagactacgagngtaatatgagcatccgttgacaaaaggatcaccctaagatgatcatctcatggctatcgagaacgaatcagatcagatgggtctatttctcaacctttctgacttgctcctac

SEQ ID NO: 28781 - DNA, 335 bp, Oryza sativa
gatgaccaggcaacagctccgtcggtcgaacctttttgttgtaagttgccgaagtgccacgggcatacttgcgcatgtgctcgagtgcttcgactcttaccccctccaagagttcgagcgacacctcgcgcccctcttcgtccccagagaacatcacccttggtgagttagcccctagctctattggggtcattgcctcatcaccataaagaagcatgaacgggctaaacttggttggtcttgtggaggtcgttcgaaaggcccagagaacagatagcatttcctctggccatttgcccttcactgccccctcaagccttttctttagagcttct

SEQ ID NO: 28782 - DNA, 431 bp, Oryza sativa
acactgttaaccgtgtggcatgtcgattatgctggactctaggctcttctgcttatagaaactgacgcattgatgaactttgtttatattattcgccgaacgtatcatcatatcataatcatcttatcatagtgttatgtagagtgtgatgatgcacgaatgaagttacatagccatcttcatacatagttaaatgcgtgagcatgccacactccactatatccgagttgaatatttgacttacgactagattccgcttcgacagaccgctagtgccatattctggtctaccgttctgataccagtttcgagaataatatatggatatgaacatagttgaggaatttctcgactggatacatccctacatggcactaagatcatcacattctgctcgtggtagcaagcagcaaccgtaagagcaactcaca

SEQ ID NO: 28783 - DNA, 399 bp, Oryza sativa
  unsure (1)..(399): unsure at all n locations
gcttgtgctcanggttntactcacatgtaggnggttgtattatgatgaaacttttgctcctgttgctagaattgaagcaattacacttttgttggcatttgctgcttcaaaaggttttaaagtgcttttcttaatggntntatacaggaggaagtttatgtaaaacaaccacccaattttgaaaatcctgattttcccaaccatgttnnttcgttgtcaaaagctttgtatggtttgaaacaagctccaagggcatggtatgatagattgaaaaactttttgcttgctaaagaatttacaatgggaaaagtggataagactctttttattacaagcatggtgatgatcaacnnatttgtcagaattatgtggatgagtatcatcttggttgttcatctc

SEQ ID NO: 28784 - DNA, 422 bp, Oryza sativa
  unsure (1)..(422): unsure at all n locations
tgggcgccagtcggctgactttccgcagtcggttggctntctgctgtcagctggctntcggcagtcggctcagcatctctggatcaatctggctctgtggcagccggatcacgttctattccaagtggatctatatcggacgggctcctgcacagtgtcctatcgatattcagccgaatttctattagagaagcatgtccaaataaaatggtaccgagaggtttatacctacaagatgttctatatcttggcatttgacggccagccagattttcctgcgcatggtatgctntggcggtttattgtgcgttcctttgtccccagaatatgtgctgtcatcgtcttcgtcgtcattaacaccaactatctcttggagaacctgctgacacccggttagaggctgaggtgcggtctgacctgat

SEQ ID NO: 28785 - DNA, 472 bp, Oryza sativa
  unsure (1)..(472): unsure at all n locations
aagtcacctgccgcagcaagctntccatggtaataactcattatttaatacattatattattatcaaatgattagattatggtcgacttagaaatgtgctaataaataaaattgatattgtacagtagagtagatgtcaaataaatatatttaacatgtgttgtcactgtagcaaccacataatctaagtataagtgatgtctcaaatgaatggatgtataggaaaatactagtgcttatttaatattcgatggccatataattaaattcatgacttaaaaattagttacataaagtttagcttcatattttgtaactaanatattaatactcatagataaatctttaacttgcttatgagaaataataacagagctgggtgtgatgaaatcaatcgaatgatagatttaaccacgtgcatatcctatatagtcagatatttataaattgcgtgacacctattatntaacat

SEQ ID NO: 28786 - DNA, 253 bp, Oryza sativa
  unsure (1)..(253): unsure at all n locations
atcctctgagngacctgccgcatgcaacgcttgccgcgacgcgtctcatgtgttttgacgagttttcatgttttgggcacgacgcggagtgcgggtaaagtgtacatacactgcagcgtgagttaaccaaatctatacgaatagtcgtgctcgcggctattgagcaccgggacatgtattacacttggctagactctaaattctcaacttgtgggggatgggatattgcacgatgaaatttatgctgatggag

SEQ ID NO: 28787 - DNA, 376 bp, Oryza sativa
atgacacactgatggagtacttcatgcgttgagacggaatcaatatagtacaattacatggcgagattcaagtgcaagaagaggatcaagagtccatcagatggaagctaacagtgaatgggatgcactcggcggcattggcttatgacatgatcttcatttcacgcatccgctctcttagtgttgatctgatttggtatgcaagagtgccatcgcgcatcaaattcttcatgtggctgccaacataaggaagatgtctcacgacagataatctgcaataagttgtggccgcatggcgatgtgtgtcctgtgcaatatctagaatgagagctacgaacacctattggtctcatgccgcttcacgaacatggtttgg

SEQ ID NO: 28788 - DNA, 283 bp, Oryza sativa
  unsure (1)..(283): unsure at all n locations
gtagctgcgaaatgagggagagtctncccctgcttaggccgatcacgccgaagtttgtttcgggttcgaggccacacccgaaaatcatattgactggcatcgtgttgtcacctaacgtgaacggttggaggccgaggtgtccttccgtttccgatccgcccgcaccaccgtacctgcaggtgtatttgcatgggccattatacggtgcgccgcagtccggctgcccgacgattgtcctgcagcgcttgtcttcgcatgagtataagctctcgggcagcgtctt

SEQ ID NO: 28789 - DNA, 465 bp, Oryza sativa
  unsure (1)..(465): unsure at all n locations
tgcactgtatntgctttcattggtcagatgcacatggatagcaacatgaaacatgtcagacagagacgatgtttactctttgatgaaccgctcagctcaaagttagagtcttgaagctccacgatccgatctctaatggtcatgttcagtttcctagcaagctacttggcttcacgcagctggtttctgtgtgcttcaaggggtccaaggtggggaactagcttttcaagggttgcggtcttcgcctcattcctgagatggattctctgtaccacaaatatatctgtatctaagcaaagtggctgacaggatgattgaagccgtgtatagggatacttacatttacaagacgagtagcttggccgagtgtccctttcagcagacatacttcctcatcctctttctgtttatttattacgatcccctgtggttgcatttcgtcatctcaccacttgactaatatgg

SEQ ID NO: 28790 - DNA, 447 bp, Oryza sativa
  unsure (1)..(447): unsure at all n locations
actactgcagatgcgtggcttcggcggcggcgccgctgcatcactacccacctattccgctgcctgccatcgagctgctaccttccacgacgatccctctaaagcccacgaactttcccctcttcccgggttccccaccctcaaaccgggacctaatctatagctaggtactcctcctgagttcaaggtgccacttgtgctgaagaagaagaggtcaccggagccggagaanaagagcttatagcacaaatcatgaagtatatccggtgacccacaatcagatgaattntctgtagatagaatgggtagcaatccgataaactctttgtataggaatatagaaatattaggtctggaatgacactattgcttacatctttcctaacaagtaaagggtcgatgaagctaatagtataacacactacatattgatagcggacacatcca

SEQ ID NO: 28791 - DNA, 303 bp, Oryza sativa
taacacatgctcatcattcacatagtatacatattgaccaactcctatggtacacatactattattatgtgtgaattgtacattcgcctatcatccattatcaaaatacgtctcaatttataccgctcttaatccaatatttgactttgaaccagctatcttctcatttggtgcactttgcaccacctacaacgtgtcatctagacatgttcgtgttctcctatacccaaggtattgcatgctgcagatgggatggggaggttcccaatgtgtcatagccgatatgccactagaggtcattag

SEQ ID NO: 28792 - DNA, 405 bp, Oryza sativa
  unsure (1)..(405): unsure at all n locations
gagtcacctgcggcatgcaagcttcgctccgcctgccaccgcaccgtcgcgtgcgttatcggtgccagccactccaggatccctcccaccgccgcccgccactgccccgtcagccccggctccgccgccgccaccgtcccactcagcctcgctcgaagctgcgcgcgcacgctcgccgtcagcatgccgtacagctcgtcccgctcctccgcccccaccagccgcggcgaccgcgccatcctctcgatcgagattatcacccaggcgtagcgcggcgccaacgcgggcgcgcccagcgttcccggcggcgggaccagcgccgccgcgctggcgctcaacagcccgctctggctctggctctccaagtacagcggcctccccatgcncatatccatggacatggac

SEQ ID NO: 28793 - DNA, 356 bp, Oryza sativa
  unsure (1)..(356): unsure at all n locations
tatcttncatctgagaatactatgcatgaaaataagcgcttgtcacaaaacagatttttatgggaatgtcatgccctattcataagtccaacgttccatctgtttcctcataagaaacagagagaatagttgtggattgcaataactcccagtggaactaatcagatttggatgctattcctgatcatcaaagtgaaggtctgaggcatgatctttgtacatggcacatcaccttcatgtcttgaaatggtggactagagtagaagtagaggcggacataaccatggagttgaaaatggaaggattacagtgctggttctgatggactgtgagagctgacatgaaccaggacctga

SEQ ID NO: 28794 - DNA, 359 bp, Oryza sativa
  unsure (1)..(359): unsure at all n locations
gcttatctagaagagtccgagttcaaggaggacgttcttggttttttatctattaattacgcagcatttgtaagtttccttttatctttacgaatgtgtgtttagtgtccgataaggactttatcgtttccttttatctctaggagagtttctttcttgttctacaaggactagtatntacccatgggtataaatatgtacacccggngttattggaaattatctcaggatcaataatactactttctgcgcatcgccaccctctttctcgaggtgtttacatatcaaccggcagaattnggcacttgacgcggngctgcatcggatcagttcgatctccagcgaaggggtaagtccta

SEQ ID NO: 28795 - DNA, 411 bp, Oryza sativa
  unsure (1)..(411): unsure at all n locations
agcctatattcttgtacatccttgttcgttctatattgtatactatttagtcttaatgtcacagcntggaagtatatctggcgtgtaaaaactataccaacaaaantatactctatatgtatgtttcatatcaatgtcggttcctgtattaattaacaaaatatctacgagtcaacagttatatgtcttgacctttctgacttcataatacgccttataaaaagaaatggacgttactttcttgaaaggatctgaaacctatgccttatcattctaatctaggcatgacatgtttccagattataagcatcggctttaatgcaatatgatgtatcccatcaaggcaatcttacatactgaagaaacaaaatactgcatgaatgcgaagatngcttggacattagcaatgca

SEQ ID NO: 28796 - DNA, 420 bp, Oryza sativa
  unsure (1)..(420): unsure at all n locations
tgangctgcagcttggcaccttggcggcgcanagacctccggctgtctgtggtcttgctagaagagatagagcgaccagaacgagcgagcgtatganaagaaccgtcgacagggccgacctggcccacgttgttgggcccaaagagtcgagacaaatcacatctcgaacttccgctgaagccttgccgtgcaatcaaaaacagacgtagatgcgtaaaactactgcaggatccggttcccacgggcataccagaacatgcggcaaaagtttaggatatagtagtaggcatgcatgcttcggttgttctgctgacgtaaatacaatatatgttattntcttgtggccttgttagataaaaaaaaattggcaaaaacgtacatcaaatgtttgacatgtgcatggagaataaatatggaaaa

SEQ ID NO: 28797 - DNA, 330 bp, Oryza sativa
  unsure (1)..(330): unsure at all n locations
tnctgaccagatggatcgcacgagcatgcatcggtctggtgatgtgtggatgcatctagcgatcgngctacaggagattaattggccaatcaatatatgcgagctgcatatatgcacggatatatgctaacatacacacacaagatttctatacccatattttnttgtgtggtactaaacagattaatctgttaattgatttattttgcatgtacccacaccaattgcctctgtcgccgctgctgggcgttcgcatcttcaccgaactgccgcctcgtctgcagacgactggttgatccgactacacggntgattaggcacaccaccgtt

SEQ ID NO: 28798 - DNA, 521 bp, Oryza sativa
agcttaaagccatgaatccctattatgcatatgtatatctagatcctgcataataaacaaacatataggatgggtagtatctgatgtaaatacagctacttgatgaaagttcaagtattttaagatggttataaatatgtatatctcctcttgtcaagtttgatttccctgagaagatgactctttacgtttaaacactctgtccgactagtcatagtccccaagcaccggcagtcggccaatgcacttcccaaacatgcatatgagtgacatgagttcgtcattaatggaactgagtttcatggatcagaaattactacccgggtcttttgcaattgtaagagcagaaaaaaaatatcttatctctatgcgtttgatatcttccaagtaatacttagcaacctttgcgtactcggctatccaacgagtcctccggtgctaggaatctgcccacatgcaactatccatagacaaaccaaacggagagcataggaagatagaactccatcacgtcgatagta

SEQ ID NO: 28799 - DNA, 285 bp, Oryza sativa
gagatggctactgatttgattcttcagtcgctccctcccagctatgagcctgtcataatgaatttcaacatgaacaatctgaataagaccttggcagacatgcatgggatgctaaagactgcgaatgaaagcattaagaacaactcccaccatgtgatgtgtatgcataagagcaagctccacaacaagaagagtggtccatagagaaagctaaactctgatgagatcacgagtactaggcactcttagacccagggttataagacagggcccgctaatgatgca

SEQ ID NO: 28800 - DNA, 401 bp, Oryza sativa
  unsure (1)..(401): unsure at all n locations
ttgggtatgtttcttggtttctactaacaatggcagggatacgcaagaataatggggatagctgtgctcaacatcgacatcttcgtcgagacatgagganggatcaacatgaccattatgaggtaagtgatgatgttctacgtaagatcaaatctgcactgccttattttcagggaaactatgatcctcgtgcctacattaattgggagcctagcggtgatagtgaatttcaaaacatgtcttgtcggagaaacaaaaggttatgtgtgcctctagtggtttattaaacatgcttctaatgattggaacatctntgangcataacaaaaccacatcttggaagacctgaacatatttagagatgttatgttccatgattatgctgaattctgtcaacaact

SEQ ID NO: 28801 - DNA, 366 bp, Oryza sativa
  unsure (1)..(366): unsure at all n locations
acctctgagtcacctgcggcatgcaagcttctcaggtttatctcaaattatgtctcttattgttagatgtcgacgaagttctttaatgttaatagttacttgatgaaagttattcaaagcattccaaatctcattggcagttttaagatgcgaaacacgattaanatccaaacgagaaattccactcaaaagaatattgcgagctctgcaattgttattaaactcagttttcaaagcaatagtgtcaatttgttcaggaataacatatggcagtgcaactttttgccaaacatcataatcctcagccataatgtaagaatgcatcttatcacaccaataagcaaaatccgaaccattcgaaacatg

SEQ ID NO: 28802 - DNA, 460 bp, Oryza sativa
  unsure (1)..(460): unsure at all n locations
ttgttgagcctanaacccaaagaagccattaataactgtcagtcctcgcacactaagtagaataaccaaacaaggcaatgattaaccaagtaagcaaactgaattgataataaatcacactccattattatgatgatagcccccgactgacaacggttagaagaaaactngatgttgacagtcaaataggtgaatacaatgataaatgtaagcgtagaaacgacgaagatgttcaatgtgccaagagttgtcaacgagagtgccgtcttcgcgcttgagtcgatatgaaccttgccgggtaacttcagagataataaatggcccttcccatagaggagataactagtgccgatctcgtgtggtttgaattctccgtaaaaccatgtcgtcgactagaaaggcacgagatcgaacattgcgattatgataacgtcgcaacccttgaagtaccgagctgact

SEQ ID NO: 28803 - DNA, 331 bp, Oryza sativa
  unsure (1)..(331): unsure at all n locations
cagacataacactaggactagcctcattaaacacacatgcattcctatgattccaaatctcccaagccaccatgataatgagagagttgagaccttttttctatccttatccaaacctctaatagccttgacccaccaactcgagaagcggatggtatcttggctnggtgagatgaagatcagccctatcctttgaagaattagagaccaaacctgctatgagtagacacaattaacaagaatgtgttgaatagatttcttagcttaatcacacaacggacagacggcggtgtgagactacctccgtttgtaagacaatccgcatccaaca

SEQ ID NO: 28804 - DNA, 329 bp, Oryza sativa
tagcgacactataaatactcaacttaacactcacaccagctgttgagatcactagatgtgctattctacggagagggaagtgatctctgtggcacgccttgttgaggtcggtgaaatcgacgcacatcctccacttcccgttggccatccgcaccatgattgtgtttgctagccactctggatggaatacctctctgataaaccagctttagatgatgtcgagctcttctcgtatggctattcccatctggtgcaatcatcgcagctttcgtttcactggcttggcatgggtcgcaccatgaatttgtgcttaaacacctccctatgga

SEQ ID NO: 28805 - DNA, 454 bp, Oryza sativa
  unsure (1)..(454): unsure at all n locations
ttaattaacgcagctgcagctatggaaatcgctagccctttgctttcttgtatgattcgtgaaccatagcgcttatgttaacacaaatatcttgtgtactcattcacacatggtgaaatgtctacataagaagaaagaaccttatgctcctcaagttggatatatctaaggcctttgatgtagtaagttgcgctttcttgcttggcgtttggaagaaggttatgcaacttgctctgtcagatgctctccacttcttccataaaggtgttggtctatggagagacaagacacactatatntcatcaaagaagactgtgacaaggggaccttttgtccctcatgctactcattgtggtcatagtcatgcttaattccctcgtagttcatgccaccctggacaatctcctacaaccgctcgtagttcagacagcaactcaccatagttatatatgtg

SEQ ID NO: 28806 - DNA, 446 bp, Oryza sativa
  unsure (1)..(446): unsure at all n locations
caggtgagcctacatccagtncattgtntagatcacactacttacttctaaatcccatagcttttgctaaactatagaggttgacctcaacatcacatggggcatgactcgtcacactgtacatgtggatgatgcatgtaggttcagaacttcagattcatttgatcaattcgctacaagcatccatataattctagtcaactctgtctgtatattgcctaatggtctgcacaaactgtccatggggataaacattcttgtcagttactgcataaaataataataacacaggctaataatctttttgaactctaatgctcttatcacgaactgagaaaatttctgcattaaatcatggcgacactgctgtgatgcactgatgtaaatgtacggattacatcttataatctgtcgacacacatgatctacactatttgattgggtcc

SEQ ID NO: 28807 - DNA, 362 bp, Oryza sativa
  unsure (1)..(362): unsure at all n locations
accactcggtcaggatgatccgagcggtcaaacttgatggcaatctctgaccatcgaagatattggggcgtgtcgggctgaacagcattgatctcccgttcggtcaacatttgcttccttttagactcataagccagggggccgccgaagatatggttgagctccttgcggtggtcttgaaatcctaccggngtgtcgccgtcgtccttcttcctcgacgtgctatgttcttcgtcggagatcttccgtgtagtcttggtgattgctccgcgaattgcttgaaacgaaacaantcttggccgcgtgggtggagttatgatggtgcgggcattgggagttcatgatcttgtcgaacgtgttga

SEQ ID NO: 28808 - DNA, 508 bp, Oryza sativa
tctccactctggactgctaggctcgaactcctgatgcaggtggaatcttcttttcaactgactggaaccagtgttgaacctttagctgacttcgactgggttgtggcacttgatgatggggcttcaggtccagaacttcgcatagttcatatctttggagtcaacctcatacaagttacccgcttcatgtcatgtgccgagatcagctcgtcattactaagataccatgcttgtcatttgcttctaactcgccaccaactgcctcatattagctttcctggtctccgggtgatagctacttctgctatatgatgcaagggtcgatcactttacctatgaattatgctttccaagggagccaacttatcctacttgatatactttgacgtcataccgaatgacattgctgctgaacttgttatcgtctgatcgtgatcctgccagatctgaagcttcagtgttgaggtgatttaatctgactctgagactatcttaacatatactggtc

SEQ ID NO: 28809 - DNA, 353 bp, Oryza sativa
  unsure (1)..(353): unsure at all n locations
agcttgtctggaatcaacctcgtgatgtattgtgcattatatattccctgagngaagggccccttggagatggcaatctcttgcatcatgagagacacaatgtcgaactgacggccctgaatgattgcatcgttgacgtgccaagccaccccctaatgtcatcatttgtgccaaggtgagggaggatggtagctctcacaatcctgttaaccacactggngatagtcctcaagccggcaaccttcccatgtgtgtaccgcactccatcttcataaaactgagagagatagtctaaggagagcggattgtgggtgtgctcctcatacaagtcatctccaaagtccaagcgaata

SEQ ID NO: 28810 - DNA, 406 bp, Oryza sativa
gcgacacatgatctaactgggtgatagtgagtcgggatgcaaaagggaaatgctagttgggtgaatttgctgcaattttagtcctctacattttgaatgaagatccagagacctgcttgtatgtgttcctactgaattgaatcatcggcttgctccttaggaatggtcaggctgactgaaaatttctgatgttgtatattgcacatgatacctttttagccttcttgttaatggatctatctacatgctaattggctatgctggcctcttattacagtgtcgtgggctctgggtctctctgtcttggagctgctgaatttcctaccttgtctacatagaaatattttggtcacaactgtacagttccactctagcctgtacactacaagttcttttcgcgcttatt

SEQ ID NO: 28811 - DNA, 455 bp, Oryza sativa
  unsure (1)..(455): unsure at all n locations
agctngcgctattgctaggagttcactagggcaaactggtcttttcttggtgtctattgaagattgcataacanagtagtgacagggaatcacggtgccatatatggaagaaaatggttgtccaatggcatattatagaattaaactntgtcgacgtcatgttttggaactatgacctgttggtatattaatagattatctcttttnttttccctgtcctctattttgcgaggtctgaatggtcttgtatttttctggttaggtaaggatagacagtggtttttgnttcaggaccatgagcttattgattattctgggaggcctaaaagcttcgttccataatcagaaaagttctcacgatgtgtctttttgagaattagtccttgccttttgaatcacggtaatatgtcgttctgatacttgcctttctgggcatgatattctactctcaacat

SEQ ID NO: 28812 - DNA, 353 bp, Oryza sativa
  unsure (1)..(353): unsure at all n locations
tgactatcttatatatacttaaagccagacctgagttcttcaaatgaattgaatgccatattgcatggcctggagcataaatngcccattaatacatatagggaaggaactagctttagactatcataatcatcaagaacaacacctaatttctccatggtcttctctacgagataacacatatgaacattctgagaatatggctcaataataatggttatttgaaatagggcctagtacaaatgagaataccttatgattgtcaaaccaaacatctgaaagtataacaaacatatcattcatggccatcttctttaacgttgatagccctacatgtttgatattgtcattga

SEQ ID NO: 28813 - DNA, 445 bp, Oryza sativa
  unsure (1)..(445): unsure at all n locations
agcttgcctgccggctgttgcttcttcacctcattatttatcctctataatggngcaccagatggagggaacatacgctggcttcttgctggtgtttgttcttgcaactgataatatgctgaacggtgcaaatgttgccagaagtgtacacacagtgagagggcgtcctgccatgctcttatcttctactgaatctacattacggcgatgggtcttatgatcttatccaagatagtcagtatcaagatactacacagaatcgttctatataatatttctgtctgattaaaggtagatatttttaatatgaaatttgtaatatgttgtatggattgaaggaattaatattgattgataaacttaatctattttctgaacttaagtgggctcattcataataatctcaatactccttattctaaataatatgttcatatgagcgtat

SEQ ID NO: 28814 - DNA, 357 bp, Oryza sativa
taaacctgacactggtgtcatgttctgcactagtagtagccacggtttaaaaagccgcactgaaattatcgaaatttcggttatatcatgaacccaatcccccgataagatattatttcagcctgaattaatgtttcgagaattttggcaatattgaccaaatttgactaaatattgctcatgatttcgaaaatttctaaaatatcgctatatcggcactcccgatatgaataccgaaaacaaaagaattaaccctggtagtagtgaaaaatctacacaccacattaagttatacattacctaataacattatgtttggcatggtggaatcacgtgaagttcttggagcaggtgctg

SEQ ID NO: 28815 - DNA, 433 bp, Oryza sativa
  unsure (1)..(433): unsure at all n locations
agctngtgcgtcanactggaaacctcaagggtctatgtatacttaattaatttatacctagaacctaaggctgagttcggcacccagagttgggaactcactcccctctttttccgcgtgcacgctnttcaaactgctaaatggtattntttttgcaaaaaaaattatataagaaagttgctttaaaaaatcaaatagatccatttttgaaaaaaaagctaatatttaattaatcacgcactaatggaccgctctgtttcccgtgcgggagggattcgctcccaaccacaagtaacgaacatagtagcatntagatagctggtcactggttcataaagattgggcaatgctgatgcagaccaacccatcaaaattatacatcaatttgatgtgacgtttgtgcactatctcatgtanaacattatcatgtcac

SEQ ID NO: 28816 - DNA, 210 bp, Oryza sativa
  unsure (1)..(210): unsure at all n locations
tcgatttcaacctcgacgacctgatgatgaccacccctcgcgctatcccgggctggattcttgaagccgaagccgctggcgcctgcgtgcgcgttcgcgaatgatcctacgttcaagtcccaggcgagcgactgcagcttggcgcgcgttctcgccgnctcggctgtgccttcgactgcattgaggtggtcccggtaacaccgctcgcac

SEQ ID NO: 28817 - DNA, 322 bp, Oryza sativa
  unsure (1)..(322): unsure at all n locations
atatcgtattaccccatctgcgcatgaatagaacatattaactcattatgttggctagggggccggngctacacatctagttntgtgtaatttagttgattaaatagcgaatttcacataactacacctttgatgcacataaaactataagagagctgtcgtttttagtaagtgcactaaacaacactttcagttgcaacgttttcaaaatgaccatataaggagaatgcaccacaagtgtagtctctgaatggctatttctgctgaagttgtgcataaaattgagtatgcaactcggctgcccatatagctaataacagag

SEQ ID NO: 28818 - DNA, 347 bp, Oryza sativa
ctagagcttagtggttcttgatgatacagtagcatgtggtgcatcctgcccctgcagggccgctgatgcagatgtaccggggcatcatcttcagatatcaagccatcttttaccggcatgggagtgatgtcgcatttctcgcgtgatcgacgaactgtcatagctcgcttgtcaagaaaataaactcagacaaaccactataaggctctgaatatgcaaacttctacgtatcaagaatgcttggactctctctcattccacaacagataaaatcgtattccaactcggttaaatgtcacattaagaaacgaaccacatatgaccactatcatatatattaaacactc

SEQ ID NO: 28819 - DNA, 368 bp, Oryza sativa
  unsure (1)..(368): unsure at all n locations
tcactcctctgagcacttgaataatcatcagtacttttgctacaaattccactctctaagcaccaagcatttaggccgatgtgatcacaatccttttgccatctccctacaccttcatgatattgtctaaccatcatgcactctctcattcggtgagtattaatgaacgcttctgtcgatctttctggcactccaaactggatctttaaatattctattcaaagggaatctncaatctatttctgacttatgggcacatatgtccgaattccaattcatccgcgctttaatcaattgtattgtgccccagctctctactccggatcagtcaggaccgacgcacaatgcctggcagaccatcctgtcta

SEQ ID NO: 28820 - DNA, 293 bp, Oryza sativa
  unsure (1)..(293): unsure at all n locations
gcttgcatcggactatacctttgagcatgcatgctcttactccgagntggagnaattttggtccctagcattntactatgtcttgtccaaatgtaactaaggtcataaggtctaatattattactctacagatatgtaaggtcacattagatttataaatggtgatagaataacaaatttaactgtatgaaacaactgcatntnttttcacaaaatgattcttttgcgtggacgtcaaattcgctcttacacgttcttaagttttttaagatattntataactatttcaagcg

SEQ ID NO: 28821 - DNA, 450 bp, Oryza sativa
  unsure (1)..(450): unsure at all n locations
actagctgcacgcttcgtcgtataagtcgtaactagtgtgtaagcagcccatttaatctgtaggtgataagtatatctactgatgctgatgtctttgctaaagttataacacaacataccaatcgtggtggagaaagcctgacattttcatcctttcctgaagctcgaatgtttgtaaattctttagttctcacaggatcgatctgaacaacagaagagttatttatgttgggtattagaacagatacctaattcattgataagcatataatcaacttacatcaagatcactgtactggagtgctctcaacattcatgccttcgacgccttaaaaaaggaaaagaaatatgataaggaaaccctctactcttagatggagatcatagtaacaaatgaataatgtcgatacctccatccangagaacatacagaataccacagctctaaac

SEQ ID NO: 28822 - DNA, 399 bp, Oryza sativa
  unsure (1)..(399): unsure at all n locations
agctntcaactaaagtacgagtacgcttattttatatgtacttcgtaacaggcaagctgacaattagtagcgtgttcggctcacagactgaaactctcatgtccacagaattcttttatgaatactatggcagaatgaaaaagaacttacgaatattcatacacaaccttgtttgctccaccaatccaatcaaccatctcacttgtttacacacaaggaactgatcattttcagaattcagagtgagagatagagacgacagtcgcacatcaccacatgatagtatcatagcactagtagcctactgggggaacaagaaaggaaataaaacgcacttcgatcatgttatccacatttgagttctttgacattaaaacagctcatgttacatggggagtg

SEQ ID NO: 28823 - DNA, 300 bp, Oryza sativa
  unsure (1)..(300): unsure at all n locations
agcaccatnatatcactgggtttttgcccaactaggttcgtatttccatttaaaccgacaagctggaaactgttgataactgaaccaattctggtcgtaaaggtacctatgaactagcccanaatggctatttgtgcatacggcttcatacattaataaacgacgacagaatagctgtccttcaatgattatctacaagctatagacaatacactgatacctggactatgtctaatggtgcgaaatctgatactctgtgctgatggcacatccataagatcagatggatggtaacaataa

SEQ ID NO: 28824 - DNA, 431 bp, Oryza sativa
  unsure (1)..(431): unsure at all n locations
gcttagttcctgagcatctagttttcttctataccctcgtctgcctntccctccacatggtctacaccaggaatggtagccgcgcaacatgcgaaggcagcaatggcgaaaagcgcactgatggggtgcatccccacagcgattccggctatggtccgccaccacttcccgagaatccgacgctagcccaagtgatggcacatcagactcagatgatggcagacatgatgcagcatatgcagcatcagcaccagcagatgcaccaccggatgctgtagcacgccggacagcagcatcagcagtttggtccccctccccctcagtccaagttgccagagtttctacgtgtcaagccacccaccttctccagcaccaccaaccctatggaggcgaatgactggctccatgccatatagaagaagctgaatctc

SEQ ID NO: 28825 - DNA, 107 bp, Oryza sativa
atggcaaccaccatgtgagctggctctatcttgctgaccattagaagctcctacaagcgcatggtcctatgctgtcgctgtcggacccatatcatcacttttgtatt

SEQ ID NO: 28826 - DNA, 432 bp, Oryza sativa
  unsure (1)..(432): unsure at all n locations
tctcatcctatggatggtacatgttggccatcactagttgatggctttcaccataccaaaccctcaaatattataagaagggccaatntgccatggataatgactacctgataatctacgcggagtagaatctttaccctgctgttattgtgaaatgatgtacttcgaatgatactactctaaagtggtgaactatggacngtatacgtccaatctctcattcgattaattacatgtgatacaaatcatatctaatatagttcaaatcgactggcgaaccacacgcaatattttaactcctatgnttaaatataacatagggcttgaaaatagaatatatatatgcattgtctccagccatgcatgtttccaagattccactactatttgagtggcttctataagatatgaaacacatacccacaaacgttg

SEQ ID NO: 28827 - DNA, 286 bp, Oryza sativa
atggatctcaacgatacgcctgccacgcttcattatcactgatgatacatgttccaaagaagattatcactgatgaaatcttgcggcggcttgtgtcctgctcaactctgcagttgtaccacgaaacacgagttgctgttgatctgttgtattctctctcagcctacccgcctagcggacgcgcgatgggtgcatcgtctcggcgactatgatgctcccgatgatttgcatctgcgcctcgatttgcatcgcgtgatggcgtagtcgttctctctcaagagcgagc

SEQ ID NO: 28828 - DNA, 332 bp, Oryza sativa
  unsure (1)..(332): unsure at all n locations
gcattttagccctcgngctnatggggctttgcgttagatatggcacgcatggagacgatgggaggtaactacataaattttggaggggttttgtgaagctggtttctgaaattggaagctaatagaggtgagctagaggccctagtagagcttgttccgaaattcaatcttgtgtaaagcattcagcttacttgcatgtacggaaagattgccgtttatactaccttgctgctttcgtgagaatcggaacaaacataacgtagctgtgcttgtgcttgtgcttgtgctcttctctctctcacacacacattaagaagaggagaactggagat

SEQ ID NO: 28829 - DNA, 418 bp, Oryza sativa
agcttcattgcatgatgcaacctgaactttattttctgtgactaacagcgctaagctttgcttggtttcatccacattaagctgatgcttctcactgaaggcgaaagggagacaataagcatgcatcaccaaggcgtccatttcacctgacctaagtgaaagtatacctttctgtcactgcaactgtatcttgctgctcacagaatgtcaaaaaacagcatgctttgggacatggcccagtttattttaactaattacgatttgcccagctgctttcttcatcatcaccttgatcctttttttaaaaaaaaaatcaagcaaattaaggcctgcccaatcactagcactgctgctgcatgtgcaaagaatatttgcaaattgcaaaactcaacagtctggagtctagaagtgcatcacc

SEQ ID NO: 28830 - DNA, 426 bp, Oryza sativa
aactcagctgatcacaataaatatatgattcatatgatataatgcacaatctaacaagcacatatgttgaagacttaacactaaacacatatacctattgcatttattactctttctcaaataaccttctagcacagaacaaccaagatgaatcttgtcaaccttttcttgagcctatttgctcatatatatctcttttattccggatacgtccctgtcttcaagactgtgtccagggattcagctcccattatattgctcatattgaatacgtccttgccgccaagactgtttccaaggattcaggattcatatatttctcatatgttgtagtctctgtttcataatgagcacataaatgtattctggtgaataacatttctatttgagcatatttatcaagccgtcattaatcaaaccatatct

SEQ ID NO: 28831 - DNA, 482 bp, Oryza sativa
acctgaggcatgcaagctggagatgcgacggtgtcagccctgttatgcttgatctcctttcttgcaccgcataaagctgtctgggtctttgtggtctatagccatccatgaatatagttggagatgatcagatatgctctgagagactgactatgggccatataacccaaagagaaacgctttggtaataaaatcaggcctcaagtgaagacattatgctaaggatagcccatagtgaaactatggtaataaaaatatcggccaacatgtaatttactctcacttttaaatctgagtttcgtaggatcactcattatatggttcttactgaatatgtgcatttatgtaataccagacatttgccttacgaatattcttgtatttggttgagtcctttcaatttggttaaagttgagggagaaagattgaaataccaattacaaggctgattgatatgagatgttaaatgttaaatagttaaa

SEQ ID NO: 28832 - DNA, 399 bp, Oryza sativa
ataacagaattaaaacaaatacaggttaaactaagtatattaggcataacaagcgtttcgttcttgtagagtagataattggattttgattgagttatttttctaagggaaaaaggaaaaggaggattcaaaatccttttttcttcggactttcccaaacacaaaatacctccttgtattcgcactctcaaatgagagtggaagaaattcgactttcatataatatcttaatagaattccatgtaatgatcaatgcattttttggattctatattattcgcatgtctagaatcctaccaagagaataccccccatttttatgtaattgaagtaggattgacgaataagaaataaacataatactggttattagtgtcgcataaaacccgaaatggggcg

SEQ ID NO: 28833 - DNA, 458 bp, Oryza sativa
  unsure (1)..(458): unsure at all n locations
agcttgacaggtttcatcattcctttcagctctttattggctgccttcattgcagncatctgcccaaatgaaaacacttgtatcataagtttgggaatcaggatgtaaaacatcatggaaataaaacttcttgagtatactatagctatataccgtttgctgagcatctttaagtccctctgatgcaaaagcaacttggtcaaggttatatgtttggttgtacagcatgtcacgctgcccttcgtacctgtcaggaaagcatatataagacagtatacagatgagcacagtaccgtaatagagtaagtaattcgaaggagaagcaaaagagctcaacaagatatacagagtgaatggtaaatgatgattgggttccttaactaagtaataaaatagaagtctctttttttcttataacataactgctacccttaagaaaatctttcataatatatatg

SEQ ID NO: 28834 - DNA, 145 bp, Oryza sativa
tctcgagagtcttgacaccaccattacagagttgtgttctgataggctggttggatctattgcataatctagcagctcgcgcataacatcgacagtacgagcttcgtctatagcgctcggaatgacataggccttatcacaagat

SEQ ID NO: 28835 - DNA, 491 bp, Oryza sativa
ttaagtcacctgcggcatgcaagcttcatatgtgccataccttatctcaatatatcttttgttggctctctacgcctctgcatagcttatggtgtacttgaatatgttctcgatgtgcctaataattgactttggttcacagccaatgttaccaacaacactgttgtacatctcacttgccacacaagctgaagtgatgtttcggtgatacttctccaccccttgtaagtagcacttgtgctcggtcacaatgctaactttccaataatcattccatttacccttatatgcatggacacgccacggacaatcttccttatgcacctcacttatacacataatatgttgcttgaccaccctagactctctctgcaggaaactacccaatgcttcaccgcctccttcatctcatccttatgagcataccttgcacacgcaattacctctgtcttcttatactctcagggtacatgatcaccctctgatataac

SEQ ID NO: 28836 - DNA, 160 bp, Oryza sativa
  unsure (1)..(160): unsure at all n locations
tcagctgctccgncgcaacgagtccttcgagctcaccctctagccgttcacctacgagcacttgttggagcggcggatcagcttcgtgcacatctgtctcgccaacatgctgaacgtctgtgtgtgccgtgcaaggctttcatacactgaagaatgacca

SEQ ID NO: 28837 - DNA, 295 bp, Oryza sativa
gacataacccaccgctcggttcgctctggatgaataaccattgctagctgcaaacccatctttctactttgctatgctctaggctgttatcatttctctcaatttagcttccggtgaatggagatggataaaaggataaaccaccagccattttcttttagatgctcgctctggtgttgatttcaatctaaagctgtgcaggagatgagctatgaaagcaaaaaccaaactctctctttatcttcatcgggagactactcacgctcatgacagcacaaatggctacaaagatgga

SEQ ID NO: 28838 - DNA, 300 bp, Oryza sativa
  unsure (1)..(300): unsure at all n locations
tttntgacgattatagagagntcactccgatatatctccttaagtataagtctgaagattctcaataatatccatgagattctatagctatgtggagccgcctctttaatagaaaaaatataaccatgcatactgattgcggaggagaatatctaacacttcattccttcattgcacaagctggcattactcaacatatctcattgtctcacactcaccaacaaaatggctcacctgaaagagaacactgtcatatatttgaagtaagacttgcattgctagcttactcatctatgccac

SEQ ID NO: 28839 - DNA, 342 bp, Oryza sativa
acaccacgccaaagatctacttataaggattgcaataccctttgtggatgatccagcttctgatggctcgggagtatcagaccctcgaataactcttcacaactgaatggcttgtgtaattgcatcacgcactggtttgacctgtgacagaagtcagaaaaataagtgtatcatatgcaagataatattacagcatgaatgtttagtatgctgaccctgtcaaatttataacgtacatgggagcgaatgcaggatattctaaatgatgcaaccagatattcacaactgagagctatactagatagagctattgaagctgctctctctgtagtcaatcactac

SEQ ID NO: 28840 - DNA, 265 bp, Oryza sativa
gacagcctcatctcacctactgatatcttagtgcagctgtagtcaacactcatgctactactaacactggcaatttcgcttgagctaagatcaccttcatgaccacggcgagcgtctactggacggagaacagaggatgatgcccgagctttcgctgcaactttcataacctcatttctatctagctctgcatggctccagtcactgatattgacacgcttcatagatctgtttgctctatctcgctatccagcagcatcaggat

SEQ ID NO: 28841 - DNA, 392 bp, Oryza sativa
  unsure (1)..(392): unsure at all n locations
cctgctgcatgcaagctggctcgaggcacgccgacacttatttatctttgttcatccnnangcgggcggagcggagactgtcgaaagttccgctagattcgagagtaaggtctcttggttgcgctgtttcacaaccaagtcatcaacataggcctcaacattacggtctaatttgctacccaaagaaattcgagtagtacgttgaaaagtatgacctgcattctttaacccgaaaggcattgtcgtataacaataagttcctatgggggtaatgaacgcatgattttcctcattcttcctagccatgcgaatctgatgataaccagagtatgcatctagataacacagaaggtcgcaccccacggtggagtcgacaatctgatctatgcgtg

SEQ ID NO: 28842 - DNA, 374 bp, Oryza sativa
  unsure (1)..(374): unsure at all n locations
agctatatcatcgngancgctattatatttatggattataanngagaaacataatacgagatatttctgagtatatataaatgctagcctcatattaatgagcaaaggtcattggtagtataattgtttatatgtataaataataggttagtgcgtcattattaatgatgttctatngcgtttttatcaattgtgcaactaaagagttacgaagaagatatattacatacgatcgggtgtgtatttggagcttactaatgttaaaatatactaaaaatcatatataatatttagattatgagtatttgagtaaatatggggtgtcttgaaacatataccctataacatggggtttctctaaacatataatataa

SEQ ID NO: 28843 - DNA, 481 bp, Oryza sativa
  unsure (1)..(481): unsure at all n locations
actcaagcttggcccacgtgctcccagtgcacgagaacgagacaacgaccactcaaacggctcacggtccgacagtcgcagtcatggatcgataaacgcacacctgcagatcgacgtaaaggagaatcgaaggttacgttatttgngatgccgaattcgtcacgccttgcgtgttcatacgtatgcacggactactagttatcaatgtgtgaacttggccagtttgccacggtgacgaaagacaacgcatctcttctttctataaaaaaatttgctcattaaatatataaagctcaatatacaaatatagcatttattacactcttaaaactacatgtaacatatacaacatctattaaccacaattttgcatgcagctacgggaatatattataatttttatttaaactaacatgacacctaatcatattttaatcatttataattcaactaatatgacatttcaaatgacctattctta

SEQ ID NO: 28844 - DNA, 317 bp, Oryza sativa
  unsure (1)..(317): unsure at all n locations
agcttctgaatctgcaagggatgagtagctcaaccctacttggncatgctcacagctccatgaaaactacatctgctcgaatctactaactcatgtcgcttcagcaagcaactagatcagagaaagagatggttccgatcatgacatgtacggtggatgctacctagctcgtcaaatgtacgcccaccgatcgagttgccggttatgtagcacgatcgatcgacgcgagctatcaatcatatcaaccggtcacatgctctgtgccacctgcagagtgtaagaatgtgcctgaacctaatctaaacttgctgtcttga

SEQ ID NO: 28845 - DNA, 285 bp, Oryza sativa
  unsure (1)..(285): unsure at all n locations
gcttacnaagtcagcaacttcancgctatcaacttatcatatgaaacttgagctgtgttttctactgctatattgaagggataatanctaatatggctcctaatattccactcctgtgacattttaatccttaatctatcatactgtctaaacaaataccttaatattgtcacgtgggttgacataatccttgatcttaccataatcgccacatagatatgccatgtcacattttcatgcaaaatctatatgaattgtccaatttacccttacatatatcataga

SEQ ID NO: 28846 - DNA, 480 bp, Oryza sativa
  unsure (1)..(480): unsure at all n locations
cccagctgcaatatgacctgacattcgtcaatgagatctgtccaangnnncactgcctaaactctctcatcaatgagatcgcccaatgcttcactgcctccttcatatcctccttatgagccatatgtagcaccctcaactacctctgttattccttgtatatcccagagtacactgatgctctctctgagataactaagtcccgagaaagtcctcgttgtccaatcagtgggcattacatcaccttcctcgtcngatgatgcatcaccctccgcttgctcgttatccgaatcttccctctccatttcatcaacgattgtattgtgtctcttcccctcatacgccacgcccatggcctgctccacccatgtgtcattacctcatcttccnctgatgggtcaacacaatccccctcatggcttggaccctgacatcttcaagttcattgaatattttatatttcatgcaccgcacaaaata

SEQ ID NO: 28847 - DNA, 226 bp, Oryza sativa
agcgggctgtgcaacaacgcgcgtggtggtggtggctgctccaggcgcctccctgcgacatcgtagtagatcatgcccgagaagtccaacgactggcaccgctcctccatcagtatcttctttctacacacaccgtgctccacgcggaaagctagctcttggccgctccgccgcctaggaaagtcacgatggcgcacgacgagaaggacattgcgattcccacccg

SEQ ID NO: 28848 - DNA, 442 bp, Oryza sativa
  unsure (1)..(442): unsure at all n locations
caatagcaagaagcttgcactagcactttggttgattaatacagtagaacgagaacctatacttgtgatgatatatctaacgacacgtggagactgtcataatgccatcataatcatctctgccataactttcagacagattacttgtagagatgcacatcggttccattgtttaagcgatggaagctgttcctgtggagattattggtgagacagaaaagttgactcaaattcataagaaagatgagattctgttntgtttcaatgaatacatcggatgaccatcatagttcttcaccacactagactggaatatagtcaatatggtcaaagtacagcacgtatgtaaactttcacttcgtaaaacttgattgtgccattgtactaaaatctcagtagaaagccatgactatgaattatctgaagctatgctaactagctc

SEQ ID NO: 28849 - DNA, 213 bp, Oryza sativa
cgaacaaggatcgaaggtaaagcagccgccacgcgctgacgcagcacaaacaggccaccgaagcccgcagccaacaccgccgcggggaaacgccgcaccccggcacactacgcaccgagcgcgcggtggaaccgggcgtgccacacgcgaagcgcacgagaacacacgagcatgcaataaaaacaaaccaaagacaccacgaaaaccccacga

SEQ ID NO: 28850 - DNA, 432 bp, Oryza sativa
  unsure (1)..(432): unsure at all n locations
catgcaacttagttagtggatataataatctattgtaattagattttaatgctctgtagatataatgcacgtgtcggtgcatatatgcagtatgcatgcatgttggttcgtttgctaatagcatgactgactggagatttggtcggcattaatccagcaacacatgcatggattaatacgtggcagagatgacctcagttggatgccgcccgtctcgtcaccagtacatgcaaaaacagagagcagaacagagcatattaatctgattagaaatcaatctaatgatgatagattggagtatccgaggatgccatcagggagagatcgtgcttgctgcctcgcgacaccagcgcgaggtcaccacgagcactatcgcgagcgcgatgcgaggccaccgctgacaccgctgcangcacatgcagcacacgatct

SEQ ID NO: 28851 - DNA, 413 bp, Oryza sativa
  unsure (1)..(413): unsure at all n locations
gctgccctaggaagctanggctcctgcttcgtcggactctgatgctgatgacgaggaggatgctgaaggacgtgacggcgaagaggtaagtggggaagaagaggatgtggagaccgtggttgaaaaggccaatggcgacggcggtgagggccgcgctgtgactcccggctatacccccactccgagtcctggccataacgagaccggggtggagtcgaatagctccccccttcgccaaatatacttatacggtgcgaaggccctggttgcgttttcttcgggcaaagcggcgaagggaggtcttgtcaagaaagtggctataaaaaaggactcgttgatgtcgctccgtgttttagcggcgatgagtcctctgacgggactccgacttcgcccgctggccgcagcttggatct

SEQ ID NO: 28852 - DNA, 502 bp, Oryza sativa
  unsure (1)..(502): unsure at all n locations
tcttaagcgactgagctgcagctntcagaatttattcgtgcagcaaagagtggtggtggggagaacttgaaaggcagcatggctgagctggctgagataggaactctaccaagcacaagtttagttcctgcatttccaatggccatatcacagcctgagcaaccagtcaaagctcgggctgctctttcttttctactctctgagaggggcgactntnttagggagttcattcttgatgaggtgagctctcatgtttgcagcattttgtattttgtttaaaccaaacaacagtaatttgcatgttgcagggaatggtgtttaagataatccagtgccttccatattgagacctctngntctctgcattgcagatggtcaaagccatagatgcagtttcaagggagcaactgatacaaatngctgcatcttttgggctangaaatgctaccccagttttcagcatgggtcctgtcagagctagagcacttgcttctacaatcac

SEQ ID NO: 28853 - DNA, 355 bp, Oryza sativa
gtgaacgagaatctgtgcgccatatacgaggcaacgtgttcctcgagatcttcatagccaggctgttcacagatcaactagaccaagctatagccattgcacgtagatcgggagcttgctagctcgaccaagctgcctacctagctcgcgtcggaattaatggccgcgaccgccggcgacgccgccgccgccgacgacgccgcctggcctgcctacccatggtcgagcgacgggtgagagcatgaatgcatgtcgattgctttcgcttgatcacattaactttgcatgaaaataaccacgtcgcgcgcgctacgtaattaacccggtggagctaattttctgatgtgatgtgagc

SEQ ID NO: 28854 - DNA, 256 bp, Oryza sativa
taagcgacgagctgcactcatcgaccaggaaaatattttgtttcacacgagaagtgcagcttgcgtgcactgccgcgcatcgtgcaaggttttcttacaaggaaaaacccggtatctatctcattgagaacatacggaacctcagtatcacgaatcctgcgtggcgccggggaaacccaccaaccatggagcccaaccccaaaggcgacccataagtgttgaaagtcattagtcttttaacgcagttattactgac

SEQ ID NO: 28855 - DNA, 387 bp, Oryza sativa
  unsure (1)..(387): unsure at all n locations
atcagacgtatatgtggggtgtaatatatttttccatacatatagcttcccaggtcttgtattatttttctgctatataaataaaaatatcatactatcttgtatgggttgtttaaataaatacagctgatactctttgagtnttttatattaactttacagccgctggtaatataaatacacaagttntattcatgaattatatttggttgcttcgttattactctgtccagaatataaaacttttntagagttctcctttatagttttttttggctcatatctgagctcaacagtcaagcaacatagaacacggtgggtaaaattaatattatactaaggagtcgtctgatgactatatgtaaaatcaatcaattatattgcatt

SEQ ID NO: 28856 - DNA, 325 bp, Oryza sativa
  unsure (1)..(325): unsure at all n locations
tctactaacaatggcagggatacgcaagataattggggatagctgtgctcaccatcgacatcttcgtcgagacatgaggagtgatcaacatgacctttatgaggtaagtgacaatgttctaggtaagatcaaatctgcactgccttatttcgagggaaactatgatcctcatgcttacattaattgggagctagcggntgatagtgaatttcaaaagcatgtcttgtctgagaaacaaaagggtatgtgtgcctctagtgttttaattaaacatgccttctaatgatggggaacatcttgtaggcataacaaaataccacaatct

SEQ ID NO: 28857 - DNA, 496 bp, Oryza sativa
  unsure (1)..(496): unsure at all n locations
ttgtgattatactgggccaagtatcattgtatctatatatgtgtggtaaaataatatatgaatcgggcttgctatatatttctcaacacatattcttcatttgtcagatgtaaatacagtaataattatagcgtatttatattgtaacttttatgtaccttctatgtaacttacacataattntaaacccgtagaaatactttaagattcatgcaagttgtgaagaaaaatctcatagcgtgcacatgagtgaggagttntggtcttgtgacctctgcttcgatagtgtgttacactgagaatnttaaaagtatatacaaattgtaatggtagtatatgcaagtaacgtaataaattatgaagtatatatattatatctgtcaaatcttaggagaaaattatcgataatatgatctttctttatgatactactcttctactactagtctttactataattaacatgacacgctcaatccatgttatatacttctac

SEQ ID NO: 28858 - DNA, 372 bp, Oryza sativa
  unsure (1)..(372): unsure at all n locations
ctgagcacgtggcggcggatgcatgggtggcgcttgttacnatgacagggtcgagcttgtcgttgatggcagccacgaagatacacgtatgccaatgagtgatgacgaacgaggatacttccgtcttgtgggcgagatcacatcaccggcgtcgatgacaattatggagacactccggtcgtgcgggtctgagagtatgaccggcgatggcgacgagtcggaagttgttccgacaacggtgtacatatgaacattttgtcaccgagcggtcgaggccgatgagtgtgatactgtagttgttggcatgaggatgactccgtgttgatgaacgaaagcatcgtggatggacagcacgacgacctcagcctgatg

SEQ ID NO: 28859 - DNA, 346 bp, Oryza sativa
  unsure (1)..(346): unsure at all n locations
acacagcacaacatgatgatgatgactttgtggcatcatgtttcagcttcagagggcacataaggctcaacaagtgtgatgctgtggtttgggtcaaggtgcaatatctccgcagctcgctcaaattcctctcggagtgcccagatcgatctattgtcaacaacacgaccaagatcatgggaggtctcaaaaggatcttcaatgcaaatgagatgcctgtcatttccaattcttcttgtccaatccttcatattcttactcgaagaagaccaaaatgacaaggaaaatcaatccgtaagctacttcatattccagtatacgataanaatatatatntaaagctact

SEQ ID NO: 28860 - DNA, 375 bp, Oryza sativa
  unsure (1)..(375): unsure at all n locations
gcatcatgccagacggactatatgaagcggctcaaagatggctttaccagaagatatcagataagatccaatcagttatggagacattgcggaagagacttctcgacctgaagcaacattgatattnggctgtttacttgcaatccgaggaggcaccttctttgtttgaacaataccttcttgatatggtagaatatatagcttcattgaacagtttcagatgatgcaaagacgattgagagtaggcagtggacgctacatctgttgaggtgaaaatntgagacgacggtgagagatagaactcagcatgttatattacgaggcatttctttttcagtaggtcaagaatacttgtcaagcgcctacttttctttt

SEQ ID NO: 28861 - DNA, 372 bp, Oryza sativa
  unsure (1)..(372): unsure at all n locations
acctctctcatcaaggtcgagatgtcccgtggttgccatacgtgtcttgatgggcttcgcatactccaagccaaacctcttgagtagatccttgatgtacttggtttggctcacgaacatcccatccttgagttgcttgatttgaagtccaaggaagaagctcaactcttcaatcatggacatctcagattccctaaacatcatatcatcaaattccttgcagaatacctcattagtagaaccgaatatgatgtcatcaacataaatttgacacacaaagaaatcatcaccaatganttttgtgaaaagggtggtgtcaacttttccaattttgaaatcctttgcanaagaaaatctctcaatctttatacc

SEQ ID NO: 28862 - DNA, 246 bp, Oryza sativa
  unsure (1)..(246): unsure at all n locations
cgtagtcgtgctatgaatatacaacaagaggtgaactcgctctttgctaaacttaacccannatttagtgagaatattatactacctaaatgctctacctttgtattgctaaggtttacgcccgaggacatcatcactacgccaaggaagatgggttatgttgagaacgacaagggttacatcgaggaggaatcagcacatgcccaaccaacagctggttacgccaacaagaagatggtttatgct

SEQ ID NO: 28863 - DNA, 431 bp, Oryza sativa
  unsure (1)..(431): unsure at all n locations
ccaagcgactgagctgcgactggcctcgcttgggaagataggccttttctttcacgagcagatgtgggtgctttcttgcatgtgggttggtcagacttttcatgggtctccatggaccagagaactttgccatatctcatccacaagattgtggctgcctgttaatctgcggatccacaaattagctttcatcttttgtcagtgactgaagaaaaaaaaaggcctgtacctctgagatatatattggctactagtaaatactgaacgctccctctagccncattattctttcgtgccactaaaatgcagcacaaaggatatcattggaaggatagcgacatattaaancaatttcgtacataatatgcaagagaattatctcactacctggtcggtgctcattatatattatgaaggatattcttgtttta

SEQ ID NO: 28864 - DNA, 306 bp, Oryza sativa
  unsure (1)..(306): unsure at all n locations
agaggttacatatggttngacttggtattcttgtagaattgatagtcttctaccataatgcanattcttgtagttgcgtgtcttttttcatgaattaacctgctacacgaacgtatcaatgaaaaactcacatcttctgatgccactggcgcggcgcgcaaagcgcgcgttcacctctagttttcttttagaatataagtatatttgggatcttttcctctggattgaatcgccttcctcaactgctgactcaaacgagtcaaccgccgaacattgtctgcagaaaccacttataacatgtacaat

SEQ ID NO: 28865 - DNA, 492 bp, Oryza sativa
  unsure (1)..(492): unsure at all n locations
gcagcttggtttctctaaggtagcactatgataggttacttgagcactgagacatacacaaacgcatncgatgtgcatcccttctaatagtacagcattcctacacttcaatataaataggaagaaaattataccaataggaatgccttctttccattncctttctttnttttaagggacgccaacaccaaaaccgtttcaccgtatattcttcaaatgatngatgcggntactngtagcttcaaatggtctcgcacggtccatcgtgacaaagccgtcactcgcccttcaccaccggatttggttcttcagcaccaaaccccttgcttgcccttcaccaccacatggtccatcgcgacagagcatcgcttgcccttcaccgtcttgccatagtagccacttcgtatcccacatcttcaatatcttcactttgccattcttggtatcgntangggtaatgatatcactttagcatcaacatcaacacctttt

SEQ ID NO: 28866 - DNA, 193 bp, Oryza sativa
  unsure (1)..(193): unsure at all n locations
tctctgaagggttcttgtccatttattatgtcatctctgactcaggagttntctccatttacgatcaattataatgcaatgaagatcaagtggtgcattgatgaattaatagccatgtgtgtacaagaagaggaaatggcttaatgcagaaagagttgaccatgcatatctatttaaacactccgagaagaaa

SEQ ID NO: 28867 - DNA, 485 bp, Oryza sativa
  unsure (1)..(485): unsure at all n locations
ttacagtcacctgaggcatgcaagcttatccacccagtgtacaaacacccaccagaatttcttcttattttatgctgacataagacacaaaacacacaccttcttaatctaattatctgacgcgtactacaagagagaaaggttggagcccgtcgtcttccaagatggacaaatggtgtactgcgacctggcgtctgccgattgagctgtcagcgcctccacgtcttgagtgcttcgcactatccttcctgacgtcggtttaagaatctgcagtttctcaacaaccaagagggcattgcccatgattatatggaaaaatgaagagccgatgcccatcacaagtcactgaaatgtgggccatatgtatagctggngcccacatttcaaaatcaattcagatgactagggcgttgcttttcctctctctattatttttggatgaaggtgcagatgctaatcctccgtacaacaaaaagataactctg

SEQ ID NO: 28868 - DNA, 385 bp, Oryza sativa
  unsure (1)..(385): unsure at all n locations
gctatgcatctggaacatatatganatactaaagatgtagatgattcataattctcaatggatcttttatcagaatccaaagttgaaagctttgtctgatctagatgactaaatagctagcaatgcacgatcattgacactagaaggcctcgtgaatgcatgatngaacctttttctttntatcttcctaactttctattttacaatgccaatcccaagccacagagacatgtggccatagctccccagcacggcctttaaccctcttcttctctatgacgacttaaagggattaagcttgtgagacacaaaaacaagttcagtgtgcaaaagaatgcaatctaacagaaggcccaagctggccgtcgatcgaagccgtgacaac

SEQ ID NO: 28869 - DNA, 435 bp, Oryza sativa
  unsure (1)..(435): unsure at all n locations
cacgctgctgaccttgttctactacgaccaactgcatatcatgaaacttccccaatgcagttaggacgtggaaatccttcaagtattactcatttgcgtaagttcggatgtgctgtatacataccgatctcaccaccacagcgtaccgctatgggcccgcacaggaaagtggggatctatgtgggattcaaatcttcgtcgatcataaagtatntagaacccttaacaagtgatctatttactactccgttcgctgactctatcttagatgaggaacatttccctgcattatggggagacttcaagtaccatatagaatgccaggacattgattgtgatgcccagggtatttcatccctcaacccacgtactactgaaactgtacttaagttaataaatattcatttgcaagacttgcaatacctgcatataatt

SEQ ID NO: 28870 - DNA, 285 bp, Oryza sativa
  unsure (1)..(285): unsure at all n locations
catgccgcttggttcggatgggcccacaaaggtgagatcgtatgactgcatgaaagctgtacttagaatggacacatgcatgcacagtcagaatgtantacatgtgatgccactagacaagtacgtcctccgcacatgtactaaacctttaacttgtggaccagcgtgtgaacattcattctattcacaattattgtgtgaatatgacaatatttatgtcatacttaaagaacatctgctgatgaattaagtatattaaaataaatgatcattacataatctttt

SEQ ID NO: 28871 - DNA, 401 bp, Oryza sativa
  unsure (1)..(401): unsure at all n locations
gcttacattacggaccactgggtctatgtaccagtgtggtccgtcccgggtggaccactcggtcatgatgatccgagcggtcaaacttgattgcaatctctgaccatcgaagatactgtggcgtgtcgggctgaacagcgttgatctcccgttcagtcaacttctgcttccgtttagactcataagccagggggccgccgaagatatggttgagctccttgcggtgatcttgaaaacctgccggngtgtcgccgtcgtccttcttcctcgacgtgctttggtcttcgtcagagatcttccgtgcagtcttggtgtattgatccgcgaatggcttgtagacgaaacaatctttggccacgtggttggagttaggatggtgcgggcattgtgagttcatgatc

SEQ ID NO: 28872 - DNA, 219 bp, Oryza sativa
  unsure (1)..(219): unsure at all n locations
tactctatattccttttgatcaacagcttcaccatcttcatcaggatccaacacaactgtagaaccaattggtgttgaaattcgcttgcaattctccatcttgaaccgtcgcanaagaatccttgtatacttcgtttgatgcacaaaggtaccttgaggtgtttgcttaatttgcaatcccaaaaagtacgataactcacccatcatgctcatctcaaa

SEQ ID NO: 28873 - DNA, 391 bp, Oryza sativa
  unsure (1)..(391): unsure at all n locations
agcttgctaagaagattcatcaaccattcanaaacattattgcttcaatccaaattatcaatanaagtaagatccgccaaagcactgagatatcttgtgctacgttgaatggatgagtttgggcaaagaatacaattcacagaaaccatcatgaaggatatcaacacttgatcatcagacattgattcgttccttatcagcttatctccaaaaaattcgacagtaggcaaagaagagagaccaaaagtgtcaagaattatctgcttgccaatttcagaattggaactgataggtaaacctccaacaggaagacctataactatatgaacagattcttttgaaagtggaattactctgtctcgaacaatgatgtcacaagaattgacatcaa

SEQ ID NO: 28874 - DNA, 338 bp, Oryza sativa
catccagtcgtcctgtgccaaagatcaggaagtcttccacgtataactcctataacgatctcccttgcggtgatgcgcgctcggtgcaataataatactgataatcaaacttgcaggagaccatctgatatagatccttctgtgaaagacatctgacctgccggcagggaagcggatccctcaaaagaaaccaggccgactgcaaaagatcacctgagtgataatccgcaggcaagcgacaatgtagaacccagcgacgaacccccgactgtgagccagtcgtgcggagctggagtcggagttcaccaggagcctcccgactgaaaccagtcggatac

SEQ ID NO: 28875 - DNA, 329 bp, Oryza sativa
  unsure (1)..(329): unsure at all n locations
catgcaagcttggacatcattctaaggatggattggtcggcttatcacaaatgacagatagaatgtgccggataggtcatcaccttgcaaggacctaaaggaaagcaagtccgctttacccctaacacccctaccgcaagtcggtctatcctaacctgtttacaagtcacctccttggagtcggtgcccataatctgcgaatatcccgacgtatttccggaagaattaacaataatgcctccacaccgagagatcgagttctccatagaactggcaccaggcacagctncaattgtcaaaagactctaccgaatggcagctaatgagtt

SEQ ID NO: 28876 - DNA, 359 bp, Oryza sativa
ggccttaatctactgagacaagaaatcgcatgcctacacactgtcaacttgtcctaagcagggccaggcctgaccacaatcttgacaactgagagtacccgatgatacttagaaataagacgctggagatgggactttatggattgggatactaaatcttgtcccgagatgaaatgacccattgatgttgccacgacagcaaaactgttgactataatgtaaggcgtgaaatgaggagtgaacattccacacacctaccacatatactctagaaagacgattactatgaacgacaatgagctattgacaactgggattatctggctgaagtctaccaagcttgattctaaagcttataa

SEQ ID NO: 28877 - DNA, 246 bp, Oryza sativa
  unsure (1)..(246): unsure at all n locations
acggacgagagatgggtaccgagacgacgcgaggccgccgcacgcaacttgcgagagttgcgagagggggtggatgagatgaggaggaaacttctcgcacgcgtgctccgttccgtacgcgggagcgcgtcacgcgggcgtcaccctctctcgcggncgccgggcctgngccggtttgtaccgtagcgcggctgatatttttctgggcccgtttttctccggctgcaacgaggaataattgtgcga

SEQ ID NO: 28878 - DNA, 449 bp, Oryza sativa
  unsure (1)..(449): unsure at all n locations
actcagcttcagggccccacttggttatgtgatccaagtcgccttccatgttctgtaagatctgccagtatggtgtagtcgtagttcagaacttaagatgaatcttatccatatgaagcctgtttttgaaaagttctggtaggtccatgctgcggtctctctaggttctcgtatcgtatcctgggatccttttcttttgctctgtgatcatctgatgcctcatactgacaattcccagtttgcgttgatattggtttactgaaatattataacgctgctattttgctcactgcttatggtagcccaatcgaataatccgntaaaatcatagtctgatgaactgtgtttcaactttcttgctgtatatgctaatcatagtgactcgcatcaatngggtggtatgtgcttattacgtaattctgtaaaccgaaaatacaagtaattctcat

SEQ ID NO: 28879 - DNA, 323 bp, Oryza sativa
  unsure (1)..(323): unsure at all n locations
agcttgcatgagcaaaatatactggcacatcaataatggagctgctcattggcgcatgaatgattccagcgcacacttttgtcttaaaactttcatccgaaaccattttgtccaaagctcttttatcttaaaactttcatcgaagaacttttataaaaaaattaactttcgtatgaaatggtgtgcactgtgaatataggttgcaccaaatagcaaacctgcaacaataaataccactgtgtatngaataggatctatgcattaggtatctatcttatttgtaagtttcggatggaaaataacatttcttttctaatcttatg

SEQ ID NO: 28880 - DNA, 359 bp, Oryza sativa
  unsure (1)..(359): unsure at all n locations
gctttatatagctgtcctcctgacttttttatatatatgtcaaggcgctgnttgggtttttaagcaattgattggatacaatatcattgctttctcccacgtaagtgtgcagttttattgaccaatattatggcttaagctgagtatatatatgtggcattatctaagcgggtggtaaatcctctatgagtntattcactcggattttacaccacatatgccatatatttccaggtgtggtgaaaccatgtgtctcttaaggactaaagcacgtctgttaaagcagtgtgcgcatggcgtatgccccatactttggaaaattattattcacaacatacaagcttctttatagctggttt

SEQ ID NO: 28881 - DNA, 315 bp, Oryza sativa
cttgacacggttctaagaataaattaagaaggtttaatcactgctaattatttattgagcaagataataaacaatatgtaaactttgtggtaaatgaccatatacagaataatgacagactaataacctggaataatttgaatgaaacttaaagaatataatgatggccttgttggtaattaagaaagggagaacagtctactttcatattttaaggtttatagaacattgataataggaacctggcttgaccctgatgcggattttccaatcaacctactggggacctgtagatagcagcccatcaatgtatag

SEQ ID NO: 28882 - DNA, 529 bp, Oryza sativa
  unsure (1)..(529): unsure at all n locations
accgtgatctctgagtcacctgcggcatgcaagcttcacanagcgagggtgagtccgcgccgaagaggcgcgaagatgacatcctcacaaaggcgctcggaaccaaagaacatcctagccgaactcggngaattggtagcgatgtgccctagaagcatggactccctcagtacagctcccaatacaggaaacggaaagtctccaaggaagagagggacgctcgtttgaaggccgaacttaaggttgaggtcattcaagaactagaagctagcatgaatgcaagggtggaagaaagggttaacaaggtgctcgccgacatgaatataccccgagtcacaacacctgctgtgcaaccaactcctcgtgtacaacacgacgcgagtccgtcacagcatatgagtagttgtgcatccacagaggtgccggcccctggtctnccgatcgcaccactagctgcagtggaccacatcgaggtaattgtnngtatcgatcatatctataaagacattacacatccatataaattaac

SEQ ID NO: 28883 - DNA, 351 bp, Oryza sativa
ctaagcttatagagtggtagatatcttacataatctaagttaacgtcaatagttaacctaatcggctgccttctactgacagatgttagccgatggagggttagatagcgatattgccagagattatgtaagatacatgataactcgacgagttacacaaacaagattagagtatcataaagatgggagcactaatctcgagaacacaagccgccataacaaggtttacctctagttgaagatcgaaaccgatgcagctcaacccgaaagcaagaactcgtcgaaacaaaacgaaaagtaaaagtgtggcgatgcgccgagaatgtattgaacgtgtgatattaattacat

SEQ ID NO: 28884 - DNA, 430 bp, Oryza sativa
  unsure (1)..(430): unsure at all n locations
acctganngcatgcaagcttgctcggcagctggaggaggaagngacatatatatatatgtttggttacttagtcccggttggtagcaccaaccgggctaagatcaccggatcttagtcccgttgtaaagtacgatcttaaatcccggggggcctgcatgcctgacacatcaaaccggactaaaacttagtccggtggactaagatcaatatgccgttaccctttgaccggactaaagacattttagcccggtttattgatccggactatgggaatcgccgaccacgaagaggttctcacagtgtattcaattcctcatcaatcagacctgcacttcttttgcttcatcaaacactctacatgacctcactccaacaggtcttttactgtatttcctcagaatgcaggtcactagactgacacatgatctt

SEQ ID NO: 28885 - DNA, 299 bp, Oryza sativa
  unsure (1)..(299): unsure at all n locations
ttttctttctttactttttattgggaacacgcaggagatccgtgcatcattntattaagcaatttctctttttatttgctgncatttagtatgaataagatgtgcaacatatatagntatgtttatttntgttcatctggtactcagcttacaccaatgccttgtatgacaaatccacaaatgctatttctccgcaccgaagtattatgttgcanagcgtgattaaaggagtgcacttagaacatcagtttttgaaaagatgtggctatacattatngctccacatcatacatgagtat

SEQ ID NO: 28886 - DNA, 356 bp, Oryza sativa
  unsure (1)..(356): unsure at all n locations
tatgtagaatccgaacaagtaattgcggagattcgtgccggaacgtccgctttgcattntaaagaaaaggtacaaaaacatatttattccgaatcagatggggaaatgcactggagtaccgatgtttatcatgcgcccgaatatcaatatggtaatcttcgtcgattaccaaaaacaagccatttatggatattgtcagtaagtatgtgcagatctagtatagcttctttttcgctccacaaggatcaagatcaaatgaatacttattccttttctgttgacggaagggatatctttggcctctcgatggctgatgatgaggtaagacatanaactgtggatactttttggtaaaa

SEQ ID NO: 28887 - DNA, 246 bp, Oryza sativa
ggtagtactagtgcattcttcttctgatctggctgagttcctcctgcctgacactagctcaagcagcaccattccatagctggagacatctactttcggtgtaaatgctgttccactaatccatttcggcgcaagataacctatggttcctctcatggaggcgagtgctctgctgaaatctctccctacaaactttgccatcccaaaatccgcgaccttgggaagaaacgatgcgtccagttatat

SEQ ID NO: 28888 - DNA, 268 bp, Oryza sativa
  unsure (1)..(268): unsure at all n locations
ttcattaacatcataagtgtcatatactcgtatgcaagctcaagtgcacagatccgatatatataatatgtgaacaacatggatctataacatgaacaataaatgtataggagttgctctcctaagtatatgcgtacacagaaatatacacgagagacacgtgtatgcataagtaaagaagaaccaatgtggggttatnctatacacatagagaaggcgtatgtgtaatgatgaagatatacaaaaaacacatccttctgatctcatg

SEQ ID NO: 28889 - DNA, 278 bp, Oryza sativa
gcgagctttactgctttggtgaaccctacagtaggatcaaatctaaccttttcatgtgagggtggttcttatccattctgttaccttggcattcctatacatcataggagacctcgtaattcggagtggaacgaagagattgagcggcttgaaaaacggttggcaagttggaaaggcatacttttatcacttggagggcgactaacactaatcaattcagtgcttaccagcctaccaatgtatataatcgtctctttggaaatacctacaggagcgat

SEQ ID NO: 28890 - DNA, 406 bp, Oryza sativa
cgattgaccggttgtagcagccgcgccatcacgcgtgcatagcacggtggattgatgctggctgcttcttctcttctctacttcctgtggatcaagcgacgatgggccaacaacaagcgcgcggaatctagggcgcacgagtgctagtgccgctgccgcggccgacagcgacgtgcagcaatcagcgcctgcattagggcattggccaactgggatctgcgcgagctgtcatggaaggaacccacatagagcagttaattactcctactgattagcagattagaaccatattatgcattcaatattcaggtttgacccaactcatacatctaacatatactattgtattgcagattcttaatacatgacgatatatgtacatatttcatcttattctcataaacat

SEQ ID NO: 28891 - DNA, 335 bp, Oryza sativa
cttagcatctaagctgtcaaccttatcgttaagctgaacgaatatctgatatcgatacgatacagctacacagttctacacaatctagactttattatagtcctaataacgactatgattattatatctgaaactgcattaatccgaatatacatacactgcttcttgggtatacaacaccctatattacaaaaagtacccaagtatacaacaaacaaccaggatctatactatggactgtagaggagatagggcggcacataacacgatatgctatccgtaacaactctattggagtctctatgtatcattacatatgttattgacaatacttg

SEQ ID NO: 28892 - DNA, 402 bp, Oryza sativa
  unsure (1)..(402): unsure at all n locations
cattttaggattccactccccaccaccatgaccaaaatgaactcccgcttctatcatctctttcaaattgatgttccaatatcttcttgtcattttttccacacttccttttgattttttcttttttttcatcctacctttccattacgaaatttctttcttttcgaagattaagaaagagccgaaatagctcgaaataaataataattgttccgatggaaccttctacatggtataagcataaccttaatgaattaactaaacttctttttaaattaaaataaaaatagaatatctaacctcttagcgttctaaggtcaaaaatctagtttannagtaaaaatctgctctatgtatncttacatcatataaatggnggtaatgggtgatctgatgtctcat

SEQ ID NO: 28893 - DNA, 168 bp, Oryza sativa
  unsure (1)..(168): unsure at all n locations
tcatacnggctcctccttctgtacatagtactaagcgaanaaatctagagaataaaaatagaattagttccatctcattatggaccgaaaggggctggtattnttccaagaaatctctagccaacctttccacaagaggtttttcttaacaccaatgaattctataat

SEQ ID NO: 28894 - DNA, 358 bp, Oryza sativa
  unsure (1)..(358): unsure at all n locations
atgcaagctgttcggtttctcgacggcttctgaaactttttcaagatctccacgacgcgaagacaagatacgcacagatccaaaagctgctatatgcagtaattatgacatcaacaaagctacgccactactttcaagcccacagagtcacaggtggttcctcctttccncttggagaagtcatgataaacaaagacgttgttggccgcattgcataatgggtagtcgagctaagccagtttgatgtccactttgtgccacgaacagctgttaagttccaagtcctcgctgattatgtagccaactggactatgcctgagaataaggtagacagtcgaacggacagcgatacatggat

SEQ ID NO: 28895 - DNA, 263 bp, Oryza sativa
  unsure (1)..(263): unsure at all n locations
gagatcctatgggaaagagagatcgactcaccacaggtgattaaagattcttggtccagttcgagcgagaaatcatacttgtgggacatanatcggtctctcgcacaagtcatggcggctgtgcgttcctggagcaaaacacaagtgaaaaatgtaagtagagaacttgaaaaggcaaggaagaagctgggggactcgattgcttcagatagctgatattcccacattcggttggccactaaccaaatgaatgaactgttata

SEQ ID NO: 28896 - DNA, 359 bp, Oryza sativa
  unsure (1)..(359): unsure at all n locations
gctggagttgcgcctgcagagccgaagcccctttctttattgtctgngacgtctggccacgagggtgatgctgtacctgggcagcggctggttgaacttgcatatgcacgtgaggggccggatgcgctgctgcantcgatggctgcccggcgaaatacattggcgcttgctcgacttgtggcggaaagggctaagtcgtcactcgctgatggacttgaggtgggatataacccgccgaatactgaaggattggagccgacgtgaccttgattcgccatgctacctcgnatgcttggttgtgttcttgcatatggcgaaacatgtcttggagccatgtcatgttctgcgcatggcttcat

SEQ ID NO: 28897 - DNA, 392 bp, Oryza sativa
  unsure (1)..(392): unsure at all n locations
gacgtgactgatattgtatgaaggttngaaagcctgcaccaccaaaaaagatcaccatagcanacaagtcttttaattcagcatgtagtanacatatcgtcattccagcaaaaaanaatgcactaaaaacatggctgtgaatattataaataatttaactttttttgaacgactatgcagttgagagaactatgagatacgcctcataatctgcatgctatctggcaaggaaaacactgcattaaatgcaagaatagagtgagaatgagaggtagaaagaatctgaccggctgactttngaaatgtgactanntcttctcacaaatcatanggagaaaacacttgatgaagcacttcaatggttataggggtaagcatatgatgaatggtac

SEQ ID NO: 28898 - DNA, 350 bp, Oryza sativa
  unsure (1)..(350): unsure at all n locations
acacacacctacacctcgtnctgtcgtgctctcgtcgtggaaccanaaccttcgcggtgaaacgaataacgaaaagtaggagtacgccaacagcctctgcttatcaccgtcaatgaaatcccggtctcatcgcgttattgcacatcaaaagtttttaccgagacccgctggtcaggtcacggaatcacgccttcttcgttctagatgtacccaacggatgaacgtcaccgcacacggctgtcggcggaggccccgagagtgggtgtgggtcgtcgtggactgacgggcggcgctgtcctgatcactcgcaattcttgcatcgtctcgccgtgctgtccgcttgcatattc

SEQ ID NO: 28899 - DNA, 410 bp, Oryza sativa
  unsure (1)..(410): unsure at all n locations
tattctcattatttccgatttgtgatattggagatgcctatggctcangagtgccgcatctatccttttcatgatcattncactttntaaagcacataaacattacatggcgttcttggttgataccataatgtgccataccacattttatgtagtttgaatagtaaacgtaatgatttggtttaaagccagatatttcggaatgcttatacttaaattggcacacatctaaaatattcttaccacaatttgaaatntggctctcaattgacataaatacaaacacatgcatttacaattctaccctatcataatagtaatagtaccaaaacttgcatagatnttggcactaccacatattttgtagggtactagaccagatatgccctacattacattatatgaatgct

SEQ ID NO: 28900 - DNA, 359 bp, Oryza sativa
  unsure (1)..(359): unsure at all n locations
acaaccacagnactcatgttgccactccggagatgcataatccacgcaacgcgggggtacaaagagataataatatatgggttaagttttgcagtacactgcatttataagtcacttatttgcccaaagctattttgtcaagacgatcctagagctatacnaaattattaatcaanggcgtgaaccctcacgaacctgccttaacccaaggcctactatgattcggaccgaacttgcaacacgacctgtgtcccagctcgtcccatgcctacccatgccaaccattccacattttagttgttgagcaaattttaagaatttaacactgacttgngtacattgctatggttgccatattc

SEQ ID NO: 28901 - DNA, 186 bp, Oryza sativa
ggcacttggaaacacgaggtggaaaaagcgacgtgataaagggtgagaatttatccgtattttttttccacagaagaaatggtgatgtttggtacgagagacgaccatatatggaagtggtatacgtataataatacaaggcttgcttcatcagtatactaatggaacacgatgcctacttggata

SEQ ID NO: 28902 - DNA, 96 bp, Oryza sativa
ctcgtttcccttcattcacttcttttgtgccataaccttataattagcgccaaaccatcacgagcaactcataagccccgtgctctgctgtaatgc

SEQ ID NO: 28903 - DNA, 367 bp, Oryza sativa
  unsure (1)..(367): unsure at all n locations
gctaaagggttactgaacaaattaggcatattctaaatcatgtgctcactcattnggtatagaagtgcatctaatagtatttaacatcttggatttatgtgctcttttatgagccaaaatttaaccaacttcagagtttatgggtttaactctcttgtgaagattaaccttgaagctaatgtagggtgttaaattaatcacttatattggttagaatgatttaagctctcaccattcatgtcaaaagcaatgtacagtacttttcacatccaaagcagagtacacnaatttaatgcctatacatacaccagcanggagtgaaatngaacttgctttaataggagaacgttaataacctgaagtacat

SEQ ID NO: 28904 - DNA, 401 bp, Oryza sativa
  unsure (1)..(401): unsure at all n locations
ggcgctcgtcattancgctttaatgactggcgctatcacattaattatgctaatatatgaatatgtaagctgagcagctttgtaatatgagatgaaagtttccaatattcggataacttagacttgaaagtntttaacattcgagttaaaagtcttcgagaattaagttgaaagtattcaacatttgagttggaagtcatcacaatatgagtaacaattttcaattttgagttgaaagatttctacattgagttagtttagattatgagttcaaggtttaaatttgaggggacgaagtttcaattcgagttgaacgttaaatatagatgcgatttttttagaagtctcaattattgaaggttaaatcatgatttactcctccaaaaaacccttttgttgat

SEQ ID NO: 28905 - DNA, 441 bp, Oryza sativa
gcaactttctctttttttgtctctaatcctggatatttctctatcaaaataatgtttctgtctctaactagaggccactcacttttcatagcgtaattatattcatctgctatatctcttaatttatcttcataatagtttatttcactttcatgggctaatttttccatcaattcacatataatatgtcttctcgcatctataatatctctgtcagatgactctgcatccacatcatccgaagctctggttttataatttgtaatctaatactaacatttcctttgctggcttggtaacttatgaagttttcaggctgactcaaggagttatctttataaattcactaattgcgcattttctcctgtctttctcacagctattttaacggctatgaatttattccttagaagcatttttcttccaccattacattgattt

SEQ ID NO: 28906 - DNA, 421 bp, Oryza sativa
actttttacattaatcctcataaatgctgtaacttcttgccctaacgtcgcaagttctaacaaataaacactgaggactctgcatgacatgactgagaaatgaccttaccttattgctaacaactcatttgcaggaatcgcaaatatatggatctcatttcaaagaaatcaaagcatatgctcctaaatcaacaaagaatacgtttggagatactgatgaggactagcaacatttgctggacttttcttcgatgcgtactgaagtttgatgcttgagtaggcaaatattctacgcaaaaattgcctttttgaaaggagaaccccttaacaggatattgttacctacgctagttagtatcaatgatgtcctacttgtcagaccatcttatttatacttggttgatgtactgcaattgtctct

SEQ ID NO: 28907 - DNA, 84 bp, Oryza sativa
gataacaatggtttgcataatgatattgctaatacatacacatttatgcataatggtctgaaaataaaatgggaccaatgagta

SEQ ID NO: 28908 - DNA, 349 bp, Oryza sativa
  unsure (1)..(349): unsure at all n locations
gaatagaatttgtgaatgaanaacctgttactatgcactactaaatttgcgagcgaattacatgtactagcaagttagcttattgtagatttaactccaaattggacagtgttgcagcactctcttgcacagcttcatttgccatgcgaaggattgtaaagtgagtatataaatgttagacatgaggtactcaatcaggatgaaaatcaagcctgctgatcaagtgcattttgcaaattcaacgacaatttatcacgataagaagagaaacttaatgcttaaacttgcctgtatagatggtcatgcctatcatatatttgctgtgctcatgacataaggattaaaagga

SEQ ID NO: 28909 - DNA, 407 bp, Oryza sativa
cagcatgcaagcttcatcaacaacataatcgcgctatataacatagtatctcctgataggtttcgctcacccaaatcacatccatggctataactataactaggattcgaatgagtcccggatgaaccaacaccataatttccttgggttaattgataaactattttctgaacaaagtgcaagcatatctagcaaatgaggatcatattattcatatgtatcatgcactgttgacttgtgcatcgtactattaataagaaacaatacaattctactgaaaaacctctgacaaataactagtactggacaaaatattctgtgataatggtaattagcaccattgtacaatgagggatgagctaaatgtttacaacgatatgtcttaagagctattcttacacatatta

SEQ ID NO: 28910 - DNA, 168 bp, Oryza sativa
tctcacggttaccgcggggcaatgcactgcaagaagacgggcattgccgggagtaatgcacaccgctcacccatacttgaaacagctttgtctaatgtttgctatacgctcgttatagctggaaagggaattacccgctaagccgtgctgtggctgatgttactgtct

SEQ ID NO: 28911 - DNA, 394 bp, Oryza sativa
  unsure (1)..(394): unsure at all n locations
tagcttatgttgaagctcaagaaggagttactgcttcttagtggattataaagcacgtataagttcacaatatcagtttgtcaagtctctgtgtacaagacacatttctacctcatctaattggaatggatatacgagaaggtgttgttagctataaaaccttttattttctaataaaaaaactgatgccctttattgttgcattcacattgggaagaactggcagttctgatgatgatatgcttcatgtactcaagtttatgccctttattttgccagatccttttgcacaggcttaagcttgagctatgctnttatgttaagaccactcgttcaattaaaggtctacaaccttgcatgatttcttcctccacctagaaaagccattgcacat

SEQ ID NO: 28912 - DNA, 212 bp, Oryza sativa
ctggctgtcagattaaacaatgcaagtagtactgagatgaaaaaaaaagttaactttagccctgcttcgattatctttggccttctcacatttaatctttctgaagaagatagtgtaggttagcagaatggcagagcagaggaatgttctattagagcggaaattcagtaaaaaattcagttctgttgaatgtgactatcagattaaacatg

SEQ ID NO: 28913 - DNA, 332 bp, Oryza sativa
tatcaagatcaacaagattcgaagcatttgccaaggaagaagggagattccctcggaagaagttgccgccaatgaagagccgccatatattatgcagcgaggtaccaatgccggatggcatcttgccgctgaagcgcgtggtttcgaggctgagccgaatgagcaccgacatgttcatgatcggctctggaaacccacctgacaaccggttgccgccgatggtcagtatcttcatctcgcgcagcgccgcgagctcgcctgtgatgccaccctctatgctcgtgaacgcgaagcgaagcatcctcaacgtcctgaccgtgccgagcgaggga

SEQ ID NO: 28914 - DNA, 369 bp, Oryza sativa
  unsure (1)..(369): unsure at all n locations
agcttacacgagaacaataggcagaatatgaacagattattaataatatgcataatcagntcctgcattcatttgtacatactcgttcgggtacagttatccaaaggtataaactaaaaataccatccaacgatgatttagagtcaggcacttaaaaggacggtaagaccaaatatggcaaagctaaggatgatgaacccaaggatganaaatcanaaggagaggagtctcaagagaataaaaattcgcacgatcagattgnatatgctgttcatcatgcactgatcaaccagtcgggtgaacttgtcaacactctgactaatatgatcaagtccttggttgatgttacgattgctgagcatcaagcta

SEQ ID NO: 28915 - DNA, 205 bp, Oryza sativa
  unsure (1)..(205): unsure at all n locations
gatccatgatgacccgaaattgatactgctagcatctcttaatgattcattggaatatgtagcggattcagttgaagggtaatcatcttatgctcaatacattgaatgtccattttgtcgaactattgttccgtttgcagtagttgtgaatggtatgcacatctctctanttgtgaatggtatgcaaatctgcnaagagcaacat

SEQ ID NO: 28916 - DNA, 300 bp, Oryza sativa
  unsure (1)..(300): unsure at all n locations
ttagaagcagaaattcttatctaagagactgagatgttcagagagtactactactgttccattcgaacgaccaaaaatgcaacgatcatctcacaactctatccatcgctaagcacatcaagaagcgagaggagaaccnncnaananaaaagaaagaaagaaaacaaaacctattctgacagaaatgatgcagaagaagaactaacaccacagcttattagctcanagtctcaaaccaacagcagatcgctcacctgaagcattcatgatcgttctcttccggagccaagaaacagcagc

SEQ ID NO: 28917 - DNA, 463 bp, Oryza sativa
  unsure (1)..(463): unsure at all n locations
caagcttataggcaacactagggagcnaggcaccagaatttagagaccatatatgttgtacacttgcacataccaatatgagcccaactacaaggttggcctactggtttgggaaaattaaatcacattttacaaataacactcgctcattcttggtacgagattgcgcacatatctcttgatggaactatcattgatatactagttaaataagacgggcattcgcacaactaatacgctctttctctgctagagggcttcacttatcatatacagagaatgatgatcaaccttttactcttggttcccaacgtacgacattagagacacggcctcttgtatatgattattcaagcaccgtctgttggngataaagagtcatcgttacaatccaaccaggcaaggaccaagcattgatccgagattggacattataaatcctgaaaaaattaagctcaatgga

SEQ ID NO: 28918 - DNA, 460 bp, Oryza sativa
  unsure (1)..(460): unsure at all n locations
caccgtatatacatgaccagctgcatatataaattgattttttatacggctgaaagacaaaatgaacaccgctcataacctatacgacaagaggcattacacacaatctcctttctattgggtgaagaanactggcctaactaaaggaacaatctatatgatgtggtgcaactatagagatatataagcggtccgacccgtgagtctacttatatgtcaaataacaagaaacactcaagttgttacgacaaggacctagcttattgcacctaaagatgtaggtgggtagatcataaatctattataggtcaaatacgcacaaaaggatcncgggttaccactaatgtacatgcggattcgcgggtagaccacttgcaacctataacgaactagtggagatgtaagacatgacttccacacactaatccaagtagaagacataatgctatatgatgcactt

SEQ ID NO: 28919 - DNA, 411 bp, Oryza sativa
  unsure (1)..(411): unsure at all n locations
agactttatgaaggaaatcatatcttataaacttgcattatcacgtgtgttgagaaanattttgatgggatataattctaacgagttgtttgaacatattttccgtcattagatttataaggtgcgttatgtaaatagtttgatccaatcttgaaactctcaccttaattaaataatatctcaaatgcaggtgaattcacataatatgtgccaaatctatagtttattacctcatcggagggacagcacgcctctaaatatgacattgtgaatatccctctattggagacctcggtctcattgatggagccagagaatatatctgctccatgggcactgcattagtgcttcccaatctctcatcatcaacatcatcagctgttgatccttctcagcgactgaattattcat

SEQ ID NO: 28920 - DNA, 463 bp, Oryza sativa
  unsure (1)..(463): unsure at all n locations
tgtctggccttcaatctgttaagttcttgcacagagcgcaacaccgtatagtccttgtcgcatcctttctcttcgtcgtaaagaagatccttcgctgntttttcaacgcttcccaattgtccaaccctcgtcttctaccagttaggacctctggttcaacatgccgcaacatatcttccagatcaaaatcaatatctgcatcgtctatactagagtcaccgcattccgggatggttccctgtgacatgtcttcgattataatattttacgcatcaccaaagcagaaatcatcagcctcttcgttacgaccaccgacttccccgtgaaaagtctatatctcgtagagagaatcccttatatgccactagaattngaccagttcccttattatgccactcaaantagcttctcccttatatgccactcagtcaagttttccaccctttatgccactctaccctat

SEQ ID NO: 28921 - DNA, 330 bp, Oryza sativa
  unsure (1)..(330): unsure at all n locations
actaagcttcccgttgcggccgatctgagttgaaaacatctctggatcatgcgttgataggttgctcctgcgctctttaatccacaaggcatggtgatgtagcagaatgcctcgaacggtgtgatgaatgaagtctntaagcagttagattcctttagtcggatctgatgatatcctgagtagcaatccaaaaagctgagtagctcgcagccggcgggtgagtcaactacctagtcaatgcgaggcaacccaaatggatctttgtggcatgacttgttgaggtcggtgtaatctacacacatgcgccattgtcccgtcttcttctgaact

SEQ ID NO: 28922 - DNA, 434 bp, Oryza sativa
  unsure (1)..(434): unsure at all n locations
agctntggaactcgtgcatggcttgtgtatattcatatgaacatgcagcatgcagggcatgcatatcatgcgtgcacaagggatcaaaggggtagcagtaccaatgcttcatacatatggaaacttttgtgccatgggagtctgacatattgatgagccaaatagaaatcgagtggaggagttggatgataaaacgacttgtcggagtcggacaaggccgactcgaccgcagttgctatggagttggattcaaagttatgtatggataccgactcgtgatcacatcangctcgtattgcttgtcctttaaataggcagccgaagagagagccgaaccaaagcaacaaagctcgtgacattggtcaaacgtggtacaaggggctcaattggcttgctgtgcataggctcgtgacaaagtgcgcgcgtacgggtgc

SEQ ID NO: 28923 - DNA, 345 bp, Oryza sativa
  unsure (1)..(345): unsure at all n locations
tcaaagtcaaacagttntaaatttgactaagtttatagacaaatatagtaatatctataatactaaattagttttatcaaatcaataattaaatatattttcataataaatatgtcttgggttgaaaatattattcctttttttctataaacttagtcaaacttaaaacacgttgactttgactaaagtcaaaacgtcttataacctgaaacggataataaagaatgatgtatggcaaaagaatatcgatgatggtttacatcgaagcataagctcgatgcgagtgagtgatcgtcccttataccatggacaactgacctgttgcttaaaatncatataacttca

SEQ ID NO: 28924 - DNA, 345 bp, Oryza sativa
  unsure (1)..(345): unsure at all n locations
gctggttacattatatacctacctttntactctgattntctaactctattcanattaatccaaaaacttgtgctattaattggataaaggtcttaactccctcctttcacttgtctttagatgctgcgttaccagcctgagtacctgtttggtgttgaaggatttgtcaagagatgcgtaccatgttctttgtcattggatttgggactgccccattttatgcccagattcctcatgatcgtcatgaagagaagtgccgagtcaaagtcacctttgacagtaatagtgaagatatcccctcaatgattgttgaagctggaagaagaaactacatccatgcatgtc

SEQ ID NO: 28925 - DNA, 361 bp, Oryza sativa
  unsure (1)..(361): unsure at all n locations
tagagcaagaatgagtactaccacacgtctcagcaagccacaccgcggatgcacaattaatgcataggagtacatcgggataataatataggggttaagttttgcagtaaacagcattttaaagtcacttagttgcccacagctattttataaagacgatcctagagctacacagtattattaaacaaggccgtgaaccctcacgaacctgccttaacccaatgcctacgatgattcagacccaactggcaacccgaccctgtgtcccagctcgtnccaggccaacccaggccaaccattccacattttagttgttgagcacagtttaagaatnacaacaactgacttgggtacattgctc

SEQ ID NO: 28926 - DNA, 425 bp, Oryza sativa
  unsure (1)..(425): unsure at all n locations
cgaactcaagngacgcagcatgcacatgacacctagcacactgtttggaattgattatttggataaaaaaaaggaacttgaacagagctttcacaattctcggattaatccaaattgatctttaactagataaactgctatttaactcggattgagtgaactcgaacctaatcattaaaatatatctttcaatggataaactcactgtaataaatctatttataattattatatataaatcaaatgaacttaaagcaactaaaatggtaataaaacaatgatttgcagtgaaaaatgcaaaatatattaactgtttgcactgcgcaaccataactaatatagggatgttcaataacgatgatggaaaactatactataatttctggggcgatataaaccagagtataaagttccttttattggtg

SEQ ID NO: 28927 - DNA, 370 bp, Oryza sativa
  unsure (1)..(370): unsure at all n locations
agctcttgacctcgatacgttgtactatatattgcaatccgctaaggcataattcttccatgatcccttaattctagaatgcaagatcttatcatatcatcaataatctgattcactctttcagnttgtccatctgtttggcggtgatacgcggcgctgaaatataagtttgttcctaaggccttgtgtaagctcttccaaaatttggacagaaaccgggtatctctacctgacacaatccttactggagacccatgtaaagatactatttctttgacatatagattagctaactctttcaaagaaaaagttctttaaccggtatgaaatgggcagactttgttagccgatctactattacacaaatact

SEQ ID NO: 28928 - DNA, 394 bp, Oryza sativa
  unsure (1)..(394): unsure at all n locations
catgcaacttcttatagatggttgctatgagaacatactatatgttgttactntatgggcacgcatcatattttgccgagcagtcagtatatcacttggatcatattattcggggagtcacaccgcatatgctatatattgatatcaagtcacttggttgattacaattatcaaaaccactcggttgggtagaatatttattccttgactatatgtttggttggttcaattaaccacatagttcggggctgcacctattaggtgcatctattcgatgcacctgactttatttttcagtccttcatagtcttcagatttggtaaaagtactcgggagacatggcgaatatgaatgaacactcagtctggagtaatctagttagagaaaatatatt

SEQ ID NO: 28929 - DNA, 330 bp, Oryza sativa
tctcagctttgtcatgcggaccggcagtcctacgcacaatcacaagtaccatatgatgaaggcggagttcgatggtactgaagagactgatccttgcaccaaacctacattgggagataatgtgtgtgcaatgacagagaaaattgtttgcgagtttggaaaaatgactaagaaaccatcataggggacaaagtacaagacacccgataagaatacgaaaggaggggaaagtaagaaacaagatgacagttcgaagccagatgataaactcccttccccattcaagaagcattccatattttttaagtacctcccgtactggaaagatct

SEQ ID NO: 28930 - DNA, 417 bp, Oryza sativa
  unsure (1)..(417): unsure at all n locations
agcttcatcttggtctcctctatttataccacctctttttttcatgacagtaggaaacttttacaacttcaagcatggggagcagttgtatactctccggcaaggaattgaggtgtgggcagtcattgatgttcagttccatgagagaggcgaggtggcccaacccttccggtagggatgtcatgcttgaacaaccgaccatccatagcgatttcagggacgtgagatgcttcgtgctctctggcaatgacttcagcttcaagcattttcacagaatcaatntcggaagagatatgaactgacacagacttgctgtgcagtctaccatgtcttgacactctactggtatcttgttaatggaagagaggctcttaataatctcaggtgagctgcacgtaanggtcgcacactcgtata

SEQ ID NO: 28931 - DNA, 457 bp, Oryza sativa
  unsure (1)..(457): unsure at all n locations
ctcagcttanccttttttttgtgctagtttcatgatcagatgtgtcataatgttatttccctcagtcatatctgtctacctgagcataactgagcttattttatagagtagatttcacaaaaccacacggntctatatattttttttaataaaaccccagctgttgaggcatgagtataacanaacccctatttctgtcagctggtaacatgggccgtacctctcagcttcacctttttcttcctcatccctttctcacgttcctttctagcagatcggatctgacaaacagcangtggtggtcagcgcatcgctcctcttccttacttcccctcctctcttttgcacctgcactatgcacactgccttctcatcactgcaacatcacagcagaaatagcccgacacaactggatcaagctacaactctgcatatgactccaaaaggcattatgaat

SEQ ID NO: 28932 - DNA, 295 bp, Oryza sativa
  unsure (1)..(295): unsure at all n locations
ccacctcctcatcttaccaggatatcttgtgccagggcatgcattgtaacatggtccaaatgcccctatgttgttttcctttcctagatacacaaatgagaattcgtaacttacccatagttcattngtataagtgccaggcgcttacccattccttctcgtaccacaagaggnggcttgaaggagcaatgtttctggcaggacaactcgaaacatgtctaggaatgccgtcgcgaaatagcagcaacaacagttgcaatacccgctcttagattggagccagcctgggtataca

SEQ ID NO: 28933 - DNA, 337 bp, Oryza sativa
ccctcgtacaaccgtacttctcatatgtgtatagacctagcggattacatagccgagcggaggcagtttccctgcatagatgtgtcacccctgagtgaggcatgtgcgctacgatgggacagcctttgatgtagggccgataagcgtgccctacatctgtgtcctcattggtaggactgccatgagtatttgagagagagaacttaacttgaaccataatttaatatgtgtgtgagacttctcttttccgggagcgccagaacttctcttactgctataaacatggacgcctatagtgcatgaggatataagttcatggagcggttactgtccatgc

SEQ ID NO: 28934 - DNA, 419 bp, Oryza sativa
caagactcatatttctcgcacagaacatgttacatgtatctagtccgtcattcgccattatatcacaccagatcaaactttaaatacacgcgccatatgtgtaaacttctacattctaaattgagcatcacattacgttgatggcatggtcgaataggtcggtttataccactagactgaagtagaaagagaaataaagccacatgtttgcgcgtgcgctggaccagcatgaaaaccacacttgtaggagcaacaaacatgccgtgtaaggatagaggtgagtcactgttctgcaatgacttgatctggtacaacatcaaacaagccatacatattgtgcattccaattggtgagaattctgaaactgcacacatttcaaattggtgtgctcttatcatctatctagctaccatctcta

SEQ ID NO: 28935 - DNA, 409 bp, Oryza sativa
  unsure (1)..(409): unsure at all n locations
catgcatgcangcttaggagagtacatatataacccacggagttgaatagatgagtcttcatcatgaggacgacatganaacttcaggccttgcaaaggaaacttcctcaaacacattggcatctgatgaatgaacaaacagcaatcaggggtcctaagagagtgtgaaatcgcaacatctattgagagaagcatttaagacatgtgtatgggaattttgatacagacaataaggctcacagaattgattttgcagatatgtcaagctgcactttgcaatacagaaatggtgaaacttatgtatcatgaattgaaaccagcataatggagtcccagcacagcaagattaatggatactagtacagcacagtatctctcgtaacatgaagtcccatcacaaagatatctt

SEQ ID NO: 28936 - DNA, 425 bp, Oryza sativa
  unsure (1)..(425): unsure at all n locations
catgcaagctntgcgactagcatgcatctgcgcatgtccatgtatggtaagttgtgttcttgnagaanccctataatcgccgctgtctatctgagtgcaggctgacctctctagtgtcacagacactccagacagcagggtacactatttggctctgctagctgggccattttatccaatccttccacttacgaatgaaaggtgccagnaccttgcacaacatacaactgcatatcaattatattttttatactaagctctgtgctgtcctagattatatttcggacagaatatgtgtgtgtgcaagtagctgtacagacatgtgtgcgcacacctacatgcaagcactgctatctgaaacaccttcttattttacagggattgtactaaatcattaattagcttctgctgattcagatgctctg

SEQ ID NO: 28937 - DNA, 467 bp, Oryza sativa
agcttgcccgcaggtacaccgaacactcacttatctgtgttcagttatatgcgggcggagcggagactctcataagtatccgctagatccgatagttaggtctcttggttgcgcgtctttacaaccaagtcatcgacataagcctcaacattacgtcctagttggctacccaaaaatattcgagtagtacgtcgaaaagtaagacctgcattctttaacccgaagggcattgtcgtataacaataagttcctatgggggtaatgaatggcagattttcctcatcctccctagccatgcgaatctgatggtaaccagaatatgcatctataaaacacaatagatcgcaccccgctgtggagtcgacaatctgatctatgcgaggcagggggtaagggccttatgacatgccttgttagggcggtgtagacgatgacattcaagcttgccgtcgcctggaacaccaccg

SEQ ID NO: 28938 - DNA, 324 bp, Oryza sativa
  unsure (1)..(324): unsure at all n locations
tactaagcttgttggtgtaagctgcactctacnccctacccatgaccctgcgaaagacgaacacanaaccaatctcacatattcacaacacacatcagatcaatgccgggtcaatgaaaagtgatctgatttcaaaaaatataataaaaaagaatctcacaaattcagttactacatactgtattcaacaacaactaactaatcaagataaatacgtaatgaatactacctcatatatacattataggaaggaggtagcatatcaagagttggattggtgacacatactctttgagcctgatctcgatgtcggggaacttggcg

SEQ ID NO: 28939 - DNA, 472 bp, Oryza sativa
  unsure (1)..(472): unsure at all n locations
agcttacctaaatgagcttatcagattataataagctgtgctccatatataataagctacttcaataagttgtgtgtgtctttcagcttactcccaataatctggattataataatcccaagctgaaagaaacagggcctaaataattactccatttttcagttcttgatataacgattgacttttcgtcttatttaaaaattttctatgattagtatttttattgttattagataattagataataaaatatgaataggatttatgtgttactaattctttaaaanaaaactatataagacggatggtgaaacgttggacataaaaaactataaatgaagtcagacggagggagtaactatcatcaaatataaattctttaagccccatcgttttgcttatccttatacttatcgcgaccacttattagcacataataaaagagtattttgtagcatactgaacatatgtc

SEQ ID NO: 28940 - DNA, 175 bp, Oryza sativa
cgcacaccacatgggcccactatggccggtgttccaaacaaagttacaagcccataagcccaagacacgtgatgtatcaccttggttatgtgattgcagccaaacgacaacgaatttggcaatgaagctataatctgttgaaagagggctttagagctttccatcaagtactcat

SEQ ID NO: 28941 - DNA, 309 bp, Oryza sativa
ttttaaccgcttgtgcgtcttctcagagaagtatatataaattcttataaatatgttataactgtttgtctttttacgctatgctataatataagtgaaatgtctatagacaacaatagtagctattaaggaatcgatgtagtaatgagcttatctctactactactaaaatattgaagatgtgtccgctataatttttgacgtcatccatgtttcaatttggtttaggtttatgtttcggttctaattttagattatccatgagaatatgtcgacaagaaactatcattatgaattgtgtcaatgatg

SEQ ID NO: 28942 - DNA, 69 bp, Oryza sativa
ctatttctgcttcaattgccacaaaggctatagtttctcctagataaaggatctattccgttataaatt

SEQ ID NO: 28943 - DNA, 447 bp, Oryza sativa
  unsure (1)..(447): unsure at all n locations
ctgcggcatgcagcttattcaaaatatagtnggtatatgacgcctatttactctatggtatccaattatttataacacaacaaaactcacatattatacaataatctgagttgtattaaataaagaagataagttcgcattattttgaaggacttgggaggagaaaacatagtattatgtgcagaatggataacaatgtcacatgcgattatgatctaaagggaggagaaaacatagtataactgtactaatgctgtaatgtcccgcctctcccattcatangtcatagactgccctcacaacacaagtctttcctgcacactntatcctcactcgtgtgatatgagtattctattaaggagatcggcttccggagaaagttgcaatttgttgatatgagtattctattaatcctattaaacagctctctttccgatcggtcaccca

SEQ ID NO: 28944 - DNA, 353 bp, Oryza sativa
  unsure (1)..(353): unsure at all n locations
tgctcattctgccagcactgcgccagccagatcccctgacacgccgncgtcgtcgccgctatgtactccgcctcacaagacgagagcacgacaacctcttgcttgatggactgccaactgactgggttggcacccacgaagaagacgaccctgctggtgctnttgcgagtatccacatcgcccgccatgtctgcgttacagtatccgacaggctcgggcggcgtctccatcctcttgtagtagcagccgtaatcaaccgtgccggcgacataacgcangatgcgtttcaccgccgcgtcgtgctcggtggttggagcttccatgaagcggctcacgtagccaacagagaacgc

SEQ ID NO: 28945 - DNA, 402 bp, Oryza sativa
  unsure (1)..(402): unsure at all n locations
gcttgagcatgtaagttttaggcataatttgtcttgtaatctagatgcatgaatacctcatttgcacctcttggccttgcagtatgctctgtacctcgtcgattcgctatatggaattgcaagttcaacctcttttagtactgcatactgcctaatgcatcttttaaatgtttcaccgtcttcaaatgttacatcaacagctatcttaggattgtcaagatcagttatatgcactacagaatcacaaccctgctcatcatctgcagctaagtcgtcgacatcttcatcagacccaggttcataatctagatcatgctcttcatcatctgaaaccaaatccttgtacttatncttctcatcatctacaccgacatactctacctcatcattctctcccaagca

SEQ ID NO: 28946 - DNA, 224 bp, Oryza sativa
  unsure (1)..(224): unsure at all n locations
tactatggcgtatcgggctggacagcgttgatctcccgttctgtcagcttttgctttcttttagactcgtaagctagagggccgccccagatgtgngtgagctccttgcggtgatcctaaacacctgtcggggcatcatcatcatcatcatccttctttctcgacgngcgttgatctccgtcagaagtcttctgtgcattcttggcatattgctctgcaactac

SEQ ID NO: 28947 - DNA, 463 bp, Oryza sativa
  unsure (1)..(463): unsure at all n locations
agctctgcatattntaactggccttccaatgggtcattatgatgtacctgagaatcttcctgcatcaactactacagtgaaggaggctctntctgctgcttctgggaagagcaataatattgttttatctgatgctataaaaacatctgagaatgctagggacaataatgaccacatgctgcaagtgaagctcttcatatgggttgtattcaactttgccatctttacaaccacttcattatattttacagccgacagcatgacagctgtctctgagataaataagctagtgaagactaattggtgtgaaaagataattgctcatatgaacaaatgtgtgaaaacctttcattcatgtcagaaagttccagccccgtgtcctctgttgtaagtatctttaaataatttttttctttctataacaacaatgttgatgcgtacacgatgtgacacttttttttat

SEQ ID NO: 28948 - DNA, 106 bp, Oryza sativa
tttaaccaatgtgtgaaaatatacacctaccacagtttgaaaaatatgcgagcgattgttttaccaacaaccggaacaatccagcgacgtgagcgtgcaatacgtg

SEQ ID NO: 28949 - DNA, 482 bp, Oryza sativa
  unsure (1)..(482): unsure at all n locations
agcttagctntcacgtagtatactcttctataatacatatttataaaatgaaaagttcagagcacctatcaagagagcttatctggagccttgaaagaatcttctttaaagggtgttctctaactaattgctacctttaattagtgagcgcccaactatgacataattactcgcaactattctggtgtcttcagatgccaaacaagctccctgtggctgcaatgccttttgtgcatggtcctaaccatgattcctctcattcaaagccagcattcttggctttgcttccttttcttagtttctgtgatgaagctaatggtctgattcatgtgtgttcctaatctgattgatgcaacatggtgcaagccaagggacaagcaagaagtttacgctcgtcggcggtggcccccggctctgcccttgatcagagcttgcaaaagtagaagctgctttcttcctccatcaccttgtgctcaattata

SEQ ID NO: 28950 - DNA, 273 bp, Oryza sativa
  unsure (1)..(273): unsure at all n locations
tagcgatacttcaacgagagagaacaatacttccatcgctgtggtttcccacatgatgatgatntgcacaggtattcataaatgatgcagagcaagtgcagaatatacaatataatgcactcttggatactttggtgggtgtagcctcgtatatatatgttcagaacataatggttgatacttacctccaggcataatcaggaccatgggttaaactatttctagggctnggtaaacaaaaccatgacagatgtacgggttataatagatgtc

SEQ ID NO: 28951 - DNA, 284 bp, Oryza sativa
gatcaacgacaactgtgtcagtatttcatgcacgagaaccagaacatctggacctattataagaaagatagcaagttcaccatctactgtgctatggttggattatggagaatcaatttctaacacatacttgcaacccatagtcaacaagggactatgtaatgatgtagctctcttgataagcgtgaatcagtacaggtcagcctacatacatgataagaacttcggtttccactatagagaaaaccaagacttctaaatctactatccacaacctcttcacg

SEQ ID NO: 28952 - DNA, 452 bp, Oryza sativa
  unsure (1)..(452): unsure at all n locations
ctcaagcttctgtctgtcatataacaaacctccactggagatatatctatagtaccatnggcattgctcccacagttcctctgctctcttgaactgatggataacgacagattatacacatgaaaaactaaatatatgctgcttatcaaagaactgccagcacgaagtaccttcttccatgaattatcagcctacattccaacttcaacagctgctatgcggccaggattattataatatcatcgaagctctacataaaagagatcgcattctggttttgcgaatactatttgatacactacatgctgcttagattcttacttgaacaatcatccgtggtcatatcatcagagtgagcccaattgccatcacatctatgtcttatgcatccaagtgagcaagaagaccatatccatactgtcttgcccgcattaatttctttaattgacctc

SEQ ID NO: 28953 - DNA, 338 bp, Oryza sativa
ctgcaactaactccaattgatccttattgaaacaaggattgctcattttaccatgtttttcaacatcgtaagttgcgtctgaccctactttcactacattctgagtctttcatttagaagaaaagaagaacatgtatttacaagcccaaatgactaaaaagacactgaatacatcaaccttatcctcaagcactcatttgctcattccttatcccgccggctctctctctctctctctctctctcttcaaagcgcgaaaggcatgatgagcggtggctgcaacactacatcagctgcggagtgcccccggctgcttcgcggaaggtaggatcggtggc

SEQ ID NO: 28954 - DNA, 300 bp, Oryza sativa
  unsure (1)..(300): unsure at all n locations
gcgccttgataccgcttgaacaaggaatgactccccaccactcccaattctggctggcacataataactntttcacgtgtagaaactcctctgtgtacacccaccaaatctggtccgaactgacgaatgccacaatattgatcaaagtaagctcctctacatatatgaattgccccaaggtggaagagcgcctcaagagatgctctctagatggagagattctcatcctttctcacatatatcatcacataaccaactaggacccgtggaaccaccattgattcttatttcaaagctcta

SEQ ID NO: 28955 - DNA, 188 bp, Oryza sativa
taacaatgcttgtgatcatggggagccatgtgagtgccgcgggcgactttggacatggtccatgtagtatatattttaaagtttgacaatgaggagtaagtataaatattactaagttgtacattccaggcgctacatattttaacctaattatctataaagacatatgttaacctaaagtctatgat

SEQ ID NO: 28956 - DNA, 332 bp, Oryza sativa
  unsure (1)..(332): unsure at all n locations
atgcctataatggcctatatttaagtgaggatntgatccttctatgtggcatgaggtaaccctgagtcggcttgggaaaggctttgtcgcgaacctctgacaccggccagtgtctggagtaagttcgtgtcttgtggcgaaagtgtacctctctgtagagattaataaactggtcgaacagccgtgcccacggtcatgggcggatgtgagggcggtcctgctgcgtaaatatgattgcctgtgctttgttaaagaagtggtggtggggaatcgttaccgaatcacctatgtggagatggagaccttggtggtctaaacaaatctgcgtgatc

SEQ ID NO: 28957 - DNA, 490 bp, Oryza sativa
  unsure (1)..(490): unsure at all n locations
agcttatctcgcataccaggggaatactagcccagaatatgaaattnttggtctcaattantgaagttagctagcttcgtgagaaactttaattaatttgattctcattaactggatcctcattattcccgatacattaattggctcaggtttgtactctgcctagagtactaatatatacagtagatgcgtgttgcccggtatagaggcgttttcgttttacatgttcttcttgaagcaaatataattgcaaggttaccccgttgtttcaattttatatttcagaanatggatgacagtgggaatgagaggcggctggaagaatataacctgcgattgtagcaattgtggatactagaggagcacaggaacatgaagaaggcatggaatgagagtcngtcgctgccgttgagatccgtgcaacttgcgttctgagcagctacagcagcttgtcatgtagtggtctcacatggtgtatcaactgcatctg

SEQ ID NO: 28958 - DNA, 483 bp, Oryza sativa
  unsure (1)..(483): unsure at all n locations
catgcaagcttgaaccanggctacagcctacagttagctagctgtgtccatcatatgagattagttgattgttagaccaataaataaatactccatccaactcagaatataagtattnttaactataaatttaaacaatagtgtgtccaaattcatagctaaaagttgttacattntgggacgaaggtactccctccatctaattttgatagtcatatttcatcttagcacacagaccaataataagtaagtctacttatcatgcatttaaacatgctactagtcattcctcataaataaacgatttattaatatttacatttctcagagcctatatagccaatcatgtgtggaaggatagagagtcatgcattanatncgagaaaatcattatgaagatagattgctggattgaaatataccctatgtatagattttcagattttgcaatataactatatatagacaatagatggagggagt

SEQ ID NO: 28959 - DNA, 338 bp, Oryza sativa
atgttgatctttattgcatatgcatccaatccattcatattcatgtggggcgctctcctccctcttgcttgggcagctccatggtcaggacactgttgcacttgcctcgacatgtctcatttctggcaccggagagctggcaatctggctgcctctgacttctgatggatcatattgtgatgacttatatgtctctgcatattgctatgccacacgaagagaagagagcctgtgctgttcatgttgagaaaaggtggcagatcaactacccgagtgaccaacctatcgattgtggtctcggctcttgtttatgagatgtggactgcctggcacttttg

SEQ ID NO: 28960 - DNA, 263 bp, Oryza sativa
cattgtcatgcgaaagagactgtttatggtgatggccacaaaggcattgactcagaatcagctcagatagacagtggaggatatagtgatatgcctagtaaattatgctctgataagacgaggaagattcataagaagattgagagagaatcaccagctaatctagaggactatgcacccgattgacatgcacaataacaatatgattcacttgcgccgcagcttgctaaaggatcatactgatgattatggcacggtctctg

SEQ ID NO: 28961 - DNA, 374 bp, Oryza sativa
  unsure (1)..(374): unsure at all n locations
catgcaagcttgccaaccgctactggttcaccttcttccttattacgagatgaccaggcatcagctccgcgggtcttactatnntgttgaagttgccgaagtgcttgtggcgtacttgtgtatgtgctcgagcgcttcgactcttactccttccaagagttcgagcgatacttcgcgtccctcttcacccccagagaacatcacccttggtgagttagcccctagctttgctggggtcattgcctcatcgccataaagaagcatatacgggctaaacttggttggtcttgtgggggtcgtccgaagggcccagagaaccgatagcaattcctctggccatntgcctttcgctgcccnctcgagtcttttcttta

SEQ ID NO: 28962 - DNA, 361 bp, Oryza sativa
  unsure (1)..(361): unsure at all n locations
accgtcattatgagagcatctggagcattcacgccaaaccccaggatcaacagtgatcatggaggttcgggctgggccctctcggcttggacttctgcctgtggactcccctgactctcctctatccgtatctcggaattttgggcttagtctttggtattttgatgaagttcacaacccatccttctatggatacttgtttctcctcactttagtctgattttcctcctaacttcagggtttatcacctgtatacaaatatacaccaacacttgtgagattaagctcctatcactatgttggatgtgtnattatctgaactctatgtagatgttggcggtatagaattggtatttaacag

SEQ ID NO: 28963 - DNA, 373 bp, Oryza sativa
  unsure (1)..(373): unsure at all n locations
tatctggatctggatcctgcagaacaaacatataggatgagtagtatctgatataaatataatactcgagaaaaaatcaagtattttaaaatatttataaatatgtatttctcctcttgtcaattatgatttccccgagcagatgactctgtacgtttaaacactctgtccgactagtcatagcccccaagcatcgggagtcggcctatgcatttcccaaacatgcatatgagtgacatgagttcgtcattaatggaataaagtttcacggatcagaattactactcaggtacttttgcaattattaagagcagaaaataanattatctcatctctatgctcttgatttattccgaataatacttagcacctt

SEQ ID NO: 28964 - DNA, 393 bp, Oryza sativa
  unsure (1)..(393): unsure at all n locations
agcttagcgtgccaaggagaaacgatgttaacactgtttaaacaatgcatagagattctccacggcagctagtgccattcggtagtcctaatccttgattntggaataagtttagctgccaacacgtcacgccgagatcagcatcatgattntagaattagttttagctgcgaacacgtcacgcccggtcactggtggttccgttgtcccgacctggcgcacatggcggaatcccccatccgtcccttttttttgttcgtcagttgacgttggttcatccatggaagtgtgaactaaacacagccttattaactggagaatttaacctttcagcactaatacagaatacctatcactggaatttgcgtattgataaaaactatcgtcaaaact

SEQ ID NO: 28965 - DNA, 513 bp, Oryza sativa
  unsure (1)..(513): unsure at all n locations
catgcaagcttcaagtgcgccacacaagatatagagagagtgtatatgcgagccaccgagatattaatttctgtcgatggactacgaccccgatcaacggattggttagaccattcccaacctaataattaggatggtgtccatagcattaaatagactgtcacctataatgaaaaattgatgtggcaaacgaataaataagagaagagaaggaaacaatgtcctgcatgagacatagtttctacataacaatcaagacatcatgtaatataagtaatattaaatttaagtatgaacacgtggtgttgcattgggggggctaatgggcgatcgattgcccagcgatcagtttgccccccccctatactactccctcttctcccccttccttctccccttcttttctttctactacagtacaccacacaagattttttattaaacacacagtagaacaatgtatgtatataaatactatatataaaaaatntgaatgcaaattcaaatttgaat

SEQ ID NO: 28966 - DNA, 339 bp, Oryza sativa
ttattgctcactgtcaggtcccatctgtgcatcattctctgccttgcaagcactcactatgatcgagcttcactataatcacttgtcaggttcagtgccagagttcttggctggcttctccaatctcactgttcttcagctatccaaaaacaagtttcaaggatcggttcctcccatcatcttccagcacaagaagttgagaacgatcaacctctccaagaatcctggcatatctggtaatctgccaaatttctcacaggacactagcttggagaatctgttcctcaataacacacacttcacaggtacgatatcctggtccatcatcaatctcatatc

SEQ ID NO: 28967 - DNA, 460 bp, Oryza sativa
  unsure (1)..(460): unsure at all n locations
tccttaagncacctgcggcatgcaagcttcttgatggaattccgagattgcttcgctgggacatacaaagatatgccaggacttgaccctcgtgtcgccacccataagctggcgattgatccccaatttctgccagtgaagcaaccgccaatgcgcttaatgccagatgttcaaaaccaagtcatcgccatagtcgatcgactcatcaacgtgggttttatcaaagagatacaatatcctcggtggttagccaacatcgtcccttggaaaagaagaatggacatgttcgagtctgcgtaaactttcgccgactgaatcgtgctcgtcctaaagacgactttctcctaccaatcacggagatggtggtctattcaacaactggttatggcgcactgtccttcatggacggctcatcangttataaccagatcaagatggatccccttgatgccttcgacac

SEQ ID NO: 28968 - DNA, 258 bp, Oryza sativa
  unsure (1)..(258): unsure at all n locations
actagcttcggagaattgtgacacaggggatcgaatctgccttcatatggattgacttagtttgccttcttgccaaaccgatgtttattttctatttgggcagagagaaagatctgttacttgtgccatacttgacagaacctgacatggatataatccagtggccaccattcttgcttgctaacaaaggatatgctttctattcagctcctatttaccatgccttctatatttgngaaaagacgtacctatagttca

SEQ ID NO: 28969 - DNA, 366 bp, Oryza sativa
  unsure (1)..(366): unsure at all n locations
tataaatattttttcttattttccgacttactgaataattgagtattattcgctttaatagggagctttacgtgtttccatgtattaatgtttctttacaagtttgtacccccattctcaaaatcctgcatcaaccactgggggttgtacaatttaacaatggcaatccctaaacacgtttgccattatatacttcttacattatcctatggttntccctatnttcattnttctacatttccagtatttgtttcaaacggacagaatgttggcatgaaggaagtggcanaatggaagagagctttgtcataacagttggcccaaaataagatgaagagaaattacaagaatgtatccatggattat

SEQ ID NO: 28970 - DNA, 327 bp, Oryza sativa
  unsure (1)..(327): unsure at all n locations
tacatcatgcaagaatcgggttgtttcatgatgattaacaagaacaacgttatgatggccagagggacaaggcttatacttgatcgacggtgatgagggtcgttcagtttcatgaagatggtcaatatgttcagaagaaatgaacgaagatacaaacatcaccttctcgaatggctcatgcttgggatgagccttgattttgctggaataattcaaggtgttctcataatcttcataaagatcatccctgaattggaatggaatntccggaggatgaattctttcttctcnngctcaacgactggaatgaggattcgacagttgagt

SEQ ID NO: 28971 - DNA, 272 bp, Oryza sativa
  unsure (1)..(272): unsure at all n locations
tgcagcatgcaagctcgacagaaatctagatcctactgtattagagatataatatccactctctactgcgagcaccctcactanggaaatttcagatcatacaccttcgctatacaattcatgcggtgcgttcgcagcttaccaacctcaattantaattgactgggctggttgcggaaggacagtatcagtgatattgtaaaggaggagtggcaaggggtgtccattgagggacacctttagagagatggctgaggataaatataccatta

SEQ ID NO: 28972 - DNA, 432 bp, Oryza sativa
  unsure (1)..(432): unsure at all n locations
agcgttacatagctatctatttgnggtcttttttattatgtngnatttccatatggaatgattattgtggctcacttaattatgttgttgtgtacacctttatgctatatgcttagaagtacttaactcttgttgaagtcatctattcttgcacgaggaaaatattagcctgtcataaacttggcttttctttccacattaaagatggtgaaggactaaccactggtgaatatatggtagcactacggatctattcagaagattgtattgcatctggtggtcagcaacaaagtgctcgtacctgtgctgctgttggagaccaatctttacaaaacatataaaatgtggaatggaatgaaatcgtcttctttatagttgagagcgaagtgtgtaaatagaaatatctaaaatatatgctgacctactttacat

SEQ ID NO: 28973 - DNA, 328 bp, Oryza sativa
gtactgcgctgcaccacttatctgaattgatttttgttcagggatacgcataaatgcaacctgaaatttctgttctccgtaactggcagagggatcttatgactcaacttgcaaatgtagtgatatactatctcccaattgagctcgcttctgtttcttatgctaatttaacatttggtttcctgaaatcatgcagaccttacaaagtcttcaacagaagtcacttctagttcaatttgtctaattcgaggtaatgcaggctgatgtattgtctggtatgctctccatttagtcttgctgatatacttgaaattcatccgtatattct

SEQ ID NO: 28974 - DNA, 52 bp, Oryza sativa
cagcgcaagattgtcactgctagctatccttggtttgactctctgaagttac

SEQ ID NO: 28975 - DNA, 428 bp, Oryza sativa
  unsure (1)..(428): unsure at all n locations
gcttcactccactcaacttatcaatnnttcctctgcatttcttgatgganacattcgaaccttttcttggaggttgatctctgctagctctccatggacattaagctaaatggtaaaaattttcaagaatgggaactttcggtttatatgcttcgaatgttaattggccaagcatgtcaactcgcagatgatcctcctgatgatcgaacagatgcaactaaggttaaggcatggagaacatgcagttgatcctgttatggaataaatattcatgagtgtataggtggctattaattaaacaacaagaatagtccattgaagaaatttatgatggttttattcagttgtctggccaagttcaggttgtgcacaatgcaaggcgagagaggagaacgaccaggaaaatctactgtaccaatttgtcatgc

SEQ ID NO: 28976 - DNA, 242 bp, Oryza sativa
  unsure (1)..(242): unsure at all n locations
acacatagtcgtatatagccgcaaggctgtcgaccatgctatcgacctgtttgagacattcgacagcttgcgcacagaatgcatatggctgaatctggagaagagcgttntcagcgtccgcgcaggcaagtagttgagattgcttgtttacgaaagaggcatcgatgcgaatcccgagaaaatcgatgccattcaactaaatgaagcctcngtcaagcgtacatgtagtacantagcttgca

SEQ ID NO: 28977 - DNA, 464 bp, Oryza sativa
  unsure (1)..(464): unsure at all n locations
atctctgagtcacctgaggcatgcagcttggactaccattgattaggtcacaatccatatgctcgatgtntactgttctatngaccaaagggaccacctatatatttgtcgacaaattntcttcttaaaatttgacagatgtaattacagtacaatcgtagcgtaattacactataacttatatgtgactacactgtaacttgcatgtaactacagcgtaacttatatgtaacgtttagataatcttgaatacgtagatctattacaagatttgttttggtgaggaagaaaaccaaccatagcacatacatatatgatagaatctgttcccacgaccttcattataccgaaataacatgttacggagagatgtttgaaagatacatatagattacactatagtactgtgtaattacatgcgaggtacagcataattacactacgatcgtagtggactatatctg

SEQ ID NO: 28978 - DNA, 248 bp, Oryza sativa
  unsure (1)..(248): unsure at all n locations
atgagcacctgctgctccagctcctgccgctgcatgaacgtcagcgccgacagcggacgcgccttccgcacggtggacgcagacgcttccgcggcgctcacactgctgtcgctgccgctgtcgcccataccgagacccaacccaagaaccagcggcgagtgcgctgccatcgtcaccacgcctgcgtgcatgctcaaacgacgccacctatagctaatgagttggtcgatacagcantgcccgaatca

SEQ ID NO: 28979 - DNA, 450 bp, Oryza sativa
  unsure (1)..(450): unsure at all n locations
agtcacctgcggcgtgcaagctgtggctaactaatccaactgaagctatagaggtactcatcatgaatggtttacttaaacttaagccatctagctaatctagacttgagaactatgttgaaatgagactaacttatatgattgaactcccggcttcggcaagaatatcaaattgactctgaaaaggaggggttgaagcaagagttgtactcagcaagctattatattgagtaatgaatgcctganataatagtaattgagtagggctatattaagttgtagaaagcagagaatgtagaagaagaaagcctgcgatgtttgaaatgtgtcagtatttaataaaatcttgaattagggttctaaccaagatgccatagtgagtcccaatgcccgataacaacgagcacggctattcgaatagttttagggatactcatactgcagtagatg

SEQ ID NO: 28980 - DNA, 259 bp, Oryza sativa
ttccaatgagtgcactaccacaaggtgtcaatgctcaatatcagccccagccaccagctggcaagacagaggccagtatctgcgttgtacctttggaagttccaatacaccagctgagaaatcaagtacaagatgaagaacccgagtgtaaaaagttaatgttggttacaactgcagtgaagaagggattactccaaatactgtcccaaccaggcagaatcggcctcacattaccgcaattacacgaagcgacattcca

SEQ ID NO: 28981 - DNA, 525 bp, Oryza sativa
  unsure (1)..(525): unsure at all n locations
agctngaataagaaagggtacgctntcaccgtcctataccagctcgaatcacacgccaaagttcgaggccatactttaattggagtgcttgatcggtgttacatccaccaaanaaaaaacaaaaaaaaacaaaatacgagtaagtggcagctagtggagcagcaacattattntggggctggccctcgcctaattttcgagtcgattntgctagatatttgtcatcaaatttctccccctaatatttgtcagatgtaattacagtacaatcgtagtgtaattacactgtaacttgcatgtaattacactgtaactataatgtaacttgtatgtaactntcaagaatctctcggtaacatgctatatcagtacaatagaggtcgtgggaacaaattctntcatatatgtgtgtgatgtgatattttctctctcatagaacaatcttgaatagatctacgattacaantacgtgaaactacatacaagtacactgtagtacatgcaagtacagtgaaatactacaac

SEQ ID NO: 28982 - DNA, 453 bp, Oryza sativa
  unsure (1)..(453): unsure at all n locations
gtggtattttttagataatggaatgttatattcaagctagtgtataccctgtggtcaacaactattctctatttacatgtactattcacatatatggctgacactangggtctcatacttgccaaacctactgcctgcattgtgctaagtattgcatgagaaagaattgctggttccttagtaatatactttgataaagattctgtttttcttttctanganaatgatgaagaagaaagcactgactatggcttcattcagacaaagggcanaaagaagcgttctacctgataacttctccaatcaagacagcctacttttgctatctatagtccaagatggacacttttgttatcctctcatctactagccancattacttttgtgtatctagctctgactaagaacctagactgatctactacccaggtactctaatacaaagttgacatg

SEQ ID NO: 28983 - DNA, 143 bp, Oryza sativa
  unsure (1)..(143): unsure at all n locations
atagattattttactatgctcatttggttgccaaccctcatattgctagagcattcgatggactntcatttgaaaacaagatgcattggtttgctatgttcattattgaaaagttccctggatcaacataggcttcttggatg

SEQ ID NO: 28984 - DNA, 240 bp, Oryza sativa
  unsure (1)..(240): unsure at all n locations
cacatcataacggaagtgctgatgatggacgttctatgtccccgccgaagccgccaagaactatgtacgtcacagcnggtgggttgtgcgggataacgtgcctgtcagtacggtgtactggcgaagaacaagggcacgcggagatcatgagagctttgttcccacattcggagaaagagatgctgtggaccacaatgctcgagacatttcacccttctgcggtacagaggacaaagtgaa

SEQ ID NO: 28985 - DNA, 415 bp, Oryza sativa
  unsure (1)..(415): unsure at all n locations
tgcagcttttaataatgtgtcgtcaaaccgttatttccattaacacanatattntgtaacttcattaggatgatgacctggtggtgtctcctcagtcctatgggattgtagtactaatattatgtattgactaaattgatcaacagtaataaaagcatcatggttgtaccatgtactatattataaaaccgcatatgtgaggataaatatataaagtgtttcaagtgtgggcaatataaattgggcaaagcggatgaaatgtaatatctgtaacaccactaagccaggtcacaatgaaggtggtgtgaggtaagacatgcacaacctgcatgtggcatgttcattgctttgccagttaaatagtcaaaatgtattatttgcctttgctttgcatgaactatggngagcaatttat

SEQ ID NO: 28986 - DNA, 292 bp, Oryza sativa
  unsure (1)..(292): unsure at all n locations
cagctgcacctatcanatacattagcagcataagctaacatgcaaagttaatattatgtaaagaagtaacatttcacaataaatgatgtaactgcagtttacataccacacttcacaaaacctacagcatgaactgagagaaggagtaaaattccctacatgctacaagtttcaagagcatagcgtaccctcattcccatttctgttgctccaggaataacctcgctttcaaagtcattgcagcagggaaatttgacggagaagcttagcatcacatctttgctaaaaacat

SEQ ID NO: 28987 - DNA, 372 bp, Oryza sativa
  unsure (1)..(372): unsure at all n locations
anngctgctgtntagtctatnggttaattatgagttgatattgctcaggtttccctgctgtttcctctccctgttagttcggtctgcctttgtgctgaaggtattntcttcttctttatatttgtgcattcctatttttctctggtagattaattctttgcatgatattatatggtatatgtgtacccctgtaagtttatgtgtgtgcaactgcagttcctccctagctnntgtcatttgttatataattagatggttctgggtgctgtgtgcatatagtgaaagtgatccctccttccccctatagtnttgggtattagtaggaaaagagagacgttacaagttacaatggtcacaattgttataactacc

SEQ ID NO: 28988 - DNA, 312 bp, Oryza sativa
  unsure (1)..(312): unsure at all n locations
tgtgcttcttgtattgccacgcgtattggtgtaacccanacttttctggaacattggagcanatgccccttgttcgtccacggtgttcttcatttcccaatgctttcgtgaggatgtcatcctcgcgtcttggtgagcagacctcttgagaggcctgtctctcagcattcagttcgacctgnggtacaattatgacgcgttagacgaagaacaagatatagcataatgaaacttattctatgtgttcaacttacgattntctggtacaccgcttgatcttcgggaattgggaacgaaagagttccgtctcta

SEQ ID NO: 28989 - DNA, 513 bp, Oryza sativa
  unsure (1)..(513): unsure at all n locations
agcttgcgctgantggtgcaaggcanagagctgatgtatatcataagtagagaacatcagaactgagagagttgaatttctggcaaaagaatatattctgggataaaccaaggctctgactttattgttccacaaatcttcccaaaacaaacaagattntccatcttgcacagtacaggccgagatgcctctaanaatatccacaaattgcaaaacatccctccaccaaaaagatcctttangagtaacagcatgaggaggttttgcagtgtagtaagtattccanatcaaactaacccagggaacaggatatctattatagaacttatgcaaattcttcaagagaagggcattattttgcaatctaaggtctattacacccaaaccacctctatctttcagctgacaaactctntcccggagaaccaaagacttcctactnagaataatatcagatcccctncacanngcatgtctnctagctctatcaatactntctataactggctttga

SEQ ID NO: 28990 - DNA, 359 bp, Oryza sativa
  unsure (1)..(359): unsure at all n locations
tcatgaactcgtctcaccaaaccaaagcgcgttcattcggaaattatcttacatgacaacttcttgtatgtgcagaacatgatcaanaacttcaacagaaagaanaaaccgatgctttntataaaggttgatatttccaaagcctttgacatcgtaaactggccgtatntgctggaggttctgcaaaattttgggtttggacagagatggagaaattggatttcaaatattttaggaaattcaagctcgagaattatcctcaatggaatccctgggtaaagcaattggcacatgcgaggtctaagacaaggggatccactctcaccgatgctnttcatactcgcaatggaaccgctaca

SEQ ID NO: 28991 - DNA, 506 bp, Oryza sativa
  unsure (1)..(506): unsure at all n locations
agctngaagatagatcatctacatgtgatcaccttacccgcgtcgaagttgtatgctcggagggtgagcccctggtcaaagatgtggtcaacttctttgttaatagtggactgacctctgctcaggttcagatcatacgctggtgctagatcgagtatgcgtgacctgcaattttctggtctgaggagatatgaaacgtcaaaaaggatcaagcattctctgaacattccattcaaaaatcgctctcttgcagttacattcgttgattccagttgagtcagaaagcacatagacatgtntactgctnttgntnggtgctatgatgtcagtagaagcaatcatgtattggttcctgtacttgcatccttctgtgatgttctgttgtacagaagatactgcatgtctgcatgtacatgccttgggactctatttggccttatgtttactgacatgatgtacactcctatgactctgctgctctattcccttcatgttctaatgtcaca

SEQ ID NO: 28992 - DNA, 387 bp, Oryza sativa
  unsure (1)..(387): unsure at all n locations
tcgcatctntatcagcgatgctgcanagcagagcatatgggaacctgaagcagagggaatcagggaagtgaagaaaatctggcaaaaccttggttgttgagggctttcacagtacacctagctgtcaatcagccccagccttctacgttagagattccacgccacatccgcctctctagttaccaagtgaagaccgtggagcctaactgggtcccgcgtttctcattaggaattgtcagggcgaggtgaggcatggctctgagcggcgcgttgaaagagtgcatggcctagtgcaacgccaccacactcatgttagacaacaacggtcgtcctgagctacttaccaccctaagcttgacgaagtggtgtctgcggtccggngagaga

SEQ ID NO: 28993 - DNA, 189 bp, Oryza sativa
  unsure (1)..(189): unsure at all n locations
agctttctncctctcnttgttgtttaatttttatttttttaattgcgggatcagaatccctaagctcgccgttcaaacgaagctcgcgagttggcgagggatcgccatgtattatatccatgtattctcatgtagaatagcacaccaatgaaacacgcataaacgatcccttagtgcatatcttcgggc

SEQ ID NO: 28994 - DNA, 512 bp, Oryza sativa
  unsure (1)..(512): unsure at all n locations
gctgtaatagccgatatggcccattgcctaatttgttctatatcgtctatggctggggcatcnggagcatcggctccagggatcanctttaaggatttgctcagatctgacagatgcttgatggaattccttaactttgatctcggcttctttcctagctcagctaagagttctgctctacgagacttcagccgatcaatgtagaattgtatggaatcgacggtcatcttatcaagcttcgatttgtctttattgatggnttgccgattagcttgaattgtggcttcaagttcttttcgttcacgcctatcgacaatcctttgtcttgctttttccagcttgaaccgatgatggtcaagatatacagcaggggaaatgattctagcttgatcgtcacgaatttgatcatggatactctcgaaccttgctcttatangtccacagtcaacaactcgagaataagagaactctctactcatgtgcaatgtccaaaagtgttgtttgacatcatc

SEQ ID NO: 28995 - DNA, 323 bp, Oryza sativa
  unsure (1)..(323): unsure at all n locations
agcttacattctctctctctctctctctctctctcttcataccatatactcagnagggcacactagctggctagctagtccgtataccggcatggcagctgccaggtgggccccgatcgccggcttcctgatcgtgctcccggcgctgctgctgccgccgccggcatcctccgccgccatggtgtgtccgctccacggcaacgtctacccttctgggtaggcaagagcaagacggncaccttcttcttcttcttcaacgctctgtagatgcatgcgcaacatttacaatttggctgttaattagttgaaatctctgatttttg

SEQ ID NO: 28996 - DNA, 303 bp, Oryza sativa
  unsure (1)..(303): unsure at all n locations
aataaaccggacacanattttgacaataatacaaatgtaagaataaactttctatctgaaatttaacatggcgatagattctattcatccggagcactcctaagaacacatgtgtgaacattggcagtcctcatcttatatgtgagctcctcggctttataactcttttaaaacattaaanaatacatagtattttatcttattatctcacacaattcttctcgaaataatgcatagcacaaccaaactccctatattaatagtcattattattaatagcttatgtgaaaaacctttatattt

SEQ ID NO: 28997 - DNA, 520 bp, Oryza sativa
  unsure (1)..(520): unsure at all n locations
agcttattatctttataaaanaanaccatgcatatttatgcacctctctgttgctggacaaatgttttaagctcttttactacaactagtgcagatatcttttattataaaaaaatgccaacatgatattgaacattgtgttttcagactcaagaggtacactgtttttctaagcagagagaagcaccttgctgtgtagcgctttacttatttaatctatgtttcatcttgttgaaaatcttcaggtttaacatattgttagatagcaataagctgttgtctttatctacatatagcggtgtacacaagttattacatgttaaggctaatatagatcagttgagattgaccgtatacatcatgccttaggttcaaatatctgttctgatgaagaatactctgacaaatgattctgaaggataaatgatggaggatatcttgtagtcaaagtatccatgcagatgttttttttcttgcataacccatacaagaaatacactaatattgacttcttctactt

SEQ ID NO: 28998 - DNA, 352 bp, Oryza sativa
  unsure (1)..(352): unsure at all n locations
tcgagctcagtacggtactgtacagntgctgtagtactntgtgctgctgattactagntatgtctattgatgtcaacttcgttagtcatctcacatagttatgcagaaagactgagaaatgatgatcatggagtcacctgtaaagatactccctccatctcataaaaatcaacctagctaggactggatctgatatcgatacatcataatacaatgaatctagatatgcctctgcctaaatntgtttactaagattcgtaatattaggatatccaagttcgtaatcctagattatatcatattcaattattgatacattnttgtcgaccggggatacccgtagaccggatat

SEQ ID NO: 28999 - DNA, 190 bp, Oryza sativa
ctcagctatcataacacgttctagtatgagatctgactccctatgtcataggatgtatgcctccgaaggtgaacgctgcaaggatatactcacacataggcccttggactcgatacgcttggagaactaccgctgacacatgctacatcagcatatccgtggcgtcgccgatattatatgtgatacgctc

SEQ ID NO: 29000 - DNA, 449 bp, Oryza sativa
  unsure (1)..(449): unsure at all n locations
agcttctaagaatgccataattacatgttcactgctcccatgcattgaatccctntggccagttgggacatggcaaatggcctcacttgcagggggactgtatgggatgatgattaggctgttgccttcctatgtgcgtacatggtttactagtttaagagatcgttcattgtcatcctcaatcgagtccttcactagagcatggtgcagtcctcctcttctacttgatgaattttctcaggtattacacttttgtttaaaaaatatgcatattntaatttttatccagtactcagccctttcgagtgtctatttacaggcctaccctggacactatattatgacacagtatgttatttcattgtgaaaaagaatgtgtataacttttttagccaacccttcggctgctttgggcatattacttctctgttctataccaaactggaggg

SEQ ID NO: 29001 - DNA, 385 bp, Oryza sativa
  unsure (1)..(385): unsure at all n locations
cactagtagcgagttaattctgtaataattntagagatatgcatcatattatatccctcctccacacccaaattaaagctagtgacaactcacgcgatcgatatgatggagcctggaggctggagctgtatatatagacatatgaaccacagatcgatggagaggacacctgcgctatagctagtcgtagttgtgaagatcgaagttggttgtgtgattagatagatatggcgatgcangtggcggcgccgtcgcggaggaggccgagcttgtggcggcagaagatcgagatccggcgcatcgagagcgaggaggcacgtcaggtgtgcttctccaagcgccgtgccggcttcttaagaaggccagcgagctgtccattctgtgc

SEQ ID NO: 29002 - DNA, 176 bp, Oryza sativa
cacaacaaacctttggttaaacacaccgatctcagcaaaaaacacccccaccaaggaccacagaccaacaggggggcaccctcgttaaccaagagcaccacgaacctcggacctccaacaagaagggcaacaacaacacgactccggggcacacccccagagacggaacgcccacg

SEQ ID NO: 29003 - DNA, 359 bp, Oryza sativa
  unsure (1)..(359): unsure at all n locations
ctcagcttgacaagcacaacacaatatcctgtctgtatggagaataggtattcaatttgaacaagaggaaaagaacagtacagaaactagatcacactgttggatgatgctcacatggaanaacactggtgcatccggcaagagtgagattctctatcaagttaactagagaatagtgaattctagctacctttgaaaaaagaaaaacattgcatacaaaaaccttngacaaaatgatattcatctatggaacaatctagctatanggatgttggttnttaaaaaaagatgtaaaggaccactcaatcctactcttacttacgagtgtttgtcttgaaatgcatgggtaataccaacat

SEQ ID NO: 29004 - DNA, 301 bp, Oryza sativa
  unsure (1)..(301): unsure at all n locations
agcttacacatttatagaatcctgcttctcaggatcagtgtaggcattactgtagtagcgctgaagggtccggaggaactcctgagattgtgttgctgccttccattggcctctntgctcacagaagatctgtaacatatatcagcagtatggagtactcagacagtcagactaataactcanaagagaagtttggacttttggtgtgtaaagaaaaaaaaatctttagaagaaaaataatattatgactattgacttcaccgccaattaagaagaanaatcgctttgaaagaaacaaaaa

SEQ ID NO: 29005 - DNA, 316 bp, Oryza sativa
  unsure (1)..(316): unsure at all n locations
ctcagctgatcctatggtttatatacaagggtattctgagtttcttatttcagcaaaggtgactttgtagttaaacctctttctgtattcaggctgaagaaatgataaaggaacatggctctggtttcccctgcaggccaacagataagaacaaatcttgcttgaaattgaatcactanngtaggatatatctttgtattctggaacttgcctcggatatcagcctttcaagttggttatggaattggtctttagctatgcttcactgctcaaacacctgcaagtcggaatttttgcactaatgatattctgtatg

SEQ ID NO: 29006 - DNA, 449 bp, Oryza sativa
  unsure (1)..(449): unsure at all n locations
atcctcagagtcacctgcggcatcaagctnttatcattctggcatcgagctattttgccgtatgacctccnctacagtatcgtcaccgcagtagagtttaaccaccatattcgggatggattggtgtggttcctctacgcctaggacaccagaatatcgaaccatgaacgaggaaaggcatgagagaaatattggctagtaattgtgaagccccaattcttgactggaagggacaccaaaggcctctgccctccctctctatctatccaagagatggaagggcagagcttntttttgtgtttttcatcttttcatcacagagttgaacaatgaagatagatggcaagtgcctgatcgatttgatcaggtcgtgtaggaacaaggttcanatcgttcgttcgttaggatgcctcagctgcatacatcactgcacttccacttgacaccta

SEQ ID NO: 29007 - DNA, 410 bp, Oryza sativa
gcttattcctgataggttgtttaaccggtatgatgtgagcgacttatgtcaacctatcaaccactacccaaatggaatcatgtcctgccgacgttctgggtagaccggttataaaatccattcctatttcttcccacttccactctggaatcttcaacggctgtaacagaccagctggattctgatgttctgctttgacccgctgacatacatcacatagagccacatattctgctatctcacgtcgcatactaagcccaccaaaatggtgcttcaagtcttggtacatcttagtgcttccagggtgaatggaatacaaagtttcatgagcttctttcatgatagtatccttcaactccttattatctgggacgcatattctttctcctaaccacacagtaccttgctca

SEQ ID NO: 29008 - DNA, 307 bp, Oryza sativa
  unsure (1)..(307): unsure at all n locations
ctagaacgctgcaacgctattaatcaacgccgcgaacccacacgaacctgccttaacccatggcctatgatgactcagaccgaactggccacccgaccctgggtgccagctcgtgctaagccaacccaaggcgaccattccatattttaattgttgagccacgtgtaagaagtaccacactatactgggtacattgctcggctatgccataaccganggctctgctattctaatagactatactctgatcagaggagcacatctttacccacaagacacatctctctcacgtgtaaccacgtgccac

SEQ ID NO: 29009 - DNA, 348 bp, Oryza sativa
  unsure (1)..(348): unsure at all n locations
agcttgtacagtttgggaaggggttntttgagagaatataagaatctacttcaaccgatatgcccttaggcacggccatacataacatagaaatcacacgtggaaggggtgggcaattagctagagcagcaggtgctgtagcgaaactgattgcaaaagaaggtaaatcggccactttaagattaccatctggggaggtccgtttggtatcccaaaactgcttagcaacagtcggacaagtgggtaatgttggtgtgaaccataaaagnttgggtagagccgggtctaagtgttggctangtaaacgccccgtagtaagaggggtagttatgaaccctgtggaccacc

SEQ ID NO: 29010 - DNA, 495 bp, Oryza sativa
  unsure (1)..(495): unsure at all n locations
tcttcccagcatacggctgtctagatgtatatgacgatctctatacagatggatcttatatgaatcgtatgatgaagtaccacatgagtggatatataggagaggaatccaaatctgccgaatcgctcatgttatgatcttctacatcctaggtctccgcgttccgtcatctggcttatgttcttcatgtagcattcagatcgaatgactctatgaaattacgtcgatacttctacatattatgggtaacgtaggagacatccctattttccnccggnggtcttaattaccactgcttagctttcaattcgcctctgaccatcaaattaaatgtgaataacccgtcctcctctctttgaaacaaggagcgcttccggttctgtgcgtgcttcaaacaattatgtcttcttcatattaccatatctctagagtcaataaatttctatgaggaactactgaactcatcacttgctgccgtactcacagtttctgtga

SEQ ID NO: 29011 - DNA, 134 bp, Oryza sativa
  unsure (1)..(134): unsure at all n locations
ctttgcgagcatccgcgctctcacgataaaaataaaccctgagaaatgcaccttctgagtaccgtcagggaagctgcttggatntatggtgtctcatagaggcatacaagccaacctggagaaaatcaacgcca

SEQ ID NO: 29012 - DNA, 413 bp, Oryza sativa
  unsure (1)..(413): unsure at all n locations
tctcaaagtcctcatagactccggagattagctggttggtcaattcatcatcgagcccaaacaanaacttctcctgcttctcagcatcggtgcgcacgtnctctggagcgtaacgcgcgaggcggttgaactcgtgcaggtactctgtaatcgttctggttccttgttgcaatgcacggaactctctcttctgttgtgccataatccctttaggaatctgtgccttcctaaagttttgacaaaactctgcccaagtaaccttccgtgcacctagacgggtcgccacgtagttatcccaccaggcagaagcaggaccttgcaactgatgtgtagcacaagcaaccttctctcggtcgttgcattgcagaaaggtcagcttcttctcaatagcacggagccagtcgttggcctca

SEQ ID NO: 29013 - DNA, 220 bp, Oryza sativa
  unsure (1)..(220): unsure at all n locations
gtgcttcggctgcgcgctttgcgcgctgccgcgcgagaggcatactctggaccgcatgcgtgctctgcactacgtgcgagagaacaccttctttgcatcaaacacatcggggctggtgccgcgccangacctctgacggactgcgatgggatcgtgctcggcgtgggggaggcagcttgtccacctggctgcgcaacagtggcgcctgtctgcacacgga

SEQ ID NO: 29014 - DNA, 304 bp, Oryza sativa
tatctcttacgctccaggaatggatcagtcagaacatcaccatctgctcgcctcggccgccgccgactggtgtttccgcctgcacggctggcctattatgccgccgttgttaggcgtctacgtcttcaccgaccggcttgccttcgtcgccgccgactggtgtcctcgcctgcacggctggcctattatgccgccgttattgggcgcctacgtcttcaccgaccggcttgcattcgccgctgccgactggtgtttccgcctgcacggctggcctttatgccgccgttgttgggcgtctacgtct

SEQ ID NO: 29015 - DNA, 508 bp, Oryza sativa
  unsure (1)..(508): unsure at all n locations
ggttagctcgcttttatcttttcggctgtatttgtaatcttttctatttttgtaagacgtggatctatatgtcaacaattgtcatttgtatatcctggctggtcctagacagggatttaatgcacattcagcttataaattctggttcgtgaatttatgggcgtgacagtaacctgtgcataagtcanacaccaacatttatcacctgcttttcgttgatcaaaccgctgcagtattctgtgaccagatcattcccttgtacatagaaagaaggaaagaccaaaagaggagagggctntggcttangtgtatgagaaatctttgacaattccaatgccatccctctctcattctaacctgtgcatcatggtattccccactgcaagaattgtgcgcgtgtgttctatgattacaaactgaacatcccatctttagagactggagctggacanagctcagataatcatatcctgttcgttaanatgagctacataccatacttntaata

SEQ ID NO: 29016 - DNA, 420 bp, Oryza sativa
caagggggagggaatgtcacgacacctgacatgcctgtaggtacttatcaggaagtcgagccacagatgcatatgaatgctaatccaccgatgctgcgcaagtctactcatgagagtaggcctaatagtaggtattattcaagtgaatggacccagtacaaatgggctgggccatgtgtgagggagtgaggtccatggcacgatgctataagagaccgacagggagttgagacagaatcgaacactgtagaaacatattctgaataccgaattcaaatctctccctgttctatgctgttcttccccaaatcccaaattccttgctacttctaccctcaattctgttcaattcttcctcgttgaaacattatagatctagcgccgtgacaaattatccccgttctttcttgtcacagttct

SEQ ID NO: 29017 - DNA, 404 bp, Oryza sativa
  unsure (1)..(404): unsure at all n locations
agcttccaggaagcaattgcaggtcagtgtgatgatgtccatgatcaatgcagagcangagttgagctggatgggagtgggacaaacaagctgctatnggagtagtgaggttgaggcataagtacattgaattgaattgaattgatggttntaattttttgcgaaggagtggtgactggattgtgattgaattgatggatgggggtgggcaatgcangaccaaatggcgcctcccctgaataacgagctcagattaataatgcaatgcangtcataagtcgtntgcgcacgagtaccacctgctgcaagaatttctgatgtgaggngctcattgttgttgattgagtagtangactatatcttagatttatgacgatatatgtactatgtactatangagaaaa

SEQ ID NO: 29018 - DNA, 411 bp, Oryza sativa
  unsure (1)..(411): unsure at all n locations
agctggctggataggatccgagtnccttacctgatagagtgaactgttaattatgtgaccagataaactagtatatggaaatgaattaaaactattaataacttacttgtcgctttctcaactctntgcttgtgttagaataacctgaattatcattgccaagccaagaagagcttgtaatatcaccactgcaaatcattgtatcaacaataaatgaaactgatatagcccttaaagatttaagggaacgcaatatgccaaaatcatatccaaatggcagaagtatatgacacctagtatcatctcagcctcaacttacggcccccttataacagagtgcaacactgcataaaacataaagtgtaactgtgaactaccaacaaatagaccgccgttcacttatactctaaa

SEQ ID NO: 29019 - DNA, 357 bp, Oryza sativa
  unsure (1)..(357): unsure at all n locations
cacaagaatttatgtcatcttagccatctctcatagatcaactacttagatgaataaggttccctaattaaggtggttgttcacaggttacaggtatagtcaagaataaaatatgtacgagattaatcatcggaaaanttttgttagttagaaattttatctttttatgcctgagttgaaattcccttttattttgctctatgtacgtagcagctcaaagtgggggagagtgaggagtccgacgtgctttacctttgaaaatgagaagaagaggggccaaaatgggtttggccgaacccactctgatgcccaattcatctgcatttttctaacgaccttggttactgacagatgttc

SEQ ID NO: 29020 - DNA, 385 bp, Oryza sativa
  unsure (1)..(385): unsure at all n locations
atgaatgcnaatactgatgagaaaaaggttgtgttttcatactatagacgtgctctccttgagaaatgggaacatctaaaacacggtgacaaaactgttagggagtactttcatgattnntaaaattgtatcacttatagtggtttacaagaatctaatgagaacacaatgactagattcttcagagggcttaatttcaatattcaagctgggcttgttaatgtgacatataatcatatatgccaactgttcatgcttgcttgcattgttgagcgcanaattntggagaatccaacggagcaacaagatatgcttgtgcctcctatcactgatgttntgcacgaagttcagaaaagtctccataatgagacgaacgatatgtttg

SEQ ID NO: 29021 - DNA, 129 bp, Oryza sativa
aaaaaaaaaaaaaaagaagaaaaagaaaaaaaaaaaaaaaaaaaaaaaaaaaaaaaaagaaaaaagaaaaaaaaaaagaaaaaaaaaaaagaaaaaaagaaaaaaaaaaacaaaaaaaagagaaaaaaa

SEQ ID NO: 29022 - DNA, 452 bp, Oryza sativa
ctgagctgcagcttaggaagagatgggttctaagctgaacttagtactgcttatcatccgcagacagacggacaaaccgaaagggtaaatcagattttggaagacatgttgagagcttgtgctttaaacttcggtggaagttgggataagaatttgccttacgccgaattctcgtacaacaacagttatcaagctagtctccaaatggctccttatgaagcactgtatggtcggaagtgccgcactccgcttttgtgggatcaaatgggagaacgtcaggttttcgggacggatatcctgagggaagcagaagaaaaggtgaatatcattcaagaaagattgcgtgtggcccagtctcgtcataagagttatgccgacaatcgtcgtagagatataagttttgaagaaggagatcatgtgtaccttcgtgtcacgcctcttcgaggagttca

SEQ ID NO: 29023 - DNA, 446 bp, Oryza sativa
  unsure (1)..(446): unsure at all n locations
ctgagcggacaaggaagtgngaggaggagaggaggcangatcgccgggaaggttagtcttcgtcggttccttccgtccgtcggcgaagtgaggccaagcagaaggcccccgccgaggacatcgatgatggcgataatgacctangtttccaagagcctgnggctaccatagccactgtcgatggaggagcgtgtgcgcacgtttctcgccggagcctcaaggccatgaagcgagagcttctggccgctgcccctactcatgaggcgacgcgccgggcgcggtggtcggaagttgccctcacttttgaccagtccgaccacccgccgtgcgttgcccggngagggcagattgcgatggtggtttctcccacccgttgcaacgtgaagtggggcgtgtcctatagatgggggagcggccctaacatcatttccccgcggctttgatgc

SEQ ID NO: 29024 - DNA, 220 bp, Oryza sativa
  unsure (1)..(220): unsure at all n locations
gatcaacatagaaacctgtggtgttgttaatgtatagcgtgcaaagctaataaagttgtaaaaaggatgaaaggtctagctagagtgattntactaccaactgtaaatatatttctatttcgatgcatgtgtttggcgtatcatatgtcacatcgntntcgatgctctatgagttgagtacctacgtcgaaggcattgangaaatttactgacaacatat

SEQ ID NO: 29025 - DNA, 376 bp, Oryza sativa
  unsure (1)..(376): unsure at all n locations
atattaatgagatatcacacaggcgccgcaactcttggtaacatattggctaagcatcggtcgaagcctcgagcttacattggttgcatgaaatctggtccagtcctggctcagaagtaagtcccatgctgttgtcatgtcttccttgatgttttaaacagctgaccaaataccaatttgtttttattctcaggggtgtaagataccatgagcccgagtactggaaattcggcgaatgggggaacaagtacttncgtcatgcaaccggccagttatatgcaatctccaaggatctagcttcttatatatcaatcaaccagtaagaacattcttcagagttggttttctttgttgatacaccataatatgttntatc

SEQ ID NO: 29026 - DNA, 430 bp, Oryza sativa
  unsure (1)..(430): unsure at all n locations
agcttatgaggcctgtcttcaacgtctggagcaggatacctataacatcctcagtgaaactgactttcagaaggagagacaaaaggtggtaatctttcttacatatttatggtcatatcgtgattaatgagatcctaaagtgcatgacagcctgctgctttggacaaaaataagtaaggcagaagtttcttttgatagatgaaacacataggtagtgagcaatgttttaaatgaacaaataattcccttgtaacttctctgtaagagaattcttgcccacttataaaaatgttgaagtgcaacagttcctgaagaagttgcctacttgacctttcttatgtgaaaaanaaaagaataagcacctctgactggtcagtggccatgattntcatggaactaaatgtattatgtgttctgccatttcagattg

SEQ ID NO: 29027 - DNA, 498 bp, Oryza sativa
  unsure (1)..(498): unsure at all n locations
ggcttgtatctaaacctaacaatatntangaggatcgatagcttcataacattcgatggaaaggattctcggattatgagtacgattacaatttcaaactgaccaactatgggtggaaaacttttaaacgtaactgcaatacaattatattgtaattgtaaccagcatgttacttgcatatacctgattgctaaagtattgatgttcgattggcaaggatcctacgcatgcgcttgcgagatcatagngcttatccatgtccttgtgtgtggctntaaaattttacatctcctatcatgaatcttgatgtcgatntgacgattcacggatngatagttntcanaacaaaaactatcaaacgattcctttagcgaacccgtctcaaattctgtangaaatagtgagtgttgagtgggtatcgtggtatgtattatcttattacgcacacttgggtttttatatcaaccaatatgaccctgatatatagatattttatgt

SEQ ID NO: 29028 - DNA, 432 bp, Oryza sativa
  unsure (1)..(432): unsure at all n locations
agcttcttccanagcatacggctnttatatgtatatgacgatctctagacagatggatcttatatgaatcgtatgatgaagtaccacatgagtggatatataggaaaggaatccanatctgccgaatcgctcatgttatgatcttctacatcctaggtctccgcgttccgtcatctggcttatgttcttcatgtagcattcagatcgaatgactctatgaaattacgtcgatacttctacatattatgggtaacgtaggagacatccctattntncccccggggtcttaattaccactgcttagctttcaattcgcctctgaccatcaaattaaatgtgaataacccgtcctcctctctttgaaacaaggggcgcttccggttctgtgcgtgcttcaaacaattntgtcttcctcatattaccatatctcta

SEQ ID NO: 29029 - DNA, 403 bp, Oryza sativa
  unsure (1)..(403): unsure at all n locations
ctaagcttcgatgaattcttcgatgagccactatcgtttctgcgttcgtctattcaaaatgtgtcgttccaaaaccgacatgacgctccacctcatacggctcctcccttctgtacatagtactaagcgaaaaaatctagagaataaaaatagaattagttccatctcattatggaccgaaaggggctcggtattttccaagaaatctctagccaaccttcccacaagaggtttttcttaacaccaatgaattctattaatgctagaggaaaacgatagctccaagaatttctttgttctcaacgcctcctatntagaggaattagccacttcaacgatctttgatggttataggggtatccacagtacaaacttgatggtgggttgtatcccaccatctttc

SEQ ID NO: 29030 - DNA, 354 bp, Oryza sativa
  unsure (1)..(354): unsure at all n locations
cggacgatgtattacanatgatcactatcatagaacgctattcgccattacatggtcgatccatcgaagcccgtaagtaatcaatagagaaagatgcattccatgaccctcgtgtgctccgtctatgcatattcctttatatatcaatgatactgcaagtgaccttagcatggacaatagggctatcaccatatattagacacatggtcggacaaggctaaatattaacttaataacaaacaaggtgcgaacccatatcactcttaagcagtattattaggtttcgcaaatataaactatgaaatcaagacacattttgtcataactctcatactcttgttctatatgttaact

SEQ ID NO: 29031 - DNA, 341 bp, Oryza sativa
atctctgagtcacctgcggctgcaagctatctcttacgctccggaatggttcagtcttaattatttcaccggctcgccgtcgtcgccggcgactggtgtctacgcctatactgatggttggtcacaacaccgctgttggtgggcgtgtacctctataccgactggccgcctcgttcgccgccgactgatgtttccgcctgcacggctggcctattatgccgctgttattgggcgtctacctcttcactgactggccgcctcgttcgccgccgactggtgtttatgcctgcacggatggcctattatgccgccgttgttgggcgtatacctcttcaccgact

SEQ ID NO: 29032 - DNA, 380 bp, Oryza sativa
  unsure (1)..(380): unsure at all n locations
atctatctngacttttatgttctctaagaccttgtcattagcagctagctttntacttatagcatctgtgattctagcttgcgcacagacgacatctctcaacgagggtgctgaccgtcattatcgaccagtttcgaccgtcaatattatccaatatatgaagactagctatgcttgcaatgcttaattcacaaataacatatatacttccactatgtgctatgctcctaacatgtatgcggaggaagcactcataaatgaagagaagaaggtggaaatatatccatccatcagtcgaaagtctgccgctgacctgcaattgatgagaaagcccaacagtgctattaacaatcacaatgggcctanaatgatatcactga

SEQ ID NO: 29033 - DNA, 395 bp, Oryza sativa
  unsure (1)..(395): unsure at all n locations
agctntactggtngacacctcttaagatgcattgtttcaactcctaanaagttgagtaactgcggtataaaaggaatttaaggtattgngcactcgatcacgcgcactctggcctaagcaaaaagtgcctaagtccctaatagaacgtgacaggccacacctganaatatgggctgcagacatattaggcctaggccaaaaaatatgccttcgacaccctttataggatgacgcatgtaacatactcccgagtaataaatcttccgggtaatatagaccaagtgtagctcatatgaatagcttctgatatgaatgattatcccttatgggatactccaaaataaatataataattgaatcccgactggcgcaagtattcggttgatagcccttac

SEQ ID NO: 29034 - DNA, 464 bp, Oryza sativa
  unsure (1)..(464): unsure at all n locations
tatctcgctagctntcanacgcatccagtctcatgtccaaatttatctcgagtcaacgggaatcgccaaaacaagacagtactatngctgaaaccgaacttgngctntgggccttgtaataagctangcctatctcggaagtgtctccctccacctcaacgaattagcacataaccctagctttatntttcttcaataaatagcttgtacatccctcaaaacaattgggttttgtttagtttgaattttccaagcgccattcaccttgtctctagtccttgctcgattagtcggcgactaatgaattagatccctcaatagttggtgtgttgaattgccgggtcgattagatctaccacttcaatcgcaactatttctttgtgctaaatcacctattcgcaatattaagattggcatctatcttgttcttgcagtggtctctcgtttgcattgagggatcatca

SEQ ID NO: 29035 - DNA, 393 bp, Oryza sativa
  unsure (1)..(393): unsure at all n locations
agctnggaagctagcgtaagtagtaatcatgaacatgttaaaaactaaactaagttcttgaacaaaaaaggcatggntcatgtcaacgaccaaattcttagctttcagttctgtaagtaaagttgaattcatagcacatttacctggttttctgtcccaagaaatccaggcataagagagtcaaatagagaccagagctccaatacattattctgcaattatagtggaatgtgtcaaataaatagtaataccaatttcagtactggatcgatggaattatctacaaagaacatgaacaatgaaatataaagtgcaatgtanagcgaaccgcaacagctagacgaanagcataccaacaagattcatgaagtgaaatttacctgaattggagta

SEQ ID NO: 29036 - DNA, 331 bp, Oryza sativa
  unsure (1)..(331): unsure at all n locations
ctccaatcagagtanctctactttcttttttgatagaaacacgtctcactntattcagagaacatggcgatcagtggaatccgatctaccanaatgttcacaaattctaggaggggagcagaccaaacatttagtaacggataaactggatgaactggtcctggattgggccttcgctggagaactacgtttattccgcagatgaagatgtggactactcataataaaataataaggccagtctaacgtttgaccgttcctcttaattctaaaaatattaaaacattataaagataagtcacgcatatagtattaatcatgttttatcatc

SEQ ID NO: 29037 - DNA, 426 bp, Oryza sativa
  unsure (1)..(426): unsure at all n locations
gccgacaatggtgcgcgcagcagcatggtttccgcatatcctataatgtatatctttcagttattgtctcccttcctctaaagatacgcagcgctgcagaattcctgaagggcttttcttgtataactcagattcgtgcataacatanagtntgctccgccttgaaatccgctcggcttcatctttatcttgagggagctcttgagaagttaanaaccgtatgaggggctctcgccagtcggctttaaccatagctacgtcatgagtgtccgcatcttgagtagtatctttatgaggcacggtcggtgtataaaggtgttcgacgaaaacatctgagggcgccggctcacgcttggatccaaaattggcaagtctgtcggcggcttcattgtgtgtcgaaaacgtgactgagctcgagtccatcaa

SEQ ID NO: 29038 - DNA, 475 bp, Oryza sativa
  unsure (1)..(475): unsure at all n locations
agcttntgatagttccctcacattcaaacaattagttgcatatatacaagttgctntggngaaactaaccggcgggtgaaattcttgtcattcctaacctccgtcgagttagtccgttcttgctccattgtgcaaaatgaggaggcgactgtctcgtctgttcaagaggtccggctcttcatcaagttgtcatgacgagtctagtactcgttcatcagcagatgtcttgatggaagacgccgaagctccgcgacgactcctgaacgacaccgaccttgaccttgtcagtgatcgggagagacaagcctactacatgctgagcgaccgggagtatgctcacacgcgagaatactcaccgaagctgctaaaanagataggtatggatgctcgaatacgtactattnntgtaagactgttggtggaaagaattgctgtggaaatgagactggtctctcctgttactttgattttctgg

SEQ ID NO: 29039 - DNA, 275 bp, Oryza sativa
  unsure (1)..(275): unsure at all n locations
gtcattttttagacagcaaagcatggctagcgggataatatggttcccttgggaaacataattcanaggcgaagttatcgaccctcacattgaatataggaaatatctatcaccggagaccaggatagctaatatgagacaattagtgcgcagctgtcaatcatgggattcttagtaaaccgggatatcatagactaaagcatatggtggtaagctagaagtaaatgacaagcatggtattctcatgatgacaagcatggtatcctacttatgac

SEQ ID NO: 29040 - DNA, 460 bp, Oryza sativa
  unsure (1)..(460): unsure at all n locations
agcttatatagctggcccgctgactntntatagttatggtgctgttggagttttaagcaatngattggatacaatatcattgctttttgccacgtaagtgtgcatttctattgaccaatattatggcttaagctgattatatattatggtcatttttcaggcggttggtaaatcctttatgagtttacttactcggatgttataccacatatgccatatatttccaggtgtggtgaaaccatgtgtcttttacggacttaagcacatctgttaaagcaggtgtgcgcatgtgtgtatgctccaatactnntggaatatttctttattcacagcattcaagcttctctatagctatgttgctatatcactcatcatattttacaaagcagttggtatatcacctcgatcatgttatttggaggattcacaccgcatatgctatatattgatatcaagtcac

SEQ ID NO: 29041 - DNA, 437 bp, Oryza sativa
  unsure (1)..(437): unsure at all n locations
tatgtctcatgcanaacatacattggggatagataatcttagaaatgactacattgaatattgataaaataagaatgtttttaatatttntggtttgtattntatgtgtaagatggtgaaaaatgaacatattntatgactgagagagttgtgttacatatcactatcagtgctagcttgtttcatgtctcatgcacaacatgtgtggccgcccaccgctgcatggtcatggagtggatgagaactgaatagaaagtgttggcacagcgctattagtctangaggtttcggggtgtntagtggttatgctntatactcgtgatctaaccattgtagttattcttcgttagacattttgtgtagctttgataagagggttactctaactagcaaataatttgactttgcatggatttcaaaaaaaatcctaagttctt

SEQ ID NO: 29042 - DNA, 420 bp, Oryza sativa
gctacagaatttcatggagcggttcatcacagactgctatgataagaaatatattggcaatgtgcctggaatcaaagatggtgatatcttccacttgagggtagagctcctgtgtgttggtcttcatcgcccacaccgggtgggtgtagatcatatcaaacaggaggatgggactcgcatagctgttagcattgtatcatatgcacaatcttccgatattaagaataatttggatgtcttggtgtattctggagcaatgacagctatagccaatcagaagatagagggtaccaacttagcactcaagaagagtatggacactaacacaccagtccgtgttatccatggtttcgtcactcacctcaatggagactgccagcgaacgaagatccctacttatatatatggcggtttatatat

SEQ ID NO: 29043 - DNA, 312 bp, Oryza sativa
  unsure (1)..(312): unsure at all n locations
tgccgttttttggacatgtactctgctncctgttacaagagcaatgcatgcttattggccggcaaagcagacaatctacttaagtgctgtaaaattagttgaatttcgagtctttgaggcactgtattttctgtttccacttcgaacaactgatatatttttcttttgagtagtctatatttcgctacttgctaatggggtgtgtgagtgggttcaaaacgtgcagacctcgagaatttggactgaacaaacaatgctgtgatgcttctgtatattcnagtgattataagagaataccttgactctttcatt

SEQ ID NO: 29044 - DNA, 496 bp, Oryza sativa
  unsure (1)..(496): unsure at all n locations
agcttccttagtagatcaatttgcttaaccgaatattcatgaatccgacttctgactgactgacaactctcatcggctaatctcaggacttcgaagccgatgctgactctaagccaatgactactccgggcttaccaaatttcactgttaacacatgccccccagttttggagtatgagaattcatgcttcataatttcttgtcttgataactncaaaaccaatcttcctttgcttcttgcaatcggctttcatgagcagatactgatgtgctccatcatgctgaaacttatgcgctagcccnccgagccaatatgttgtactttttcactgcaatagaagtgcgaccctctttgaggttatcctgaaaccttccgtntgtcacgagacgggaggatcctcatataatctaaatcggccagaggctgatttgatatctaaaccgtctagagctgatttgatattaaacggtccgtagccggtactattttttacaa

SEQ ID NO: 29045 - DNA, 370 bp, Oryza sativa
  unsure (1)..(370): unsure at all n locations
tcacctctagtgtgatcttggtgtccaacattgagttttctatgttcactcggaactgagagaaaccttggngtctangcttgaagactgaaggcttcttcctgngtacttgcttggttaggcaaggggttaaacgagatccagctcacatgagctcttcaactagagtaggatcctagtgattcgaacttcgagaaaaaaaatccttgtcttcccttcgtttgttcacttgtgctctgttttattgtatttgcttttgctcggtacctactatattgtattgagttttgaccattgtgtgaatcaatttactcattgtgaggtgattggaagagcaactcagagctgcccgacagttcacgggaagatg

SEQ ID NO: 29046 - DNA, 515 bp, Oryza sativa
  unsure (1)..(515): unsure at all n locations
agcttcacaattaacacatgtcaacttttatccctgtgattcaagctagcgtgaaaattatcacgcgccacgtcactngttgttaatgtatggttgttgggttgaactcttaacaaacattcatgctaatcattttgtgtcaaaaactccatcttatagaaaataataaatntaataattaactagctctacatgaaggatgttttaaattgtcttgacacttatccccttgacagagaanaggacatcaaccttaaaactaagagcctatttgcagctgctttgtaaggtgagtaggagcaattnttaattccagaagtgtgtagaccacacattctgacttcacaaaaaatctatctgagcaaactcgcactngcacacattagtttaaccctataattcaagatgttccaactgcacctctcctgcangtcactggtccattngatctataaaaaacagtatatcatggtccatttctccatcacaagtacatattaattaatttatatatc

SEQ ID NO: 29047 - DNA, 313 bp, Oryza sativa
  unsure (1)..(313): unsure at all n locations
agaaacagcggagtaattcatggctgtcctgcatctggaagcccctgaactgcgggtactttgagcaaatatatgagaagagattctntggactcagcgcacctcctacatncattgaagcacttgtctccatgaagagtttcttcaatgacatcaaaagagcccccggtggaacatctggtcccaacatcttactgcgcaacctatcaagcgcgaggaggctctgcatcactgcattgaagaagcatgtgttcccaagaattggcagccctctgattacactaccatgagagttaaccaaacctagatctct

SEQ ID NO: 29048 - DNA, 494 bp, Oryza sativa
  unsure (1)..(494): unsure at all n locations
gcttggaatggcctaactctgctgttttgctatatacttaaaccatctatctaatctaggcttgagaattaggttgaaatanaactaacttatatgattgaactcccagcttcggcacaaactccaaatggactctgaaaaaggggttgaagcaagagtgagtacaacgtactcagcaagctattatatttaatcaacaatgaatgtatgaattgataatatctgtgtaaaggtagaattacttgcagaaagcagagaatgtagaagtagaacacctgtaatgttttaaatgcagcagtatctaataaaatttcgaattaggtttctatccaagatgccatagtgagtcccaatgcccgataaccgcgagcacggcttattcgaatagtntaggaatattcatactgcagtagatgtacattttacccgcaatccatgtcgtgccacacacattatccttgtcatggcagagactttctggtactaacatcagt

SEQ ID NO: 29049 - DNA, 507 bp, Oryza sativa
  unsure (1)..(507): unsure at all n locations
actaagctatcnagggtcaccttattttcttaggagctttangactcgaatctgcactcctattctccttccaaacaccaaactccgtattctttggcaccacttcggcctacgctctccaatgatcactccttccctttagtagattcagcttgctccggccgaatcaacaccttcttatcattgaaattaattgtgttcaccgganaaggatcatgatcaagcttcatcttggaaccatcagtaaatttcaatcatccctcatctatggccgattgaacttgttgtcgaaacacattgcaatcattagtagaatgagaatgagaatgatgccatntacaataagctcgacgccttcaattctcttgagatggtatgacatggccttntggtaatctaatttggttttcttgcaaaagatanataaaaatcttatcacatttgccacgtcaaactatacttacctcactttgcgatcttacgaggggcagcattagatagaacaac

SEQ ID NO: 29050 - DNA, 406 bp, Oryza sativa
atccttaagcacctgcggctgcagcttgtctaccgcaggaagagattcgtctctcctcgatccagtggcttcaagactcggtggaggagagctgcgcctgtcggctgaacctgcgtcatgaataagtgtgatgaagagaggaagacccgaagaagagagcagctctccaaggaaaagatcatctttcgtccacgcaagggggattagtgctagtagacattgcatagtcgtgtgtagttgccgctaagttgtttggcggtgaggtacatgtgctacatcattgggggagtaatgatgagttagtctttgttgcagaagtagtagctgggacaagtttattcaattaatgtatctaccagtagagcatatgattaataattaagtctcgtctaggatctttgcatct

SEQ ID NO: 29051 - DNA, 343 bp, Oryza sativa
  unsure (1)..(343): unsure at all n locations
ctcagctttcttccggtcaaaacatcgcacccgtgtgagccaatatattccaatattggcattaatggacaaaagttcgccacgcgaatcaagaaataagttttttcctcaaaagcacacaatatgtccaagaagcatgttttggtgctgtntgaacattttcattctggtcaaaaacatcgcacccgtgtgagccaatttatgccaatattggcattaatggacaaaagttcgccgcgcgaatcaagaagtaagttntttccacgaacgcacccaatacactccaatatgtccaaaaatcaatgtttggtgcttttttaccttttctttctcagcaaaaaca

SEQ ID NO: 29052 - DNA, 411 bp, Oryza sativa
  unsure (1)..(411): unsure at all n locations
gacaccaactccgatgctccttcagctggctggattcgcagtccgatacccggcagagatagcagaggatgtgccagtcaagctacgggatttcttcatcccgggtgacttcgtggtgctggacatggatactgngaaggagacgccactcatcctagggcgtccattccttagcaccgcaggagccaacattaacgtgggaacggagagtatccgtttccacatcaacggcaaggaagatatgtntgagtttcaaccgatgacggagcaatgctccatggtcagaatcaagtatgggccgaacccacagaatattcaagtggttgaagtagagccacccanaactgacagcccggngaaattcatgcataatntcctggagaaagaacaacgatgccaggaaccgtattg

SEQ ID NO: 29053 - DNA, 319 bp, Oryza sativa
  unsure (1)..(319): unsure at all n locations
ttagctgttcgatggaagtcaaacatggaatggagattagtatatgttacatgtacaaattgttagntaagtatatgcaatatggtcctagattatactccgtatgtgtttgacttctatcttagatgaattaattgatctggattntttttaaaaaaaagttgaaaaagagtgatgtgatattatttatgctctgcacatcatactatgttnntactttacatgtacagagaatttgtatggtagagtttggtgaagaataacacgacactgtcaaacgcgtgtgacatgtgaacttagnaaagataacctatattta

SEQ ID NO: 29054 - DNA, 255 bp, Oryza sativa
  unsure (1)..(255): unsure at all n locations
agaagaaagagattatctatcacatctaaacttacctagacgaaccatagcagaaggtggcataataactganaagaaaatatagtaatacttagttcaatttctcaaatcaacttaacagatgatgaatcaatgaacagagagcatactcttgtcaccagtttcaagctgaggctgcaaagggtaaataanatataagaagatatttcagaagacatatccaggaatgaaacactatatgctttatctctgaat

SEQ ID NO: 29055 - DNA, 448 bp, Oryza sativa
  unsure (1)..(448): unsure at all n locations
tccagaaattatggaatttgttatggtagcaattgttgggatatgtttgttntattgccttaccaaacattggtaaggctgaaggtggtaacaaaccaaacaggccctaaggcatgcaaatatctttgaaatgttgtggcataaaaaaatctctacatgaaaacaaaaacagactntatcccgtaagataatattaagcaaaatttattcaaggagataatggagtgagggacaaaaaggagcacctcttctatgattctgtagacttcgacaatagaagccccatggcgttgttgaggggatataggatcccaagtctgttgagcaaaanaaagtttggcatanaaaagatgacagaatgaataagataatggtgtatccacataatgtataagaagcgatggcangctttgagagatgaacatgactttatgtttgaatatatcat

SEQ ID NO: 29056 - DNA, 440 bp, Oryza sativa
  unsure (1)..(440): unsure at all n locations
gcttatcatanaggggcttctacaaggtgttntattctntctntgagcanaaagataaagatcggatagattcgaaccgcaattgcaaaggtaatcactactatgccagcccaaatcatgatcttcaccaacttggatttggttctctcgcgaanatcgcgagttgcagagatgagaaccatgaatagcaagatcccgaataagagaacaganaccgaggaaaccacaagagtgaagactagtagagtctcgccttttgtcattctttgctcctttntcactcaatgattcattcgaatttcccgaccaaaaattctatatgtctattcatagggcctcgntgctaagtgctacaagatctagtgcactggaaactcgtggtatggacccgaatcctttagtatggaacattgtcttttcaaagtaaaaccctcagtata

SEQ ID NO: 29057 - DNA, 427 bp, Oryza sativa
  unsure (1)..(427): unsure at all n locations
gtatgggagtaccatggtgctttngaacttatgctactgntatcctctcttggagtggttccttttggacttggtttctattgagtattgactgtaagcctgtaactattatctcttgtatgatgagatgcaagataaggcaaacctgcaatagctctagtcaacttggccttgcattgctgatgacctgatggaaatcngtttattntacccattcgttctaaactgtatattgtagtcacgggtttcctgtatatntgaggcccaattttctagactagctgaagaccaattaagtctcttttatcctcatgtagctttgagatcttgaaaggatggaanatatgtagtgcaaaccacatatgtggtgtaaatctagaatataccgtcggatctaaaaatggacgtacgagaatttgtcatgtca

SEQ ID NO: 29058 - DNA, 156 bp, Oryza sativa
tctaggtggagttaaatcttgcaagcctgccactgtgggtcatgatggtttaatgtgcatgcttgtccaagctgctagtggataatatttgtacccagctttgcttcaagaattggccacggatttggggattgcattcggtcaaaacgtgattca

SEQ ID NO: 29059 - DNA, 448 bp, Oryza sativa
  unsure (1)..(448): unsure at all n locations
agcaccgcngctgcagctgtggcagtgccctccactgcgctgtttcagaataataaatgtgctgcttcatcattatcctttcttgattgaatcatatggcacaacattcgntagaatatagtnttttctttcttacatgatgcaatcctttgagttataatttacatgatctggaccagctattaaatccatgcacatcctttttcattcatgtcttctttggaagagtatttggctgactccacattaccaggaataatacttggtttactataaattgcattattggtttctacagacgtactaagcactagcaaaatctactntttagcttttagccatctacgagcaccggattgcagtccaaggtttcctatggtgaatatactcattngaccagtggggagtggaactgtgcaaggttagtgcttgaatatttatacatata

SEQ ID NO: 29060 - DNA, 353 bp, Oryza sativa
  unsure (1)..(353): unsure at all n locations
gctgctccttatgctactattcactgtcagctcagtgccttaagctatgtgctagttctaatatgtntgtgcgtttaaatcctcatccatccgttatgtacttgacaatgtgttcttaacgttatatccacagtgacagtctatgacacgagcagcacttcggattacagagcaatgttagcaagtatacaaagaatagtggtatcatgcttgcgaagactagctaagtgtctgttgggacagtaaatatatggggcggtgtggagcatgtatgtttggattaaggtgtttgagtgtgaatacatgtggacaatgatagataactgtttatgtggggggctttttttattata

SEQ ID NO: 29061 - DNA, 506 bp, Oryza sativa
  unsure (1)..(506): unsure at all n locations
gcttgttcttggtaagatgcctgtggagtggagtttccatagttgntccgtagattgctctagcttgatattccgctgcgtagtatgttattctttcagaggaactatctacctctgtaataatttattatttgcgaatattaaatagtgatttatttgtactctattatcaatttgttattgtgtgcctcggctgattcctggacgagggtttaacacacatgtaagcgtttggaattttggatagaaattccgggctcgacatgttggtatcagagccaccttgaccttatgacaagccaaatggtaaaccttaagtagccttcaaaatatattggaatattagaactgctcttctctattctcctataaattaattaagttggcagcacatgcaagagtatgcacacaattatttaattcagttcttttttttagagcagaagatgtctttcaaaatgtgtctattcatttattaacctcattgatagtcggactgtcatcta

SEQ ID NO: 29062 - DNA, 375 bp, Oryza sativa
  unsure (1)..(375): unsure at all n locations
tacgcccgaacttgccaaccaattcttctggcgaatttcttggtgaaagcggcgatgataacgtcgtcggtgatgtcggagatcttattacgttgttcagaaaatcgccggatgtaatctctgagggattctccggacttctgaataacgttgtagaggtcgtattgtgtgccgggacgctctaatgtgcccttgatagttggcgatgaagtggtcgcgtaattcggcccaagatccgatggtaccacggngtaatccatggagccaagatctggcggaatccgctaaagcactggtagatagttcgccatggccttgctgtctcctcctgctgcgcggattgcaagaccgtagaccggtagccaccattctggg

SEQ ID NO: 29063 - DNA, 424 bp, Oryza sativa
  unsure (1)..(424): unsure at all n locations
gctttgattctcctcagcattacctttagcttcagtccaagggtgctgctggtatctcctcaacatctccaacctctctgctacctctttcatcgntggtcgttcttcaccgttcatgcttangcatcgcatgaggaggtctgcaatctctgttgccatttcgtcgttcatctctttcctcactnggctgtccataagctctcgatgacgaccagccttcactgctgtggtgaagcgtgacaccaagctcatgtcttcctctggcccgtctaggtacaatgccttcttcctggttagaagctccagcacgacaacaccaaaactgtagacatcgctcttatcgggtaactggcatgtcattaggtactcagggtccaagtacccacaaattccctgcaccaacgtggcaattgcagcctcatca

SEQ ID NO: 29064 - DNA, 361 bp, Oryza sativa
  unsure (1)..(361): unsure at all n locations
ctactgccttcatgtgaacaacactgatgcagagctgngcggattagttcgtcaaatgtacgcctggaattattagcttgaatgccctctgtgtaccattggtaacactatactagatcctgtctggttgaacttggcttatgcttgcaaatgcaggattttttagttcatttaccaatagctgattttnttttgtcttgatcattgatgattctgaaactnggaaatgtaactaatctaaaggagatgtaagttctgttttgtgtgagctgacatgttttcaaagttaacttggttatcgttctgttntgcagagatagttcctgtgaggtggagggaaatgatggtgtttttagcacac

SEQ ID NO: 29065 - DNA, 343 bp, Oryza sativa
  unsure (1)..(343): unsure at all n locations
acctgcggcatgcaagcttcgcggccgcaagatttggcctcagcactgctgcgcggtctttctcctcctcagctagtagtagccgcctcatcacgcgccgctcttcctcgcggtctgggcgtttcgtcgaacacctggtgggctccccccttccgccgccgcaagaactcgatcgatcggtcggtatgaccgtcgcttcctccgacgaggcgtcccggtcggtgctgcggccggcaccgcccttgaagtgggaggacgaggaggctcacggttcgtcgccgggagaaggaggcgctgctggttgggccgtggatagcggngaccaagaaaatggtgcggattt

SEQ ID NO: 29066 - DNA, 378 bp, Oryza sativa
  unsure (1)..(378): unsure at all n locations
gcttagatgtgtaactntagatgtataaacttactaaaagagaataatatanaatattngaattcaannattgaattgaatctggtatataaacttttgacttataaacatttgctntataaactntaagtggataaactttagatgtgtaaactctaggtgtataaatttactaaaagaggaaaagaaaaaaaaacgatcgctggcagcgatctatcgtccgttagccttctcgtttctctagtcatcatccagcagctacaaaattgacctatatatatgcagctccatcctataagcgtagggatgggaacatagagaactaaaattacggaggagagaagctgntcgtagatacaagttcttcatacccactac

SEQ ID NO: 29067 - DNA, 559 bp, Oryza sativa
  unsure (1)..(559): unsure at all n locations
tctcagacacctgaggcatgcaagctngaagaagacgatgatagcagcccagtgtagcaaggggtcttcatctgtgaacgccttccanaaaatacacgcactgcataatatattgcacatatatgaatagtccaatcagtactataatatggtgatctgatgtactaagtaacattttattatcactattaattattgtcagtagaactgatcctaactgtaaaatactgtgagttatattggccagtacaattttttttctactatcagtaattaaagggatagtataaaggaaaatgcctaacatattttttgaccaaacaaaattgttggaatactaaggagaaacttagcatctattattgatagagaagaaaatagtgagataacatgcgttngnaggggtcgaactcaagccacagttccctgcagccaagctggcagccattaccaanagtccaaatactacccctaaactnnntgataactgaaatctacccggcactataaactctgaaaaccagacattcaattctccgaactttacaatatataatgg

SEQ ID NO: 29068 - DNA, 368 bp, Oryza sativa
  unsure (1)..(368): unsure at all n locations
tacagtcaggacaaaagtatagataaataaggatgcacgaaactaagtatatcatgaactaaaagtcatctagcaataacattttcaagatcaaaacactaatgccacaagacaattatcgagaactggagtccccagtttgctatccatttgagtctgtaaatgaacacctgtttttgtaagctttcttaccaagctggattgaattatctntgatctaaaaaaaatgccataggacagagagactntgccacatttgaaagctgacattattatgatgagatgcacatgcacgaagatgaataagaaacttaagcacggctaggcattaaagaggtcttaaaatcaaatgaaacacaatggagatc

SEQ ID NO: 29069 - DNA, 398 bp, Oryza sativa
  unsure (1)..(398): unsure at all n locations
agcttcatcaccttccttgctcacactttcttgctgttgccggtgattggggcatatctcccaatgtgtacgtctcanattatttcaggaaagaagcaatctttcatacatggagtgaggagatatatgggttcgggatctcaggatcttacacaacgctgagtgcccaagttttttatattccagatccatctatattaagggtgaaaaagggtcgacgccaaactagacgcatcagaaatgatatggatgagtcataagcaggtgggaggactctacgctgcagcaagtgtgatctgcgcggccatacttacaagaaatgcccgaagaatgcagaagttccaagcggcgcagatgctagtccatctggacaggcaagtgatggtaggcgaccacct

SEQ ID NO: 29070 - DNA, 447 bp, Oryza sativa
  unsure (1)..(447): unsure at all n locations
ttcatccnctgtacgctnttgggtaagtgatattgacaatactctatgcaattaacaacaactntgaactatttaattagtgagcgacaaagataatcagtcgtatgcatggatgtacagtaccaccaggtagtcgaacactcgcgagttatgtttcatgggagcactgacacaaagagggcacggatctcaaggttagattaacggctganaattcgacanatcttaacanaagaaattgtcgacggattnttagcatagtcgattattattgagagttgagatgagatctaattgtgaatggngatgatagattagttatacgtggagataccttgaggattacgcatacgcanatcannatacaaaatgcagatatcaattcaattattatctaaaaccatagcggncttggatgtcatgtgaatatttcaatagagagcaccc

SEQ ID NO: 29071 - DNA, 487 bp, Oryza sativa
  unsure (1)..(487): unsure at all n locations
agcttactgatgaactcttacaatcttttgtttctaatcacccagctcatcccagcaggatatgatcgatgcagctccctcttaatntaatttctcacgtcttgttcatcaggaaaaagaaaaaggagagtgcaagaaaagtgaggcctccttctgcatgatccaagtacgtattccccatctcaccagtatgatggataatgacaccttggatccccattattacttggaataaattagggttcttcctaccatgatgtacatgcattctagaggtagaccccttgacttttgagaggattagtgcgtgttgatgtgattaatttgtgccaaatntagaacagtaggaggatccaacttgagtaatataaaggccgttgtagcanaataattagagggtcgatctcgagctaaatntaanattatcagagtattggaccaaagctgcaggaatgctgcacctgagcccaatcaataatgcatcatg

SEQ ID NO: 29072 - DNA, 314 bp, Oryza sativa
  unsure (1)..(314): unsure at all n locations
ctatatgagctcngattgaagagatcgagctccacacgggatgtatttaattctggaaaaatcgaactcggttntatggataaaagcaaaacgaactcgattcggacccaatcctcaacgattctctttgattattggtggaaaagatagaggagaacgagaggaacaatacccctcataatcctcaaggaattgggctcggatatgggcggaatctgagcgggaagccgcggctatggatcaggctctcgcggtggcggtcggaggtctgggacagacttgacaggtgggccccacctgtcggcctccgtgag

SEQ ID NO: 29073 - DNA, 413 bp, Oryza sativa
  unsure (1)..(413): unsure at all n locations
agcttgacacacatgggtcatgggttcataggccatatgatgccatatacaatgaactctgtcccaggctactcccagttccagaattcagttgaaagcacaattagataagacaacccgttaactcgtagtctcgtaccacagtatttaactgaacacctgcacttctataactctattctgcactttgtagaggtcatgtattagtcagcaagaaaatgtaggcacaaaattgctatttgtgcactggtaaggtctgggcattactaacattcatcaggaaaccatggatgttagcaaggcactagtacatacacgaacccaacagagccaccattcctctttaacccaagcatatntctcccaaattttncctgcatccttgccagctccatccatcattntccactctt

SEQ ID NO: 29074 - DNA, 327 bp, Oryza sativa
  unsure (1)..(327): unsure at all n locations
ctaagcttgccctccttaaaaaaaaaactgagcttctcatgtagtctattatttcactcatcatattctanaaacatggtagttgaataacttacaaaatatacaagaatcaaaaatagaanaatcagcttttcaactcaccaataagtaacctgcttccaagaatctcaaacagagcctgaatgttaagtactatagctggaagcaaaaagaccaagataccaatgggaccatggaccaataaccagcggtgcggcagactgacggaccgcctcaccgacacaaaaactcctgcgccggccggcatgcacggacggacaacgtctg

SEQ ID NO: 29075 - DNA, 426 bp, Oryza sativa
  unsure (1)..(426): unsure at all n locations
agcttgatcatgatccttttctggtgaatacgattattttcaataataagaaggtgttgattcggccggagcaagccgaatctactaaaggaaaaggagtagtcattggcgaaccaagacctaagatgatagtgccaaagaagccggaggttggcgtttggaaggagaataagagtgaagcttcaacttctaaagcccctaggaagaccaaagtaacttttgatatgcttttggagaaatatgagaagcaaggtggtgagacggctcacaacaaaggaaaaagaccaagatcacctcctagggagcaatttggtcattcaccaagacggtcgcattcacctccatatcatcatccacaagacatgtcatggggttcttatccaatgccgccgccgggttatccttatccttattacatanccatgg

SEQ ID NO: 29076 - DNA, 301 bp, Oryza sativa
  unsure (1)..(301): unsure at all n locations
ggccctagctctgtctctttcctaccggcgatgtctcaggctgtgactgtcggcctccttgaaccaccggtgccggagtgcttgcgccaccgtcatcctcttctccgggttgcacgtcagaagtccactcaacacctcgaacccagcctccgacaatggtggccggcggagcatcctggcgtcggccggagatgggaagaagccacgaagaaagctgtccggnccgcattctcccagcagccgctgccccttgtagcctcgccaccgcttgatgtcgttcacgccgaggacgtcgacgatc

SEQ ID NO: 29077 - DNA, 473 bp, Oryza sativa
  unsure (1)..(473): unsure at all n locations
atcctctgagtcacctgcggctgcaagcttatacggccggagtgccgccacctctcttctgggatcagacaggcgagcgtcaactgttcggaacagaggtattagcggaagcagaagagatagtcaggatcatcatggaaaggttgagaattgcccagtctcgacagaagagctacgcggataaccgtcgaagggagctcacttttgaggtaggagattacgtgtatcttcgtgtcactccgctccggggagtacaccggtttcagacgaaaggcaagttggcaccacgcttcgtgggaccatacaatatcttggaacgaaggggagaagttgcttatcagctagaacttccatccaacatgatcggcatncatgacgtgttccacgtgtcccaactaaagaagtgcttaagggtacctgaagaacaggctgattcggaacacattgatatccaggaggacctaacatatgtg

SEQ ID NO: 29078 - DNA, 415 bp, Oryza sativa
  unsure (1)..(415): unsure at all n locations
ctcagcttctaatgaatccatggaatcttctctatcttgtcctattattgtttattatagctaattgaatccataggaatcctctctagctaatcctatcattgactaagctagtgttgatgcgaaaaacacacactggcctgngagatctgcttagctccagtgcaggtccaaagcttgatgagatgcgggcgtgccagtcagtttgatcctgcaactgacaagatatgtaaacagtagatcaatgagccgatcggctgacaagccgatggagtagttccagtcgatgccgataatagctgatgccgaaaccagccgataacgatagggtttaaacaatcggctatatgtccaatgtagataatgatataaaggcaatcggctaatgatgatgtaataaaataaccatatgatc

SEQ ID NO: 29079 - DNA, 420 bp, Oryza sativa
  unsure (1)..(420): unsure at all n locations
agcttgcgcgaagccatactagggcgtaagcgagcttttccatttcaatgtaccttgttttcgctccttgcagtgcttcggagacgaagtagaccggctnttgtccgaactctgtttcttggacgagggcagcactgactgccaccggcgaagctgctaagtataatagcagtgcgcttcctgcgggtgggcttatcagagttggtgggctttgcaagtattgctttagctcgttgaatgctgcttggcactctggtgtcgaattaaactttcctgcgccccgtagggtcttgaagaagggcaaacctctttcagctgtctttgagaggaatcggctgagtgccgctattcggccttgcaagctttgtacttcatgtacgctngacggaggcttcatttgctggatggcatcaattttct

SEQ ID NO: 29080 - DNA, 326 bp, Oryza sativa
actcagcttgggggtttggtgacggtcgttagcgattagtttctaccgtttatactaccaaaatagaggagaactagttatgcttgcaatgcatatttatgttagaacaataatataccactagtattagcagtactaacctttcatagagaataactataaagtggaggagaatcgacatcaaatcagacgatcaatcaatcggacgatgtcgagaatcagacttatcaatgaattggccaagaatgcaaaaatgacacgatcaattggaccaaaattcacaagtctgcgtatgggagcaatagaggtggtcacctgccgaaatt

SEQ ID NO: 29081 - DNA, 499 bp, Oryza sativa
  unsure (1)..(499): unsure at all n locations
agcttgccagtgagtatggtggagaatttgtgtcttttnncaatgacatttcagtttttcatgcacacggcacaactgaatattgtacgaactatgggaagaattttcttgcttttgtttcttcttctgtatactatcttgngttctttatcccaaaaagatgggtcaatctggagatcggtttctccttcatgcattgagcggaggattgactcataaagtggtgtagatgactggagttgngttcctttgtaagagaatttcaatcttgagaacttgtgcccgtcacctgtggaatcaacattcgttagtttgtttctcttacaatcatgatatcataattgaccaagtaaacaacattgcagtttgtacatcatgttaagactacactatatcctagacgtaagcgcataggagataggttaataccatttctgagcccaacagatttctgcttcatttgcttctgagtgtcttctgaatatagaaatacacgtat

SEQ ID NO: 29082 - DNA, 462 bp, Oryza sativa
  unsure (1)..(462): unsure at all n locations
gactgtcgacagccacttatcggncaggcccacgtcgcacgggtggaggaggaagagccggctctgctcctggctcacgcaagcatcgaactacctccagcggcaccggccgcagcggctttcctccaccttgatgagccgaaggtactcgtctccctctgcaacggctccagcaacgacaaggctgatgggtggtacctcgacaccggcgccacccatcacatgaccggccgacgggagttcttcaccgagttcgactccagcgtccgaggctccgtcaagttcggggacgcctccggcgtggagatcaagggtgttggctccgtcaccttcaccgccaagtccggtgagcataggctgctcaccggagtctactacatcctcacgttgaggaattctatcatcagcgtgggacagctggatgagaacggctcacgcgtgttgtgtgaggacggactcatg

SEQ ID NO: 29083 - DNA, 435 bp, Oryza sativa
  unsure (1)..(435): unsure at all n locations
gcttctatgagaaggttcgaatccganaccgaanagaaataagaactcttcgcaattcttattttattctgccttgatgattctcattgcattggattggatgatccatcttgcaggcctgtggcatggagctgctaaggaagagagataaccctgaatacaaggtgatcaatctgcagaaaaaataacttcatttggggaccattcatgtacaatgtggtgacattttcaagtgcttgtgtagtacacagtggcaatgatggngtatggtcctgaagacaagaatgctgtgctggagctgacatacaactatggtgtcactgaatatgacaaggngaatgcatatgcccanngtgaacaccatggatggatcatctatcatggatctccttattccattcatccatcaatggtttctagagctgaactggcatg

SEQ ID NO: 29084 - DNA, 459 bp, Oryza sativa
  unsure (1)..(459): unsure at all n locations
agctngtaaggtagttattatagactagttcagctcttgccttgctccagtgtcattaccccncacccacccctcagttatctntgttacccttttcacagttntgtaatgtgctagacagccaatatctgtatgctcctgtntatctctaggaattcttcagatgccttgcactctgccatacggttcttcctgagggtgaggagacaccaganaagatcagttatcaagctgcttctcctgatgaggctgcacttgtggctgcttcaaagaactatggcttcttcttttataggtatttccgaactttaacttattttcagtaactcttgcacagctntattcntttatgtatttatccaatcagaatgtctcgaatacattagttatggtgacatttttgtgcttcttttatagacgtacaccaactacagtcatttgtcgtgaatcacatgttga

SEQ ID NO: 29085 - DNA, 400 bp, Oryza sativa
  unsure (1)..(400): unsure at all n locations
ctcgacaatcagatgaatagagctgtccgctgaatgtaatgctngngttctttcagccggnaaccatttcatcatcaatggttgaccataaattggatgatggtaggtagacttcactcgtcacttggcgatgggaatcaagccctttcaggaaccacttgccatcatatacaactccaatgaaaggtaccatcccattgttcatttcaacaacgcaggcccatctgttcctatttggatcataaacttcagcagacgggagtgtcctttgtattccttcacactccccaccagcaacatacaagcaattgttatgacacaagaacaaaaaagtgtcgttccgtacatatctggagctggtgcatttgttgtccgacattgtaaatacaacacgcctcat

SEQ ID NO: 29086 - DNA, 336 bp, Oryza sativa
  unsure (1)..(336): unsure at all n locations
gcttatggagtctactttcagatgggtnttggcccatcttaaaattcctaccgagctgccgggaatcttcataacaagccacgtgcctcattcagtccgaatcttgattgtgtgttggacttcataattgtgtcgtgggctaagcccaagggggtgtgcgccctatggaaaccctacgacatccctaatcatatttatttagtagttgttatccgttagagtcacgttttgcttagattaatctgtcaagaacagtttcgcggctagatcagtttgtgaaaccccaaattcgagtgcttaatcattcatatgcaattgtgttgcaattatcttgtc

SEQ ID NO: 29087 - DNA, 353 bp, Oryza sativa
  unsure (1)..(353): unsure at all n locations
acactgtntctcgttaggaaatcctctctgccctctgcgcatattagctatgtgtctctggatgaacctgacgaggagaaaatcacacgtgttcccttggattcgatacccttgcaatactccgtaggagaagtgctacatcggtatatccgtgcgcttgcggattctatatgtgatcgtaagaaataccaacaagcatttctggcgccgttgccgacgaactgttgctggttatctccaaaccttggtcatccttgtatcctatttatttttctttcttctacctttacccctgctatcctagagaagaattcctataaaacctctctcacatatagagccacaatctatct

SEQ ID NO: 29088 - DNA, 388 bp, Oryza sativa
  unsure (1)..(388): unsure at all n locations
cacttcagagtatttgttacgacctgatgtatttctagaagttgtctgcgtggataaatactgtagcactgcaattcacaaattgtaacgtgatgagagattggcgtgctttctacaaggccgtgaactatactgtagtagtactctgggattttttgtgcccagagtggtctagatatctcaataaaacggttatattgatcaggatattattgatatggtatactgaatttccaccatgccactcttagacatgatatatttcagttcttctactgacgcgaagaaagctcaaagctggtggagggagacgcacgntcagattataccagtcctatgtcactaatgggtggactcggacttgacatatgctttatgtttgataagt

SEQ ID NO: 29089 - DNA, 358 bp, Oryza sativa
  unsure (1)..(358): unsure at all n locations
ctcagcttcatatattgctaatgccgtgttatgtaggtttatttctcttccaatattttgagattctggtagacatcttcccagattatcattcctcctttcttttgttacatatagtctgggattgtggatattgctctattatctgtgagctgatactcctgtcttgcataatgcgtctcatgtagcattgtgcccaccaaattgatgatcttaaatacaccaccgatgngttntgcattgcaagaatcaatggaatacagaaactgttttctttgactgaatattatttacaaattaaaccatgatttctgagattcctctcagtctctccatctgtctatagcgtgagaacttg

SEQ ID NO: 29090 - DNA, 415 bp, Oryza sativa
  unsure (1)..(415): unsure at all n locations
agagggaatggatttctctaggtgattggattggagattanggaaagggatgaactgaggagggaagagtantttagtggcatttgatttctttcatttcttcgataccatttacagacaacggattccccttaaatggtcacatgccatagcacacacacccacctgacgcgtncaccggccctgcacggcacatcagttcactcacacaccggtaccttggcccataactggcccatacagacaagccttgatgaactacagttgtcatgacaatttccctccccttaaagagcggtttgtccccaagccggtgcttcangaaagtggtgacgcagttgatgaagattctagcatttcgcaagctcatcanggagaccagtccaacgcaccagcacttgagatgttgtagttc

SEQ ID NO: 29091 - DNA, 455 bp, Oryza sativa
  unsure (1)..(455): unsure at all n locations
gctatctcttacgctctangaatggatcagttagaacatcaccactcttttgccttcttcgccgccgactggtgtctccgcctgcacggctggcatattatgccgccgttgttgggcgccgttggtcggcgtctacgtcttcaccgccggcttgccttcaccgccgccgactggtgtctccgcctgcacggctggccaattatgctcgccgtgttgggcgtctacatcttcaccgaccggccgcctcgtatgacgccaactggtgttatcgtcttcacggctggccacgtcgctgccaccgctagtaggcgtcatcatcttcaacgcaagctgtctgcgtctgctgccgactggtttcttcactcccatggctgcatgattctgatactggtgaatggcttatcgtcttcaccgtcgcgtgtctggtttgctgctgactactgctctcgcttcta

SEQ ID NO: 29092 - DNA, 476 bp, Oryza sativa
ttgatcccaaccgggctgttgtggagcagttatcaaccatgaaggccaccccacgagcgtgcatgaatgggttcagggaatccacagactcgatcaaactctcgttgatgatctccgagtaagagtggcccttctttctaaggacttcaatctaaaatcagtgcacaacagaacatatgaataaacattttataaaccaatgtatataaatgggttctaatttgaaaaaaagaatacaatcatccaacctgtgccatcataagtgcaacatacactccagcagtgaaaggatgtaatgggccaagatcacactgctggccgtgttgaccgcaccctttcacccaccttccacatacgtgtttgatcaatggtgcccatcaggaaagcaagaagtccttcctttttctataagaatacaggcgtcaataaatttatttgttcaatacccacgaataagatatatatgtttatggtat

SEQ ID NO: 29093 - DNA, 403 bp, Oryza sativa
  unsure (1)..(403): unsure at all n locations
agtgcacatacccaatacagtagtacattntttagatgatgatactgtgtgtagtacatgtttttttcntttttgacatgcccaccatgtgcttgcgtatatatgttgcagcgcaagcactccagcttccgtttgtaccaccgagtttgcccgagaaggacaggtggcagtttccgcacggcgccaacttcgccgtgttggcctccacggcgctgccgccggagtacttcataaggcggaaccacaccgtgccgatgcccttctccctcgccacgcagctggagtggttcaagcaaacgctgcagcggatcgctcccggngacggtaagtaatacgtggtacttgtaaaataacaaccaaaaaaaaaaaaaccgtgtgcacggcaacagtgacactgacatac

SEQ ID NO: 29094 - DNA, 454 bp, Oryza sativa
  unsure (1)..(454): unsure at all n locations
agctnggaagaattggaagtcgaagctcttcaccgtgtttgtcaacccgcccggcaatcatacgccgttcgatgaataccctcaaataactgaagcggtgtgggaggaattctgctctctcaagaacccaagagtttagggaatcaagcgaggcacatcgcctactgcaatagcggaatgagcacccatatcggctgggcactgcagggtacatcggcaaggaggcaatatgggcccaagaagatgcagccactgcagcagcaaatgtccctgccccgttttcagacatccctgaacaaagagctcgcaactgggtgtgggcaaggggtaaagtcaacccggacggctctgtcacattngagaacaaaagtgatgttgtcgtctatcaggaactggtgagttcactacttaacctaactaatttccgttcgtataaagtagaagttcgtataaa

SEQ ID NO: 29095 - DNA, 458 bp, Oryza sativa
  unsure (1)..(458): unsure at all n locations
tatccagaagtgaccgagtgatgcggcatggcaagttatctattatttangaatagntnngtggtntccttttatctttaggaaagatcctttcttgtcctacaaggactagtatctccccatgggtataaatatgtacacccggngtcattgtaaattatctctcaatcaatacaactactttcggcgtatcgccaccctcttttctgaggtttttacttatcaaccggtggaatttggcacctgatgcagagatgtatcggttcagttcgatctccggtgaaagggtaagtcctacgttccgccggcccagacaatngtctcgtctacgtcggcgtcgttcaaagctgcatcagtacattcgacctcttggattgctccgtttggatgatatatnntgctacctaattatcatatgtcttaagtaatctagtcttagtatctcaatttagctctat

SEQ ID NO: 29096 - DNA, 519 bp, Oryza sativa
  unsure (1)..(519): unsure at all n locations
cggatccttaagcaccgcggctgcagcttctaaagatcactcaaatcttatagactgcgaccaacagtcaagctcacaaaggtgagttctttcaagaatgctctgctggacagcatcttcgctaattaaagccaacagaactcattaaggcatagccaacctgccttgcagctcacgagagtacatgcatcttcacttagagagggtatatatcggtactctcctctagtttactaatggtttgttcttcccaggatctaattcacgggatctccgatcacatagactgtgtaccaccatagtataactcacatgggtctcanacccatctccttcgatgcattgtctatcacatttcgtgatagtcccttcgtgaagggatctgccaggtttctagttgttnggatgtaatccaacgttataactccggaagttctcaacttcttgacagacttcaatcgtcttttcacatgtctagaannattcatattatccttagaactattcactttgacaata

SEQ ID NO: 29097 - DNA, 464 bp, Oryza sativa
  unsure (1)..(464): unsure at all n locations
ntcaganacatagattctaataattagacaactgcatgatgttttctcctgaagaaagtctgcagtacccttacgctctgggcagcggaatccgcatgactcanagaactcaaggacgtattcgcggggtccctgataaacaatctggccttctgacagtaggataatgtcatcgaatagctcanaagtctcangngctggttgtaggagtgacatgaggatggttgcctcgcccaagtgcacgattngctgaaggcatttgacaatctggaatgtggtggagctgtccaatccagttgatatctcatccatgaatagaacctngttggaccgacatcatctcactgcattcaatgagcaaattgtcattgtagcatcctacattttcgngaaaaaaggcaatacctcatacttatagtcaactgacattgtgaatgctagtttggctttacttctacatattt

SEQ ID NO: 29098 - DNA, 401 bp, Oryza sativa
  unsure (1)..(401): unsure at all n locations
agcttcatctggtacggcgacaaatggtgaaaggaatatctggaagaatatatggcaaacaaatgttcaaccaaaagtgagaatntttgcctggaagcttgcccaggacagattgcccacttggggaaataagagaaagagaaagataaaacagagtggcatatgcccgatttgcgggatgactgaagagaacggttttcatgctacggtggagtgcactctagctagaggcttacgggaggcaatgagagcacattgngtgttgccggctganaggagttntgcatatacagggccggactggctattagtgctgttggatagtctgcagagtacataaaaggagcatgttatgtatntactctggagagtctggcacctgcgaaacgacatgatccatg

SEQ ID NO: 29099 - DNA, 416 bp, Oryza sativa
  unsure (1)..(416): unsure at all n locations
tcagtgaagatcagcaatttctcccctggtttgcttgccgtccttaataaagatgtcccctagctntgatcagtgcgcatgcatcgactctactacgtgtaaactctacagaggcacgcctcatgagactttccttgatcagctatagcttcatcggtctgaacccactcatgatgaactctctgaaactctccccgttccactaacaccacccactaacatcatcataaaatgttttgctccgctcgtacacgcaaagagacgaacacgtcgccgcgcccgagctcacggtgcgcctcacctactgcaaacctctgcanatgcctatanatacaccgacgaggcagcgatcactcttcatttcacagcacagcacatctcgcagcttaattcagcttactgatcagtgttcactg

SEQ ID NO: 29100 - DNA, 423 bp, Oryza sativa
  unsure (1)..(423): unsure at all n locations
atagtaaacacaattagtatcatatgaagtaatccatcgaagaggctcatcttcacacancctgaagtttcactcttcagtgctacgaaatttaatgtgatgcttgatttggggactgtttggcgataagagtaatatcgatgagcatgaaggttntgctttggtgaccaagacaatggccatgctttatactcttatcactcganaaatcccaggagttgttgtcatgattaacagcactggtccaggactgctagtgcaattgtgcaaattgcacatgccaacaaatacatgtcacttggatggtttaaggccttggatttccttntagatggtccaatccaatgtactcagttntggacttaagaaagcttatctttccaggctacgctattttcaaaatatggagcgtacatgtgtcat

SEQ ID NO: 29101 - DNA, 343 bp, Oryza sativa
tatgtgtgagaaagccaacgagtacgccaaagccgaagacgctgtcaccgtatcaaagcagtcgggtcccagttggaagcaaaacaagggtacgccggctacgggaggaggtggaagtaacaatcataaggaccgcaagcgtaagcctgcggaacttgttgcaaccgccagtcactcttctcgacagcgttcgcgcgtcaacacgttcgacaagatcatgaactcccaatgcccgcaccatcctaactccaaccacgtggccaaagattgtttcgtctacaaagcaattgcggatcaatacaccaagactgcacgaaagaactctgacgaagaacaaagcacg

SEQ ID NO: 29102 - DNA, 455 bp, Oryza sativa
  unsure (1)..(455): unsure at all n locations
agctnnnttgttcttgaagtcatntagaaactatactccaaggagaatattacagctatgtgctgcttgttcttactgatngctnttactgcttattattctttctcaacaataagatttgacaatgtgagcagaatagcagatatgcaagttttttttttctctcaaaataaagatatgcaagctntttttttccttgtattttcaataaatattttcaatctgaatatgctaggctgtgtcttcagacaaaaaaagtatcttcatcagagaattggatgaacgaanaagcaagaaatggtaagttttgcagttcagtaccttgcattgttaacgtgtaggataactntgcatggctgtcctaatgattctaatgttaagtnggcaagctgtgaggttgctctcactgcccacctgcattacattgtaacctagaatngatctcatttcctaat

SEQ ID NO: 29103 - DNA, 397 bp, Oryza sativa
  unsure (1)..(397): unsure at all n locations
gggcgcacacganagaggacgaggacttcgaaagactcttgcgtcccctacctggcgcgccagatgacggagcatggggctcctcaccgggagaccgcgcaggcccncctgtgccggttccgtccggggcgctaagtgaggttcttcaccctcgatctgtggaaagttcgcgagagaacaaatgcgcaagacacgggcgacgtatacaggttcgggccgctgagaagcgtaataccctactcctgtgttctggtggatctgtgtgtgaaggagttacagagagctggagagcaagagtcgtctgagagtcccctcctcgtccccccttttttcggtgggcaagggcctccttttatatctcaaggggataccacatgcaccacttctacctactctt

SEQ ID NO: 29104 - DNA, 501 bp, Oryza sativa
  unsure (1)..(501): unsure at all n locations
agctatgaagcccaatgttcgtgtgcttgtccatgtatctcttgtgtgacagactatcaaggaattgctataattcatcattagtttcctttctgcttctggccaaagatattctttatggtgtaccgtttttgtaggctcaaataagcaataatgtataaatgaacctgataactgaacactgcccaaacctcaacacattgctgttctatggaagatcatgttcttcataaggcagtgatgcaatcttaatgacctggtgtttaagatagtatttgttgagatctggtccttgtgtccagatagatcatgtgacatgtctgactgcatacacaactgatgtaatcttgcatctcatgccaatatcatcaattccagcactcaacgaagctctgatattcactgngtgcaaacactctatatcctttgtaatctgcatatatgcacaggaaagacatggtgactaccataatcatacacgacactgaattcctgaatgat

SEQ ID NO: 29105 - DNA, 317 bp, Oryza sativa
tataaaactaagctatacatgtaagtggaaattttggtcaactctatgttctacaaacttagaaaggcatagttaattcaaacaaatctttatctgcaaatatgcaaaaggatatattaaaaagaaatcaacatcatgatcagttggaagtcatctcaaagaagagatcagaagccgggatagcagcagactcttataaagaatttaaacaacgggttgtgggctggccgatgtatgatggtagatcttgactcgttggcttgtcaagctcgtacgctgccaacatgcttgtggcaggatcgggattaagtgcccct

SEQ ID NO: 29106 - DNA, 491 bp, Oryza sativa
  unsure (1)..(491): unsure at all n locations
tctgagtcacctgcngcatgcaagctngcacgcagtcggattatacaggttcgggccgctatagagcgtaacaccctactcctgtgtttgggattatagatgagttttacaaaggtttcttcactctagaaagcgcgctcgcttcctctcttctggagttcaggttttctgggcgtcgtccccttatctcaatgggcagggtcctccttttatagctcaaggggataccacatgcgccgcctccacctaccctctatcggagggggatcccacttcacttttcctgggctntaaaccgtgccttctcccggaagctaagcaacaactggccccgcctgacacggnggacaaccctgtcattccctcatcaatgaacgatgacttgcgacagcccttcctcgagtgacgctcggatgtgacgggtcatacccacccccactctcgccggtacaagggcgacgtgaggacatgattgccctatccatcggatg

SEQ ID NO: 29107 - DNA, 252 bp, Oryza sativa
gtcggcgaagtgaggccaagcataaggcccccgccgaggacatcgatgatggcgatgatgacctatgtttccaagagcctgtggccgccattgccaccgtcgatggaggagcgtgtgctcacgtttctcgccggagcctcaaggctatgaagcgagagcttctggccgcgacccctactcatgaggcgacgcgccgggcgcggtggtcggaagttgtcctcactttcgaccagaccgaccacccgccgtgcg

SEQ ID NO: 29108 - DNA, 497 bp, Oryza sativa
  unsure (1)..(497): unsure at all n locations
aagcaccgcggctgcagcttatgctngcatttgcccttgtntattgaatattcanaacttactacaggcatcaatattattctacttccctttctgtagncaacagcaaaaatctcaagagtataacagatgttttctttaaaacaatctcgatcacctttggtttcattataattataaaggcactggttcatgtacttagatagtcccaaaacttatgagccataccaaagtctaaactgtattttggtgaatggtacaataacgtangacagcccaactggatatacacaatgctgttgttntcatgcatagtttctatgtacttccatccatcttttcctgctccttccattgctgaggntgtcaccatatttttgtactttgagttcagtaagcttcatgatcgccggtgtactcgcactattaaggtttccagtacaacttgaactgagtagtgaccctattatcattntttaaatacaattgtgcacttg

SEQ ID NO: 29109 - DNA, 51 bp, Oryza sativa
ctcgggcagctggaggaggaagaagacatatatataggggtgttactttag

SEQ ID NO: 29110 - DNA, 503 bp, Oryza sativa
  unsure (1)..(503): unsure at all n locations
ctgcagcttctcaaccttctggagaataatcggaggggtctctatgtacttgttctcactgggattcgaactggaaaatcatgcaggagaggacttccttaccagaataaaggggaaatcactcactccgagctatcttggatggatctcccgctccaccccaccccaagtccagtgcagcagaggggagtangggactgtctggagaggaagagagggagggggagctgcgggcttctattcgaagcggcggatgcagccaggtcatgcgagcgtgctccggcgggaggatcgccggcggccggcggcgcgagcgagagaggcggagactgtggaggngaggaatcanctcctctgactttcaccctcacgacggcagagagcagtcgaggtcattcagccgtncacgttcgatcgaaccgttcgcccatatagcgcacggccgcgttctgagtcttggccaatgccggtccaacaagccccgtctccgtttggccggcgca

SEQ ID NO: 29111 - DNA, 391 bp, Oryza sativa
  unsure (1)..(391): unsure at all n locations
aagctgaccgacctncgcttacttgngcatcgccggagcgccactgtcgacatcaactctaggtcgtcaccttttcaagctcggcgccggccactcctatcgccgctcgtcaatttgcaacggttttgagttggaggaaggttgtatccagttttgcagctgagggatgtgattcaactatgggcatgagctgagggaggcatagacttattccttgattcttcaccatgtaaatatttgttgggcataagtggaacggccatgcatccgtgccttgaccattttgaatcacccctgagtatagtatgtgatgcgaaatgtatttatataagatattaatttgactattgttctgtgtaaagtgccaaagcatttgaaaatcataggaata

SEQ ID NO: 29112 - DNA, 447 bp, Oryza sativa
  unsure (1)..(447): unsure at all n locations
agctngctngagagaggtatcgaaccggtcaccgctaaatggccggatcgatcaaagttctggtactatgctcacggtggaacgctcaacccagttgatggctccttggtcttcagcgatcagatacgcgaggctgcgagtcgactaacggacgcagtggaagcctcttctcagggcacgttctgacccgacagagagaaggacgagctgtcactcgccctacagactccggagcatccaagacgaacacgagggagaggggtgattccttggaagattggattcaaggaggacatccacacgtacaggagtcggatgaggagcaagagagataccgaggcgaagattgaagatcttgagtacagggtatcgagctacgagctcagcatgcaagaggaggtggtaaggaaggtggatgaacgcatggccgcacatcggtcccatgat

SEQ ID NO: 29113 - DNA, 336 bp, Oryza sativa
  unsure (1)..(336): unsure at all n locations
atcgatctgttntcagaattgaagagtgaaacagatctatctcttcagattgtgctcttaattatctagctcttcagccagtgttaaattgttattgattctaattaactnttaacatctaattatactatgaataagttcaccaagtcatcgaatcgttgcttcggcgtattagtagatgctagttaaatcgatggcagcagattaactgattaagcatgtataaatgcatcatncaggcgcgccatcgtggaggaactggcgagcttcggcgccacggtgcacacgtgcgcccggaacgaggctaccctgaacaggtgtctggaggagtggaga

SEQ ID NO: 29114 - DNA, 407 bp, Oryza sativa
  unsure (1)..(407): unsure at all n locations
gacacctgaggctgcagcttcattcacctattctacagatcagactctgtatgaggctcttttcttaattcanatcctgatgcctacgaatattacgtacatgtagatgattacttatgagatcatgtatatacatttggtttcatctctttgagtgtgttctagggtacgtatttgcgacgatgtttgtgcggtgctacctgtaatggtgtgtgcacgcgtgcgtttgtgtgtattaacataatacttattatgagcattaatggatcatagagtatctcgatgtacatcacaaattacatagaaacaccaaccttgcgcttctttctgtacaactatgggcggagaccatcgcatctgcatgatggaatctactcgatctcttcttgaccaagatctactagacc

SEQ ID NO: 29115 - DNA, 433 bp, Oryza sativa
  unsure (1)..(433): unsure at all n locations
gtagcgcatgcgactgatgatgagcgcatgtctacctgtaagagctatagcatctcccactgtgnggagcaaggaccacctgaatatagaatataacactctatagtatggacgcaacccatgtgtagtccccaaacaatccttgtgagcatccttctcatacatgaaagaggtgctggtcactgataaagcatcactctcaaagatatgtggacgacttaagtcatcatcatctagctccaaagctgcagcaaactgtgccataaaggtcttgtactgctgacactgaatggaccacttcacacaatgaagtcccttcctggcggtgccgaagaatgcgatggagtagaattgaccaattactttctcattacaggaatactgcaaggccaacagatctgccacatgcttgtgcacacacaccttgcgcacc

SEQ ID NO: 29116 - DNA, 225 bp, Oryza sativa
  unsure (1)..(225): unsure at all n locations
agcttacatatacnctatanaaaggtttatgatatatatccattgccacaagcatataggtatggatgcgagctntgatacagcctaaagggcgacggagattttaagagagctataaagcataccatgggacccaccatatgctggatgcaccacaaaaagctaccatcactgcgcaagacatgacctctatcacataccgactatactctctatatctatgcg

SEQ ID NO: 29117 - DNA, 370 bp, Oryza sativa
  unsure (1)..(370): unsure at all n locations
aatttccaaatggattaatatgaatttttaaagcaactttcctattgaaatattttgcacaaaacgcaccgtttagtagattgaaaagcgtgcgcgcggaaaacgagagacaatctctcctatctccacctaacgaacactcccttagtagccggcaataaaaatgtctatctcaataaaagatactccagcttgaatgtacaatagctattgctatcgagtaggtacacacggnttccaatagatcactatataaatttctagactaaattctatctctaccaacattctttccttctactcaggcattggagtatacaatggctgtgcagccacaccgatgtaagacaagttaatagatagccactac

SEQ ID NO: 29118 - DNA, 334 bp, Oryza sativa
  unsure (1)..(334): unsure at all n locations
actgatgctgcctcctgcatcatacgtcaacatcagattcttcactcatacagacaccatagaaatgtacttatgtaagaaataattcanatgcaagtaaaatatacaatatactacatatctgatgcatatatatgataccaaagttcaaacgaatactataaatcacttatcacttaaatattcactccatcaacaaagcgaacaatctatctggttggattctacttgcattatcctggataaaatattaggatagtgaataaaaccatttgcatgtccaaaatactgtacaagaatggcatttgtatgaatgcaagatgaagaatgcaac

SEQ ID NO: 29119 - DNA, 346 bp, Oryza sativa
  unsure (1)..(346): unsure at all n locations
atgcatgctttgatgcttcttttntattattcctagctcatacttttaagtatccaggtacttaaaaggtgtgagacgaactaccggagcacatgttagagttcaagatgttaatccccaagtcatgtgggcatatacatcattatcgagttagcatctttaagtagtatgtggcttctgtccttcaaaattcaacatctcaagataagttactgggtacatttgtttcctcaacactcgatagtggaagcatccaatactgcacaggacaatgaggacataccacctattgaaatgtttcgtaaggaactcacatgataagggcactggaagcaagtcttctgac

SEQ ID NO: 29120 - DNA, 420 bp, Oryza sativa
  unsure (1)..(420): unsure at all n locations
agctntaatcttgagttatttttgattgtgtactactactagtactactaagagcaagagcaaggataatagtagagctcaccactattagtctatcttaaagctaacatatataatggattagctataaggttggctacaactttcttctcctctctctctatctctcacctatgcatttaatgtatttacctaggagtttgtgttaagctagctcttgcataagagccaacatccttgatattntgttatctttctcctccacataagttaggccagtcacaatggctagtgtcattgcacggctacccaaaatattataccatcttctctcanatgaaatcttttatgaaacaatccccacagtggaggggtttcactttgacgtttccaagactaagcanagcatttaattgatac

SEQ ID NO: 29121 - DNA, 398 bp, Oryza sativa
  unsure (1)..(398): unsure at all n locations
tggtgttatttcctactgtgttataacaaattgttgataaatcattcacttgaaatcagtgtttactcatgcaactngattntgctatttgatcagatcattcaggagatgaactgtttgcaaaattctatacctcgcttgatgaaatcaatttctttaaaacatcatctgctggagctgaagatcctggccagctntcaaaagcaacacaattcttcgatgatgcatngctggtataatatgtgatatttacttgtctaactcgcgctcttttaaagcacaataatggatcatgattgtattgtccctacaccctgttaccaaggaaaagttatcccagatgccctcccttgtatctangactgtccccctgttcatggagattctcttaaatgact

SEQ ID NO: 29122 - DNA, 438 bp, Oryza sativa
  unsure (1)..(438): unsure at all n locations
tagctntgagaagagagacagagaggatgataatggcttttctggacaacctattcagatcaattcctcacatgatagggggtggggtctggtgggaaaaagaagcaaaggaataatggaaagtagtgaatcctggagagcttttgaggagcaacgagagagacaagaacagagactaattgaagctaggatatatgatgcaaggagagaggatgagctccataatgcatagaagataaacaagaataagattaaacatgaatttcgagatgatgacctacttgatcctaggccatacaaaaatgacagaagggtacctgaaagaggtcgagcggcatagagacgtaccccagctgatatgacagaatacacaccaccagctaagcggcacagaggaggagaggtacttngtctcaaccctgtttaataggagtatgc

SEQ ID NO: 29123 - DNA, 437 bp, Oryza sativa
  unsure (1)..(437): unsure at all n locations
actcagcttggccaagaataagtaatatntaccgatctctcataagtatgcacatgccctgcaaataccaagtcaaccttgtacttcacaaaccatttctcagaagcagccctcatactctcaccctccatgtaatgtgcttcattgctgttgtacatgggagaatgcatgagaacaataagccaaggagtcttctctctatccacatgcttcaattcatacttcaaccaggtccattgaggagtgtatttactggtaacatcaagatancttataagcatcaacaaatattaatgaaagaatatncactataaatatcatgctacatatactttaatatagtaatgaggcaggtatacccatgaaaaaaatactataactgcctattcaggagatcatgctgtccccacaatgttcaggttcaacactggaccgga

SEQ ID NO: 29124 - DNA, 500 bp, Oryza sativa
  unsure (1)..(500): unsure at all n locations
agcttgtgagagcagacgagatgaatcatcatcatgcgtttccaagaagaaagagattatctaacacaactaaacttacctagacgatccagagcagaaggtggcataataactgaaaagaatataaagtaatacttagttcaatttccaaaatcaacttaacagatgatgaatcaatgaacagagagcatacttttgtcaccagtttcaagctgaggctgcatagggtaaaaaaaaaaaagaagatattttataagatatatccaggaatgaaaaactagatgctttatcttgaaatgtgattgtttcctctaacttcttttagaagaaaattcctagaagtattaactgctactccctccgttngaggttataagactttctagcattacccacattcatatagatgttaattgaatctaggcacacatatatgtctagatacattaacatatatatgaatatgggcaatgctataaagtcttataatatgaatcgga

SEQ ID NO: 29125 - DNA, 416 bp, Oryza sativa
  unsure (1)..(416): unsure at all n locations
tanactgggtctgtcgtctatgcattgatggcgtgcttacatgtaagatgctgtgagtttaccactagaacgctaacatcattgtcagtttgggcaatacctcatttgcttaacgaaacctttataacattgtgaaaatatggatatccaacttcgtatcatgattatagtttgttgctaaaaaataaatcatagttctaggtttgctgcagtctaattttcttatcatagtttcagtcattatgcataagctctcttttaccaacctgtccatatttttcacatttagtttgcaaattaattattttcgcaataatagtagagttgattnttactgtgctggtccattagcccagtggtacagagctggttatacatagctacagcagtaaagcatgaattcttcactaataatt

SEQ ID NO: 29126 - DNA, 305 bp, Oryza sativa
agaactacgtgtgtctactatgcatattcgtgctagaataataataattccactagtactgtgattgctaacctcttgcagagaatgaacataagagcatccctagcatctcatctatattttatgtccccaatgcccatatggattatcatgccaaaagattcctcatccatatccctatcaactccaacacagtatctatactatatcatccatatccgatcatgctatagtgtagtaatatcttacaactaaccttacatttatatattaagggacttatcttgaacaactcaattttaccg

SEQ ID NO: 29127 - DNA, 398 bp, Oryza sativa
  unsure (1)..(398): unsure at all n locations
catgacatgtggtgctctatgtaccactatcctcatactcacaaaagtgtagtgttcatgcatcttatacataccaatacaaaacaaaaggatcagaatactcatatgttatcaaatctcaatgcgactatttatcactgtatttactccaatatagagatttcatacttttgcaaactctgatgcaacgattaccttataaataaaccttatttatgataaattgaagaagataaaaatgaacttattacaggatagacaaagtaatacaaatatggtatggcccgccaatgatatatacgttgagttcaatacggatgatangttaagatttctactggtgcacgaaaacagaagccatctagtgtatgattaatcaagtattacttattacaacg

SEQ ID NO: 29128 - DNA, 527 bp, Oryza sativa
  unsure (1)..(527): unsure at all n locations
agcnttttaattaatgtgattggtttgaatgtttatctaattgctttcattgtagtaatagaatttgggcttccttgacagattccttatgttacanttttttcaattgttttttaacactttcttttacatgtgtaatctatcatatgtccatgttttcatgattncaattttttcctatcctatattccgaatagtcatgcatgcatatcgatcacatcacgtcatcatgcatgagaacgtccaaaatcagaacagcttgttagaattntgacggcgtcgtcgttgtcgatgatcggtcgcatgcaaataaagtaagcaatgaacatatttcgacgaaatagtgttgttnttgtaggttagtgtggcttcagagacatntgtacgtgcttgcacgtacgctagcgagctactcccttcttctgcnngatttggttgatacaatatatcttatggattntggctggatacgacatatcttagtacaatgaatttgaataaacggtctgtctataaataatataata

SEQ ID NO: 29129 - DNA, 186 bp, Oryza sativa
  unsure (1)..(186): unsure at all n locations
actccctacgcctttcaaagagtaaagaccttccaaacaaactaaaaaccacattcctncgttaaccggcttctcatgttccatccactctcaccaaagaagtgcatgacacaatgtcttaacagtatagcatgcggtcgttgtcacatgtcgctcaatcttgtctaagcatgcaaggaccgtttg

SEQ ID NO: 29130 - DNA, 496 bp, Oryza sativa
  unsure (1)..(496): unsure at all n locations
agcttgtcanagntaagaagacttcccatcaagcatcttgggagcgcgcggngccctgagagaacccgtgggccccaagcgtggaccgtgccccgggagcacgatttgtcctagagatacagtggttcgaggcactgatataggtctaaagtaagacttagacatgtcattaccattntggaaggcaagcctggcagtgcttttcgcttgggctagacctaggaacttcgtcggcaacgctcgctgctcgggcttagctcgggatctcctcccagcggtctacgcagggcggtgggcccgatgattggacaatggcattaagccgtagcagagtggaacctagagaattacaactcgaggttatatctcaattacatgcaataaggaggtggcaaaggtatgaagtaatcaagctagccgcgtcactcgaaggaacaacattatggcaatgagccgcgtgctggtgagcggtgcatgactttgccgtaaagcaata

SEQ ID NO: 29131 - DNA, 387 bp, Oryza sativa
  unsure (1)..(387): unsure at all n locations
tcagctatccacctgaatagagatcaagtaaagagggcatatgcatttagtggcccatcttattctgatattactatatttcctcgtaaatggcaaggtggtgagtggagatcctttcaaaaaacttggttcaatgagtttgattggctagagtatagtgtttcacaggatgcagcttattgcttgtattgntacattntctttngaaccggaaaacctgaaaagtttgggagtgctgtctttgctaatgaaggttatgtcaattggaagaaaggtaaagataggcttaccgtacatagtaattgcaagactcacaatgatgctaggaataaatgtgaagactttatgaaccaaagaacaagtgtatctaacanaattgagattgta

SEQ ID NO: 29132 - DNA, 347 bp, Oryza sativa
  unsure (1)..(347): unsure at all n locations
gctgcttnacacctanattcctgtgacttgctgagtacgaaagttctcacccttgctctatattaatatatatagttcctccacccggaagttgaagatgaagtaaagtgaagattanggtttcgtcctggttcccagccgtcgcctgtggtgtggggtgttagaccgttggttccgctgctgctgctgttgctggtgtttcctcgtctgtgtctttggttgtattctcaggctgtcctgagctgcaacctaagttaaggtaaataagtcctctatctattntaaggatttgcaatgaatcatatttgtcaccgcgggtaccagcactatgttctgngactggtact

SEQ ID NO: 29133 - DNA, 505 bp, Oryza sativa
  unsure (1)..(505): unsure at all n locations
gcttcatgagagaagatggaattgcactgtagatgaatgatctctataaacaattgagatgatgtggcttcatgagagaagagaagattagcattaactactctatatataggattaatctagcttgggtttcctaaagtaaaacagatggccttttgagaggatacgtttaaacggctgctctactatcttatgttatgccctgaaagttaatatattttgatgcaatatacaatcacatagatatattctcctgaaatgtatgtcacaggattgtttttaatcctcctcagatcagcatganaaatcgagaaaataagatattaaataaactagcttggccagtttttcttctccatgttagtagagagaaaatttctgcttgcgttgcaatagtttttaattcaacttacatataaagctcntagtttaagcacaatactntatgaatntcaccagtcgttattcatgaagttccttctcttcacagaagcagcacatcatt

SEQ ID NO: 29134 - DNA, 293 bp, Oryza sativa
  unsure (1)..(293): unsure at all n locations
gccgacacaggtgtaccatatgttgtctagatgtttcccataccaacaacaggttaggttccagaccatactgagccaggaagcccaagggtccttcccgacaccaccacggcgaatccacatgtctctcggcatcaaagctcccttgataagctagttactcagacagcggtgttccattccacncatgttggcgaacttgtcttatgtttggatgaaatatcaaggaaaccgtctttaagtgcaagagcgggagaccgtacacccgtgacgttatccggtacgcggttttg

SEQ ID NO: 29135 - DNA, 455 bp, Oryza sativa
  unsure (1)..(455): unsure at all n locations
agcttccaggaaaatgttatccactggatcacatgtttaaacattaaacttacatttgtactgtaattataaaanaaatattactatcctaataggactctatgtgatcaagaacaactngaagcttctttcagtagttaaaaactaattgagccatacaatgctcatagatttgtttgttagctatttgttntgactattttacaagcaatggttttgtgattatacccgtgaagatntaaggtagtatnttacacagtagggtcagagaaaacccatatgttntcatttagttctgaaaatgcaaaacgttatgtagaatcactatgaagtaatgtctccctttcanaattttctcctgattgaattgatgctacttaaagtgttatcactaagatattactgatagcttgctcttggactcactttccatttatgctgaatgagataataag

SEQ ID NO: 29136 - DNA, 389 bp, Oryza sativa
  unsure (1)..(389): unsure at all n locations
ngagggcgcggntgaacgcggccaatgccatgtcctctgcggtctgcttgctggtgaactgcaagggcatctgaacaatgaagcattatcagtacaacagtatgtctgcacagaagataccagcttctgaacaatccaccgaattggctcacgcgctcaaagcgtgctcacaagatgggttcaaaacaagttcaaattcgggattactcggagggggagccgaggaattaccttgccgagcagctgcgccatggaggccatggagtagggcacgacgacctcgaggacggtgccggacgcgccgggcacggacagcagccacccgagcgcctgcggcgaatgcgcgctttgctntagtctangcgccaaacagtactaccatatcggat

SEQ ID NO: 29137 - DNA, 379 bp, Oryza sativa
  unsure (1)..(379): unsure at all n locations
agcttgggacttcggcctggcgagtgtatggtcgtctacaatggcgccaagtcacggacaaccaaagtcgtgctcgggaccgccgggtacatcgacccggagctcgtcaacacgcgcaggccgagcaccgaatccgacgtcccatgctgcgccgaataaaaagggagaggggatcgaggcgcacggcactttggaagattntgaagtattatgagggaaaaatgggatggttatgtttataggcagctctcttaatagggtatgggaaaatcagctcattttacgggaaacagtttcgtgcggtcctcttaaatggaccgtatgggaaaatgagccgatattctcgtgcggatcgagttatcgtctacacgcaatctaa

SEQ ID NO: 29138 - DNA, 382 bp, Oryza sativa
ctaagctgctgttgggagactaaccgtatacttgctctgcattgtttagcgaggcgcggttccgagggaacgatgacatccgcctatttgaaagttataaaaaagtccacataagcattattcatatttataatctaatacaataaagtactaatcataaaaaattcaataagaggatggaaaatgtagatgcgaaacccccgctcactatatcaaccgggcagaataatagatcttctacttttgaagaaaacattacgatattaacacataaaaatgaaagcttcaataatttttttactacacggcggcatgtatgaggatgtaatttttgtactttactctcgccattaaggagctgattcctgcacttataccgcta

SEQ ID NO: 29139 - DNA, 351 bp, Oryza sativa
  unsure (1)..(351): unsure at all n locations
catgcagcttattttgataaaagaaagagcttttaatgtactccatctgtcctaaaacataagcatgtttaacataatatcaagtcaaatatttataactttatcaattaatagccaaaaaataaaaaaataataattattgtaaattgatattactagatttattatttaacaaactatcacaatatacaactctttttatttaaacattctactttgatagaattgctngtcaaagtaatatatcgaagaccaatgcgaagtttaaatatgttatattttaaacggatggcgagaatgatgnggagcatttacaaagaagggcatggaatgtgatatgcatgtccagtg

SEQ ID NO: 29140 - DNA, 387 bp, Oryza sativa
  unsure (1)..(387): unsure at all n locations
actaagctagccactctctttttgttcaattncttcttattattgtattatgaataatttanaaatatatctcttcaagacttatttttaagatctaaaccttttgatcatgctagccggattaacgtgacaaaataaccctcattatttgattatgccggtctggctgacgtggtaaggacaaaactatcacgctcactacgggtatctgacagttgccacgccatgccagattttgaaataagtttntataaggtttattctttaaaataaaagataatttaaaaagttcaaacaaaaaaattcccttccttcccgccattgatgacagcatgttctttcatcgagcttaataacgtacaatgtcatggcgtgggcgcgtgtgca

SEQ ID NO: 29141 - DNA, 445 bp, Oryza sativa
  unsure (1)..(445): unsure at all n locations
agctgcctttactcgggtccttggtaagaattgtaccctggaagcagaagtatgcttgaagatcatcattgtgttgctgcatcacgttgttgacgttggtgaactgagcatcagcgttctgttgccattctcgcgtctaagctatgtgttcttcgaggttgtgctgaatttctcccgcttgcatctcaagggtgtccatcctcctagtgatttcacccaagtcccaacgagaggaacttgagcgccaccagttggagaacggaggcattgccacttgaactgngagaacgggagttcatgtttccccattgcacatcctgaggtgcttgccaccggttctcgctggtattctgccggggcgaacctccggtgttgtggtgtggagcttgagtccatctgggtgcatacccagttggctcccagtcatactcatacatctgcatgg

SEQ ID NO: 29142 - DNA, 385 bp, Oryza sativa
  unsure (1)..(385): unsure at all n locations
ctntctntattttccttcatatatcatttcctccatataccacttacattnntgcactatcttgatcttgagtatgtttagttatctgctttagtctatgtttntgacttagtaataaatgtgaatgcaactatgccttgtttgatccctacctagctctacatattaaaaccttagagtaggaataaaaaaggcaacaattggtgaggaattcattttgatacacttggagagactgagtgaattatttgaggaacttggctttctttngcaaaatcatttgaaaacttccggaataagagttgaataaagaatgggtgaatggtgctctaattactattatctttcaatcgctcaagggcaggaaaagcagtgtctcatggga

SEQ ID NO: 29143 - DNA, 424 bp, Oryza sativa
  unsure (1)..(424): unsure at all n locations
agcttgtngtgtttgaggcctggctgacatgccactgtgatatgcactatatattgtattntgatgccttcctgacttgctgtagtgatatgcactctatattgtagtttgaggccttcatgttacctgccactgtcttgaacctgtattttgaggcctatgttgcctggcactgtgatatgcactgtgtgcaacatgtgaacatgcagtgtgctgaaattagtccaaacttgtgaacatgcagtccatattgtgaaatattgctgatcatctgaacacatgccatgtgaaatatttgttgctgatcatctcaacttataccatgtgaaatatttgttgccgaaatatttgttgctgatcatctcaactaataccatctgaatgcacaaatttcctgtgaactcattntcctgtacttcttttt

SEQ ID NO: 29144 - DNA, 357 bp, Oryza sativa
  unsure (1)..(357): unsure at all n locations
nntttatagagatgtcttatatgacttcttttgtatttctaaatgcaaacgaacttaaaatcggactcaaacatggatctctattttcaaaagtgaacgaacttataaaatgcccaaatacggataacgtaccataataccgacaaaaacattttaatttttcgggaaggctaaatggttgtcgaatgatttttgataactaaatcattcatgttttaatatattcagaactggtgtttaatacgttatagcaaaatgttttatgagatgatttggntgtgtttcgaatttttaaaagattgaaaccttctcaatttacttggtgaaacattttcaatatgggttagtatatgaaac

SEQ ID NO: 29145 - DNA, 396 bp, Oryza sativa
  unsure (1)..(396): unsure at all n locations
agcttctcgggttcttggtctctgcccgatgcatctaggccaaccccgagaagatccgagctatagagcggatgcgccctccagcaaacttagggatgtgcaatgcgtcactggttgcatggccgccctaagtcggttcatatcgaggctgggagagaaggcgctacccttattcaagctcctcaaacgctccgggccgtttacttggacggaggaagctgaacgtgccctcactcagttgaaggcgtatctcagctctcccccagttctggtcgccccggagccaaatgagcctttgctactctacttagcggcgaccccgcaagtagttagtgcagcattnggtgtggagcgcgatgaggacaatcctcattccacgcatccncaccctgtgct

SEQ ID NO: 29146 - DNA, 384 bp, Oryza sativa
  unsure (1)..(384): unsure at all n locations
ctcagctanagcctgaatccctttatgcatatctggatttggatcctgtataacaaacatataggatgagtagtatctgatgtaaatataatactcgagaaaaattcaagcagtttataaatacgtatttcttctcttgttaattntgatttccccgagcagatgactcattacgtttaaacattctgcccgactagtcatagccaccaagcactgggagtcggcctaagcacttcccaaacatgcatatgagtgacatgagttcgtcattaatggaacaaagttttacggatcggagtttactactcgggtacttttgcaattattaagagcagaanataaattatcttatctctatgcttttgaattattccgaataatact

SEQ ID NO: 29147 - DNA, 489 bp, Oryza sativa
  unsure (1)..(489): unsure at all n locations
agcttgttcgtatctcacccatgatgaatatctatataaatggactcgaaggggtaatatttaattagtacttacatcgccgttggagaacaacttataggtctatgattgctntataaagaaaacaatggcacatataanagatcgaagaaggctcagtaaactgctaanatgagaattatgaatctcaccgtaagccattgcatagtcaggacgtgcctgcaccgcacgctgatatgatataatggcttcttgagacattcccatggtctggataaacaattatatcanaaaaagatccacttttgctctaaatcctcccaagctcttgcaggctctctggcaagatgcttgtatcataactcatgacataactctaccttataaacattcccttggttaagatatgcatcagcaaaagatgagcttaagttaacagcttcctgannatcanagaataagcatgtcatcacggaaatngaacactta

SEQ ID NO: 29148 - DNA, 399 bp, Oryza sativa
  unsure (1)..(399): unsure at all n locations
agctntntcattccggtcaataacatcgcacccgtgtgggccaatatatgccaatattggcattaattgccaaaggtcgccgcgcgaatccagaagtgtgtttntgccacgaacgcactcaatacactccaatatgtccaaaaatcatgtgttggtgcagtttgaactttttcattccggtcaaaaacatcgcacccgtgtgagccaatatatgccaatattggcattaattgacaaaagctcgccgcgcgaatcaagaagtaagtttttgccacgaacgcacacaatacactccaatatgtccaaaaatcatgttttggtgctctttgagctctttcattccgggtaanaacatcgcacccgtgtgggcaatatatgccaatattggcattaattgac

SEQ ID NO: 29149 - DNA, 368 bp, Oryza sativa
  unsure (1)..(368): unsure at all n locations
ngatcgatgtggtanggttcgttatggagctgagaatgatggtattngaagtangctacaacgttgtccccgagtatcgccaaattccccatgaccccaatgaggagaagtgtcatattcgcgtgacgttgactagtgatcgtgaagatcttccgtcaataatgttcgaagctggnggaagaaagtacagtcatgtttgtcaggaggcagccttggcggccattggagagcttcgtcatcgctttgatgatgagttagtcatcagctttccagtatcatccacacaagcctcatgatcaagagtatggaggttacacctgtcctgaagatgaagatagcaccactttgaagcgtgtcgagtgtatgat

SEQ ID NO: 29150 - DNA, 294 bp, Oryza sativa
ctctgcatacattgcttatgaaatcgagatcgaggaaatgactgttgaaagcactggtgatgactatggagttagatgtatccatgtagatgtggagatcatttttcgatcttgtcatctgacctcgcggagatgggcattctggtctacgatgatggggaaataatatttcaggtatctgactgtgtttcagctactgttgttttgagctgtgagtctttgtcacttaacacaccggtggctataatagaacgtcttgacagttgtgtagaaattgactcttcatcttgaaca

SEQ ID NO: 29151 - DNA, 370 bp, Oryza sativa
  unsure (1)..(370): unsure at all n locations
agcttggtgtctatatccctagattgtgagtntagatagctctgatgtttgaacgaaacttcagttccatgagagcagtcagtgacatgtttgatcaacatattagcggctacaaaatacagaactgccaactggtacggaatatatattgcgtttctttatccaatctcctttgatcatcacatatactgactagtgaaccattntattntgaacaaacagctcattttcccggttcaattagctagtgatacatgggcatgctacatttgtgacatgggagaaaaggcaaatgcacatattggaccctgtcttgaacaccgggaggtcttcgatgtgagtgctaagcaccgtctgatcagtaccatga

SEQ ID NO: 29152 - DNA, 315 bp, Oryza sativa
  unsure (1)..(315): unsure at all n locations
agttaggttaagtagtgaactcaccagttcctgatagacgacggcatcactttttgtctcaaatgtgacagagccgtccgggttgaccttaccccttgcccgcgcccagatgcgagctctatgttcanggatgtctgaaaacggggcagggacattcgctgctgcagcggctgcatcttcttgggcccatattgccttcttgacgatgtaccctgcggtgcccagccgatgcgggtgctcattccgctgttgcagtangcgatgtgcctcgcttgantccctaaactcttgggtggtcttgagagagcataattt

SEQ ID NO: 29153 - DNA, 299 bp, Oryza sativa
agcttctatcccgaggtggatatacaatcgatgctcatcgtcgtcgtcggtcgacgtcgcaaacgctagcacgtgtgtggttggctgatgccagatgccaccggttgtcgtcgaccatattcgtcacgcacgaatttattcttccaagacttagataaaattatcaataaactaatactatacaaactattaacaaaacttgcaacggcgacgtgctttgtcccacggtcatgcacgctgccactgaccatgttcccgttactgaaacagaagacgcgcgcagcacacatatctttgca

SEQ ID NO: 29154 - DNA, 276 bp, Oryza sativa
  unsure (1)..(276): unsure at all n locations
gggcgaggaggctttggcacagtctacaaggcaagtttaagagatggccaccctgtggccatcaaaaagctgacagtgtcaagcttggtcaagtcacaggacgaggttaaacggcaggctaagcttcttgganaggtgcggcaccataatgttgttaccctcagaggcttctactggacttcatcactgcagctcctcatctatgactctgtgcctggcggcaacctatatcagcacctgcatgagttctcagcagagagatcggcttatggatgg

SEQ ID NO: 29155 - DNA, 425 bp, Oryza sativa
  unsure (1)..(425): unsure at all n locations
gacatangagaggtatgtagcagtgttaagagtaaattgtccaatggcatgttctgcatgaaaggacgtttattttgtcaaaataatcgatctgctcctgtactcatgtggtaggttattctagagcaagaataaaatatcaggtcaattcggaaaatctgtaccagaccaataaaacgtcagagtttctggtcagaaaaatcattctcaggtttatctgctcaaaatgtatataaagagccttccctctgcaacaattcattgtgccaactgccaaggaactactctatgttttcagtaatgggggctcattcttcaacaacagcagcagctctggtcactggctttcttgccttggctacacttgtgagctgccacactgaaggtacagacagttagatgaactatctttgttatcatcatga

SEQ ID NO: 29156 - DNA, 322 bp, Oryza sativa
  unsure (1)..(322): unsure at all n locations
caattcattccctcaagtcattccccaataccaagtattttgcactcaacccaatcaaacaatacaagaacaacaaaacccaacattctaacaataccaattccaacagcaaatgccctaccaaaatactttcacaatatttggccaattccaaaatcagaataagcaatttccatcaacccaacacctccaattccatccaactcgtgctacagataccanaaaccctctaagccaaagtttacaaatggcaccatggccagcaaatttcaagttatccaacatcagcaaatacaaaggcgacgctgatccaaacgattat

SEQ ID NO: 29157 - DNA, 277 bp, Oryza sativa
  unsure (1)..(277): unsure at all n locations
aaaaagaaaagagagaaataaaaaaaaagaaaaaaggaataagaaaaaagagaaaaagaggaaaaaagaaanattaagaaaagaaaaaaataaaaaaaaaaaaagaggagaaaagaagagaagaaagaaaaagaaaaaagaaaaagaaaaaaaataaaaaaaaaaagataaaagataaaaaaaaaaagaaaaaaaaaaaggaaaaaaaagaaaagagaaaaaaaaaaaaaaaaaaaagaaaagggaaaaaaagaaaagaaaaaaaaaaagaaaaaag

SEQ ID NO: 29158 - DNA, 467 bp, Oryza sativa
  unsure (1)..(467): unsure at all n locations
ttaaagcacctgctgcatgcaagcttctattatctataaaaagagagaaacatagaagaacttcatattgaacctatacatggtaatgaggctgatattngacggagttcagttaaaatctacatccccaagacatcgattactgtgccgatactcttctctaatacaacataattacaacatgtccgggtatccacgtccctcaactggatagtctgtagctcaattattctcacacctcgtatcttgtttaagagatgacctaggataagagttcaactctacattgatcataaaatctactccctccatcctaaaaaagagcaattttgcactgttcgtatccaacatttgaccatttgtcttatttgaactttatatgaataacacattttgttgctattcgatgatagaacataaataaactttatgtgtgactatattttaaaaaaaattgataatttttc

SEQ ID NO: 29159 - DNA, 357 bp, Oryza sativa
  unsure (1)..(357): unsure at all n locations
tctttcccgctgcattngttatcttttatatttttgtcagatgtgggtctgtatgtcaacaattgtcgattgtgtaccctggctggtcctggacagggatttaatgcacattcagcttagaaattctggttcgagaatttctgggtgtgacaaatagataccttgatgacctgatcaaagctagccagtggcaagtagaatcccagttttgagtgaatggattgccaatcatggacggccggtgagtgagaagaggatggtgccttgccctcgtcatgctctgatcatgcagttggcctctggaccaatggagaaaatgcattgccatggaaaggagatgagaanggtgtggtacac

SEQ ID NO: 29160 - DNA, 408 bp, Oryza sativa
  unsure (1)..(408): unsure at all n locations
tgcagcatcaagctttaccaaaagacgctctgctaggctgaacttaagaagtagttctgaatttctgatgttttgtgattcttttggaaacatgtacttgtgattgtcagtcttggcaatgtggagatatatagctaacttctaagaggagattgttggttcacttgaatgagaggagtccttaatttacttattttcactgaacaacatatttgccattntgccccaaatgcccaaactagttagatgtacagtgataacacaagaaagctacctttgagatagctttttcttctctacaaggaatatatacaaatctatattatttcttgcatcatgtatcttaagcacagttttaattttcataattgatgattctactggtgggcaatatgacattcacttgtc

SEQ ID NO: 29161 - DNA, 377 bp, Oryza sativa
  unsure (1)..(377): unsure at all n locations
acacatganatattggagactggagcatttccgcttttcttctagctaacctacatgacaaaatcaaagatttcgtgagcattgttcacatgatcctttggccatgagcccatgattgagagcataataaaactccatcttaagaaagaatactggacattcaataaaaaaactaaatacatattatagaagaaacaatcgaaaaatactcgacaaaataaaattaatggaaaaagactatgattcantagtttcatctgccgtacagagacnaccttttattatagaaaagggtgagacaccacatgctgccaattgaatataaaaattgcatctatcatagctggttattcccagagaaatattaacacacatgt

SEQ ID NO: 29162 - DNA, 441 bp, Oryza sativa
  unsure (1)..(441): unsure at all n locations
aggatcatcanggaaacgtaaccctatatttgatcggaatgacagtgagaacaatagaaggtcagaaatccaaaagtcaccgtctaggttgaaatctgacattgaaactgctaaagttattggtacaagaatgcctgatggtgttgaaggctcatcggtttcactcacagaatcaaaaagcctgaggaaatctggaaccacttcaaatcgttttaaagttattcgtaaaaagattaaagctgctgtaaaggagaaccggaaagagcttgctcggattaccaagggatggagttttcataaactgccatatggacaaaagatggctgggttcatgaagagtccctccacagacaagtatgtccaggaggagaaacaaatgcgnaaatcatacttcattgcagaatcaatagacaagtattcaacactctatgaatcaatatc

SEQ ID NO: 29163 - DNA, 337 bp, Oryza sativa
ctgcagctgagcttcatcaacgtatggctacacctgcgtcggccactgctgcctctcccctttctccatacattgccagctttctggagtattaaattttcatgccctacatgtttagggtcgctgagtcgctaagagtcggagcttcaataaacttattagctcattttggaaaccttaaggcagttgcctcttccgctctccttaccgttcccttctcctacctagaacgacacaaccaggcaagtctcgggccaaagaaaaaccatcgccgagaaagctatactttccgaacctaactaacgttgaactctgaggtcttgaagaaagtcctggg

SEQ ID NO: 29164 - DNA, 352 bp, Oryza sativa
  unsure (1)..(352): unsure at all n locations
actaagctggtagggcacaaaccatctggcaccagaagaagcattactacgaacggctaacacaacctcgtcgtcacccaacttcagactgatcgctccgacggaagaaacgtgacgacatgacaaggatgtaacggtccgtgacaacggaatgatgatgacatcagaaccatggcttcatcgggagcatggaacgatcgcggcccatggcacattgaccatcccncaatcctgatcaccggacaaccgaggggctgacacatatctgacaaacgccaacctggctggacacacgaggagcgtaccgacgcatattgcacacactctatatgtcacagaggaacgacgacga

SEQ ID NO: 29165 - DNA, 458 bp, Oryza sativa
  unsure (1)..(458): unsure at all n locations
gcttggagagtntatgaggaccaagccacccacgttaccacagctgtttattctatggttgctgaggataggntaaggattattgagaagaagctgacccttgttcgagtacgtgaagccgataaagtgatcttcgcagcataccaactagaaggaccatccggagactggtgggacacttacaaagaggcccgagaagaggatgctggagaaccatactgggaggagttcactacggacttccgtgacaacttcgtgcctgctgccgtgatgcgaatgaagaagaatgagttcatgaggctacgacaagggaataccactatacaagagtacctgaaccgtttcactcaactagcgcgttacgcaactggagacctagccgatggtgaggaaaagatcgataangttatcgaacgcctgaacgacgagctgcgtgggtcatgattggcaggacatga

SEQ ID NO: 29166 - DNA, 417 bp, Oryza sativa
  unsure (1)..(417): unsure at all n locations
aacatcaccttctgaccatgtctgtatagttcttgctgctgccacgactcctccatcaacaaagttgttttcttctgangtcaatgcagctgcaacacattggatagttcaaatcacaggttccgaatcaaggcatgttgcagaatggttcgcaaggtcatgtgttcctagttcctaccatcgtggtagagctcatcatgcaagccagcaatgttgaagaccgacaggaacgagtcaagatgaatcttggcatcactccagaagttataagctcccaaggattctgtagtgtttgttgtgtcacacaaccatataagatgtcacatctnttttaataaaaaatatgacactgtagctgtttcatgcatggtatcgtattaacatgcctagccatctagcatagcagcacaacctatt

SEQ ID NO: 29167 - DNA, 341 bp, Oryza sativa
ctgagcagcaactttcggtcttggcttgtcgagcatcagccaccccaaagatacacttagagggatgctccctcatcaagcttaggatgtgcattgcttcaccggctgcatggacgtactaagtcgtttatatcgaggctcggtagagtaaggcgctacccttattaagctcttcaacgcttcggccggttacttggaggaagaggctgaacgtctcctcctcagtaaaggcgatataaatctccccatgtttggtcgcccggagccaaatgaacctcgctctctacttagcgcgacctcctagtggttaagcggtttggtcctgagcgcaagaggacaac

SEQ ID NO: 29168 - DNA, 431 bp, Oryza sativa
  unsure (1)..(431): unsure at all n locations
tatcattgtactttcctatcttgactatcaacatcatgttttcttcttgacgttgtcagtcgggggctatcatcataataatggagtgtgatattttatcaatttaaattgcttacttggtctatcattgccttgtctggttatttctacttagtctgcgaggactgaaagatcttaatagcttctttgggtttaggctcaacanagctcgataaaagcatttaagaaatcaaagactcggctagaactatcaagcacagcatatatacaccagtattgtacaaattaagcctccatttgttacattcatactcagtcaaaatcagntctgtcatcgtcagagttattgttgctcggctgaacgtcgttgttgcggaattgatctacaacgtcacttgctatctttgtagccgcattttgagcattactga

SEQ ID NO: 29169 - DNA, 403 bp, Oryza sativa
  unsure (1)..(403): unsure at all n locations
aatgcgaagaagctaaagaattgacgttgttatttgngctgaacaaaanaattcacgacatgcttgattgtccaagatatacatctctttctcatttgttacagctcgcttgcaattgctgaagtaaaatagaggaggacatgaagaagcaaccatgctatcgttttagtcttctattactaaccatttgcaggaagtgcataatcatgaaaaggaggagagagacatgatagagccgctagtcccattgatcacactcanagtcgaggcacctccattaatctgaagagggcatcataggtagacttaatggtgctgaaactaataaaggtgagtgtgttgtaatgaaatgaatcccgcactttttatgctatagcagagcaccattattggaccaactggt

SEQ ID NO: 29170 - DNA, 349 bp, Oryza sativa
  unsure (1)..(349): unsure at all n locations
ctaagctgatatactccttacagattgttccctgtctagttgttgtatatgttcatctaatcacgtgcatgatatgaaggaacaaatctagctcgcatgactcttttcattgcatcccaacgttggtgagtgttatttggattggaacgaacaaaatcactccaccaaatggatgcaaaatcagtgaactcactagtagcagccctaacacgtttattctcatgagaatcattgctagcaaatttctgatcaatggctaactcccatgtgagatatgcatcanggtcatattttccatcacagcaaggaatggtaaacttgatcttgcctaaagaatcatcattatcac

SEQ ID NO: 29171 - DNA, 465 bp, Oryza sativa
  unsure (1)..(465): unsure at all n locations
tagcttgcaaatgaatgactntcaagcatgccctatcttgttaactaaattacacaacacctgcccttatatgaatgtatnttgcttgattgaaaataagaacacgcaatgggagagttggctcaagttggtttacaggatcttacatgtacattgaaacttcctctacacgacattatatatattatgcgcatatatttatgcaggccttgtattcttcatgtcacaatctatactggacgcagaaaccagaaagggaatggctgtattcatcattgagcacaattaatctaacctgacgtccttttacctaggaagaccataactgtactaatcgacatttacgatgcttcaacggaacgtctgactctcgtgtccagctgatctatctatctcagcactcatatttaccaaattaatatccatcttacagattaattcgaacacgtacggggtgcgcgatct

SEQ ID NO: 29172 - DNA, 428 bp, Oryza sativa
  unsure (1)..(428): unsure at all n locations
ttctgagaattaactccatttggttgaattggaaggtggatatggagctattggtggtaatcaagggtctggcttctcggcatatgctgggagtggctctgctggatctggaggacccccagcgaatcttttgacacagatgagaanataacagagttgtttccaggtatcctagttcttcattcctttcggctgcagnggcccttatgcatgcaccannaaatgttcttcgtgcattagctgtagctatggtggaactcccagcacctggtaagttcaacctcgatatttgtacatcgaacacagtggctaatatggaactgactgacgaacatttntggaccacctatttctttcaacaagagatagatgagcagtgcgcatgcactgatcagaatctanagtaatacaaatattctatcatcctg

SEQ ID NO: 29173 - DNA, 493 bp, Oryza sativa
  unsure (1)..(493): unsure at all n locations
tctaagtcgactgcagcatgcaagcttatatgctgatgtggtacagtacagattgaactaataaaaccatggcaaacgccatgcaaactaaatatgaatagtactgggagaagtcaaatatggctcttgctgntgcatgctttcttgatccacgttacaaaacaagttctatagagtactatggtatgaagatttatgggttataagctgcagaataaattgatgagttcaatggggttatcaaaagattgtttgatgtttatgctactagtgcgtgtgcaacatcaaagaagaaaagtgctgaaatgcatgtgcatcaacttcaaaatcaatctgatcctgtcataatactgatgagttcgatgatatctntaatgagaatgacagtagccatgatcatgagcaacatttttaaagattcttgcttgagagaagtccgccaatttgtagtgataaaatcgagttacaaattcatggacaaccactgtactat

SEQ ID NO: 29174 - DNA, 450 bp, Oryza sativa
  unsure (1)..(450): unsure at all n locations
gagttgatgaatctaagatttggttaggctntggggtgagaacttctttgacccggccacatagaagtggaccaacaagagcactggctcagctacctgcaaaagaggtttcgttcagttctgttatgagccaatcaagcaaatcatcaacacttgcatgaatgaccagaaggacaagttgtggcctatgctgcagaagcttggtgtggtcatgaaggctgatgagaaggatcttatgggcaaggctctcatgaagcgtgttatgcaaacttggctgccagccagtaatgcacttcttgagatgatgatataccaccttccatctccttcgaaggcccagaagtaccgtgtggagaatctgtacgagggtcctcttgatgatgtctatgcaactgctatcaggaactgtgatccggaaaggtctctcatgctgtantgttccaagatgat

SEQ ID NO: 29175 - DNA, 415 bp, Oryza sativa
tagcttcaggaagagatgggttctaagctgaactatagtactgcttatcatccgcaaacagatggacaaactgagagggtgaatcagatttctgaagacatgttgagagcttgtgctttagatttcggtggaagttgggataagaatctaccttatgcagaattttatacaacaacagttatcaatctagtcttcagatggctccttacaaaacactgtatggtcggaagtgccgcactccgcttctgtgggatcaaacgggagaacgtctcggttttcggacggatattctaagggaagtagaagaaaaggtgaatatcattcaagacagattgcgtgtggtcaatcgcgtcataagagttatgccgacaatcgccgcagagatttgagtttgaagaaagagattatgtgtatc

SEQ ID NO: 29176 - DNA, 480 bp, Oryza sativa
  unsure (1)..(480): unsure at all n locations
ccttgaactcgcttacatatatactcttttgatgtttgaaataagtgctcatatttatattcttatatattgatctcttggaaaagtctccaatcgatattctttaatgaacagggtggagtaaaattgtaatttattgaaactagaaattgataggtacaaattactatgttatggatcaaccttaagaatcatggttgcaacttctgtgttttgtaatggataattaagtaccgattaagtatgcagccttcactactatacaataatacaaaaataatggccattggaaccgacttatccatggatagttcagactatgtcactagcggtttcttaacgaatcatctgtganaaatattttttacatgtggagaataaatgtaccttcatggctgaggccacactgngctcgtcacagcagggtgcaccttttattaacctacgtaaaagaaaatattactcggactatgaaagtaa

SEQ ID NO: 29177 - DNA, 485 bp, Oryza sativa
  unsure (1)..(485): unsure at all n locations
agcttncatcttttcaatcctaaaccttatcaccagcgtcgacccatgtccttcagagacaagcctgtagcattcatcctctagctccctgatacgaccatcaatcctgctgatctgcacatatatataagccatccataaaataccatcacgatctgctcattaacgcatgaacatctatcacaagagatggatgaaatcgatccatcaaatcggaacaaggatatatatataaacctcatgctccaggcgtctcgggagctggtccagcagcggttgccgtcgcagtggcggcctcngtggctgctgcggcagcggaggcggcgccgccggagctgcagcctggttgttgttcccctgaggcagccgcatggattaaagctcgcttgctacggatagaagataaattgggtggatgatagaagatggatctgttgttgggtgttcatatatgacgganatcgagatggctgcattaactcatg

SEQ ID NO: 29178 - DNA, 267 bp, Oryza sativa
  unsure (1)..(267): unsure at all n locations
tgccagaggggaacaatttacctcagacgacatatgaagcgaagcaagtattatgtccgttgggcccggaggtcataagaattcatgcatgtccgaacgactgcattttgtattacaaggaatacgctgacttggatgtctgccctatctgtggggcatcaagatacaaaccagcanagagtgaaggtgaatgaagtatgtcatagaggggaggcccagcaaaggtggtgtggtatctcccaattgcggagcgcatgaagagaatgt

SEQ ID NO: 29179 - DNA, 476 bp, Oryza sativa
agcttacaacccgtgacagatacagacggcaaggaacaatatccacaccgcgagtggttcaagtatggatattaagcatataggtcaatctactattcgtacccctacacgcaatctatatttgagagatattcttcatgttcctagaaccagaaagaatcttatatctgcacatcgccttgccgttgataatcatgtctttggtgaagttcaccctccggcttttgctattaaggatcaaatcacgaagaacactcttcttagaggaccctggtgtaatggactctatcctctaccagccttcacgtcttcattcaagcgagtcttaagagctatcaagcccactgtctcaatatggcatagtcgtctagggcatccttatgcaaattgttcaaaaggcgcgagcataatatctcccaggctaagagagcaaaagagtaggtgtggtgatgatgtcaaagggacaagcatcactt

SEQ ID NO: 29180 - DNA, 337 bp, Oryza sativa
  unsure (1)..(337): unsure at all n locations
ctcatcttgcagttttcgatcacaagctcctccaatgcaggcattgcatgcacactatttagttgntgatcccactcccactcctcccactccaccatgcctatcagattcatcctcttcagcctcgggaaggcatgagcttggcggagttggctcgatgatggtagtatagttaggaattcanggccaacacgcttggttgcaggggcatgggtgagctgaaagtaatacagagacggaagtcggcagaggccatctgggagttggttgcagcaagcgaggtcatccatgatcaccatcgacaacctctcatatgcacctgctactcttgacatca

SEQ ID NO: 29181 - DNA, 416 bp, Oryza sativa
  unsure (1)..(416): unsure at all n locations
cagcttctggcatnntttctccagatatatttcttttgtgtgctctgtattgctatgatatttatgcataacagatactggtgattcagatattatgtggcaataaatagcctatcgataaccattgattgcaactaatcttctatcagtaaaaaaatatgtacttgtaacagttgcatccaaattagtctgtctctatatagttccctgtgacctgtcagatctagaagtggttacatgatatatggtagtanggtaatatgaagctaagccttatggttgcagatgtgctggtgttctaagctggtatgatgtctgttgtgcatgtgcaaaaacgagttctacttactgtattagagttccgagcaaatatcttttactatatttcaatgcataagaatcctagtgatcaatat

SEQ ID NO: 29182 - DNA, 478 bp, Oryza sativa
  unsure (1)..(478): unsure at all n locations
gcatgacatggacttgaattcctgtttaatgccgagcaatcaatattcatgagatagtcaatgtcacattggtcgattccggtctttagtaagtcagtgttcaccaagcaagctggagcaccggcccaggtcgtggcagtacttgtgatatttctacttgggacgcattttatttggatgttntatggatgttaaataccattagacgggctactttttattggcattggaaagtggaaacacatcacattatggcagnggcaacgcttcacaattaatgccgaagacgacaagcgtcacttttcaaaaggaaggagtgcggctgactgaatccatccataanaactgtcaggaaacgaagttcgtcctagtgcaggttntgctcgagcaacctcttttttcttcttctttcttttntgtgcttgctaatatagttcattggntaaacacacnatatgtttatcaatacaacatgtaa

SEQ ID NO: 29183 - DNA, 457 bp, Oryza sativa
  unsure (1)..(457): unsure at all n locations
agctntactgtntgacaccttttaagatgcattgtaccaactctctaaaagttgagtaactgcggtataaaaggattttaaggtattgggcacttgatcacgcgcactatggcctaagcgaaaagtgcctaagtccctaaaagaacgtgacacgccacacctgtaaatatgggctgcaaacatattaggcctaggccaaaaaatatgccttcgacaccctttaaaggatgacgcatgtaacatgctcctgagtaataaatctttcgggtaatatagaccaggtgtagctcatatgaacagtttctgatctgagtgattatcccttaggagatactccaaaatatatataataattgaatcccgactggcgcaagtattcggttgatagcccttacggagaataataatttgtccagtctttgagcatagaaaatagacccatgatcatgaattcatg

SEQ ID NO: 29184 - DNA, 426 bp, Oryza sativa
  unsure (1)..(426): unsure at all n locations
tatcgacangggtttntctggcctactgtggtatctgatgctgataaatgtgtgcgaacatgtgaaggttgtcagttctttgccagacagattcatctaccagctcangagtngcaaactatccctccctcctggcctttatgcggtatggggcttgatattggtggtcctttcaaaaaggtcaccggtggtttcactcatctttatgtagctgtggataagttctccaagtggattgaagctaaaccagtcgtcacaattacagctgacaaagctcgagatttcttcatcagcatcgntcaccgatttggagtacctaatcgtatcattacggataatggaacccaatntactggcgatgtgtttaaggaattttgtgaagactatggtatcaagaattgttatgcatccgtagcacatcctatg

SEQ ID NO: 29185 - DNA, 422 bp, Oryza sativa
gactgtcgacagccacgacgcggccagtcttatgttttacgggtggaggaggaagaaccggctctgcttctatcttacgcacgcatcgagctaactccagcggcaccggccgcagcggctttcctccaccttgatgagccgaatgtactcgtctccctctgctacggctacagcaacgacaaggctgatgggtggtacctcgacaccggcgccacccatcacatgaccggccgaccggagttcttcaccgagttctactcccgcgatcgaggctccgtcaagttcagcgacgcctacggcgcggagattcaaggtgatggctccgtcaccttcaccgccaagtccggtgagcacaggactgctacacggagtctactacattcccgcgttgaggaattcatcctcaccggagaaactggatg

SEQ ID NO: 29186 - DNA, 446 bp, Oryza sativa
  unsure (1)..(446): unsure at all n locations
tagctctgctgaatataattgttattacattctctgtggntaattatactctctggaatattctcggatttttcagagctcaattactaattttaataatacaaagagcatttcaacaattatttacatattaaattaatcattaaatggtctgtncatatatttttaaatacttatagtgttcaagtactttctgattattcttgaactattcgagaattggaagtatttttaacaattcaagcattatcttagtgattaatctaattggaaaagtaaattaaattccctcttccttttcgtgctgaaactggaaaagactatctgttgtcctcagcccgtcctttctctttgcctatctctgctttcttactggctgcttattcttcatggaaaacaatatcttttcctttcatttttctattcggcaaacaaaagtctactat

SEQ ID NO: 29187 - DNA, 282 bp, Oryza sativa
gccgaatagagacttgcgactcgattctactttaagagatgttctgcaacagcgtgatttggtaatgtaccgacactccgggtcagatcattacttgtcggctcccagagccattccactagatttatccgcttccagagccttattcatttctcggactcccagaggccagctgcccagtagtacaacaatccgctttcactctggaagcctagactatgatgcacggagatatcccgaatccacagattcgttcttgacactcaggcatgcatatgcaca

SEQ ID NO: 29188 - DNA, 349 bp, Oryza sativa
  unsure (1)..(349): unsure at all n locations
agctttgataacggacatgatattcacatgctagctgtcccatctcatgctgaacttttattcaagagttntaagatcaaaaaggagaaattgaaatctgaaaacaaagattagattatggagaaatatgggaatgctgcatctgaagaaccaatccctcgggagcttcttcttggacaaagtgaacaagagattgaatatgaccgaactggtcgaataatcaaaggacaggttggtatacaatactaattactgtcgattacacttctatagcttcttgctcaataagtatttcttcctaggatgctaagatgtattaggttcaacctaatcttctggcatccttcaa

SEQ ID NO: 29189 - DNA, 396 bp, Oryza sativa
  unsure (1)..(396): unsure at all n locations
atgagaataaagtcttgacaaggatggcaaatatctctgtataaacatggntcaaccgaatggtcacaagtgttgatgttggctcaagcattgaccccaagttggatggcgcaaggcaaaggtataatggagctaagaatggtttcttagtctttttcccggtcttggtggttggtgtagaccggatttactagatatgtgccgtactatcaagaggggtatatgaagcgagcatgtggatgattttgtgccatattagttcatatgcatataggtgcattttgtgggcttgtctagccaagtgtggtgagttntatcaagtcccaaacaaagagagaagtgggcacatcctatatgtttggttagcctcatgtggttatgtccggcggagtattc

SEQ ID NO: 29190 - DNA, 355 bp, Oryza sativa
  unsure (1)..(355): unsure at all n locations
agcttatgctctagtaagtagctctggtttcctttntttttttcatattgcttgaagcaatactgttatttctacatccttgtatatacaaaaactaattgtcagaactccaggttggaatggctgctacactagcttcagtctgttcagtcccactgacctcagtgctgcttctctttgaactgacaaaggactacaggattttgcttcctctcatggtaagtatgactggttatgtagtgtgcccattggtttgtttagatataactttctcttttgcacatcatgatgtctacaagaggacatatatgttgtgagtnttatgttcactattgcattatcaaaactaatgcac

SEQ ID NO: 29191 - DNA, 339 bp, Oryza sativa
catcaatttaatcttacttgctctggtgaactattgacttacccatttgcctatttatgtaaatagctggttgcacacattgcttctgatgcaacccttaagccattgggccactttgctgaagcatccgatgctcatagttattcaccaatctgtgctggcgactacgtcgaacaggaactatcagtaatcaatctgaaaggaaagaatggattctagacgttatgcacaattctcgttaaccttacaattcatatgatcagcaaacggaacaacagtccacgctgatatgtatattcattgctggaggctcacatgctgaaactgttgggttgttcc

SEQ ID NO: 29192 - DNA, 459 bp, Oryza sativa
  unsure (1)..(459): unsure at all n locations
agcttgacttttgattcaattctggtgaattagacttgtaacggcgaattccctttttacctccttggggatgataccttattggaggcttggagcaagagtttgatctaccaaaagcgtgtnggttttatttgtgtttgctacatcctctctttgattgcttccgcacgtgtaccaagttatacgaacatcatacatatgcctacctcaccctcatggcctcacaccggtcaccaatccatcagggcatagatatttctttgaagcatgaatatgcataaggtccaaagcacatgtaggatgttcatgtacatgtaatttccatcaaaaaggggtttccccttcaaaagatagaaatgtccttgaaatgtcatacaggtgggggctggttttcttctttatatagatattttctcctttttttttaaaaaaaaacaaagtcaaattcacattaaatga

SEQ ID NO: 29193 - DNA, 338 bp, Oryza sativa
  unsure (1)..(338): unsure at all n locations
ttctactggcgacactggaaggagaagagttcgaccattcctggaacgctgcctctcttaaacgtttctatgtctagaacaggtggcacccaaatcgccaatttgtaaaaacgtatatatctgtatgtaagcccttcggcactatgtaagcctttcggcaaagaataaaaagaaaaaaaaagaggaaaatgaacaaagacaaaaaaaatggatgtatggctattatccatcacggaggcccgaaccagtataaaacctctgtgtcctccgccttctttttatntacttgtgtgattgataaattgtggagaaactccaaggcaaacgcctgatcagcg

SEQ ID NO: 29194 - DNA, 365 bp, Oryza sativa
atgtatggacgtatattgctaatgttctgtgctaagtaattcctaagatattttgctctgagacaataatgcataataaaattgcaatgtataactcaagtacttgcaatccggtttgggttgattgagtttgctttacataagcgactagttagcttcttcctgtttcattatctaatgagtgtgattgatttactcaaatcatggtgttgagggatattaagaactgcacttgacatcacagtgtcgctggtctactgcaataatgaaacatgaattgttctctctagtcatggacctcatgggtgcgtatattcacgcatggtgactctaaaatatagtcgtcttaaggtcgaactcttaaa

SEQ ID NO: 29195 - DNA, 483 bp, Oryza sativa
  unsure (1)..(483): unsure at all n locations
ctaagctcacgtgcctatgatgaacttagtcctatgtcagactttatttctatttctanactttaatcctttctgtgagtttctggattcactctcacaacggaaatggctgtatttcatcaagatagtaactttggtgaagaatgtacactgaatcagttcatttagacgaagcattgtctctagctgataagcagaagatgttctcaagctgatcatgctttctgagaacctgcacctattgactaatctaatctgcatgattggtaaatgtttttcggttgtcacgattctccatatgagtatacttattatcagtcatacgctngatgcagcagtatatactaatattttcaagctttcaagattcagctacaacagtgccagaacctgtccagggagtgaaactaatctctctgtggatgaaaatattgactcatcctcattcatggcaatctggcctgaatatagccataattcatg

SEQ ID NO: 29196 - DNA, 404 bp, Oryza sativa
  unsure (1)..(404): unsure at all n locations
agcttcttcagtgatgcgctagtggaggatgatntgccgagatccatcgccgatcggagatcgccggagaaagggttgaggtcgactaactagggtttcttgtgggaacgaagaagacgaagaacgcttgcaggcgggaggttttcttcacaataggcagacttccatatggatccccaaaattcctttatatagacgcactaccgacggtgcgaattccaaggaaaggagagagatagccgccggatatttctgggtccgttacgcgcggcagntntttggacttcagtttaaattcactcgtaaccgctgggcttcacatggtgttctcgactacgtcctgtctctacggttctcacacccgggacgactatatcctcaacacaagaagtcacgaatggtta

SEQ ID NO: 29197 - DNA, 450 bp, Oryza sativa
  unsure (1)..(450): unsure at all n locations
ctagctccttcaactggcccagttcntgaattcctataacttatgtgtgttttaatctttaaattaatttgtatattcttcgtttcgtgataagagttgtgcttttattaacgtatggttctgaagtttgtcttcctaccctttggtaggctttcttgtggtttgtatctgtgtgtggcacaattaaggtccagcttattggtgcctagatttggaagtgaagcacacaattaattcgactgaagtgaggtcctaactttttccatctttgagccagaagtttcaatgagtcgtcttcatggcaatgacatatgatatccagttcagtcaccctactggttntagtagatatattatgggatactgttgatactcgcgaggaatcatcttgatgtaaaaaacttgagatggaaaagggaagtgaggaatatatatcgttttatgactctg

SEQ ID NO: 29198 - DNA, 482 bp, Oryza sativa
  unsure (1)..(482): unsure at all n locations
caagcttaaacttctcccaatcatggctaatgatagagactattttgttaattggctacactgacccagaggaacattttactgaattattattgcgtttaactgggaagttcgggaactggaattcccttcttgctagtgctagttctatttacagtggaatcaatagcataatttgatttggttatactctgttacttgtacgatttataagcattctattgaacctctaaaaaactttataatggatatagagagatagagatagatagagagagagagagagaggacatatcctatcccgtgccatttcttgcaatgtcaggtatattgacgtattgtctccattgctttctgctgatgaagttacaataaatgacaagagtctgtttattacttatctggacctatttattgtatactcaaataaaattttgcanatggtatcatcatttgttttatgcggtttggttcaatctgta

SEQ ID NO: 29199 - DNA, 454 bp, Oryza sativa
  unsure (1)..(454): unsure at all n locations
ttgtgagagcacgggcaggagaatagcaagagctngacagggtncaaccattcggggcgcgccgcgcgggcgtacattacaaacggggcgttgcaattgcattgcaactggttgcctttacgccgggctgccaagttggttgcccccaccctgcactgcaccgcgctggggtttactacccaacgcaccctactttttttcgtcggaagacttttgtttgaaaactattactccctccgtcaatagaaaataaatctagtattaaatgtgacacgtcctaatatacgaatctaaaatggttagattcgaggaatatgatacattacattctatactatattcaatttatgtgaataactaactatttgccctcttacaggtagttctaaagaatctatcactgaactcacgggtcataacatatgagagcctattatcataataatatctaaaa

SEQ ID NO: 29200 - DNA, 330 bp, Oryza sativa
  unsure (1)..(330): unsure at all n locations
gtacaggctgcgcggttttgtgcctgccacaattgtacagcagctagcactatcgaaatgcaactcgcagcagccagcagtagcaacaatgtagtaccagcacagtatatgatgatacgagtacgggtgatcaaaatgacaagttcacgaggccaaaagactcgcagtttgcatgtcaatcgcgcggcggcccatcggacgaatgacatacaccacggctgcagcctgaaggcagcggtggccaggcctggagagcaacangtgtccatcttggcatatgcagccatatgcagagggagacatgagatgagagcaccggcgtcgtattct

SEQ ID NO: 29201 - DNA, 365 bp, Oryza sativa
gagaagccaatgcaatgcaatgcattagtatcacttcttgctagttcaattagccctgttaattaaattattctggggtattgcttatatttatgtattgcttgtttattattttggattgatctatcaagattcaagaaccatttgtcttgttgagacgggtgtttgatgatgattagtagtgggtccaaattatgagggccaagataaaaggagtttgagagagaaggggaggatttgtacagttgatcatcttgatttatgctgttgcactcgtaattaattctagtttatttttcattctttccatgtgtgttctactagtactagtggatatctctctctctctcttaaatttatttttt

SEQ ID NO: 29202 - DNA, 469 bp, Oryza sativa
  unsure (1)..(469): unsure at all n locations
tgcgagcgaaggtcgattagagctccacattcaaagcaacgatttggaccacctcttctcctgtacctaacattgctcatagctcgagccaacttgttaatgaccaaagccaagtcctcctccttgaactatttgagttgctcatcgaacatagcattaattaaagaaagaatagtatatttcaacgaagaagcaccaacattcatagaattcgaagaagataccaaagcactagaattagaatcaactctacgagaaagaatattcatctcatggtgtttgagttttgtgaaagcgaatccaatgtcaacttagacatatcaacagactcttgaattgatgtaactctcatctcccanattgacatgtcaagaccattcaaaaaatgacgagacaccttatattgtgtgtatttatatcataggaagaatcaacagatctaagatcactccagattttggttgaacct

SEQ ID NO: 29203 - DNA, 392 bp, Oryza sativa
actaagctcttctaattctctcttaataagtttccaatctttactagtatgttttctaaagtgcatcggaattccaagatatttaaaaggaaaggcacctaacttacaaccaaagataccagaatattgctcataacattcctttgcctgaccaaaacaaaataattcactcttgtgaaaatttatttttaggctacgtaacttttcaaagacagattaaatcaatttcagattctttgcctgttgcaagtcatgctccaaaaagatgatagtatcatatgcgtattgcaagatagacaaaccatcgtcaacaagatggggaataatcccattcaatagtcccacctctttagccatcttgatcaatagaagaagcatgtcagctactatat

SEQ ID NO: 29204 - DNA, 380 bp, Oryza sativa
  unsure (1)..(380): unsure at all n locations
gccggagaactcgaggtgttttattgtggaaaggttttggttatagcggtgaatacggaagtgacgccgtgaaacgagaagagcggtggttactatttaaatgagagcgcggttacggccaaaacggaatcggntttggaaaccctatatcggcctcgganaagaaatttgagcatatcccgtacacaaatatagcggacttggggatctgtagaccggctttccttctctctcttctctcttctctatatatatttacagctgacttatagcctgctattgttctcgctcttagcgcaccgcagttaagcggtcaaagtatggccatgtctattgcaattaatgcaagccggtgcatatgcataggaaacccatgtagt

SEQ ID NO: 29205 - DNA, 380 bp, Oryza sativa
  unsure (1)..(380): unsure at all n locations
attgccagagaattgaagggctttgtggtggtggtgactaactcgcgtagggttacgatttatatttgttcagtaaattgtatctttttatgggtttaagttntaatgcaaatcctggcggaaatgtctttttcaactagaaaaaaccatcacattntgctattaaatcttcatatgttcacttaatccgttccaatatactatgttgttctggagaaacctcacccaattgccaatctaaaatccatgctagcaagggtgctgatgtattcatatgtgattcttgactacaattcagtcagaacaattctatacccgcaatgtatttaaaaatcacgatagtttgtacacaatgacaattggtcaacaaaaaaaatcat

SEQ ID NO: 29206 - DNA, 428 bp, Oryza sativa
  unsure (1)..(428): unsure at all n locations
tcatcacacatatacaattctatatgcatataagtttgatgtactgttcaacttatataatccaacctagaaattattaagtgatcctctagattcctggggaagttaacaagctaccttagtgttcatggaatcgtgattgttcccttcangggcaggcccaggaatttaagaatgggtattcgaaatggaaagggggtaaaaaatattttttacaacatgagcacaatattnggtacgtataatcaacaatatgggcgacaaactcgatcccgtttctgaacgaacacgctacttatccccgcanatcgcagcaccacgtctcatctggttatcaaccgtgccgaaacccggttaatctcgccgagaaggctaatccctacatgcgaatcgtagaacacaagcaagaacgagatagaatgcaacac

SEQ ID NO: 29207 - DNA, 477 bp, Oryza sativa
  unsure (1)..(477): unsure at all n locations
tgtattgtctagctagctatcttacacattggtttctcttgttattatgctaactcagtagcaacacgcggagtgttacatagtatatataaatgccagccggccagccggtacactctangagaaaatgcatgcgtactaacgtcatattcagttcggtgcaaatctacatcatcaaggtacgtatgtacaacacctaaattcttatatatactggttgtggcaaactgcaagctaattaattaactatatggccgtccaaatatgattcttagcgccttcntttttattcgtgggagattcttagagcctttgcttcttataaaatgagaccttgaatatacaatataggacatgtacttttttaaattangatgtacgtacatatacaattaattaacatttgatacantttctcttcgagtgaaagtctgaagtactcaaatgctcacngtgttttcccatggacatatacta

SEQ ID NO: 29208 - DNA, 357 bp, Oryza sativa
  unsure (1)..(357): unsure at all n locations
agcntaacctctatgtgatatccaattgacacacttgcattaattgtgcatctccagtgtggcttgctgaatacagtggttgtactcattactgctcaaactttgcccactcagtaagagacagctttggagaagatgtcttaagtggagtcctggcttatacctcagatgagcgcctgtgaagatggatccgtaagccgatattccgcatgtagttattcttgatagtcatgcctgaaatgcccttgcaataatggaagatataatcgatataataaagatgtgtcttattattcatgtttgtgaggtgcaccccggctctttctgggaccgggatatatacactatccgttcgga

SEQ ID NO: 29209 - DNA, 495 bp, Oryza sativa
  unsure (1)..(495): unsure at all n locations
atgatgaggaaacaatcatcacgcctttatatggacaataatcacatcaagggtcgtctatggaccggacctcangtcagctgcaatctccttgggcccgacttagagaatacggtgatgtatatatcccttgttttttggggcccaagtgttaaattgctctcatttcactagccttgtaattccctgaaaccacaaactataattcatatattgcttgaagctcgcaactaccacctcctanaaaagataagtacatggccagtatgatctaccatcgcttcctttgaggttattcaagaataagattggacattacactcacaaaaccatccaatctaatatattatgtggcatggtaagcatcacgaacaatattggaatatggatatatngctcgttgtgaccctagtatggtattccatatcaaggactagaacatgttaaatatgtgtcccattgtgcactaggaacaaagtataaacaatgtacatg

SEQ ID NO: 29210 - DNA, 413 bp, Oryza sativa
  unsure (1)..(413): unsure at all n locations
agctngacttattctatacaaaatgtgaatactttttctcaacaaatattnttntccatggagacagtacgccatgcctactaattttatcacctttatatacaataggtatctatactacacttatcatacacacattgtgtctacatatcttgagcccgctactcctatctctcctctttgatcttctcgaaatgtctttataactggcttatnagttgctattatacctgctctgacatgtgcatctagcgcctaaacgtcaatgagtattagagacaaatactggatcacataatctttttggaaataaggaactgccccttttattaaagtgcagttggctaacacatatacattttttttaacantcggatccatgtacttgatcctattaaacatagaatcaatca

SEQ ID NO: 29211 - DNA, 249 bp, Oryza sativa
cggacacggagccacccccgtactgtctcccgccctcacccaactagcggagaacctcaaggcaagatcgaactccatcacgtgatgaaggcgcaatggacgccctctcttagcacgcgaccccagggcctcagcacggccctcactaccccctgccgaccgactcaccacgtgtgacagggcacttgcatacgcgacccaggctgggcgctccacaacttggcgtacacgctctgttagcgagccgca

SEQ ID NO: 29212 - DNA, 458 bp, Oryza sativa
  unsure (1)..(458): unsure at all n locations
atgatttccctgttagctgacaagctcttattttctttggttagattaactatccatctagagctattatttactgaaagctcgtgcaaggaatgacactataaaaattgaccacagtgtgaaagaaagggctgcgcggcttacccattatgcgagagtatgattttncaatatgtttatataattgaaccatccatgtgctgtacttgttgatcctttctacctctatgtactttagccttgtacctctggatgcatattcagatattagaggaacatgctcatgctaacttgaagaaagcacctgatcagcattggagccatggtgctatggaagtctgggctagttctactggcctcactctcatttgctggaactagttgaaacatcttgagcgatatatagcttgtcaaatgtttctggagtaccgatgttgataattaccagggttaccctc

SEQ ID NO: 29213 - DNA, 412 bp, Oryza sativa
  unsure (1)..(412): unsure at all n locations
taaacaagaccttagataacacacatgcacaagtttgaagaatacacatgcactntactcttaccgctggcaagatataaacggtgacactgggccatgttcgtttcttctgcaagcagaagaattaaatttggatactcgtggcacactttttaaacggataaaggtgcgtttcgtgcgaaaactttctatataaaagttgctctaaaatatcatactaatctatnttttaagtttgtaataattaacactcaattaatcacatgttattaccatctcgttttacgtgaaacacttaattnttataaacattttcatcttcatcgtctaacgggagaggtaccccgtgtgaccacgttcatctcggcgagcaaaaatatgacangccgataatttcaaactanatatactc

SEQ ID NO: 29214 - DNA, 409 bp, Oryza sativa
atccgaaagatagcttaatcttcttaacacgtgtgaatgggaactataagctaactgtgactgtttgagttgcaactctctcattggaagccctatttcaaattccttgagttcgttcgaacgatcaacggcattaagaatgcgattatcagcttcacgagaggatctgctatgccgaagatgcgttaactgctgattgtcactcgcaaagagaactagttgacatttcactgtggtcacaaggtcatgctctattctgtttggctgaatttgaaatcagatgagctcaagctgtcacagccacagaatcatcatgttaataaaacattcggaatatacttctctcattccaggattcattacaagaaaagcgtctaaagtgctgtgaaagattttcaaattttgatga

SEQ ID NO: 29215 - DNA, 435 bp, Oryza sativa
  unsure (1)..(435): unsure at all n locations
ctactcatatacattataatgttttatacgctggatggttccctataaatccgntataacatttcaaacgctggatgttcttgtatgtatcgttgcagagacgacctctatgcggacatgctcagagaacccgatgaaataaccataaagaggaggcaaatacgtgacaccctcaaggtccttcagcaagcatacaaggtatgttntgtcagaactaagttttccattttaatagcatttcatactgattgatctaacattaaattatttattggccttgtgacatgcttcagaacttggatgagataccacttgaagcggacacagttgagagaggctattccctgtatgccgatgcaacagggtctaccagggctcatgggctttcttcatccttccaagatggaagctcgccatattcgaccccaaagcaac

SEQ ID NO: 29216 - DNA, 416 bp, Oryza sativa
agcttcatactttgtccgcatgagaatagagattctgtgcgtggttctagtgtgctcctggctgtgaagaacatatcataaaaaaatatatataataaaaagttgtgcctttcttctcagcactagagagagccaaataacataacaataaatttaatgaggatacagcgagcacaccacaccattcctccctttgttaccacctatcaccacccggtcttgatttcgttgcttgttgggtttgagtattgggcgccctttgggtaagctcgctcttacttgactacctaggaccacactgacactataccctagacgataattaatttgcttggctaacgtggttctaatttctttgacattgctttaacccacaacagctcaccacaaccgatacagttgacaggtttgtgtac

SEQ ID NO: 29217 - DNA, 387 bp, Oryza sativa
  unsure (1)..(387): unsure at all n locations
ttatgtcaaggatgaagggctcacgcctccaaggatatccaccggacatactcacaagatgtcactcactcctattggacatgcccacttctctctttgtttaggacatgagaaaattcatcacacatggctagacaagcccaccaaatgcacctacatgcatatgaactaatatggcacaagatcatccacgtgctcgcttcatagacccctcttgatagtatggcgcctatatagcanatccggtctacaccaaacacgaagaccgtggaaaagactaagaaaacatcttcgctcgattatacctttgccttgcgccatccaacttggggtcaatgcttgaaccangatcaacacatgtgactatttcagtgaaatctgttatgc

SEQ ID NO: 29218 - DNA, 466 bp, Oryza sativa
  unsure (1)..(466): unsure at all n locations
gttattatacagagatngcatcgcattagatgtttctgcttgtatatcactcacgaaatggaaggacaaagatactattatcatatcaacaatttaacatcaagtgaccaccataacttcatgtntgattgtaagtttcagtacagagttctttatgtgctacaataaaataaaatgtccagctaatagttatattaggacagactggatgtttccagttctctggtatactgatgttctccccaatatgatgcaaatttctgccccgatccgtatagtcactgtattttgccacgataacattctagaattgttctacggcaactttannggacatttagttccatgaatctgtcctgttctgaatgtcagacttacatggtggctttattgtccactatttntgaaacgatgctttttctgagcgcatgtgtatctctatatcattattctctaaacaatatat

SEQ ID NO: 29219 - DNA, 368 bp, Oryza sativa
  unsure (1)..(368): unsure at all n locations
agcttgaccatctttgatctgaccggttctttgagggttacgcttcacaggnttttgaccggaggagatgaccaagcatcatgtacttattgttcctgacgattctcttgtttcagttgcgtcaattctgacatccatgggccatctgcttcttcaagaaattaattgtgatatcatcggtgcttatctgatgcgaatttcgccgctaattccatttttttattaatgctttggtttcatttgaatatccgatgcataagagagggagagcccttttgacagttcagtcgcactccatttggaaaatacgctgattaagataatgaccatgattacaaacaaatataagcaggtggagtacctatttg

SEQ ID NO: 29220 - DNA, 405 bp, Oryza sativa
  unsure (1)..(405): unsure at all n locations
aacatatggaagagtaatatctatcagctctcaggctgngtattatgaaacatatggaagagtaagggttgggaaccattacctcttagtattaaaaaaacagagcaatgaattagtacatactcccttcggtgtcattctaattaaccgtttgaataatgacactgtctacaaaacatacctttgaccttanttttctattataatatatataataaataaatacgcgtttactcttattatagtgggtaattttgaaagacacatatatatatattgttctagtatctttgaactaaatattcttagttattgatgaacaaagatatataaaggttgatctcaatcttgtccacaacgtcaattattatagaaccgcgaggaaagttaattaagtttagtaaa

SEQ ID NO: 29221 - DNA, 352 bp, Oryza sativa
  unsure (1)..(352): unsure at all n locations
tagagaaacagctctccaactctatgacttgctgttctgatattgagcgggaaaacgaaggcctnccgctatgagaagatgacctgctaagctcanggctagtctgtgttgccacatcttttctcgaaagttcagggttactgctggtggtcaaatctgttgtgattccgaactgttcatctgtgcaagctgcaaaatgaaaacagtttctgaataataattactagcttctagcttcccaattttgagcgttatttgcatatggtgaaagaactatctatgagtggattctaattaataattataatcatgttgtgtaccaacatgcttattgacaaaatactttgcataa

SEQ ID NO: 29222 - DNA, 421 bp, Oryza sativa
gttgcgtgactgacatgctggagtactttctgtgtttggcacttgtacgccaaatgacccattccttgactactgaagctacatatatacttccggactcggcattttctgtctaattatgaatcctctgtcctggcactggagttaggctgaaactggaatcatggcgaggatttgtgataccttgatgcttgtcgtcattacaacgggcgtgatggttggcaccttcttcgtaacaaaaactgaaccacaatcttttgtcatgatcctaccttcacaaagaacaagtgatctgctcgtgaacacctatgggaggaggcttcctcacatgaacgcatgagaggcacacatctgcaatatgaccgatttctcacgagacatgcctaagactattattctggtaaactgggaactcgattta

SEQ ID NO: 29223 - DNA, 352 bp, Oryza sativa
cttggaatcgagttcgatacggatcggttttccctctctccaagccgaaggtttccttcgccggtggcgtcgtcgtgggccttcgtcgccgtctacgagcccctttaataagaccctcggtgtctcctctacccgtcgcagccctcgccttcgcctctcgtcgccggaatagctctagcgccgtgtgccctatcttcaccgtccgcgccggcgcttcatacgtgctccggcgtcgcttcagctgtcgtcgccgttcgggaagaccgccgtcgtcatcgtcaagtcgccgccgttctcgtacgccccttcacagccgtcggaacccgccggagcctcttctgcgtcaacaacc

SEQ ID NO: 29224 - DNA, 458 bp, Oryza sativa
agtgctgtggcggtggcggcggtggtggcgcattgcgatgcttttgattctgtatgtggtggaggaaagcatccatcatgttggcctgctgggcgacgatttgggtgacgatggagttcgcgtaacgtggcggtggtggtggcttatggcgatgtgtaaataaatgctggctgccacggttgttgtggttgctgccttcggggtgactgccctcacccgttgcagcgcttttcctcgttgtatccatctaaagatttccacagaaccagccaacatatagacttgcgatcaatactaaccccctctactaccataattcttaattatttctgctactaattggtcattaggttaaatgcttagccactaattagacggctcaccattatacacctatataactgcccacccacttgatatactacaaataatccgtctgcctctctgtgtttcttttt

SEQ ID NO: 29225 - DNA, 373 bp, Oryza sativa
tgcaacttgagtctcggaatatcatgagaataagaaagcaacagttatagtttttcattctcatctatatcaatgtgtcataattagcaacttcagataaaactttaaaccaccaacgaactggtatgtggtataacctacctatgcttcacaatgtgaacctgtcgcttagcatacaacttaataagcgctacatgacttcatccattttcgcatgactgcatagtccaacatcggagtgagcatctggcaatttacatacattatctcgctaattgtataactatgctaatatccgaaacaacatacaaattattatatctatactttggtctcctacattatactgaagataaagataatgaacttactg

SEQ ID NO: 29226 - DNA, 483 bp, Oryza sativa
  unsure (1)..(483): unsure at all n locations
tcaccatgacacgttcttgatggaatcgcattcgcagaagagaattccttctatttcttgatggaattgcagaccagttagcgaattactgggcgtgcaacactgtacacatgttgacagggaagtgtactaattggatgcaataagaatatgagtatattatgtcaacaaatacacgcctaatgtttctgcttgagtggctacaattaagcagcaatactcgtacaaatcaatttagtcctcagaatacaaagggatacggcctgccacatgatcaatgaagctttccagttgcanactgttctgtgcataatcaatgttgcattcttgcactggtctaaaaatcaacgtatatattggtagaatgagaattgacgctactaaaactgcttccattactttcgatgtcatatttctctatcaccatactatgaatagtattatactatattcgttaacatgcactattattctcgtaacagc

SEQ ID NO: 29227 - DNA, 458 bp, Oryza sativa
taatcacctgctgcatgcaagcttactctcgttgattcctgcagagccaatggagattggtttatatcatccttagcagcaacaatcagacaaggaacttcatagccacgtttttctccatgtgtagccacctccacaagcaatcccttgttctttgcctagagaattcatcacagctgccatttaaacaggcataacatttagtgtacagaaaattataatcaatctgcataataagatatatccggaaacaagagcaacattgctgttgtgtgagcttttgagattgcttattccaaaaatatatagattgcctgcaattatatttctatcccttttaatttattaaaaaaatatcctgattgcaactgctggacaagctatagactacaaacatggcctacaatctcaaaccatgaggtgtaaatagtattgccaactaattaccatgcataaaa

SEQ ID NO: 29228 - DNA, 425 bp, Oryza sativa
  unsure (1)..(425): unsure at all n locations
tctaagcttgctatcctggttcctagtcaacataaatatctactctttttgctgtctttntcttgtaccangtcagccttcccagccatttccttaatttgtccctgtaggaaaaggaacataactagtgaaagaaccttggttgtttatatctgggtatccatcgtgccacttgacagcaagtggatgcacttgtcacatttagcttctctgtcgaacacggtaaacatggctaagtttttagtcgttgctacactaatccggccacaaagatgaatgttttctatgtcgttatccgacatgtcttagcagatcaatagtatgaaagatcggtaaagttagtagtcattattccgcgttgaactaacctattatagcaaaaaccttgatcactaaattaanaaatgcaacttacacaaagtgag

SEQ ID NO: 29229 - DNA, 174 bp, Oryza sativa
acacaaaatacctccttgtattcgcactctcaaatgagagtggaagaagatcgactttcatataatatcttaatagaaatccatgctatgatcaatggcacttttggattctatattattcgcatgtctagaatcctaccaagagaataccccccatctttatgtaattgaagt

SEQ ID NO: 29230 - DNA, 380 bp, Oryza sativa
cactgcccggatcttaagcacctgggctgctctgaccaccctactgggcgcactgtgaactgatttcgcataataaaggaggtggctatcaagctgcgaaagtgtttgggtttggagacaaaggatttatacaggttcacgccttcttattgaagaagtaataccctactcctgtccggggatgaatccgccgagtgtcttattgattatatgaattggagaatatcaacatatgcccctagaggcacccggaccccccttatatatgggaaggagtccgtgttacataagataatctatattcctaacggaatatgtagatatagattaaatacagtcgtaaccgactaagtctcatagtatttcttgatgtcaagttg

SEQ ID NO: 29231 - DNA, 458 bp, Oryza sativa
  unsure (1)..(458): unsure at all n locations
tggagaagatgtcttaggtggagtcctggcttataccccattgtattcctgtgaagatggagccgtangcccgctagtccgctgctggttatttttgattgtcaggccttaagtgcctttgtaataatgtaaatattatcgatataataaagatgtgtcttttatatcatgtttgtgtggtgtaccccggctnttcctgtgacggngattaatacactatcgttcgggataaggaaattttcccggtcgcgacaagctggtatcagagccatctcgactgtaggataagccaagtggataaaacctaaggacatattntataaataaaactatttgcgaaagttcctctttttctccttcnncctaatgctatttgcaaaggtttactctnttctttcttcggatttcaactaagtactagatggtcagctttgcgaagaagaagatgtcgtcagtcg

SEQ ID NO: 29232 - DNA, 488 bp, Oryza sativa
  unsure (1)..(488): unsure at all n locations
ttagagtcacctgangctgcagcttgaataattaaaactgaattgaccatacgctcattgtgaccttacttgatctgatacggacatgacctagtgccatacgccacggctatntatattacacatatactacactactagagctcatcttacggacatggaggacaggagtacaatgtgttgctcggcgtgggcgcatcccttcttctcgtcttccttgccaagctgatatcacatgccgncgcatgtctacaaagcttgctcaaagagactactcttgggttctaatgggtaggaaattgtcacgtgttctaatattggaataatgtccaaacactccatgatgtccacatatgaaggcagaatcaacttaaggaccttaattccctatttcctctatgtggtcgtttggaggctaacccttatattgacagtaatcccttggacatcttggtacaaccaccttaagtactatatgcattataaca

SEQ ID NO: 29233 - DNA, 398 bp, Oryza sativa
  unsure (1)..(398): unsure at all n locations
tctccgacgatagccgtcgatagcagtgtaaggacaatgtactantatgtattgtggttatggggggacatcccgcaggaggttgtcacttagatgcggatgcatcacctttgccggaggcgtatgggaaaagtatgatgagtggagatcttgcacggaatggcggcgttggcagagcaagtggacaaccggcgtggagctcgtggatctagcgggtaaccatggtggtgctggttatntcggatagaatactactcctagacttaaatcactgaaccactctggtcgatatattatgtctaaatgattattgcatgcagcttcttttgaaatacagctataagttataaatcttttcgtatgcgaatgacttagcaaccaaccgtggaaacacttta

SEQ ID NO: 29234 - DNA, 459 bp, Oryza sativa
  unsure (1)..(459): unsure at all n locations
agctnntattacgaaatttcatattgtccatattgttgccgcaagacccactaccacaagtnntttttgtaaatttatcaatcttgttcatccaagatccaaacaagtcttgtctattcaacacaggatttatattaagagcaaatttcacaatattccataacagtctagctaaagggcaatcaaaaaagaggtgttgtaaagtttctgtttgatcacagaattggcaattagacttcccttttctccagcccctcttgaaaagattgtcttttgtgagaatcttgttttttgtaaacagccaaataataattntgattttcaaaggcactttgaaaccccataaacttttatgcgggaaaaccacctgttgcatcttcagaagctttgtaaaggaattaacaagtgaattcccatccttggtcaaactccaccgaagtgtatctttggttccatctt

SEQ ID NO: 29235 - DNA, 405 bp, Oryza sativa
  unsure (1)..(405): unsure at all n locations
taataggatacatatcttaattaagatactcctactttcttctgtatacagntgacattgaaacttactcccatctgttcccatattccctaataaatcaaaacgggttattagaaacaaaaattaatctataggtaaaacttttatatatttattcttagcgataatctacgttgaaaatatcttanaatcaactctaaacttaaattttaaattctaaatcttaaattttgactttngccttggtttattacgccaaccgatgaggccattatatgttctctcaattgagagggtcaaactgcatataaacttcacgtctatgtatactccaaaattcaaactgtgatttggatcctgccagagcaacaggccaactgcattggattctctnttctgccactg

SEQ ID NO: 29236 - DNA, 449 bp, Oryza sativa
  unsure (1)..(449): unsure at all n locations
gttgactaccagcagatctaacaacttacatctgttgtttatctcaactgatgaattaaagagtctaccatggattttttttcaatgtcaggtcaagtgtctaaattctaagaactatctttaaccaaacagaccatttgctcaaaagacaaaaacaaagctaccaatataatgacctgtccaaactactgcaacattaatccagagctccaccaattattatcatatacaagcaagcttataatacctcagatttgacgagtgtgacaatgtatgtgcattactccaacggtccatccaatagaacacacgctaacgaattctaacacgcagaactctaacgctcttagctatacgagtcactctagaaggttgaaacaccttatattatatcaacgtatgactcangacacttgagatgaatatactaacattgcggccatgtcatg

SEQ ID NO: 29237 - DNA, 457 bp, Oryza sativa
  unsure (1)..(457): unsure at all n locations
agcttgaaccgaccatcatgtatgcgccggtctgtctgatagttanctattaatccatccagcatgaagtgagtggtccatatatccgaccaaggcacagcatcgtccaataatctaattcatcacttcagtcccattgtcgctgccggactgttcgcctcgccggtccatctgagcattccatgccgaatcgacccttggaatacataaaaacatggtttaatgtaactttgagaagtagatcaacttattgcatcaagatgtggttacaaagtgcatcttaagcacttttctcttaactcacgagctagaaataaaacctcagcaaacttattctcctaaacaacattcatttacactgcaatctaacttttaaactggactccaaataaataactcgcttcccaccaacaaattcttattgacgatgaaacctcattttatgcttatttctacc

SEQ ID NO: 29238 - DNA, 201 bp, Oryza sativa
accgagtacccagtctggcatgtaggggttctttttctaaatattatgggcgtatagtatgatatatatccagtgtatatattacaacacgacaaatcaacaatagctagctagcacacacatatcattatcatcattatataatgagtcaatcgtctactcagggtaatactcccttcatctctaaatgtttgacgccgc

SEQ ID NO: 29239 - DNA, 405 bp, Oryza sativa
ctcgatgtgatgaaactcgcagacaccgcagctcctcctcgatcttcgcgggcacgcggctcctcctcagactctgttggcgttcacgtggtgaagctctaataatatagaacatcaccaatgggacaaattatatgtgccgaatattgtaaaatcaacatctatagacaatttcccacctccacaggatggaaaaatattaaccaatacctttaaccaactatgtataccagttccagagaagactggaccaatactttatgttgctatattgtaaaaataccaacaactttaatatattataggtgtcgggtaaaccacaatatataatataatttaggtgccgggcttgtataaatccagcacccttaaatttgagtcacgcccatgtgtgggagcgagcta

SEQ ID NO: 29240 - DNA, 484 bp, Oryza sativa
tctatatatggggacgtatcgcgtatcgtcattcttatccgaataactaaattatttattatctagtaatttagtaccgcatctgtgttatatgaggattttgttaagtctgaagcccctgctgaatgctgaactattattattattattattattattattattattattattattattattattattattattattgctgctgctgctgctgctgctattactattactattacatcaactgaataattaattagttcgttgtgttgatgctcgatcggccgtacgtggcatatgtgctcatgttattaatattgctggccggtttattgaaatcaagccacaactttcattattacccactagctttatgtaatattcatcttttggttgcaattaacgacgacgtcgattataatatctggtcttctggggaatgggcctatacgtgcgtgaatagtcactctctttctttacaatctct

SEQ ID NO: 29241 - DNA, 385 bp, Oryza sativa
ctgcagcttggggaagtgatctgcgggaggtagtgcagagctgttctgtattggttggaggagctaggcagatggggttgccggaaggatgagcctcgatgatgcccaagacaactggtcattgcatctccaaagtcgatccccctggttagggatgtctactcaacgtacatgttcaacgggaccttagctacctgccccttgatggacgctataaggggggttgtggattgcgataatcacagatctggatatccatgctgccacatccccccaaaagtggtttgcatgcgacacttatggctgctacacctatggggttgataaaaaaacaattgagagggtccgcacgaactatatcgcgtgcactaaggctctataaata

SEQ ID NO: 29242 - DNA, 396 bp, Oryza sativa
atgaagttcatcttttcacactgaccgtgtgtttagttcacataacaattgaaagtctgattgaaattggaacgatgtgacataaaagttgaacgtttgtgtgtagaaaagtcttcctctcttccctctcatacttcattctctctattttccctactctttactttacactctctctctattcccattttctcctctctctccttatcttattcttctgtctctcctccccctccctccttctccctttttccctctcatctctcccctctcctttctactttcctactcctcctacttttctcactcttcttttacacctttccattccacctatctcttactacctcatctctatttctctccccttccttatttcttctctctcttccctcc

SEQ ID NO: 29243 - DNA, 89 bp, Oryza sativa
  unsure (1)..(89): unsure at all n locations
atattctctttacatccaccagagtatgtgcacctaccccancttaagcactgagctgcactgctctctgcaccgggcaagcggcttgt

SEQ ID NO: 29244 - DNA, 304 bp, Oryza sativa
ttaatatcaaatgattagataatagttaacctaaatagtgtgccaatgaataaaaatggatattgtacagtagcataattatctttaacatgtcttgtcactgtagcaactaaataaattagttataatcaatccttcaaattaatgggtgtataggaaaatattagtgccatttactagtctatgtccaaatataactaaatccatgacttataaattgtttacataaagtttagcctcatattttgtaactaaaatataaacacacataggtgaatctttaactttgttcggagagtaatca

SEQ ID NO: 29245 - DNA, 390 bp, Oryza sativa
  unsure (1)..(390): unsure at all n locations
ctacgcttagaagcttatttagtaattgttatgtgcatgtgtggctatatttcggctaanaccatgcttgcaaaaaggcccagggaaaccgaaacatctctatgagctctctctctctctctcttgtagagctgtgaggagtgagccatcagcgccgccatcgatcacacacctcccgcttttctatgtctcgtgtgagagtcgagatatacttgatagtacagtggtaagagatgtgtggttntaacaccaaggtcctgtgttcaattcctaacacgctcacaatttcttcttacaaaatgttntgaagtacatctgtccctccaatcctcttttttttccttgtgtgagagtcaccacaccgctggacttcttcgttgggtccacttt

SEQ ID NO: 29246 - DNA, 389 bp, Oryza sativa
  unsure (1)..(389): unsure at all n locations
agctngaaccacttacatggtatgagatggagcaggctgacgagtccncngngaacaaagagagctcagagcagcagcagcttaccagcgagcaagatgatgaccgcgcgacatggctgagcctcactcttgccacacagggatcaccagaagaagcaacagccgaagcagaagaaacagaagcatcatactgctacgagactgaggcttccaagccttcttctgcaccacacaaggtgttctcatgtaacttctgcatgaggaagttcttagcattcaggctctgggcggccatcataacgctcacaagcgagagcggagcgccgcatatcgcttctaccatgcgcagaggatgatgatggggctgcctcttgaggcacatgctggct

SEQ ID NO: 29247 - DNA, 323 bp, Oryza sativa
  unsure (1)..(323): unsure at all n locations
taacactattntattgccagtatgctcgtattatccaaaagcttcggctttgctgctaagattaaggtaactatttcacgcttgattaaatttcatctgtgcaaatgcctaccattttcattctgtaagattggacctaaatggttaactcaattgcactataccaggacttcaagattcagaacattgttggttcttgtgatgttaaatttacaatcangctggagggactngcatattctcatggtgctttctcaagtgtaagttgaatccttgcatgttgttttaggataattctttcacatatgttatgctattctcat

SEQ ID NO: 29248 - DNA, 406 bp, Oryza sativa
  unsure (1)..(406): unsure at all n locations
catgcagctntatgatctataatatgtggtggcatggtgcacactcgttaacacacgctcacacaacagcaactaccttgcatgttctgcccatcgtattttcttctgaccataataactaacttatatcatttttccttatgatgcagtcctaagaaaccaattgctttaagtgcaactatattgtgcttggttatggttggaagagccaacattgtatccctttgtctttctatccatctaagaaaaaagaacacgcccaagatctccttcagcagctagttagtattgacttatttattcttatagagttgtatcactttctttccctcctgaaaacagaaggagctaagcagctaactgcgatgggtgtattctctaggtaatcatatggcgggcaggtctc

SEQ ID NO: 29249 - DNA, 375 bp, Oryza sativa
  unsure (1)..(375): unsure at all n locations
aactaagctgaaacatcattcgattaaaattttcagctanaatttgttactttcaattccaggtgaaaactattacctcggattaaaaaaatgttcaaatcaaaatttgaatactttccacttggatataaaaactttcaactcggatttgaaaactctcaactgaagatttaaaatcttcaactcatatttaaaaactttcatcttagaattcgaaactctcaacttatatttgaaaatgttcatgttaataatagagctaattacctgaanaaataaaaaaaattatgagatcatagcgctacgtactcatgttaatcacgttagatatggcgttaatcacacactaatcgtatgagatggcacctgcacatg

SEQ ID NO: 29250 - DNA, 451 bp, Oryza sativa
  unsure (1)..(451): unsure at all n locations
agcttccactcactcattctttatatgtnccataactttgtgtttggatagcttgtgtgctgatcagtataatcgactggtttctcaacacgctatcaacacgaaactctaccgagcttataaggtcaatagaacatgttggacattacaaatagagaatacgtcgagctagccttgcatggtactaactacctcacttgggcattggacggtgagattaaactccactacttggntctcgatcatactatngngcctgccgaagttggcacggtggagtctactaatgccgagaaagcaaaggcatttcatttcttgcgccaccatcttcacccagacctgaagtatgaatatatgaccgataaagatccactggtattatggcaatcactgaaagatcgctctgaccagcaaagggcaaattgtgctctcacacgctcaacatgactgg

SEQ ID NO: 29251 - DNA, 169 bp, Oryza sativa
  unsure (1)..(169): unsure at all n locations
tatgttgatgatgtagtcgtcaagaccaagcagaaggatgatcttattgctgacttacaagagantattgcgagcatacgcgctttcgtgatgaaactgaaccctgagaagtgcatcctcggagtacacgtcatggaagctgcgtggagttatgtgtctctaaaggcat

SEQ ID NO: 29252 - DNA, 421 bp, Oryza sativa
  unsure (1)..(421): unsure at all n locations
ctctaagtcgcctgtagcatgcaagcttttcaaagcgctagaacatggtcagaacgaggctttattcttggagaagctaatcaatggactaaatgcgaatatgataccctatccacagtctccaggaatcagaagtgtgatagttgagcagtgtatatacatgatggagctgagctctcgttatgcaacatatttcacaaatcatgaattgatggaagcattaataatggtggagaagacaccatcacaggctgtaaaatacaggcttttcttgggcaacacacggctcattgagcacagagtgaatctgtcctctcttgtggagagggccaaacatttgatggncgtgcattcaacttaacagccttgagaatccaattagaatttcgatcatatataccacttacctttggatcattct

SEQ ID NO: 29253 - DNA, 227 bp, Oryza sativa
tgactgctgattatactccatattactttgtattagttgccttgctcgagtttctgtgtgtgtgctatgaatgatcgattctatgatcaataacacatggtggctcgacaaagtacttttgcctcataaaatatatgtaattgtgtgttcgacacaaacaaatgtagctggtatttcgctaccctgatgtatttgcatttcaatatttgagcttctcttgcatatta

SEQ ID NO: 29254 - DNA, 370 bp, Oryza sativa
  unsure (1)..(370): unsure at all n locations
cttcgcacgaatcatcatgttcagcataaatacaccagtattgtacagattgagcctccatgtattacattcaaactaagtcagaatcagtcctttcatcatcagagtcttcattactcggctggagggtcgtgttgcgaaattgttctacaacatcactcgcaatattgtcagctgcattttgcgcactgctgataagatcaagagcagcttcttcacttgtcccgtctgcaaatccatcaatggtgtcgacttcaattctcgggtacaaggattatgtcatcgccaaggccatgccagctcccatacttccagctntcttgatattcttganatatacatccggagcaacactcagcttgtcaatatt

SEQ ID NO: 29255 - DNA, 367 bp, Oryza sativa
tccactggcggatttactgactgtttactccaacatgtggcatcacatgtatatggtgtcgatgttggctattgacaagttgcgctactcccttataaagattattttaatctaaccgctatcacattatctgtaagctgcatgtagtttgtaccagattacagccgcataactataatatgctccacttcatttcatgtggctgaaataattcaagtgcatgaacgtgtttcagtaattgaacgcacaaatgtaagatatttactgaactgaccagttggtgacatggtgacctgatctgcattatcttaatctatggatgattgggctgctttttaagttgatgaagccactgcccagtcttaac

SEQ ID NO: 29256 - DNA, 377 bp, Oryza sativa
  unsure (1)..(377): unsure at all n locations
agctncaatcctttgaatcaaagggccaaataagaaatatttctataagtattgaatcctatgaaatatctacataaatcctttgattcaaaggggccctattaaatatctctaaaatgaggactcatatgtcaactctaaccaccctatgtcttcctcctctttctctccctctccctcttattctgctggggaatggagccctattcatgagctcctccctgacccactccctctgttgaggcaatgatgtctgtgcacgccactgctccgcgagggagggaaaggaggtagtgacagaggaatcgtgcgcgcgatgtatgctcatgggtgtgacagaagatatctgtgccagcgaagagggggggatggtgttc

SEQ ID NO: 29257 - DNA, 426 bp, Oryza sativa
  unsure (1)..(426): unsure at all n locations
gaagccttacgtcggtttgcgcacacttctcccctatcggtacacaactaatcaccatatgtgcaccacttgaggcccaaacctaaaatccatgtttttccaccattttatttatcaaaatcacaagtattaaagttctgtccagattaattaaaaatttattttcatgtttgtaatgagcccataatgacaaggaagacaattctaagcatggctaagctttatatagtaacctagtgtcaccanaagtcatatataaagtggtatagtcatattgttcctaacgttacgagtgagggatatggatatatgtggtgtcaacgtgaatgcacacaatatgagttcgtcaacaagttaacaaaattctaattattagtgtacaatgacatgcaaaaattgaaacatttcaataacctcaaacatagg

SEQ ID NO: 29258 - DNA, 472 bp, Oryza sativa
  unsure (1)..(472): unsure at all n locations
ttaatcacctgagcatgcaacttccttaaaactgttcaattattagtccatatataaagcatatctttagtatagtctctccaaaaatatcttgactcaaacaattaacacataccaattcctcaacatgaaaggggtgcattccttttcatacgctatcttcttactttaacccaaacatatacaaacttgaacctgtcgtgatgatacttttgctgatcacatctgacaactttaatntgctactattaacagatatataccatgatactgccataacaaaaaccgacaatgatcatacaacttttgcatcttcacaacctgactattactgatgagctacaataatatctcctgactattcattaatcaaagacaatctttataacccagccttactagatatccataccataaacataataatgcttactaatgggcactttcataacaagcaacttacctcattact

SEQ ID NO: 29259 - DNA, 425 bp, Oryza sativa
  unsure (1)..(425): unsure at all n locations
gctatctcatcgagtcgctcaaacactcggacgagatcccatctatctttatcaccaccagatcaagacgatggggcttactcgccaatcctgatgaaactccccgacgatctggctgccgtcttcactacaaggacgtcttctccctgtaggcctangcgggatccggcttcagcaccgattcggcctagctccaaggaagtcggcgtcatactccagccactcggtacggtttcgacggatcaattggaaggctacttcagctcccccggcgtcaactcacgactgacagagatcgtagagtatgatgaatttggctaccgctacgacaaccgcgacctcgacgacttcgacgaaagctttgaagataactacacccctctctacttcggcgtcttcatggccgataacgagacggaagaaca

SEQ ID NO: 29260 - DNA, 480 bp, Oryza sativa
agccttgttgtgggtggatggaagacagcatatgatgtttatcttctattggtccccaaaggtatgcagaatcagttctgatgcttctaatttaaacaataagctacttctaccaatctcaaatgccaagctcatgatcatctatatcagtgaaaaatggtgtgggtcggatgggtgaagagctggacgtgcctggatcacattcacgtgctagtgtgatatatgatagtgtacaatatctcatctctattcctaatcacaagacactcgctacgtttgcactccctgagttaattaaaggaggccatcatttcgaattccaaacatacgtacaatactatatatcagaatctctccatggagtatgcttaaccttttaagctttataatttaagagacctctcacctcttattggactgatactacaaacaatgctgatgtcattttttatcacttactgaaggatgacatacttttca

SEQ ID NO: 29261 - DNA, 250 bp, Oryza sativa
  unsure (1)..(250): unsure at all n locations
ctacagagcactgtgccgcataataacgtacatacgcattgccaaatgagtgcgtgggctgaacaattataatcatgtggaactctgaaaactatagcatgcttacatgcgtatatgctagttgctaaatgaatggtcgcacaactatttcactgaaatctgaagacacaagtttgagtatatgatngcatatgtataggcatgatatacatatactgtatataccatatatactacacgtatatgatat

SEQ ID NO: 29262 - DNA, 461 bp, Oryza sativa
  unsure (1)..(461): unsure at all n locations
catgccaagtgcaggaagatgatcatagtatgtttatgtatgctctntgggaactatccagtactctgaaatctgctgccatcttcgtctgagtatgcagttctgttcatggatgtgggctgaacaagtttgtgtctccggcaggttatcagtgccttcaactggctcttgtctttgctttgggtcatcatctggattcctaattgcatacggnctttcctcttggctatttgctgtgctgagaatggcgtcttgcctctcctctcgttcatcatctacctgcagaagtggatttccctttctaagattggcattggtgtccagaagtgcagatacaagctgcagtgccgtacgaacagtgatgatatggaggtcctttgaagctcagcagcaccttagctgatataatctgaccgccgattatttggactagtccacccaacatactgatattctatcat

SEQ ID NO: 29263 - DNA, 342 bp, Oryza sativa
  unsure (1)..(342): unsure at all n locations
gtcagtgcatgcatcaaatataataagatggatatggtctcacttccgaaaattcatcatcaatcctaccaatggctgagatgaccttgccagaacagcttcagaccctgtaacacaaacacactcaagtttatgcatgtcgataaagggaactganaccaacatgatactttatattaatgatgttacagtgttaccccccaaatctgaaagtagcggaacaattatgaacctatataatataaaaggaatggcaatgatgtcataattcataagaccattcaccaacagtcatcagccttttcanaatatagggagcataagactgcagagaataatgat

SEQ ID NO: 29264 - DNA, 398 bp, Oryza sativa
agcttctgatgtgcatcgtctacaccgaccttaactaggcatgtcctatagacccttactccctgcctcgcatagatcagattgccgactccactgcggtgtgctacctattgtgttatctatatgcttactctggttaccatcttattctcatggctagggaggatgaggaaaaaactgcattctatacctccataagaacctattgttatacgacaatgcccttcgggttaaaaaatgcaggtcctacttttcaacgtactactcaaatttctttgggtaaccaaataagacgtaatgttgaggcttatgtcaatgacttggttgtgaagactcacaaccaagataccttactttctgatctatcggaaacttatgaaagcttcgctccgcccgca

SEQ ID NO: 29265 - DNA, 357 bp, Oryza sativa
  unsure (1)..(357): unsure at all n locations
ntacaattctagagactccgctgagcgagcacatgcagaangcactttcttgtgcttctcggagaacagtgactacatttcacagtgccaatatatattggacaatgcctcaacaccatatgccctgatgctggccagttcaagcttgttgaaccaagtcaacgaccgcagtctttcattgcaattgcgtctcgatatctgtaatgttccttaccaaaaatttatcatgaaatcagttgttcacctgttattgcttttctattgcatctgcatggcatgttntcatttacgtctctaccaatttattcagttatgattatttctgcattgcangttaccacagaaagcagtaagcac

SEQ ID NO: 29266 - DNA, 463 bp, Oryza sativa
  unsure (1)..(463): unsure at all n locations
agctntaacgtcatagctgcagcctaatgtacacctctccaagtctcatacgaatagactcttgagaagcgtgttttctcatacggctgaacagtacactttttaaataggaataagttcctgaagaaaaaatacttctaaaacaaattaactaatatctaatttatcatgatggtcgttctgttacattcgaacagtcctattagaatgcgcttgctagcagatctcatttcttgcatttccagcaaggaatgcacacatgcagtacacatctgaacgagaaaatagggctcaatacaaacaatcacgaatagcacacaatttgcattgtcctccgttaacgccatggatctggtgtttggaggctaaaccacagctacagaggacaccatacttttcttcggccgcccggttataccaattctttgacatgtactcgctaccatttgacaacgatgtatac

SEQ ID NO: 29267 - DNA, 383 bp, Oryza sativa
  unsure (1)..(383): unsure at all n locations
tgctgtgaataaagaaaattccanagtattgcgcatacgccatgctcacactgctataacagatgtgcttaagtccctaaaagacacatggtttcaccacacctggaaatatatggcatatatggtataacatccgagtaagtaaactcatataggatttaccaaccgcctgaaaaatgaccataatatataatcagcctaagccataatattggtcaataaaaatgcacacttacgtggcaaaaagcaatgatattgtatccaatcaattgcttgataaacccanacagcaccttgactatataaaatagccagcggtgcagctatataaagctntactggttgacaccttntaagatgcattgtaccaactcctaaaaagt

SEQ ID NO: 29268 - DNA, 394 bp, Oryza sativa
ccgcatgcaagcttggaagtgtgtggagaagtgaatgagtgaatcttcttatataggacatttacgacggtaatcactatacgaactgtcggaaattccctgcaactgccatcagggagtgatgaggagcgtccatgctcaaccccaacctatatggctgagatgttggttcggactctttgcatggctggcccctcctagcatgggctttggcccatctcctcctctgatcctgctctatccaattctcggagtttttgggctgattctctagtgttgtgataaagctcaaaggccatccttgtatggatatggttccttctccactttagttcgattttcttctaccttctaggttatcatccgcatacagatatacaacacacttgtggaa

SEQ ID NO: 29269 - DNA, 374 bp, Oryza sativa
  unsure (1)..(374): unsure at all n locations
gcaacanagatnaagaacaatcagaaggggaagaatctgagtttatatcatcttctagagtattgaaatcagattcagtatatttgctaccaaggataaggattttaatatacctgccaactccttcagtnttttagctgactntccccttggttttcctattcccatttgctgatcaaatttgagctcttggttggcattaagaagcctagagctttgtcttctagcaggattatacagaacagtcttcccatccctttttttgacaggagccataggaatctgaagcactgctggngtgactactggacttgatggctgggcttgcanaggtacaacatccaaaatcttctgatcagaaagcccatcatcag

SEQ ID NO: 29270 - DNA, 193 bp, Oryza sativa
aaaaaaaagaaaaaaaagaaaaagaaacaaagagaagacaaaacggaaaccaaaaaagaaccaacacaacaacaacgaaaccacagaacacacagacaacagaaacaaccaccccgcaaaaaaacaccagacaccgaacaaaaacacaacccaaaaaaaaaacccgacacaaacacacaacaggggaaacaac

SEQ ID NO: 29271 - DNA, 204 bp, Oryza sativa
agaaagggagggggggagggaaagggaaaaaaggaggagaagaagggaaagagaaagaaggaaagaaagagagaggggagaagggagaagggaaaggggaagaaaagaggagaaaaggaagaaagagggaaggggagaaaggagaaaaaagaaaaaggagaaggaggaaagaaagaaagagagagagaggagaagaggaaaaag

SEQ ID NO: 29272 - DNA, 312 bp, Oryza sativa
  unsure (1)..(312): unsure at all n locations
aatggtaacaagtgttgatgttggctcaagcatttgaccccaagttggatggcgcaaggcaaaggtataatggagctaagaatggtttcttagtctctttcccggtttcggtgtttggtgtagaccggatttgctagatagacgccgcactatcnagaggggtctatgaagcgagcatgcgtatgagcatgtgccatattagttcatatgcatgtaggttcattnggtgggctcgacaagccaagtgtgatgagttntctcatgtcccaaacatacacagaagtgagcacgtccaatatgagtgagtgacat

SEQ ID NO: 29273 - DNA, 417 bp, Oryza sativa
  unsure (1)..(417): unsure at all n locations
agcttcaagtatatntgatgatctgttcctcctcttatagtctgaaactgaacatgacattcagtgtcaggtatcacacttctctaactgaataacatgaccgccccccnctcattctttctttgtatatatttctgacgggagaagtatgttaataattaattggtgttatcaacctaaactataaaccgtaggttcacattaaattagtgatgctatattcaatccaccttaatttgatatttgatatatgacgcgcacttattgcatgtgaactacagaataattctacttagatgtntgcatggtctaccttccctttccggcttaatttttctctccatctcttttcttatcaaactaaataataagtgacccagccccaacattgttcccccaactttacaagaaacccga

SEQ ID NO: 29274 - DNA, 257 bp, Oryza sativa
aacacccaaaaatacccttaacccttatagacatacaatgttcacaacaaatttatctcattagatattctaaaataatatgagaatattcatgtggccgttttatacaacatggaagatagtgataagttttaagctctttttggtatgtttattctctgaaaacaatatttcttgtggtatataatagagaatttgcttcacaaaagatagtagcacaaaaacatcttatatagcatttgaaagatgataacatt

SEQ ID NO: 29275 - DNA, 279 bp, Oryza sativa
gacttaatgtcgctgtgaacttgcatagaaatatggtcgcctatgccacgcaaaactattgctcagatctaatccatatctattcattgccagagtgtctgccactgtaatcaagcaacatatacttataattgatgtgtgaatacaaatgagaaagtggacaagatcctgatgctactatcgacgtgcatgaaaaaatttgtgcacactaactgtcattacaattgtacagttgtatcaagcttctgttcttgttttacttgaattgcaagacggttg

SEQ ID NO: 29276 - DNA, 410 bp, Oryza sativa
  unsure (1)..(410): unsure at all n locations
agcttggataattatgaactgctgatctcaacacctgattacatataaataaaagtaaatctgcttagcaccatcacgtatattgagatgttggaaaatatcactggaaaaaacataagctgttaaatgccatcgtanagagaatttaagttgaaaatacccttgcctttgactttttttgcccccaccctctcttgttcttttcttgtattattatntctggttattaaggacgcccccacatgccatgatacaaagctcaaaccagaagctcactaggatatcaaatcactgtctaaccagagaggcatgacggtacatgattacaaaaggtgagaagagacaggcgtagtgttgccattatagaatcctatatctccaaaaggctagcatatntggacaaaacatga

SEQ ID NO: 29277 - DNA, 296 bp, Oryza sativa
ggaggagaaaaagaggaaagaagagagaatattaagaggaaaagaagagggggagaagagaaaaaggaaaagaagaaaaaaaaaggagaaggaaaaaaaagaaagagggagaagaaggagaggggaaagaggaagagaaaaaaaaagaaggagagggaaagagaagaaaaggaaaaaagagaaggggagaaaaggagaaaaaagaggagaaggaaagaaaggaagagaaagaaataaaaaaggaaaagaagaagaaagagaggagagaaaaaaaaaaaaaggaagaggaggagaaa

SEQ ID NO: 29278 - DNA, 307 bp, Oryza sativa
gagatatcgctgttactaatggtcgttgactaaaagtgactgcggctgaccggggcctatgccggctgaccgaccttgtactggctgaccgcttggtaggcggtctgaccgcccactggctattgcactggctggttttggggcatacaaaccgccaagctgaacctggcaaacgaccgacgttggctgaccgaccgtggacggtctaccgtcactcactgcatataccgacagttggtggctcatgatccctgaacggtattttctaccgttcaatagtccggctgatggcttcacatcaattgac

SEQ ID NO: 29279 - DNA, 444 bp, Oryza sativa
  unsure (1)..(444): unsure at all n locations
catacaaatcggagtgcctaaagggttgcaacttcatcctccaatgtttatttttgtcatactacaattgcacctatattntgcacacttttttttgtctccaaaatttagttgtaagttgatgagagagaaaatgtgtgtggtgaagaaagaatatatagaaatttagttcatttgctaaacaaggttttataaaatagttgagaagganaactctagtgaaagttaatcttaaataatagaaaacaaactaanatgacaattaaaagaagtacaacacattanaattagtttaaaactttacacatagttcttaagaattatctggtgtaatattctatgaattttgtatgaataaagatatcttataaatatcggatgactctcattattgaagaataatatttggtgcggttttcgactatgacatggatcgcaatgatg

SEQ ID NO: 29280 - DNA, 380 bp, Oryza sativa
  unsure (1)..(380): unsure at all n locations
tgccaccaatatgactatcagacgctaataaatatcactgcatgttgaagatttccagcagcaactcgaacttgctaacgagttgaacaagcctgtntctgatcatagtgtgcgcacctttggagatcttctggagatactaaagaaaacatggagattattctcaaagtatgtttaagatgacaatctcagtagattaattatagtatcggatccaccagttcctaacatagctcggatacattgattgactaaataaccaaaaccttgagaatccatgctgtttaaacaacaaatgccaatcttgagtatacggtccagaatacctaacttgtagcacaaatagcaagtaacatctgagtgtttttctccaataagta

SEQ ID NO: 29281 - DNA, 503 bp, Oryza sativa
  unsure (1)..(503): unsure at all n locations
gcttatacctgaaatatatctntcccaacccatcactcgacatcttgtttctactaagttngttccagttcaacgatttgccattgacactgtcgattgtattgcaatataccagtgggctgacactttttttaaaagaaacacccataaatacccttaacccttatagacatacaatgttaacaaataatttatctcattagaaattctaaaataatatgaaaatatttatgtggccttcttatacaacatggaagttcgtgtataagttctaagttctttttggtattattattctttgaaaacaatatttcttggggtatataagagagaaacttgctacacaaaagatagtagcacagagatatcttatatagcatatgaaagatgattacattaaaactattacacagaatgatttacatgcatatacatatggtatattatactatttaaaagtcaatgaaaactgaactattcaactcatatgataggtggactaa

SEQ ID NO: 29282 - DNA, 417 bp, Oryza sativa
  unsure (1)..(417): unsure at all n locations
agctnattattcttgaatattgtgtgcaaagtntggtctgccattacgttacctaatctaaactaatctagctaacccatgcatatggtagtttctgttggtctttttgcagtgagcagagatcagtgcatgtgtcaatccatggatcgggagaatagtctattgagaccagtacaataaaattgcaatgattagattaattaattatagcaagtgtactccctgttctgcagtgtgcagactcaatgcatgtgtcaatgtggatcacaataatattatattgagcatgtcatgaagaagtaacgtaaccctacaattaacacaatgtactgacgcaacacctgtgcaggccacatagtttggaatatagccttaattntacataagatatttcaagtgtatgtgctacatgataat

SEQ ID NO: 29283 - DNA, 379 bp, Oryza sativa
  unsure (1)..(379): unsure at all n locations
ctaagctntgtctcttgcacataactagaagaggtctntcacataatatattattattatcatcatcacatttagtcttatcccctaggcctctaacattccatgaaagaacagaaagacatcgagagttagcagccattggagaacctagtagcaccatagctaaataaggattatatatgaagggggttagccgagtaggggaggaccaacaaaacatccctaccccgagaggcccattgcttaagccgcatcttcatccagcgtagctagcaccttngtgagctgagcaacatcatggtcatccaggccacaagtgacagccagatctttgagcgcttcangggtggttgcagagtctcaatcaagtagcttatgc

SEQ ID NO: 29284 - DNA, 383 bp, Oryza sativa
cagcatgcaacttctcttggaacaagacatatcagctcaatcatcggaacacgggcctggatagaggagaagatactggtaaatcctgctattatggatcatgaaccgggaaaacggtataacctagctagtgaaaaacttaactttatggttatagggcagagctctggcttacatgaatacaggtcgcgaggggtttctttatggatgctttttgttctggacgataataaacaggattttttatatgagcctgaaaacaattcctgtaatacttactacatttctaagaatactccacatctcaaaatgtacgggactgttactaaaatgcctcgagaagaatattttgttacaatgtatgactaggcttggcattaatg

SEQ ID NO: 29285 - DNA, 437 bp, Oryza sativa
  unsure (1)..(437): unsure at all n locations
actaagctaagagcttcaacgccatgcgctgnacaattgttttgtttttcatggctgngatgatattctgacaacaccctgcaattcatgaaaatacacattggtacatatgtcacattccatcaaattaacaaccatgactttccaataattacacggcatatcaactaatggtaagatgatcttagtcatccactcaaatcaagaagcagaaatggctggcataaaattccgatgaacactgactaaatggaccacaaccaatattaataccccatttagcacaaggaccaaatattgaacatgcttatatttatttgtagacagatcgaatcaccatgagagataacttgtcgtgcagagagaatgctattcacatactgttgagtctaacattatcattaaccaatggtggatctgttatcatctcagacaat

SEQ ID NO: 29286 - DNA, 371 bp, Oryza sativa
  unsure (1)..(371): unsure at all n locations
atcttgctgtctatactattaagncnanatcaatgactangcgggaagatgatagtggtgtttgggagtattanttaccagtaccttcgacatctttcagagccgagtctctttgttttgccaattcggccttgtctttctccagagcttggatccgtttttccagttcagatatcttggcggcttgcactgtatcgcttcttgttggctgatatcacagatagcagcataaataagtgagacagggatgagaattaccttttgacgaaccactcagctcanagttggaatcttggagctcagcgatccggtctctcagatcatgttcagtcttcctggcaagctctttagcttcatgccagctggttctg

SEQ ID NO: 29287 - DNA, 177 bp, Oryza sativa
cttaagcgacgaggcatgcagctacatgcaagtccgctgcggggtgatatactttgttcggacaagagcctgaagctacgaatgtgttgctgcacatgtccgctttttaatgccctttaaactccctatagcagctggtgcgcttcctatcatgcatttaatgagggtccatgtatt

SEQ ID NO: 29288 - DNA, 505 bp, Oryza sativa
  unsure (1)..(505): unsure at all n locations
cgagtcagtagatcaagagcttgcttgtacatngagctagattccttatcctttggttcaatcaccagcgacacctgttcaatcaacataactatatgagtattcaagacctcagatcaaaaaagttctgctgaagacactagtaaggtggcacacagtgatcaacattctcattatatcagaaaggttcacatgagaggatggaaccactaatangaatgccttgcaatccactactgcaatcaaatgttacactgtgctntgtctcttttcaagagaaaaggcaagccaggccgcatgcctcanaagcaatcacaatgaattatgcaatgaggcaccaacaacaaaagcaagtaccatcagaatgtccagtattaaaattttttaagaacattatcatgaaatctaatgaagcaacttgtacaattagagcataaaggtaacatcaaaggatatccccttataaggatgtatgacatctctcatacagcgtaggttgactcta

SEQ ID NO: 29289 - DNA, 326 bp, Oryza sativa
  unsure (1)..(326): unsure at all n locations
aagcttgttaggaggctcgtggagtggtctcaatcttctgtgaaccaatccaacgtctaggtgcttacctactggagggtttggttgctagacatggaaactctggcacaaacatctaccgtgctctgaagtgccgtgagccatagagcaaggagctcctgtcctacatgagaattctatacaatatctgcccttacttcaagttnggctatatggcacccaatggggcgattgcagaagcattgagaactgagaacaatatccacataaatgatcttcagagtgctcaagggactcaatggatcacactgatacaagcattagct

SEQ ID NO: 29290 - DNA, 429 bp, Oryza sativa
  unsure (1)..(429): unsure at all n locations
tcccgttctcctcgtcttcaacaatcaacactagtcctcctccaccgtcttctccggttctcccctctcnccaaaccccgcctcctcacaagaagagaaccaagaaatccaaagaccccccctcacccacggccatggcggttctcgtcccgatcgacggcggcggcgaccgacagggagagggaggtagagccacggccgtcgtcgaccccgcccccgcccctgctcccatggatatcgacggcgatcgcggcgcgctcgacgtnctctgccccgccctcatggacctcgacctcgaccgcgaccgcgactggtgcggcgacagagccgcgctcgtcgnctccaccagcaacaggggcgggcggtgctggctcctcacggatctctcccaggacatcctctccggtactttgtgcctgcttaaggaca

SEQ ID NO: 29291 - DNA, 390 bp, Oryza sativa
  unsure (1)..(390): unsure at all n locations
agcttgtattaattactctcatagaatatgattcaatgtattaattangagtattttcgccactattgttttccggcgttttttttacgtctaagaagataactaaatgtacctaaaatatttttaattaaaattttgaatggaaaatccacttttattgtagtttacatgctcaaatcaagaacagaagggcttgattgtatgtaaggatggactcgaaatatgtgaagaaacaagataactntaagaactattgaagggcgcaggcaaatcaagtttaacagtctaaatctatcaatggcatggagtaacccaatcatatacaatngatgagactttttgttntcgatcagcaatgagttggacagtgcttacttttcatcctttaca

SEQ ID NO: 29292 - DNA, 143 bp, Oryza sativa
  unsure (1)..(143): unsure at all n locations
ctcaagctntacaagttactatatatgcatcaactctatagtgagatacgatatgtacacgctcgttcactgacaaaatcgaaaattggaccaccatagatatatatatatatacatagtatatatctatatatatatctata

SEQ ID NO: 29293 - DNA, 425 bp, Oryza sativa
  unsure (1)..(425): unsure at all n locations
agcttatgcaccatgcanagctganatgtgacaactaattagacatgtcacgtttganaacaaatgtgtgcagaaagtgagatggtatgatagagcataccataaaacggtcgcattcctcattatagaacttccctttgttctgtccatactggattttcaactctaaccatggattcttatagcggtctaacttcttcccgatggctctcataatttcatccttccgtgatatcctggcctctcccctttcaatattcttgataattctatcataatctgngtggacagtcaataataatgatcagccaataatcttcagttctcaactcaccattcaccacataagaaattagctgtttggtgagaattatgactaattaacaattattaatcatgatactcaatgaacacttgctacactc

SEQ ID NO: 29294 - DNA, 436 bp, Oryza sativa
  unsure (1)..(436): unsure at all n locations
tgactggtattcttgttntcgtcgatcgaattctacttgcttctctgaattattccaatcaaaactaatacttgttggtctctgaataactgttcaattaatagtagagattcagtaattctttattcaagatcacggatacacatactatataacacactatgcccaaaagaagaaactaaaatcgtttgtatttttcttgtcagaatcgcgagcaatcgctaggtacatctttcgcaagtacaaaccagagttcctgtgactcggagaaggtggaagcctggaggagtcggcaatggtggacgtgtggctggacgtggaagcccaccagcacgaggccgccgtgaggcccatcctgtggcactgcatcatcaacaagttcgagggccgngaccgcgaccagtgcgtcgtggacgagagcgtncggaagctggag

SEQ ID NO: 29295 - DNA, 367 bp, Oryza sativa
catcaactagtcgagcatataacttattaagataggttagggtaccgtgggcgaaaattactcacagagtgcgatcttcaattagtcagacatcgaaatcttcttcctcaaggaaatgcatgatgaatagaggatattgaaaaagttttaattcaacgtgtcattgaaaatatatccatacctactgtctttcttagtgggtaacgaagtttctagattaagtgaatacaacggctcggactccttcttgctattttgtctccatgcggatccagctggctattattttcgtcgattatgtcggtcactctatattacgttgtccatcgcgcactataacctcccctctattaactatgctatacat

SEQ ID NO: 29296 - DNA, 437 bp, Oryza sativa
  unsure (1)..(437): unsure at all n locations
ctcaagctgtcataatttgtttctttanagatgatggataganatgagatcttcatactcattntggtttanagcacgtcataattttggttgtgtcgcgaagcgagcgtagctcaatgggctatgttcttttnttntaaatctatccactctaatttagtttaagntctaaacttagcacatatacttgtatttagtgatagatgttaattatagtgtgtacgtttatatggtcagtctgaacaactttttttaaaaaagaatagttgtgtcaaatcttaagcaaacttttatgtagaattgcccccaacttcatagtcattccaatcgaaatgactagtctatgaagtacaagaactggcaaaaaaaataaaatagcccgatgcggcgtgactgacccagcctcactccacgtcgctggacaccacgtacgatag

SEQ ID NO: 29297 - DNA, 340 bp, Oryza sativa
  unsure (1)..(340): unsure at all n locations
agcttatacatatatgtatacactttgtatntatacgtataggtataaaactctatatttgnatctatatgtatatatttatagggataaactctctataaataaaaatngtatatatgtacacattctatattatatatatatatataaactttgtacgtacagaattttataaattttatacatgtacatataaagttcatgcacacgtatgaactttggctgacctcccggtagttattgatctaaacatgaaaaaaaaatcccaagacctaacagaaatatgaaaagtgaactttttttccaatagaaagataagttaaacccgtgaagattaact

SEQ ID NO: 29298 - DNA, 416 bp, Oryza sativa
  unsure (1)..(416): unsure at all n locations
tctccacttcatcaaaatcttcaacggtttctccaatatcgttctttgtagaccgatattcttggcaccctttttataaccactccaaattagcctctntactcattatacaaatttatatgtcttagccgtgctacactagccggctntacagagataggtacaaatttgccatcgcagatactaataaaatcatacctagaaagatccctccccgataagcattggatattcccatgacgccactcaaaagtagcatcggccattgcaacctcggccgatgtatccgcttgaacaatttcaacatcatcgccgtcccattgaattaaacattgatgcaaggtagaaggcacacaacaattggcatgaatccaacaacggcccacaataacatttgtagtaccttgcacatcgac

SEQ ID NO: 29299 - DNA, 364 bp, Oryza sativa
  unsure (1)..(364): unsure at all n locations
gcttcaaacgaggatccatctttataaccacatggtctgatcaatgccactactactccatcgccagaagagcctgagctgacctgagcacgctaatccagcacgagggatctgaccaanaataattcttgcttccaccctcttctaacattttacatatgtttcacaataatcaaatactttcaaatctactctatccaccatctcacatctaaccgtacattatctattaaggactattatagcgttatttcttaaactttatatatactaaacaatctataacaacaagtattgtttgacatagataataaaaacacacacttccttcttccattccgaccgcagtcgcacaattatatat

SEQ ID NO: 29300 - DNA, 368 bp, Oryza sativa
  unsure (1)..(368): unsure at all n locations
agcttcttcattagttgagaagtgtatgttgaaagtagntcttgatgacatgcacttctaaacagaaaattagtattttgcaagatatcaattttatgctatctgtgctaataacaatactgaagaaataagaggttaaataacataagcacaactctatcataaacaggctcctggtttctcatcacataccatatttatcctatccgtgctattggtgtttcagtaatagtgcagcatctcagcccatttgtggtgtccagcatggctcagttgcaacagtgatgagaattgcctgcataacttcatatttgttgggctacatatanacttcatgatccaaatgtagaactcttgtagaccttttg

SEQ ID NO: 29301 - DNA, 361 bp, Oryza sativa
  unsure (1)..(361): unsure at all n locations
tcaagtgcgccacacaagatatagagagagtggatatgcgagccaccgagaaattaaataatttctgtcgatggactacgacctcgatcgatggactggctacagctctgcatttaatttcaaggccgactttcttaaaccacccacgaaattaaaatcccgtcatcttgacatatcgatcatttcanataacttatttcaaaaataaaccgtgcaaaaaactaatttcaagaatatgccgtgacctcagcgccatcggaattggcgctgagctaaaacctcccatcattaaataagttctttgaaagggtcttaggccattcccaacccaatgactangatagtgtccatagcattaaat

SEQ ID NO: 29302 - DNA, 334 bp, Oryza sativa
tactgagctcagcttgctgtgtttaattttcggggaaataacagatatatcaggttgccgagaaaagactacccgcaaaaagaaagagctatattctccaaattcgactccataggtgtgccatcttgacccagtcttcatctactgactttcatgatgagactggagacgcaagttcgaaatcttgatgcgtcgactaattccacgaaatgaaatcatatcttaaggctgctgggggttgggactcctacaagtcccctgccactaggtcagttctaactacccattaagcgggccgccatttggatttgcctatttcttgtacctcatttgt

SEQ ID NO: 29303 - DNA, 471 bp, Oryza sativa
  unsure (1)..(471): unsure at all n locations
ntgatagtttccctcacattcanatctttagttgcatatatacaaatnggcttggtgaaactaaccggcgggtgaaactcctgtcatttctaacccccgccgagttagtccgttcttgcttcattatgcagtatgaggaggcgactgtctcgtctgttcaaggggtccggctcttcatcaagtcatcataacgagtctaatactcgttcatcagctgatgtctcgatggaagacgccgaagctccgcgacgactcctgaacgacactgacctcgaccttgtcagtgatcgggagagacaagcctactacatgctgagcgaccgggagtatgctcacacacgagaatactcaccggaattgctgaaaaatataggtatggatgttgaatttcgttctatttgaaaagctgttggttggcagagatttgctgtggtagatgagccttggtctcgttggcttacttgaatttct

SEQ ID NO: 29304 - DNA, 310 bp, Oryza sativa
  unsure (1)..(310): unsure at all n locations
gcttcctagaagattcactccaaatctncatagactgcgaccaacagtcaagctcacaaacgtgaattctttcaagaatgctttgcaggacagcaccttcgctaattaaagccagcagaactcattaaggcattgccaacctgccttgcagcaacgagagtacatgcatcttcacttagagagggtataaattgggactctcctctactttactaatggttagttcttcccaggttctaatccacgggatctccgatcacatagactgggttaccaccatagtataactcacatgggtctcaaacccatc

SEQ ID NO: 29305 - DNA, 498 bp, Oryza sativa
  unsure (1)..(498): unsure at all n locations
ggtggtggtagtaaacatcgattnnttctttgagatagagttcgatcctcaactatttctcgcgatatcttcttacgaagttttgttagggcatctataacagcctctggtttaggtgggcaacccggcaagtagacgtccacaggaattaacttatcaactccccgaacagtactataggaatccgtactgaacattccaccagtaatagtacaagctcccatagcaaanaaggagaagtcattccaatcctcaattctcctttcgagattcggcgatagtgaatcaattgaacgcgcttcgaagatttgttctacttttggaagaccttgcgttatgtcactagatctcgctntntcgtatataaacgtaactaacctatccnctttgtaaaggatntctccataatgaccatgaacagttgctcctgtagtggcaaataaggctagctgctctatacaaggaatcatattacaatgaaatttgcctgatttttat

SEQ ID NO: 29306 - DNA, 306 bp, Oryza sativa
  unsure (1)..(306): unsure at all n locations
agctntggatgaccatattttggtcatacaaactctttatctatctgttcaagcctcttaattataacctaaagaatccatggttgtgcttcttatgtactgatctnttgcttttgaatagggttntatctttttttttgtgtgcttcatgtagttcatgtcattccgaaggatcctgaagtgcggntcgtttctgcgctgaangttcagaaagatcgtttctttgagcaaaagcatgtcgcatgggaaatttgcaaactgtttaatttaaagtattgcttacactttattaaatctcgcatataa

SEQ ID NO: 29307 - DNA, 459 bp, Oryza sativa
  unsure (1)..(459): unsure at all n locations
tggaactgtgtgtgtgaagtgagggagtgatgtcctcttatagggcagttatgacggttgtgagaaggggaaatgtccgaactgccccgcaaccatcattgggagagcatctggagcgtccacgccaaaccccaggatcaacagcgaccaggggggttcggccgatccagggggttcgggcgaacctatgatgggctctcctggcctggccttcggactgcggactcnctaggctctcctctatccatttctcggagttntggattgattcgctgatgtttctatgaagttcacaacccctccttgtatggatacataattctcctcactttagtctagatttcctcccaacgtcagggtttatcatctgcatacaaatatacaccaacacttgtgaaatatgtgagataagcacctatcactatggtggccgtttattatctgaacttatgcatatgt

SEQ ID NO: 29308 - DNA, 363 bp, Oryza sativa
  unsure (1)..(363): unsure at all n locations
tctaagccacctgcggcatgcaagctngattagggtagaactagagataattaanactgttttttctaccttatagttntagtttaattttctaaattctttntagttnttttttctaaattctacaattacagtctttcagagtaagaaactgcagttgaactgcttggaaaagcttctaattctgtaagaaactgtagctaatcagaaacttctctacacaggctcttaaatctgatgccagtaatgctgaaatgatgaattataaaaataagtataaaattcttatacggtatgggcaaaaactaagggcaaacttttttaggaacattactggcacatcggagtcgccagttgcaacat

SEQ ID NO: 29309 - DNA, 480 bp, Oryza sativa
  unsure (1)..(480): unsure at all n locations
agctcctctcgttacctctcanacgcatccggtctcatgtgcaaattcatcttgagtcaacgggaatcgccaaaacatgacagtgtgtttaccgaaaccgaacttgggccttgggcctcgtaatagactatgcccatctcagaagtgtctccctccacctccacgaattagcacttaaccctagctgtattattctctataaatagccttgtacatcctcaaaaacatttgggttctgtctagttgaatataccaagtgccattcaccttgtctctagtcctcgttcgattagtcggcgactattgattcacagaccccaataattggtgtgttgatttgcgaggtcgattatatctactatatcaatcgcaactatctttatgagctaatacctatccgcatattagattgatctaatttgncttgaatggctgtcgttgattgcaggacatcaccgtcctcatggtggacacatcttt

SEQ ID NO: 29310 - DNA, 440 bp, Oryza sativa
  unsure (1)..(440): unsure at all n locations
aaaccaccgcagctgcaacttatatggacnaggtcgtagctgcaagttcttgattcgatgtattncttgctctccaatcgatgaaagattttataggcattctttgcttgtccaggagaaaaagatataattatgccgtgttcactacattgctgatttcaacccaacaaaacttgattatatggtggtatcaaaatntaatagtttaacaaactacacaagccttaccgttatcaacctatcataattattgaacttcgaaagtattcgctcacagaaattctgagaatgattgacgtaggtcggccagcgcggaggagccggatcgggcgctccccactcgcacccgttccgccacgtgtgggccngcccacttctttctcatttttccacaaaagatgttccattcagtgtacttatattgtgtcactacttataga

SEQ ID NO: 29311 - DNA, 324 bp, Oryza sativa
  unsure (1)..(324): unsure at all n locations
ccgcggcaccatgttcncatgagagaacgacgaccttatctgaatacaggccaagaagcaagacgtttcgtgtgcgctacaataaccaccatactttcgtctataaacgcaatttatgagtgaacaaacctctctaactattattgccctatactgatcgatgacctccaaaagaaactcgactcattatcagacatggtatctgattgaacgtcatcattgcatggcgcacaaccggcattatcgatggtcaacaactcacttagataatactttcaaatgcaaagttacttattttcacttgtgatgaacgccacacggacc

SEQ ID NO: 29312 - DNA, 430 bp, Oryza sativa
  unsure (1)..(430): unsure at all n locations
agcttattattattcactgtcatctagcaatacctgattcgaagcctatttcaagttcaaaggtagcagacgactgactntgcattcttacaaacttacaccaaggtccgaacaagaccaccgcanaaggctagggaaattgcgtcatatgcttgccaccagtcttatgcgtcattaagagcaaggactcctgngagggtcttgccttccaacagttccaagctcgcgccacctcccgttgaaatgtggctcatcttgtccgccaacccggccttctcgacagcagcaacagaatcgccacctccaatgatcgttgaacacctttggcggtgatatcagccaaattcttggcaattgcctgaattgataagaacacatttagcttcaacacaaaaactgtgctgataatctgtcaaaacagactacatag

SEQ ID NO: 29313 - DNA, 450 bp, Oryza sativa
  unsure (1)..(450): unsure at all n locations
ctctaagatagtccccctttacattgtcactaagggtggtntctaattaatctagatagggtacaaaagaaattacatacaacatcctctcaacaatggcctatgacttgagggtaatatagatattttcctacgttaaatagtattaggtttacaaataacctgtggactacgtgtataactttctggtccctaccttatgtgctcgaggcagatgagggaccattaangccttatggtgtcttcaacaaattccttttactcgaatagcattttgactgttgagtattcaattagctgaaggcttgcctatctctccaagtagtaatcttcatgagtgagttgttatgctcacaccttcatcagataatctgattatcaatcgaaaggtttgtcacttctcaactgtcggagtccgcggctagggctatcatccaatatagtgcatat

SEQ ID NO: 29314 - DNA, 366 bp, Oryza sativa
  unsure (1)..(366): unsure at all n locations
agctngcagtagagcggtagtagcatttgtttgacgcatctaggatcaccctaagattccaaccactccctgtttaccaccacacacaaactttgtttactgcacacttaattgcccttttacccatgcctaatgacctaatcttgtgacctttttgaacgctcatagccgagctatagctacaagacagacaagaaaaaggtccacatggagagattccaaagacttgctcagtttaaatttctccccctatacatgctactccataaatcccaaaatataaaaaaattaagttgaatntgacaaatcctaaaaccatgagtctatacagtctcttgagatatactcccntccgactgataatac

SEQ ID NO: 29315 - DNA, 390 bp, Oryza sativa
  unsure (1)..(390): unsure at all n locations
taatgcttccttaacatgttcttcattatcaacattgtaaccaatttcttttgtccgtattcctggatggaatcganttttactccaaaatngccacataccaaaatctcaatgggatgagatttcggaatgctattcacagctcaaggaccacacacataaactacatgacttacatggcaaaatcggcatctccatcaagtatggaaatgcctagtgttgtttgctgtctttgtatcgtccactggttttcttcatatattaatgataaacagatggnggcttggtgtcactgtgcccgtatatccagttgtttcagagcagacctcatgtcatcagtgccataaccctcaattccacatgatgttgggctatcaagtgcaacaaaca

SEQ ID NO: 29316 - DNA, 371 bp, Oryza sativa
  unsure (1)..(371): unsure at all n locations
agctnttaattactgcagtatcttacactggggaggatccaggagctgattcatgagctgggaagagaaactctgcaataatgcagaanaagggcaagtggaaggcaatatcaaaggtcatgggtgagcgaagctgcagtgtatcaccgcagcaatgtgaagataaattcaatgatctcaataagagatacaaaagacttacagatatccttggccggngtacagcttgcaagaatgtggagaatcatgctctgctggattgcatgagtaatctgtctgacaagatgaaagatgatgcgaggaagatactgagttcanagcacttgttctacgaggagatgtgctcctaccataataacaatcgagtgagt

SEQ ID NO: 29317 - DNA, 479 bp, Oryza sativa
  unsure (1)..(479): unsure at all n locations
atttcaccctactctatgcaaatgtcacgatgaccacgtaattntgctatactaaaaatgacactattccaaaaggaatcacanaatttgatattcttttctttaatatccaaaacagcacaaaaaacaaaaaatacttggaacaattaggttgacaacaaaatcccccaaacttccaacatagtcagagttcacgatggacctccaacaagtcgttggacctccaatcgcaatgcttgatctttgagcctaaggtgattgtaatgctttcatcttgaacttaaggcggttgcaaccctcatggaagcaaggtaggaaaagctcgtgaagagcgagtcaaggtgacactagagcacacaaggcgatctgagctcactagagcacacaaggtgatctgagctctangtggacacaacttaagtgtcttgcanggaagagatggaagagatgtaatatattttaaatattttgaagatact

SEQ ID NO: 29318 - DNA, 396 bp, Oryza sativa
  unsure (1)..(396): unsure at all n locations
ctgcagcttatgcttctgcgaaactatggaattatattatatatngaggcagcactgagcagacagctatatcaagataatctcaaatgtaacaagagagtatgctgagggtaattctaaaggtggtaatagagcttccaagtatgctgttctggaatataacatggtgcatgcatgagcaagatacctttgggataggggtgccgtccacattggggtacattctcaatgatgtcgcattagcaaggatcatcccttcttcaggcctgaaagtttcaagctcggctaatctcanggcatgaccacccactgcagcagcaagacttactgctttttctgaagaactcaagagaattatcaattacatgatgtactgaaatacgaatcaatttgagc

SEQ ID NO: 29319 - DNA, 428 bp, Oryza sativa
  unsure (1)..(428): unsure at all n locations
gggctcattttatgataatcatttatcagttgaatatctaacanagagttcaatgaatcacttctggacattgttaaaatatggtataaaagggatccaggtacaacagtatgggatttacagattcacaatgcttaatatcaactacaaaattatctagattcacaatgcctaatatcaactacaaaatcagcaatgaaacaaggatttaccatgatccangagatgagggatcaccgccggccgcatcaaaccaaggttgagacgatgcatggngaccaattgagctggtgaagtcacctccgacagaaccatcaatggagaaagccgggacggtcgtcgctgccgctactgacccgcgaccgtgtccgcgagaacggngcggcggtggtagcccgacagcgtgaccaatagaaccccgaccgaat

SEQ ID NO: 29320 - DNA, 419 bp, Oryza sativa
  unsure (1)..(419): unsure at all n locations
ctgtgtnggcgccatcgagtctggaataatgaatgaagcggttaattgtggttgctgcttatttctgttcaagaaaaattgtggttgctnttcatgaaagttaattcagtgccatcataataaattaataatactacaaacctggattattatggaagctctggtctctcgtctgaatctgtgttcattgcaagccgccattgcacgtaatcctgtctgtattactatggctgactcatacatttgaaggtaagatttcctggctgaatgagtacgtgcatgcttctgtatcctgattgaagcagcatttcttctcatatgctcgaaaaatattctagctaggcgtgctgcagtgttgaatacattgtatgtcaatgccaagtcagaacttactactaataccgaagatatgaattact

SEQ ID NO: 29321 - DNA, 451 bp, Oryza sativa
  unsure (1)..(451): unsure at all n locations
agcttagacttctcttcgtgcacatgctgtcgnatgtgctggattgtggctcccatatctttgcgttcctggcgatcggctaatctctgcctggccttctccagcttgaattggtgttacgcaacgtagacggctggagtaagggcatcggctagctcatctgggagtagagcttggatatctgtgaaccttgcccggatcgagccacagttggtcaccaggttgtctaatgatgcttctagcccatgagaaatatcttcaagcattcttttcacatcatcggacagaggagctatggctttactggtggtgtcctcttctgtttcatcaaaataatccttgatgtcaaggaaaacatatcggcttaaacctgcaaagagataatattatggatggtcaaagatcaaacattgatggccgatatcaagttgtgtcacaaaaaactactgga

SEQ ID NO: 29322 - DNA, 434 bp, Oryza sativa
  unsure (1)..(434): unsure at all n locations
tcatccttgccaatcacattctcaagatttctgagcgataaatactcaccaatttcgttcatgttcctgagctgtcgcaactcatgtcccttctgttttaggacgtgagaactatcaatacgttgaagcatagttagccggcctatgtcaggaatccgggacagctccaatccatcagaggacatttgaagatgtcgtaacttacataaattgcagagtttgtcaggtaacctcgatttcggacgcacataaagtaactctaaatggtaaagatcgcataatgcatttggtagttcagaaatcaatgtcttcttgatgttcaaataccgaagatgctttagctgaccgattgattctggcaactctctagtgttgtaaaacgacanataaagtacttgtaacttcttcagattcaatactacctgctcgaaata

SEQ ID NO: 29323 - DNA, 384 bp, Oryza sativa
  unsure (1)..(384): unsure at all n locations
agcttatggaaaatgcatnttccctaanatctttagctgctagaagctntctcaaacagtntagatttttatccaacatttgagaatatgtagttatggaatctagaaaatgaactaacagtcacaatctaggttgggtttcatagcttctctagattctcaccagctgtatatcaaaatcttaatctccacaaacaggtcttatgtctctctcaccacctactaactacaacaatgctacgatcagtcagcggcagaaccaaaatatttgcgggcctagggctgatgttaacacgttagaaataatatatttaatttttntatataatttctaaaagatttacatagaagtttgaagcaggcatggtaactcaagccccttat

SEQ ID NO: 29324 - DNA, 338 bp, Oryza sativa
cgagttgtacattgcagttagatctgcaatggacaaattgagactggtcacatagttcaatagagtcggccagtaaagtttttcaattatcttttccaaagcttcagtgtttatctgcgagttgacaagcaaggagattccttcggatgactgcgggacccctttttcccaacccatctctcttgttttgttttgcgcgcacgcttttcaaactattaaacaatggaatttctgcgaaaagtttctatataaaagttgcttaaaaaatcatattaatccatattcgaaaaaaatagtaaatacttattaattaatcacgtgctaatggaccgctctat

SEQ ID NO: 29325 - DNA, 414 bp, Oryza sativa
  unsure (1)..(414): unsure at all n locations
agcttatgtctctaactaggagggtaattagttgtgtgcctcggctcanatattattgagacaatgttnttcttttntatttagaacaaagcggattgaatttagaactttntgtttgaaacacaccatagatacatacgcttatatgcacgtagacacatccatataagatcgtacacaagcacactctattcctataagtatcttcgaatactggacaacataccttatttgtacgtgttccttgtgcgtataaagaccatacacgtatatttaaagttgatggtatcataaattaaaactagaggaagtaataaataaaacaaggtagatggaggaatacgaatccaatcaccaaataaaaggagaaagtaggaacaaaaagaatccgagtaagtccacaaaagttacact

SEQ ID NO: 29326 - DNA, 425 bp, Oryza sativa
tccagctaccttgtataccagtacaaggtgatggaaggcatggagcatcagcgtaaggctctggagcgcatgcttccacttatccttagcgtcatccaagatacggaggagaagagaagtaagaaacccgaactaagcgcttggctcgatgaactcaagaaggtgtcctacgaggcaatcgatgtctttgacgagttcaagtatgaggcgctccgacgtgaagccaagaagaaggggcacgacgctacccttggcaaaggcattgtaagcctcttccctcatcgtaacccaattgtgtttcgttataggatgggtaagaaattgcaaaagattgtatatcagagatggactactctggactcataaaacagcagcaggaaacaccaaagcagtggaggcaaactgattccatcatgtgtgatact

SEQ ID NO: 29327 - DNA, 372 bp, Oryza sativa
  unsure (1)..(372): unsure at all n locations
ctatcccatactatcacatgttgttgtactgtatacnaaatgaactgacattgagtgaagtccttatgtcggnttgggcacactctccccctatcggtacacaactaatcaccatatgtgcaccacttgaggcctaaacctaaaatccatgttttccaccattttatttatcaaaatcacaagtattaaagttctgcccagattaattataaatcaattttcatgtttgtaatgagcccataatgacaaggaagaccattctaagcatggctaagctttatagtaacctagcgtcaccaaaactcatataaaaagtggtatagtcatattgttnctaaggttaggaatgatggatatggatatatgtggggt

SEQ ID NO: 29328 - DNA, 454 bp, Oryza sativa
  unsure (1)..(454): unsure at all n locations
cggtggcgggatggcgctgttaagganatccttgccatggaggagatttcatggaagaagcctgcatgtattgtcttctatttttgtgtttgtgaattagatctggatgcacttaggtccctaggcgaatcagctaattgtttcggaatatccataccaattgatgatgctttgtcttttggtaatatccataccaactgatttatgctctgtattagttatggatgcacttaggttcctagggtgaatgagctaattgtcttttggacgaattagctaattgtaaaattggtttcttcttattgtacgccgattcatagcgaattgaaagtagtattagagtggtcatatttcagcttgcagatgcnggccaaagacctacctcagagcaaaacttgccacacaggatgttgactgcacactatcactatacattagtctacagctagtcaaa

SEQ ID NO: 29329 - DNA, 388 bp, Oryza sativa
agcttgaatgctgtgaataaagaaatttccaaagtattgggcatacgccatgcgcacactgcttcaacagatgtgcttaagtccctaaaagacacatggtttcaccacacctggaaatatatggcatatgtggtataacatccgagtaagtaaactcataaaggaattaccaaccgcctgaaaaatgaccataatatataatcagcctaagccataatattggtcaataaaaatgcacacttacgtggcaaaaagcaatgatattgtatccaatcaattgcttgataaacccaaacagcaccttgactatataaaaaagtcagcgggacagctatataaagctttactggttgacacctttttagatgcattggaccaactcctaaaa

SEQ ID NO: 29330 - DNA, 481 bp, Oryza sativa
  unsure (1)..(481): unsure at all n locations
tcaattaacattacccagattgattaaagatattgataccgatcctgcgacgaatggatgactgcaaacactggcacgaaagcaagaatataatggcaccattgatagatggatgaaaatgtttaattagcttggttctatgagcactagcttagttctgaccgaagacaatttcaaacctgtggctgccgttctagttgcttggtgngcttctttaatttgatttgtacgcactggcatataactccagagagtagattattcaattattatcgaacatatatccttgtgagtcatatcttacgtagtacttatactgtgtaaagttgaattgagcactaatatttctgcaattcgatgatgtcgaatattacaagtcaagcacgctaagtatccgtgtcttatagtatcgcaatagaacccgccggtcgtcatatagtacacactactacttgcantgtactttgatagctctagatta

SEQ ID NO: 29331 - DNA, 507 bp, Oryza sativa
  unsure (1)..(507): unsure at all n locations
gtcacctgcggcatgcaagcttgtgattcactgctagctagtctgtagccatattaatatataaaatactagtatgtattaggaacatttccaaaatttccaactattgcttttaggaggcagaaattaacatgcttaattagagatgtttcattttcgtattgcctcttagccaatgaactaaaacgaagagcactgctatttttgcagatgcttccgtccaaggatagcaaacttgttggctatacatataagaaatttgaaattgtaaatgatgatgaggttgcangaattggttagcactctctctctctctctaatgaaattgtaaatgatgaatgccttctttagattatgcattattagtgtcttttgtttgaaaaaaaatgttgtgcttatggaacagctgagttgaagaagaagagttccaagtcatagcggccaactatcaagacattanttggtattgagcactattattacctattggttcttatacaccatgta

SEQ ID NO: 29332 - DNA, 432 bp, Oryza sativa
  unsure (1)..(432): unsure at all n locations
tctgatatcctactatattctcattctgttgtatatattaccttggcttgcatatttcaatttgctactttataccctaacttctatgctatatgatacaaactccatttttaagggagttttcaattacaagcatgaaaggaggttatcggcgggtgttccagcggcctattgatnttgagtggtatgccttatcccattgacttttcacttcattagatgaccaaaatcatcaccttttctttcgtataaattctagccctgttccactaaaaaatgctttggtgtgactgtagggaactcatgacttatacagatgacacagcatctntagcagaaactgatttggatgttctgtccagaaacaaacctacaaaagccaaggaagtatatgagactatatctagcgcgaattcaaatgctcaatcacat

SEQ ID NO: 29333 - DNA, 405 bp, Oryza sativa
  unsure (1)..(405): unsure at all n locations
gctatctaataatacaacttacatggaaagcttatttgacctttttatagctaagctacaaaacaataataaaaggcactctttggctactctggtgcttatctttgtgataaactagtcttgaggtagtatactgtttaaaatctcagctntgtatcatgtacacagtattccagctgagataactttcctgagatacgaagcacttaaaattcaatatggcatacgggatacgggtttagttttatttagcgctagaaagcatcaataaaggaaagcataatatttgagcactcttctacacaaaagaaaatctcaaccatgtcatgatacaacatactacttcacagtggcacttctcacatattcctatcatatatgacaaaaagtacatgtagcacatgt

SEQ ID NO: 29334 - DNA, 448 bp, Oryza sativa
  unsure (1)..(448): unsure at all n locations
tcctctaagtcacctgcngcatgcaagcttcagctcgtntgttggaactttgaaggtaggtgattctttcttggtgcgaccttacaagttaacaggacgaattcagcagaaaatcaaatgctatgttctgtattgtgaacatgtaaatcangtgaaacttttgaaagagagcaaaaagaacaatggagagatgtaacggcgtccaagagttgtatatttgtgtatgacaaactatgttcttgccagattgcatgaaacgaggaagaactatttctcctcaagtcaatcaacggccatttggggtgcttctttggaacagggttcaggattttcactcctgatcacccctgggaccaatatggctgggatacttaaatgaaacatccgcccaggtgctttgcccatctgtcagctgtttcaccactgatgccacctcatcgatgccaac

SEQ ID NO: 29335 - DNA, 456 bp, Oryza sativa
  unsure (1)..(456): unsure at all n locations
ctaagctctctntctgcacattntgcagatatcgaagggttgggtagacatatatggccctgatagggttcttgacacaccaatcacagaggtgatactcttaaaccttctgagtgaccgctggtgtccactcataagcagctagagtgacgcagtcacattgaagtactgatatgtttgcattctgttcaggctggttctactggaattggtgttggtgctgcctatcaaggtcttcgccctgtggttgagttcatgacatttaacttctctatgcaggtcaatcattcactattctcacttaaatntatatgtttgatttcagaatgtgccttttcctttgtttttaagcagattatttggttctgcacacttagaaaggttacatttagagtatactatacagaagaacctgcattctacagcataatntttctttttttgtgagtacaaaat

SEQ ID NO: 29336 - DNA, 410 bp, Oryza sativa
  unsure (1)..(410): unsure at all n locations
agcttgacatctgccaatttaaacaattctttccacattgcacttgtaaagatcctatccctgtcagagataataacttgnggcattccaaacacatcatatacatgctgaataaaagcctgagccactgagtaagctgtgaaaggatgtgtcaaaggaatgaatttggcaaattttgtgaacttatcaacaacaaccaatatggtgtcatatcccccagattttggtagcccttccacaaaatccattgtcacagtgtgccaagcttgcaggggtactggcaatggttgcaacaggccaagagttctacaatgctccaccttagcctgctgacaaacttcacattgagagacatactaatggactgnattctttagtcctggccaaacaaacatattctttatcctctg

SEQ ID NO: 29337 - DNA, 487 bp, Oryza sativa
  unsure (1)..(487): unsure at all n locations
ctcgaagctcgcaagattgaactcttggcacaacttcaagaatgcaacgccgagctggatatggaacacaaaaagctagccgatcttccacaagttgtcgaagaacaaaaggcaaggctgaaatcggctatcaagaatgtcgctgatctgaccaagtctttaaaagtcatccttggaaccgatgctcangatgcccaagctatagaagaagtagaacaaattaggcaaagggccatatcagctctccaacgatatttgtctcagtgacattntgtaataggccttaggaaatntcgttttaatcggctaatacctccactactttgactgtctgaacgatcttttgtgccgattaacacaactntagcatatatatgtgcaccccntaatttataatgatgaaggcatngcctanattataaatngaactaagggcgatacaacaatatcggccatcgtacatcggcaaaccacaaccccgatacat

SEQ ID NO: 29338 - DNA, 419 bp, Oryza sativa
  unsure (1)..(419): unsure at all n locations
atgctgacgagagcagtattagccttgctaatgagatatacaggatggtactgccattacatacgatactgactatattggcagagttcaatgcttgtnagctagcagactcacacaatattaatctatattatatcacgcgctcattcctgtgatcatcagtgtactgaagcactagtgtatcattctatgatgaccaggagagcgcctatactattgacagaccatattcttgatgtgctctatagaacaaatattatgtatcctccactacaacctggcctacatatcattataaccctgaatatagacctccatgtacacttctgcatctgggatgataaggtataaattccagcttcaaggatctctggatctatatatagggagactgcatgcatgtcctagacgtactgcat

SEQ ID NO: 29339 - DNA, 355 bp, Oryza sativa
  unsure (1)..(355): unsure at all n locations
agcttttaaacatttatatgggattgtgctgcatctatctacctttgctctatatatatttctcttagacattatcctgttgcctggcatattcatatgtttacatgggattaaagtagccagtggtgatatagatatatgcanactagactcaaggatgctgaacatgtnttttttaacagtaaagtaataaatatttaacttacaaataggagtacatangctgctaggactgcctacaaatctgtnttcagaataacaaagctaaatttcttttgatgtataagtagatagcatttcctgtgtagcctgcattntgtagagagctttataaggttccctgaatttagttaac

SEQ ID NO: 29340 - DNA, 362 bp, Oryza sativa
  unsure (1)..(362): unsure at all n locations
tgcctcttgatatgtcanaactactgttgttntataacatagtttgatttaatccacaaacggttaggtcagtgacactatacttaaagagaattagttaattacaggctcaaagtttcaacgcacatacacttaacgtgactcatgatgtacaaggagaccactatggaattttttttcctaacaatttgagctacaaccagctattctttattaaaaacaaattagaggctagtctttattaaaaagaaaaaaaatctttcaatacgacaagcaacaaatattattttcctcatgaaaatatcatcatttattttccttgtcttgttatctatcgatgatctatgaggtacacaacaatg

SEQ ID NO: 29341 - DNA, 459 bp, Oryza sativa
  unsure (1)..(459): unsure at all n locations
agctttccttatctttacgtgatatataaatactttctctgtttcagaatataaaactttctagcattgcccacatttatatagatgctagaaagtcttacaatcttacaaaggattatatgtgccggttcaataggaaaaaccggcattaatattataggtgtctccatctcaaacataaccactntttctccatgtattatcgtaatattagacgtacatgcatgcatacattatctatcaccattntctcctctaaattcgtgttgttataaatcctctatcatcaaacccncaatcacattacttgcaggtataaggtgattaaattctttgttggcttttcgtagtgatgctttggcatgccttatatttaaaataagggagtaaaaacgaatatttgttcacacttcaaactatatttcttaaagaaatctttactatactttggacactttg

SEQ ID NO: 29342 - DNA, 435 bp, Oryza sativa
tcacaagcagtatatatgtgtctgtatgtgcaccatgcatgaatggtcaaatcggaaccgggaacttcatatatatatatactccatgttgtgcatatcaagatcccctagttggtacatcactagttcttttttctacatgttaattggtcttgctaacattcgttcatgttagaatatttgcatctgcagtttgtaacaaaatgcacctgaattctatttgaatcttcactatatacttctaagcacttgctctgaccctctgatatatacctctgatgctggtgggctccaaaaaagatggtcacgtaacttggagatatatatatgcttgtattgggtgtgacatgtaattggattggatgggataggtcagtaccaccactttgaacgatgagggtgatgagatgatgtccagttatatcttgatgacta

SEQ ID NO: 29343 - DNA, 327 bp, Oryza sativa
  unsure (1)..(327): unsure at all n locations
agcttgacaggatattgatgaagatgacgatgtcggtgatccattcaatagcaatgtagcaaccaatggtaatgatgaagacgctcatcaagcgttgcatagtagatcaaccgtgaaggcgaaataacaagccgacaatgacggaagtaaccggaggcgaggacgtagtcatccattagcaacggcagagatgtcacggncgatgaagtaaaggtgctggtgatgaagtcactgacaataatccatcanactgttgagaagatatcgaagcttaagtaattntcttgatgtgtgtataatgaagattgatgcaacacccncttgatt

SEQ ID NO: 29344 - DNA, 374 bp, Oryza sativa
  unsure (1)..(374): unsure at all n locations
gggatggcacatggtgtccatcaggggagatctgcagtgcctgctctcccactgcaatgttttggagtggttaagcctgacacagtgttcattgcaacatcggagcatctgccagaagttgtgccggttgcggtatctgtgcgtgcgcaagtgtaggctgcagaagctgcatctgcaagcaccgaatctgacagaattcgagctcaccaactatccgataccgaatgtgcttgccgaatgcctgaacttgtncgtggcgacgatcgagctggtgtcattctcggattgtttgagctatgtctccactgagcttccagctggtggtcttcatcgcgtgcacgatcgtctcttcatcaacatgacagtcagaactg

SEQ ID NO: 29345 - DNA, 397 bp, Oryza sativa
  unsure (1)..(397): unsure at all n locations
agcttgtattatgaaactaacagtttatcgttctgtctataaattagcaaattaaagagagggttttggtactttataagatacggngagataccaccatctattgtattaatttttgtgatacctttgattttctctacaccaaaggtttttgtgatacggggaggtactgtaaattaacatagaaaggtttttttttttactttccaggactctcaagaaccgtatataaaattgctcaaaaacataaaaaatggatgtgccaaaatgtgtatgactatataatatccgtagaaagcgtcttggattgaaacaattcatgtacaactagcaatttcaatctgttcatgctcagttgggatagatagagcatattggtattagtcgtaaagaaact

SEQ ID NO: 29346 - DNA, 431 bp, Oryza sativa
  unsure (1)..(431): unsure at all n locations
ctcagctgaccacgcagaaagctgtgaacggggagaggaanaggaaaggtgccattagccccanaaaagcttgatcttggcaaggcgccattagctgctcaaaagcctccgaccgaattcacattgngcatgccattggtcggtgacgatgccttattcaagatggaccctgcatgcaaggagttgcacgggtactacatggggaagtccaacgcaaggaggaagaatagagagacctccatgttgggctagcatgatagtcagccgttcctcgggcctactgccttcatcaccgtaaacttcaaagatctatgggacctctacagggtgcgagcgatcgataccaacctccttgagtgctactccttgtaagtatttctggctaccgatatggtagtaactgtccataaattacgcttaccctgactctt

SEQ ID NO: 29347 - DNA, 422 bp, Oryza sativa
  unsure (1)..(422): unsure at all n locations
agctttatccacattattatcttccatgtctacatgctctgaagacgtggagcacagctccgacctctcctcgcagacttgttntgtgctagtgtcttggctgcaaagagaagatattccaaaaccttcttaactctccaatcaagtttctttagaagaatcttatgatgctcttcaatgattgaaggaacagganattaaatagtagaatatacatgcagaaccttcgtatntgcaactgtagcgcgtccacaagagctacgagttcttccttttcttttgtcgcagaatcgagtctactcgcagcatccattattcgcatatcagcatctgctgctgaaactctcgctntctcttccgccctcacaacggctgtctctaaattacagcattttctctagctttcctagttagaacgccca

SEQ ID NO: 29348 - DNA, 461 bp, Oryza sativa
  unsure (1)..(461): unsure at all n locations
tactaagcttaatcactaattcttggattatggtacctttactatactntgctaatcagctaacaacctaataaaggtctgtgagaacacattgatacaacagtcaagaatcatgactttctactggggtctatctttactgttaaatcctgccttccttgcttcctattgttaatgactaggatgatctatggtgacaacagacatttctatatcaccagcgtcattgccttaagctacaaaggatatgtgcaaaactgcattaccttcctcgagtgtttcttgcgtacggaagacagcagcattattntgcataacacgttgcatgtttagacggatcttggaagttggcaatgatccatttgcatttctcagcttgtctaaccaggctatggtcttttcttcagcacttttttgaagaaggttctgcttctcacctataatgttgcatcacagacatt

SEQ ID NO: 29349 - DNA, 406 bp, Oryza sativa
  unsure (1)..(406): unsure at all n locations
cgtgaagcagcaagcatgcagcactgcagcagtgagcactactcctcctactacaaattanaaagagaaaaaacactttntttttcagagacagctagagacaagagaaagtgtcactacaaggtgaaggagacactgaaacacagaggaccctnggtggttntgagcagctgggttcttcacaaagattcagagatgtgtctttccatggcatgagtgcatgcatggctgcagatgcagaggcagaggcttgcancaatgcaaagaaagattgcagtcatgcagcagtcttgtgctgcaagtgctttgcatgcatgcatgcatgcatgcatttgcatgtgtgatactccactatataaatgtgcatggtccacaagatcttncttgacatatcacaacaactatg

SEQ ID NO: 29350 - DNA, 381 bp, Oryza sativa
  unsure (1)..(381): unsure at all n locations
agcttaatagaatagaagtactcttagtaaataacatataaatgagcatatatatatagtttcctcaagtactcataaactaacactacaatagtgagctagtatttctacagaccatttacttcacttgtattagaaatgtactgaattaagtcagcgaagcaaggattgattaattcagnttccagcttgttcgtaggatcagtagttcatccaacagtacacttcagaaaaggtgtaacagagatagaatacagatacacgatagcaacatggttatgctatacatgacataaaagagtgcaattaaggaagtacatacaatacacatcaatcaataacagtgcgacagatttaacatgtccaccaactgaacaagtt

SEQ ID NO: 29351 - DNA, 481 bp, Oryza sativa
  unsure (1)..(481): unsure at all n locations
gctggaggaccggatggtagcaatagtagtactactactcgtagtagctataactaagctagctatggactgaaatcatgcatgcaagccgtctgtttctatatgtaacgttgtgctgtgaaactgtttgcacggttcaatgattgatgagatgggagagaactatactagtggctgctgattagtttcactgttgagccatcgtgcaacattgcatcaaactgcagtgccaagaaagacgccagctcaactagcgagctggagtaggactagctagctatagcaattacggcattgaccatccaatcgtgactcaacctactaacaactgattccgttcaataatggtgccatgttggatagcggtgtgatgctgacaagatagcatctggataatgataatcccgcttccttttcctagttagagatagtgacttggataatcaatccagcgtanaccatttgtattttttcggacaca

SEQ ID NO: 29352 - DNA, 427 bp, Oryza sativa
  unsure (1)..(427): unsure at all n locations
agctntgtttgttggtttagacctttagtttaggggttgagtctcacttgtcatctntaagagtatttgtagtgttctaggcggtaatacccctctttggctatttttgtcgtgcagtttgatcaggattactaccctggcagacggaaaagaggtgaggactacaaagaggacatggtatgttcattacctcttgacaattcactgcctggnncaatttaaattcttgatattattagttcctgatgtcttgattgcttttatgcagcttgaactcccgttcttctatcctggacaggtttgctagaagttctgattgtactctcattcttcagcaatttggtgactgttctcgcccttaaattctgattgtttggttgaatgcatctcatgcagatctgtcgtggtcgagtgatcagtgttcacc

SEQ ID NO: 29353 - DNA, 463 bp, Oryza sativa
  unsure (1)..(463): unsure at all n locations
cgaagtgaagttgtcatgcgaccttttaagaaggggacccaaatatctatctatctatctatccccatcatctccaggagagaaacaaggagaaaacaaagattcttgagaaataaaaagaaatatacatcataaaagatatgccatcagattggcaagaaccaaggaatctcttgtgacgaactaagcccaaggaaaaaacacttcttttttttttccgtctttcacagcaacttgctctgcatgacgtgttggaatgcatccatccattcatatctagctgatgaggacgttcatgcatactgatgaccaatgcagaananaggcagaggaaagagcagaacatattcgacgcaatcatcggatcgccgcttgtgttatagntccttctcatctcctttnntccagtccttggttaattcagacaaagatgatcagctacctagtattccacgtttgttca

SEQ ID NO: 29354 - DNA, 386 bp, Oryza sativa
  unsure (1)..(386): unsure at all n locations
agcttgaaccgngttntcaatgtggtgcttttgttactttcagtcggattaatcctaacatgaacagagtcttcagggatattctttattatcttgacaagaaaaagtttaccaactcatacacactgatgttggatgaaaagcagcttatcaacgaactacaggaattccttcagaacaagaggtacacatgctagtcatcaaactgccgtggttagcaactctaggcattaacccatgcattttgcatgggctatttatgtcatcattatctgcataattatataaatagtaaattacaaatctggtgcaaacagtttgttgtgaacgtggtgcagcacacatcagatcagagatagtcatgttcaanggaaaaaaaaagcgtc

SEQ ID NO: 29355 - DNA, 455 bp, Oryza sativa
  unsure (1)..(455): unsure at all n locations
gaagatagtagtttatacgaacttgtactntatacgaacggaaattagttaggttaagtagtgaactcaccagttcctgatagacgacggcatcactnttgttctcaaatgtgacagagccgtccgggttgaccttaccccttgcccgcgcccagttgcgagctctntgttcagggatgtctgaaaacggngcagggacattcgctgctgcagcggctgcatcttcttgggcccatattgcctccttgccgatgtaccctgcggtgcccagccgatgcgggtgctcattccgctgttgcagtacgcgatgtgcctcgctggattccctaaactcttgngtggtcttgagagaagcagaattctcccacaccgcttcnngtatttgagggtattcatcgaacggcgtatgattgccgggcggnctgcatactcggtgaagagcttcgacttccaat

SEQ ID NO: 29356 - DNA, 462 bp, Oryza sativa
  unsure (1)..(462): unsure at all n locations
agctntacttanggggtactcgcacaaggtataacactgagttcagaatatgatcaaagaacattcaagagaagtcacccatttcatgtataagtattactaacatctttagtgtagggcatctataaaaacatctctagtgtagtgaaattcaatagtacacccaataagatgactgcgcatgtgcagacacatcctaattagcaatagaagtgtttgctttngtatgacatggatgaaaatggaggcttggagaaattgggttgattagacccaaagggttcgtatcttctgccttcggtctcaaacgcaaactttaccgttgcttcatcctttcngcgatcaatagccgtatgcattggcccgattaaangtgctattgcaaagtacttaattagcagctgctcgtctgtttctttttccaggaaaaaaatccgagaacatcgtcangaataaatgcct

SEQ ID NO: 29357 - DNA, 499 bp, Oryza sativa
  unsure (1)..(499): unsure at all n locations
aagaggctgtcaggtgggaccaagtcgtggcaaactaggctatggtgagagggttgggtaagattctgggtaaacttgagttttagaatcatttttcggaattattttctcctctaactttgtaactacataattcaatgtgtagaccagaagaattagtgtagattttactggtggtagatgattacacctagattccattttctttggttgcactcaaaaataatgggtggactgctcacagaaattaaacaaagatgggctattagaaagctagattgaatttttaggaggcttaaacagaggaggaaaaatctagaanaattacatttattcatgataactaatctagtatttgaataaattatttcccatgttcacttatgtgcagttaaatgtacctttggatgaaatatggntnntagccgattaattaaaattgattctttagttgctgctcgaccgattaattgagattcacttgagtgtaacatgtacc

SEQ ID NO: 29358 - DNA, 327 bp, Oryza sativa
  unsure (1)..(327): unsure at all n locations
catctggcagagtcctcaccacaagcanttctcctgccttctcgtgtctaactgtctatatatatagaactggcatgtcccgttccaagccaagagcaggagcatcagcttattaccaatctttntcattcccctctcttggaacgtgctggtctcctcgcttctacactctcttgatcagctctcaccactatgtacccttgatcgtcatttgccacaaagtaataatcgatacagagcaacacaaagagctaaactaggggcagtaacgcggtagttgtactcgatcatatcgatccatggcttgcgtggcgaatggcggtgctg

SEQ ID NO: 29359 - DNA, 378 bp, Oryza sativa
  unsure (1)..(378): unsure at all n locations
ngcttatctcctatgcttcaggatttgtatagtcattatcataccatcggcttgccatcgtcgccgcctacaggtgtnctcgcctatacggttggatggtcacaccgccgtctgtgggcatcatcgtcttcactgatcggccgcttcgtcgtcgccagctggtgtctgcacctattcagttggttggttacaccaccgntgttaggcatctacgtcttcactgaccggccgcttcgtcgtcgccgactggtgtcttcacctatatggatggttggtcacaccaccgttgttgagtgtctacatcttcaccgaccggncacctcgtacgccgctgactggtgtttccgcctgcatgactggcctattatgcctgtcgtg

SEQ ID NO: 29360 - DNA, 415 bp, Oryza sativa
  unsure (1)..(415): unsure at all n locations
ctgcctcagaattactgctngatcttcattntagctaattgcttgttaccttcatgttgtgatgaaaggtttgagtagcatttgtaaaatcatgtatttaagaaagtagtcatagacaagctctattagatattgctaccttactattttcaatagaaaaaaaatgaatcagtaatactggccatgatttgcaagaggccttcagactaacctaactatttatattggtttgtattgcgtaactttggttttcaagccaattattccacacatgagtcacagagcagtgtacaggtgggcattcggtttcctcggtttaatcagattgcgtttttcaggttgcctggaagttagttntcgtaaaatgtaaaccgaaggaagttctagaaaaatatcaaccgagcaaaataaaccg

SEQ ID NO: 29361 - DNA, 291 bp, Oryza sativa
gcagcttattgattgtaaaacaatatgaattactagtcttccttatatgcagcttcatgtaatcaaactcacagcaagtgaatacacgatagtaccgcgttaaaaaaagaacaccagattgacaggcagttcaatagcaaaggtccaagtttggagttacaagagcaccgaaacatgacaaaaatacttataacaataaaggaacagattagctcaaagcgcaactcctccaggtccgaggcaatcgttacgcgaaatcaaaccctagtacttcaacctctcacaagcaca

SEQ ID NO: 29362 - DNA, 435 bp, Oryza sativa
  unsure (1)..(435): unsure at all n locations
cacanaactaatgatcaagagctaatgatgattaagttcttgagcgagttttctgattaactaagagaacaaatcaatatgagattatgagtagctaaaatattacatgagataacaccgagagcctggatgtggttttttatttgtgatcggctgaaacatacagacgaaatacacttggatgtggtttttttatttgtgatctaccacataagaaacttgagtttgtatcaagcatatcattcttgcttatttattagccatttaattgaaggtgtancttggttgttgctgtgctatgcttgagttgtactttgctctacattcaacacattactgccattaagttaaagagtcctttttcaaacctgaacccattaatagagagctggagtgtgaaatcttgagggtagaaatgggtggccacatgaccta

SEQ ID NO: 29363 - DNA, 409 bp, Oryza sativa
  unsure (1)..(409): unsure at all n locations
agctttctttctcttccgccatcgatttacccgaatgcgctgatntgattcgagggatggctacggagaggtganggatngaggcggcggatcactggaaggattttgatgaactttttgaaggtggattcgagtggaatggtgaaccctattttgccggcgcagctctgtactgtagcanggagtggggaaaatggcgagagttccggcggggaagacgaagtgacgctcggatctcgggatttcttgttaagggtatcggaggtgcaaatgggcttangcctgaacagtacctcagcccagtatttttgacagcgtggcccattgtgctccttagggacttangcattttttgcttttggcatctatgcgcataatagtgttgcccaatgcctgataaatcctttta

SEQ ID NO: 29364 - DNA, 422 bp, Oryza sativa
  unsure (1)..(422): unsure at all n locations
ntcgtgttctctctgcttgcatgtagtatgtatcaagctaataacccctttattaatctctatctctttttccgctcttcactactacagntagcatctcaacctttcttcctcttcactatatatagccagctagaatcgtcaagcttttcctttcgttgctacctgngcatgaagaaagctcaggttcttcctatattagtgtatacatacagatggtgcatacgtaattgaaagagccctgtagatggaaagtggttcttcttcccactcgcgtggacatacactcgtttcatgaatgccgtctaaaaatattaatttttcaaaacataataaaacagattaatatgtgatatgttactctataaaactataagttaaaattcgacttatagaagaagagacaaaaataacaaatactc

SEQ ID NO: 29365 - DNA, 297 bp, Oryza sativa
  unsure (1)..(297): unsure at all n locations
agctntgtcaaattattgggacccgtgtgagatgcttttcatacttccatgatcaagatcgcacgcacactccacatacacacactatgctaaacttctacactggaagctagcatccctcatccattatttattttattcattatccacaaaataaatactccatgtcatttatgccttttcctccaaaaattctttcanagaanaaaacagagatagagagaggcatggctatgcaaaagaaggaaaaaaaaagtattgctcatacaagtatggagcattgataaaaaaaaagag

SEQ ID NO: 29366 - DNA, 405 bp, Oryza sativa
  unsure (1)..(405): unsure at all n locations
tcgtaagccgctntcatcttacgacgataaaatcaagtcaaatcaggccaaattacccgtcggcctagctntgcgtgggatagcgttggtctcgtctgcatcatcatcgctgccggtgaagtggtaagcccgccgccgccgccgaccaccgccttgaggcttccttgggccaggctctatgcgttctgggcttcacctatgcactgggccgtcgtgacttgngccgttctcagctttgacttgggccggcctcagctactttacggngcctggttgcttcttctggacttggttntccagtggaataagttcatctaanggtccttaactcgtctacgaatacgatttccgtccttcatccgcataaccagatacaacgagtgcctcaactatcncaacctatgc

SEQ ID NO: 29367 - DNA, 409 bp, Oryza sativa
  unsure (1)..(409): unsure at all n locations
agcttctctaatttaggccaagtctaattcgatgtgtatgtcatanaaagatcagggcaaccatatnttctacaaatagcaatagaatcttgataattttgatacaaataccgaggtcctccggtaaatgaagctggcaatattatcctttgcccaatagaagatccagatgtaatacctcttgagacagaattaatcaatgagttgaatggtgatgatctatattaactttggaaggctgggtgcaataatgtgctatccggcttccctcgacacaacaataagaatctacttcataagattgtgttagccttttacaccgtaacggtgtattgaagtctcctggcctatcatgcaacctatatgcatagcactctagcattgtaacttntattccgtgcatggattg

SEQ ID NO: 29368 - DNA, 418 bp, Oryza sativa
  unsure (1)..(418): unsure at all n locations
taagagagtacgctctgaattaggatacaatagagcatcctttataaagatatgggaacccatagggagaactagagtagcacttccggtgcctactatatgagcattgcttccggcaatggtcataatatttccagttttcttagttaaggtgtgaaaatatctagtttcccttaagattgtattagtggtggcactgtctactagacatatattctcttcacccaagtctgtttatagaacataaacataaatgaaattaaacatggagtaagttgattctattaagggaaacattacaatgacttcaggcccagtaaaagactaagcgtgctcttcangagcattattcatgaccaaagttctacatgtgctactcatgccgaacactgcatatgactgacatatangagaatac

SEQ ID NO: 29369 - DNA, 163 bp, Oryza sativa
  unsure (1)..(163): unsure at all n locations
agcttcttctctagttcatgcatgtcagcaatatcagagatctcgcttgtttctcgccgagtcagctccctgtacacccgtgatggataatatgcttgactnntttntttcgccgggtcggcaaagaacgccgaccatagtatattaagaatttggagaatgt

SEQ ID NO: 29370 - DNA, 461 bp, Oryza sativa
  unsure (1)..(461): unsure at all n locations
ggtgatggtgaacatggaagagaatagtaaagtaggagtacaaatgaagagagaagcttcggtataatactcactacttcctccgttntacttcaattttttcaaagtcaaattttattgaatttgatcaagtttatagaataatttagcaaaaatactaaattaattntattaaatttaccattaaatatattntgatgatatatttgttntgtgttaaaaatgctactatattnttttataaacttaattaaatctttaaaaaattaaaatatttgaataggttaaaagtcaaaaagggtttataatattaattgttgaagaagctcaatctcgtgttcatgttgcccaactgccacatgggtggccactgtgcagttgcctttcaactgtacgtgcaaatccaagcttattaaattgaagcttgtacaagtaactaatccttgtctgaattactcgtc

SEQ ID NO: 29371 - DNA, 154 bp, Oryza sativa
agcttcgaatagactgtgttagagttgcctgctattcagctcgacgaataaagatggcacggaggcccatttatttggaattcaagagatattgcatggagaaagttcataatacatgctaattgtttagaagcacagcacagatgtaggcgct

SEQ ID NO: 29372 - DNA, 394 bp, Oryza sativa
  unsure (1)..(394): unsure at all n locations
tactcagctacacactgaacttggtctgtttgcttgttcaagtggctcagtctcgtcgtgatatacgtgtaaattgattgtggaatgctcgaccttacctatactcttatatattgccactgaaaatggaaggaaatgctacaggcggcggtcattctgaggcactgaagaactaccatctatgaagaactatgngtataggctcatttggcatagcgaagattgcagagcataagctcacacggcacagagttgctatgaagatcctgaaccgccgccaaatgatatatatggagatggatgagataggtgccttgcttttatatagagaccactatgatcaagctatcatcgtctgtgacgtgatcatactggacctgcttcctatagtgga

SEQ ID NO: 29373 - DNA, 368 bp, Oryza sativa
agctgggcgtttccaaacccgcatatttcgttctctatcttgtagggaagagactcggcgcccaatccttcaaccgcatgcacttcgcgcgcgctgtgtgaaaattttcctaccaggttcttctttgtgcgttcgtctacctgtgagtcaatccatcacgccagcagccttatctttctcgcagctggctgggaaagcagccatgcttccccaaggcttcccagcgtcgacatttttttctagcggcagcgccagaccatattcaaccaattggcggacttcgtggcgctccccagcccaccaccgactcaatcgggcgtcgccctattcatctcaatcgtcctcgacctaccgatcctgcagacagc

SEQ ID NO: 29374 - DNA, 186 bp, Oryza sativa
  unsure (1)..(186): unsure at all n locations
cgacttcaatgttaactgtgcaacagctccaaccaactgcacatgatgttcatgaactcctanaaaatggtgaatacatagggtgtgggagtggctcttctgtcatgggtcttntggataaactnggtcttttcagatcgatgatcaagcctcatcataaccctgaggatattcacaacgcactct

SEQ ID NO: 29375 - DNA, 312 bp, Oryza sativa
gcatgcaagcttaactcctgcgctttcctgcagggcagggatgatagtataagatgtttaatctatactatacaagttactggcggtatggttcttagcctacaattggacctgcttattctctatacaccatgcctttgtaagtgatcttggatactctattttcaatcacgcggcgagattttaacgtgcaagcaccacaacaagggatagggtacatcaatgaatttgtaagaacacaacaacgttcgctttgtaactgaataaaatggcttcctggtgaatcaatcactgacgtgtcaacaatcatgc

SEQ ID NO: 29376 - DNA, 474 bp, Oryza sativa
  unsure (1)..(474): unsure at all n locations
tgacatgatcctatatcnatatttaaaatgctatacatacatggacgcaacatttatatgatggataaagaaaactcatgaatattatatgtgattgtagaactaaaaatgtgttagatcaaagtcaaaatgatcaatagtgtggttntatgatattttatgattatntgtcacatgctaaaatntctgtgatattgtgtaacttagaccataatatgtgtggttaggttaaatntactgtgaatagagagaaagaagacaaatacaatgagatggaagcatagaaggtgacagcagaggataattcagtgccaaagttgacgaatgagctntactatcgaggttataggcctttgtggaatatcattatatntatttgtcctaattgttgcccaatntaatgnagcttataagggcattacaatatcacaatataaagtctattaggatagacaccctataaatcgatgcatg

SEQ ID NO: 29377 - DNA, 241 bp, Oryza sativa
  unsure (1)..(241): unsure at all n locations
tcaatcaatcgatactaggcttgataaagtctaaacatactgattntcgaatcatttagttttacctctaagaatctaatttatctatgacaaaaaatattcatcatggatcactgaaaaatcgtcaaagaagattgtctgtgacgaatctacttaccatcatctattgagcggcacagattaaatctgccgatggtttctccgaaatcgtcacggatcagtacattctatgacggttttt

SEQ ID NO: 29378 - DNA, 369 bp, Oryza sativa
  unsure (1)..(369): unsure at all n locations
tcctttgctntctccactcanatctagagcctatcttgtgagattgagagattacatgagagtgtaggagtgttttggagatggcttgaagattacgtttgattgagcactttggataccttgtgggctgtcacttgggcttattactcttggagatcttctcctagatggttaggtgtctcccgtgagcttccaaagatcttgtggatgtcgtacgaaagtttgtgaagtttttcctcacctccgcaaggaaacgaggtaagtgagtaaagattcttgtgctgagttctcagaggttgctctaggtagagcaacttgcacttgtggccttttctagaagaaattatgagttggatcttggtggtctct

SEQ ID NO: 29379 - DNA, 409 bp, Oryza sativa
  unsure (1)..(409): unsure at all n locations
agcttcaagtgatcgtgacgacggaatcaatggcggtgttcgcgtacaggagcggcggatccggcatcaaggatcttggctacggcggatcaggcgctagcgagctcggcgatggtgggtgtggtggtaggtgatgaggacatcactagcttagatatggtcatggctaccttaaatatttatcaagcaaaggtacatgctntctatgtaagaattacatgtcatatatttgaacaaacactattatactatgagtcttgcatgtgctcgtttggagaggaactngcttgtgtgaaggaaaggggagcggacatacggagtgatngaatgatctattgaagttaatggggactaaccaatatccttcccaaagtttatccncatgttaccacgtcacttttagttcata

SEQ ID NO: 29380 - DNA, 400 bp, Oryza sativa
  unsure (1)..(400): unsure at all n locations
tcttggagtacctgaacgtggtgcttcngccatggccgcgtgtggccgnctatangcggtcggcccctcgcgacggcgtcggagatcgacaatcgcttcgttcagagatgttataaaaatcgatgcacaacggagacacanaatttacgtggaanacccttacgggaaaaaaccacgggcgccgactggcaatcatcattatagaggagttgattacaaacgtaggggaataacaatgggaacgtcaccccttcctgtacggcttacaagagtatatataggggataaaagaaagacacctaataggatagacataaagtgctactaggaaactaatccgaatatattgtggngcccaaattcggatcacatatttaacaagaaatcaaaagaacatcga

SEQ ID NO: 29381 - DNA, 447 bp, Oryza sativa
  unsure (1)..(447): unsure at all n locations
agncttggctataactgatttttnttatttctataatatcaagagtgatattttaatttacagcatcaattaccagttctggaccatgatggttgcgatgggcttcagcgaagcaatcaggtacatacacaataatggccattaactcgtattatatatttgcacatgctatcgatattacatacaaaagtttagcagattattatatatataaggatatcatagttctccttttttaagatattacttaatcgaactattcatgcacagatgaatggtgatactcttaattgcttaaataatattttttattttcacaataagtcattntaagtctattaacagttgcatactntcgaattactnntatggcttccccgcaaaaaagaacaatagtttatggcttcaaaaatacctatnaaatcattctgaaagttnnttcattat

SEQ ID NO: 29382 - DNA, 368 bp, Oryza sativa
  unsure (1)..(368): unsure at all n locations
accccctgcctcgcatagatcagaccgtcgactccactgcggggtgcgaccttttgtgttttctagatgcatactctggttaccatcagattcgcatggctagggaggatgaggagaaaactgcgttcattacccccgtaggaacctatgtgtatacatcaatgcccttctggttaaagaatgcaggtcctacttttcaacgaactactcgaatttctttgggtagccaaataggacgtaatgttgaggcttatgtcgatgacttggttgtaaaaacgcgcaaccaagaaactttactttcagatctagcggaaacttttgagaacctccgctccgcccgcatanagctgaaccccgataagtgtgtg

SEQ ID NO: 29383 - DNA, 346 bp, Oryza sativa
  unsure (1)..(346): unsure at all n locations
tgcaagcttttactaagagtgcagntctgaattcatttcatcctcatagtagtaaagagctaggtgtcagaaatctgaagctgatcgacacaacatgaaacagccataatagtccacagtatcgactttggagattcttacctattgcagtaatccttaacccaacctcggacctttcaggtttaatcagtactacctccgtcccaaaataagtgcagccataaatatgcgtgctcgggcgtttgaccatcccgcttatttgaaaatttataaaaatattaaaaaatagtccacataaagactatcatgtttatcatctataaccataaaaactatcataattttt

SEQ ID NO: 29384 - DNA, 399 bp, Oryza sativa
  unsure (1)..(399): unsure at all n locations
acgttgtataatatgcaacgaatgggaagcaaatagtatggcttgtcgtgaataanaaccaatttaaagaattttgctatcatgattntagctacaacttgcagtacctatttattatatataatcatgaatttgaaagaatctacatataatttttggacgaaattaaactaaatcaaatttagccaccatgtgaaagcaaataatagctttgagaaagtggtttacctgaatttcatggtctttgaacagcgggtgtttaaaggttggctgttgattgacgtcaacacaatcgtatatatcaccatcttctgtctaattntatgttacctatgcttgttagacatcaaacgatgcagaatacacccttcanacaagataatagtcttgcacatacct

SEQ ID NO: 29385 - DNA, 421 bp, Oryza sativa
  unsure (1)..(421): unsure at all n locations
agcttgaacagccctgacattcttcttatcagtagttttacccgcagcgctgatcacatgacccaaataagtaaggctggattgagcgaacgaacacttagatcgtttgacctttaactggtgagtcgtcaatagctagaacacttgacgcaacagcatgacatggtccttgcaaatacgactgtacaccaatatatcatcaatgaacacccaaaactccttcctcaataacggtgcaagaatcatgttcatcaacccttgagaagtggccggngctcctgtaagtccatatgacataacccganactcataatgaccattatgcgtnttaaacgcccgtctatactcatcttcagctcgcattctaatctgatgatacctcgcgcgcagatccatgctgggtaacagactagcacctgac

SEQ ID NO: 29386 - DNA, 392 bp, Oryza sativa
  unsure (1)..(392): unsure at all n locations
tcgacttatgttcaggccttccgccgaccaacttgtgcgacatatccagccttgattggagcaacagacctcgacgatccacactagacagaataggcaaatgttgattcagtggcaagcaaaataacgagagaatattcggttttcatccaacaaatgttttanaatgtttcagtggcaaagtgttttttagtcctccctctaattctactatctgntgtactctccttaaaccccgtgactttgagcaatgaaattcacgtggggaatctctcccctgcggtgacttgttaaaaaaatgttttaaaatgaagattgccttagaagtcagaactttgcagatnatatcatattcctttactcanacaatgtatgctaggcaaactattatg

SEQ ID NO: 29387 - DNA, 396 bp, Oryza sativa
  unsure (1)..(396): unsure at all n locations
agagaatcagcatccttactcctgcagtaactgaattctaatgtgaatntccagtgttttctttggattagctaataacatannactttagttgaaatatatatatctttgaaatcactggtagaatatttgtttcattgtagccatctaacctttttctcaatgaattgtatcagtagttttctaacctttntctcaaacttgtacatgaatatattttttntnctggtgaaatttctgaggccaatctttctgatctatagtttggctgcctttctatcagacgccttagattaaactcatgggtgaagaattcctctgagaaattcagtcacagatcttacaggctattntattggctgtaatttatgtacctttggtctccattggatcctg

SEQ ID NO: 29388 - DNA, 384 bp, Oryza sativa
  unsure (1)..(384): unsure at all n locations
ctctaagtcacctgcngcatgcaagcttccaaataatcntggtatcttattataaccattattagttaaagctagatacatcgacctaatagaaaatattccattctgatgataattctatctaaagctatcagaggattgattcaattgaatatgtacaatataagcacacaattcatgccaatatgcaagattctgaccaactaatgatcttctaaaggaaacattgagtggaacagatctcataacattagcaatagtagaacttttcccttcgacaatagagtataaagattgatatttgtcttttaaagccaagtttcctagccatttatctttccagaaccttatttgttcccattatttataatccaagaacccata

SEQ ID NO: 29389 - DNA, 428 bp, Oryza sativa
  unsure (1)..(428): unsure at all n locations
catgctgtatattntctataatattctgctgtaagctgcataccagagatttcttacacatggctcctctatttgttgtataagtcattgagggttcgtaaaatagtttagttcttcttggagtaaatgaaatagtttaatgtttactgtaccaagtatagtaaattggtaacaaagtgagcacacgtagaatgttatatagattatgagtacaaaacaaccaaagcattctccaatatacttatataactcaacaaaaaggctccccgttcagaaattgacaaggaatctctgaacttcagagtcttgaagatgatgcctgcagcctgccacaataaaaagggtatgccattgccctatatttaatcaaatgtctttgttaacagatagaatgggcatagatcgtanatggaatgaanatgtgtgta

SEQ ID NO: 29390 - DNA, 251 bp, Oryza sativa
  unsure (1)..(251): unsure at all n locations
agcttacaagtaaaccatatatggagatggcgactaaagttgctggttctcattttatagaatttcaagattacaatggatctacgaaaagatcgtgtatttacaactacaacggaatagtatacaaagtcaacacaaatcattaaatggaatttatggctacacaaaccgctgaagatagttctagacctggaccaagacanactcgcgtaggtaatttattgaaacccttgaatttggaatatgggaaa

SEQ ID NO: 29391 - DNA, 474 bp, Oryza sativa
  unsure (1)..(474): unsure at all n locations
ccagctacgaccaccacatcatcatggagaacacataatgttacagctaacagtagggatttagtccaaatactacaaaggttgtgacagagcanagttacagtgacactgacacatattactggaaagtgattgnggtgctacaagcaatggttgttacaagcacagaaaccaaggaagcaaaagtcgcaccgtgtgagcccttgaggaggaagaaaatgacgccttggagtgggaatcacaagacatggagcggctgaaggatttggtctggaaccctctatgctgcctgctccttgacctctgtggctttggtgattgtgcgtcatcggatgctgcaagaatgggattaaacaagaccaactatttacaaacgagacgcatgcaaccaaatcgaaggacataattaggtgccacgaanaccgtgccattantttaagttcggttttcacaagctaaatnggtccgtgacac

SEQ ID NO: 29392 - DNA, 265 bp, Oryza sativa
  unsure (1)..(265): unsure at all n locations
agcttatgaggttcttcgtctacgtggcatatgaggaacaacaaanatcggtgacgcactgtgaacgccctgatgcttctctctctccttttgctgctcccaagaagccaccacaaagcaagaaagtactactagcatttcagttntgagtttggacatgcatagaggggtcagatgcatgtctccccacgtcacacacgagtcgacgcgcggactcgaggtgacgcaccaaaaaatttttggacacgcgtgtcccggtagcact

SEQ ID NO: 29393 - DNA, 466 bp, Oryza sativa
  unsure (1)..(466): unsure at all n locations
agataggcacaatctagtggataaagaaaaggagttaattgccaaatatgaccttctcttggagaaactctctgaatttcacagacaaagggccaaganagactggattaaagatggngacagaaatacttccttctttcagcaagctgccatcaaaagaagaaggaaaaatagaattgcttccattgttagcaatgatgtttatattactaatcctgatgatattgctcanatntttattaattatttctctgatttgttttgctctgatagaactgatagacctaatacttatcttcctaatactacttctcctcaagaaatggattggcagattccagatgaggaagaaatttggagtatcatcaagggcatgaggaanaatgcttcccctgngccagatggtcttaatgctgctntttacagatctgcatgganngtggataaggatgatctaatgactctg

SEQ ID NO: 29394 - DNA, 339 bp, Oryza sativa
  unsure (1)..(339): unsure at all n locations
ttagagtcacctgccgcattgcaagcttgggggagacatcgctccctccaatgaggtattttgtatcacattgcatatntccctntccaattgcatatatgatttccaattgcatcttataaaacttcaaaacaacataaataattgcaaaatagaaaataccaaaaaaatatgataggtttgagtcatgctangtaagacaagctagttctcttttgtgaaatgatgaatagttgctctggtttatatctgttatatactctatcaaaggttaaatatgagtagccaacaattatccaggaaccggaggttaatgggctgcactttctaatctaagtc

SEQ ID NO: 29395 - DNA, 469 bp, Oryza sativa
  unsure (1)..(469): unsure at all n locations
aatagagatggacttctacactctntnggtcttgaatcatntgagacatgcgaatcttgtttacttggcaaaatgacaaaggcacctttcacgggtcacagtgaaagggcaagtgaactattgtgactagtacatactgatatatgtggaccaatgagctcaactgccaaaggtggttttgggtactttattacctttaccgatgactntagtagatatgggtatgtctacttaatgaggcataagtctgagtcctttgaaaagttcaagacatctcataatgaggtacaaaatcatttgggcaagacaaccaagtatctacgatctgattgtggtggagagtatttgagccttgaatttggcaatcatctaaagaagtgtggaattgctccacaattcacttcgctcagaacgcctcaatggaatggngtgtctgaacggaggaatcgtacattgttggacatggtgc

SEQ ID NO: 29396 - DNA, 286 bp, Oryza sativa
  unsure (1)..(286): unsure at all n locations
agcttgagggaagtttttagaattnttntttgtttgtttgaggcgtcattatctcatgatgattgaaggaatgagtcatgagatggtaattctgggcttagtagtttttttatagtgacattatttctcaattttggagaggaggaaaaaggttgtgaattggtattgtattgttgtctaagcatgaatgcttggatgaatgctgtatttgccaagttagttaaatttcacataatctaatacattttgcaaatgcatcattgagaaaacttgaaatgctaattat

SEQ ID NO: 29397 - DNA, 416 bp, Oryza sativa
  unsure (1)..(416): unsure at all n locations
tgcgcttgcatagacaggtggatccacggtagtagccgagcattcttagccgtgcagcagagggtggtgccaaagcctgagctctgggatgatgcacgtgattgtgaaaaacaaggtgagtacataatttcggactctgcatcctgtgattatcatgtgcttgcagtggatatgactgatgcctagtgcgctacttacaatgctatccctacttacaatgctaatctanaatcattcaagtggttgttgtacatcattcttaaacgtggtaccaagggatattgttcatttaggatgaacttatcgtaaccctgaagagtagctattttaattattatatgcaaattattcaaaagcaagaattatgtctcattttggttgaaaagctattaataatagtatttcatggccttata

SEQ ID NO: 29398 - DNA, 371 bp, Oryza sativa
  unsure (1)..(371): unsure at all n locations
agcttcagctctcaaagatgggtggagaattggtggttctgaaggaatgttcatcgccaagaatgcgtttntagtaggactagtgttcatcttgcctgcangctttgttggcacactgcctgagttgaaaaaaaaaagaagagcattttgtgtacgaagtacagagcacagtaattngtaaggttggactcggaggttgcaatgggcatatcttatcctccaaagtgagcggactagacatgttattctgtaattntcatagactgtgcatgattaatgagccaggacatgttntctcaaacttgctgcaattcacagatcatagctaatgcaatgcatcctaatatctctttaattaaccttaatagcta

SEQ ID NO: 29399 - DNA, 356 bp, Oryza sativa
  unsure (1)..(356): unsure at all n locations
tcatgttatgcacacggtcagctagatgtattacaactgctcnggcatcanccatagcaagaagcattgtgtgccatcgatctgcttcacaaacctgcttgctgtgttggtatcacgagcaagtntgctcatgtggcctaactttgagacctgaacatattatatatcaaccattacttgtgcaacaatacaatcatatttctctgcacacactgctatgacgtagtctactaaatatattgccaattgtcacacatncatcatatgagaaataatgctaccgagaaagtgacctcttaatgcactagacttagtacctaagctactcaaatcatatcatagaagtcgtacattga

SEQ ID NO: 29400 - DNA, 327 bp, Oryza sativa
  unsure (1)..(327): unsure at all n locations
agcttgccgttcgccttgagaacgaccaccgngatcttcatccactcctggtggatgacctcgcggatgaatccggcctccagaagtcgcgccacctcctcacggatgaaggcttgacgttccggggcctggcgccgcactttctgccggaccggtcttgcgcccggccgcacggcgagacagtgctcaatcaccttcctgtggaccccgggcatatccgcctgtctccatgcgaagacgtcagcgtttgcccgcacgaaggagacgagcgcgtctttctatntgccgtccaaaagaccaccgatccgtgtggtcttggactggccg

SEQ ID NO: 29401 - DNA, 367 bp, Oryza sativa
  unsure (1)..(367): unsure at all n locations
catgtcgtttggctttgagttgcacacattatacaagtttatgtaccataatacacgatctatttatgtactaaattacaccccacctcacaagtagacgtatcacgggtacaatttagtctattataaaactacatatttaatattgatattattacaaaactacaagcttagaggataaaatcttaacagtaacgttatcttcaaggtgtaaatgttgttactaacattataatcttgtaataatatatttgtaatatgtggttttgtaatacatcaacttaaatatgtagttttacaatagctggattaagacatctataattttgtagaatacactnttagatagcatagaatctaaataaag

SEQ ID NO: 29402 - DNA, 143 bp, Oryza sativa
atttttcgccagacaaattcatctccagctcatgagttgcagactatcccgctgtcttggccgttgcggattgggggctcgacatggttggcccgtttaaaaggcagttggcggatacacgcatctctttgtggcattgacaa

SEQ ID NO: 29403 - DNA, 447 bp, Oryza sativa
  unsure (1)..(447): unsure at all n locations
cgatggcatagtagtagaaccttgagtaccaagtccgcctacctggcgcgccactgtcgacgggtgatacccgtagaccagatatagagggtattgtggtacgctggtacaaggatctacgtagtacgacatcgagcaatcaaaagacaagaattatactggttcatgccccttgacaggtaatagccctaatccagttgatgtgggattatatggtggaaaacacatgttacaaaggacaagatggaacttgtcagatccggcgagattgtagtcgagtcgattcgactagctctcgacgacttggctcctcataggctccggcttcgtaggctgtgtggattctgagattcgatgatctatgccctccccggngggtcccttctatatcgcaagtctggtactctccgagtaggactcgaacatatcagacctagcacgatacgt

SEQ ID NO: 29404 - DNA, 368 bp, Oryza sativa
  unsure (1)..(368): unsure at all n locations
tgcagcttaacaagttgactggtcttattccacaaaatttttacataatggtggcactacaactacaatatttgtgagattaaatccttgagattttactttatgtgtcaacattntttgtttgagtttggacaaaataaagtgtagaattctctccaacattggtggnttttgttattgcttttggaaggcgcctcatttcaattactataaataggtacttaagtgacaacatgctgactggagatttgctcgttggatgttgaaaaacaaaggcangcacnagtaaacatgtgcgtatgctataatgcaatactcttctgtgcacatacatatatgctctctactggncactcttgttactttta

SEQ ID NO: 29405 - DNA, 270 bp, Oryza sativa
  unsure (1)..(270): unsure at all n locations
cctagctggttttgaacaccaacatattatntactatgctgggcaaacatgtagaaaggaagacccggagatggttgttgaattagccagtctattatactctgatgaagattgctgaagcaacacgttggatttgctcatgccaggatgatggaacttttagatggtaaaaacacgctaaaaacgacattttagtcttctgatgtccttatgtcatgggatttaactctgtgatcaggttgagatctctctctctctctctctctctct

SEQ ID NO: 29406 - DNA, 361 bp, Oryza sativa
  unsure (1)..(361): unsure at all n locations
aagatagaacgggtagagagatcgatcatataaacataacacatacacgaaggtataataattatctaaaaagaatgagatacgaaggtatataagtacttctttacatccatctgatcgatggagacataaacaccctaatcaaacgcactaatcanaatcgatatatatagcaaaactaaaccaagtagcaataataatctaagacgaagacacgggcttagtcgaagaggttaaacaagccgtcgtcgtcatcctcctcctcctccttcttctcctcctcagcctcctcctccgcggcggcggcggcggcgccgccagcagcgacgacctgaccacccgccgcagcagcggcgatgcc

SEQ ID NO: 29407 - DNA, 322 bp, Oryza sativa
  unsure (1)..(322): unsure at all n locations
gcttggcagtgacaagaagtatagaatatcttcaatgtgtgaggagcacaaccatggttntgtgtcgctagataagaggcatttgctaagatccaaccgtaattgtagtgagagggcaaagagactttgntcagttgtcataaggctaacattggcacctcacaggcatatcgacttcttcatgttagtgagggtgggtttgagaatgttgggtgcacgaagagggatttgcanaactattaccgtgaccttagaaccaaaatcaaggatgcagatgcacaaatntntgtggcacaacttgagcgaaagaaagaagtaaatc

SEQ ID NO: 29408 - DNA, 372 bp, Oryza sativa
  unsure (1)..(372): unsure at all n locations
tgatgtgattgataagaaggctganacagatcntttgactcangaagaaattgatattctatattattngaggaatagacttgcgtgtttactgagagaagaagagattaaatggtatcaacgtactaagactaangatattttagaaggtgactctaatacaaaatattatcatctggttgcaaatgcgtaacatacgacaataagaatttatcaggtacatgacggtgaccaagttataaatggtgatgcgaatntaaaatcgcatattatcacttattataaaggcttgtttgtgccaccagaagattctatattacaattagatgagactaggatacatgatattcctcaagtttctcacatggaaaa

SEQ ID NO: 29409 - DNA, 287 bp, Oryza sativa
  unsure (1)..(287): unsure at all n locations
agcttctcacttttcgattggaatggtgtgttgtcgtacctgccattacttgngtgtttcctggaagtgtgtcaatatttcggaattgtgtgaggtggtatattatcttcgagattccgacaaactttctttattcagacgtgcagtgcaggtatggcatacgagtagacttttacttttgttgaggtatacaaataaacttttataaataaatatgtaatgatctagaaataaattaaaataccccacataataatcaaattaatatttatcttaataatcttaca

SEQ ID NO: 29410 - DNA, 432 bp, Oryza sativa
  unsure (1)..(432): unsure at all n locations
actcagctntcagctccgcaggaaagggaagaatttactcacaaataatgtcaagtatgccggagcaattgcaaagtatagacgagattgtgaatagcctaccagaagcagacgatgacatcgacattgaagacgatgaagacaatgatgatgtgatcgaggataacgatgatgacaacagtgatgagaactagtactaaacatgctanggaaattgtggagatctatgtactactaaaattgtaatcctaagaatgttgggagaatatttatctatttcttatttattatttggaatcagaaccaatactacaagaatctattatatgcagntgtgctacgaattcagattctagttagaaacatgatatcatttatttaacanttacatgattatgcgacaacgccaatntcaagtccattttaatatat

SEQ ID NO: 29411 - DNA, 226 bp, Oryza sativa
  unsure (1)..(226): unsure at all n locations
gctatctncacgcttaggaatggatctntcatatcatcaccaccggcttgccctcatccgccgccaactagtgtcttcgcctataccgttggttggtcacaccaccgttgttgggcgtcgatgtcttcaacgaccggccgcctcgttcgtcgccgactggtgtcttctcctatacagctggatggtcacaccacccgttgtgggcgtctacgtcttaaccgaccgg

SEQ ID NO: 29412 - DNA, 446 bp, Oryza sativa
  unsure (1)..(446): unsure at all n locations
ctctttctcttccgccatcgatgttacccgaatgcgctganttggttcgagggatggctgtggagagatgagggattaaggcggtggatcacgggaaggaatttgatgaactntntgaaggtggattcgagtgggatggtgaaccctagtttgccggcgcagctctgtactgtagcagggagtggggaaaatggcgagagttccggcggngaagacgaagtgacgcttggatctcgggatttcttgttaagggtatcggaggtgcaaatgggcttaggcctgaacagtacctcagctcagtatttttaacagcgtggcccattgtgttccttagggacttaggcattttntgctttggcaatntatgcgcacaatagtgttgcccaatgctgataaaatcctttttatgcggtcatataattctctggaattattgcaatgcaaat

SEQ ID NO: 29413 - DNA, 429 bp, Oryza sativa
  unsure (1)..(429): unsure at all n locations
agctttcacgttntagatcggtattaaacaatacatatatcacantaaaattttggagcaagagatgcaatataattaaaatagactaatactccctctgttttacaatgtaagtcattctagcaatttccacatacatattgatgctactttattcatactatcatatctaacttgatccataactaattctatttattaattacacttttatattctatcttttactatctgtgccgagcacataacattagctatataccgactcctgctttcttattctttctccattctctcttagtataacctctttctctctctacatattctattcatctataactcattttatctattttatctattatcatttatcatctttttatttttcattaatttcttcctacattttttctacaactcctttct

SEQ ID NO: 29414 - DNA, 438 bp, Oryza sativa
  unsure (1)..(438): unsure at all n locations
tanacaaagatngctaattacttaganataaattcagcaagcagaccatcagtggattaatgctggngctagctgttgtgaacaaccaactatcacatgntcctatttgacccctaaagcacgaaatattnttttccttttgtccccagactatcatgaatgcatagaatagtatgttagcatttcaggcagcaacccaaaaattagttggcactaacacattggcgtaatacattccaaccatcgataacaaaattgcttgacgaacagggtggcggactgtttctgcagcattcaatagaaaacataatgtgcatgttcaaaaacataccttgctggtacatcacagccaanatcaaattggccggtttgtaaaanaaatcaaccaggccaaagaanaataatgaactggaagggagaagatattgaaactggaca

SEQ ID NO: 29415 - DNA, 289 bp, Oryza sativa
ccgcatgcaagctacttcttgaacacccacttgcaccccacaggtatattctcatagtttctctctgccaccacccaagtcccgctagcgataatggaatccatttcactacagacagtctcctttcaaagtctgcatcaagagatgcatatgcttctgaaactgacttaagactgtcatccacgaggtacacagtgaaatcatcaccaaaagacttagccgacctttgtctcttactccttcgatgagcttcactgacattctcctcagagacaagttcatgtgaatg

SEQ ID NO: 29416 - DNA, 386 bp, Oryza sativa
  unsure (1)..(386): unsure at all n locations
gccacctgccgcatgcaagcttgtatagcaatttatctttgtgcgaaaanagttatgatagaactttcatttgaattacccaggtaccacccaattgctcatcatggatgctgtatggcctaccaaagaaacatccatttttcaatctgaaccacatattctgcacaacattcaagtagacatttctggtatgttgcgaatatttatagactcattcggtacaatgcaaaatttgtctaaatcttaatggtgtatttatgggacttcaaatttaagttaagtgagagttatattgtcaataaccatgattccaggtatcattattacaagttcctacttcaacagagtgcaacaaaatcatcatgaggatattctatataatgact

SEQ ID NO: 29417 - DNA, 481 bp, Oryza sativa
  unsure (1)..(481): unsure at all n locations
gagttgaagtggatatccctgtggctatgatattgagtactcatagtgaccgtctntgtgttggttgcagcatgcccatctacccttctctgcccaaggtatgtttaatccaataatccttntattactatcttgtgaagttctgctacgtaacattacacatgctgttcagggagatctattttccttttatgaaacttgccaaagttacacttgggttatagaagatgacaaggttagaatattcctcttgttgccttgtatacttttaaatgctaagttcagagcactatgaactaacaaactgttctacactangtggctatgtttcaattagctagatcttggcagtatggacttgatcaagggctatattcggaaggaaagaactatccatggttttcgaatggaagtagcaatgcttttattaatcatgtgatcgaanggactacatataagtattgaatgatatactgaaatg

SEQ ID NO: 29418 - DNA, 344 bp, Oryza sativa
  unsure (1)..(344): unsure at all n locations
gcatgcaagcttcnatttatctcctgaagtcaccatgatgaatattccacttcatatcaatttactaatatacagngaaatagctacatctatttatgtaagtaggtgcatcattgacggatgagcgataatcatatgatcaaatagatcaaatgtctcgtcatgtcaactggtgttgaccatgtttcagttgaaaatcacaagcaattgaagctctaaaagacttgactcgttacatgtatgcatatgaagcatgacagcaatgaggaacaatactaaatacactctttataatatgcaatctaatgctgcagccagcactcacaaatagcaccgacctatta

SEQ ID NO: 29419 - DNA, 406 bp, Oryza sativa
  unsure (1)..(406): unsure at all n locations
aaataaaaatcgggtcattgtagtcaggaaagtcataaaaaaatacataattctaaaccaaacacagtagtcaaaagtaaaaatggtttatgttctttccatggtattaatgcatatgattctactcattgcaatttaattgttactaatttaaaatattcctatgaaagacctttgaaacaaaggaataaattctatctttttataaaacaaaatctatggaagagtaatcctatataaattttggagaacatttagcaagagcttcaaccttttagaanatctattggattccattcacatgtctattcctatngtttttctgtgttttgaaacatttgtttatgcttgattcatattgaatcatttttttctgttgtctatttttaagagcaaagcaatcaca

SEQ ID NO: 29420 - DNA, 229 bp, Oryza sativa
aaacacgagagcaactaaaggactcaaataccactttttcctattattccatattgagtcactgagctgcaatagcgccggcccacagcggcagagaaaacatcggttggtccgcgtagcaaattatataggacttacatacgagggacgattaaccacttttcttagataatctctcctgattaacgactatatctatgcaattatgcattattaaattttatatata

SEQ ID NO: 29421 - DNA, 375 bp, Oryza sativa
  unsure (1)..(375): unsure at all n locations
gtttccactcgcacgcattttanactgccaaacgatactttttttgcaaaaatttctatatgaaagttgcttaaaaaaatcaaattaatccatttttgaaaaaaaaaactaatacttaattagtcacgcgctaatggaccgttctcgtttccgtacgtactattccaagttcccagccgggaatagagaacacacccttaagggtgtgtntannatttcaagttcccagccgggaatagagaacacacccttaagggtgtgtttaattctttgggtgtaaagttttgaagtatatgaacacacatttgaagtattaaacgtagactaataacaaaacaaattacagattccgcttganactgcgagatgaattat

SEQ ID NO: 29422 - DNA, 428 bp, Oryza sativa
  unsure (1)..(428): unsure at all n locations
tcagttaaagaatcatatacgtgctacgccatcgatgctgaggggattatacgcacaactctgtcgaccgactgcacactgggcatgccactggtcggtgacgatgccttattcaagaccgaccctgcatgctgggagccgctcgggtccttgatggggaacaacatccgtccggtcggcacttctttaatcgtacagaagatgccgacctcgggtgaaaatatatttgcagcaaatggataaacatttctccctanatgaagcacagatggtctaaagtgcacaatctagtacaactgtatatgacgctgttngtaaaacaagcaaggaaatggtagatgttgaatagtgggagacatagtactggcaagaacagctctattatgcactatatatacggtcactcttacagaaacaataagacattc

SEQ ID NO: 29423 - DNA, 332 bp, Oryza sativa
  unsure (1)..(332): unsure at all n locations
ctgacagngctggttcaaagagctgtgaataatgagttgatatactcgcttgggatcaatgatgataacaaggttgcacatttgcaatacactgacgacaccacattctngctgacatatgatcttgaacaagcttaacatcttaaatactagctgtgtctgtttgaacagctctctggtctcaaaataaatttcaacacaaatgaagtgctctgttttgtggaagctaacgagaagccatccctgtacagtaagattntcacctgtaaaggcggagagcttcccatgacctatttaggtatccgcattgaccaaaaaaagaattctgaaca

SEQ ID NO: 29424 - DNA, 388 bp, Oryza sativa
  unsure (1)..(388): unsure at all n locations
agcttagaaattaatgtaccctntaatatataaaagttatatactatagggatctaattaagactgcgttcgttcttgagctgaacatctgagatggaaattggagcaagcaattaacatatgattaattaattaattattactataaatttgaaaaataaatntatttgatttttagtaacttttatatgattcttttatgaaatatattgtttagcagttcgggaattatgctaattaagaatgagatattaccttaagcctagatgccggaacaaaaacaacctaagtgtgtgttaaaggcgtgcacttatatggatgcgcatgctaataatagtgcacacacatattttccatgtataanatatgattcacccaaaaaacacat

SEQ ID NO: 29425 - DNA, 440 bp, Oryza sativa
  unsure (1)..(440): unsure at all n locations
gactgatcagtggaagtaatagatgaagaagaagtcctcactaaacacaggatgacaggaatatgtgaatnttcttaccagtactgacaagcatgaatcacacctctagtgatcaacccctagtaatcaaccactgcaagccatggagcagaactgaaactactcttccgtaaggcaaaactacaaacacctggagtgcaacacgagagaactatccctgcaacacaagcaccgtaatggattcattgacctaccagttcttttccagtagatgcccaatcacaaccacgatattatttatataaaaatgttaagtagtacactgaccaagtagtgttagcaaaaggaacacaggtttggggctagttttaatttctattctccactctatcaaccatggctggttggaaacatatatataggctagtggcttacaccat

SEQ ID NO: 29426 - DNA, 420 bp, Oryza sativa
  unsure (1)..(420): unsure at all n locations
agcttgtacagtaacttgtcgcataacctactaacattatctgtgctgattgcagcagcgtctttttgctgcgtttttactgtgcctgngggctatattgcagaaggagaggatgcangcgtcccggtattatcagaggtgccggcattcatgtcattcatggaaatcaatgctctagcattgnngttctccatatcagcaacaatgctgcttctgttaactagtctacccgacagctctcagaggtatcgcaggtataacattcgctattccatcgcactcgtggaaacggngattntggctatggttagcaccgntgtttacgtggtaaggctgacaccccttccacgcggtgattggtatgagtttcttcatttgaagggagatctccatttcttcttgcgatctatgataataatg

SEQ ID NO: 29427 - DNA, 349 bp, Oryza sativa
  unsure (1)..(349): unsure at all n locations
gatctctccccgtgattagtaaaaataaaaatactcaccgaatctcttaacttttcggagaggatttgctgccggtcgccgctacctcgtggcggtgacatggactggagtcactggacgggcgcgcggcacacaaacgcacgcgcgccgcgagcggcgaccgcgccaaagagaaanaaaaacaccattcaatcgccagacgtataacatgcacgcacacgctcgtgacacggtgagacgatatcatcaacatcaagcacccgaactgccgaaatactgtacctaacacgagaatatttntaatnctcctctgcgcagctaatcgtagcacgtatctaactatgcatgg

SEQ ID NO: 29428 - DNA, 408 bp, Oryza sativa
  unsure (1)..(408): unsure at all n locations
taatgagttagtgggggttaactntataataagataggatatataactgtttcgatacaatcaatttattttatataggaagtaactctttataaaatagaagttactattcataatattggaaattactacactcctaatgaaaggtaactcgaaaaacactgtttaagggaagtaactcttcatggtattaaagtaactatactgctatagagaagtaactcttaatagtattccatgtaacaacattgctacaaaagtaaatgatctgaatatatacattcaatatcggtcttgtattatgatatatttccaatagagtacgatggttcaatatgatcttaaaagcaatatatatcntaaaagatataagccaccaaagatgttaaaatactagtgcgatggtgc

SEQ ID NO: 29429 - DNA, 289 bp, Oryza sativa
  unsure (1)..(289): unsure at all n locations
agcttatccagactctcggngtattctaattatttgttctcatgtgggctcactggattaccttctgcaagcctgcacgcaaacaaagactttgaggtattaaacctctcagctcttgcttggtcctcaaacatgttacgtagtcccgtgattatcgtatgagcatccaatgcctcatattgcctttgaagctcaagggacataatancaagcatgagacagcttatgtcaagataatcattgcatcgctttcatgctccctacgttgagcagcaagagcattgtgggc

SEQ ID NO: 29430 - DNA, 410 bp, Oryza sativa
  unsure (1)..(410): unsure at all n locations
tgccgacgggatggcgagccgcgaatccgccgatgtatatgcgatgcgggccatcgcgcggcgggccgcgcgcgcgggtgcatgcatgctccgtcgcaccgcgctcgctggcttttgtccttttttttttcctgtcaactctctgtgtccgatcacgactagacggaggcatgcacgattgcgcggtgtgtggaggtgcacaggtgttgtantgcacgtgagaccgttacggcatcgtatcacgattgggcatgtggatcgatatggcgagccgtcgacgcgttgctttcggatcagttgttggcctgtcgagttgggccgccgccttgcacttgaagatggttaggacggcctaatctgaccaatgttggtgtacgatcgatgttcttcgacaagttagcttatgtgat

SEQ ID NO: 29431 - DNA, 426 bp, Oryza sativa
  unsure (1)..(426): unsure at all n locations
ctcctttacaagaggaagaccacggtgctttgtcagtgtcactgcctcactggttgtggtctcaccttttccctatcacgtcctcaacttacactagtctacatgccacctttatcactgtgcttgaaatccatggctattttagtggcctaatgcaagagtactcttcttgaccctggtggtgagtggtgactggtgagctgagctgagcttgcagttttggttcttggagtcttgaggagttgagctgtggtgcttaacacaggcatagctgcttgcttctttctttcacaaggtattctntgtcttcagaattgcttcattgcttggtcatgttgtatgtcttattatgtgttcctatgttcttggcttttcctgtcaatgtgtactagactactagtgctgttctgctctgcgatatctagt

SEQ ID NO: 29432 - DNA, 417 bp, Oryza sativa
  unsure (1)..(417): unsure at all n locations
agctcggtntctccaattactggtcttgttcatgctcncttagtgaatgaatatttggtggtcatctggttgcaaataattgagcttttctaatgtacaatcacctattagcttgagatcctttgccttattcagcacaatagtttgaaatgtagagctcggaaaaggtgtgtttggcacgtctgtcaaattgatcagagatatgcgtcttcaatgactatcggttgatctcgatactggtggggctgcttacatagaacacttatacgcctatgaacagaagatgacttcttcgatcacagaacaacagacagtacttttgtccttggacctggaactgacaaaggtacaaccagttcactaaggcagctgatgaattaagcaaactgattgacctaaggactatttgctaagaca

SEQ ID NO: 29433 - DNA, 492 bp, Oryza sativa
  unsure (1)..(492): unsure at all n locations
ccataaccataccattaagtaggagagatagaactgaattagctattcacacagggaactgtgcattgcctatatgtatgcacaggtttccaacccaccactcataaaaggacagtaaccaaattatgctcagaactaactaaaatggaacatgacaaagcaagagctacttcactctgtttcattctggtaaggtactacagcaaaattagcctctcttacataccttggccaatgttatgctgaacttttaaccagtgatgaatgattatagaacaaataatatcttcaagtatcatattaatcatggttttatgctatgaactnttatccagtgacaaatgactacagaacaaatgatngtttttcttgcctagacaaatagcangcatcaactaacaaaacaacnaaaaagagaataaagccatgtggactatcactnntttaacatccacatgccttcatttncaatctattngcgccttaattagc

SEQ ID NO: 29434 - DNA, 283 bp, Oryza sativa
  unsure (1)..(283): unsure at all n locations
ttagagccacctgctgcatgcaagctngttgagaatctgaaattaaatcaggaagaacatctttgatatgatctgccaaagatttagaaatgaatttataagagacattgcacagactgattggcctaaaatcagcaggagaagtaggatatatttttttaggaataagagtaatattagtatcattcatacctcttggaaattggcctgaacatacaagtcttgaaccgtttgagtgatgtcagatataatccaaggccaagaaactttattaaaaccaaca

SEQ ID NO: 29435 - DNA, 434 bp, Oryza sativa
  unsure (1)..(434): unsure at all n locations
cctgcgtcgtctaggcgaagcttaactttaacctcaagtgcattgtaattctgtaaaggtgcaagttggaagttaaccgttcatctactctcgtcggcaggggtacaaacagcttgaaatatccctttttttttttctttttttccctttaagggcctgttttggtgttcgtgtctcccgaaattaccaggaaacatataaatccttatcgtttggaaatcgcatgaccagtaaaacattcattttcagaanagtctccaaattaaaaaccaacaataaaaatagattaacatgcagtagaaattggcaataaattccaacaaaatcactggccatacagaattaaggcggcaaccataaaagctcaggtgtaacctacgtggattaatattggtggagacggcggtgacagagcgaatcaatactagtggaca

SEQ ID NO: 29436 - DNA, 349 bp, Oryza sativa
  unsure (1)..(349): unsure at all n locations
agctnttcagtctggccatatccatgagtccatgacttgttgatcattgatgaatgatgngttgcatgtttgcatcgcctgcactgcatcgtactaccatcactataggttgtgatgatgcgtccagcccagagagtggagtactcctgtgtacagtactttcagttccatctctgatgacggacgactgcagagagtggagactggagagcaacgaacgaattcttcatgcatggctgcatctgcatacttcgctttaacttcgtactagcatcattcaacgctaatactatcactatgcattagtactggagtagtatcgaatatcgattgcaggcctcactggtat

SEQ ID NO: 29437 - DNA, 387 bp, Oryza sativa
  unsure (1)..(387): unsure at all n locations
ttcgaaagccgacacagggttaccatatgccaactagaggcgtcccagaccaacaacatgttaggtcacagaccatactgtgccacgaagcccagtggtcctctcccacaccaccncggtgaatccacatgtctctcggcatcaacgctnctccgattagcaatttactcagccaggggcgttccattccaccaatgtggtcgtacctgtcttatgttcggatgaacatccaaggaaacggtccttacgtgcaagagcgggaaaccgtacacccggtacgttccccggtccgcggctatgtgaaatcatttacttcgcaagcaccgacccacgcgtccggcttttccaagtcttttgtaaaactccagctttaccaagctgctactc

SEQ ID NO: 29438 - DNA, 357 bp, Oryza sativa
  unsure (1)..(357): unsure at all n locations
tggagcaatggagtgtaaccaananacagtggttcccgataagagatccagccctgacatttcatcgtctggagcttgggtacatggacgagctcgatcgtctcgaaattgccgtgtgatatctcaagctcaacgagatgattgtgctctacctgcagcacgctgcgtctcaccgatttgcagttgaacagccgaagaaaccgcagggttttgcaggtgaggaggatgccggcgatgtctgaatcgccgaaccagaggcgggtgaggccggcgaagacggccgggtaggcggtgaacaaggtgtggaactggccggcgaagtatacgaggtcgtccgcagcgcttctccgtcaggat

SEQ ID NO: 29439 - DNA, 534 bp, Oryza sativa
  unsure (1)..(534): unsure at all n locations
tcactgcaagaattagcggaccatatcgtggatcagtatactccggaaatggcaatgcactgataaattcagcaccatggcgaggcaatcgctgatcaaatgagctagaagggggccagtcctttagcttaagcatctcaggccagtaggtcctgggatgagttctgccccttgtatatcccataanaaacatgtgtatgttaatttccacctggaaaatcagatatgaatgtagtaagcgccagaaagttcaactgtagatgaagaaagataggtttctctcatttcaaacagaaacacataacaaacattatttaatagggaagctcaattcactaatggatcaacaaaattagttaaactggtcaattatntaatcattatgtgtattactttcttctggaaaggcaacacatgcacacattatntcattgtcgcatttganaataagcatcatctcatgtatttctgccaaaagaataaatcaagaatatgccacgtatgttaaaagagtatgaactgtgtaaagtacat

SEQ ID NO: 29440 - DNA, 326 bp, Oryza sativa
  unsure (1)..(326): unsure at all n locations
ttaagccgcctgcngcatgcaagctngagaagtatatgaggttttgcactttttctatatctgagagatcttgctaagttacttgtctgcgcatatgtattgcattatcctctgacgagcccacttgagcttgtgagctaagactcaaactttgtgtattctattgcgtctagggagattgatcctatagtttcatccataatacgtgagaaatattcttttacttgtatgggtcaacactaactgcaggcttgttcgcgcacaagacacacactttggatttgttngcgtacaaacatgtcatcgttagaccgactatagtggaa

SEQ ID NO: 29441 - DNA, 327 bp, Oryza sativa
  unsure (1)..(327): unsure at all n locations
agcttatatctcttcaattgtgcattanatttgaattttattcgaaccattattttctatttgaaatgtacaacataacgagcccaatattgattatattcggacattatgtgatatttgaatttttctagacccacacgtcacagagacacgcctcacatgtattcagtaaaattgggctataaataatattctcatataaaattaaatgcccaataatttattatttcttctatgagatttagcacaaaaattcatcaaacaattggcgagtagtagccaacgttcttcccaagtcaacctctccacaccgaactcttaccaatc

SEQ ID NO: 29442 - DNA, 432 bp, Oryza sativa
  unsure (1)..(432): unsure at all n locations
accggacccaaggaccaggtagccatctcatcatagtaattagatctagtcaattggtctctatacctgaagtggctactgtagtttctagcttgaatccctgcagatcttctgatacgaaccaacttcgttactgcgtatcccgtatctgaattattcctattacttcatatcttctatgggaattcagtttactacagcagatcttcttgtctgaattactcttcttacattagatctcttggctgaagtttgaattatgccgattgctagaggagagaaggtcagctgttctcacgtatngtttacatttcataatttgatattgtcataatttgctggaaagtccgtttcattatntcaaatgagaaaatacatgcattctgtctangttgctgaaccatttatgcgactttgctttaatagattatg

SEQ ID NO: 29443 - DNA, 338 bp, Oryza sativa
ctttatcgccccggaagttgtccctgtcggctcatgccttcttggggaagaacaagatttggccgcattaggatccttctcgggcccggatgttgtcgatgttccgttctccgcttttgcgggaggagctttcgacatgtagtcgaccggggtcataaccacaaccgactcgctctcaataatcgttgtggtcagtcgagatcggcattgtggtgtagaccgcgaagatgatattcccgacttgagttcacatcaacatcgtcgaagattaacttcttggttgatcccgtgttgacttatcatcacaacgcttgaaatataattaaaaactttgacac

SEQ ID NO: 29444 - DNA, 479 bp, Oryza sativa
  unsure (1)..(479): unsure at all n locations
tactaagctcgntattaagttgtggtttagatgaatgcgaagaagctaaagaattgaggtctttatgtgggcttaacaaagagattcatgacatgcttgattgtcaaagatatacatctctttctcattcgttacaacttgcttgcaatgctgaaagtaaaatagaggaggacatgaagaagcaacatgctatgtttttgtcttctattactaaccatttgcaggaagtgcataatcatgaaaaggaggagagagacatgaaagagccgccagtcccattgatcacactcaaagtcgaggcacctccattatctgaagagggcatcaaaggtaaacttaatggtgctgaaattaataaaggtgagtgtgttgttaatgaatcgaatttgtccacttttcatgctatagcagagcaaccattagtggaaccaactgctgagattctttgtacaaattgatttggttgctgttcttgtgat

SEQ ID NO: 29445 - DNA, 340 bp, Oryza sativa
  unsure (1)..(340): unsure at all n locations
acccggatccttaagtcacctgcggcatgcaagcttaacagtgtctatgcagtggcagcccgctgttcccagatatcgctctactacgtacccggacagggaggacttaagtgatctcgagggttgtcaccacctctacacacacctcaaacatactatgggatacacaacaattactggataacaattacataaataccacgtctaagcaattaatatctactttagtgtttataactcaccaaagcaatcactantatttagttgattatagtgaataataatcccgtatgctatttangaactataccagagataattntcacaagataaatctaaa

SEQ ID NO: 29446 - DNA, 411 bp, Oryza sativa
  unsure (1)..(411): unsure at all n locations
agcttctcggtatatggtctctgtctgatgcattgatgccaaccccgagaagattcgagctatcgagcggatgcgccctcccagcaaacctagggatgtgcaatgcgtcaccggntgcatggcccgcctaagtcgtttcatatcaaggctgggagagaaggcgctacccttgtttaagctccttaagcgctccgggccgtttacttggacggaggaagctgaacatgccctcgcccagttgaaggcgtatctcagctctccttcggttctagttgccccggatccaaatgaatccctgctactttacttagcagcgaccccccaagtagttagtgcagcgttggttgtggagcgcgatgaggacaatctcattctgcgcaccccactctgtgcgacttggccgggagaagc

SEQ ID NO: 29447 - DNA, 407 bp, Oryza sativa
  unsure (1)..(407): unsure at all n locations
anacacaagtcgacatgtgtgggactgtttatgcctcccaggccctcatataatcacaacacanaactgcaagtagcttcattngcctatgcctgttgaagctagctcacgaagtttctcacttctgagtgccatgggtagcaagattggtgcagaaggaaaggaggtgcaggtttatgactcgtgtttttattacgtgtacactaggctcacattcacaaaaccacacagtaatgcacactgcctcactcgtctataaactgctctagagaccactagagtatataatcatattcattataattttttaatcaatcttcttgtgtactagatgttaatgacgcttatatcctctcatgtggtcgttaagcaattcgactcttgctgacattgttatttcaatgatg

SEQ ID NO: 29448 - DNA, 293 bp, Oryza sativa
  unsure (1)..(293): unsure at all n locations
gaatagtaatcagacacgtgcagtcggtgacagttcaacggcagcaagcatatggtcggttaattacatgaaagggcaaacaagttacactagctttcttgtcctcgtttaagaaccttaagattcttattagaatatgaagaaactcataaggagttataaatagctttcgacttttaattattntttaattctaccactataattttntaaaaaaaataaaatgaaagattagaatgttacatgatcgcttctatagctatcagaaacttcaataaacctttgtgtcataa

SEQ ID NO: 29449 - DNA, 514 bp, Oryza sativa
  unsure (1)..(514): unsure at all n locations
cggttcataactagtgtgaaaaattgtgcaggttgaaatggctcatgcttatgataagaatggtgctgcatgcttgagcatcttgaccgatgagaagtattttcaggtggctttggaattggatgntgcaatggatttggaattggaacatgtacttttactggtctaagctaattctttcttttattcgatagggaagttttgaaaatctcgcacaggtgcggaagtcaggagtgaaggtattggttgatatatgtgttatttaaacatgaagacaatgcttgtgtattaccattncttttctcaagatgtacatatcttgtgtaaatgcagtgccctctcctatgcacagagtttgtcatcgataaatggcagatctattatgcccgctctcanggcgcagatgcaattctgcttattgccgctgtgctacctgatctcgacataaagtactttcttcgcatatgtaaggagttgggaatgacagctcttattgnggtagtcactgcttata

SEQ ID NO: 29450 - DNA, 287 bp, Oryza sativa
  unsure (1)..(287): unsure at all n locations
agcttaattatgaaagatgtgattggagaaaacggtctgaagaagagagatcgatgctgatgttggggcgcgccnatntctctcccccttcctgcaactctttttgataatgagtgaaatatgtgaccagcctgtctgaaaataataacacttatttgtcatgctgcggcaaaatatagatcgtcccttcattggatgttgcttatacgcgatagatatctcttgccaggcgtgtcttcacaggacaatgaattgatcaggatgagccatacatgctttcattactt

SEQ ID NO: 29451 - DNA, 474 bp, Oryza sativa
  unsure (1)..(474): unsure at all n locations
tcatgagttccaacacgcatgacaactngctgtgcttcgacttgcatccatcatacaacggcatctggcaatcttccaccaacttactaaacttctcataatctctgtcgttgtcctctgcgtcttcaatgtcatgcaacattgtagatagacattgagtgtccaaatctatggtctcttcacctaaaggagaaggtacgaacatgccttctcgagctgcggcgggggtctctacatcctgatccaacacttcttcagctgcgacatcaggcacctcttgctctccatgcttggtccagcaggtatatntcttcatgaatccattcattatcaaatgagcatgcacttcatccttggcttcgatcatctgtcattcttacagtccctacatgggcacaacatgtgcatgctcatcctacttcttctgtcattatccgcacatgtgacacattcagtgacaccctctctatactc

SEQ ID NO: 29452 - DNA, 368 bp, Oryza sativa
  unsure (1)..(368): unsure at all n locations
agcttgacgcaacctctatctggcgcgccaactgtctaaactagatttcggcaataataaaagggggtggctatcaagctggagaagtgtatgtggttggagacaaaggatttatacangttcacgccttcttattcaagaaagaataccctactcctgttcggggatgaattcgccgagtgtttaatgattgatgattggagaaaataacatatgccctaaggcaccggacccccttatatatgaaggagatcgtgtacaaagatatctatatcctacggatatcagatcaaataaatcatcgaaccgactagctcagggattcttatgacagtgaaacaaacccaacacaataaaatctatttatt

SEQ ID NO: 29453 - DNA, 382 bp, Oryza sativa
  unsure (1)..(382): unsure at all n locations
atttaactccttcgactgttactttgtaaactatttttgagttatataaaattacactgctcggcagagccctggcagtatttcaggtcaaaaaagatttcatatagattgaaacgacaaaccaatcgacgtcagagattagaatcatcgatctcattgagattgccctcgagcaaaaacaatgcctntgattcctgaagttgtttccattgcacttcttgatggataattcgacgcttnccctacctgtcgcgccaactgtttaaactggaattcggcaatatgaaaaagagtatcgcacgagacataaaagtggatggatgtgaagacaagaatttagacagggtcacgccctctcgatgagaggtaaaaccctacacct

SEQ ID NO: 29454 - DNA, 379 bp, Oryza sativa
  unsure (1)..(379): unsure at all n locations
agctntatcgatcttagacgtaagggcttgttcggtttggaggttattgaatgaggattgagacggaataactctacaccgcaatagtgtgaaataaatcccctccaatccctccctcatggggagtaaccgaacaaaactntaatgaacaactattatgagaaacacctccggcctctacaccagaagagtgcacacatccaacaggaatccacgatagcagaaaaaaacttcaagagccctctaaccatagcctaaaacgccacctatatgccgggtagaaaactccatggtcactagncttaattattgacaagccccagngatagtactccataaattgatcttttagagaatagncatgacggagccaatctac

SEQ ID NO: 29455 - DNA, 503 bp, Oryza sativa
  unsure (1)..(503): unsure at all n locations
tgaatattgttgtgatacgtaatngatttatagaagtacatatgtataatctaattcatacggaacttcttttggctaacagaaatcagacaataattcatattgagtccgttacatacgtatatatcctatatcatgtttgatttcaattccgcaaggctgcatgcctctgaaaaatattatttttataggaaccttatacgtagaagtgtatntggatttatacaactnttagttntaatagacatacaactcttaacttcaatttatgtagatataattgtatcttgtatacaataatatcaatcaatctataccattataattcggacccactataatctaatgggtaagaatttaattccgaatttcagctattnttaaatngtatttctacttggactctccttttctttttttttcttggcccgcgcaattgtgcggctagcacccaaacaaaatcatatattnntttaagtatgattntactttttaaatattaa

SEQ ID NO: 29456 - DNA, 497 bp, Oryza sativa
  unsure (1)..(497): unsure at all n locations
atctctgagtcacctgcngcatgcaagctngaatcacatgagaagtatagtagacgganatttgttatcagaatcacattctntgctacctactgtcaacactgctgaggtgagtattaataaatggaatttgagcatactattctgagttgcatttaattctgctgctctgtgattaattgatgattctagaatatagctaggctgtagtaatcatgattcatgaagttacaccgtacacactttaatangtanggcagaagtataaagttgagttttcattagctaaagaaatgaagtcacactgttagacactggagcacaaaaatatatttctcagtataataattctagttcaaatattaatactggttgaagaatccttacttggatatccaaagttccgcaggaaaattcagataccccataaacataagagtctgcatttgtgtttgcacttcattagcgccttagttatttnntatgtaatatcacat

SEQ ID NO: 29457 - DNA, 393 bp, Oryza sativa
  unsure (1)..(393): unsure at all n locations
agactctatgtgtgtatatagcgattattcatcattgtttctagtcggaggactnggcaaacataatccaggatggtgttggcaaagaaaaaaaatctagaatgatcttagaaacactagctaatatacatctctactagagacctagtgtctgaccctgctgcaaacaaattgtaaacagaggattgtaccacttacctcaagttcataagcctgagttctttctttatcatcttggttatcagatccttcttctttatattcatcattatcttctctggtatccttctcgagtataactagcattttcccaccttcttctggatataaccaaaggatcacagacanacccacaccgctcatactgatacctgcaacaatgcattcaattca

SEQ ID NO: 29458 - DNA, 413 bp, Oryza sativa
  unsure (1)..(413): unsure at all n locations
agctngcanaccatcatttacatgtagtaccacttgctaagagatattatccaataaacgtgcagcggtggatcccatccatctttctacctataataaattagaaaaaagagaaagaaatggagaaacanatacacgacagaaagaaaagctgatttgagtatggttgtcactgaactgcatgccccgagctaatgcttctccgattagcaacttggcactagtgcaaccatntagttgcttccccatgcatagaatagcgcaacttgtatgtgtatacgttgacctgtgaacgactcaatcagttcttttgatcgataaaaatagtcatgtagggctgcatgaacacaatccatttatatttcttattgttagttatatcaagatgagagctcccttgttagaccacgtct

SEQ ID NO: 29459 - DNA, 409 bp, Oryza sativa
  unsure (1)..(409): unsure at all n locations
tattctcactaatatgtagaaccaactgtggtttccncatccaggatgtttatttgaagcatcttcgcttgactngatttgtacaccaagaaacagagaanaatatagttttctttgtgtgaggaatgattcttagattangaaattcagggggacagacgaagcagctgagtgaaaattcatggtacgggaattntttcccttcacaatttcattgaaatntaataactatattgtacataattgcaaaaaccaagattaatagcaatgtatattacctgngagatagaangggaatgcccagnggtagaggcaaaccanagaacaaaaaagacaagaatggataaactgaagaatctgtgtatgaaaaccaaagcctgaatatagatgaaataaatagctgatgtca

SEQ ID NO: 29460 - DNA, 391 bp, Oryza sativa
agcttatctcttacgctccaggaatggatcagtcagatcatcactcgaccggctggcctcatccgccgccgactggtgttttcgcctgcacggctggcctttatgccgctgttgttgggcatctacgtcttcaccgaccggccgcctcgtccgccaccgactgggcttccgctgcacggtggctttatgcgcgtatggggttactttcacgacggtgcttccgcgcgatgggtttcgctgcacgtggcttatccgtgtgtggggttacgtttaccaccggttgctcccgcgcgacgggttcgctgcacgtggcttatccgcgtgtggcgttagtttacgacggcgctctcgcgccatgtgtttgctgacggtgcttatgcgtgtgtggatt

SEQ ID NO: 29461 - DNA, 162 bp, Oryza sativa
  unsure (1)..(162): unsure at all n locations
agctnggcgtgctattgacgagaccacaacgcactcatctgcattattggacacggctgatggngaaacgaatactcgggattacaccaatatgccatccatagcaagctgaataaactgatgcaatatatccatgaacacctaggtattacagatgatacc

SEQ ID NO: 29462 - DNA, 402 bp, Oryza sativa
  unsure (1)..(402): unsure at all n locations
cgctacgtgagagaacgatattattttctattgtaagaataatatattcaagagctggcattaactagtggttgcaccacgccaatggcagggttctggcctgacgcgcactctatgtacatcaccgagatgagaagcgagaacccaactcaacaatccatcgaaccactggacgccatggaaacacgtangggaggccaatgaacaatgtgcaagccagaccaatcttgtgtatataatgacataatgtacatctgcgtctcaaggcacgggacgtaatctgcgctaagttagtaatactttggcgtgagccaacggtaccgacttactngactactgacctgacgcgaatatgtgttgtttgccatactgaatgtatttcaacgaagttcgacatatgta

SEQ ID NO: 29463 - DNA, 522 bp, Oryza sativa
  unsure (1)..(522): unsure at all n locations
tcagagncacctgaggcatgcaagctntggtcctgtnntttcttttatactgtgcagtttactccttccttgttagcggctcgccgattcgataaaaaaattgcatatgtttgcattggatcagttccaaacttacctcttttgcacctaacttgactctgattcccccaccatgagagccgatctaggggctagttcggcctcacttgtcggagactgaactaccgctcgcttacttgctgatcaagggcgtcatttccacttattctaatctntgaaggaagaagattgaaaaactaacaaacaaattgtcttcagccctacttagaatttattttctgttgttccaactgtaagtctccaatagatatttcgctacagcaccttacattagaagatggtacaacttctgaccaccacaaactggggtctgacatgcgcaatttgcttaanttgttgaaaatatttgatgtgaatgccggtgccatagctgctgtcagtgtgacatggtatcacctctag

SEQ ID NO: 29464 - DNA, 372 bp, Oryza sativa
  unsure (1)..(372): unsure at all n locations
ctgtctctatggaataaaaatcgttgaacctacacgttaatatatgaatattaacaacgatacgaaatcaaattatagcgtggtattcaaaatgattcngacaggagcaaaactngagactaaaatcgcaaaaccttgcataagcaaagctngtccagtgcatccttcccctactttgcagcgacagtcacttccgcagctgccaccgagaattgcacctgcctgttccacacaagggttgcagattccttgaacatctagtattaaccactatcaccaacatgattcatgaggccaagtctcaatgaaactacgagcatagtctgctgtcaaatggtcaatccagcaatgacatggactcttacctgatga

SEQ ID NO: 29465 - DNA, 274 bp, Oryza sativa
cgactcgcaccagatagtgcgaagttcatatcgatatagtaggaaaaaaaatacaagattacaaccctatcacttttttttacacacttgctattgttgcagggatacctggacccggagtactacatgacacagcagctcacagcgaagagcgatgtgtacagcttctgggtggttcttctagagctcatagtggcgcagccacccatacacaagcagaagtacatcgtccgggaggtgaagacggcactggacatgggagaccaaacgtact

SEQ ID NO: 29466 - DNA, 370 bp, Oryza sativa
  unsure (1)..(370): unsure at all n locations
gcttcttcgcttataggtgctngttgggagggagttgggttgcggaataagtttcttcaacagaactaacaagtcgttaaaactactgtcagaccaaccatttctggccttcaatctcataagctcaagcaccgtccgcaacaatgtgaaatccttctcacagccctttgcctcatcgtacaaaagatcattcgctgcctttttcaatgcatcaaagttatccaacccatgagcggacccagcaacaacctcaggttcagcatgatgcaacatctcttccaaatctgcaaaattaccatcatctacgctgacaagtttgtgtagcgttcaacaaatccatgcgtcaccaagtgttgctcgattacagatg

SEQ ID NO: 29467 - DNA, 381 bp, Oryza sativa
  unsure (1)..(381): unsure at all n locations
acacaaaacaagctaatcttgatcaagaccaataggaaattcctatatgattttgaatctctataaaatcctatataaattctttgattcaaaggggccctaaacatgttgtgcgcaccannaacagaacattgatggtttctgaatttccaccaaattcagacagatagtactgctgtcctgacaangtggagcttggaagcnaaanacaaaaacaaaaaggagagaaaggggaaaaaatanatttgattcgaagaagaagaagaagaagaagaagaagaagaagagccgatgaaacatatggcccttagcaatgcacgttcgcattatggagcgagcacatgctacccttgtgatggagtcgccatcgatcatattcat

SEQ ID NO: 29468 - DNA, 511 bp, Oryza sativa
  unsure (1)..(511): unsure at all n locations
agcttatccagaagagaccgagttcaaatataatgttgcatggcaagttatctattaattaggaatagtgtgttagtttccttntatctttangaaagtgtgtttagttataaggactctatcttttccttttatctttaggaaagtttctttcttgtccaacaaggacttgtatcaacccatgggtataaatatgtacacccggngtctatgtaatctatctcgacgatcaatacaattcggcgcatcgccacccttttaccttttctactntattntatcgtccggcgggacttggcacctgatgcggngctgcatcggtgttcgatctccggcgaaggggtaagttcaatattccgtcggcctangcaattgtatcgtctatgccggcgttgttcaaggctgcatcagtacattcgacctcttggattgctctggnttggatgatatatttgcctacctatttatcatatgtctctgtaatctagcctaacatatcaattaactctat

SEQ ID NO: 29469 - DNA, 421 bp, Oryza sativa
  unsure (1)..(421): unsure at all n locations
gcgtcacatgaatcaanggtacattctcctcaactatattcatgggannattttagtaaaattatttggttgtgaccgaatctaaatgcattgaatataagcatgtgatttaaagttttcaaggtttaaagcttcctatatttgacggaaagcttcagtatgatgcaaatgactgatatttttgccttgcctcttaaatcagcatcacccttcagcagcaattggtgctagcgctgaaccaaccaaattatcaatagatcaaattcgataatggctcaaatcattatgaaaactgacataagcactactgcagaaagtcaagtatatcttcagagagccttcatttatatatgtaccttaaggacagcagaccaatcaatatattcaactcacaaataaacatacacaatcagaaaacacc

SEQ ID NO: 29470 - DNA, 397 bp, Oryza sativa
  unsure (1)..(397): unsure at all n locations
tcagagtcacctgcggcatgcaagcttcaatntcgttcanagcaatgtgtgtttcttgtctttatcaatatccacaaagggttcaaatgtctagatgtttctaccggcagggtatatgtatctcgtgatgtcacctttgatgaacaagtgtttccctttgctaatcttcatccaaatgctggcgcccggcttcgagctgaaatttctttgcttcctcctactctaatcaatgagaaaacatctgatcaaggtggagaggaacatcatgatcatcntgttaatatctctatgccaaatgctactgatatttcatgtgcagaatctcccagaaatgtgaattcagatataccgcgggcacttggccgggtacatggagcatatggcgacttggcgggag

SEQ ID NO: 29471 - DNA, 405 bp, Oryza sativa
  unsure (1)..(405): unsure at all n locations
ctaagctcctatctgataatatcntagtgtatcggattctctcaatgtgtgtgacgatatgagaagagcactgcatatgctcgggttcaactggtgatgttctcgtctgattacattaccgctagttacttgttctttctggctagtcgctatatatgccaatatgaaaaataactgtgatttgggacggttgcgctggctttggaactttgactatcntgttgcttgccttggttggtgaggagtactacttcaattaatgtggtcaactcttctttctttgaaaaaatgaatcagttgcaccgatggatattctcagggaccgtcaaatcccaaatgatttgttcgaaactttcaatcaatggcttctgtgtcatagacaaaacgtttcagacaacatgcaat

SEQ ID NO: 29472 - DNA, 321 bp, Oryza sativa
  unsure (1)..(321): unsure at all n locations
ttcaaacaaancagagcaaattttgtatacaaggaaaatttgcccttgacacccaaaaatggtaattgataggagtactcgtaaattcgtccctgcgatggacaccataaattgtgcattgctgttgacacccgacacaaatttatattcttataaaaaggaagagaatcttgaatcaaattgcgctactctactataccattgctgcagcgcttctacgcgtcccaccgctgtgtgctcgcggattcgcgagctgcgctctcaaaggtgagtgcacatactgtgacgggccgaccgctagtcatatgcgtcacatgtatt

SEQ ID NO: 29473 - DNA, 254 bp, Oryza sativa
  unsure (1)..(254): unsure at all n locations
gtcctcttcccaatcggntcagagtcccggacttctcncaaatttctggacaagatggtgtgtcaacttatgagcatattagccgattcttagcttagtgtggtgaagcatcggctgtagatgctctaaaggttaggttatntaggcntattttatctggatttggctttacttggnnttcctcttgccatatgggtcgattcataattgggccgatttggagaagcaatcccagctacctctacaggggttca

SEQ ID NO: 29474 - DNA, 233 bp, Oryza sativa
  unsure (1)..(233): unsure at all n locations
gcactgtatggacggaggtgtcgcactccactcttctgggatcagacaggggaacgctcactatttggtacagaagtgtttaatgaggcagaagagaaagtcagagttgtttgagaaagattgagaatcgaacaatctcgacagaaaagctatgcatacaaccgccnaaaggagctcgctttcgtagaagggaccatgtgtaccctccgtcactcactcagggagacaccact

SEQ ID NO: 29475 - DNA, 342 bp, Oryza sativa
  unsure (1)..(342): unsure at all n locations
ttactgcagaaggatccttgagtggaggaataaacaaagaaggggttgctttctacaacagctngatcaatgatgtcatagcaaaaggtgatcactaactnttattccaaaaacgcaaaanaatatgaactatatttgacaacatttctgtatcacatanggatgaatcccattgtcactatctttcactgngacacccccttggctctggaaagcaaatacggaggattcctcagtgaagacatagtgtaagttctttcttgcttactgtactttcacaaacattcttgcaatctctcgagaaanaacctttaattcccgagtgattntacaatactattt

SEQ ID NO: 29476 - DNA, 323 bp, Oryza sativa
acaaagctcacgagccttcccggagccggggaggaggagtagtctgagtttttttctgagttctgacgtccggtctccggtgttccactctaactacagtatttctctccttttttcactttcacctcagaatagatcattaattatgtgatcctgtggtgaaacgggtaaactaaaattgagtcgaagagatctgtctgtaaaattgtgacatcgtcagggtaggtttgtgaaataatcggtactattcttgtaggggactgtaaattccaatcctttctgctcactagacgctacggtgactgagaatactgtccttcaca

SEQ ID NO: 29477 - DNA, 494 bp, Oryza sativa
  unsure (1)..(494): unsure at all n locations
gctatcatactatcaccaattctgtgcctatagaaattcttacgattcctcatctacatctatttccaaatgcagttntatcctccaacacatacttttcctttggaatctcgtatatcgaaattatccattcaaaatttcaaagcctactatgtagcttggaccaatatttccccaatcgggccgtctctctgttacatctcattatccatttttaaccttgaggcanaccagcataattctaatnttattggaatttattctagatcaaacctctatctagacctatctccaaaaatctttacttccactccatccaaaaatattatatcatttattctttggtcatgctcctatcttaatccagccgcctgttaatngcggtggttaatatcttcttggacaagaatatattagcacatattagagtgattgtcttggctagaaaatatttaatcccttttacaaaatcaaatttcttacccacaatattt

SEQ ID NO: 29478 - DNA, 356 bp, Oryza sativa
  unsure (1)..(356): unsure at all n locations
ttcggccatcggaaactgcgcagcanatgggaaggacgcgttgacgtcatctacacctcttcgcacggggcaatcacactccgcgacgaattaggtaacatatttaatgtaaacggtcaacgcctaaagattntccttgagccaaatgaaactttagatgaagaagtggatgttattgaattaattgattatgaaccatgttgatctcatctattgcatgctntaaaaccctgtatagtgtcatttttgtgattaaaataggttttagtgggcctangaaaaatttggtggcctgccggacccaccatggttcgggcgatctatggcggcgcccgatcgagccccaatttgaacct

SEQ ID NO: 29479 - DNA, 489 bp, Oryza sativa
  unsure (1)..(489): unsure at all n locations
agcttgctgcttatcaccactgttntgacttcatggttatatggtctcgtaattggaatgttgaaggagtcaagctnttccttctccacgagtccctgccatgttgaaagcagaaagcaagttctttcattttagagactctgtttataatatactgatcaggcgaggaaaataatatgtattgttcattttataacactcttcttgctatcaaccaatcattctgtacataagactggaaatgtgaagtatcagcgtagaaaacaaggtgtaataatgtttggatatagagaccggattttaatccatttttttaaaaaaatagtagtaagtgctaagtggctcattttagattgaaacacatctgcattgtcctgagtaaattgcatttcaataatcaaattggttgaaatcttcttttacagaatatgcctgangaaagccaaagtttttttnttgaattggaaatgtgtgtatgncatatataca

SEQ ID NO: 29480 - DNA, 400 bp, Oryza sativa
  unsure (1)..(400): unsure at all n locations
agcttgcttacctagctggtatagatccactcacatatgttgtgcctacctattgttgagtggatcatatctcaaattgaaatcttgtgtttttttgtaaaaaaaccttttgtcctcaagtttacgaaaatattaaattatctccaaaccttattacgctatacacctccaaattcttcaatttatgcccagtttagttcacaatntttttttcctaagaacatcacatcgaatctttagacatatgtatggagcatcaaatatagataaaaacaaaaactaattgtcaaatagggaggaaatcgcgagatgaaatctttgagcctaattagtccatgagtgctatagtaacccacatgtactaatgacggattaattaggctcanaagatttgtctcgt

SEQ ID NO: 29481 - DNA, 438 bp, Oryza sativa
  unsure (1)..(438): unsure at all n locations
gctgtgaaataactgaatacataaggggtgttcatcttatcagccaacaacataaaatggatggattcggacataaaaatggttgattttatccatttggatgaaagtagacaacacacagtgtttattgtggggcaaaatttgggaacatagcgacgcgagatgagacggtaagcaataaagtcaacaataccatcaaagctgttctgtggnggtaggggggggagaagaatcttacggngaggttcccgaaaggcggtgtgccatcctccaccagcatttggtcctcattgacaagctggtcgacgatgtccttggtgaacatctggatacggngtgtgaacatccgttccataacaacttctctgggagggaggatgttgtaagatataatacctgtgcaagaaagtaccgtggataattaagtaacacacgttc

SEQ ID NO: 29482 - DNA, 453 bp, Oryza sativa
  unsure (1)..(453): unsure at all n locations
tcttggtggtggtcgaacctggactntagacacatatttgaatntattcatcgttntcaaagttctantttgctcaaatatntgtagtcagaacaaccaaattatctaacttttatatagtaaatatgggcaatatggatcttggattatgtatttaattatcaataacacagcaaatcaaataaattgaggatagtcatgatcatttagctattgggtattttttatataatttgtgttagctagaaaataggaaaagttagctagaaattaaataggagaggagagtgggatcccangtgagagtacgagggtgaacgagtatgcacgtgtgtggttacataccgtgggggtggagccgtggaggtggggggtacccgatttttttaatctaatggtaanaaatatcggtcacctattaaagaataataatggtagattattttcttttta

SEQ ID NO: 29483 - DNA, 454 bp, Oryza sativa
  unsure (1)..(454): unsure at all n locations
cgatgatatgacatgngaagaaataatgaccctatggaagctcatcttgtatctcggttggaagctcaactngaagcgagattgatggctcacctagctggtagctctaatcagctggngggctacacaaggaggtacattagtagagatcatgaagatgaccacaacagattatntgctaaatatttttctgagagtccattgtacaccgatgatcagtttcggaggagatttcgcatgagaaggcatcttnttttgcgcattgtacaagctcttggtgtttggtctccatattttcgtctaaagcgagaatgcattggcaaggtgggtctatcaccattgcaaaaatgcaccgctgccatgcgaatgttggcatatggtacaccagctgatcttatggatgagaccttngtggtgcagaaagacaacaatggagtgcatgatncaatttgtc

SEQ ID NO: 29484 - DNA, 231 bp, Oryza sativa
  unsure (1)..(231): unsure at all n locations
tcattattattntggttccaacttgcattattagaatcacacactcaacttgcttggcctcagtttgcgtgccaaaccgacggacctacccagtagtcgcacttattcctgtaggctgtactaccctgattccttgtcgccccaccttttgggtacctcggtatctgtgctctctgagcgcgtataccaaatatcccacatacaccgttgtttgtaaaacttgggaaatgg

SEQ ID NO: 29485 - DNA, 404 bp, Oryza sativa
  unsure (1)..(404): unsure at all n locations
actcaagcttcatgctagccgcatcctgcacaagggagaagcatggaaaaattatatcatctcaattatatgaacactntatattccgatatataccaagttattccttcaactgcaccaaccttgtacggcgtaggaggtgacgacgatggttttagcgagctgaccctgccaagggcacgaatgcggcgcgcctcgcatgagccgacgaagagcgcatagaagacgacgacgaggagagcggcgacagcggcagtgagcttaagctgcatcttgtgagccagctgangagaggtcaagcaagacatggcaaggcactatctatgcacacgagtagtgataatgatcagcacgaagaaatggatatgaagggagacatgatgtgatctttgatgcagtgtaat

SEQ ID NO: 29486 - DNA, 348 bp, Oryza sativa
  unsure (1)..(348): unsure at all n locations
agcttgtaactctgaactctgaagagtgtatcaggtgatgatctatgnatatgggaaactaactacttccatctcatattataagtcattttgaattttttcttagcanaattttttttaagttatcaaagttatagaaaaatttagcagcattttaatacaaaagaaatatattatcaaaatatatttaatgtttcatttaatgaaactaatttgatattgaaaacttcgtgtggtgacgcgcatcatgtnatgggaattcagtcggaaattcacacaaagaagctggcaagaaagaagaaatcggtgattgatttgtcaacgaatttggtcacagaacaagcggca

SEQ ID NO: 29487 - DNA, 490 bp, Oryza sativa
  unsure (1)..(490): unsure at all n locations
atccttaagtcacctgcngcatgcaagcttatccctaagtgaccgagtntaaagaggatgcttcatggcagtttatctattaattaggaatagtttgctagttctcttttatctttaggttagtttctttcttgtccgacaaggacttgtatcaacccatgggtataaatatgtacacccggngtctatgtaatctatcttcatgatcaatacaattcggcgcatcgccaccttntaccttntctactttattttatcatccnggcggacttggcacctgacacggngctgcatcggtgttcgatctccggcgaaggggtaagtccaatgctccgccggcccaggcaattgtatcgtttacgtcggcgtcgttcaaggctgcatcagtacattcgacctcttggattactctggttnggatgatatacttgcctgcctatttatcatatgtctcntgtaatctagtcttagcatatcaatttagctctat

SEQ ID NO: 29488 - DNA, 330 bp, Oryza sativa
  unsure (1)..(330): unsure at all n locations
ataccactactattgactattcgggtgaatcgccggtccgatcccgtctttactatgtactattcatgatattagtttgataccattagtatnttatcaaatntaaacaataccatcgccatcacgttttctatccctttccactcccgtatatatattcttcttcttcttctcttcctcccttcctcttccgatgggcagccaaagcagcagcaagcagctcggcatcggtgcgatggcgatggcatcagtcccgctgctgtccagcttagcagctcaggcagtagatcagcaagaagctagctgagttcacagctcagagcttagagc

SEQ ID NO: 29489 - DNA, 174 bp, Oryza sativa
  unsure (1)..(174): unsure at all n locations
agctntcaagatcaacatgcaagagtaagctagaatattaactgctcgcacanaggcgggtaagatctcagtttacacagcatatctagggagtacaagagggcccactcttcannaagggggagaacagattcccccaggtcaccgacttcttccatcatctccttacgcgtg

SEQ ID NO: 29490 - DNA, 389 bp, Oryza sativa
  unsure (1)..(389): unsure at all n locations
ctcctgatgttctcctgcngggctntgctagctacatcagcttgtttatcgatngacaggaactctgcactcccagatgcaaaaatagaagtcccaggccaaaaccccgctaaggaaggctggtaacggngatcgattgagtatcctgatgggtgcngctggacctgcacaggagctggtccaccattcgctgctctctgagcagaagcatcatccaccctcctaccaagccccttcctgaactgctcctcctcccatttcctctcttcctcatcgctcatcgcatccttgtcatcctcaacctccctgaaaccatcattgataacccncaaactggcagcaggacctctattattgatcacgccaaatacacctttcgtgctcctctg

SEQ ID NO: 29491 - DNA, 408 bp, Oryza sativa
  unsure (1)..(408): unsure at all n locations
agcttccagaatatcattngaagttgggtctacttcttaccacataaccaaaggtttatgtgagattagataacaatcaaaattcatacttgtttaaggttccgaaatgcccttttagcaagcttctgtctccaacaacactggatcagaattgttgcatgtcggtattgccgatggaaatcatagagcttcttcattctccacaaggcctatgtgttaaatgggcaggattgttagtacacatcaaatacatagacaagcaatagaggaagagagaacaatagcataatcatggagatcttcaaaggggaaagggcaacattctcaatgcaatgagaaacttatgtaaccttgaaagtaaaaatcaatcatcaaatggtcanaaccctttggttataagaagtcaat

SEQ ID NO: 29492 - DNA, 296 bp, Oryza sativa
gctcagactaacaccgttatatggctggttctcatgagaactatgtacttatatgctcttcctcaataaaacaccatttaaggcaacaagcaagaacatagtcaacaagcatcattttccttgtacagaatctagagtgagcgcagccaatctacaaatggtgctgatctgaggatgatattaatgaagacgaactcttcctgtgtaaaatctagagtgagcagccaattcacatatgaaaagaaaagaataggatgacacgtacctttagctagctataggttctccctgacatg

SEQ ID NO: 29493 - DNA, 481 bp, Oryza sativa
  unsure (1)..(481): unsure at all n locations
agcttgccttccgagccggccaccattgatgaggtcttctctgacgtcatcatcgnntttttttctttttcctggttttctaatagattaaatcttcggaaattcataactaaatcatcgtaactcggttttgagtcgttcaagttgctaaattcatctaaaatcatgatctacatgtttgtttactttatatgtactgtttatttggtttttattagtctttntcttctttntgcgtgttagcttgtcgtttctgtcgttgcgaaggttcgtgagtgcgtcgggagtgttcagaagattaattgaagaccgattattgcaagacaagtcacatagatcctaaacacaatcctttgagcatgttgatcctatacttaaattctctatttatttcaactgtgccattattttcgaatgtcattgggtggtgtgaatctattcttttgtatggccatttgcatngatattctattcctgatac

SEQ ID NO: 29494 - DNA, 394 bp, Oryza sativa
  unsure (1)..(394): unsure at all n locations
ttggtgattacatacaaatcggaggtgcctaaaaggtttgcaacttcatcctccaatgtttnttttgtcatattacatttggagctatgttttgcacacttttttgtctccaaaatttagttgtcagttgatgagagagaaaaattgtgtggggaagaaagaatatatnagaaattagttgatttgctaaagaagggtttataaaatagttgagaaggaaaatatagtgaaagttaatcttaaataatagaacacacactaaaatgaaaattataagaagttaacacattaatattatgttaaactttagaatagtaataagaatatttggggtatatttatgattttgataataaagaatgtcatatgatgaccttgagagttgaatatctat

SEQ ID NO: 29495 - DNA, 403 bp, Oryza sativa
  unsure (1)..(403): unsure at all n locations
agcttggcatacaatngatgttcccgcatctntcctctcaccagacggagatgctgctgatggtcttcctctaattgtgagtacaccagaatgtcgtcaatgaaaaccacaacaaacttatccaagtattccatgaacactntgttcattaagttcatgaagaaggcaggagcattggttagaccgaacgacatcaccgtgaattcatacagtccgtatcgcgtggtgaatgcggtcttcnggatatcttcttcacgaatacgcaattggtgatatccggaacgaagatcaatcttggagaatacagtggcacctttaagctgatcgaacagatcatcgatccggngaagagggtacttgttnttgatagtaacttcattgagagctctgtagtcaacgcaca

SEQ ID NO: 29496 - DNA, 356 bp, Oryza sativa
  unsure (1)..(356): unsure at all n locations
agcttcatgaaatattggcataattttagtaccctgtatcatagngaaacaatctagatacttagcataatcatattctgganatttgtagtagctgcattcatcttttcatgtagcccanaacaataatgataaaatatgcatctttttacagtagntttcatacataacctgtaggctccacgaattttggttgaatttttgagtcattgcgtcatggcataaaagttcatataatacttgatagttctgtcctgaaatctgtagattgtcagtttcacacatttgtgtagcctacactataaatgataaaatcatgattcctttagggttagctctaatctaacccatctatc

SEQ ID NO: 29497 - DNA, 284 bp, Oryza sativa
  unsure (1)..(284): unsure at all n locations
aagaggaatagaggcaaatcctgacaaaatcgcagcaatccatcaaatggagccgccaaaaaacacaagacaagtgcagaggttgacaggccgaatggcatctttgagtagatntctatctaaatcagcagaaaagggattacccttctttcaaaacttgaggngggcaaacaccttccagtggactgctgaatgccaacaagctttcgatgacttgaagaaatacttgcatgaaatgccaacattaacaagtccgccaaaatgtcaacctctgtaatgtatgt

SEQ ID NO: 29498 - DNA, 312 bp, Oryza sativa
taagctctggcgtggctctgggtaggccttggtaagcaatctcgatgtgtaattactgttcacagcacctttcttaattacagaatctaacagctgatctggtttcatgggcaagccgttcatgcagtacgcatcaagcattgcgttcactgatgacaggtgtacattattttgtgagctcacaagctcatcgaatatctgtctggcccttgagacacaatcacaatatgcatacatcatgattagacattcttgcgtcacatagttgggtttgaatgccatttcagtcatcttatcaagcacacactctgc

SEQ ID NO: 29499 - DNA, 443 bp, Oryza sativa
  unsure (1)..(443): unsure at all n locations
atctctgagtcacctgangcatgcaagctntactgttngacaccttntaagatgcattgtatctactcctataaagttgagtaactgcggtataaaaggattttaaggtattgagcactngatcacgcgcactntggcctaagcaaaaagtgcctaagtccctaaaagaacgtgacaggccacacctgaaaatatgggctgcagacatattaagcctaggccaaaaaatatgtcttcgataccctctaaaggatgacgcatgtaacatgctcccgggtgatatagaccatgtgatctgagtgattatcccttatgggatactccaaaatagatataaaaattgaatcccgactggcgcaagtattcggttgataacctttacggggaataataaatagtccagtctttgagcatagaanatagactcatgactatgaatccat

SEQ ID NO: 29500 - DNA, 228 bp, Oryza sativa
agaggcaagaaggaagatgatgggagagtcaaggatgatgacgtgatctagaagaagaacatgaagcagaatgagaagaagaagcattgcatgcagtggttaattcaagaactcataaaagtttttgatggatctgaagatgaagatgagggcaaaggtaagcaagttgttgatctaagctttattgctcgtaatgctatttctcatgttgatgaatctgatgatgat

SEQ ID NO: 29501 - DNA, 416 bp, Oryza sativa
  unsure (1)..(416): unsure at all n locations
agtcacctgcggcatgcaagcttccctttgggctngttgtgggtggcggaagcatcgctgtggagcattctcagcttcatctacactgcaagcaaatggttcttcctgatgtctcagtggctcttcataggctgcagtcttcagacgttaatcctgatttctcagatcttgagaagctcaactntgttgctccactgccgttgcatatgcggntgagttgggagattttgaagtctgtgaagatttaagagattttttaaaaaaatcttgtctctctctctctctgtatgtgctgcatatttaccacaatgtctgcctcttcttttcaaggtggctgtgtctttgtggtagctactaataccattctcctaggaaagattcaaagagagggcctggcttactactncatgtttttt

SEQ ID NO: 29502 - DNA, 312 bp, Oryza sativa
tcaccaacaactttcgcgagatctctctcctcgactcggaatcagaccagtcgggagagaacctgctcttagatcctgttggacatccatacacggctgagaagtatcttgaagaccatctcaatcgagtcggctttaaaccactctggcgagatcgcattttcttcactacaccagatcaagatgatggggcttacccaccagtcctgatgaagctcctcgacgatttagcgggtcgtctcaccacgacagcagtgtcattctcgtggcctatgcggaagtcggcttcaacacccgattttgtctagcttc

SEQ ID NO: 29503 - DNA, 357 bp, Oryza sativa
  unsure (1)..(357): unsure at all n locations
agctngacgtacgacggcgtcatcgtactgccacacttggttattggtttctgatgacttccagtcataagcctaccacatctgctccaaaataagttaacctcgtatggaatatgactatgtctaaatttatagtattacaatgagagagactagagaatgaaatctcattatgatgggatactttaagtgactntttcctgatacctgatacccgagtaccggctggtacctggtaccctggtatcgagctggtacctagatatcagaccttggtacctgtgtaccaggcatcatacccagagagagagcgaacaagacaccaccgtcggccgcctggtacctgggcatcttgac

SEQ ID NO: 29504 - DNA, 457 bp, Oryza sativa
  unsure (1)..(457): unsure at all n locations
tctcagctgtggcctctggttcatggcggaacaaaattatagggttgtatcantttagacggctatgtatngactagtttgctntatgtgggtttctgttagtttccttgagaatttgcatcagtatgttcgccattcagaagtaacttggatttgttcttttttggtgggctccagatgaagttaaaaggtgataagactggaagaaaaggctatntatctgtagcaacggaggtattggaaattaaattgacatgtatcctgttaagtctgtgcaatggcttcagtaaatttgctttaataaaagaacttattcacatgctatctcacaggttttcgaggttgctccatcactccacatggttgagcttcgtaaactggaggggcacgctggagttcacaatgtatgtatcaaactttgatatctatcattcatagtggtcattgaaaaaaaatc

SEQ ID NO: 29505 - DNA, 428 bp, Oryza sativa
  unsure (1)..(428): unsure at all n locations
gcagctgcagcttctcaaatggtctagaactacattagaacagctagtgttgaatttatctattctgccatgaattatgtgaagaataaattgagaaacaggctgtgggatcaatacttgaatgattgcttggtcacatttattgagcgtgagatgttttcgaaagtcaaggactgtgatatgataaaccgctttcaagccatgaaggaacgcagaattaaaactactcttccaagccatgaaggaaccgaaatagaaaattagaggtaccgcgtaataatttatagttntatttcttcgattatcgatattgacatactgtgaaccattgattnttttttactatgaactcnttttttagacgggaataaccaactttgaaatcctggctccgccatttggtacagtttagtggtgtagcatctctg

SEQ ID NO: 29506 - DNA, 346 bp, Oryza sativa
  unsure (1)..(346): unsure at all n locations
atgcaagcttgaagtatgtgaacatccttccattttgcatatatcctaccgcagaagtaccacatgtcctctcacaagtcacgaccattccagttaacatantttactctcctacggtcattccaaaaccaaacttgtagatcttctttgaatggtcaatctgcaccacataacataagttcacaaaagtcactaatctgaaaaactcacttcttggtaacanagaatatatacttcatctggtcatgagaacatctgtcttggtcatgggggactatgtagacttattcctataaaactatttagattggatgtataaaaactatatgttagatttatctcaagc

SEQ ID NO: 29507 - DNA, 264 bp, Oryza sativa
  unsure (1)..(264): unsure at all n locations
ctaggactatgaatatatagtcctagaatatatctcatctcattctagatcgcctatatttaatatggagggtagatatgtttaccgctaccaaaataaacctcacgcattattattatagctaaagacgggcaatatcaaattatgagaaggttaaaatatgaagatgtcacgttaatatctactaccttcgtcccaaaaaattataattctagattattatcatatattagggtttganaagatagactatgatactcctta

SEQ ID NO: 29508 - DNA, 398 bp, Oryza sativa
  unsure (1)..(398): unsure at all n locations
atctctgagtcacctgcggcatgcaagcttcggatgtgcatcgactacaccgaccttaacttggcatgttctaaggatccttaccccctgcctcgcatagatcagatcgtcgactccactgcggngtggcgacctttgtgttttctagatgcatactctggttaccatcagattcgcatggctagggaggatgaggaaaaaactgcgttcattacccccgtaggaacctattgntatacatcaatgcccttcggattaaagaatgcaggtcctacttttcagcgtactactcgaatttctttgggtagccaaataggacgtaatgttgaggcgtatgtcgatgactnggttgtaaaaacgcgcaaccaagagaccttactctcagatctagcggaaac

SEQ ID NO: 29509 - DNA, 448 bp, Oryza sativa
  unsure (1)..(448): unsure at all n locations
agcttcanaacctcttccagattctcgtttattctgtagaggtctcagnttcagaactctttgcanagtcaactattgatgctcagtcaagtgaagcattattatcagctcttcactgtctggatctaatatgtaacatatgtattcaagaggtaaagaaacctcagatgaaatttggaagatccaaaattcaggttggacctgaatggttgaaaagttccgtgttagtatatgcaaagaaattgtggggagtaaaccgttcattccacgaaaaggtttcaatttcttccccttttcatttctacctccatactactggtatgataatatntaaaacgtttcgtgaccaattaatagataanatatgctactaatatgatcaaccaatagataaagcatgccatttttgtgttctctactcatagtgatatctgactctctgtggatc

SEQ ID NO: 29510 - DNA, 358 bp, Oryza sativa
  unsure (1)..(358): unsure at all n locations
gatctataattaactccacaagtgaaccacagcaagctaataggtgtcagtttcaccttataacgctgatactccacagaacgcttcanagcantccttttatttaacaaagattttggcctgagagttgatggcctctgatagttctttccccgatatattataattgcatgtgctttgctcactctttccactgccaccaatataccaccactctcagcctctagagttcgagcagcatattcaacatctntaatgttgtgttctttacatataattttgacaagttctcggtactttcagtgaaggtgcatatnttcaacagttccatcaaaaactcctctccttcctgcaatca

SEQ ID NO: 29511 - DNA, 342 bp, Oryza sativa
  unsure (1)..(342): unsure at all n locations
agctatacctgaccgcgcatgcgcaactcgaaggttccgtttcgtcatcggccttggggggagtcgcacacggaggcagctcgccattgtaaacccggttcgcctgaccagctgtctgctgtgtcagcaactggctgtactcgacgacagacacatcgccgatcatcttgcgggcttcggcttcagcttggtcaaggtttagcactgtaaaggcaagganggggaantcaccgtttcgagttcacggttgcgaagaatatggcgctgaanagctcggcgttaggcccaaacccggaagtccggcatgcccagttgaagatagcgatccgaacaagcgccgat

SEQ ID NO: 29512 - DNA, 230 bp, Oryza sativa
  unsure (1)..(230): unsure at all n locations
agggcactgcttctctctcctcttacacacatctgtttctgcatctctatatgatgtactgnactggagtatagtgtgtatttttggcgtggtatgacatttatcttcggtggtctttgngtaggagttgactggagctgcaagacttcaagatgaatgctctgatatagtgctactgtatgcattatggtacaatgccaataattatataaaaatgtgtggggattgat

SEQ ID NO: 29513 - DNA, 331 bp, Oryza sativa
  unsure (1)..(331): unsure at all n locations
tgcaagctttatatgggtctatctaccgaataatgtttttaaaatggctaanatataaaaaaccagcaatctgcaggcatgtgcaaatttgtataatagtagcatacagagcatcatgcatatatatactagttcttaaacactagcatgtgccttcatctacatgttatatatatacatggcacagcagttggaagaacttcatctacatngtgttgaggcatacttgaatanttagtgaatatatacanccgttatctatgcaacactataaaactaatcgctntggattgngaggtgtcaggaattctggtgctacatctgttagcac

SEQ ID NO: 29514 - DNA, 311 bp, Oryza sativa
  unsure (1)..(311): unsure at all n locations
cagctcanagttatntaaccctctagccgaccccatcagcacctctggttctgcatgacgtaacatttcctctaagtcgatgttgtcctcaacagaaccatcgtcatgcaccatgtcttcaacttgtgtcggaactacattttcaggcccgtccacttgttcttcgccatgacgtgtccatatttcgtacttgtccataaatctacgagttactaagtgctccttcactttaaaagcatcgtcaaagtcccaggctatttcattcttacagtcagcacatggaccaattatcttcctcatatngttcttct

SEQ ID NO: 29515 - DNA, 326 bp, Oryza sativa
  unsure (1)..(326): unsure at all n locations
agcttccggctcgcgtgagaactccagcagctggttttggtcctcatcctgatggcgcctcaacacagcanacagctcaaggcagtcaaggaagtccaaaaacctcatcctgaaaagcttcatgagagcagcagcaagcaaggctagacgccaatgtgagcgccttgtctgctcaatcaacaacttttggttgccaacccaacacttggtgatgcgctctcctagtgcttcttccatcttgttcaaatgggcggcgataaccttggcgatagccttctcctgatcatcccaggcctccggcggagcctggcatgtgcagcaccgtc

SEQ ID NO: 29516 - DNA, 123 bp, Oryza sativa
  unsure (1)..(123): unsure at all n locations
gtaaactgngttcctgccacaagcaatcaacgatcttcagtatagacaagcaaaaaataactaataagagaggttattatacactttaaaaagtatcctacttgtacaaccatcatgtatagt

SEQ ID NO: 29517 - DNA, 513 bp, Oryza sativa
  unsure (1)..(513): unsure at all n locations
agctngacatgcanagatgccacatcatcattcactatttaacaagatgccacattatcatccattaacaatcatcacatttaaacatcattcaaacatactatatatttatagtttttataatttaagagtttttcaaatacaaacatgttaaattatcatccaacataattcacataatatttcaatgtatatctgtattatgttttatgacattctatatacttatatagtttatcctcacttagttagtgcttaaatgattaatatatggttcaagttatctttcttccattttttcctcanattaagtcatatcacagcctttagataattaatctacggtccanactatntccctacttttcttttccatanagtcataccagcttaaacttttacgttaaatcaccattctacatactatntaaatttaaaatatcatanaccacattaanttacttaatctgatgtatctagctatcttacacgtattttttttattgtatcata

SEQ ID NO: 29518 - DNA, 417 bp, Oryza sativa
  unsure (1)..(417): unsure at all n locations
ctcaaaacggtataacacctntctgtcnggcacctnnttgttgtttcgtgttaattcttaaagaaatatcaaaccacactaaaaagggatttaacagcattgagccacatcattgtgaacacaaatggccaaagcaaaaagtgcctaagtccctaaggatcacaacgggccacgctggaaataagactgggctaaagtactgtacaggcccaggcccattagtactcccgataccctaataacaccgaagtgaaaaacgtctcttcgtcttccctgctgagactctcgccattntccccatttcttgctacagtgcanaactgcgccgggcanactatggttcaccaatccgcttcaatccaccctcnaaaaacttcacgaaattatcctgcatcaccgctcgattcccatcttttc

SEQ ID NO: 29519 - DNA, 432 bp, Oryza sativa
  unsure (1)..(432): unsure at all n locations
ctatcatataaagagccacttacatgtgctntagttgaatttttttgatccatagtcaaattatttcatataaaatcattatntataatggttaaaacactacttgtcacaatgcagaagtatcggcttgcgaagtatcttccagagacaaaagaaggtaaggcaattaagccaaagaggaagtttaaatatcttangaaatatgaaataattagctttgtcggtaattattaactatttggtctgatgcatgctcgatctagacaagaagcaagaagaanagaanacaaaatcagtggctaatggaaatgatcatgcaaaanagaagtgagcatctcccttcctttcaatgacttactgcctaacattgaacatatnctgctgtctgcatgcataaactgtanaacttcatactgttttctggttcttaat

SEQ ID NO: 29520 - DNA, 420 bp, Oryza sativa
  unsure (1)..(420): unsure at all n locations
acaactgataaaattacaattcgtgatgtattaattcattctatatataatttccaataaaatataaagaaatgaagattntgttatggaacagtcaaagtttttattnttctcctagacaacgcacaaacatgacatggcttgaggtaaaaaaactgataatttaccataggataatgtggcaattattttataatttgtggatcacatagagagagataaaaaaatagaaaatactatatgtcttcccctagggctatcaccatgtaacccaactgggtccagttcgaagcatattttgatttctatggttntaaagagaggatcggngaagggaatggggctcaggtctagtttgaaccagacctagctacgttacatgttgctggtccaaggggtaaactatctntaatttctatg

SEQ ID NO: 29521 - DNA, 441 bp, Oryza sativa
  unsure (1)..(441): unsure at all n locations
gagagaagaaanaacatcattttgtgaattaccataactatntaaaaaataagttctcactcaggggcggaatcaggcatggngcagctagggcttgngccccatgcctagctccataatccctattataatcttcaaaaatgctatgtaatttgtgaaaatatttgagatcctattagctcagccctaggcgtgaaaattttctggctccgtcagtgttctcactgttagcttggaagtcaccaaacaaaacatgtactccatcattgaacacgtgtcatttntcttttgttggtaataatntaatagatgacctaatccaatccaatatatgtgaaggcttaataatctagaaaagctgcgcactaatccaacctcctctgtctcttttgtcatctgaaatggtttctactagtacaangttaaccacaactcatgtga

SEQ ID NO: 29522 - DNA, 373 bp, Oryza sativa
  unsure (1)..(373): unsure at all n locations
ctgaatgtgaatcagtgaccggctagcataactttcangtctcatttatctgtccggtgttttccagataagagacataaagtcagacgataaaacagaaaanaaaatgtngaaaatttgtgcatacattggcttcatttcgacggcatctgtcgcacagtgaaggagactttgtgtacatacattggccgcgagttgatgctgatcagcgaaggtgaaattggacacaaaaacgttaaattcatgcaggtatgacgacagcggctcagagctactaccgtctgtgtagaaaatcaaaagcataataagcaagggtaaaaaactagaatataccatncattaattcagagagaaaacaaataagggtagactc

SEQ ID NO: 29523 - DNA, 490 bp, Oryza sativa
  unsure (1)..(490): unsure at all n locations
agcttcaaggagtgcataccaacatatatagtgctttcacatataatgagccatatcaatattaatgtgtgtgattntttatataatagatgaagcatgaaatttttgtgctaattatacagtaaaaatgatctcatgacaagttattgttgcaagtttatttgttgcatggtcagttactggtttttaagtacaaattaatgtggcttaatctcagtccttgaagtatacggaatggcacatatttggccaactccaccctgtagagttatattcatctctaggggatctggactcatgttgagttttagatgtttagtgagcattagctntaaaaaagaaggggtaataaatatagatatcgtggtgctattttgaaacagtccatatatgataatgtagatcgaaacannaattctcatggtctagaatcttnntcttcaatagaaaggctagtaccacacacgaatatgatactccatatgtacat

SEQ ID NO: 29524 - DNA, 340 bp, Oryza sativa
  unsure (1)..(340): unsure at all n locations
aagagaagcgataacccaataaccgaatcacatcatcaaagttcatctccaactatgaaaaaaaagggttcgaaatggtcganaaacagtctcaggatgtgctatttagtctactttcccaactntgatcatctcccttgtttttcgcgtgtgcgctctccaattaaacaatgtgttttatatatatatatatatatatatatatatatatatatatatatatatatgtgtgtgtgtgtgtgtgtgtgtgtgtgtgtgtgtgtgtgttccttaaaaatcatataatcaattcttatttctctctctattactcgataatcatatgtaaaccgccacttgt

SEQ ID NO: 29525 - DNA, 449 bp, Oryza sativa
  unsure (1)..(449): unsure at all n locations
agctngtaattntgacaagagaacaaggtactcgctgtttatctagagtggtattcgagctcactgctgatcgaggccatgtcgaccggtcacctccgcgtcttcgcggtcttcctcgtcgtgcaagtttacctgcttgcgatgatggccgcgccatggacggtacaggccggacctgtggtctcgntgctttcgaatgtatgctgctctatgcacattgccggctgttgcctcgccattgccggcggcggtggcggcagcggcgatgccaccaaggccaagccttgacctatgcatccatggaaacgccacattcctgcggcttccgtcaatctcctcccggtatttggtatccagcattgtgacagaataaacaaatggctcgtggtcctgtaatgttaagagatcgtggtattgtgagaataattcgcatataaaatgggaagaga

SEQ ID NO: 29526 - DNA, 367 bp, Oryza sativa
  unsure (1)..(367): unsure at all n locations
gctcgccgacgacgagcgcgtaccatcccgttcccgtgattcacgcaatctcgctngacgagtcgtcgcgcagccccggtagagtcgtacagagagccccccgaanaaagaataaaaggttgacgaattatacacgccaatacagctgtaatcaacaganaagatcggcggaacggcacgaccggactactccaactgtccaacacaacgactgatgaacaagttagcggcgcagaggatccactcgtcgatgcggctgctggaaatcggcgtcctttgtggagcgttgtcagcactcagcagcagagggcgatgagcccgccagacagccaaaggagaaccgcgaggcgggtggaagcggaacgcg

SEQ ID NO: 29527 - DNA, 443 bp, Oryza sativa
  unsure (1)..(443): unsure at all n locations
agcntataataattaataattaattaatcatgtgttttatctcaacttggtntatgtgcgaggaagagcaacaccaattcaagccgagtttagttccaaactntntcttcaaacttccaacttttccatcacatcaaaattttcctatacacataaactttcaactnttccgtcacatcgttccaattttaaccaaacttccaattttggtgtgaattanacacaccctcagctgaatcgaactcaggtctctgaaatttgaagtctgaactgctcaagtacacagctcagttaattcaaagaagaaaaagaagtggcaatggctcgagtaaaagccaaggctgacacatgaagaattgcgatatcagatgatgtcaggcagggatgaactactactgtgatgaaacacaagcgagtgtcttgaatctggatacaggagatcg

SEQ ID NO: 29528 - DNA, 322 bp, Oryza sativa
  unsure (1)..(322): unsure at all n locations
cttctctggtggagctcanaactgcacactctgatgttcattatatgtagtaacatgcacatggaattgtcaagaaaatgtacatttccctgcaggaacttctattcaactcattgggaaatccagatgaatcaggtgtcgaatacaatgctgaagaaccaatagaagctctttntagtcaatatggagacattgttgagcatntgaagagtttattgcacgagcggcaatattngctatcaaagaatactgacctagagtcaagattgttgagcaaatgtgaagaaactgaagctctcagcagttctctgacaaaaagtat

SEQ ID NO: 29529 - DNA, 461 bp, Oryza sativa
  unsure (1)..(461): unsure at all n locations
agcttagaattggcggataacgatcatacaatattatgttcagcagtaaagtcatttgggaagacgtcaaagcatgtcaagtgggacaagttggttcccttgggaaacataattcanaggcaaagttatcgaccctcgcattgaatagaggaaatatctagcaccggagaccagganagcgaatatgagacagttagtggcaagttgtcaatcatggtattcttagtaagcgggatatcatagtctaaagcatatggtggtaagctggaaggaaacgccaagcgtggtattctcatgatggcaagcatggtatcctagtaatgacaagctgatatcggcgcataacatgaagtgggtaacttgtatgaggttgacgccaaagatatgaattatgagaagttctggaactgaagtcccatcttcaagtgccacaacccaagtggctgatatcagaatcgaca

SEQ ID NO: 29530 - DNA, 460 bp, Oryza sativa
  unsure (1)..(460): unsure at all n locations
agctngagatattacannattgtcccaatatttcttgatacttcattcaatccatagacatcgattntattcacatcaggaccttgngaattctcccttatacaagaccattaattctactgtgaatcatctttctttattgtttgcaatccattaatttcagcaagtacatctcactaattctccattgcaacatatatattttcagcgatcaggctcttgtcgtcgtcactggcgatgccggcatcgccgacggcggatcatcangcggactctcccctccacacgctntggtgcacatgcatttgtgtctaacagttgtgcagtagcctcctgtgtagccctcgttggtgcagcangcgatgccagtggtggggtggccgcacaagcctctgaagggttggctnggatcatgacacatctttgcagcccgcacaccatctgctcatcacanaatcac

SEQ ID NO: 29531 - DNA, 393 bp, Oryza sativa
  unsure (1)..(393): unsure at all n locations
tctcgggtttttggtctctgcccgatgcatcgaggccaaccttcttatgatacgagctatagagcggatgcgcccncgccagcaagcttatggatgtgcaatgcgtcaccggttgcatggccgccctaagtcggttcatatcgaggctgggagagaaggcgctacccttatttaagctcctcaaacgctccgggccgtttacttggacggaggaagctgaacgtgccctcactcagttgaaggcgtatctcagctctcctccagttctggtcgccccggagccaaatgaacccttgctactctacttagcggcgaccccgcaagtggttagtgcggcgttggttgtggagcgcgatgaggacaatcctcattccgcgcacccncaccctgtgc

SEQ ID NO: 29532 - DNA, 469 bp, Oryza sativa
  unsure (1)..(469): unsure at all n locations
agctngttctcaaacatntatcaccttatatagcattataaggctgaatgatgaatggaatagatggacactcttgtaagggaggagtggtctgttgtataaggtgcccggtacaccagcgacgtagtattgaggtggctgtaaacctctgctcgcgcattcttgggctatggactgcttgcactgctccaatgactggaagatgtggttgaaatcattgcttggtaggtcattgagaaatatctggacctccatggtgctattgttcatagcgtttttattgcttattgccatgattacttctgagatcagaagatgtgtgtttgcaccataagagcagcccaggtccgtaactaccatcgatngaggttgaagatctgtgcatacttctntaatggcattttcaatcattgccttagttgtaagaatggctnttctctgcatacatagaggcaaatcaataaattta

SEQ ID NO: 29533 - DNA, 268 bp, Oryza sativa
cgccgcccaaacgactctataaacatcctcttatgatttcttattataataacaaccatgtgaaagccgccaacatgtaaaatgtgcaaagctaaaagtcatataatgcttggaggagttttgtatatttcctaaaagcctacaatgcgtaaataaattttagtggaactttcacagcacacatatatttattaacagataaccaagttaaatgactttataaaaagaaaactctaaaagtccctttcctcctctcctctttattgaa

SEQ ID NO: 29534 - DNA, 339 bp, Oryza sativa
  unsure (1)..(339): unsure at all n locations
agcttctttggcgttctgttgcaggatgtctcaatctaactttttgtacctcagtaaaacatcaaatgcggtgtgacatcaattcgcatccaaaattccaaatgcatgccacttgtacaatacaatgcgaaggaagagaaaactaagactaggtagatgtatcatgctcagttgcctaaccacggagcaagtggagcagcagctcgttccaggcgtcgacggggccaggcaagcaccagtggacgcagtcgatgccgaagccgaccttctcgtgcggccagtggccgtactgcccagggtgcccgtcgccgcgcatctgcatcatcccgctgacgtnca

SEQ ID NO: 29535 - DNA, 364 bp, Oryza sativa
  unsure (1)..(364): unsure at all n locations
ccggtctgctatctgcatnggttgggtccatttcagaagattggatgatattcattgtagctgaaataatctgctgctatgtgaaacatgcgaagatcggatgaaattcagtgtagctgaaaataatttgctgctacgtgaaacatgattttccatttcattgcctcagaagatgcacacatgatatcgtcctaggtgtgagccataaagcgcaatgtntaatcaatggttaatgaaagtcaggctttcaagtatcaacgtctcagggttgtcattctaatgctagaatacaatagacgccgccgccatctgatgaggctattgaaagggttgctccaccagatagcgccacttctacaatata

SEQ ID NO: 29536 - DNA, 430 bp, Oryza sativa
  unsure (1)..(430): unsure at all n locations
agctntgttgcttagacagatatgtagatacaatttattcaagcacgcatgcgtgcgtatatgtatattactccataatagtgtactacgtacctcttagtcaagtcacgaagtaattgcctttttgccaaattttcgacattcttcaagagcaatggatcgacctgctgcgtgcataaaagaaaaatataataaactttaaacaggcattacgtattagtagaaagaaaaaaaagatacgataagtttcattaattaggccaaaattagcgagtactgatcagctatagggacatactactatgaaagacgaagagaatggttgatcgatcggtcgagagaaattaagaggcaggcagtggtgtgacctaattaattaaggtagaagtacacgtacgggcgctggattacctgatgatgatgatgatct

SEQ ID NO: 29537 - DNA, 340 bp, Oryza sativa
  unsure (1)..(340): unsure at all n locations
caacatatcttccaagattngattgactcgctcggtctgaccatcagtttgcgggtgataagccgtgctgaagtttaaacgggtccccaattcttcctgcagtntctgccaaaactctgaggtgaactgactacctcggtcggatactatcttcctgngtaccccatgcaaacacatgatccttgcgaggtacaattctgccaatctctntcccgtataggtggtatgtactggtataaagtgagcaaccttagtgagtcgattcacgactacccagattgaatcatgtcccgatgatgtccggngcagtcccgttataaagtccattcccgatctcctc

SEQ ID NO: 29538 - DNA, 357 bp, Oryza sativa
  unsure (1)..(357): unsure at all n locations
catatccattagatccatcgatgattcaaatgcagagatagctggtnaataataaaaggtaccatttcgacaagattaatgattccatcattgactgcacaataaatcttgaaactttccttcagcacctgagtaacattttcattcatcatgagcaagagcaattcggataaatggttctaactagtagtatctgaagttcagatatcagaattaacgtcagccacaataccagagctaatgcatactgtataagatangttccaaatgcggcttcttcaggcttcacacacagttacagcattggtaaaatgagtcagaaactaatctatatcaagcagataacataccacaaag

SEQ ID NO: 29539 - DNA, 487 bp, Oryza sativa
  unsure (1)..(487): unsure at all n locations
agctnttaattngatagacaaatatactccactntctcttctgaagggatatgttgaaagggcaaaacagaatgctctggatataattaatatgaattctccacgcaagtctctggtattgactactccataggaaatgattaaatgttggggtagtacttttctaatttatactgcaacgtgatctggcaccgatcgatgtcataaatcataagagtaaatagaaacttgaaatattgttatgcatggactattagagtgatcttttaccttgcaaaaattaagaaattggaaataagacattcttgtagtagtagtctggtagatgtttatgttacaaaaatttgttctctcctcgagctatttattttttgatgggtttaaatattgatgatggcacatttacttgtgagcagagtccacttataacgaaggangtggatagtctaatggttgcacagaacatagttcaacagcagatcactga

SEQ ID NO: 29540 - DNA, 447 bp, Oryza sativa
  unsure (1)..(447): unsure at all n locations
aagaccaaagtgactntngatatgcntttggagaaatatgataagcaaggtggtgagagaattcgcagcggaggataaagaccaagatcacctcctatgaagcgaattggtcattcaccaagacggtcgcattcacctccatatcatcatccacaagacatgtcatggggttcttatccaatgccgccgccgggttatccttatccttattacatgccatggngggcgacgctgccaatgttcaatcatatgcctncaatgcaattcaaccaagggtggngaggaccgangaggccaattcatgagccgtttgtcttcaccaaacaatagccggtntatggtaagaatcgggctaatgaagaaaagagggaaggaaagcgcgtcaaggtggaggcaacgacttcagaagaattaccatcaaagtggggtctcatgatgtgccatacc

SEQ ID NO: 29541 - DNA, 424 bp, Oryza sativa
  unsure (1)..(424): unsure at all n locations
agcttgggcttanaccctanggttacctctataatcttcttattctaagatgtatttattntanaaaatcaatatcctgttagtcgagccttacttgagtccaaggtgttgatgatttctggctctgccattgtccacatgtaagtataagaacgtgtacattntgtctgatgtttacatgaactgcgtgcatttatccggcgtttgctttccaaatcatcgtttcttacgtctcttcccccgaaatccacccatcccttggattcccttcccccaaactgacatctcatgcttgcgtcgacaatagtatggaagcaccgtggggagtctggctctagcattgtctcaccaccggtgtggatatgatcagcgcgctgcctgaggagctgcgcctccccatcctcaaccatgtncgttgcacctg

SEQ ID NO: 29542 - DNA, 383 bp, Oryza sativa
  unsure (1)..(383): unsure at all n locations
taagcaccgcagctgcactttatagtgattgctgatggtgctttattatattccttaccagacattngaatctcccttacgcataacccatcaataatagcattaanaaaaaaggccatctatcatcataattatcattgtttttttcatcagggctacgcaggatattaaagtcaccaccaataagaattgataaggtttcatgactgcacatattaactaacttaacaaggaattgttccttanactcattctgagtangcccataaaccagaactaaagcccacttaaacttatccactttattacatagatggaacttaatataaaagtcctcctcatcaataaggccaatgtctacattaagtaaattaatacccaat

SEQ ID NO: 29543 - DNA, 408 bp, Oryza sativa
  unsure (1)..(408): unsure at all n locations
gctttctgcaccgagtgcatccttanacacatatctgagtgacatgtctttattgccagataatgcaacagacagagtgttgatcgatntcccatattgcccaatgtacgcgaaggccttgtccgtgaccagaccagaggtcgaaagcctggaaagcttcttgcaattcatcacaattgctccaaaaccttcatccattggctccccggtgatccgatcagggagatatagtttcaaaatgctgaggcgaaagacctcaagattagggcagntgctggacataatgaccactgcttgcattgtcatgcttccacaatagtatgttagggttntaagctcttggcagcctttcgagatagtttcagcncaacatctgatactgagagatgatgctcactcccacgaagc

SEQ ID NO: 29544 - DNA, 478 bp, Oryza sativa
  unsure (1)..(478): unsure at all n locations
tctctgagtcacctgcggcatgcaagctggctctgcacataaagagcagaggaccctatgtttgtacttacgaatggaattatatntaggcattggacattcggtccgagttgctccctccgttgagaaattcaaggcgtattagttnttgacaatattcaatattaaagtgtgaccattattttttataaatagaacactgacaactatcatattaacttcatgtaaaatcttctaaatatgaatccattgacaccacttgtatcacactanacatatatattgtttgtttatttattagtcaaagnttacaagtgttgacttttacaattactacatgcatggtttatattttccacaggagggagtaaattatcggatagtcaaactatcttagttgatcaaagatgaaatattcatcacaatagagtgggacatattatatagagcattgaatcattttattaaaaaaagaatc

SEQ ID NO: 29545 - DNA, 350 bp, Oryza sativa
  unsure (1)..(350): unsure at all n locations
agctctcatgacaaggcatntccaaagccgacataagtgtaccatatgcctactttaggggtcccagaccaacaacaggttaggtcccagaccatactgtgccaggaagcccagaggtcttccccgacaccaccccggcgaatccacatgtctctcggcattaatgttcccctgataagctagttactcagccaggggtgtcccattccacccatgtggtcgtacttgtcttatgtttggatgaaattccaaggaaacggtccttaagtgcgagagcgggataccgtacacccggtacgttccccggtccgcggttttggaaaaatcatttagttcgcaagcaccgaccc

SEQ ID NO: 29546 - DNA, 418 bp, Oryza sativa
  unsure (1)..(418): unsure at all n locations
agctggtagntgatggccatgtgggcgcggaagctgtgtcccgtgctgtataagcgcatcctgcgcagccgcccgttcttccccgcgcgcggcggcgggttggcgaagaagtagcggtggccggcgtccgacagcaccgcgtacggcgccgggttgctcagcgacgacgtcacgtggtagatggtctgcgccttgtccccggagtgcgccgccattgccaccatcatcgcgttcaccaccatgtcccccggtatctgcatgtcccangcacagtcagtatacagcgccattgctaacctcgatgggggtaatcatttcagactgttgaattaattaatggttggtgtcactatagggcttaatattttggtttgaatttcgtaatttcggtatttcatccagcgcaggaagtatttga

SEQ ID NO: 29547 - DNA, 371 bp, Oryza sativa
  unsure (1)..(371): unsure at all n locations
atgaacaagctgccgattggctaggataggggtctctatatctntgcgctcccaacattcagctagtctcagcttggctttctccagcttgaattgatgctgctcaagatagacggcaggagttaggacatcggctagttcatctgggatcagagcttgaacctcatgtagccgagtcctaattgatccgcaatcaaccactaagctatctaacgatgatgcctctagccgatgagagatatctctgagaatnttcctcacatcatcggataaagaggctaaagcgttgcttgtgggatcttcttctgtctcatcaagataatctctaatgtcaaaagagaaaagattacctagaccctcaataatgattt

SEQ ID NO: 29548 - DNA, 472 bp, Oryza sativa
  unsure (1)..(472): unsure at all n locations
gtcacctgcggcagcaagcttatacattctctcaagtntagtattgtctctatagtatagtggaatagaaatagaatagaatcttcagtcctcagagtcttcggaagagttcggctatgcctctagtatcttttccttcttttgtaagacttgtactatttatagaatattcttctcaatatatttacggtactttccttcattctgattattcgagtaccaactttatgaaatattattcgagttataattgtttagctaacttactcgggagatgcaatgctgtgggtataatgttcatttatatgattactctatgtcatgatgatgatggtagagcagtatttggtagcataagcgaggtgcttaggctattgaatatcattatttagagttatatgctgcagatatgtcgaggtgggccgctgatggtgacaactcagtacgagtatttctccgcgcgtgtatataa

SEQ ID NO: 29549 - DNA, 321 bp, Oryza sativa
  unsure (1)..(321): unsure at all n locations
ttattacnagtaaattacggataggaggctctaccaccaagtttatactcaggacagatccgttctactctattttaaattatgtctgatcttaataccgttttaattaacctcatatatctcttcttttcatgctgtgtaagttccaattcagaattacaattggctacaccacgggacatctcactaacttaaaggtgatattgttcactttctttgagatcaactgtatgtacaattctgaatggcctctcttttttttctatcaaggttcatgtagtcatttgactaatattcattctctgtcatatattcctcaag

SEQ ID NO: 29550 - DNA, 460 bp, Oryza sativa
  unsure (1)..(460): unsure at all n locations
acccatatggacgctcaacgacttcccaagtgccattagacataatcgagtccatctcactgcgtactgcttccttccagtagtcagcgtcaggagatgaatatgtctcttctatggttcttgnggtgtcatccacgaggtatacaatgtagtcatctccaaaggattttgaaccctttgtctcttactcttacgagtatctacaatgttgtcctcctcaggattttcctcaggcgtttgatcattgtgttctatcggtgcanagtgctcatggngcatgatagtttcttgactagaggtgctaggtgtatgtttcatgggaaattcattctcaaagaatgtagcatctctggactcaataattgtaccaacatgcatgtcgggtcctctagagnttactattaagaatttataacccacactgtgaatagcataaccaaggaacacacantcaacagta

SEQ ID NO: 29551 - DNA, 394 bp, Oryza sativa
  unsure (1)..(394): unsure at all n locations
agctggccaccaatggtgatcggctctgtgggaggtttctgcttgcggntgtcgacggccttgaggcgacccgtcacctcttcgatcgtgagctcggtgaagtccagcagcgtctcgatcgacagagccagctgcgtgtacttctcggggacgacgcgaaggagcttctccacggctctctccttgtcgatggtggtgtcgacgagctgcgccaaccgctgcttgcaggagttgaagcggagaacgaagtcgtcgatgtcctcacccggctngaaggccaggttctcccaatcctgacgcagcttctgaagcgtggacctgcgggcgcggtcgctgccgatgcgtgccgaagcgatggcatcccangcgtccttggcgatccgcttgtcacaat

SEQ ID NO: 29552 - DNA, 432 bp, Oryza sativa
  unsure (1)..(432): unsure at all n locations
ctaagctcgccagagagaagcgagcgactattatgcctgcttcaatggttgttctagtgcactagctcatgcttgtccacctcatacaagagatagcanaaagtctaccttcttaatacgttgtctcatagcacattgttcataatgctttgggttccacaacccctctcatattttgtttacgagcttagctctcgaagaagagatagtgcactctctctccttatcttctctctcttctacatcatacaaaagctgatgtggagatntatgagctagctgactcatccttgttggaggaggccttatgtccagctctacacgtgagtctagctaggcactttgcctgccatgggcccacctgccctcacaacaaccaacgggaaaatgaatagacttaaagtaatggctgggtagagatagcttcattaa

SEQ ID NO: 29553 - DNA, 385 bp, Oryza sativa
  unsure (1)..(385): unsure at all n locations
tctgagtcacctgcggcatgcaagctntctcgttntatgtacactannaaaatctacttgcacatgtgtagatggaacgcagcctggcatgtttcgattggtggcattttaaaccaatcattggttcacaaaattaataaacatgcatatacatttagtttattaccaaatatttagcttagaaaattttggcaatatcacatttaacacatcctatcaaaacttggtaacgctgttgacttaccaaanatttggcattgctaaatttctaaaatggttatttttgcattaaactaaactgtcctgctacaatggagtcaaacccatgaagccctgaagaattgactctagtagaacaatagtcttcaactcttcatagtttata

SEQ ID NO: 29554 - DNA, 211 bp, Oryza sativa
  unsure (1)..(211): unsure at all n locations
ctctcgacancagtgcgcacgttctcangagcgtagcgcgcgaggcggcttaactcttgcagatactctataactgtgttggttccttgttgtagagaacaaaactctctcttcttttgtgccatgatcccctcaggaatctgngccttattgaaactttgacagaactatgcccaagtaacctctgtcccagctggacnggtcaccatgt

SEQ ID NO: 29555 - DNA, 483 bp, Oryza sativa
  unsure (1)..(483): unsure at all n locations
agcttcanatccatcanacataggttctgaaacatctgaagtgcatcatcagtgagtttgtttttgcaaagtccatgaaggattatgttgtatgtgctaagttcaatctgcgttccactttcggtaatcctgacatagagttcttttgcagcagcagttcttctggtttgaaataaaccttgcagaattatgttatacgtaataatatcaggactaacaccactgctctccatctccttaaaaagaactaacgcgtcttccatcctactaattntgcagtagccattaatcaaagtgctataagtaacagtattaggtttcaacccaactgagaccatgccagaaagaacttcattgcttcatccatcttacctgccaagcaatatccatcgatgagtgtactgtatgtaatgatatcaggcttcacaccaatacgtaccatcaggtcaaagagttnttcagaatctataaccctcccttctt

SEQ ID NO: 29556 - DNA, 302 bp, Oryza sativa
  unsure (1)..(302): unsure at all n locations
gctcgtccggatcnnccctcttgaagaagccattgatgacggtgttgtttacaccacatcaggtgggcagtcacctccatcatcatgcatcanttggagcagctcgagagcttcttggcttctggtctcatcacacagaccctcgagaagaatggtgcatgagaagacatntggtttgcagccgagctgggtcattctgcagagcactatgtccattgcgtcgctcgttctcttgtcggcacagaggcccttgagcagaaggagaaggtgatggcttccactctaaattccttctttatgac

SEQ ID NO: 29557 - DNA, 328 bp, Oryza sativa
  unsure (1)..(328): unsure at all n locations
gaccttaagcacctgangctgcaagctgactctgaactagaatgtgctgtggcttctacgctgttattgnngnnngtggcgaagagagctgaggcagcggcgctcatcaatggccgcccggcgaagctagggttgtcgtggtgcagcagcaagctgtaattgtctgggacggcggcgtatgctccggcgccgtagctgccggtgatgcagccgtaagacaacctgtgctgctgctgttgggcatcggcttctgaaacgcgcggcaaaccacccaaccttcctcctgcatccatanttcatattaatatccatgaattaacatatatag

SEQ ID NO: 29558 - DNA, 261 bp, Oryza sativa
gagccaatatacctcttttgttatgcacccgaagcttcggtttagaatcacttatttcttgctattggggtacctacattgtaactttcatgattcatcaaacactcattggtgctatgtatatacagttctgataagaggggtgggagtatcatctttgttataatggcgcagggtgacttactgtagtgactgaggactattggctctatctgatgcctatgtgatgttggtaatcatggtctactatattggctgact

SEQ ID NO: 29559 - DNA, 490 bp, Oryza sativa
  unsure (1)..(490): unsure at all n locations
agcttggacatgctgcacagtgcaatgttatttacattaaaacttaaggatgtagataatggcaatgactggaaaagaaagcacagtgatatttcaccacatagcatagggaacacagatgggcgctggttgccaaactccttagtaaatacatacatttcataactaagtgcatgtcaacaaaaagatacatgaagtagtggaaaatagaagacanatgagaatcataatcaaaaatagcataataaaaggccaaaagtacatgttttgcttatctttgtagtccagtttttttattccacaaatatattatgctttacaattaactagtaaacatacaaattgtaatcctagccatagaggctcagaaagatgagcttccaaaattattgcacagganacaatntacgtaaatcaataacatatatgactatgattctagaaaccaatagagagtgaccaatatagttacatcaatttatcagtaatg

SEQ ID NO: 29560 - DNA, 513 bp, Oryza sativa
  unsure (1)..(513): unsure at all n locations
tatcgcgcacctgccgtttgtgcgaggcgggtgtgtaccgccctctcctctcagaagctcctccaagaggaaccttgtgccggcggcaagcacttgcaacagctccttgtcgagccacagtanttgaggcccgaattccacgggtgctgctgaagctgccgccatgaatgattataaagtccactctgcactctgaactntgcagtgctatttatactggtctgggtgaatctttgggccgctcgctagttgtcgatatacgtacctactacgtactatatgcattcggcagagtcgttcgaaatcacgtagaactaaatatagaataatagagtgcatgttccgttntgccagattcactcttactactttcttttattcatcttcaaacttcaactntnntcgttttcattaacacgctnttcanatattaaatgatatgttntctacaaatgtctatatagaagtcatnntaaanatcanataatctattttaatttataatataatact

SEQ ID NO: 29561 - DNA, 351 bp, Oryza sativa
  unsure (1)..(351): unsure at all n locations
acctgcggcatgcaagctngagcttaatacaagaggctntattctactttattgttactagattanggagaggtggagtagaggaagtcggaggaattccagagttgtcgataatcctcttcttatttattatactctggcaattactctactntaatcaaatatcattctgaggaattaagatttattctatgagagttacctcttagttagttcctaatcaaccgatgggatcattgntcattatagtccattaaaatatagtgattgcttctagtgagtataaacattaaagtagttattaacggtgtagacatggtgtttgggtagttaatttccttcgtatcccat

SEQ ID NO: 29562 - DNA, 382 bp, Oryza sativa
  unsure (1)..(382): unsure at all n locations
acacctaaattcccgtgacttgctgagtgcgagagtactcattcttgctctatataaatatagttcctctgccttgaagtcaagatgaagtgaagtgaagattaaggtttcgtcctggttcccagccgtcgcctgtggtgttaggtgttagttcattggttccgctgctgctgctgctgttgatgtttcctcgtacgcgtcgtcggttgtattctcaggctgtcctgagctgcaacctaagttaaggtaaataagttctctattaaatttaaggattgcaatgattcatatttgtcaccgtgggtaccagtgctaagtcctgngactggtactgtgatcgcagtttcgtaggaagcagttcgcgccgtttttcctatgacac

SEQ ID NO: 29563 - DNA, 308 bp, Oryza sativa
ctcatcggctaaaactccaatgaacattacattttacttattgatttagtagaagtaaacttattagcaacaatgtaatagatagatctatgtaaacgtgatggatataccatatcgaaccaagagatcgaagcgatacagccttagcaaaagttggtatatcaaagataaaccgacgactattaagactagtcagaatatcaagcgagatacgggaaaattctaattgtactgatacgactaccaggatgacagggcttatcccttcgctggagatcaaacttaaccgatgcagccctgctcgaggg

SEQ ID NO: 29564 - DNA, 337 bp, Oryza sativa
  unsure (1)..(337): unsure at all n locations
atttactctatnnttggagtatgtntctttctctctttggatagtacttccaaactgtacatgtgttataaattgtatattaaaaatactagtcaaatgtgtggattgaccatttcaatataaaaactaacttatttttataccccatattcacataatttatactntggataagagggagcaatatatgttgaactttgtgtaaaggatttgaaatggaatagctagctacgggtgggcagaaaaagaccgaacttgaaagaccgagaccgagactgagaaattttgtcatcaattccgtcctaagtagtgaaagaccgaatattgttcggtcaat

SEQ ID NO: 29565 - DNA, 369 bp, Oryza sativa
  unsure (1)..(369): unsure at all n locations
agctnttanaggtcaaatttggtaagggtatntagtggattcagttaagaaaagatgtcgatcaaccaatggaagtttatctagaaatgaccgagttcaaagaggaatcgtgaagaccacggcatagcagtttaattctatatattaactcgacaagattntgtaattttccttttatctttaggaaacttgtatcgagtccgatcaggactagtatcaatccgtgggtataaaaatgtacacccggggcccttgtaatctatctctcgatcaatacaacttttggcgcatcaccaccctctntttcgaggttntatggccagaggaacttggacctggggcagggctgcatcacttcgatctcccgcg

SEQ ID NO: 29566 - DNA, 352 bp, Oryza sativa
  unsure (1)..(352): unsure at all n locations
caccaaatgcggggatctgatctctgtgctctttactctntacctgcagagatctgagaatgaggacatattgagtaatccattgagcagcanatgccatatttaaataatacattatgaagggaatgcagataatagcacactttacgaatttggaatcttgntttcttgatcattctctttaacgttccttttccacacatgtaatatttgctacggntactttctaagacgtccaattgcctaatcactattagcaatatnaaaaatgactaaagtccagtaattatactttgaagaattgtatcttctcatggtgtaatgcaatgttctactcgacagttctactctt

SEQ ID NO: 29567 - DNA, 463 bp, Oryza sativa
  unsure (1)..(463): unsure at all n locations
atctctaagcaccgcggctgcaagctgacanatacaacagnggaacgctatattatatatcatgtactaggaattgagagagcattccgagagaagtttcctgcatgctcaattgctgctaanaagcatattgatacgacaactacaatactggatgtccacggtgtggtatgttcaattgtccatcgccacctaactatgtcttcttcttgctagcagttgtctaataaaattgacaaagaatatcagtcctacattaagatactntcatgctcacaataaagacatttgcctgaactaacaatttcttaaggtgttgatacattaaagacatgaagttatgaaaccatcacattggaaattagctttcatcattgtttattaaacaccaagaacatgtaaaaataaatatccttcatgatattgagttgagaatcatgttttataaggaaagcattgtcct

SEQ ID NO: 29568 - DNA, 447 bp, Oryza sativa
  unsure (1)..(447): unsure at all n locations
agctccncgacccatgttgggcacctgctaatcgtcggtccaactgtattttttttcctctcnggattggtttcccaaaagcggcaggtgacatccaagcgcccgtattcaaccagcagcccgtgccgtccatcttcgagcgagtcaacccaagtaatatttctagtaattttactttctgtgagatggagggagacactcctatggacgacaatggcgcgcccgcaccaacttcaggtgataacccgatggacagctcataacaagtcataactcataagaggacctgacatgttcaatctcctctgtagggattaatgaatggatattactgccaggcatatctgatatgcaaaatgagatgttatctagatggtctctataattgatgaatgggtctggccaatgatggcaatngatcacgggtatatgcactgactgccatca

SEQ ID NO: 29569 - DNA, 446 bp, Oryza sativa
  unsure (1)..(446): unsure at all n locations
agcttcanggttgcacagatatcttanattctttcttcttgtntttctcatgtccagacaaacatttcttactaggtctgtcttgaactttctgcagatgatatttctgttcatgggccaatgactcaatcccagttcttgggctctcttggtataaacttccgtgtggaagccctgctccaaaactgtgctactgatgagcangccgagtctctgacgacaggctactggcgtctngtcggagatggtgaagccccattctgggaaggtcctgacgaccaaaccccaattggcatgggtactangtacttggccatggccattgtcaacatgaagcaaggcacacccgttccattcgagtaaaagaaatactggaaccgtttctcctctcctcaggtaaaataacatcactggcgtgtaactcttatgctgctgatgaattctgc

SEQ ID NO: 29570 - DNA, 192 bp, Oryza sativa
  unsure (1)..(192): unsure at all n locations
gctgtgtactactgtgagctctncaacgctagttgctgcttggatatgaaacaatccaaagaccataaactgcactgatccaacagcanacaagcattcccagtacacacgaacaccgtcatggcggctagttgctagtgcgcaccatcctctgccacgacccacgccgagtgagcatacaggatgcgcccc

SEQ ID NO: 29571 - DNA, 419 bp, Oryza sativa
  unsure (1)..(419): unsure at all n locations
actatgctcgcctgcgacaggcatctctacctgctactgtagctgatagtacatatcctcataacccatgtnntatttgctttcttgccatgctatagtctatagctgcatcacctttattagatcaatctaatccctcaatgtggcaaaaaaagcaaaggatcaaaatgatactaatacaccgcacgcaaatttcagacatctgcaaaccaatgccctaacgtatcanaaacagaacatatgcctctgaatacatgcactccattgatactctatagtgtaaaaaatgatattgtaaaatngcattactacactactactacgactagtgtaacaagaaacaaaagaattcttttacccatcccacattccaatacgttcgctcgccttttcttgtgggacgggagatgggttacgtc

SEQ ID NO: 29572 - DNA, 450 bp, Oryza sativa
  unsure (1)..(450): unsure at all n locations
agcttctcaagacatcccttacctgtttaatatattaccagatagcagattgtggcatatctgttctagccttccaaaaggaagtgtttggaaaatagtttgattttaggacagaggatagaagatcatttggattagtaagaattctccaggcagattggacaaggatacttttatttacagccatcaaatctcttatgcccaagcctccctcatatacaggtgtgcaaatgtctntccaagacctaagagccattcctttnttgccaccatctgcttgaattcctgtccaccaaaatntccttataatagcagntagtttagcaatcaatttttttgagaaaagcatgatggacatgtaataaatatgaatggaagcaaagacagattttatgagggcaagcctacctgcatgagaaagagaatagctttgtagtagaagcttgcttt

SEQ ID NO: 29573 - DNA, 368 bp, Oryza sativa
  unsure (1)..(368): unsure at all n locations
agcttgcaacagaaatgctacatacaaagaatctcattattctatgtggcataaacngctagatgtgcaactccctgaccgaggaaagcatggctcacatgttcttcttctgaccatttgcgcaacaatgctggcagtacattgacatcaactggcatatggccctgggatatatgaacatgctcacctcaaaccagatctgcttacatcactctttcatatacgaaggtatatcaattggctgcatgaacatccggtgcatactgaatgatcatatgcttgacaatatcgctctaaacttgccatatggaaggatgactttatgaatgatattgccttgcatatacaccgatcgacatgagatggac

SEQ ID NO: 29574 - DNA, 452 bp, Oryza sativa
  unsure (1)..(452): unsure at all n locations
agctngcanaagaaatgctacatanaaagaatctcatcattcaatgtggcataaactgcttgatgtgcaactccctgaccgaagaaagcatggctcacttgttcttctcctgcccatttgcgcaacaatgctggcagcacattggcatcaactggaatttggccttggaatttatgaacatgctcacctcagcccagaactcctttcatcactctttcttcttcgaagtttatcaatnggctgctggaacatctggtgcagacggaatgatctcatttttaacaatatcgctctcagctttgccaaatggaaggttgactttcttgaaggatttgccttgcatatacacagagcaaaagagatggacaaaccccaagtggcaatcatggctaagcacttttaattaatcttcttgtatttattgtaacctgtaaatatcctatctattaata

SEQ ID NO: 29575 - DNA, 128 bp, Oryza sativa
cctcgccgagtggaccgagtgccgagaagatatgctagatgataagatggaatattggactatgcgtgtgtgatgggtcaaagaagcttacaggtgctggtactcgggttgtccttatttgccctact

SEQ ID NO: 29576 - DNA, 471 bp, Oryza sativa
  unsure (1)..(471): unsure at all n locations
ttctagngaatatgtctgcgtgattatatacaaataggaggtgcctaanagggtagcaacttcatcctccaatggtctttttttcatattacatttggagctatgttctgcacacttctttatctccaaaattttgttgttagctgatgaaagagaaaatttgtgtggagaagaaagaatatatagaaatctagtttatntggaaagaaaggtttataaaaaagttgagaaggaaaataaatggtaagttaatcttgaaaatacaaaacaaagtataatgataaattaaaataagtactacacattaatattatgttacaactctatatatagcaaatatataatcattcgccgaatatttcataatatttgtatgaataatgatatgtcattattgtgtgactgttgaaagagtctgtaatattttataattattggatgactgtctctatcgtaccaataaatatgtgt

SEQ ID NO: 29577 - DNA, 62 bp, Oryza sativa
tttttgagttggtgaataactacagtcagagactttttgtacttatacgtgcagttatttat

SEQ ID NO: 29578 - DNA, 419 bp, Oryza sativa
  unsure (1)..(419): unsure at all n locations
agctntacgcaatgctntcttgatcttggacaaggttagtctcatgatattttatgaatgccatcatgcaactggaaaccacccttatacttgtaatgaaggtattatgaaataccatcttatcatgtttttttttttgttttgacactaccatgaatatttgcattcaggtttttcttttttgtgtttgtcataagttataacttatcacaatctcangaagtctattacaaatcagaacataagccaagtgtgtttggtatgacagcatcacctgttataagaaaagggaagtattcagttttctgcaagaactatatagaatgcttcttcttcttttcttttgtgagtgggtgggtaggtgcccggngggctcgatggangatgggatgttaaacctcatttgttcaactctggtc

SEQ ID NO: 29579 - DNA, 422 bp, Oryza sativa
  unsure (1)..(422): unsure at all n locations
ctaagcttgtgcctntactagccatgtagctggctacannaatgacaaggtggtgatgttgtctctatntatcgaagatatatagagtacgtattgatggctcaagtgtgtgtaggcgcatgttgaacaccatcgctatctaaaatgtggttcctctgcattacatgctcaggaacagctagatntaattnntgatggtttcgntgtaacaagaccttaaggatatattaagcaatgatgaacccttcgatccaccggaagataactntggacagttcattgtcatatttctcgaccccacatcgcaactaacccctagcacacagagattgtgcttcctcaatatttactattcttaatagcacgtggtatctggtagcgaaaggtgaatttgcaatacattggcaacagtagccacatga

SEQ ID NO: 29580 - DNA, 408 bp, Oryza sativa
  unsure (1)..(408): unsure at all n locations
gaatgcgagagcttagaanaacacacacagaagcctctacctggcgcgccagatgacggagcgtgtggctcctcaccgggagaccgcgcaggcccncctttgccggttcggccggnggccctgngtgagattctaagctcctagtctgtggaaagttcgcgagaatggaaaaaacacaagacacgggcgatgtatacaggttcnggccgctgagaagcgtaataccctactcctgtgttctggtggatctgtatatgaagaagctacaaagagctggaaagccagagagcccttactctagaaaccctcttctccctttctctttctctcctgggatctactctccagatcctctcccctccttttctattcctctcctgggatctactctccagatcctgttccctc

SEQ ID NO: 29581 - DNA, 367 bp, Oryza sativa
  unsure (1)..(367): unsure at all n locations
actgtcctgggaggcttacgcncaaacttgttgactagttcttcttttctaatccctctggggaacgcggcgatgatgacgtcntctgcgatgtcggacatcttgttacgttgttcacaacatcgccggatgtaatctcgaagggattctccacacttctgaataacgttgtagagatcatattgtgtgccgggacgctccaaggtgccttggaagtggcgatgaagtggtcgcgtaattcggcccaagatccaattgtaccacggngcaatccatggagccaagatcgggcggaatccgctatagccaccggtaaatatttcgccatggccgtcgttgtctctcctgctgcgcggattgcgagacc

SEQ ID NO: 29582 - DNA, 245 bp, Oryza sativa
actccatccgctatgctgtgagcgcgcataatcccttctttggagcaatgttagatatgaagcaatttatactgtctcagtgccaccaccgatctattccagtcgctcgatctaagcatgcgccatctaatggattacatgtcgctgatatctacagccgatcaagtacattgaacactctccaagttttacgtgccttcaccgatttgacttgaattgcatcggcgtgggccccatgatatgtc

SEQ ID NO: 29583 - DNA, 413 bp, Oryza sativa
  unsure (1)..(413): unsure at all n locations
agctnggggagaggcattgctgcacttggtcccctggtaccccttgagcaaattggagatgatggaggtggagagcangaggaagacggtggaggcgccccacacgaagaggcggagcgccgggtggctgcaatgatggccgtacgtgccgagcgccaccactaccgtagcgagcatggcaagcacggcggcgccgattatctggccattgacgttgaagaattctttgatagtttcagtggacgccattagatgctcttcggtttagacggactgaccgagtagtgtgctcttcaggttttgaagagatgatcagaataagaattgtgtgcgaagatgatagatcaacctcggcgtatttataggcaaaggctagtgagtaacgggagagcgaactgtttcttactagacac

SEQ ID NO: 29584 - DNA, 368 bp, Oryza sativa
  unsure (1)..(368): unsure at all n locations
taccctgaaatgcatgtcttaacaatcttgtagcattatgttcttcttgcctacagaaaaacaagagtatgcaatatattacctcaagtggtaccttgagttccttcgtcttatcatcaattaactcaatcaacacggagttaccatcctttgctggggttatctagagatatggatgntgcaaggttacaatagtgtcaaaagatttatattatggagaaagcttgagttgaattctaatgtaacctctctcgcaaagaccccagtttgatattcaatttaccaggattgatgagaatctcttgggcaactttgcatcttagatcaacacatgcatcactgagcagtgctcaccaaagaacctgtcc

SEQ ID NO: 29585 - DNA, 320 bp, Oryza sativa
acaatgtctgtgactgaagacagcagactattaaagtgactattccttgataggtgcaaataacaaagttgttggaggctaccaatgttggcaggctatatttctagagagcaattggagagaattatactctgcatattttgaaacgtgtggaaagagttatggagggatataataggatagcctgagacatcatgataccccagctacatcagtcgacaaatggaatatggcacgactggattgcttggagtagattgctcttcattggacaattcactcacgtccaatatacatatgtaactggtttgagagaatgc

SEQ ID NO: 29586 - DNA, 257 bp, Oryza sativa
  unsure (1)..(257): unsure at all n locations
ctccaccactctgctgtgcttggagtcacatttgcttatcagaattttctattgctatcacgcacgtgcatcgatgcgacgatgtgtctatgtatagcgcatcacataggacacaacgactcatatgacaaacgtcacccgagttatgtattgagctatgattctacgcattgcattcanctcatctgtcgttagacttgcttccaaagtccaaccagcgactgataccgacgccggtggcattatcgtcatggctg

SEQ ID NO: 29587 - DNA, 422 bp, Oryza sativa
  unsure (1)..(422): unsure at all n locations
accttactccatggagcacctaacacatgtgaaccattcatttaagcatntaatcacagcagcaggaaaacaccactcagtagccttgacgggtgctgataagatacaatgcatgtcacttgccgcttgattacaagctagacacactangtcccatgtttntgttgttgttgtgttgcctcaacaaaggctcctggtcacatccccaacatttttgttagttgattgcaagcacaaagttggcaacatttaagatcacccgaatcccataaggtgcccgcaccaagttgtgctctcaaaggaaaatccttcttttgggctcatgatgacaagtttagcacatagtttaatcccctggatgacctcacccattntgctcctangaaatatatatatatataaatgcgtgatatataacactc

SEQ ID NO: 29588 - DNA, 429 bp, Oryza sativa
  unsure (1)..(429): unsure at all n locations
tgattagatgctctctctcttcttgacttagcctccctctatgcatccacatatcttgacttatgaaaatatttggggcaacttcagcaccaaacagaattttatagaactgatatatgtgagctttcagttctgcaggttcctcaattattctaccatcttcttctaaagctcttatcaaactttttctctttctccccattagctaccccatggaagaaagatgtgttagcatcaccctcttagaagccattttctccactccttccttgccaatattnttcctcatcaaaataaatctgattcaatctgccttcaagaaagtatcttttctgccattcatctgaagaaagaattctgtgatcagcctcatcttcgatnnattttatctctctcatgagggtgtccttcacctttctcatctcactc

SEQ ID NO: 29589 - DNA, 418 bp, Oryza sativa
  unsure (1)..(418): unsure at all n locations
tcacaccgcttgcgttcaggtatggatataagccacattggtcatactggtgttcattccctagtagaaatattcatctaaagaatatttatatgttccacanaccaagaaaagtctcatttctgtacaccggctagtagatgataactcagctttcctgaatacatcgtgattatttctttcttaaggatcgaatcaccaggagaacgcttcttagtgggaggtctgggcgccgactctatcccttgcgcaatcatccttgaggaagcctacatgcgtgaaccctactaagcggggctagcgttgggtatcattatcctattgtaacagtcgcaataattagcctcttgtttatgctcaatgagtcagtgaatgctgcacagcaaagtataataccttctggcacaggtgttagatc

SEQ ID NO: 29590 - DNA, 471 bp, Oryza sativa
  unsure (1)..(471): unsure at all n locations
agctnggaggtcctccgacgtggctgatttccactgtctgtgtgatccgggttagtaatgtcgtgtgggtaaagtgtaccccctctgcagaggttaacaaactgttcgaacagccgtgcccacggtcatgggcggatgtgaggtgattcctagcgtagttttgtttgactactgcttgtgaaattgctgttgagaaaagggngttcgatgttgaaaaatctgtagctgatgggatcagctaggcccgggtgggccgttgaaaagttgttggcccgggtggccgtttgaaaagttgttggcccgggtggccgttgaaaagctgttggccgggtgccaacctttgttcaattttaaagactgatacattgcacatactccgaccggacgagacgcactgtctcattcgtgtctgttgagaagcactcacttagttgttcagaaaagagttcgaataaatcaattgcaaaacac

SEQ ID NO: 29591 - DNA, 338 bp, Oryza sativa
  unsure (1)..(338): unsure at all n locations
ctcatgcctctcgtatctctggcgacatccaattatgacgtgaagctgatggggagcgcatgcaacgaatcatgccatgtgtggacgaagattgaaaccggtaagtccatcactctggtggctggatttttgctcgatttggatttnttcttcgtttccgctcttaattcttgatttgggtctaattcgggaaatttataaccaatctngatgttgatatgcaattctttggtgaacatgaatgaaatggttaaattatcacatatatgtaatcagatcagaccaatttgcacagactcggatgatnttgtgtggggactcggatgtgctgccgaaaa

SEQ ID NO: 29592 - DNA, 404 bp, Oryza sativa
  unsure (1)..(404): unsure at all n locations
cgacttcgtcgctgagtggactgagtgccaagaagacatgcccaaggagaagatagagtattggactatgcattttgacgggtcgaagaggctcttatgcactggagcgggggttgttctaatttccctgaatggagaaagactgagctacgcattgtggatatatttttttgcatctcacaacatggcagaatacgaggcgcttcttcacggactaaggattgcgatctctttatgaatccgacgcctgatagttcgtggagattctcagttggttgttaatcaagtcatgaaagagtggtcctgccttgatgataacatgaccgcttaccggcaggaggtacgccaagtggaagacaaattcgatggacttgagctcatncatgttcttctacataataatg

SEQ ID NO: 29593 - DNA, 247 bp, Oryza sativa
  unsure (1)..(247): unsure at all n locations
gagtcttgtatttgtgtagccnctgactcnttggttagttggataacaatcgaacatagagtcgagaactgtagcttgtcgtcaagtagccattgcttgagtgaagatatgtgctgacaatgtccgagtagaaatattgaatattgaaaaaccacttggtgtagtaaaataacacagcgtcgaatcttggaagtgcatgccgagatgtncgtggtggtgaagtagcanaacttgcgaagtagcaaca

SEQ ID NO: 29594 - DNA, 323 bp, Oryza sativa
  unsure (1)..(323): unsure at all n locations
gaccaatattcttgcacactcttttgctaccaccctaaattagcttctctagtcattgcataaattaatatggcctagccgtgctaaactagccggctttacagagatgggtacaaatttgccattggagatactaataaaatcataactaaagagatccatttcccgatagcattgaatattcccatggcgccactcaaaagtagcatcagccattgcaacctcggccgatgtattcgcttgaacaatctcaacatcatcgncgtcctattgaatatacattgatgcanggtagaagcacacaacaattggcatggatccac

SEQ ID NO: 29595 - DNA, 303 bp, Oryza sativa
  unsure (1)..(303): unsure at all n locations
cgtccgcgaacccgcttataggcagaantagttggtaacccgcatgttngactcgcgggttacctaatttgacctataaataagtntatggatcgacctacgtacatctctagatgcggcaagttgggccacaacacgaanatccatgagttgtcatctatttgacctataagtgaactcgtgggtcggctcgctggcatccttattcatagctaggtgtcccattaagtggaccatcagcgaaaatgtagtacattctcactggtagtcggcttaagaagccatcaacaaaggtatacttta

SEQ ID NO: 29596 - DNA, 377 bp, Oryza sativa
  unsure (1)..(377): unsure at all n locations
agcttgccgatgccatggtcacctggatcgaggcctgtgatgagctgaacccctcgactgctgctgtcgagaacggcaaggccaagtagattgatcctgngagcttgtgtgtcgcaggatggaaagtaccctntaagtgaaagtgttgctgtggcctangccccctagatatatgctcttttgagatgaagggagagattacttaagcaactttataattctttgttgttatgctgggtcttttgtagctggaaaaggatttgttatcnatcgttacataattcaagacaataataattntatcatgtaattntgatagtcgngctttgcgtgctaaatggtgttatnggtattaataacctttgcaaatcactata

SEQ ID NO: 29597 - DNA, 338 bp, Oryza sativa
  unsure (1)..(338): unsure at all n locations
cgagctctgcacanatgacaaggtcngcctcctgtcagatgtcacctcaatcttccgcgagaacagcctgactgtcacaagagcggatgtgagcacgagacgaatgatggctgtcaacacattctatgttcgcgattccacangagggacggttgatcagaagacaatagactccatcangcaagccatangccagaacattcatgtgaaatgccagcctgagccatcagagccacagaagaaagagtcacccacatggntcctcttcgccaaccctgttcgaccgagatctctctacagtttcnggatgttcatgcgctgatctcatgagccgatcc

SEQ ID NO: 29598 - DNA, 412 bp, Oryza sativa
  unsure (1)..(412): unsure at all n locations
agcttgtgaagaccctgagcaaggcaagccaccttttaacatattgagcctatatttgaacttaattatattgcttgcaaaatattatgcattgataggattgcacttaatctgtttgccccgtctgcaaggcagaccggtgggcctacccaacttgttgcatctgatccttccattgttaattgttatatcatgttcccttgtaaccatctagttgcgcctcgatatttgtgcactctgtgcgagtatcgacggtcgccttcaaacttaaaatctgagtaacttcttgggtaaaacttggtttacaaaagctttggaaaacccgacgcctgngtcggtgccttgtgaaagaaaatgagttttataaataaaactcgcgacacaaggccattcctgngcggaatacttgtgc

SEQ ID NO: 29599 - DNA, 197 bp, Oryza sativa
gacgatcgtcgtcgccaccatcttcctgctcagcctcacctcggcgagcgtcgccgtccatggccggagcagcatgaggaggttcgtcaggagctacgacgagccgtgcatggagatgaagctgtacctccacgacatcctctacgactacagcaacagcaccttcaactccacggcggcggcggccaccaagccga

SEQ ID NO: 29600 - DNA, 452 bp, Oryza sativa
  unsure (1)..(452): unsure at all n locations
tgcgatctatggcacaaatgtgatagttattttttataataagtcttgatattcgatgactaatatggtaaatatcaattaggtaatggaccttgagaatgctcaactgcttgtgcagaagtgtctacttacacagatagttttctatgagaaaataatccaatagtattctttccatttgaacaatctaagtctacctgcatataaatgaaataaacttgatcaaaaggtagtgatcagtagctacatatacaactttggacaaagnttgagtataattaatttactcttactccaggtatggcttgaggaaaatactagaagtagtatgcttctaggctgctaacctggaccaaggaaacaaatcttggccagtaactagtaaaaacaatagtctcagtggaccaatattttgttgaaatcgatggctatattgagagtacatggccata

SEQ ID NO: 29601 - DNA, 477 bp, Oryza sativa
  unsure (1)..(477): unsure at all n locations
ctcagctatatgggcttccagaaaggcaggaagatgagggcanaagggcgatacatgaagaaagcctagcatgtatttctgaccagccatttgcttctgatgcacagttngagaggcggttgggtgccaaatcanaacgtgatgatggtggtgaatctggtgatgatggcattgaattgaaagtgaggcaatcaacaggtatttcttgatcaaaacttgtgttcctatctataatttcacataagagccanaaaaatttctgtaaaatattaatcaacaactattctagctgtagtctagcattntctagtaatctaattacataccccttgtatttctataatgaaaagggaattgtttggtatcattctttgaatntatatgatattaccaccattntttttgtttcacagacttngtggtgagttagctaattatatggcccgattatatatgtcaaanatgtagtcatacaat

SEQ ID NO: 29602 - DNA, 443 bp, Oryza sativa
  unsure (1)..(443): unsure at all n locations
ctctgagtcacctganngcatgcaagctttggcttcctttgtggcgcgaaaggcagaggagaatcgttagtggccggctcggtacttggggtgtgtggtaaggcgacgtctcaacagattggaagcgaaatgggcgaccccctttacgcatcgaggcctgtaggtggggtgtgtgtgtgttcgcgttccacgggcgctcgatcgccggccaggacaagtgtggtgaaaggtcggaagcacacgccaactccatgatttcgggtgctgtctccttaagaaagcatttcggttaactaccttttgttgagatctctgggtggacaagcccccacacctgatggctgtgctgtgcagtgcgccccacccgttgtgttcgtttgtgtgtgatgtttcacctcactgcaatgttcacaatgcaccgtgggtgacactgacactgatgt

SEQ ID NO: 29603 - DNA, 493 bp, Oryza sativa
  unsure (1)..(493): unsure at all n locations
agcacctgaggctgcagcttaagggacccttaattaatctggccttaatgggtgtgttaccaaggatcgattgattcaatgcatacaatagctagcactgcattaaatttcaatttacctgcatatatattactcttactagttattttttaccgtaccctctctatttttaaattacttatcgctctaaatctatcttaagttaatcgatcatgtctatctttgagcattatntctttaaaaaaatcagtgttagttaacaacatgtaaattctatgttatgcaaacatttctcatagtgaatctaanaacataaaccttatgatgctatacaatatgaattttcaaaattgatacaaacatataaaagttatgacaaagctaagatggtagtaattacaacgaatgaagtatcgcttctaagataataatatctcgtncattatacaccgtgaggtattattacaataatcccgattcgtcagctatatac

SEQ ID NO: 29604 - DNA, 479 bp, Oryza sativa
  unsure (1)..(479): unsure at all n locations
cttgactacccaatccttaatcacaccgactatgggtttacccccattaagttcaaatcctataagaagcagtcgaaaaccgcatcactcaaattaaactaagtctaatcctgcaaaacataaaacaacacatggcaagactcagtacattaatcaaattaatgtactggcaagagcaccatcaaacttacatacatgaaagctctaagtcaatggaaggctatttgtagtctcaattttcagcataaagcaaattntagttcacaaactatttgcaacgtaatttaagcaaatcatttaagcaatatataaagcatattaatcatggcatgatatcaacataaatagatagacatcattcccttacaacataaggggaagtaaggcaatcatatcacatataccaatctcatcatcatttcaaatcatttagtttcaagagacatttagaaagcataaaaatatacccaatattacta

SEQ ID NO: 29605 - DNA, 110 bp, Oryza sativa
atcaagtctactttcaaatggatccagccacatgtccatatctgttctggagcggccgcaattgtcagattactcccgactattttctgtccatggtgctgcgtcacctc

SEQ ID NO: 29606 - DNA, 394 bp, Oryza sativa
  unsure (1)..(394): unsure at all n locations
attactactgccatgacagatgcgacggctacgatcagtctgatgatcgatgacctcgcccatatgcaccttgcattgtgatgatgatctgctttgttgatcagacttcgcttttgaattccatgcccacaaatcacaacagatgattctaatgcaagtgtcaaacagatgactacaaatataatagnaacatcagaatgactgtttgattgactacatgaaaaacatatgaatcggntgagagagaaatactcgaaggaaatatttcaagaggttgaagctgttactatatttcctacacaatcgctataggattgtccattccatatgaattctaaaggatatgacatcgattaatcatctgtaccaaatgcatttatatgaattttttctc

SEQ ID NO: 29607 - DNA, 442 bp, Oryza sativa
  unsure (1)..(442): unsure at all n locations
gctctatgagctatacattcaatactcttatgacaatggacaaagtaactatatattgaataacaggaacagcgattcaggtacacaaattagtgctccattagataaccaaatccagaattacaccatagcccaagctgcagttgaggaattcaaagagcttaatgaatatcttggagggggactctgtcctcaaaatgattcttttgatattctgaaatggtggagggataattcatcaacatacccaactcttgctaaaatggcacgtgatattctagcaatacctggatgtgcagtttccgctgaatctgcattcgattcttgcgatcagcgggtagaggtattcaaaggcaaatttcgcccagagacagctgaagcacttgtctgtgctcaaagntggatcaaatcatctcgtacaccttttactttcgatataaaa

SEQ ID NO: 29608 - DNA, 376 bp, Oryza sativa
  unsure (1)..(376): unsure at all n locations
acttatgttttgcatatttacactaattttntaataagataaatggtcaaaggtatataaaanaaacttgtgtgagtgcacaggtactggtatctgtaattttcagccattgaagtttcatattctagtggtgaatggattggttntggcgacatatttcacttcttttcattntgttttcccagcagcaacaggtgttgagaagaaggatagaattgagggaaatgtgggaagtctgcaagtcatggtacccatttggtggctntgattatctctactcgccccacttctaaacgcgcttcgtgcattctagtttgactatccactaattctatctgtaaatacccgatcaaacgaacacatgacattattgaag

SEQ ID NO: 29609 - DNA, 362 bp, Oryza sativa
gagtattgatctcttagggaattgatcaacgctctgataccatgtgaattagtatgggtggaaacgatcgcactaatcctgtgcgtcgccttcgtgttaatatatatgtgatgggaacagcccccatcgtggcgatacagagttcggcgcagctgagaacaaccgaagccgagattgatgaaacgactgcatgtagtaacagaatacataaaacaaactctaacaaacatctgttatcgcatgtggaggaaaggctaacctgatccgcatggatagactaacctaattcaaactaacctcaacaactacatgcatgcatgctgtcaggtcgtgatcacatgatccgaatcctttatgctaac

SEQ ID NO: 29610 - DNA, 253 bp, Oryza sativa
  unsure (1)..(253): unsure at all n locations
gacgaccctcatcaaggtgttgtttcttagggccgaaactttcgagcccacgtcgaagtcgctggactttggctggctggtggccgagatcanccatgtatggccgctaccggccatggctcctcatcactatcattcattgactgaaacatttctattgcttcttgctttgactgctcatcgcataaaaaaaaaaaagactgtcttcagtttgcacgatgtgaagcttggtcttaacaaccgcttttctctg

SEQ ID NO: 29611 - DNA, 293 bp, Oryza sativa
  unsure (1)..(293): unsure at all n locations
agcttacttcgagcccagaccaagcccacgttgactctgtctactcacaacccgcatcggcccacaaccaaaccaaatccgtatcggccgatacgctctntatagcaacacctcctcagtccgatacggttaccgggtccgatacaaagcctggtccgactccaactcaatccctcctgctgcttcggttcctctttccttttcaagtcaataacaaaaatccggcggtaacacatgccccccaattccgcttaatatataatgnggcggaatacctccagggaactcatcaa

SEQ ID NO: 29612 - DNA, 286 bp, Oryza sativa
  unsure (1)..(286): unsure at all n locations
catgtttttagttatgcatttaccattcatgcatatctcaggtcgtcatatatccttctaaattgtaatntataatcaagtttgtatgtcaagtgatttgtggaaagcctctctttccagttaattaaggagttagccttgtattgttcactggtaactgcgtaagccgatctcctgatgaaactgaagaatggattcagaagcctactattcatgtacgctngcagcaatacctgcttctgaaatcctggcctatccatgtggatgggatggaatttcacgccat

SEQ ID NO: 29613 - DNA, 302 bp, Oryza sativa
  unsure (1)..(302): unsure at all n locations
gactatatcagagtccacatccatgattccacataatctattacattttgtgctccattatctagatcttcttctttttaagacactcaaattacatatatgcacgagcgtcacgtattgacagatactacaataacctaaaactaaaaaccctcaatccatagcagtaagagcggagtggtttttcttatgagaaacaacacaggttcaatgcatatctaaacatctgtaacgagttatcagtgatgacactaanagccctgaacctactcactacagtagttctggtgattcatgaacat

SEQ ID NO: 29614 - DNA, 380 bp, Oryza sativa
  unsure (1)..(380): unsure at all n locations
atgattctcacatacaaattgcaggggtaataaagtggagaatacacgcataaataaagcagcaagtgttcacttcttatatgtttgcactgcaaatgatcaattacaacagatttctataatatcatatcccatagaagcaatcattttgagcagaaaaacaataaattttcccagtcacttgtacttctgactcgaggaactgaataggtacagatgctcaggtctgctaaattggattgctttcaccaaaatatatatcaacattaacttgactatatccaaaatcacttaanaaagtattaagtaatcaaaccaacatcacaaatgcatgctcccagagatgagatgcaaatcatcattacccctctgtgtagtca

SEQ ID NO: 29615 - DNA, 395 bp, Oryza sativa
  unsure (1)..(395): unsure at all n locations
gcatctttcatcctgcaccatggaatttccagcaatgtattcgtccgttccaaaaatataattatgtttacacctactttcatatctcaacaacgatatatctttactctatagtcccttcgaattggaggattgctttacaaattgtggaagattcacttctctaatgaacttttatatgttcgtaaaaaaggaatggaaattgttcatatgattgcatttctatagccaatttcatatgaaaaaagaagaagacgtccaacaattttggaaacctttgtctttgtgttgtttctgttattgaaaggattatcttcattcttcatttgtgtttcattcctgtaagataaagaaacacacaccttcaattcccgcattntttctaaattactttt

SEQ ID NO: 29616 - DNA, 309 bp, Oryza sativa
ttattacatcattctctcagattatcaactgaatggaactatcccagcatatctttgcgagatggattcgatggaattagttgacctttcaaacaacttattttcaggtgttctaccagattgttggaagaattcctcaagactgcataccattgacttttcgaataataatcttcatggagaaataccttcaaccatgggtgtcataacctcccttgcaatattatctcttagagagaacagtttatctggcacattaccctcctcattgcagtcatgtaatggattgatcattctcgatctcggatc

SEQ ID NO: 29617 - DNA, 75 bp, Oryza sativa
aacggctgaccggggcgggagcagacaaacatgtcacagggagagagagagcgtcggttgcgtcgacggccaggg

SEQ ID NO: 29618 - DNA, 340 bp, Oryza sativa
aaacaaaatgtaacatgtaaccataataaaatggatctgggaaccactattgcaagaacgcaagaatcagttagttggcagaaattcatgagcatctgctcatttggtttcgcaatacacttagtcattcctctacagaatatgtatttatctgttttggctggtctgggtgtagccgggagaaattcagcgagatgctcccgcttgtggaaaagaggagatcaagaatcatacatgcttcttgatgtccatgctgttgccctcgacctttgccttctccgcaaacggtgaattccaagcgaggaatgagagatggcgagcatcggtgactgggcgggat

SEQ ID NO: 29619 - DNA, 442 bp, Oryza sativa
  unsure (1)..(442): unsure at all n locations
gcttagtaaattcacaatcctgatcctttcaccaatatctgtacactgactctttntaaagacaactctgttagtatttccttcagcaggggctgagaatgagatttcctgttgccatangtaggcttctaggagtaggttgataggtttgagtgtttgcttgcagtttttgcctgaagtacatgcatctatcatgccttgctttcagcaccttgttggattcttgcaacacggctcctgttgggcttgagctaagattcttgcaaaaattcagattccttgactttgtggcctctgcttgtactgactctntagagttgttccaaagctgagttgcatgatgaanaaacagaccacaatagcttgggagaatggcccatttaactacttataagatatangagtactaactgactgatgtgtgaactttttgtgagcttct

SEQ ID NO: 29620 - DNA, 425 bp, Oryza sativa
ctggtgggattggcccggacatcacagctctcaacctgcagcagcttgatctgtccatgaataagctcaccggaccaataccagaagacattgcaaatatgaagaaactgagcttgctatacttgtactacaacaacctcactggacccatcccgacaggtgtcggtttgctaccaaacctaaccgacattcgtctcttcaataacatgctctctggttccctaccaccagagctaggaaaatattcagaattggggaattttgaggtgtcgaacaacaacctatctggtgagttgcctgatacgctctgtttcaacaaaaagttctatgaccttgtggtgttcaacaatagcttctccggcgtgttcccggcgaacctcggtgatggcgaaaccatcaacaatgtcatggcatacaacaaccac

SEQ ID NO: 29621 - DNA, 358 bp, Oryza sativa
  unsure (1)..(358): unsure at all n locations
cttcaacacaccctcaacaacttagcaactccgactncacctagcagaaacaaactaagaaagccggttctacaccataaacaagaatggaacaaagatggctaaggcttcaccaaacatcccaggcttgtagagctttagagtcgatgcaagggtccacgaacgaccttcgctattagggtaagcttcttcaaagcaatgtccccacggaggacatgatgtgaaacacgaccaccactcgtccagaagccgaaacaaggttttcacctgaagatggtatggatggggaaatgttataacaacgcctccaagaacggtaataacgcctcatgtgtcaccatcgtcaagctgggccaat

SEQ ID NO: 29622 - DNA, 430 bp, Oryza sativa
  unsure (1)..(430): unsure at all n locations
tagttgctatgctaaattacagagaattactgagtttttttatgtatcagtagcataactctctctattattcttcaaaggaaagagctaatactaacatagacaaagctaaataccaagttcatacatctttcatgcaaaatgtaccgatctaaaagtctaaacactgctccttttgggattagggcacggtataattccccagttcctcctcacttcctccaaatcttcatgaaaatgcttctcatagtacacagacataagatctgtgcacttaagaccagctgttgaagcccatgggaaataatgctggaaaaacagtgtcctttgtttctcattgaaccttgcagagcccncaacgactgatagcatgcacataggaaggaacatctgttcaaactcaatgaccttaatggcagtctctccaatc

SEQ ID NO: 29623 - DNA, 325 bp, Oryza sativa
  unsure (1)..(325): unsure at all n locations
catgaagctttattttcggcctattctagtgttggnttaattatgcatggcgaaaaggagccttggaatggtcttaactgaatattcagaccaaaaaaaaaaagaaggaaaagattccattaagacagctatgaatttgattgagtttcccctacttgaccaaacaagttccaattccgttatttcaactacactaaaaaatctttcgaattggtcaagactctctagtttatggccccttctatatggtaccaagtgttggttcattgaatttgcttcattaataggctcacgattcgactttgatcgttatggattggtacca

SEQ ID NO: 29624 - DNA, 412 bp, Oryza sativa
  unsure (1)..(412): unsure at all n locations
cgaaaattagccttttatgaatatctcggttataatccggcaaaggggggattattgagagnangntnaatggacaatggggatggaatagctgttggatgggtaagacatnctatctttagagataaagaagggcgcgaactttttgtacgccgtatgcctactttntttgaaacatttccggttgttttggtagatgaagagggaattgtgagagcggacgttccttttataagagcagaatccaaatatagtgttgaacaagtaggcgtaacggtggagttctatggtggcgaacttaatggagtaagttattctgatcctgctactgtaaaaaaatatgcgaggcgttcccaattangggaaatttttgaattagatcgggctactttgaaatcagatggtgtttttc

SEQ ID NO: 29625 - DNA, 443 bp, Oryza sativa
agcttgctccatatgcctttccgtgctggtaggcacttcaatttggcaaacacaaaaccagacttttgagggttcccgtctacaagagaggtctcgtatatttccttgcactcttgtacaacctaagaacgaggaatgaacagtgaacacgtaattatcaattaaaaaattctgactaacagtttttctaatcactttcaaaaggcataatttgaccactggaataggtctaatttgcactggttcgcacaaaattgaaccgcacatgcatatgatgtgaaaaatgttatgttcttacctctttggcttccttccttggaatgccttccctcattcccacaagcttctcaacaacctcaggctacataacgtagatatcaagttcagcacatcaacagaaatgaatgcactactaaaccactaatttctggcaaaatcgagta

SEQ ID NO: 29626 - DNA, 462 bp, Oryza sativa
  unsure (1)..(462): unsure at all n locations
cgcaagaattgtcatgtcaagctcaagcttctaatgaattttatcttattaattcgataaattaataatataaaatataatcagaaaagtttactagtatggtttcaaatcttcccaattcccctattagctagcatgaagtatggtctttcactcttggactgtgatacaagatactcgttatggccaatcaatatgtaagaatgcggtgattttatctacgtgagactcctggggtgattgatgttattntatgccacgagggatattagtctcgaggcgaaattgttatatatgtaatttgagttcagcatgcaatatatcaagtcttctttattaagccttggtcttttccctcttataatctcttgtaaatcgtatgaagagagtgtgaccgcccttgtaattcctgcatttgtaatcaaccctcgatacgtactgattattgctcatcngcactcg

SEQ ID NO: 29627 - DNA, 352 bp, Oryza sativa
agcttgaagtaccttttgtcagtgattctctcgacgttttcttcatgtgttaacaattggccagcttcaatctgcagatttagcaagtacattgctccttgtccgtgctgtaaacttgagaggttatttttcttctgcttttgctcatgtttattggtggaatggacggtactctctctctctctctctcagcctcatatgagccgtgtctgccttttgccctggatcttgttggtcatgccgtgagtttgtagcgatatcagtggtcagtctcaacttcaaagtgcagtgagcctttgatgtctttcagcaagatggttcccccttctcgggcctgcatttgctgcaaatg

SEQ ID NO: 29628 - DNA, 472 bp, Oryza sativa
tgcttaagagttcgttaattcattgaactgttgttatttgtttatatcgtccaattgtcctgccgtaataaagagatagatggaactgctatgaaacaattcattgtcggattaattgatcagtggtactagcatattacaaggcgcataatggaaacactatatatgaatcaaattagttctaatattcttatgatactgttcctgcagttaacataagtgcatgagatattgcttacctcatatacttgtggaacccctgtgcgatagttacttgtgtgggttcatgtacatcaccaatcgagaatttaatggttgtgataatgatctacggagcctgttcacgtaagtgctctaaaatatgttattctcttcaacatttttctggtattttctaaaatgtcagtagaattattattagtctcatttgcaaagcatcagtagccacattctgatgaagatgatatctatc

SEQ ID NO: 29629 - DNA, 458 bp, Oryza sativa
  unsure (1)..(458): unsure at all n locations
agcttgagctcaatttgttaaagttcgcgagtttttgttcgggctcagattcggccctggtttatgagacatgctcgcgagcctcgacccttntttacagccctacactgatgcgcagggtcattcccccactcctacacctaaaatcgcatgccatcttctccaactctacaacagtcagtttaaccatgatctaaaattgcatgccatcttatccaattctacaacagtcagtttaaccatgatcagtatgtcttgcaacatctactttgcacttgcgcgcgtcaccacgagcagccaggcacatgtacactctcaattaagcacactccccgataactctcccacttttcaacatggtcaggtcgtcttcagcaatctcctcatgggtgacagcgatccacttttactatccaattagaaaacggtgaagttatatcaccgagctaagtaaacat

SEQ ID NO: 29630 - DNA, 426 bp, Oryza sativa
  unsure (1)..(426): unsure at all n locations
tgagaacatgctaacttactgtgtgcctgaatctaacatgttgtgtacatccttaaatcatagcagtatgtaagagcccaaatttaaacaaaaaactgttgaatagtcccacattggttgtggaagggcaaatgacctaagatataagtgggggagctcctcactttattggctagcttttggggtgggaaaggcccttacgatcctataactggtatcaaagcctggctagttcaacatctctggcttgatggatcgtgggtgcctgcgggacccgtatacctaatggactgtggagaaacggtgaatgggcggtgaatggctaaaggacaccaatgtgtgaatggngagattgttgaatagtcgcacattggttgtggaagaaaaaaggatctaagatataagtgggggagcccctcatctcat

SEQ ID NO: 29631 - DNA, 445 bp, Oryza sativa
  unsure (1)..(445): unsure at all n locations
ngaaccatttttatgatggattgaatggagtttgatgtctttgacattntttttcttgtctatactagagaaattcccttaagttttgaagttttaggattgatgtttgtgacaacattnttctacacattgtatgggtacaatgcttagtatattataatgctatcataaaaaacacctactttgtaaagacacattaacgagactatatgaaatattgtaaacaaatatgctatgtcctagacgcttcatttcattgtcattaactaaatgtggcacgcaatcatgcatatggctntgcatattcgtggccatagatcttatttttggcaacactaaaatattgtttcaactttaaccatgaaggtgtataaaatattcttaatatccccccctttcacttaaatattcatagtgtgtcaaggtgatagcgatactagatgtg

SEQ ID NO: 29632 - DNA, 300 bp, Oryza sativa
ccatctattgttttcaattctttttcaggttttaaggggatgtattggctcaatcacgggtgtacggcgccaccgcggttaaacactttataccatctgaagaaatcccctgctgttcacatttttctttttcctatgtgtaaattgtttaacgtaaacatcttatatctgcttgagaaaaatattgtttcagcaaacttctaaatgtaatgggtacccatattgctgacaacaaaatatgcatgaattacttgcctatggtctatgacagggcaagggcagatgctccactacttatat

SEQ ID NO: 29633 - DNA, 381 bp, Oryza sativa
  unsure (1)..(381): unsure at all n locations
ctaagctgcccgatgtacaccgaacacgcacttatcggngttcagttttatgcgggctgagctgatactctcaaaagtttccgctagatccgagagtaatgtctcttggttgcgcgtctttacaatcaagtcatcgacataagcctcatacattacgtcctatttggctacccaaagaaattcgagtagtacattgaaaagtatgacctgcattctttaacccgaatggcattgtcgtataacaataagttcctatgggggtaatgaatgcagttttttcctcatcctccctaaccatgcgaatctgatggtaactagagtatgcatctagaaaacacaaaatgtcgcaccccgctgtggagtcgacaatctgatctatgc

SEQ ID NO: 29634 - DNA, 302 bp, Oryza sativa
gcctgctctttatcaagctacggggtgatctcttgattcaccttctcaaaactatcaaccagagtcaatagactctgaacaacatccacctgtatatttgaggtaaacctagcacgctccttttcagtctgcttccggaaattctccagatcagcatttatacggaggaacttgtccttcccttgaagtaattcggttgcaatactttcatactgagcagctgagttactcctttctttctcaatggcaatgatagcactctcaattccaccaagagcctcatcatttccatttagaaaagc

SEQ ID NO: 29635 - DNA, 272 bp, Oryza sativa
tatctcaacattcttaaaaggatcagtgaacccagcacataggcagtggtaatactggtccaagaagctgagagctacatccactgcagcttctgctccaccaatccatcatgagatctaagttgcatctgagatattgattagctcgaggggttcgtaataacgaccaattaatgctcattcgtctggtattatatgaaccatatataatgattaatcattaacgattattacatcccctacaatgccaataaactcaatatctatcacta

SEQ ID NO: 29636 - DNA, 425 bp, Oryza sativa
  unsure (1)..(425): unsure at all n locations
ctctctatggcttaaaacattcacctatagcatggtatgctaagntaagtcagaagcttcaacaccttggattccaaggatccaaggcagatacttctctattcttttataataaaaggggtctaataatttttgtgcttgtttatgttgatgacataattgttgctagctcgaaacaggatgcagttccagctctgctaaaggacctacaaaaggattntgccttaaaggatctangtgacttacactactttcttggcatagaggtaaacaaggcatctagtggcattgttctaacccaggagaaatatgttactgatctactaagacgaagtggtatgactgattgtannacctgtagtacacctttgtcaactagtgagaaactcactttgcatgaangagattattangtcccaatgatg

SEQ ID NO: 29637 - DNA, 383 bp, Oryza sativa
taccttaacaagggaatctgctgatttttgccatgtttgatattcatgacatccaatcgatgcacaacatgtttccctggatacagaggcttccctgtgaacaactctgcaaatatacattctacactcccaatatcaattgcgagggtgtactgctaaaaccactgacaaaatatacatctggatatcaccttgtgcgactatgtctaatagaacattctgaaaacactgctgctgcattgatccaatcatatcatagcaatataaccatgttggaagaaaaaattatattgccatcaccatgttaaatggaaattaccttacactttgaaaaaaggagccacacaactctggggcactataccatctatttggcacataat

SEQ ID NO: 29638 - DNA, 256 bp, Oryza sativa
tatattatcttacgacccagatgactgtttatggaatctcaccactggtggctgatcctgcgctaaatctctgtattttgcactggcgcagaccgatgctcccaatatatacaaacgaatctggaagatcaatgtcgtacctatagattaatagcttcttatggtacttatgtcacatgctgtaattcctgcaagatgcataaactattgaatggatagatggcaaacttatcttgagtgttctttaattttgcaa

SEQ ID NO: 29639 - DNA, 391 bp, Oryza sativa
tcgtcgcgtttaacgatggacccgtcaaggaatatagctccggcttgttggatgtttctggcgatggccggagcatcaccggaaaaaagatcgaccggcttcaggcccgtggtggcaccgcgcttatgccagccttggaggaggccgtcaaggtatatgtgtgcaatgatgtacaattatttgcaagtttggcaaaatgttacctcaaccagccatgaaaacatgttgtttgcgcatatttctggtcaaacttctaaaatttgaaaatcaatatcttcctaatattttggttggagacatcaaaactggctagtatatggtactccgtactgaaatattatatattatgggatagagggagtagtaatcaatttttttagtaacaccattt

SEQ ID NO: 29640 - DNA, 460 bp, Oryza sativa
  unsure (1)..(460): unsure at all n locations
acttggctgtcnttgatctttaggggcatttctagtagattgtgtggaattaagtagttaaatctgaagcacgcagagcgagcatctctatcgtggccaatgacatcaatataataataagttgacagaattaaatgtgtcctgttgattgagatgttaatttactttgcacgcatatgcatgctcgagcaaattggctaattgggttgctgatcctccttcttgggccataagatttcggcccattggcccaagtctgttgcccattatccccctggcgggccaagtcatgtccagcagctgctgcatgcatcagctagcactatagctaaaattatgagatttgctctgatctagcaaaaactatatcaaaccattttcaatcgttggatctagctgaatagaatggacattgttaaatctaacgattganaatgatntgctatatggacgtacagga

SEQ ID NO: 29641 - DNA, 177 bp, Oryza sativa
  unsure (1)..(177): unsure at all n locations
agctntggtcatgcagcgcgattgatatggctgcaaaacctcatccaaccgtccatgtccccggngacggagctcctctaacgtaaagtgaaagagccccacttttctctaagggtctgtttggtacagttccaactcctaaatataattttaagagttaaatttagagtggagttg

SEQ ID NO: 29642 - DNA, 430 bp, Oryza sativa
  unsure (1)..(430): unsure at all n locations
gtgcctgaccacttattntaatggaataatatatgtgatatttcatgtcaaaatattggataaggcaaatctacatcttcagttttaaaaagggaaaaaggtccaagttctctcctaaactttgaaacaggacatccaacccctgaactataaaataccattcataaaacattgtanggtggttttgcaaagtggtttctatctaattgatgtgacatatgcattatacatactagttgaaaccccgcgtgttgcggcgggcacattagaaaggatgaatatgcatgtaagtatgaataaacatgaataagtgagatataagtgagtagttctgctacctaaccaaacaggaatatagtatagtatacaatttcaaaagtaagcagttctgctatgtgatcaattaaagatgaatatttgcatcatcaat

SEQ ID NO: 29643 - DNA, 342 bp, Oryza sativa
atttaaactcttttctgaaacaactataggagtgcttctcaaacgacaccgatgaaacagtgcgtcttgtccggtcggagtatgtgcaatgcttcagtcttttgaattgatcaagattggcacccaaccaacaactttcaaacggccacccgggtctggctgatcccatcagccgcagattgtccaaacatcaaacccattccacaacagcaaatttcacaaggcagtagtcaaacaaaactacgctaggaatcacctcacatccgcccatgacagtgggcacggctgttcgaacagctttaataacctctgtagagggggtacacttaacccacacgacat

SEQ ID NO: 29644 - DNA, 424 bp, Oryza sativa
cattcggaactttaaactaagctatcttctcgctgccataaacattccaccatttctttctcccacccatttggtgcatcacaggccaagcccccataaaacccatccctcttgcctcttcttgtacacatttcgtccaacatcttgtgggcgtgctgcaccttcttctccacaccaccactgcagccgatcttcgttgtcccgccgtctatcggtaagtcctcgctcctctggcctcccctagttccgtagaaactatagccccctttaatttcaccaattagcaaccgtcgccgtgcctgtccggccaccgttttgccgccggtgagctcgccgtggacaagccattccggagctcctcgtagtcatctcgttagtaaaatggaaccctcacacgtcgtagatactcacgtcctcaccaatt

SEQ ID NO: 29645 - DNA, 429 bp, Oryza sativa
  unsure (1)..(429): unsure at all n locations
agcttatgcagntctttatccttccacaanaaccccagaaatttatattcagaagaagcttatgcagcatagctgatcctaaaggctacaacatattcttctttttttcctaaagagaggagaatattttctttcgtgtttactccctccatcttaaaaaaaagcttaaaaaaaagaaagtcaggaacataacttaaaaaagctttaaaaaaaaagaaagtcaggaacataacttaagactgtgttcgggaggaactcacctctcgcgcacgtaaaacggagcgaagcattttcttatgattaattaagtatttattaattgtttttgaaaaatgattntttaaaagcaacttttgtgtagaaatctttaaaaaaacacatcgtttaaccgtttgaaaagcgtgcatgcagaacacaagggagatgtgt

SEQ ID NO: 29646 - DNA, 427 bp, Oryza sativa
  unsure (1)..(427): unsure at all n locations
tcgtanggtcgcgcatctggacgtcgccacgtcgatggattcgatctatgaggggcgatggaatcgatccaggaggggggcggtgagaaacgagagagagatgcgagagagagacgcgagagaaaaaaatctgggaggtgataagattcgtgtggtgtgaacgagaggagtcgctgtccacctatggcccacacacgagtacgatagtatgaggtttctggttttctgtgtatgaatcggtttttttgggacaaagcccccctccagaactcgtctctttttgggacggagggagtatactactagtagtattatcgggtttgaccagcttgaccgcataacaggccatctttcaatacatcttcaaaatgtttactattcacttttgcgaagattgattgaaatgcatatctctcaagcaataaac

SEQ ID NO: 29647 - DNA, 362 bp, Oryza sativa
agcttgatgttgtcagtcaagtcagggagattcataagcaaacttaagcattaaaacgacgaagatgttcgatattccaagagttgtcgataggtgtaccgtcttcacgcttgagtcgataggaacctggccgagtgacttcagagattataaatggcccttcccataaaggggataacttgtgccgatcccgtgtactttgaatttttctcaaaaccaggtcgccgactaagaaagcacgcgatcggacgttacgattgtgataacgacgcaacccttgcaagtatcggaccgactgaattaaggttgcttcgcgggcctcttccagtcagtgtaggtcatccactcggtctttcccgtag

SEQ ID NO: 29648 - DNA, 442 bp, Oryza sativa
  unsure (1)..(442): unsure at all n locations
tggcgcacacgatagatgacgatggcttataatgacacgctcgctcnctacctggcgcgccagatgactgagcgtgtggctcctcaccgggagaccgcgcatgcccccctttgccggttcggccgggggcgctaagtgaggttcttcgccctcgatctggaggaacttcagcgagagaggaaatgcaaaagacacgggcgacgtatacaggttcgggccgctgagaagcgtaacaccctactcctgtgttctggtggatctgtgtgtgtaagaattaccgagagccggagagcgagggagaccgttcatgctctatcactccttcctccttctcctcttttttacctcctctttcttttatgcctgggcactctttntatctgatcatgggtcaccacatgggcctctagctgactaagaaaggaaacatgcttnttacaat

SEQ ID NO: 29649 - DNA, 355 bp, Oryza sativa
  unsure (1)..(355): unsure at all n locations
ctctttcttcatcctatcacacattattntagcctcctttgcaacacccttgaattgaatcgaggcaatccatcattntaattaatttgcagttatgtagtggcaatacatttagtttaagcgcattagtgttttggcagaaggatgacgcaccagcatggcaccggcggcaacaagagattggcatccttggagatggaaaaggctcatggcacacaggcgaatgacactgctttgctggatgatgtcatccgtatcagtagcgccatgcttgagcaactcaagcatcagctcagccttcttagcgatacacttaattggatccattcgtttaaattacattattagtcaacac

SEQ ID NO: 29650 - DNA, 447 bp, Oryza sativa
  unsure (1)..(447): unsure at all n locations
tacctttcanggatgttcatgctccactaagtgacctctgttccttgcaaaactctgtcgatgtgtcttctggtcttaatgatagcattcanggtgaggcacaagagcccactgcagtaccagtggagaatactcagccatctgtaccacaaccaactgacacagcagtaccagatgagataacacagtcacctaaagaacaatctattgatatagatatccctgagcccttattggatgagcacattaatcaggatggcaattcttctttatgtaagcaactgatagcactaacatgaaaaaagtatacatttgtgacttatttgatgctgtgttggtctgtagatagtaaaggagatgaagatggaagttcaataggtcccanatcactcaaggcaggaaaggcaccatcaccagagaggatgatatattggagtgaacatggat

SEQ ID NO: 29651 - DNA, 259 bp, Oryza sativa
tgttcaccttctatgttatacgatgccacctttgcagaatacaggttgagaacataaaggttaatcaactctttgtgagttgcaccaacactgtaaaacatactagtattctttctgttcactcccattgtgaaatgtgatatattgaataccattacaaaaaatctgacgcttcataaatagtattattcatcagctctagaatctagactagcacaccagggaagagtgatgaagtatgaactccacatgagaagac

SEQ ID NO: 29652 - DNA, 346 bp, Oryza sativa
  unsure (1)..(346): unsure at all n locations
tcttttgtgtttangcctgaagagaagctgctgctctgcatatctctcttgtcccagagaacccaaacagaagtgctaccaaccaccattatattcttcatactacctgctgaaatctgcattcatggacgttccctacgaattaaatgcacacgaacaaaccatgcatccacagcgaatttgtccccatgtcatactgtaccttctcgtggaacgcttttcgacctttctgcgccgctcaataccaaggccccaccgatcatttataaataaatactcacacgagctcacgatgaatccatggatgaggttaaggttaatatcgtgaccgatcacgcacactgtc

SEQ ID NO: 29653 - DNA, 377 bp, Oryza sativa
  unsure (1)..(377): unsure at all n locations
atctctgaatatttaaatggttgatgcagntaatgggatgcttaaattggaggatacaaaatgggattgacagcgttctggctgtaagtacccttccattggagattggacggatttacttttaatttcttttgaggaatgcaagactgctctgctagtcagtgatttaaaatctgttacaagatgaattcaagttgatgccaaaaaaaaaaatcaatctcttgcacttgtagcagcaaacgtttcgaatgtcagatttgcatcatgtactgatccagaattgcactgcaaattgctaataggttcatcttatgctatttatctaaccagcaacttccgtttttaatgcagaaacctatagtcccttctgattatac

SEQ ID NO: 29654 - DNA, 341 bp, Oryza sativa
tatgccgcgggaggagactagaaaaccgataaattgcccgccggcacaccaaacacacacttatcagggttcaaattcacgcatgtggatctaagactgtcgaaagtttctgccaaatcctgcatcaacgtgtcctattggcgcgtctttaccaccatgtcttcgacatacgcctctacattgcgccctatctgattactcacagtaatacgagtcatgcgctgaaaagtaagaccttgcattcttacaccaaaggcatatttgtataacaataggagcccacagtagtaatgaatgtacgtttttcctcactctccctatccatgccgatcttgtgatac

SEQ ID NO: 29655 - DNA, 398 bp, Oryza sativa
  unsure (1)..(398): unsure at all n locations
aagcccgttgtagaatatgtaggcaaatattatctgctcgttcttctggtggtacacgtcacctcaagcgccatgcggagtcgtgtgccaagaagcaaggaatacaactccggcagcagcaacttatggtaaacccagacggtacggtacacagttgggagtacgatcccatggttgctcgggaatctcttgtccggttaatcgccaggcaagatttacccctgaactttggggagtcccctgcttttgaacattacattcagcaatctcataaccctaggtttaaagctgtgagtaggccaacatcaactagagattagagaatgtttatcacaaggaagcaactgcactcacgaactgttantacatgtacttctctgtagtggtactcaatatat

SEQ ID NO: 29656 - DNA, 344 bp, Oryza sativa
cctggtgagtgtgtagatgcaacagaattcataagctttgttgggagtcttcgctacttggtaaataccagaccaagattgtgctattcagttggatacgtcagccgttttatggagaatcccacttctaaacactgggctgcgatgaagcatgtactgcagtatgtggctggtacacaaaattgtggaattcagtgtagcaggaagaaacaagaaattcctcagcttattggctatagtgatagtgatatggctggggatatcaatgataggaagagtacatcgggtgtgctgttcaaaatgggtgaaagtttactcagctggcagtcacagaagcaaaaaat

SEQ ID NO: 29657 - DNA, 361 bp, Oryza sativa
cagcctttatatttttaataatggaattcatgtatttctttgttcatccaagggaaaatgggcatttttatggaaaatagacggtcaactaaccgtcaactgatgggaggggtatgcaagggatcaaaatcaaattttgggggtatacaaggaagtaagccaaattcaagggtataaaagagattaagtaaaatttcaggggtatataaaggattttctcaattaatataagcccaaacaattttcatataaggcttcaccttttaaccttatcttattaataataattaaatcgaccatcaaccaacatatatgtgacatcatgttttcctctgtaatttaaatatttacaaatataatg

SEQ ID NO: 29658 - DNA, 448 bp, Oryza sativa
  unsure (1)..(448): unsure at all n locations
tctcagcttctgcagatgctattctctgctgtgtgattgcttcaacttcattggcagccttaacacgctgctctagcttactttcatcaaagagatgatttcagggcatgaacatgagcccattcaaggaattccctatctctggattccattatttccctgccacacacacaaaaaaaggttatttccatcacaaaataaataaacttaagttactggtgatgagtgatgaaatgtcatggccatagtagagtgaccgtgcaatgaattaaatacatgataggtaaacaattaaacacggcattacactgcactctgtcctaagaagtgagatgcatctatctctacaaaatatcacaagtcttagccaaaaaaaaaagttgtgttgagaaatatatatgatataaaatngaaatacctggaatcagtggattcacgcttatacata

SEQ ID NO: 29659 - DNA, 316 bp, Oryza sativa
  unsure (1)..(316): unsure at all n locations
aaagttttactgtagcaacagtcaaaacagtgaaatgaactgtgcatgggtactattcaacaaacgctgttactgatcacaactgaaaacaagttaaagccaatgttcatctttgactttaacccctaaagtcanggatctcatacatgggcgggccaagttggaaagaccagccaaccgaaaattacataggtttgtggcccttgctacccgcctagcatgatacaacaaaccaaacacaacctcaagggaaaaagtcaatttgactcccttaattatacgtcgaacctaattcgtatgcctaaaccacaaacca

SEQ ID NO: 29660 - DNA, 410 bp, Oryza sativa
ccgtagttcatcatcggggagatactagcgtgcctgatcggtgtagctccaatggtgtttactgtttaccatatgtatcgttttggaaggtttgtcactgttagcgtgccatcttaccacccgagctatatatatctgattccaatctgagattcattgtctgttctgaattctgatggcgaagcgtacaacttcgggatcagagatgtcgttttgtgttctgaattctgatggcgaagcgtacagatgggcgatgcgtcaaaatgatgcataaacaagcgaaaggtcatcaaatgatgcagctccggttttgctgctttcttggagcatagcgaggcaaccaatcacattgcacataacattacgcgattttaacacgatccatactttaaatactggacagagcatgt

SEQ ID NO: 29661 - DNA, 372 bp, Oryza sativa
  unsure (1)..(372): unsure at all n locations
gtttaagagaatgtagaggcaactgtattgattcaaagttaagaatgggagactcattttcctaattctgtatgtagatgacggtctactggctagtagtgatgtcaatctactgcaggaaataaagaaattcttgtcctcaaactttgacatgaaagacctcggtgaggcttcatatgttntgggcatagagattcaccgaaatagaacaaagtatgcattgggattntctcaaaaggcatatatatagaanagggtgtgaagaaattcaatatgtacagatgcagtgttacacctgctcctatagtcaaaggcgaatagtatggggcatcgcaatgtcccagaaatcagtatgagcctcaataaatgaaa

SEQ ID NO: 29662 - DNA, 477 bp, Oryza sativa
  unsure (1)..(477): unsure at all n locations
gtgtgagttctggttgtccgaagtcaaattcttatgtcacgtgatatcagctaaaggagntgctggggaccccgaaacagtgaccgccgtcaccgattggaaacaacccaagacagttactcaagtccgcagtttcttatgtttggcaggatactaccggagattcatcgagaacttctccaagatcgctcgacccatgacacagttgttgaagaaagaagagaaatttgtgtggagcccgcaatgcgagaaggcgtttcaaactctcaaggaaaagctggtttcctcgccggtgttaatcttgccggatactcgcaaggacttcatggtgtattgtgacgcttcgcgccaatgattgttgtgcgtgctcatgcatgacggtcatgtattagcctatgcctcgcgtcagctacgacctcatgaatgcaactaccctacccatgattttggagtagcaacaatggttcatgctctaaa

SEQ ID NO: 29663 - DNA, 438 bp, Oryza sativa
  unsure (1)..(438): unsure at all n locations
tatgtgcattcgatcttgngnatacaaatcctgctaggccaaaatcactgacgtgtgcaaccatgtcactatccaacagaatattgcttggcttcaaatcacaatgtactaatggcaattcacactggttatgaagataatccaaagcaaatgctacatccaaggcgatattaattctctgtcttaaagtcagaacctttgtttgactactatgttcatgggattatggatgtaaccacatatctagattcccatttggaacatatgggaacactatagccttgaagtctgccccagttgaatccacagaagaacatagagtaataattgtcacgagatttcggtgtggacattttgtagggttcacacttcgcaacacagctcttaatagatccatggatatcagggtaaaaatcttgatggcgatatgttcttcct

SEQ ID NO: 29664 - DNA, 455 bp, Oryza sativa
  unsure (1)..(455): unsure at all n locations
tagccacacagaactaaatggcatgcttgttcgtcttgttctcaggcattgntaggctctgcctatccattatctttatgattctaccaatagccatcagcgatgaacatgaaaatgatcgtcaagctctcctatgcttcaagtcccagctctcatgtccaccgggagtactatcctcatggagcaatgcgtaccatgagttctgcaattggcatggtgtcacttgcagcacaccatctccccgtcgtgtcactgcaatagacttggcatcagaaggcatctctggctccatatcaccttgcattgccaacctcacctctcttacaatgttgcaactatcaaacaatagcttcaatggcagcataccttcagtgctcggtctactcggacaactcaacaacctcaacctcagcatgaactctctagaaggaacatgccttctgaactntcttcat

SEQ ID NO: 29665 - DNA, 442 bp, Oryza sativa
  unsure (1)..(442): unsure at all n locations
agcttagcttatccatgcatggtgaacgttttcatcccatcacatgatcgcatgtgcgtcgacggcctattgtatatcgatacacccgtctatatccattgaactggtccgatcgatatactgtaattcactactcatcagcatcttatatgtggtttgttccagatagtttccaatacataaatttgcgtgcagcagcagcagctgccgtgcagtacaatatattattcggttttgttttctagtatatagacagtgtttagttcccttcaaatttctaaaaattctgtcacattaaatgtttagatatatacaaggagcattaaatgtggacggaaaaaaccaatngcacagtttgcatgtaaatngcgagacgaatnttttgatcctaattacgccatgatttgacaatgtgatgctacagtaaatatttgctaatgac

SEQ ID NO: 29666 - DNA, 449 bp, Oryza sativa
  unsure (1)..(449): unsure at all n locations
nntttatttttgacggcagaaacgtaatccttngcatggcttgcttatgtttcaggatggagtcactttgcacagtttaccatagctgtaattaatagagaccctaagaaatccaagtattctggtgagtttggtacactatttgattntcttgtaatttcacttgaattcttaatgtgaaatttaaagaaattaatatttcagatacactgcaccggttttggaagaaagagcatgattggggatggaaaaaatttatggagctaaccaaattacatgaaggctttgttgttgatgatgttcttaccatcaaagctcaagttcaagtgatcaggtatctatttacttgagtttctctnttattttccatcaattggtacactgagaactgctcccttgttctttatttatctatatatctatntattgtggagatgagaattatctat

SEQ ID NO: 29667 - DNA, 334 bp, Oryza sativa
  unsure (1)..(334): unsure at all n locations
agcttgtttcttttccccctatggaacatttatcttggntatgacagctatgactaatttgactacccacacagtctatgccaccatttccattccagctctgaagccgaatcgtagtactcgacacgttctcacagtcttggtctacattacagtccgcgcattcggccttgttccccgctgaagccgagcaattattcagaccgacgacgagatatggtctggtccttacagcgcaaagtagtggggaagcagagagggaaaaaaaaagagaagagggcacctggcagaggcgggcggcgagggtgacggccttcttggcggcggcgagctc

SEQ ID NO: 29668 - DNA, 484 bp, Oryza sativa
cgtgaccttatatactaagcttatcagggagctcttgaatggattgctgttcatggtgatttcgttgaggagggagaacgaagtgatgcgaaaggaggtcgaacagagtcgggataaggtggaagtacagagtaaagcgatagatgatgctcgtggtgtggttgctgtgaagaatgcagaaattatgtgcttgaaggccaggaatcataagttagagaaggaaagaaaagtctttgtaatatgtgtggtgtcatgtatgtttgtgctatttgtggtgttctttggcaagaagtgagacagtgtgatgtgtggccaatatgatgtaatgaggtcctttattatgtgttagctatgctctggaaagacaatgtgtttgatgagatatatgtatcagttgtgctatcaatttggaatgagttatgtcaatgaatggttgctaattgaaagatgagttctaaatgaatggttgcaatatcaaatgtga

SEQ ID NO: 29669 - DNA, 425 bp, Oryza sativa
  unsure (1)..(425): unsure at all n locations
atcctccgagtcacctgaggcatgcaagctttgctgaaatgaatgatgtcagactatcttctttgtcgntcctctttttttgatcaactgaaataataacccaaaaaatcttcanatcaaatttcatcaaagaaagcgactgatgctttgaataccccaccaatgagaatgtggatgagtttgacttgctttgtgtttcactggtactacctaaagatagattctggatatcaaggtagcttgctcgtcccgtctcaagcagaagattcaatagctccaactctttcatcaatgatgaaatggcttgatcaactacatcttccaatccatgttgcaggacaaanaggtaagtggttgccacatttgtgaccatggtgtggtttggatgaagacgcaaccgagatagaaatgagctaaaatcaagc

SEQ ID NO: 29670 - DNA, 421 bp, Oryza sativa
  unsure (1)..(421): unsure at all n locations
ntatctgatttccttgccgagtggaccgtttgccaagatgacatgccagaggaaaagatggaatattggactatgcattttgatgggtcgaagatgcttacaggcactggagctggggttgttttaatctccccgactggagaaagattgagctacgtattgtggataaatttttctgcgtcccataacgtggcggaatacgatgcgctactccatggactaaggattgcaatatctctaggtattcgccgactaatcgtccgtggagactctcagttggttgtcaatcaagtcatgaaagagtggtcatgcctagatgataatatgaccgcttatcgacaagaggtacgcaagttnggaaaataaattgatggactcgagctcacccatgtcctccgacataacaatgatgcggacgaca

SEQ ID NO: 29671 - DNA, 323 bp, Oryza sativa
gtgatatgagggctaatccctgtgcttgcctaacctaaccactaaaatgatcgcaagcctgggcccagctttgttgccttgttgtcccttcattaatttaccatcgacacgagcaaacatattactttccctgttacagatataagcataacccccttacccaatactatagaaataatttaattatcacatattgttgaatgttcacccaataaaatagagatctgagagtaatgagtaaagaaataatattagtagagagatggctattaatactgctgctacatgctatatataaacatggaaaaatagtgttatatttg

SEQ ID NO: 29672 - DNA, 469 bp, Oryza sativa
  unsure (1)..(469): unsure at all n locations
ntatcagtatgttntctccataaaatttcttcatcaatattgtttagataattnttctaagctctacttaagatttatattatataatattcaattcatccatataaacaattgtctataatcttcctcatcataaaaaaaaggatgtatacattttttatggtaaaaaaagaggtatacttagtttgtttggagcatatgtctaataaattaagtgtaaattaaaataaggtgtttttaccttttctataaaaagactaaaaaacttttatgaataaataaatgtatttttatttaatcatagtgttttatttgtactatcaagctctgcccttaattgatttgcattgtacgcaattgttacacagaaattaataaaaaaaaggtgtacatatacatatcctaaacatttctccccttgtagttggttaaaagaaaaacctagttaatattagtcttaaaatttaaa

SEQ ID NO: 29673 - DNA, 413 bp, Oryza sativa
  unsure (1)..(413): unsure at all n locations
agcttattgaacaaactctatattcattactttgattgtaatggtgcccctacgaaaataatctctaagataatcataataaaaaaaaaacccatctctatcttcctaccatatcttatctcttcctaactaaggccccattctaacttcataaagatacagatttttcctcgttttccgttagcgcgctttttaaactgctaaacggtgtattttatgcgaaaactttctatatagaagttactttaaaatatcaaataaatctatttttcaagtttgtaataattaaaacttaattaatcacgtgttaatggctttctcgttttgcgtgcccacttttaatcttcatctatagaagattcgaacggngcctaaatggtctctgatgtttattggatntcctcctaatattt

SEQ ID NO: 29674 - DNA, 412 bp, Oryza sativa
  unsure (1)..(412): unsure at all n locations
ttgactttgagacatctatgatcaaggcaattgtggttgttacaatgataacataagaggcagaagatgaaccggtagttntatgggtgaaaatttatggtgtacccaaactagccagaatagaagattcagttaaagcaattataaaattggttggggaatttgaggctattgagggagctagcttgaggaaagataagcctgtgtgagactgagagttgtatgtaaggaccctagagaattacacttctccatacacatctacatcaacaaggtgggctacatgatcatatgataaccagatggctatccaccatatgaaaataggcaaaatccccttgatgatggagattgtaaggatgacaaggacaatgagggtcatgaagaagatatgaacatggatgatgagttc

SEQ ID NO: 29675 - DNA, 129 bp, Oryza sativa
agcttgcttcacttcgaggcgagcagtgcgcgtgcttatatagctgtgtgcgtgtaccgagtaatgaaaccaccgaccgtgcgatgtgctgctccatgaagcggccgacggaggtggcggggtgggctc

SEQ ID NO: 29676 - DNA, 432 bp, Oryza sativa
  unsure (1)..(432): unsure at all n locations
tcgccctttgcttgccctctggcatcgatctgctgtccttatctttccactttgagttnttcgtggatcttttctcagtcctttccatccttctgcttttttatgtaattgcctgaaaaagtccagagcagaaagtttttgggctctgcttggctattttggttggtgtcttttcagtaaatctggttattttcagttggtgtcttccccatgaatagacgaaaaaccgttgtttagtttttaatgagttttaagattttgggagtgaattgtttattttgcagaaggcaactaaagggtgatttaatcttaaattcaactctgaatgaccgaatttgaatagagtgttgtttcatcatcaccatctcatcctcaaagcgacatgcttaanatagaaatgaanacaatatagtaactcatctcatttatata

SEQ ID NO: 29677 - DNA, 437 bp, Oryza sativa
  unsure (1)..(437): unsure at all n locations
agctntgctgtctgctaccttcggagaagcgacgtgtacgtacagcgttctatgatgtgatatgagggctaatccctgtgcttgcctagcctaaccactagattgatcgcaagctgtggccagtcttgtttgcttgtttgtcccttcattaatttaccatcgacacgagcaaacatattacttcccctgtaacaagatataaagcatagccacccttaacccaataactataagaaataattattaattatcacatcattggttgaatgtatccacccaatagaatattagagatcttgagagttaatgagttaaagaaataataatttagtagagtagatgtgctaattaattacatgcatgcatacatgtcttatattatgaaacatnggagaaaaatagtttgttatattttgaaatagaagggatacatacta

SEQ ID NO: 29678 - DNA, 467 bp, Oryza sativa
  unsure (1)..(467): unsure at all n locations
atgtttctcccatatatttcttcatcaatattgtttagataatttntctaagctctacttaagatttatattatataatattcaattcatccatataaacaattgtctataatcttcctcatcataaaaaaaaggatgtatacattttttagggtaaaaaaagaggtatacttagtttgtttggagcatatgtctaataaattaagtgtaaattaaaataaggtgttgttaccttttctataaaaagactaaaaaactgttatgaataaataaatgtatttttatttaatcatagtgttntatttgtactatcaagctctgcccttaattgatttgcattgacgcaatttgttacacagaaattaataataaaaaggtgtacatatacatatcctatacatttctcccctttgtagtttttaaaagaaaaacctagttaatattagtcttaaaaattaaatgtaatt

SEQ ID NO: 29679 - DNA, 238 bp, Oryza sativa
  unsure (1)..(238): unsure at all n locations
cggatgtgaggtgattcctancggtagtttgtttgacaactgcttgtgaaattactgttgtgaaaaggggttcgatgtttggaaaatcagcagctgacgggatcagctaggcccgggtggccgtttgaaaagttttggcccgagtggccgtttgaaaagctgttggccgggtgccaacctttgttttaagatctaaagattgatacattgcacatactccgaccggacgggacgcact

SEQ ID NO: 29680 - DNA, 394 bp, Oryza sativa
  unsure (1)..(394): unsure at all n locations
atgcaagctttcaatgcctatatgcctatgngcatagtatgtgtgtactattaacatctattataagnggaacttgctttctagtcagtatagcatacagttcaatacttcaatatcaccatacattataagccagccatccagcataattggtattggtttgcccaccagcaaggaagccactataatgtttgtctccttacatacttgagtcactaatgactaattaagctgcaaggaggacaagtaacgaaccaaagtttaaatggccttctttatcagtcctagcctcctagggcataagcaagtaggcataaagacagaataatgctatatatcaactaaacaagcaagctagataaatcatactgatggcttatcagcagtgccatct

SEQ ID NO: 29681 - DNA, 443 bp, Oryza sativa
acgtgactatgaagcccaaaactctttcgactttctaatgaataagtccacgttggctccctcaattatatgtacaatctgatttgtactcttcaaccccaatactagatatgaatgctaacaaaatggctccctcggtgattttgagggtggttctcgctaacgtggtttgttgacctaatctaacctgccgagtcggcatacaagactcgcatgtcagtgactctacctcttcgcctccaaaccttaccgcgtcgcataccatgttgccttgcatggttggcggtgaaaccgacgctgcatcatcgagctaaggaggttgatcgacactaagctcaaggaatcctcagcgtcgcaaagagattgaggaggtgcatgatgatatgggctccacctcgggccaccatcttcgagtgaagctgacctgcactctatccggatcg

SEQ ID NO: 29682 - DNA, 363 bp, Oryza sativa
cgagctgcagcttttttttggatttgatctcacatgtagaattctatatcattacctggtactactggacgttactacagttctatcacaacgttactataagagtctagtaaagacaataagctttgcagtaacaaagtgtcttgcatttcttgaatagtattactacataaagtaggaattgaaacaaaaatatatgggttaaaggctcacatgctaaccatatatttgttactacacataagtagaagtgttactacataataggtgcatgttaccacttctaagtagctatgttactgcatgataaatgcagtgttactatgtcatttttacgagatgaagatcgaataggtgagccat

SEQ ID NO: 29683 - DNA, 412 bp, Oryza sativa
  unsure (1)..(412): unsure at all n locations
gatagtttccctctaattcanatctttagttgcatatattcaagttactttggtgaaactaactggcgggtgaaactcttgtcactcctaacccccgccgagttagcccgttcttgcttcattgtgcaaaatgaagagacgattgtctcatccgttcaaggggtccggctcctcatcaagtcatcatgacgggtccagtactcgttcatcagctgatgtctcgatggaagacgccgaagctccacgacgactcctgaacgacaccgacatcgaccttgtcagcgatcgtgagagacaagcctactacatgctaagtgaccgggagtatgctcacactcgagaatactcaccggagctgcttgaaaagataggtatggatgttgaattacgtactatttggaaagctattggt

SEQ ID NO: 29684 - DNA, 399 bp, Oryza sativa
  unsure (1)..(399): unsure at all n locations
tctataaaactttggccaaactgctctactatagaatattatgatgtgnggnttacccttaaaagagtatgataaaaattcaaaaaaataacagtaggataaaagtcatagtgatcaatcctaataatttaattgtaacaatgcctacctcaaatgactctttgcaactctctaaatgacagttcatgcaggaccgcaaatagtttttagttaagaaatcatggtggaattggtttttaatttctgtatttgacaagaaacaagttgtgagtacgtctgtgtatttcgcttgcatagttgtgtacttgtgtgtcttataactgaggccagtgatgcagaacatttctactatcttaaagaanaattttaaaaaaatttgggagtacatctgtgtatttt

SEQ ID NO: 29685 - DNA, 394 bp, Oryza sativa
  unsure (1)..(394): unsure at all n locations
agcttnctattccacggagaattgttggatgttgattctaaaaaggaagaacactnttctctcccttgttcctaagaaatcctgttccgattagacaantttatcttttctaagaaccgtgagatactgattcttggagatgtaagatgttcaatagtaaattagtccatagattatactctagattaaaattaggtttaggagactcctccacggattgatggattgattgttaatttccgagagggtgatggagatacagtcatctgggaggcccattgaagtcccgaagtgctcctggagaaggtcctgtcagtgaacatcctctcctcngactacttcaaggagctgtacaggcttaagacgtaccacgaggtcatcaacgtgatctaca

SEQ ID NO: 29686 - DNA, 456 bp, Oryza sativa
  unsure (1)..(456): unsure at all n locations
tcattgacaaattgtctnngaattgtacagtacagcatgttccaatatcatctgaatgaacaacacattgtacttgtccatatcgaattcaatattgaaatcataggacaacaagtacatggaggaaatttgtgcaaatagaaaaaaaatcagcatgcaaaaatacaacttgccatgaaaaaaaaatcacatcattcgtcgtcaggttcttccgccattggagctccatttctcagccaatccccagctcacacgtgccaactcttccacatatgttggttaggacagtggacacgtggcatgagaggtgccacttggcactttcccattgtgtgagatcactactccctctctgcctatataaacaccatggagctagatagcaagctttgcttattcactcattcaacttccaaattaacacgattcttcttgctgcgttngctgatcgatcgc

SEQ ID NO: 29687 - DNA, 409 bp, Oryza sativa
  unsure (1)..(409): unsure at all n locations
agcttaaggagttagtgggggatatatttattctaagataggattaattaggatggtgaaagtaataatttaatctagtcgatcgtcccattgactgagtgacgtacgcatatagtatcatctagtagtagttagatggagtatctgaatatctatctacttcagttaagtcctccggaaaacatggtcgatcactcggatcttgcttaatttgtcaaagagtgcatttgcgtacgtgctcggtcaaataaatattgtattgtaagcttacatgtatggatgctgcaaatgattgaatntggtgagtgctactaatccacgtatatatggcatggtgtgcaacccaactcaagtgaaccaaacaacacttggctctctttctttctctttggcttcttatattattata

SEQ ID NO: 29688 - DNA, 453 bp, Oryza sativa
  unsure (1)..(453): unsure at all n locations
ctttcttcctcacctctccctccactctntttaacctccacctcttctctctcctcgcttactccacgtcttttcctcctttctctctccttccctccctcccagtctcgtcggggctctttgggcttaggctatagatagcaagtagtgacggctcggatgacgacaacaaatccaacggcatcattctcgggagagacggattagttgtcctttggcctataaggggctatggacggctgatgacgagctcgaggatgataggaatgggagctatggtttcgggattntgtttttataattctttttgccaaattttgtttttgcagacaagcagtttaatgttccatatgagaaaattttgtttntgcacgaggatcggctggtttcttagaaaattntgatttctactggcatctaagggcaggcgggcaaagtgctcgcctgtgaaaa

SEQ ID NO: 29689 - DNA, 450 bp, Oryza sativa
tgcaagctgcaatattaagtatgctatatagctgtgttcccttaccggcatgtaagggttttaccgccaccaagacagcaaccatgcagttaccgtgcaagaccacacaagattcatcttcaaatctcttatggcttatttgtaacaaaggaaaagatgatttttgtaggattgaaattctatggaaatttttcctaagtgctcatttgaaacaaaggaatgggcacttgaaattcccacaaaatccctatggaatgacttgattcatagcaaatttggaggttttttaacatgagattggacctcatgagaaacttttcttggtctatctctccaaaaatcttgtacttttcttatggagcgtccaagcaacaagttttgcacaattcctgcattttagaattcctaaggatcaactagatatgccacctctatttctaccattttcat

SEQ ID NO: 29690 - DNA, 442 bp, Oryza sativa
tgtccgtgggagcggacatggcgatgacttccctatgttcttgccttggttttcacttcctttactcttttgttcgggttgacttaatatgtcgtgttctcgagagagaagaatgacttgacttagtcatttccgtgtttgggcagacctcgagagtgagttggctgacagagatcgtcgaatccaatactggcggacgaagttcgaggtggccgaactcgagaggaccatggtggaagtgaaaaaagaccattccgtggaagcgctccgaggtcgcgaggtgtggttcaactcgtacctcaggagctgctatatggcaatggctggagtctgccgggaactccatgtacctcgcaggaatcccgaggagtcggcggccagatatatctcgtggttgaatggggcctgcgcccagctcgaaggcatcggcatgcgtatcgac

SEQ ID NO: 29691 - DNA, 421 bp, Oryza sativa
  unsure (1)..(421): unsure at all n locations
agctttgaccacatgcatcttgcgtgatgaatccgccgaggagttggagtggggacccatgataaatagtccagctactgcttgcttgcttgcaccctaaattatacgggaatcctcagacctctgatccgcgaagttacccactctaatatacaaggcataacactggtaaaacaagtttagacaattatacatggagaggaagtatcggtgatgttcgtggtggagggtgcatgactaccacccactatttaagtcttggtctctggttgccacgaatattatatactcacagctatgtttttaatgggattntagtatangaattctcatntggttctgtctttgagtatgtattaaggagtatatttattgatttgtgtatgtatagtgatgtctatggcctatgggtatatgtctt

SEQ ID NO: 29692 - DNA, 471 bp, Oryza sativa
  unsure (1)..(471): unsure at all n locations
ggttggtctcttcacatcatggtcagtataacatagcattatctatgcatgcccaaaggagaaggtcaagaggtatgagatcttcaagcgaaacctgatgcacattgtggagacgaacaggagaaatggcagctattggctcggcttaaatcattttgctgacattgcacatgaagaattcaaggccagttacctgtgactgaagccagggttagcaagaatggatgctcagccacatggttcaacaacattcatgtacgcgaacgccgttaacttgccctgtgcagtggactggaggaagaatggagcagtgacaccggtcaagaaccaaggagaatgtggtaagctcaatgtctgaaaaatgcacactatctatntagcatagtgatactgaatccctgaaaatgcacacgatctattcagcatattgatgccgaatgcctgaatatgcacacaatttatttcatcacg

SEQ ID NO: 29693 - DNA, 372 bp, Oryza sativa
acttgatcaacaatagtttctcacacgcttggtttattctatttgttttataaaaatgatatgcacatttttgactcgagtactatcatagtatcacaaattcattagattttatgaacttattttaatacaatatggattgacaaagtttgaaaagtttgaccaaatcttatactgaacatcaaataattatgaatagacgaagtactagtacaatgtatctacatagtcttccatggtcttgcaggatctgacgcggatcaaatcatagagctcactaaaagggctgtctgcttcttcagagaatttcacccagtcttcttcagacaagtcatctagttcactatcaacccaagatgtttcatgccacac

SEQ ID NO: 29694 - DNA, 374 bp, Oryza sativa
  unsure (1)..(374): unsure at all n locations
attgcatattcagcggactcttcaccaaattcgcgacccaccgaatcattttctgaagcctcaagccgccctctgcaggacttatcacttaatcataaaaaaaaaacagtattatgaacgaagcataatagtgccatgactgcacatgtgacatgtacgtgtagttagttacttgtcgcaggagaccaaaacgtagacgcaatttgaataagattattggcagccatgcaatgcattatacaaacggtagtcctcggagtgacgtcacagaattgacactcgggagggtcatcttcatcatatcagattatcagtcctaatantttggggctgcttgcctgctngtgacacactggcagcagatgatgataata

SEQ ID NO: 29695 - DNA, 468 bp, Oryza sativa
tcatccctcgatcactgcagggtagagtggcataccacattatctgtggtgtgcatgcatccgacagcgagtactctcgtgaacctaatattgttttcatctgtccagcacctacgtaaaacattaatttcctgggtgatgttacagcttgcaagcactatcactaccagaaaaaatatacctaaagttgggtaacactgaagaaatatcgcgtatgataattacgaacaaaagtggggtgtaatcaaacacaggactatatatagggatatccggcaactacgtacactcgcaagtacatctcaagtgtcgtagaaatctcaataagaatacactgaagagagtacttctttttagaaaacaaaaatataaaacggccggagctctgcctattcgattgagaagagtattgtgcgaaatacgtgcacatataatcatgccataacgattatattacaattactgaat

SEQ ID NO: 29696 - DNA, 429 bp, Oryza sativa
agcttgacccatataaaaagattcttatgctatgtaaaaattcaaaaagtttcaaactgtatgaataataaatggatctttctttgcgcgttgctgaaagttccttttcatctttctgttagtaggttggcatgtacacatgctataaaaggtgccactattgactgtacattacaagctgtacacgaatatgctggagatgaacatatggaggagtgatagaccatcatctgttcggtgccgattgcatgtcatggatggttctatgattgcctattactctctagaataaatcagtttcaatcatgcgatcttctggctatagctgataagtcatgtgctttgtgaagtaaagcttgtataaatttgagaaaactctacgccatcttttttttaaaaaaaaaataattataattgctttcacaattc

SEQ ID NO: 29697 - DNA, 409 bp, Oryza sativa
tgtcctgcggcagcggcggtgtcatcggtgctcccgtggtcatatccagcagaagtggcggcggcgttctttttggtgggcggatctagtgtcacgcaatttctatccaaaattccaaacgcttacatgtgtgtgaaccctcgtccaggaatcagccgaggcacacaataacaaattgataatagagtacaaatattactctaattaataagcgaataaaatgtcattacagaggtagatagttcctctcaatcaataaagttctaagcagcggaaaataaataaacggcgcagacggctccactccacaggcagcttgaccaaggctacacctaatcctccacaccatcagcctcattgagaactcttcctctgatgaatgaatgcaggtgagtatatgacatactca

SEQ ID NO: 29698 - DNA, 346 bp, Oryza sativa
  unsure (1)..(346): unsure at all n locations
taatcctgggtgtcaggtacatatcatataaaagcataatatgtgcaccacatttgattattatttatgttactcttagcatacagctattcatatgtatactggggatgtgttttttttttttgaaatattggacacganagacacagagcacacacttgatgatgactgattaactgcaatcaacttataacaatcggtcccaataacttcaataaaagctatttctcttctacagatgaacaggttataaataaggcaaaggatactctgccctctcaccagaaaatgcctttgataagagagcctctaagagtgtatggaacagctagcttttaacatttac

SEQ ID NO: 29699 - DNA, 425 bp, Oryza sativa
  unsure (1)..(425): unsure at all n locations
cctcaagtcacctgcagctgcaagctgagtgtggtagaaatgaagagtgtactctttatagcaggatgacggttgaactatgcgaattgcaaaaataccccgcaaccgccatcaagagagcgtctgaagtgtctaaaccaaaacctggatccaacggcggtcaccaaggttcgaccgaaccaacctgcgctaggccagatggtccccagatttagtctgggcctcctcctcgctcttccttatccatttctccagtagttgggcccattttttgctgttttgatggagtntangagcccaactctcatatgaatagaattattcttcactttaatctaaaatttctcccaacttcagtgggttattacttgcatccaatatacactaacactcgcggaatatgttagagtaaatcctatcactat

SEQ ID NO: 29700 - DNA, 426 bp, Oryza sativa
cttgagtgtgtgatgaagtgaaggaagtgacccctttttcaacctcccaattacggttatggcagctggaattgtcggaaatgccccacatacatcattgggggtgcatctgaagcatccacgtggagggccgagctgagccggccctgccaagatttgggcgaatccctggttcggccgaacctgggccggcccatcaagcctgcagatttggtaaaggggctgatatgtgggtcctcatggcagttctggcagttatggcgggtttcaggacggttatacctgacctgtggactcctttatccttgagcttgcttaagagtgagttttccttcatttattcttcatttatgtactaatctctgcaaacaaataatactccaagtatgagtgaaaatatattattctaaaataaatatgtattac

SEQ ID NO: 29701 - DNA, 224 bp, Oryza sativa
catcgcactaatcggcaaagaacttgacgcttgccctacctggtgcgccaactgtcgaaacaagattttggcaatacttaaaggggttggctatcaagctagaaaagtggatgggtttgaagacaaggagttttatacaggttcaggccttcttattcaagaagtaataccctactcctgtccggggatgattccaccgagtatatttgtgatcgtatgatatg

SEQ ID NO: 29702 - DNA, 437 bp, Oryza sativa
  unsure (1)..(437): unsure at all n locations
ctatatatattctagtaattatatacctatgtacttacacctcaattgtcatatggtttcgaacgaagagtacaagagcgtggagcacatggtggtgatcaagtctatccaagacgccatggtctccattgctgtcttcttcaacccatccaatcgcgatgcctccgacctgttcgggcccctcccggagctcctcaccgcggagaggccggcacggttccggcgcttctccgtgccggagttcatgcgttctcgaagggaatccggccatggcaagtcatcgatcgattcattcaggattgctgcagattaacgacggctcatcatgcaacattcatggacaaggtgatgctaccgagtataagatgtctgaagtattttcaacgcttaatggatatgattngtgtagatgtgtgtgcaatanggggtatattaat

SEQ ID NO: 29703 - DNA, 411 bp, Oryza sativa
  unsure (1)..(411): unsure at all n locations
agcttattattctctcaaccttttggcaaagtttacgttgtctggaattaaaaccactgtttgtcctttatatgccataagtgtataagaatgggagaagcatggtaagaggatggttgacaaagagaaatatatntggaagagtcattgatgtcatcttgccttttgtggtcttcattttgctgcaatgtaacactgttgccttagttcaaaattgtacataccccaatatcaaattttctgtgctcaatggttgttaacttatacttgttntaaattcaagtggcaacaatgccttttcatggaacttgaggcgcttgttcagctcaaatgaaaagcatctgccggcgatatctgacccagaagttgaatcttgcgttatggatttgatggctgctagctggactggac

SEQ ID NO: 29704 - DNA, 446 bp, Oryza sativa
tacgatataaacggcagatgagaaatgtgacgtgtagaacttcctatgtgttcgaacaacgatcaaaactagtgattacattattttcgaatctaaacctcctgcaagagtatgaagcaatcttggcattggaggtgtctcaacttcagatagaccctcgagaaactgtagtacctcactcattgtgggtcgatcaaactcattgtcttgaatacaccaacatgcgactttgcaaactctttcaacctgctccagtttcacttcaccatgcaagtttgcatccaccagactgtcaatgtctctgttcagaagattgcgtgcaacttgcacggtgaaacaagcttcatgcacgccatcacgcgaagattgttactggagttcctgcttcctgaaatgatttctaacaaaaccattccatatctgtaaacgtccacttttgatgtgat

SEQ ID NO: 29705 - DNA, 362 bp, Oryza sativa
  unsure (1)..(362): unsure at all n locations
agctggtacacatngttcagatagagcaatgtttcatcatatgcagtgaatggatgtgcccaacccagaaaatgggcatatcgactgaatttatccacgacaatcaaattacagtcgaatcccgaagatttgagcagtccttcgatgaaatccaaagacactgtctcccaagcctgatctggcgtgggcaaaggttgaagaagccctgggtaacgcaccctttcagatttagcttgtttacaaacggcgcaatcggtcacaaaagtctgcactgcccgcttgagacctatccaggcaaacagccgtttcacttgactgtatgtgacctgaatgcccgagtgccccccaattgcactagcatg

SEQ ID NO: 29706 - DNA, 421 bp, Oryza sativa
  unsure (1)..(421): unsure at all n locations
atgcattaattcaactgaaatatggtcatgggtttcaccttacgttttccaacaaccaagccattatatacagcagtgtctgccaatcaaacagagaatcaggttttgtttatccatttatttgctttggttcctttggcagggccaagcatagacagtaccatacccgttcaaccaaagtgtattgtcggcacagtaatgcttctttaatctttggactttggagagcacatgcaatgcgatattgcaattcagacagcaaagcggctggctccatccagatatacatgttttataaaataggacccatctgatatataanaaactgcattttcaaagaagatgatatatgcattgtgggatcccaacatacaacagagacatccacagaatgtttgtgaatttagactcttgtatctat

SEQ ID NO: 29707 - DNA, 378 bp, Oryza sativa
  unsure (1)..(378): unsure at all n locations
gcttacccgcangtacaccttacacacacttatcggcgntcaattttatgcgggccgagcggagattctcaaaaatttccgctagatctgaaagtaaggtctcttggttgcgtgtttttacaaccaagtcatcgacatacgcctcaacattacgtcctatttgactacccaaagaaattcgagtagtacgctgaaaagtaggacctgcattctttaacccgaagggcattgatgtataacaatacgttcctacggnggtaatgaacgcagttntttcctcatcctccctagccatgcgaatctgatggtaaccagagtatgcatctataaaacacaaaaggtcgcaccccgcagtggagtcgacgatctgatctatgc

SEQ ID NO: 29708 - DNA, 405 bp, Oryza sativa
gcactacctctctccgagtgtgagcggcgacgacggtgagccgaatccacgccgtcgagctcgtactccaccgccccctcctcgccaaagtcctaagcagggggaggcgctcgaaagggtcgaaagatccgcggcttcaccgatcgcgggcgatggaggagaacggcgagatggggagcgtcgcctcctcgtctacggcgacggcagcacgccccatggcgcgctccaagctgcgggcgcgctcttacgtcacccgcctgtcgtccctgacccggaatctccagcccaacgatggctggacgacgtggccaaattggtcatgacggcgcggcagcgcctatatgctggtgggcggtcctccgccaccaagacctctggtgctgctaccactggctccgcgtcgtc

SEQ ID NO: 29709 - DNA, 400 bp, Oryza sativa
  unsure (1)..(400): unsure at all n locations
gcttgacagcctgnagcaattttttatgagtatatgcagcctatataatagcatggtaagtggccaattgggttggaaactaatctctctactttaatgtgtctgacgttgggagaactaaatgactggagggagtaacaaaacagtttgtgtcacccggtgaggagcatattccactgagctcaatgtcaaatttgaatggctagacgttataaattctgtgctttccagccctatgtccattatatagattagtaatagccaaaggggaaaaaaactaaattcctaatttcttttttgcaatacaccaaacattggacatgtctacagtgcaggtaggagtataaggcagtatgcaagtcccatcaagtgttcaatcaaggcctaaattgatgctttc

SEQ ID NO: 29710 - DNA, 441 bp, Oryza sativa
  unsure (1)..(441): unsure at all n locations
ttgttttacttatgcataaattccaaaggataatagattgtttcaatgaacaatgcagtggtggagatctcaccgagttaacccaatggatcttgtgacaaacaaaccaccggagaacctgctctctaaatgtcttgccaacatcaattataatgtacttatgggttcttgcgtcaaaaaaaatgtacctatgggttccatcgttgtcgcagtaatatataaatagggaggtgttacacctgatagcaaacagaatgttcagttgctgcatcaaggtttcttttttacaatagagccgacttcaaaacacaattgtaatttgtacactgtaataccacaactacatctgatagcaatctttggagtcatataccatacagcattacttgatnggtaaaactgtactgtagataacagcactctgcagcacagcataccaat

SEQ ID NO: 29711 - DNA, 342 bp, Oryza sativa
  unsure (1)..(342): unsure at all n locations
gggggtagattggtgttgattaattcagttctttcaagtttagccatggttatgatatcttttttgaggtgccgaaaggggttctttataaaattgattnttatagatcgcgattcttttggcaaggagatgatcataagaaaaaatacaggctcactaggtgggatgttgtctgtcaacccaaggaccaggggggtcttgggattcataatctggaggtacaaaatatatgtcttttaagtaaatggttgtctaagttaactaatgacgaaaggattttgcatgacttattgaagaggaaatatctctttaataagtctataaccccaattgacaagaaac

SEQ ID NO: 29712 - DNA, 447 bp, Oryza sativa
tggatgtctcccgacgtggctgatccactctgtctgggtgttccatgttagtaatgtcgtgtgggtaaagtgtaccccctctgcagatgttaacaaactgttcgaacagccgtgcccacggtcatgggcggatgtgaggtgattcctagcgtagttttgtttgactactgccttgtgaaattgctgttgtgaaaaggggatcgatgtttggaaaatctgcagctgatgggatcagctatgcccgggtggccgtttgaaagtttgtggcccgggtggccgtttgaaagttgttggctgggtgccaatcttgaacaattcataagactgatacattgtacatactccgaccggacgagacgcactgtctcatccgtgtcgtttgagaagcactcactctagtgtttacagaaaagagttcatataaaatcaattgcaaaaacaacagcc

SEQ ID NO: 29713 - DNA, 358 bp, Oryza sativa
  unsure (1)..(358): unsure at all n locations
agcttgccttcagaaatatgatcgtgccagtttatttgatcctgcaancaacaagaaacagagacaaagaaaccgtggttaaatccataaatgatagccaatcggctagttgccgatgacatatcatttatctttaagccgatgtcatatgtgaatcgattggcggtcatgaataagtaagaaagaactaaatctactcgatcggctgtagatattaacaatatataattcttatgtcgatatatacttaaatcaagtgattgagatagatcggtcactatgccgagacattataaatcacttagatcgaaatatatactaacaacaagactatgtatgtttatagcatagccgatca

SEQ ID NO: 29714 - DNA, 385 bp, Oryza sativa
  unsure (1)..(385): unsure at all n locations
ntgatagcgttgatgcaaatctgcatggatttgtcctactttattgtttccattcagccatagcaccttgaggttggaacagtttgcaagattatgcatccttctttgcaatgtgttattgctcaagtatatgatttgcaggtgatgcatattaccaaaggattgagggatctctccggtgaatgaatttgcatgtacaaagagaaatttgaggaatgttaggtttccaagaggagacatctgcccaattaatcctctatttgtgaggtttatcgccggcagcggtgacgccactgcatctgcggtcgcgcgcgtggtttgctcttccggcggagtcagcgtctagctggcgccctccgccgcgcggtacacaaagagcgcgcac

SEQ ID NO: 29715 - DNA, 408 bp, Oryza sativa
agcttcgccggcttccctgtgagtcgtgttcgtgcccaccgcgcccttcccaccacgcccaccgtattccccagcagcgaagagagaaaagagagagaggggtgagccgaccatatgcacccatccgtgcccgtcgccgctcatcgccgaccagttcgtcctccctaccgcgcctgctgcctgcctgctttgccaaccgcgtcggtcttgccacgttggactgccatgtgctcaagtctccggtcaaaaccgcccaaaagtatggttaagggggttaagtgtccggttttattaattggggggttgaaatgacccggttttgagttcgagggggttttttaagccaaccgcaatagttgggggggggtaaaatgtacttttctctatatataagagtgtgatataaag

SEQ ID NO: 29716 - DNA, 246 bp, Oryza sativa
ccggctttccaccggatattgtgaaaaccatcattctaccatagtctgaaacggaatgccatttctgaaccctaaaccctgactactaccgcccattactgtacttgctctaagctagagatacttaccaacagactcttcctttgagaatgagaagagaagaatgaagcttccatgttaccatcacgcatgtggcgagcctggcccgtgctccggccttcgtactgcctccatctcgagctccta

SEQ ID NO: 29717 - DNA, 410 bp, Oryza sativa
  unsure (1)..(410): unsure at all n locations
atgatattgaacggagaatggctgtggctgacaatcctttcatgattgtgtatacaatactccatgaactatgtatttcacttgttatggatactgtaattagacagacaaatgttctacgacagggcaggtggaaagatgcgataaaatctgaacttatctcagatatcggcacacgacaaggtggaagtaatgctgtaatgcagcttggtcaagatggggagctcgattcaagtgggtctaggataccttggctgaaaattaattactggctagaggaaaaaaacaatgcttcagctgaatcagattcatctccatatattaaaatngaggcagggcaagatatgcagatatagtgtcagcacaactctttcgtattggataccattacagataaagaagctgatctt

SEQ ID NO: 29718 - DNA, 444 bp, Oryza sativa
  unsure (1)..(444): unsure at all n locations
ngccggtaatcttanggacgagcgagtgatttccgagagtctagcctccgcccncggccgaactcacaaatggtgggtctcacgactccccgctattgtggatcttccctcaacaaggtctcttcgagaggaaaaagtcagtatggaagcacggatcttaatcacagatccaacggccagagaaccgactataatcaacgaaaaaaatctgtcgacacaattatagcaaatccgtttcattgttgacgaaaatgttaccggactggcttagttcttttaggctaccagctactaagattattatgggtgcgcagcatgcttctcaagtcttagtcgctaaacggttgtttttctaaaaaagtttcatatgtaatatgtaaaaaactaaaataaatgtatgtttaaattaaaaataattaatatttaattaagcatcatctaatc

SEQ ID NO: 29719 - DNA, 461 bp, Oryza sativa
  unsure (1)..(461): unsure at all n locations
agcttgagccgggcctatagcaccttcgagcttttagacaagttcggttctagctcggccataagtaagataatatatattttaatgataatctcttgataagtataattattttctagttaatcacactaataaaagagtagaaaatgattaaaataaatatattgtgctaacacatgctaatttattgtgtaaattgatattaatatatatatttatctattggtttataaatcaataaggtgaacaaacaatataaactatatataattaagctcggctcggtaaagctcgcgagcttttgctcaagctcgagttcggctcgtttggagcttatgccgagcttgaacagagcctangacaagctaagctcgagctgctcgcgagcctcgatcttttttgatagccctaactataactggtgtgtaaccacactgtaactattatataacttatataaa

SEQ ID NO: 29720 - DNA, 415 bp, Oryza sativa
  unsure (1)..(415): unsure at all n locations
cttccactgttctgcttcctctttgccatctatggtaggccatattacagttgaccacctaagcacagaagagcaagagataaattntaataggcatgtagtggcaatgcatgattgagcaaagctacaagatagatttgctttcctggcattacaggacgtcataaatgccctggctttgatgctgaatagggcaacttggaaggccatctggttcttcactgatcttatcanggaagggtaggaacaaaaaaaaaaaaaggggcaggttcacaccactgttactgatggaactgaaagccaggttcagcttatgcatgcacatgcagacgtgcaacatgtcatgtgcaagaaagcaaaaatgaatttgcatgactggtcagtaacttgtcattagcaacttcaatttagatgc

SEQ ID NO: 29721 - DNA, 315 bp, Oryza sativa
  unsure (1)..(315): unsure at all n locations
tctggnactatgctcacggtggaacgatcatcccatntgatggctccttggtcttcatcgatcagatacgcaatgctgctcgtcaactaacggacacagtggaagcctcttctcatggcacgttccgacccgacagagagaatgacgagctgtcactcgccctgcagactccatagcattcatgacgaacatgagggaaaggggtgattccttataagattggattcaaggagggcatccacacgtacaggagtcggatgatgagcaagagagataccgatgcgaagattgcagatcttgagtacagggtatcga

SEQ ID NO: 29722 - DNA, 469 bp, Oryza sativa
  unsure (1)..(469): unsure at all n locations
tctacggagagcttcagatatgatcagaanactattgatcttgatattgtggttcaatgttactaatggttctctcttacagcatgcacatctacttatctgacgctcaattgctgcttccagtcaccaaagtaacacttgtcacggatgatgtggcggtggtgctccgtgaatgcgtatagctcgttcgagaattcgcacgaaataaggtttacatcctctatcattactaataaccattataaacactaacgtgtgaagcaataggagagtgggagtcatctatcagtgactggctggctcanggaaggggaaatcggtgcagatcgtgcataaaacactgcttgtgttagtcggttagtggtccaactgcaacttgcaagatgatgtataatccgacanatctgctgggtcgtagaaatgatggggtggccttttatttttgtcttctaaatgatctcgatcttct

SEQ ID NO: 29723 - DNA, 443 bp, Oryza sativa
  unsure (1)..(443): unsure at all n locations
attaagatacattatgttatgaaatgtattntgaaaactaattntattaaaatacattaggaaagaaaataagtaattttattaattaggaaaacgtattttgaaaatccctaattaagatacattttccttaactatttattttatggatatgcatggaatatctagagaggataagttacagaagtgatcaacaaacacataacaaatggctacagctatatatcatgattagatagtttaggatgcccgaggaagtgcagtgactatgaagtgtgctgtgattgacgaaacgttgggtgtgctttatggatcaaatcgagtgttaatccccacttgcttcggctggaattgcaacttggccaccaaggacattgagcangaacgtttacttgttctggtccatgaacacatactccaagccatgcagtgttcgtctcgat

SEQ ID NO: 29724 - DNA, 360 bp, Oryza sativa
  unsure (1)..(360): unsure at all n locations
acgcaatgctttcttgatactggacaaggttagtctcatgatattntatgaatgccatcatgcaactggaaaccacccttatacttgtaatgaaggtattatgaaataccatcttatcatgtttttttttttgttttgacactaccatgaatatttgcattcaggtttttcttttttgtgtttgtcataagttataacttatcacaatctcaggagttctattacaaatcagaacataagccaagtgtgtttggtatgacagcatcacctgttataagaaaagggaagtattcagttttctgcaagaactatatagaatgcttcttcttcttttcttttgtgagtgggtgggtaagtgcc

SEQ ID NO: 29725 - DNA, 375 bp, Oryza sativa
  unsure (1)..(375): unsure at all n locations
ttaaagtatggcatgctttggctttatgcaatgcataataagaaggtttacttttaaaaatagaactacatacctatataagtattcacaatttaatacaaagtttctgaaatttatgtcgatctactgatcgacgggtcctagtagctaggatgatgcgtgaatttatttaaatataatatagcaaaagctgttcaaattcaaaatatatttaattctaagatttatgaattccttttgatagtttctaattataggaattctgaattccttttcaaagnttcagtcacccaaatattgtttttgtacatgttccgagaatgtgatanatatatactacccgtaggtgatatatgggagtggtattaatcaaca

SEQ ID NO: 29726 - DNA, 369 bp, Oryza sativa
  unsure (1)..(369): unsure at all n locations
tgactgctcaaataggatatggtgtgtntcattcgtgtctgcttctgttgtgatggctgcataaacacgtatcttgctctgattaaccgagatgtcgaggagctcgagaggccctcgggtgtagttgaccatttcgctgggcatgcctgcatctgtgccaaagtattataaattggccgtcaccgtgaatgggttactgctattaacgttcggcggcaacttgtcgccgaacaatggcgggtcgcctgctaggaatgctcgcggcgggttgaacgtgcggtcgcatatgacctcgaagccggcgatgtatcagccatgtttgatgcccgaaggatggggtatggtgatgttgccgcacatatcgggggc

SEQ ID NO: 29727 - DNA, 239 bp, Oryza sativa
ttccccttctgacatcacaggcttatgtcacactcctacgagagcccaccaaccccacccatggcagcagcaagggcatatggcacgccatttttcgcggtgttccctcccacgacgaataaatgcacgcgaggaacacccacgaaaaggtcccgcacgccatccacatggacctgtgtacgtaacacaggtctcacggtcatcttaacctggcggccccttcgctgctgctgtacctc

SEQ ID NO: 29728 - DNA, 456 bp, Oryza sativa
  unsure (1)..(456): unsure at all n locations
tgtcaatggacgttactctgcgtgaagctatttattatcgtctcttaagttgtanggtattttggttcccttnttgtcatctcccatgccataacaagacctggcaaactttgatactaactattgttcctgatcggttcatgtcgcatgtggtctcttaagcattcatggatggagaccttttgtatggatattttgatattttgtacagttgcatgtgttagccatctgttctgttatttgttgctcctactattttgccaatgcttcttaacttctctttactgtgcccgttgtactggtgccttgcaatgacatgcctgaagttctctctcacaccagttccattgcaatagaatgtatgataatccctgcgcgcttgttacttataactcttttnttttacggagggacggtaagtgtntagtacctggaaatatgcaagtgattctcttc

SEQ ID NO: 29729 - DNA, 410 bp, Oryza sativa
  unsure (1)..(410): unsure at all n locations
agctgagctcaattggtaatgttcgtgagtttctgttcgggctcagattccgccctggtttatgagacatgctcgcgagcctcgacccttttttacaagcctacactgatgcgcagggtcattcccccactcctacacctaanatcgcatgccatcttctccaactctacaacagtcagtttaaccatgatctaaaattgcatgccatcttatccaattctacaacagtcagtttaaccatgatcagtatgtcttgcaacatctcctttgcacttgcgcgcgtcaccacgagcagccaggcacatgtacactctcaattaagcacacttcccgataactctcccacttttcaacatggtcaggtcgtcttcagcaatctnctcatggtgacagcgattccacttttacta

SEQ ID NO: 29730 - DNA, 488 bp, Oryza sativa
  unsure (1)..(488): unsure at all n locations
gctattacgtgaactataaaactaagctggtgcatatctccttactagctaggctatgacaactacctccatctatgattactntgcataccttgccatcaacttttgccttggtctgaaataaattgcatcgttgttcatgatcaatcttgggctgaaccgtcaaaacttttggagtaacaacaagtgaaggtccctcttcaaagtcataatacacaacaccattttcctcatcctcctcttgagcatcatcaaaatgcgtcaaatcagcagctagatcatccttatcttcacttgttgattcatattcaccatcctccaaaatcagcattgtcttattatttgggcagtccttctgcatgtgaccacgtccaatgcatttgaagcactgaatattgctactctttggtgtataacccaccgaatatgtgctgctacctgtatgaacaacaaatttcttgcttgcactttgtgtactctnctctttc

SEQ ID NO: 29731 - DNA, 365 bp, Oryza sativa
taaaagtattacatgctacagttgtgtcaaggacaccataacaaaaggaaatgtggtgaactcaagcatcaatacaactcattccattatactccctctggtcaaaaatatttgtcgttttaggaccagatttggacaaacttttaaaattccgaatacaattttatgtgaataaatttataaagtctaataagttcatgatattatgaaagtactttttgaggcaaatctatgtatatcatttgttttcttttttaaactaagcatttaagaaattattgatggtcagaattttaaaagtttgaccaaatcttgtcctatatgacaaatattgtttttagaacacgcaggagatctgcatatca

SEQ ID NO: 29732 - DNA, 463 bp, Oryza sativa
tcatcaccttccttgctcacacgttcttgttgttgccggttattgtggcatatctcccaatgtgtacgtctcatattatttcaggaaagaagcaatctttcatacatggagtgaggagatatatgggttcgggatctcatgatcttacacaacgctgagtgcccaagttttttatgttccagatccatctaagttaagggtgaaaaagggtcgacgccaaactagacgcatcagaaatgatatggatgagtcagaagcaggtgggaggactttacgctgcatcatgtgtgatctgcgcggccatacttacaatatatgcccgaagaatgcataagtttcaagcggcgcatatgctattccatctggacaggcaagtgatggtatgcgaccacctggtgaatgaacaacaagcatgcgcgcaatggcatgcgtcgtctcgcaacatgcgattccatggtgtaac

SEQ ID NO: 29733 - DNA, 426 bp, Oryza sativa
  unsure (1)..(426): unsure at all n locations
agcttattgacctctagctcctgagcgaactctgtattcattctnntttaaaggatcaggcttgcttgttaattaacgatatatatcagtgttcttcatatactgttagtccagatattatatttatcgttaggcagattaacttacgctaagtggtcgattgatgtacagtagaaactcattgtaacgaaatgacatcatgcgacaagctgggaagtattaactcatggtgttgctagctctacagtagatactagtacatgtcaatgtcacccctgacatttacacgatcctgacgtacacaacacgatcagtatgacgatactcctacccacatagcccgtctatggtcgcaaccctaagccgagttagatctaaatatttcttgactttaactttgcatacattaactttttaccacataac

SEQ ID NO: 29734 - DNA, 463 bp, Oryza sativa
gggactcctaatgtgatggtactcgtgtcatgtcgcgttattttgattgtatccctttattgggttaacgtactgttacttctctgtatatcaataaaataagacaagttttgcatttgcttgaaaaagagacaaaaagcattgctgaatatcatcaccagacccggacaaaattttgagtcgatatgttttctagtactgtacgtacttgctcaaagacatacaccaatagagcaattttaccaattcaatatttggtaactcgaggtatcacattttaaatgtacataaaaattttgtactttaaagtactactatcttgagatatcaatgtttacactatagaatatctcgaggtaacaaatgccaaaaatttgtcgtatctcgagacaccaaatattagatggtaaagtgctcacactaacaataaaatatcagttctgactaaaattatgaagtggaa

SEQ ID NO: 29735 - DNA, 252 bp, Oryza sativa
  unsure (1)..(252): unsure at all n locations
agcttgacgctacccctacctggcgcgccatctgtcgttactagatttcggcaataataaaagggggtggctatcaagctggaaaagtgtatgggtttggagacaaaagatttatacaggttcaggccttcttataaaagaagtaataccctactcctgtccggggatgaatccgccgagtgtattattgattgtatgatttagagaanatcaacatctgcccctagaggcgcccggaccccccttatatat

SEQ ID NO: 29736 - DNA, 460 bp, Oryza sativa
cgtgacactttaatctcaagcttgcatacgtcgtcaaaatttctctcatgtgttgtcaatattggttaccctgcaaaaaatatgcaaatgatacaattcgattcggtgcaatatgaaatgcaaaaaaagttttctagatactgctccctccatattttaatgtatgacaccgttgactttttaaccaacgtttaaccattcgttttatttaaattttttatacgaatataaaaataattatatcatgcttaaagaacatttgatgttaaatcaagttataataaaataaatgataattacataaattttttgaataagatgataggtcaaacgtttgtcaaaaagtcaacagcgtcatacattaaaaaaggaagtacaataatatggacatgtacatacgtacgtacgcatatatatatacggcaacccttaatagcatgataagcatcttgtactctgg

SEQ ID NO: 29737 - DNA, 441 bp, Oryza sativa
  unsure (1)..(441): unsure at all n locations
agcttgacaagaaaactatggcttcggcaatgttactgtatgaaacaaacagccccggtccttagaagttcacaatggcaccaccttaaaatgtttccatcgcgtttgattttcttcctgttctgtgccaagcgatccgttatttttccacgtacttcttcaatactacagactgaaagagctctgctatggagctgtaattaaactaccctcgagtatcaaagtatgtttctttttttatatattactaaaaaagtgcccgtgcattgtaacaggtaaatgcctattaatcttattattggtatacggtatagctagggtaaaattcaccgntggaattcgcttggatatatttnttttagaaaatcatgagctgaattaagaatccactttcgtctcaagtaacatgtgagtttttctttaaaaattattatacactcc

SEQ ID NO: 29738 - DNA, 413 bp, Oryza sativa
tagatgaacaacagtccatgatcacagaaactatatcatcttacttgcacagaccaaacattgcaggtttacagcaagagatatgtacctaagggcaagtgaaattatgattccctaatagagtcaaatatatagcttgaaactctcaattatgtgtcttaaatcgaccatgttcacatttgcagagtaacaactgacagatgttatcttacaaaatgttaagaccttcaaagggaggctcatgtccgttggtttcctcagttttcatacatcaaacactaacatttattttacctgctcaaaaacagagatagcaacttgtctaattgagatgcactaagaaccaacatcataattcatgttatagagatccaccagatatgtgatagcagtacgggctagttatctgctct

SEQ ID NO: 29739 - DNA, 391 bp, Oryza sativa
  unsure (1)..(391): unsure at all n locations
agctngaaaaatggggagagaaatcctacctctacgcaaagatttacaaagaaaggacgaagcgctggcatgacaaaaggattaaaatcaagaaattcaagccaggagacaaagtactgatgttcaactccagggttaagctcttcggccacggaaaactgcgcagcaaatgggaagcaccgttcgacgtcatcgacacctcttcgcacggngcaatcacactccgcgacgactcaggtgacatatttaaggtaaacggtcaacactaaaaattttccttgagccaaatgaaactttagatgaagaagtggatgttattgaattaattgattatgaaccatgatgatctcatctattgcatgcttaaaaccctgtatagttgtcatttatg

SEQ ID NO: 29740 - DNA, 459 bp, Oryza sativa
  unsure (1)..(459): unsure at all n locations
cttgatctctctctctctctcactctcaagtttagtttagttctctagtgctaagnggagtagaatagaatagtatctcggagtcctcgagtctacggaagattttggtatggctctagtagcttctctttcttcttttgtaacacttccggaattaaaagaatattcttctttatataccttcagtactttactttgtctgagtagtggttntactttatatttgtgccaatatagttgtatgactagtttatcagagaggtgcagtggtgtgggtttaatgtttatgcaaatgattgctctatattaatctagtggatatagagtaatattttataatgtaagtatggtgcttagaattattagatatcatcaaatgggcatatatgctgtgagacagtaaatgtgggccgctaatggtgacagctcagtacgggtattcctccacgttggcatata

SEQ ID NO: 29741 - DNA, 378 bp, Oryza sativa
  unsure (1)..(378): unsure at all n locations
gcttgcccgcatgtacaccgaacacgcacttattcgttgtttagtntatgcgggcggagcggagactctcaaaagttttcgctagatctgagagtaaagcctcttggttgcgcgtttttacaaccaagtcatcgacataagcctcaacattacgtcctatctggctacccaaagaaattccagtagtacgttgaaaagtatgacctgcattctttaacccaaagggcattgaagtataacaataggttcctacaggggtaatgaacagcagtttttcttcatcctccctagccatgcgaatctgatggtaaccagagtatgcatctagaaaacacaaaatgtcgcacccagcggtggagtcgacaatctgatctatgc

SEQ ID NO: 29742 - DNA, 374 bp, Oryza sativa
  unsure (1)..(374): unsure at all n locations
ctcgtcttcgcctnccctcgtacgttgcgccctagcgccgtgtagcttcgagccgccgtcggcgccgtcgcttcatccgtgcgccgccgccgttccagacgtcgccgtcgctcgggaaaaccgccgtcgtggtcgccaagtcgtcgccgtcctcgtccgctgcttcgccacagtcggagaccgccggagcatcgtcgccgtcgtcaaaccgaagaccgccgccgtttcaacctcgtcgccgtcgccgtccgttggtcttccgctgctcttttggtcaccggtgagttcgccgcgtcgcgctctacccgttggtgcctncgttcgtgccgaagcgccgccgttcgtcagcgagcgtgcgccgtccgagccgtctg

SEQ ID NO: 29743 - DNA, 381 bp, Oryza sativa
actcttaatactaagcttaaatatatgaagaactgaagtcaaataatcacttatattctcatgtgttcagccctccgatcacataattgtataataaatggcagttgctgagaggccggcagttggctgtattatgggaaaaaaataccatctccgatgttgccaactttttttttttcgaggaagaaacaatgatacgataagcattggctaactctatgtttaacagttatggtaggtagaggatgcaagggttattcaaaataattcggctttggaaaattaaagacggtaagaagtactgtatcaagctagagtataatataggggtaaatatttggttgggttagataaactaccaatatatgctcttgttgtcat

SEQ ID NO: 29744 - DNA, 449 bp, Oryza sativa
  unsure (1)..(449): unsure at all n locations
atgttcggcgcagtactaatactggaacttatgagcattaattgctctatcaatcaccatctactttagacatatcttctgaaacttttttcaaatccaaaagtccagtatcttcctacaaattagtgaattatgaggagctctntgtgccgaaaaagaaagagcagggcaatatttcaaacttgcattcgaactgcgaaatatttatacaaaggaggagagatcaagataatgcagcagggttggttatctaattggctagtcaaacatgaggtggttcatagatctttgggcttcgatcatcgaggaatagagactttgcaaataatagcagaggattgggattccattgctgtcattntatatgtatatggttacaattatttacgttcccaatgtgcttatgacgttgcacccggtggatacttaactagcgtggatcatcttac

SEQ ID NO: 29745 - DNA, 145 bp, Oryza sativa
agcttagctgccgacacgatcatccagccggttgaagaaattttgatttgaattgccacctttggaatatatctccgtcaccactggactggagtcgtcaggtcacaacccaacagattggtacaggcgtatgccgagcttcatg

SEQ ID NO: 29746 - DNA, 432 bp, Oryza sativa
atattttcacagcattggatatcactttcggtagctgtgacgttgatccggttattggaagcttatacagcccaactcgacaatgctttcataccccttgtcttctatagcctcctatgtctatatgagcaaccatttgtatatcaaactaccttgaggccctattcttaccattactaatatctagtgactagtgcagtacagtataggtatagccctttgatttttttcttaaatcctcttattggtcgcattctctgttttcctggaccgagaaattgtgtccattactaaaaagttgagtttaggtttaggaaataaagatgaaaatatgaaaggttgtttagtgaatccttcggtagagagcatctttggtattgtaatgtatacaccatatatatatttctggtttgttcagttggccacttaccc

SEQ ID NO: 29747 - DNA, 296 bp, Oryza sativa
  unsure (1)..(296): unsure at all n locations
ncaagctgtcgaaatttgagtcttttatttgtgtatcccccgactctttggttagttgagaactgtagcttcttgtcatcgagtagccatcacttgagtgaatatatgcattgagtatgtctgagtagaaatattgaaaaatggaacaccatttgttgtagtaaaataacacggcattaaatctaatggtgcatgccgagatgtcgaggctcttgtatacatcgtggttggtgaagtagaaaaacttgcgaagtagcaacaattctgtttgctagtgcagaagacaatgaagatga

SEQ ID NO: 29748 - DNA, 459 bp, Oryza sativa
  unsure (1)..(459): unsure at all n locations
ntagtatactactctgtactctccctcttatttcaaatattctaattaagntaggagtatatattttactctgtgtgcacaagaattaattaacaatgtaactgatcttctatttatttgtgagaggaactatttattcgtgagaagaatggcgttatttgatatgggcaaacatggataaaagagtgaaaaagcgcatacaagctccacaaacagcttatatttgggaaagggttaaagaaattaaagcaaaacaacttacattcagagtcaatttcataaaacacctatatagatccaagttgcacataaccatatgattattaacatgtatcacatatatagccccagctattatggccttaaatgttcataagactggactgttgatcattntgaatttgatctgtcagaaatttagattatacaatcaacatgaggtaccactgtttctattat

SEQ ID NO: 29749 - DNA, 468 bp, Oryza sativa
  unsure (1)..(468): unsure at all n locations
cggacctcaagcacctgagctgcagctgaaacgacctgtatttgaggcttattagactttcgncntgggctggctgaanaacaaaggaaagaaagaaagagaagagggagctcggctggaccgacttgggctgcacagccgtgcacacaaaagagggagatgggctgaaaagggcccaagactaggaagaggattattattacttttccaattaaattaatcactgaaatgatctttgaattgttaaaaatactttcaatgctcgaataatttcaagaaaaatcctgaaaatacttgaacactataagtatttaaaaaaattataatcagaccatttaatgattaatttaatatgtgaataatttctgaaatggctcttgtattaggaatngagctccgaaaaatccgagaaaattcagagagataattaaccatgagaatttatannaaataatcatcatgcttata

SEQ ID NO: 29750 - DNA, 461 bp, Oryza sativa
  unsure (1)..(461): unsure at all n locations
ntatgtgctgcgatcgtgcttgtcaacttgtcacanaatgttgccatcacgaattttggaggcggtccgctggggaagtctgttcaacgacatctcaacttcgacgccaccatgtcgaagcaacgcatgcaagatgtggatccatccaatatcgttccaatctcattggacgatcttgaggaagatgcacgcaagatcgtggaggagcgacttaaggagattactcangaggtgttgatgaaatcatgcaccaagacctgtcaaggtgtggttctccagcccggaccgtcgcccaaagtcatctttggtgaggtaagtacggaagagcttgcaattcctattcaaaaactagtagcaagtacagtagatgaatccgttactgctgttatcaataataaacttgatactgctgtgaaaactaagtttaatgagtgcattanggattatatgagttctaaatt

SEQ ID NO: 29751 - DNA, 421 bp, Oryza sativa
  unsure (1)..(421): unsure at all n locations
tcaagcttgagttctgaatgagtgtacttggttgtgtcnaaaatgtcngtacttggatctggatgctgctttacaccatgtcatgattcangaagaaggttactgctgcctaatcaaaatgagagcaatacgaattgcattgttgattgttctgttccatcaattgggtacagcggtgccaatttgtagtattattgagagatcatgggtaaggtagagcatgattcttttgtcatggaagagtaggcaacggcgtagtgggctcaatattgcgagttggaaggtaacgcatggctgtagtatgtccttgtcactgcactcacatgagggtgtcatctttgtcttgtacagacggatagagtcgttacggatattgttacgcatgaatcagctatacactttgttaccatcagaacaaaac

SEQ ID NO: 29752 - DNA, 461 bp, Oryza sativa
  unsure (1)..(461): unsure at all n locations
tgaatgacaggaggaacttactgtgcttatgaagcaaatcttactataccatgagagggttcttagtgtatcgactgttgatgctgatctaccgtccttgtaagaattaaaattctggtgcttactcttctggtctttcacagttcatttcattgtcatcttaaagttgcagttatatgttactgaaactggatctggatatcttgcaaattacaatgccatttaaactctttatctcttaaggggaaatagttttttttttttgagaaaaatgtgcattcatctgaaaatagtatagaatcaaccgatgaataattttcccatcatcaatatataagtctactttcataattntaatgatatttatcaatggatttcagtatcaacaagaagatggagcagatggagcaaacaatagctagagcaaaatcttgcactgtagattgtcgaaatgttgacag

SEQ ID NO: 29753 - DNA, 434 bp, Oryza sativa
  unsure (1)..(434): unsure at all n locations
agcttgngagagtcatagtgattntancatttcttaccatttgatacaactactcttgccaatcacctgaacctgaatgtgttgtttgagtagtggagtacgtaaatggcacataaatgtcaaggttgtcagcacacaaatagatacattagtggcgatgttatcaaatactcccttcggggtcgatagtacttgtcgtcatatataaaaatatcaacaattgaaatattttttaaaagtaatcatattctagaaattattcatagtcaaagattttaaactctgacctcaccattatccaaaatgacaagtattatcaatccagaggaagtagcaagctaccaacggcatgaatagggatggcatctgcgagtgaaatctgctcatgcttataactggaaaaaattacagagagaagtgaccaaaggaaagat

SEQ ID NO: 29754 - DNA, 466 bp, Oryza sativa
  unsure (1)..(466): unsure at all n locations
ccttttagcttaatgatccctcttggcagctcatgtattttctatgtacagaggtccagtgttagcaagttggagagcttctcaatagaatntgggaggagcttcacattggaatcccgcaggccaagatgtcggaggttgaatagatcacctatggcatctggaacattgtcgatgggtagcccgcttaactcaagtactgacatatatctacacttctcggatagcagaggtagcagagtggatgatggcatggctntatccaatgcgatgaaagatcgaaggcggcattcacttgaaattacttgattaatatccttgtctaatctgtgtattaccatccgtcgttcatcattctcctcaagatactcgaaacgcttattctcacaactgtatgaaacaccaaaacattctctccggcacatatcaactgccaactcgtgtacgatatcatgcattctgaatg

SEQ ID NO: 29755 - DNA, 453 bp, Oryza sativa
  unsure (1)..(453): unsure at all n locations
agctttatacatgagaattgttacgagaactattaacttatatttcgatcggatatataaacccttaagtactgttggcttaaaaagaacaaacaaacatacgtgcagctataaagccaaaaaagagtactacactgtacgttgaaaccgtatataccggaaagtgcacacgagtggaaccgtctataccagaaaatctacgtacgagcacataattgaaaagaaaacaaaaactttaggtactgattatttaaaatttaaaagaacatacgtacgtacgataaaaaaaactattaaaaaggtacggctcactagaaaaaaaaatgtacgtatgcgatgcgttagtagacaaaaatagatagttntttaaaatagtattttctatagtagaanaacaaaacttattactctacaaatatggtaaaaaacgtacaatanaaaaaataatatatg

SEQ ID NO: 29756 - DNA, 386 bp, Oryza sativa
cttgatctctctctcaagtttagtttagtactctggtgcttagtgaagtagaataaaatagttctcggagtccttgagttttcggaagatttcggtatggctctagtagcttttctttcttcttttgtaagacttccggaagtaatagaaaattcttctttactttactttgcctgagtaccggttttaatttatatttgtgccgatatagttgtgtgactagcctgccatagaggtgcaatggtgtgggtttaatgttctgttaatagtggaaattggtaagcccctaagagaattatcacatcgccaatagtcagattcctgctatattcgattaaggaaattaatctattaaaggaagcttgcccagaagtgaccgagttcaa

SEQ ID NO: 29757 - DNA, 456 bp, Oryza sativa
  unsure (1)..(456): unsure at all n locations
agcttaagacctatttatggcttgttcggatcgtaggattcgagggattcatggaggaaaaatggaggatttcgattcctatagaaattagtactggttatgcattcggaacggaggattcttatttaggaaaaatagaggaaactttcctacggtggtaatttcataggaaaactgcagggaaaaaaaatccagtcaaacctctttgtttgcgttcccattgcgtaggatcgaggcaaatgaagccatgatgccactaatgtaaggcttgagcatcattaggcttcttctttntattatttagtgctattatttaggataagactatggttaactctctaatcagctttgcacatatcatcgtttcctgttttcccatggttcatcttgacatcctccgttcctatgaaattcctgtattttcaaatcatatagtttacacatgcattcctatcg

SEQ ID NO: 29758 - DNA, 462 bp, Oryza sativa
  unsure (1)..(462): unsure at all n locations
tgtanaacaaatatgagatatgtgacatatgtctgaagtctataatattnttagatatgtcccttgaatgtgcaccgagttttgacatatgatatatatcctggaatatgtactggattttgagatatgtcactaagtgagtaccagatttaatatgacacacaccttcaaatacgaatgaaatttgtaatatactactatattacaaggtacacacttcaaaatcaaaatcagaggtacacataggagcaacatcatataaacctcgcaagctgagatacaaaatttgatatatgttctcagccactgcaaaatataaacttacatatgctcctaaatatatgtacaaaatanagaataaataataaaatagcacagtgtatagaataaaaaattaaagacgcacatgtacacagtacatacatagtggtgagacatacatgcatgccatggattcaaaaa

SEQ ID NO: 29759 - DNA, 418 bp, Oryza sativa
  unsure (1)..(418): unsure at all n locations
atgtcgcttatcttcattcaagaatgaatgccgatatcccggtggggccccacttgtcaacttccgaccggagcaactggtgagatacccttttttgcaataattgacataataaacagatcgtattattattggttgatggatggaattgcttgtgtccaagctatagtcctcctatcaactgttactactagtaggaataagctgtcttgcccataactcatgtgcaaccatgtgctgtagctgcattctgcttgtctttgctgatgctntgcctaactgaaatcattngcacacacaacttaactgggattcatagattgcaaccttttcttttcaccagaaaaagggctgtctcttntgcttgcttttcaatataattccaccgctctcatttcctttgtgtcacagtactgat

SEQ ID NO: 29760 - DNA, 348 bp, Oryza sativa
tctggtctgtggatgcgaaccgaattctccatatcccgattgctcctcagcgggaggatctgatcgcttggcacctcaaccgaaacggtttgttctcagtcatatctgcctatcactgtcaatggagtcacagctttaagagctttatccatcaaacccgggcaactgccccccctggcaacatcagtatggaaacagctttggaggctatcgataccgagcaaaatcaaaatttttggatggcgcgtgcttcatggttgcattccttgcttcgttacgttggcaaacaagcatattatgtgcaaaacataatctgatgacgtgagacatgctttgtttgcctgctct

SEQ ID NO: 29761 - DNA, 203 bp, Oryza sativa
gtggaaaggagttagagaatccaaaaatctaggctgtatcaaacatcttttgcacattatcttgaacgatatatttgtacatgcgtcaagccaaattcacgctctacatttataattggatgaaactactacacacacgatgttgtaatttttcctgcaatggcataatactacatgggcaccttccttctctcgattttttg

SEQ ID NO: 29762 - DNA, 427 bp, Oryza sativa
  unsure (1)..(427): unsure at all n locations
acctcgtagtggcgatactgatgtcacggccgggtatctagaanaacttatacactactgtgctatctgttattggaaaattcaattggtatcttgtattcaatcatattgtcagcaaactggttcactaatagaaatcgacctcatctcttccctcatcattatgcttatcacctcaaaattaaattttcaaccctaaatttggacgtgatnttgagggtttttcatcgaagcttatttttcagcctttgttgctagatcactcagaacacgtatataaaacgtttattcataaattacttttcgtttacaaatataccgtttcgcttactcgcgaataagccaaatgatgtgacaagttcattttataatcacgtgatagacaaggangatgtgaatgaaggtctccccacaatgcggatcctat

SEQ ID NO: 29763 - DNA, 193 bp, Oryza sativa
  unsure (1)..(193): unsure at all n locations
tgtaaaaaatattgtaatatatatattttggccacacttttgangtatgcaatatatatagatttctcagtaccaaatgcttgataatcttccaaaatatgtacataataatctacctgcaagaatttctattaaataatttaaaagtagtttaccggccaattattattaaatttcaatattttctacctac

SEQ ID NO: 29764 - DNA, 465 bp, Oryza sativa
taagctatatatagaaacgtgagaattggagtcgattgctaacatattctgatttctactggtccaaaaaaacaggtctcattatccattgcattatccgttaccattatttgttcttgctaaccacacaccattctttctgacattctttgaatccgaaaacaagcttaacgaatgatctatcaatgttgtcatgcgagatgaagcaagttctggtccccataatatccgttgtcattggaaatggaacactagctttcatggccattaatcctcatgtttgccatgctgctgcatgaagaaatgctactgtggcgagaagcatcttcgtcagcaagataggtagtggtgctgatttcacaaggatacaagacgccatcaacttcgtcccattcgccaaccggcggtggattcggattcacatcgccgccggcgtctacaagttacacatgcaatttcattctt

SEQ ID NO: 29765 - DNA, 309 bp, Oryza sativa
  unsure (1)..(309): unsure at all n locations
agcnttgaaactgcaattgttgatacgtcattatgcacatttttgatcaaagnggaantctacacattgtgcactcgagcacttgtaaaattgatggtcgaaatggtgaactgaacctattctttatccaatcaacaagtagtagtcaagaacaaactacatagatcaaacagaaacagctcctggttgatggagcagcagcatctggagcagcatctcgttccacacgtcgatgggtccagagaggcaccagtgcacgcagtcgttgtacagcgtcaccttctcgtgcgcgcagtgcccgtatctgct

SEQ ID NO: 29766 - DNA, 111 bp, Oryza sativa
  unsure (1)..(111): unsure at all n locations
tcataatgcccncgccgaggacatcgatgatggcgataatgacctatgtttccaagaacctgtggccaccattgccactgtcgatgggggagcgtgtgctcacgtctctcg

SEQ ID NO: 29767 - DNA, 456 bp, Oryza sativa
  unsure (1)..(456): unsure at all n locations
ctggcttgctagatggtgatcatggaatcaaaattatcacttccacccganaaatggctggtgcagaacgtgtcggtggtgctgtttatgaactaaatcctctttcttatgacgactcctacaagttgctcaacatgagagtatttgacactgaaaacaggttcgctccggaattgagtgaagtcaccagaagtattttaaataaatgtggtggtttaccattagctataattactatagcaggtttattagccagtataccgatgcanattcaggaatgggagaaggtaaataattctataggctntggacttggaaataccttgatgtggacaacatgaggaanatactgagtcttgattactatgacctacctccacatctgaagacttggctattgtatctaagcatatatcccgaggatgcgattatcgcgaaggatattttgatttggag

SEQ ID NO: 29768 - DNA, 436 bp, Oryza sativa
tgctgtgtttttctcaacgcacaagccgttatccatactttctaatagcgtggaatccaacgtacttctccaacttgtgatgtctattgtcctattcacaagacgaagaatcacgacttctcaagctgcaatgtctttctccgcgccatgaagacgacgctttccaatgtccaacagtcatgaacctctctcgaggagacagacaatgaacaatgagcgacgttgacttcggatagtttcgttggagtaatcgatatcgatccccgcgaaccatcagtccttcacttgcttgaagactatggctcatcatcttccagtacaccacgcgacgtattttccatcgatggaactagcacgtctacacatgctaatgcagatgcggagaaccagacggtcacgccagcccaacatctcggcaccgtcaatgcaatattga

SEQ ID NO: 29769 - DNA, 385 bp, Oryza sativa
  unsure (1)..(385): unsure at all n locations
agctgcaatggttcggcaatgttcaattgtcgcccgccaccgtggtcaatcctattatcaaaccatggccgttccgaggatgggctttggacttcattggtcaaatttatccttcgtcatcaaaggggcataagttcgtgctaattgctacggattacttcaccaagtgggctgaaaccgtgccgctcaaaaatatgactcatatgaaggtaattgactttattttgaagcatattatccatagattcggtattctgcaaacattaactacggatcaaggggcttcttttatgtctaaagaagtgaagagtttgccgaatcttatggtgttaaatttttgagttcttctccttactacacttangctaatggacaagccgagtcg

SEQ ID NO: 29770 - DNA, 439 bp, Oryza sativa
  unsure (1)..(439): unsure at all n locations
tctgctngtgttagcatttgcagattctataatttcctatcatccatcaacagacgacagccaacatttcctctggctactacaccccatccacctcctgaatgttgaaagaaagatccatcaatatttagcttttatcattccagcagtaggtggtttccatgagctaacagagtttgtaagacatttattttgtttagcttttatgtgctgatctaagtcagaaactaatcggttagcgagaaaaggcacttcatgcagtagaaaataacctcccccttcaaccagtttgttttgagcataccaccacaatcaaaacatagttaagattttaaactatttgctttcctccagcgtccatatttcctctatcacgtgcagtggtgagggacaacactgcattatggataaaatggggaaacatatgacgcattacgcg

SEQ ID NO: 29771 - DNA, 418 bp, Oryza sativa
  unsure (1)..(418): unsure at all n locations
agcttgaagtgatatggctctatgagagatttattataangtagacaacatagattaatcatggaaagataaaactaaggtaaatatgacttttgtagagaagaaaactgtagaatcaaagtgtgtttgattattactttgtgatgaataattagcatgcgtgatgattggattttaatattcggagataattggcgaaatgggttgctgattgtgtaaccggttagatcggatggactaggccggtcagactagccggcgtgatggtctgaccggccggctctgtgtcaatttcagtttcgggttggttatttggatactcatgattggntcatgtttatgacttctagatcgatactatgcgtatngtgatacaatgtgtgctaatgttgactcaagttggagagaacatgtgctc

SEQ ID NO: 29772 - DNA, 453 bp, Oryza sativa
  unsure (1)..(453): unsure at all n locations
tctcatctgcttcaagacgaattttntgagtaataatattatttttatggaaaatagcaaaagtagtggtcaaccggggaaaatcgcgaaagtaggtccctgtcgaacgggtgcagttcgatagggcgcctatcgaacggtcagatcgcgactggcgaggagatcggaatgctgncgttcgacatgacctgtcgtacatgccccgttcgacatgcatggctgtctaactgcccctgttcgacaggatggctgtcgaaccgtcgaactggcgcagttcgcagttcgacagggtcgcgttctccatttaattgtaataagttattttttttaataatatgtaatttattttagtgtgtaagaaaggaaaatatttttgtaatgttatatgtatatgatttannggtttgataatgtttggtcagaaaatgtagtatttatttgttggtaaaatat

SEQ ID NO: 29773 - DNA, 320 bp, Oryza sativa
tgcagctggtggtgaccgacttcccgatgtcgttcttatcgcgccgccgatggcgttgtacgataggtcaagatactgcagcgacggcgtgccctggaaaagtcccggcggcagcacgccggcgatggcattgccgtggaggtcgacaacgtgaggttccggcagccggcgatctccggcgggatggcgccggagagcctgttggtgctgaggtccaggaagctgatgctgtcaagcttaccgacctcgggaggtatgtcgccggcgaggtggttgccgctcgccctgaaccggaccagcgacgtgcagttgccgatctc

SEQ ID NO: 29774 - DNA, 466 bp, Oryza sativa
  unsure (1)..(466): unsure at all n locations
ggctggctctgaactttntagcttgtctttaatccattcttcatgtgtacttgtgcagattgtgtagcagcgcgacgggcgtctcatcgtcagcggcaatacagcgcggcggcggcggtggcttcatcagcagctctccaaccagcctccctcgtctccggcgaccgtaccgccgccgccgatgtgcctgacacggccggcgtgcagcagcctgaaaatttaaactcaatttgtgtggttagttcgactgttcatgttggagaattagttgggcctgggcctcccaaccataatgggcctaatgtcgagcggcccatagctagcccaacaaccagttgcatccgagagtaatgctcttttatagcagtctctctcgcagaaagaaaatggaagagctagcagagaaatcttccagctgcagctggcagataatgatgatcaatcaccacccctacagtgatatatt

SEQ ID NO: 29775 - DNA, 465 bp, Oryza sativa
  unsure (1)..(465): unsure at all n locations
tctccatggctatcaagggttcttctccttntatatattattaccaacaatactgcttatttgactggtgtatttcgtttgggcattgagaccaaagagaacaaaatctctcccatttacaatttaacccacatcaaatacaaatacagtcccaatgtcttctgtggcatatacgcacaatatatggtgcaatgccgtgagttagttactccaaatcgccatcaccgtccatcgcaccaaatcctgtgtatcacctcacgccatcgttgtgcatgcatgtagtgaagtcattcaatgggtgtcatcccaaacagacacatgcatcaagtagaggatacggngattacacgtggataagataaacaagttatatgtacatcatttcttagatagagagagtaccctactaaaattagattatcgaaacccacgtaccctctatttcagtttaacgaaacatatata

SEQ ID NO: 29776 - DNA, 359 bp, Oryza sativa
  unsure (1)..(359): unsure at all n locations
catttcacatcaaacttgcccgcgactcccaactttttatcacatcacatccaaaacttttctacatacataaactgctaactgtttgttcctaaactaccaactttacccaaacttctgtcccatttcagaaactaaacacaaccatgggtgataatttgtggcaatcacaagtgggcagntatcatctgccatactacaaaattagggagatgcttgaatatatggataggtgtgcacattgaatgagatggtgtccggcccctagcctcacatgcatgtgagacctattntacgtcgtgtgagacatgctggtcgccatcacacgctatgtagaggggaaacgaaccaacaataat

SEQ ID NO: 29777 - DNA, 419 bp, Oryza sativa
  unsure (1)..(419): unsure at all n locations
ngagctaattacatatcttntgcccttactgcatgtgatctttatgatatctagtgaacccgcaccaatgctcgatgataatgagaagtggtgagtgccatctaatacaccatgaactgttgtgcttctctgagtacctcagtaccaggaacagctgataagagcatggttataaaactttcagaccagagatcatttcaaggctcctgtttcttttgatctgtgaagaaattataacagtgtcagctgtgacctatttatcaaggaataaactatacattttttttgtgcgtgttggttactatagttagcaagtttcataaccgatgctgaaccaattgtccatcaatattattatttccctgcacataacaatgtagtcatcacgtatttgacataaattatgattaaactcctct

SEQ ID NO: 29778 - DNA, 412 bp, Oryza sativa
cgacgacagcatatccccttctcgatccttacgttccacgtcgatggcaagaaaatgctgggctatgacatccacactcccgtacacagtctcgtcggcatcgttcacgataacgcagacgacattatcgttgaccgtgcgcaagacagggcacaccggaggcggactaatccgcggcactcccatgacaacgtacttttcgcttgcccaaatgtctccgacacgacactccgggcctttcctccactcgccgccggagtccagcgacaggatccagatggccagcttcaaatcctcagcgaccgtgtgtcctcttcatgtcaacgaacctgatggcgccatttgtggacgttggtcatgaggagctcggcgaggacgacgtatggcgccaccgcaagtgaaaagatggatg

SEQ ID NO: 29779 - DNA, 326 bp, Oryza sativa
  unsure (1)..(326): unsure at all n locations
tgggctgggcagcacttcagtggtcttacctattcctatttattcatagtgagatacctgacgaacaatcggttggtcatccgagttcggaatatggtccttctgaagaaaaatgtctatcatctgtattgtgaatcccagatgttgtgtgtggacaacagacctgacttgtgaaggaaacatcttatcttgtctttttgctctcttttttgcatatgcccatgtacatgttagcgtaagtgtcgctgtctaactgcatgggcttagcggcgtctagcccatggatagataggttgtangatagataagttgtaggatagatgagt

SEQ ID NO: 29780 - DNA, 317 bp, Oryza sativa
  unsure (1)..(317): unsure at all n locations
acactattctcnatttttggatcatcaagctcttcatcactcagagcttcttgggtgcttttcttttctttaatacactccagaaggtccaatgcgctatcagattcatgcagtgttagcttactaagtggcaaagattggctaacaagtgaacttggaccaacaagagaatgagatctcttgacaataaccaaaaggtcattgtaaattccctcactggacttaatcaaaagtgcaagactgtctggagtgaggatgctcaaatctgtgggagtctggactgccgtaagaccaaaaacatcagaaaaatcgaactc

SEQ ID NO: 29781 - DNA, 358 bp, Oryza sativa
  unsure (1)..(358): unsure at all n locations
ctatataaaacctcatctatgggtgttttggggcttgggacacatgcaaactttagtatttccacttgtcatgtcctaatggtcccgttggttgtgcctgaacaacttgcctgaaaactacctgagaaatctatcaatttatcctgactgcagcctgaaacaatgtctatttggtttgcccatgtgcctgaggtgtactaatgttgtattaagctttcaaaagttacgttgtcaaggggttgattaatactaactaacgggcaacaatatnatggaaatataaataattcgcatcttcatcaaccaaatttctatatgatttagcttcacaatagcatattgtgattagactattata

SEQ ID NO: 29782 - DNA, 447 bp, Oryza sativa
  unsure (1)..(447): unsure at all n locations
cagcttaacatataaagatgtcacatcatcatccactatcaattattacatttaaatatcatgcaagcatgctatattatctataattttataatttactaaatttatagtttttagaatgccagcatgttaaatcatcatcccacataattcacgttatatttcaatagatctctgcatcatttttttataatatcctcacttagtttatgtcatttccctcttttctcattaaaccatatcataaaaattgtttttagtccttatatgattattaatctatggtccaaattatctccctccttttcttctcttattaagtcatatcacctcaattgtttttagctattagatgattaatctatggtccaaactatctcccttcttttctttcttataaaaccacatcaccttacttttacnattgaatcatcattttatatatac

SEQ ID NO: 29783 - DNA, 329 bp, Oryza sativa
  unsure (1)..(329): unsure at all n locations
actataagctaataaaacaaaattaataactacaacataataatacccgaacatatatgtgcaaaaaatagttttatgttgacacttgaaaagtatgtaatttcgcttttctcacccaaaatcaagtttccttttttttttgccacgcgctacctcacaatttagttgggtgccgcttaataagaatataacttatagtggtaataacaaaaaatttcccatagagatatttggatgcttctacctcttggttggtgtaagtaaccttgtatttttcgttgtcagacacttggtgctcaaactcctcaaagttgattagcaatntaata

SEQ ID NO: 29784 - DNA, 407 bp, Oryza sativa
agcttaagtttcgcaagtggcggaagttggtgtgagggatactactgtggtggtggtgggaatggatctgatcggcgcgcgggattggaattggaagggaagagcctgaggaggaagagggggagggaaggaagaccgatagacgagtagtcgaggagactagttgtgttgtgtcgtcctgaccatgctgctggtgctcgtcttgttgcgttcgcatcctttgacttgttctttcttccgcgcccacgccacgctcacgtacgccacgcgccttcccctctctctctgcaaagcctattcggttctccacttctccaccacagtttaccggagaaactattttcatcatctcgttggttacatgtaactttgttatggaaaaaataaaaaaaattaagaagatgtat

SEQ ID NO: 29785 - DNA, 443 bp, Oryza sativa
  unsure (1)..(443): unsure at all n locations
agcttagctgcaaggaggctactttctaagtggttgaactgacacttacccaatccacttgaaaataatatctggtctctttgtaaatatagaactgctcaatccttgaggaacagaattgttgatttcaactgcttccttcaaattctgcaggtaatgaccacgaaaagtagtgtaaatgataatgatctggtccaacactatacaactgacaccaaacattacagatcaataacataaaagcaaagtaattgaatcttttatacctgaactttcatcacataaagaacaggaccaaagagttcttctctcacaaccggtgcagagggtgaaatttccacaattgttggctgaacaaagtttccctcagattcaattgcagatcctccatataagaattttcccccctgcanattaagatgtcagtcaaattactgcttaca

SEQ ID NO: 29786 - DNA, 375 bp, Oryza sativa
  unsure (1)..(375): unsure at all n locations
tttcggtctgaagctgagctgagtgagtagcccatgcccaaacgagaccggaacccatcgcgtcgtgattggcttgaccgatgagatgcaaatgcggctggaaaaaaaaaaatggctggcagtccccgatacgacagcagtatgcatggagtcatggagatccgtctcgggcacttcacttcgatctgcaagtgtccaagattgcagctccatcccaaaataaatttatttatggtttcttcgatatttgactgtccactttatttaaaaaaatataaaaaaatcagcgtaaagtattatttatgtnttattatctaataacaacanaaatattaatcatgaaaaagattttataagatgaacgggtagatgtcg

SEQ ID NO: 29787 - DNA, 435 bp, Oryza sativa
agcttgttcgatttggagggaactgaagggatattgatgattattattccccaccacaatagttatggaataaaatcctctctaatccctctccttggggattaactgaacatggcttaaatagaaaagataatgacatacaaagcaatgggattgaagaatggcacccacaactgagtttgagatatccaattatttatccaccattagttcctacagtaacattttgatggcgcctactagcacggggaaaatctggcctattccatccaagatcaactggaatattgcttatcaagcactccgagcttatatcaaatggaatatcaccttgggatattttaacatatatttggttattgaacatttagaacatgcacaatatttgtgcaaaaagattataagaaactattggactctcagattggatcatct

SEQ ID NO: 29788 - DNA, 358 bp, Oryza sativa
  unsure (1)..(358): unsure at all n locations
tcaagcttcttcactctggactgcttggctcgatcttccgtgcagattgattttctcttatctgacttgtccctggttgaacctttagctgactttgactgggttgcggcacttgaagatagggcttcagatccagaacttctcatagttcatatctgtggtgtcaacctcatacaacttacccacttcactagcttattattactangataccatgcttgccatcataaaaatatcatgcttgtcattcacttttaacttgccgcatactgcctcggattaactttcctgctctccgggtgctagctacttctgctattcgatgcaagggtcgataacctttgccttgatccgaaaa

SEQ ID NO: 29789 - DNA, 440 bp, Oryza sativa
agcttatgacctatgtaagttaaactgtatttctaagatatcaacatcacctcaagttaagaacagtccaaataaaacttttataaacatttacatgcatttaggaaaagggaaacacatataagagataagtcttgctaattatctaaaataattcgtgcaagataaaatcatgggaaaatttatgtaggctctacttaacatatacaactcaactcactgtaattttggtacaatttaataattaaatttgataccttaaataaacaagtcaaactagtcaaataatagactaaatatagttcttaatcagctaaaaccatacataactaaaatgtgcatttaactgcatggaagtgtataggggaaataatttattcatatactaggttaattatcatgaataaatataatttttccagaatttatcctctctgttt

SEQ ID NO: 29790 - DNA, 433 bp, Oryza sativa
tcaagctttgaagtagggccttgcttcagaccttaattttagaaagaaagtatgtagccatatttttaagtagtaaatctaaaacaaaatcagttaatttatgcccccctttgatttatagaaaaaaaaaacatcggaaacaaattcttcaaggacttttgaaacaaatgattgaatcatatccttttctttgaaatttctactgaatgaataatcctatagatattttggaggaaagttagaagtgctccaaacccttggaagatttacttttgagttcctctcttatccgctttctgtgttttcttatggtctattcaaaagattatttatgtattttttctatgttttacaatccaattttttttcaatcttgtggagccttaggttgagaaaatttgtagcaacaccaaaaataccaaaaaaaaaacta

SEQ ID NO: 29791 - DNA, 469 bp, Oryza sativa
  unsure (1)..(469): unsure at all n locations
acgtgaactatgaaactcagctgaaactatcatggacctttgagaactttattatagtaagttttatatgaagcatgttggttagcagttcataaagcgggcttataaaaaacgagagagtagttcaactaataaaaaagatagctaataatttcaatcttcacaatcttatatgtccctaaataattctatctttcaataagcaatcatattattggagcttgtcaaaatagcaggtgaatgtattaggattagataaagtggagaacaatgacatatactagtatgtcaagggtattctagtactctnttggcctttctataattctattggtagctgtgacataggtgaaaactaaaattactttgggacgggtctgaattctgtaaccactagtcacaaaatctacggttagaattaaattgttggaggggctggatttcatagaatagcttattacgagcaaca

SEQ ID NO: 29792 - DNA, 355 bp, Oryza sativa
  unsure (1)..(355): unsure at all n locations
ctgcaagctgcaagcttgctctgtcggctacatgtatatttttattgtgctnacgcctatntagttctcgaaaagaaatattttgtgtgtcatatccgatttttgaccacatattcgtaacgggattttgggctctaatgaaaaaactaatttcataactcgcctggaaatcgcgagaccctctctgtcctttccgcgactctccttttttttctctcctcctttcgcatattgtctttttccgtcacactctcttctctattacctctctctctcttcactcgttcttcacgctttcaactctttacctcatactggcttacttcctcttacgctcaccccaaagcgtctttct

SEQ ID NO: 29793 - DNA, 357 bp, Oryza sativa
  unsure (1)..(357): unsure at all n locations
tatagctaatcgcagaatagctagagctggatagcttacgcatatataggggggtgcctcgaactgcagagctagcacctgcatatagaattaaacccggcatacgagattctaataggaaatattgatcaaattgagtgtgcatggtcgtgtaagctcgcactcatatcgattggncgtacgtaacgcacgatctgcgttacagagaaatggccatcgtgcgtgagacgcagctgctggccaacgtgggttcagcgtgtattcttctgagatacggctaggcatgcatacatgcctaatttcttttagataatggattatattaaacccgtcctctacacaatgtgcggtgcatac

SEQ ID NO: 29794 - DNA, 227 bp, Oryza sativa
agcttgtaccaacagtccaagatctggctgtcttcttggatgggcatactgatacaggtggataaatcaacccagttgtgctggctaaatagtagtaattccatagataagctatagatagctctaggataggatgggatgaccagctatgcatggcaaaaggtatattcagttgtagcttggaaaacatgctccaccgttccaaaatactccttccgttttttaat

SEQ ID NO: 29795 - DNA, 441 bp, Oryza sativa
agcttcaagttctaaagctcctagtaagactaaagtgaccttcgatatgcttttggataagtatgagaagcaaagtggtgagaaggctctcaacaaaagaaaaagaccaagatcgcctcctggggagcgatttggtcattcaccaagtgtggagattgtggataccccatacccacacggcatgtatatccgactgggaataggggtaccatattcggatagaatatctttaagggactcgggttaaattcctaacttgtttatcaaggaaatacccagggtcctagtcggttacgattgtattttatctttatttgcctattccgttaggaatatgggctatatcttgtaatacggactcctcccactatataaagaggggtccgggtgcctgttggggcataacttttctcccagatcatacgatcaataacatactcg

SEQ ID NO: 29796 - DNA, 431 bp, Oryza sativa
tatccataagagaccgagttcaaagagaatgcggcatggcttgttatctattaattaagaatagtttgttagtttccttttatctttacgaaagtgtgtttagtgtcctataaggactttatcttttccttttatctttaggaaagtttctttcttgtccgacaaggacttgtatcaacccatgggtataaatatgtacaccccgggtctatgtaaccaatctatcgatcaatactactctcggcgcatcggcaccctctttcctgaggtttttacttatcttccggcgggatttgggcaactgacgcggggctgcatcggctttcgatctccggtgaaaggataagtcctacgttccgtcgggccctggtgaatctgtcggctacgttggtgttggtcaggctacatcgattcgatctcttggatcgctc

SEQ ID NO: 29797 - DNA, 433 bp, Oryza sativa
tatcttgtgcggcaagctttatttctgcccctgcagccatgatgagctcatgtgctcgagctcgatgaattacaggaaggggatttcatttgctgagagaactcctaatggacatggtagagaaatcaagcaagacaacaattggaggcagcgaaagaggaattttattggcaccttgatttgcactgcccttgtcgccatttgccaccacgagtcaagagccttttaccttgccttgcttgctctattcacgcactgaactgacaagtggtagctagcttgccaagccccgctgctactgaagcttgagcgaccccatatacacgagcacactgcaatttgatagaccggagtttgaatacatggtgaaagagatggatgtccacagtgcaacaataggaaatattagctagtccaaagtgaaaacatagga

SEQ ID NO: 29798 - DNA, 342 bp, Oryza sativa
  unsure (1)..(342): unsure at all n locations
acaagggctcaatatggacatcacgatntggccatgggagcggcggtgtcggtcctataagaggggaggtgatgggtagcggcatgtgaagatggtgctccaagaagaccgtgcggctggtgctgacgccgtcgcggaacgaggtggtgagcacgaagccagccgcgttccggatgagcgatgtgaaaccaatgagcgtgagggtgctcgcccacgagatgcggtggtaggaggtgcccatcccctcttttctctgctatcagcacaacccatttcgatgccgcatggagctcgggcggaggcttcccaagacgatgatgcctgccccttcctgtcttcctg

SEQ ID NO: 29799 - DNA, 435 bp, Oryza sativa
agcttccctgtacacgggaagcgctgcacttggataaagaattgagcgtgtaagggaaaggattaattctgttgatagtttttgtcgtagcctacttttcttgttttagaaagttaattaggccatctgtttgagggtaagatatttttcatgcctttaaatctcactgaagatattttttttaaagaaaatatataagagcatcaccgaatggatcctaatcccaaaattttaggctttttcttttgaaagttgcctcgaacagtttccctaattaccttcctataaaaaccagaatcctcttttctattctttaattaccttcctaaaattagaatcctcttttctatccttcttgctcttcactagttggtgtagatatcttttggtgatgctatgatagtttagtattaatcgcatgttatgagaacatgt

SEQ ID NO: 29800 - DNA, 381 bp, Oryza sativa
cgacttgctgagtactatatgtctcacccttgctctatataaatatatatatataggtcctccgctctgaagagaagataaagtgtagtgaagattatggtttcgtcctgggtcccagccgtcgcatgtggtggtgggtgttagacctgtggttccgctgctgctgctgctgttggtgtttcctcgtccgcgtcggcgggtgtattctcgggctgtctgagctgcaatctaaggtaagggaaataagctctttatttattttaacgattgctatgattcatatttgtcaccgtgggtaccagcactatgttcttggactggtaccgagatcgcggtttcgtaagaagcgggtcgcgccgttatccctacgacacgctcctg

SEQ ID NO: 29801 - DNA, 449 bp, Oryza sativa
agcttcagaccttccttggtggcagagacgatcttcttgccttcaaactccttaagctgaccaacagcgtactcatcaatggcatcaaccatgtacaggacctcataacccttcttcttcagcttctcgaggaagggggagttctcaacagccttcttgctctcaccaatgatgtaataaatctcactctggccctccttcatccgggttacgtagtccttgaggctggtcaactcatcaccactcttggtggagtgatacctcaagagctcagcaatcttggtcctgttggtggaatcctcatggatgccaagcttgagattcttggagaaagcctcgtagaacttgttgtaatcttccttgttctcagcgatctcaaagaagagctccacgcacttcttcacaaggttcttgcggatcaccttcaagatcttgttctgctggagcat

SEQ ID NO: 29802 - DNA, 377 bp, Oryza sativa
  unsure (1)..(377): unsure at all n locations
ctattggcatgcgagggtttcctgaaccgactaattacttagccagggtgtcccattccaccttgtgattgcactttgattatgctcgatgagtttcccataggagatcggccttatatgcgaatacgggacagcgccacgtaggcacggcttccgcatcgcgaggtttcacaattcattttattttcaaacacaccgacaccacatgtcgggttttgaaggcttcacaaacccatattctaagttttcgacaatcaacggtgtatgtgggatatttggtacacgcgctcatagagcacggataccgaagtaccacaagggtggagctgacaggaatcanggtagtaccacctacatgagttagtgcgactactggg

SEQ ID NO: 29803 - DNA, 456 bp, Oryza sativa
ccagcaagcatgcaagctttcatacatccatgccaattagaccaattcgctattgtctttgtccaatctggcggggtatatttccttccgcctgcatcaaatggctggagattatctgcttacctggctcactgagagtcaccaaagcattgagctttcactgatgtagattctgttagctgggctatttaaattggtagtagttctccctataaaatattaatttttatgcatgctataatttccttataataattacatctatctgaactctgttgtttgtattacatttgtgatcttccttttcttacagatcttaatatgtcgtttcatagagtcacaatatggcaccaagattacaccactctttatcacaattgatcctcaacgtgattcacccgctcagcttaaggcatatcttagtggtaagccgctctctaattctcatgccctaga

SEQ ID NO: 29804 - DNA, 267 bp, Oryza sativa
ctctcattgttgggttagctggctcatgaattacataaccacagtgagatactcagttaaattcaatggaactcttctgtctacctttgctcctacacgcagtctatggtacggagacccactgtctaccttcctcttcttgtttggagccgatggtctctccttattgctagacaaaaaggatcataacggtgatctttcccctatgcacatctgcagacaagccccgagaatctgccattagttgattgctgaagataccctatt

SEQ ID NO: 29805 - DNA, 388 bp, Oryza sativa
agcttgtgctaaagctataaataaacctctattgccttgtaatggggggatccccaaaaaatatttcacgaatcaatacaattgcttttacatttcaactactgttgagagaaccacgcctttcgacatggcataagtgtacattcgacaacagctggcgccgtccgtggggaacccaaaccgaaaaggcgaaatgggacccctttcaccacaccctttgccacagtacccgcgtggtacggcgacaagggctgggggcgaaagtgagttaagtccaagttggggggctacgaagccgcccaagcctctggacacctttcgccacatgccacgcccttctgcatagtaccaataaagcacggcgtcaagggctgctggcgaacaggtt

SEQ ID NO: 29806 - DNA, 418 bp, Oryza sativa
aagcttgccgttgctcattgcaaatttgaggggccaactcttagatctaaaccctcgcgaactcgatgaaaagtacacttggtattccttccgagtggaactggcttgactgctttatatcatcgtatgaagaattgtacatcttgtgacaatcatgagcattgacccagagatggcagatctttcaagatacaagtttctgacgttcgctgaaaaccaggcgggactttcacactatgcagcatctacatatttttttctcttccggatcagtgagtagcaagccgaggaatatcgatctttacatttggcagctctttggttgaactcatgccttagtcaaatgatgtgtcggtcggacttcaccatcttcgctactcggatatcagtaaggccatgggcttcaactattttctac

SEQ ID NO: 29807 - DNA, 421 bp, Oryza sativa
  unsure (1)..(421): unsure at all n locations
agcttatcatccacttgagcaaaacatatctatcttcttctttttaagaagcacttgaatcagttgggcaaatgtatacttagcaagtcaagtttcaaatcaagtaaaagaaaactgtgacctcagctaaaattgaccttcgggatcacctctgctagatctccttatatcctgtttgaatagtgggaaaatttcgagaaactcctaatctgcaacttgcatcaaatccttcaaaagatatggtcccaaagtttccaagaaaaaaaggaccaatgcatttaacatagaatcttacgctcagatatctttgaccagaatctctagattagtagttcattttagttctggttgttttacactattannattaattggactataactggtcgttattaccttcaactgctttacaccaagcaca

SEQ ID NO: 29808 - DNA, 412 bp, Oryza sativa
aatcattaacaccatgacaccaagtggcattctgcggtaaaataccaaaataagggggaccgatgggcaccggctaaatttggcattctgcacggcgcaccaaccggtaacaagggctttctttgaactgataaggctaaccggataaggtacgctttatatctttcgaaagcggtcaatccgagtttgtagatgtggcgggccatgaattttttgagccggaagatgcgaatatttaaggaaagacctaatatcaaattattagaaggggtgatactttgaacccagatcgtctcgttcaccatcttgtggagctaggccgaagaccctggacgttcctcaaatgtttggagcccaacatatacgcagacataatggatacacaatgaaagctcacatatagacatctaat

SEQ ID NO: 29809 - DNA, 382 bp, Oryza sativa
agcttcctgaaggagtaaatgtgtcaaggttctcattttcctattcacagcctcttggtcctaaatatggccctaactgtgatacaacaaacaacatttccatagcagattttttggatacacttaatagtgggcagagcatatcaaagtttttgtatttctacgggttcttatcagcgatatttctggcggaggtattatttgttttattaagatggtttattttgaggagggaggccaaacaactcaaaggagtatggccagctgaggccggatatgaaatgatagctaaccattttcgcaggtacacctacagagagttggtgttggccactagaaaatttaaagatgagcttggaaggggagcatcaggcgtcgtata

SEQ ID NO: 29810 - DNA, 443 bp, Oryza sativa
agcttgctactatccaattatcgacagaaagagatttgatgctttggaagctagaaaagtcaggaaagttcactacaaagtccttatatagagagatggtttttgggggcattaaagatgctcagcttcagattttgtggaagtcaccgatgcctataaaaataaaaaattttatgtggttaatgattaaggggagaatccaagttgctaaacaactgaaaaaaatgaagtggcctggcagccccttatgcaagctgtgtggagtagaggaagatgtggatcacttgatgttcagatgcccaccaactcagtttctctggtgttgttttagagatgcctttgggtgggatagaattcctactgacagaagtaaaatgctcgatatcattcaacatcagaggggggtagataacaaaactttgtgggtatatgttgctgctgga

SEQ ID NO: 29811 - DNA, 420 bp, Oryza sativa
  unsure (1)..(420): unsure at all n locations
gtatgttgggatattctacttgctttaatatcttttatatagtgtgatcggagtattagccgatacatgctagatntacctgatcagctatgttatgaatgcatataatcctactattaatatatatttcaatctaagtgatttatactgtctcggcaaggcgaccgatctatcccaatcacttgatttaagtatatactgatataaggattatatatcattaatgtctacagttgatcgagtagatntagctctgaattgcttattgatatttgccgatcgatgtacgcatgacatcggcttgaaataaatgatatgtcatcagcacctagccgatcggctatcatttataggattaattgcggtttctttgttctatctctttgtgattgaggatcaaatcaactggcacactcatac

SEQ ID NO: 29812 - DNA, 442 bp, Oryza sativa
  unsure (1)..(442): unsure at all n locations
agcttgagtagcagtaaagatttggcaaaacaggatatcaggttaattntgattggtaggagagtataccaaggttcgattgtagacttgtagtttctataagcgcgagatctaattagcgccgcttctgcccggccgtctgccgtgcgccgccgacgcgacacggctgcgcctgacgcgcaatagataattccgagtttttttttgaattcttaaattcaagtaaacttttgtatccccgcaaaaaaaaagtaaaatttcgtgagagaatttcttaacgtaaagtgtcatttcaaaactgaaaattttgagtaaaatttctaaacaaatgagaacttttaactcaattttgaaactttcgactcaccatttagaccaatcttggctacattgaggattcccttataagcaaaggaggggttaagcatgtaacctatattag

SEQ ID NO: 29813 - DNA, 406 bp, Oryza sativa
  unsure (1)..(406): unsure at all n locations
tattntatttatatgaccattatgttatatgagtgtgttgatctagtgttcaaatattaatgtatatatattcccatgaaacactcatttgtaaataagatcattatagtggtgatcgtcatttcatgtggatttataatacttcatgtgagattggatccaaatacattagatttaatcttactatcccattagttagctaaacctgacatcggcctatcaaaatggttcgaatatttaatatttgatttgtgatttataatagaaattaacatttgactttgactttatttggcttgctttcttgtgcactaatatttgtagggttaaacgtaaataatatattctcgtaaattacatctattgattaaatgtagatcttntctttactctttttgtgattact

SEQ ID NO: 29814 - DNA, 370 bp, Oryza sativa
  unsure (1)..(370): unsure at all n locations
agctcgaagaggacgagagagctcttgnttattttatatttggggcccacaaagaattaccaagggcatgagttgaagaaagaatgaacgatttacaccattaaatcatgataggggcaaatctctatattattacagaaactctactgcctccagccaataaaaaggttgcgctcggtttctagaaacaaaggttgactcttcgtcttattttaaaaaaattatgagtaatattgctattgctattacgagataaaggatggataagactctatgcgtgagtgactgctctattcgtataacaatccttcgaaataagaaagatgatcaaatggtgggcatacaaacccaaaaatgaacctcttttggg

SEQ ID NO: 29815 - DNA, 462 bp, Oryza sativa
  unsure (1)..(462): unsure at all n locations
cgctgggggggcgcatccgctctatagctcgtatcttctctgtgntggccccgatgcctcgggccgagaccaaaaacccgagaagcctgcccgcaggtacaccgaacacgcacttatcggggttcaagtttatgcgggcggagcggagactctcaaaaggttccgctagatccgagagtaaggtctcttggttgtgcgtctttacaaccaagtcatcgacataagcctcaacattacgtcctatttggctacccaaaagaaattcgagtagtacgttgaaaagtaggacctgcattctttaacccgaagggcattgtcgcataacaataagttcctatgggggtaatgaatgcacgtttttcctcatccctcctaggcatgcgaatctgatggtaaccagagtatgcatctagaatacacaaaagatcgcacgccgctgtggagtcgacaatctgatctatg

SEQ ID NO: 29816 - DNA, 434 bp, Oryza sativa
agcttaaagaacaaggtctgcaatgagagcttattacccggcactttatcaagagccggctggcgccaatcaaggagagatcccgcacagcttttgagtttgatggcaagcatgaccccaaccgagagaacccagagtctcttgagttcaaaattatgtaggagagaatgtacaaaatcttctcgaatgccattgtggtcagctattcacacttattgctagtcgtgccatacaatacgttcaaccctcctccaccggtatgtattatacaccttagcctttctcaaagcatgcttttatcttctgtaaggtcgactgaaaacttggaataccatgcacaggaattcgctttgatgaaatccgatactccaattgctcaacgccgctcacctcgccggcacactggtcaagccagtggagggccgaagatcagt

SEQ ID NO: 29817 - DNA, 377 bp, Oryza sativa
tgtgacttgatcgaagttcgcagctcgaacgatatatccaatgatcatagttctagggccccatttgcgatccgcccgtttgcttcgcgattatgaagtatatcgctgagcggaaacgatgtaaccaccatgactgagtgaccctggaagtagtgagataatttcctaacggtaattagaccgatcattggagcattggggcacaccattggagtggtggaaattgtctgttttctttaacagcttgaagaagggcatcccccgctcgccgagtcgtgaaacaaaccggctgagcgccgccatgcattcagtcagcttttggacacctttttgggaactcggcggtttcatgttgaggatggcattgactttctccg

SEQ ID NO: 29818 - DNA, 430 bp, Oryza sativa
agcttccacggtatgacaaggtattatggtttagttatcgtcgcctagatgattcttataattgagtagctgcatgatacatgtcacatgtccatgtagtctgcttttggtggaagaggtgatcgggctgatccttcaacatggccagaggttgaagggcccttagaggtaagctcatgttgagctgtagggctttttgagatgagaaaattgtaatttttgaaccatttctatgtctgttttctctgtcctaggttgttctttttgaaggatggatgcttggattcaaacctcttccaaatgaagttgtaaaagcagtggaccctcaagcgggtttccgaatattaccacattatctgattctttggttctcttttacttaatatgacttgccttttttcatcttcagcttgaggtggttaataagaac

SEQ ID NO: 29819 - DNA, 433 bp, Oryza sativa
  unsure (1)..(433): unsure at all n locations
ntccatattaatttaggacggaaaaatggctaatatatttttcttgaaataacgcagtgccaaagtcttttgagaccgtagacatggtctcaatgcaagagctgtgctttggggatgttgtgatgtcgaagttcaaagactttttacaatatgtaaccttctaatttcattattttcttttctttttatttttgagaaagagaggtagccctctcccgttttcattatagaaacgaaaccttatagatagttcaggagataaatataaaaagggctacatgatgagaatatctgggatgccaccacaagatgccatctccaagccgagcgaagtgaaactagagcaatgatagagctagccaagctaatacgacattcatatcacccccaagtaaagcatatatggttagaaaccattcccaagtnaagcata

SEQ ID NO: 29820 - DNA, 432 bp, Oryza sativa
  unsure (1)..(432): unsure at all n locations
agctntacagaaggcagcatatgaagttttttatgatgagtcaaagggctgtgacagtgagttcacaacactacggtcagttcttgaacttatgatgttaaaggcgagacatggatggtctgataccagtttcgacagtcttagaacttctgcagaaaatgctcctgaggcctaactcactttcatccagcacatatcaagcaaagaaactcatatgccccctttcacttggtgtggaaaagattcatgcgtgcgtaaatcactgcatactgtacaggaaagagtacgcttctttagatgaatgtccaacatgcggtgctagccagtacaagtcgaatagcaatactggcctagaaccatctgacacaaccgagggacgacagacgaaaatcccacagcttgtgatgtggtaccttcctgccaaagaccgca

SEQ ID NO: 29821 - DNA, 373 bp, Oryza sativa
tcttctggggcctgcggccatgaccagtataatatgatgtcatggccttgagctgaatcaaaggaagagctctgtctatcaaagatacatgctctaccaatcttcttttcatcatttagagtcaaggccagtctatgtgcgcatcatatgtccaagtatccaggagtggaaatactgaagcacaaagactaatccatcaaactctgaaaaaaaagaacgtcagaattatatccttgccatttacaaaagactgctactttcaggcaactgaaaaaaggagaaaaattcagtcacattctaatggttaagatcgatgcgaagattgtgcaaagtattcaaacagaccaccccatcttatatttgtcacactcag

SEQ ID NO: 29822 - DNA, 447 bp, Oryza sativa
agcttcccgtcgtcggtgagcgccaggcggtcggcgagagggtagtagtggacaaagaccctggacagcgactccctcagtgcgtcgccggcgccgccgccgtcgtcgtcgtcggtgggcgtcgcgaagcagtaaacggtctgcacgatgacggcgatgttctggtcgaggttggagaggtagtaaagcccacccttcgtctccgccgtcggcgccaccagcgtcggcacccctcgcttcactccaagctccacggcggcggcggcggcggcttcttgcccctgcaatcaccacaccaccatgatcattgcaacatcgatcgatcgccatatatatcaaacataatgttatcagaattcgatgaacagatggttgaacacggatgcaaatgcaccaccattggttggatgatcgatcggatcagcgacgaacaccggtgagtgtgtg

SEQ ID NO: 29823 - DNA, 442 bp, Oryza sativa
  unsure (1)..(442): unsure at all n locations
ttgggcagttctaacatagacctgctgcgttgtgttcaaatcagtatccatgagcatctggagcatcccttgaaagggaaggagtcattcgaatccatgcacttcaaataacacattagtaaagatgctttaatacctccatttcaaaatttaaaagtatatgttattttaggattattctggtaaagaagcctcgacaatttatacacatagaagtaattacatccgtcatcaaagcgaaaccaaaatattaatgctcatagaagtaagttagagttgatgccaaagcctaaaacaacaattattttgaaacgaatgcagtggactaacctagaacaccattcattggagttctgatctcatgtgaaacagtagccaagaactgcaatgcggaaagaacgtatgaagtgagatgtctattctaactcanaaggatgtgtgc

SEQ ID NO: 29824 - DNA, 446 bp, Oryza sativa
  unsure (1)..(446): unsure at all n locations
agcttagcaatagagatcataacagggtggctcctgatttatctgcgccttttatatgttctccgtctcgcgcgggcgcatatcgttttcctttgctcgatcggcaacacagtacagcggtgcattattctagctgtttcccccttcctcctgttcggaatgcagctagcaatttggtgcttcacatgctaatatctttgattcctttcgcgtggtcgcgcgtagacataatcattcttaattgatctgatgtacttctctataattttgattaaatttaaagaagcttaatctagaaaaaatcaaagcgcattataatttgaaagggatggatggagtataatgttaaagtagttttgttccaccaccgttataatatctttatttgttataaccaaattaatagaanaatattcagtcacaactatgaaatggacctagagaca

SEQ ID NO: 29825 - DNA, 440 bp, Oryza sativa
  unsure (1)..(440): unsure at all n locations
agcttaatttgtttccaaaaccaaacccaactcaagcttccgtaaaagggagatatcaagctctgtaactttgatacaatggcaaaagttttggaaaaagagagaaaaaaaaaagggcgagcatgcctgactgcctgtgcgtattgagcagcagtacatgcatgcgtcatgcatgtcacgaaactgcatgcaactggaggaaccgaagtagaatgaccaaattaagaagaggcagacagataaaaaaacggaggaaaaaataacttgaaacaaaacgcgagagattaatccgtcatacgaacgctagttccggccataaacacccacaaagatgagatcggaagcgtcgttggatcatcgcaccgtacgtcgcaaaaacttacgaaatcagccactagctagcatgagaaactgcanaaaccacttcaaaaccaacgtgc

SEQ ID NO: 29826 - DNA, 466 bp, Oryza sativa
  unsure (1)..(466): unsure at all n locations
tatgaccgtcagatgaatggatggaataccgagtactgatccttattgcaccatcaagcacatctaattaatgcattgcctggcatcatttattgtattttttttgccaatcaattgctcagctataggttaaagggaaaatatacagtgatgaaaattcattaatttcttttctttgcgaggaaaaattcatttattttgacacaagcagagagagcacaccacccaagttatctttgcctgaatcacatcatctctccagataatgcaaatttctttttaagactccatgtgggacacattaattctcatcactaanaaaacataaaagtcatcaagtagataaagcaacaccttgaaattaaggtgaatatcaataagaatatgttcttttgataagattaacaaacgtgtctattactcgcccttgtctctatatatagcccattcatcacctctctgtata

SEQ ID NO: 29827 - DNA, 445 bp, Oryza sativa
  unsure (1)..(445): unsure at all n locations
agcttgttttgcaatccatatgttctgtatgtatagcaaatattgctaaacgtgaaaggaacaaaggggcaaaacaacttgatgccttaatgaaagtaagccctctactctgttaacctgccaatcaaagtaattcatctgggttattgacagcagttttctttctcaagaaatttcagtacctctgagaacatatacagaaaacttccctaagaggagggatcttcacccctatgagagatctctcattgagttgacttttggggagggatattacgagaaggtatggctctaaaatgacttgccactctcgatcagtgcaagaatcatcagagtattatctatttacttattcaactaaagtctatttttcatgganaatttgcattggttggtgagttattataatctttagtagtgccttgacaggtaatagcacgagtgg

SEQ ID NO: 29828 - DNA, 454 bp, Oryza sativa
actcagctttattcttggcttgacatctcttgagtactttctcgggtttttctctctattaatatacattgaacctggacatgttttcagccataagtaaacctatggctatgggtttaatttcagaaggaacacgtgaaaaaactgaatttaaatttcacgaggaacacacgaaatgataaaaaccagttgctgctcaagttatagcataacatggactgtatgctccggtttctaagactcccttcgtcctaaattataaaattattagatatgtaggtattttaaaattaagctcttatagtttgatgaactattactctaatatgaattatattttattatgtgaaataatataattaagatgatatttaaatgtacaccttcctattatcatgaatttgttgctactacatagttactatgtgagaagacaaaaggttaatgataattt

SEQ ID NO: 29829 - DNA, 443 bp, Oryza sativa
agctggatactaccttagaggacttatgtgatataattgaatatattaaatacgctggttacaaagttggtgctggaaataaagcttaaaacataaattaaatagagacacaacaatactaactaatgcctccggtttaaatataagcacttctagcatttgaaagctactcatgtaacaccgatttaatcaaataaacatgcatcattgatagtcgcatggacatgctcatcaatatctttgtaaacctttattattatgatatttccaaatattctgaatcgttggaatatggatcatctcatagagtcaagaatcgccacacacacaagtgaataaagcttagggtttagcaccgattgaaatttggtcatgatagttgctaccttggagtagcgaaaggagatacatttcaatgtcttatgttttagagaaagaagcta

SEQ ID NO: 29830 - DNA, 440 bp, Oryza sativa
  unsure (1)..(440): unsure at all n locations
agctntaaagcaaggttaatggctcgataatcttttctctntctctctcgaccatgacatcgtcttatcaatgggtccaatgatcgatgatatatttctctaactacggtatgcatgattgtgctctcagtggacaacctatgaattttttaaacctaaacgaaacatgaaaagcatgcgagaaagcatgggctccatgcatctctgagacgccgacctcacagtggtgagatcttataattaatggcgactagccacagtccattttccccgccatggtgaccggtgtccatcgtgacgttcgtcctcgttctctaacatgtggtcctattaattatgttcttccactcctaggtgttagtttcaatgttagaggattatagagtccaagcactcctcatgacttctagacaattacagcttctgagaatctgtaccaa

SEQ ID NO: 29831 - DNA, 388 bp, Oryza sativa
  unsure (1)..(388): unsure at all n locations
cttgctggttgggagagaactgctggccaaaggagttatgtgtggatnttgtgatgggaaaaccatcaaaatcttttcagataattggatacctgtgtttcgacctcaattggtgacaacgctttctcccttcccaacagatgccactgttagctgcctgatgaacgaggatgccagatgttgggatggagatttgataagatcccttcttcctgtggacattgctaaggagattctacagattcctattagtagacatggtgatgctgacttcgcttcttggccacatgacaaactgggtttatactctgtgcgttcggcttacaatctggcgcgatcagaagctttctttgctgatcagagcaacagtgggcgaggaatggcgtcg

SEQ ID NO: 29832 - DNA, 438 bp, Oryza sativa
agcttaagtctcatatttgattgaaaatattgatatctttaatgatgatattcttctatgtgggagttaaattatatcttagttaggaataacatatgactggcatatttgttatcataatcaaataagtttgcattgctactacttgctttctgtggcatattcctagtttaggataaagagccacagacattactgttataaactgatatagagtgctgactatcaacctaaccagttgctacactttctgattcgtctttacaataaatattttagatgatgacagtttctttcgtgcatgcatttgatgtggtgcattacttggtgtgatttacaataaagctttctaggctctgatgaaaaattgttatatacttatgttaattggggcattaattgtgtgttcacgtggcttctttttcttaaatctattct

SEQ ID NO: 29833 - DNA, 277 bp, Oryza sativa
tctccaaaacagcacaaaagccacaagaaatggtcaaaataaccccaggaacctaccgtatgtgcaccaaaggacccatcaacattatcatcctacattactattgttactgactgacagatacacacactcacgatacttctacattcctttttgacgtcatatgctaactgcctgacaaactggcgatcgcttgggctccacactgctgctacaacttcgtgaaacaaatatggcaaactggcataaaggccagagttctaattgtaataaatgg

SEQ ID NO: 29834 - DNA, 429 bp, Oryza sativa
  unsure (1)..(429): unsure at all n locations
agctntgcacattagattagctgtataagatcgctttattgctgggctttcatcgcaacgcattgattcacatggtgaagatgatttgcatagcgtcattggctacctgcgcagatcgaaagaaatagtgagtataagattcagggtcctcttcttctttattattcctctacttggaatgggatgttatttatgtagtctgatggtaatttcactatttcaggcagaaaccgagatatctttgcttaaacaggagaagtcacggcttcagatagaagtatgatctgcttgctcttgcatattgttatttgttcaaatacccataatagtgccacgtcaactactgtactcctccattcacaaaagttacacattttacttttgtcaccaagaccatgaagaaattaaattatcttggatgctacaaca

SEQ ID NO: 29835 - DNA, 438 bp, Oryza sativa
  unsure (1)..(438): unsure at all n locations
tcgcgtntctgaaaccgatcggtggccgacagttttngtttctgtacaacctgcagctacagcataactttcaggagggctggctgcttaagctttggtcgcctggaatgcatgatccaagaagccaccgggacccgtcgatggagatccaacgacgctggggtggttcgttgggcagtggccatcactggagccaactaaaaactcgggatttttcttttgctgggcttcgggtttaccggtatgaagcatgtgaaaggaattgaatacgatttggagtgtacggtggttgatgacaagtatgtgaagttcatcacactcacatgattgagagaggggcagagaatgcaagaacaatcatgggctccatgcacttgccttgcattttccattctccagctggacattggcaggctccaggctggggagttgtgggtc

SEQ ID NO: 29836 - DNA, 412 bp, Oryza sativa
agcttgatggagcaaagatcgatttataatttatctgtcacttgcgacactatgttggttacacacatcgctcagaccagaattgttcacgattctctccctactgctcctattgattttgacaacaagaaaaggaaaggtgttattattgaggatcctccggctgagacaattaggatcaataatgtttaggccgaagatcataaagttgcaaaagatgaatcacctagtttcaacaagactaaaaagccgaagctcacttttgagatgcttatggctaagtacaagaaaggttagccggtcaacgatttgataatcaaactagtgattcgaagagaccaagatcatctcgtaagaagagatttggttcaacaccaaagcaatcggagacaccaacaatatcaacttcata

SEQ ID NO: 29837 - DNA, 280 bp, Oryza sativa
agagcagcgctactattgtttcacaagaagcagctaattatgacttccagggtcagcaaacctccttatgacagacacaggggccttcacatgatatacggggaaccgtcctacacccggcagctttaaaaaacctacaacagtggtagtcacaactacagtgagcagtacaaacccaacccaactccaagtccactaatgactccagctctggtagttctggcaaaccttgcagcttcacctgatcagaccaacgagtttggaggaaagcgcgaactct

SEQ ID NO: 29838 - DNA, 408 bp, Oryza sativa
agcttgcaaaaacagcataacgcctttctgtcgggcacctttttaatttgcattgcaataattccaaagaattatatgaccgcataaaaaggatttcatcagcattgggcaacactgttgtgcgcataatattgccaaagcaaaatatgcctaagtccctaaggaacacaatgggccacgctgttaaaagtattgggctgaagtactgttcaggcctaagcccattagcacctccgatacccttaactgaaaaaatccgatatccaagcgacgcttcgtcttccccgccggaactctcgccattttccccactccctgctacagtgtaaagctgcgccggcgaactaaggttctcaactccggccaaatccacctccgaaaagtgcatcaaaatccttcccgtgatcc

SEQ ID NO: 29839 - DNA, 434 bp, Oryza sativa
  unsure (1)..(434): unsure at all n locations
acaacgatggcattatggtgggacttttgtacgcgctggctacctgcaaaattaaggagggtcggcccgtcaggggagtattatcttttacgcacaccaccgaacctctacagatgatcatggccagaaaaactactcccaagatcatcaattgttgagtacatagcttgacagacagatcagcactgaaagccttggttggtagtcatacaggtcaatcatgttttcatggctgcaggcaacttctttcctatggctntcaccttggcaaacgagtcactgttaagattagttcttttgagctttttgggctgaccagtgctttgttatctactagcatggctttttaactgataaacaatatttttaaaagaaattgtttacaagtttctttaaagaattaaatagatatttttctaaaacacttaattaat

SEQ ID NO: 29840 - DNA, 391 bp, Oryza sativa
  unsure (1)..(391): unsure at all n locations
tgaagggcatatgcgcgggtgataagttcatttaatattattcacagcaacctaagtacatctttgatatgacaagcgaatccaaacaagagtttggacctattctgaagtcctgaagggaagcttctaccacataaaatgaatcttaacactcctatatagaacttgttaactatatttggatgtgaatgtccaattatttcaaaaaacataacttggatcatgctggctctagttaattaatgttatttgcatgccgacaacaggtgaaataaacaaaagaattgaagatgaatagtgataaacaatcagaaggattactacaaatgacatagcatntacttgaataggaaacaaagtagagcagtatgtcagttattaatttcacata

SEQ ID NO: 29841 - DNA, 445 bp, Oryza sativa
  unsure (1)..(445): unsure at all n locations
agcttgtgatataaatgaagacatgggcatgaagttcaatgagttcatcgnctttctgtgcctcatttatctgctcaacgaaccaactgtgtcagaaacagtatccttttcttaataagcattgctgcagagcaatgttgggttaacatataggttaggtattgcaaaaatgatacattactatttactgttctattttcttcaatctttcattacgatgtaaatctgattggagtaatgtttattagatggataggatacttagtaactttctgtacctgtatcctattttagatctgtcttaactcatttctgccaggagcttctctgtttccttgacataatgcacagaagattaagatgggattaggaaatcttgaagcaacttttgagaccttggttgatgcatttnngtttttggataagaacaaagatggatatgtca

SEQ ID NO: 29842 - DNA, 391 bp, Oryza sativa
  unsure (1)..(391): unsure at all n locations
taccaagatacgagcctagaacagaacctgatctatcatttggaataccatgttcatccgtctctacaattacctttccttgcttcagttggtccaaggtttttacattaaaatttcctagaacctgtcgtaccttcccatttggccctacatttaggaacagttcagctatgggtgataggaaaaatcatatatttagacatatataggaagaaaatatganacttacagattatattaattggtcttttggctgcaagaggcaactccgtgattatgtcatcattctctgaaaggtcttgctcactatcttctgtgggttgtacattccctgcatcttgagcttcgagatgcanattatcgtcattgaattgtgcatctgcttcatcta

SEQ ID NO: 29843 - DNA, 443 bp, Oryza sativa
  unsure (1)..(443): unsure at all n locations
agcttcaagtagcctgcaagtttctccagcttatgttgcgccttcgnttggtgcgaaattaagatgccgtgtcacaacacgcacggcgcacggcgttgcaatcctgcatctctccttttcgaccgtggctgctcgtgaattcgcgacacgagatcccgcggactggacgagtaccatggatggcgctgcttcttttcactaaaccaacttgcctggcaaatatagcacgtagcagctgactagtggggccactaggctagccactatccatgctccatgacagtcagcatcagcaccatgaccactggcgacaaaatatgattgtttattagcgccaccatcaccagatccaacaccgttgagcccgcacataaccccttgcaaaatcaaccacgggcttcaaaatttcggtgccatgtttgacagctcagttctttggcaat

SEQ ID NO: 29844 - DNA, 465 bp, Oryza sativa
  unsure (1)..(465): unsure at all n locations
actcagctatatgttgtcactgacatcccttctcttcatcctcgttatgtgatngaatgtagntgatttggttggtatgagaaactttttgccaatactatttgtgacatcatgatgatagaattggcctcagctgttcaattcttcatangctgttgtaggcttggcactattttaattctatctgtgtccctatatatgttgtgatgacacgtatcgatgtgaagccgtaaagtggctcttcatgaacgcttcatttgcatgcaatggctgtagaatgagttccaatttaacgttctggtgtgaagactcattttatgggaatctgaagacatctgggacacgttttgaactgaagacttctggtgaggtactactctgtcctaaaaaaatcacactctagctacaaatctggacatactcttgcccagaaaaatcatattgtaactacaaatctggacatac

SEQ ID NO: 29845 - DNA, 358 bp, Oryza sativa
  unsure (1)..(358): unsure at all n locations
agcctgatagttntgaaggtagtggaactttatctgttctgctgattggntgccccatgcggaggacaagatggaagtttttgatgtatagactccggatcgctttcattatgggacacaacttttaaagggtgaagcacaaatttggtggaaaggagtgcaatcaactcacacagctgcacatggccccttgtcttggcccgagtttgttaggcaatttgagaggagactctacccagctacgttcctcgaccggttgaaaattgatctgaacaactatacccaagaaaagaaggctgtggcagagtatgaggggggcttcaaacagaatgctcgctttgtcccttatgtggctcga

SEQ ID NO: 29846 - DNA, 435 bp, Oryza sativa
agttctatgcgaataggtcccgaatcttcttgtctcataaacagaattttgcaagaggaatttggcgatattaaatttgccgaacccagccaagctggggagaatccgatgtaactttttttgtaaatgtcccgggatatactataagcctaatttcgagtccgtatgaaaaagatattactgggttaaggaaggtcactcgaatcagggttctatttcctttctagtggcggcaggatacaaggcaactcacaaaagctatcggccacagatcaaacacaaatagaaagtgatttggtgggtgactgccacggtggtgaccgtggtgatgacggcaaaattgatgaacgtggcgatgtgcggtgggtgcaagaacttgaactctattcgcctacactaaaccagcaaataaccaaccgatgcatcgaaactcac

SEQ ID NO: 29847 - DNA, 387 bp, Oryza sativa
agcttgggaatccaagaacggcgcgaggaatatggatgataatcggaggaggaggaggaggagtggtcgttcttggcgctgctgctcgcgctgctgcggaagtcgctgctcgggtgcaacgcggaggacggcggcggcggcgaaaggatggagatagggtggccgacggacgtgcagcacgtggcgcacgtcaccttcgataggttccatggattcctcgggctccccgtggagttcgagcccgaggtgccccgccgcgctcccagtgcgaggtctgttcatcactaggagctgaattcttcagagtttcaggccattcagtttgtagttcaaggtttaatttctgtgttcaaaaagggggtaaccttttttggttgaattcttcag

SEQ ID NO: 29848 - DNA, 431 bp, Oryza sativa
acacataaaactcagctgcttgattatactactgtggtcaagagaatgataactctacattataaaatagtaagagaaaagctttcataattaatatttatatcaaaaccaacctaaagaaaaatgtcccaaaccataaatactacttgttcaagatggcatatcatcgctttctcttcatttttcaaaataaatcaacgcagcaaggcaaggatatggaaattgggaggttgatccaatgaatattaccattcaccaatccatttcctcaaaatgagggttatgtacacatctggcaaggatacaaagatagttggtgctggttgagctgcaacggtaatttcaaagaagcctttcttggatccattatcatgaagtcccagaaggaggacacatgttcatgcttgcagatggatggactgacaaaatac

SEQ ID NO: 29849 - DNA, 224 bp, Oryza sativa
gagcttctatcatgtggtggggggcctccttttttttttctaattatagccctttactttttcctgaacatatcaatatgaaatttcctaccggtttgtgctttattttaaaaaaattcttattcctccattaattatcaatgccgatccctgaggaatgaaatattttataaaaatttttgaccacccagtacttataacttataaaaaatgcgcggaacttt

SEQ ID NO: 29850 - DNA, 439 bp, Oryza sativa
tacacatgctctcatcgatgatgtcccttctgggtctgggactatctgtgcatgtaaaccgcgcgtggtcgacggatccaccgcagcttgccgccggtccttccatccaaattccgaaacccccacgcgttacgtaccacacatcttaaagcgggtccaatcccaaacaaccaagtagtacaacgtacgatcgagctagcatagccaccaaaccgaaaattcgcctaggatccccccacacggctaggttcgccgctcctcgctcgcaccaccgatcgatccacgaacgccgccacacgcagacgcatgcgccccgcggcgcgcgctgctcgggccacgtcgtcgcgggcgccgagcaccaccaagatgctcgcgatccagccgcatgtgatgcagccacccaccccaacccaagcagcacatgcgacgcgacgcgagc

SEQ ID NO: 29851 - DNA, 427 bp, Oryza sativa
  unsure (1)..(427): unsure at all n locations
agcttgatgtgtccaaagcgtactatcgagtttattggngttnnttggagcaatcaatggtcaaactagggttctctcattgntgggttagctggttcatgaattacataaccacagtgagatactcagttaaattcaatggaactcttctgtctacctttgctcctacacgcagtctatggcagggtgacccactgtctcccttcctcttcttgtttgtagccgatggtctctccttattgctagacaaaaaggttcataacggtgatctttcccctatgcacatctgcagacaagccccgagtatctcccatttgttgtttgctgaagataccctattgttcttcaaggcaaataaccagcaagatttggtgattaaagaagttcttgaaaactatgctcagagtactagccagttgattaatcc

SEQ ID NO: 29852 - DNA, 440 bp, Oryza sativa
agcttaagcattgcggtggatgagttgctcttgctccgaagagagcttcatgtcatcatagggtacatcaacacctgtacaaacaactttccaaatacttggatgcaaagagattagatgcaacttcatcttgtgcttccaagcggcgtaatgcgtcccatcaaattgaggagcacgcccggaaggcacggagacaaagttgtgagagggaatagtaagtttgctgtaatcaaaaggtatagtagctcccttgggtgatggagtttccttgctgctcactccatcttcatttccattttccccgttctttcaccctaagtccgacatcgtggatcactcaaagcagtgaagcttgaatcaagagcaccttgctctgataccaattgaacgtgctgatgaagcctagaggggggtgaataggctgtccctgaaacctaaaa

SEQ ID NO: 29853 - DNA, 407 bp, Oryza sativa
aaggaagaacctcaagatgatactctataacacctagttgaacaagaagcaattcaagaacatgaagatgaagaagttctattaaaaggcgcttgatgaagcatttgcagctgcccaagaatcatgcgatgttgaatttgagagtgatgaggatgatggcaaggggaacaaaggcaagaatgatgtttgtctcatggctagaagcgtggatgaagattctgattgtgataatgaggtaactcaaattcctagtgttgaatatcttcaagaagctattgctagacttggttataagatttctagaattgagaaaaagattaatcaatatgaagctactattgaatttcttaatgcctgaaattctagaataaaatctcttgtttatgataatgatgagtgccaatctt

SEQ ID NO: 29854 - DNA, 437 bp, Oryza sativa
agcttctggacttcctcgagcctcatcggttatttcatttcctcgaaggccttgattttgttggggtttgcttcgctacctcgtccaaagactaggaatccgagcagtttgcccaatagtactctgaacatacactactctggatatagcttgagccgatgtctccgaagaatgttgaatgtttcccttaggtcatcgatcagacgatctcgattttttttttcttgacgatgatgtcgtcaatgtaggcctccacgttattgctgagttgggattggaaagccccttggatttggcgctgataagttgatctagcactaatcaggccaaaaggcgtcttgacgtagcagaatacaccgaagtggtgatgaaggttgccctttcctcgtcttccttggccatgctgatttaatggtacccggagtaggtgtcaagga

SEQ ID NO: 29855 - DNA, 380 bp, Oryza sativa
  unsure (1)..(380): unsure at all n locations
gtgcacgtaatcggattatacatgttccggccgctactttattgtatcaccctactcctgtgctngggaatatggatgaattttaccaaggtttcttcccccagagagcgcacctgctccttctcctctctagctcaagttttctgggagtcgcccccctatctcaatggacacggtcctccttttatatcttaaagggataccacatgtgccgcctctacctaccctccatcgggagggggggggaccccactcgactttttgggctttaaatcgggccttctcccggaaactaagcgatgaccgatcttcgagtggaacccggcgccgcccctcgtctgacccatgggataaccctgccattccctcatacatgaacg

SEQ ID NO: 29856 - DNA, 358 bp, Oryza sativa
agcttcttcttgaacacccacttgtaccctatatgtttacacccatagggtcgctctgtcacctcccaagtcccgttagcgataatggaatccatttcactacggacaacctcctttcagtaatctgcatcatgagatgcatatgcttctgaaattgacttaagagtgtcatccacgaggtacacagtgaaatcatcaccaaaagacttagccggcctttgtctcttactccttcgaggagcttcactgacatcctcctcagagacaagttcatgtgtatgttcaagttgttctggtggtgtgattgaactgggaattatttcagaggggtggttcgaaccactatgtgtattctaca

SEQ ID NO: 29857 - DNA, 397 bp, Oryza sativa
tgcattaaccacctgaagtcctctggcttgctgtgttcgtttgtactcacccttgctctatatatatatagaagtgaagctgaagtgaagcaatgattaaggggtcgttctatttccaaccattgcctgtggagttgggagatagtcgttgtttccgctgctgctgacgttgttggtgttgccttgtccgtgtcgtcagttgtaatctcgggctgtcctgagctgcaacctaagataatgtaaataagtcctctatttattataacgatttgcaatgattcatattttttaccgcgggtaccagcgctatgtcctatgactggtactgagatctgcggttcgtaagacgcggttcacgccggtttcctactacacgctcctgtcaggtgccgttgta

SEQ ID NO: 29858 - DNA, 371 bp, Oryza sativa
gaatctggccaagaatttacactgtcttactttagacagccgtatatggaggtcttctctccccatcaaagtgtactttacccatatggaaagcttatggaaaactctcccactttctaattattaactttcgcagcaaaaatcattttgaacctctaattagcgaaatacagagaccaagcataactgacagcgcccataaacactaatccaaaacataacacctaatcccatcctctaacccttcaataacgacgaattacaacccttaaacaacctacaacctctgcacaggagagttaagactcacctatgggttggagaacttgagagaatatgatgggaaaaccaacccaccactcttcctactc

SEQ ID NO: 29859 - DNA, 330 bp, Oryza sativa
tcaatggtgcggccgatctgaggtgaaaagcatctctggatcatgcgttgataagttgctcctgcgttctttaatccgaaaggcatggtgatgtatcattaagcccccgaaggcgtgatgaatgaagtctttaagcagtcagattcctttagtcggatctgatgatatcctgaatagcaatccaaaaagctgagtatctcgcagccggcggttcagtcaactacctggtcaatgcgaggcaacccgaagggatctttgggacaagacttgttgagatcggtgtaatcaatacatgtacgccattgtcccgtcttcttccgaacaaggact

SEQ ID NO: 29860 - DNA, 391 bp, Oryza sativa
  unsure (1)..(391): unsure at all n locations
agcttctntaggttcatagttactgatgcttctgaccatacaaacgaacaatcactttataggaagtgaaacatcagttagaatatttgtaaactttacttaagtgcatacattttcttatcctttgggaaattgtaaaaacatgaattacttgctcatagtatacaaattgaaattttggtcattcccacctatgcacctgaacctacttctccgtacagcctatgttggctggctacaaatattgtttctgttataggtagaatatgcatatcatactgtgagtatgaagacattgtactgaataagatggcataaacttcatcccttgattccatcttttctgtagataattntgcactagtaaactaactactctttggtgacctac

SEQ ID NO: 29861 - DNA, 384 bp, Oryza sativa
taattagccataaccattcttttgctttggtgtctacttcctccgtttcacaatataagtgattctaatattttccacattcatattgatgttgatgaatctagacatatctatgtatctatattcattaacatcaatatgaatggggaaaatgctaaaatgacttacgttgtgaaatggagggagtaatatctaataatccatcccgctcaaatataacaaactcttagagttaaaaatttaattcaactataacgatatacttataaaaagtgactcttaccactagactatccatactacccctactatatattgccctaactaattcggacatatatctcaccagaaagacacactaggcttcttacctatctttaatac

SEQ ID NO: 29862 - DNA, 276 bp, Oryza sativa
tgctttggcgaagtcgactcccttcgtatatactcttctccctacatccttcccccaagaagcctccggcttggcagaatacccgcacgatccttcgcctctcgccgtccttgattcataatcttcgccatttgggggggcttcgccccgactaaactttactcttcgggctaggatccccactcctctcatatccttctgcatgtttttgtcgaaaggcctcatgccatactctccacaacccctaatccaggttagcctctagttgcattaccc

SEQ ID NO: 29863 - DNA, 442 bp, Oryza sativa
  unsure (1)..(442): unsure at all n locations
tagcttcaagctgtagtgaactcacgggcatttttttatatctctcaactatgttgnacagtgaaaaatctgctgttaatttgcaaggcactacttgggaacatttccgcttcatgagatcaacggtcataataataaacagaggctagcttgcctcttgtcttgtgctatacaaagctctcagcgaaagatggttgaattgtggcatcattcttcaaatctgatgtaccttgtgcaccccaaagatgacagaatttgcagcttgaacgaatcatgccgtttcccttttttgacttaattggagaatactacacactgagtcagaagtaatgtcccacttatttctaggtgtaaggatccattcatttctaaggtgagtcttcatgcgacagaaatantagtttgtaataagatataggagcccttgtttactactaacttt

SEQ ID NO: 29864 - DNA, 453 bp, Oryza sativa
tgcagcatctgagttaattagtaccatgcctgtctgttgtggtttccactttgtaactggaagggggagatcacacccagaggcattcctatccttggggcagtgctgcacaatcatatcgacataccacacaattttgggaatcacttggcgcgggtgggtagtaacaaggttattcctagaaaaattcctcgctttccaaatgtgccgcagaataacagccaggactgtcttctgaatgtgagagctgcgagttaggaaatcaaacacccattgccttatattgcataattcccgtctgcacaagttaatctgaaacttctccttgatggcatcccaaacagttgcagcaaaggtgcacacatagaagacatgctcaattctatcatcatgaccacaaaagatgcatccctccgtagcaagaacatggcgtctcccgagttggaaccctgt

SEQ ID NO: 29865 - DNA, 445 bp, Oryza sativa
agcttcggatgtgcatcgactacaccgacctttacatggcatgtcctaaggatccttaccccctgcctcgcatagatcagatcgtcgactccactgcggggtgcgaccttttgtgctttctagatgcatactctggttaccatcagattcgcatggctagggaggatgaggaaaaaactgcgttcattacccccgtaggaacctattgttatacatcaatgcccttcgggttaaagaatgcaggtcctacttttcaacgtactactcgaatttctttgggtagccaaataggacgtaatgttgaggcttatgtcgatgacttggttgtaaaaacgcgcaaccaagaaactttactttcagatctagcggaaacttttgagaacctccgctccgcccgcataaagctgaaccccgataagtgtgtgtttggtgtacctgcgggcaa

SEQ ID NO: 29866 - DNA, 415 bp, Oryza sativa
  unsure (1)..(415): unsure at all n locations
gatatcttccctgatatacangccctaatattgcaacctattgtgtgataaggaattgcagttattggtggtgacactataagggggttcactaatcttgatcaagtgctatttctaatctacagccttctaacatatatagtacccacgttttgtttgggtgattcgcacagataatacagagaaaaacaatctatatgtgtaagctaaagatcacagtttttaaaaacaaacacaagccaaaactaggtcaactaaatgcttaacattggttttatgctcacttttgctgaagcatacaatctctacggtgtgtgtttgcattggagcattngaagtattgacggtgagatcttgcattatttgcattgcagctacattattgcttttgaagcacaaaagaccgaatgtaatg

SEQ ID NO: 29867 - DNA, 431 bp, Oryza sativa
agcttaattgctccatgatctgacaatgtgttgctatatttaacatttgctaataatggattaattaggcttaataaattcgtcccacaatttacaggcggattctgtaattagttttgttattaatctatatttaatacttcaaatatctatccatatatccgatgtgataccgtcaaacttttcacacctagatctaaacatagccttacaaatgattgaaacagtacagtactctcaatggaccccaaatcagtcatgttttaaatattgacacagtaagctagatatgttatattatttattactgctccatcattctaaaatataacaacttttacctttatatacatggataaagaaatgtcaagatacatagcccaagttatactatttttttaagacacatttaacaataccattttaaaatg

SEQ ID NO: 29868 - DNA, 401 bp, Oryza sativa
ctgatttccttgccgagtggaccgagtgccaagaatttttctcttatgaatagatggaatattggactatgcattttgatgggtcaaagaggcttataagcactggagcttgggttggttttatttccccgactggagaaagattgagctacgtattgtggatacatttttctgcgtcccataacgtggcagaatacgaggcgctacttcatggattaaggattgctatctctctaggcattcgccgatttatcgtccgtggagactctcagttggttgttaatcaagtcatgaaagagtggtccttgttagatgataatatgaccgcttatcgacaagaggtacgcaagtttgaagataaattcgatggacttgagctcacccatgtcctctgacataac

SEQ ID NO: 29869 - DNA, 404 bp, Oryza sativa
  unsure (1)..(404): unsure at all n locations
caagctttggacttgcactagagataagnagatctcctatgcctcgtgtntttacatcaacatgagtagaattagaatagtctgttagttattcaattcttccagagatttcgggtatagctctagtagcacttctctcttttggaagactttatccattaatgaagtattcttctctatatagttttgctcctttattttacttatataattattcgagtaccaactttagttcatacttggctcatactattatgtaactagcttactggagatatacaatggtattggtttgctattcaattattntgatgctctatgccatctgcagagatgtagagtaggatttagtaatgtcagccatgtgcttacaatattagatgtcactaatggtactatatgcg

SEQ ID NO: 29870 - DNA, 466 bp, Oryza sativa
  unsure (1)..(466): unsure at all n locations
acacctgaaactcagctggatagatttgattcatctcatcaataaatcttggcatctatacatctattgcaaacccatagcaatggatggttagatatgattcctactacactactaccaaaaacccagtggggtttatggtaaattggtcctatgtctatacgagaattccatggatcgatcccctagagttataaactgttccctagagctgctaaagcaacccaagggaagtaaaatatccctgggtgtaggacatattataaacaggtgttcttgctgccaagaaatggcaacaacgacgtctcctatcgaagggaaggattgagaagacggtcaacgagcacgagctctcgtagatggtggtggcgcaagaaatgcaatggcgatcatgcngtgaagctcgccacccaatgacgacgcttatggcaccactcacccgcagttgatggagctcccacgagaa

SEQ ID NO: 29871 - DNA, 173 bp, Oryza sativa
cctcttcttaatttttggcctggtaaataccctgaatataataaaaataacttttgaagtattttggtttgcttggcgaaaaatatggcctgggtaagttctaattcaccgacctgaaccttcgtcactattatccaattaaatatagtgagtgccttaatttatagcttacc

SEQ ID NO: 29872 - DNA, 425 bp, Oryza sativa
  unsure (1)..(425): unsure at all n locations
aaaactaagcttcttgtgcataaattatctgctaaacattggatatatcttaaccatcatattaagagcattcaatccagtaaatagacatactgcagaacacaggacatctagcaacatcatacacatgttgaatggtcccaaacgtatgtgcagggaattcatgtgtattacctgttgctccaaaagatccaacacagatggccatctttttccatgcttttcatgtcagctcccttatgtncttcaacaggtaggctattccttacgctgcctgccttccagtgtagcataatcaagcatcaccagacctacataatgcacaccatcataacacaaagcaatcagtgtaacacgaatttttttcacggtgaacataattcacaaagcaatcagtgtaacacgattgtttcatggtgacatta

SEQ ID NO: 29873 - DNA, 443 bp, Oryza sativa
agcttgacatggtacaaattaatgttgtttttgtagaatttttttatttggagttctctgatgctgatttgtcctagtatttgcaccagaagatacgtgatgattctgcagtacgtgtcaggtgcaattgcaagaaaaaaaaattcatactaactagcatgtatagtggtgtggcagtggcacattaaaacttatataccctcctcaagctcgcaagtcccgatcaggttgttcagttatagttctcccaaatcaacaggcccagtcagggttacaagatattcgatggaacttttcattaacccccaatttggcattagaaatgtacgaattaaaattcacaagtcacattaaaacctggttatattgccgttaggaggtataaccggttttgatagtcgacgagtgtaaaatatgcagtttcatagttaaagagtgttttg

SEQ ID NO: 29874 - DNA, 341 bp, Oryza sativa
  unsure (1)..(341): unsure at all n locations
aatgccgcgcttacatccatgtgagggaattccaaatcactaatgtgccactagtgccactataatcctaaaggaatctttacaagagactggagaaaacgtctcattgcaatcactactctctgcgtgaaaactctcgccacgagccgcactttacacatttctacattccctctagagtcatatccggatntgcagacccatctacagaccactgtgatggctcctcaagaatctcttcaaaccccagacatcatgatatcattcaacgttcatggctacccaggcgccttatatgagatggatcatnctccaaagccactcttcacgccatcaagggc

SEQ ID NO: 29875 - DNA, 437 bp, Oryza sativa
  unsure (1)..(437): unsure at all n locations
agcttataggttgggatatcttacttgttttaatatcttaatatagagtagtatcggagtactagccgatacatattagatttacttcatcggctatgctatgaatatatataatctttgtcttaacgcatctttgaacataagtgatttatactgtctcggcttactgtccgatctatccgaatcacttggtttaaggatattcttaaaaatagattatatatcattgatgtctacagctgatcgagtagaccttactttgtcacgcttcacaccacattgccgatctaatgtaaataccatcagcttaatgattaacgatatgtcatcggcccttagccgatcggctatcgtttatggatttaactntggtttcttggtttccttcttgttgattgcaggatcaaatcaactggtacacctttaagcccgaaagt

SEQ ID NO: 29876 - DNA, 479 bp, Oryza sativa
  unsure (1)..(479): unsure at all n locations
tgacctataaaactcagcttncacatttgnccaactgcttgtaaggaccttgtactccaacctggtgaaagttgccccggcattcctcatgccgaaaggcatcctgatgtggcaaaaggtgccgaatggtgtgatgaatgctgtcttggggatgtcggccgggttcatgtggatctggtggtagccggagtacgcatccaaaaagctcatgagttcgcagccagctgtcgagtccacgaattggtcgatctgtggcaaggggaaatcatccttcggacatgccttgtttaggtctgtgaaatcaacacacatgcgccatttgccgtttgatttccgcaccattaccggattcgccagccattcagggtggtcgatctctcgaatgaccctagccttgagcaacttttggacttcggcttttgctgcttcttggtgatcaactgacatcttgcgtagcttcttgttcctggcttggtatc

SEQ ID NO: 29877 - DNA, 251 bp, Oryza sativa
agctttcagaatagacatatacattgtgtgttggagacttcatatcatgacacgacaagcatggggtcatcttataccgaacaacaatttaaggcatgccatcaaccgttgagaaacagctatcgacaacgtatcggtggtgctacaatcactgctatgatctcccgatgagggagaactgaaacatcgaactctgtcagcccacagactgactcccatggtggagaacgtgctaccgaactgcaaaaact

SEQ ID NO: 29878 - DNA, 394 bp, Oryza sativa
  unsure (1)..(394): unsure at all n locations
agcttgacaattgcttatttctttatagtgtatctatttctaacatttcatattactaaaccatataaggttgattcatgaggtaaaggttgttatatatatgaaggtcctaccccatcttacttatttacctcttggaagtataattgcttccgcaaattgatgttagatttgccatataaggaaacaatatgtttgattataggcaatagtatatttttaatttctcatgccgctacgtgcatgattactaatctatttaaacatgttactaagtattaaacaagcgattaataatantttgtattctcgatgtctatatagcccactttgtgtggaccaatggagaattacgcataaattccagaaagtcattaagagaaatattgtggga

SEQ ID NO: 29879 - DNA, 378 bp, Oryza sativa
  unsure (1)..(378): unsure at all n locations
ntcttcgtgccgtgtcatcaactgccaccgccttcgccggtttatacacacctacacctcgtgctgtcgtgctctcgtcgtggaaacaaaaaccttcgcggtgaaacgaataacgaaaagtaggagtacgcatacagcctctgcttatcaccgtcaatgaaatcccggtctcatcgcgttattgcacatcaaaagtttttaccgagacccgctggtcaggtcacggaatcacgccttcttcgttctagatgtacccaacggatgaacgtcaccgcacacggcggtcggcggaggcccggagagtgggtgtgggtctgcgtggactgacgggcggcgctgtcctgatcactcgcaattcttgcatcgtctcgccgtgct

SEQ ID NO: 29880 - DNA, 427 bp, Oryza sativa
agctgcaagcttgccccaggcttgactagtttctaactccattcccatcgccgacaacatgagacatccctcaatctaagccctcatcatcatctctctcagtcccacaatatgctcttagatgtgtggcctcatgatcatgagccatgatagggaatgatgtgctggtgggatttgctaccatatagtttagccatcatagattcacttccctaactagtggttttgacccatctacaaccagatgatgatgccaccccccccacccttcttcaagcgtcgtctatcacttgtacttgttgaatctactagctactccctccatcaattattccatctcaaggccttgatggagatcaaagcaaggattaactggtgaatggatgggaggcaatggcacattgctaggacctcttcaccaaaaagt

SEQ ID NO: 29881 - DNA, 445 bp, Oryza sativa
ctttgtcccaagctccaccaaaatcaagagcgcatgctctcttatatcctccaagatttgattgactcgctcggtctgaccatcagtttgcgggagataggccgtgctgaaattcaaacgggtccccaattcttcctgcagtttctgccaaaactttgaggtgaactgactacctcggtcggatactattttcctgggtaccccatgcaaacgcatgatccttgcgaggtacaattctgccagtctctttcccgtataggtggtatgtactggtataaagtgagccaccttggtgagtcgatccacgactacccagattgaatcatgtcccgatgatgtcccgggcagtcctgttataaagtccattccaatctcctcccatttccattccggggattgaagaggttggagtaaacctgctggtctttggtgctctgctttcact

SEQ ID NO: 29882 - DNA, 431 bp, Oryza sativa
  unsure (1)..(431): unsure at all n locations
agcttctaacccctcgagtaatattttatttatgtcactttccacaggcgattagacagtgggagatgcatttgtgctatgacgcatgaaacaaattgcatcagtttcttttctaaataaacaacacaatccaacgaaaacaaaaacaatggcagtacgagcatagtactactatatcttganacaaagatgatgctatcacacaatgttcagactctgacctggcgtatctcctgccccatttgatatgctaggcaactccaattttgactgaagacagggtccatgactgcatcgaccccaatcttggcgacaagtatcctactaccggagctctcaaggtttctatctaaactattcacctgcatagtagttttgcacccaaccattaccatctctatctatgtatctctagtaagtttctacttcta

SEQ ID NO: 29883 - DNA, 460 bp, Oryza sativa
tcatcccattccttctatctgcagccatgagttgatatactcactctaatcttgatatcttctttcttgcctgtcacctcaatccaacacccttgggattcactgatctcaccaaatccacaccttggcaccatcacttatcctccatattagtcatttttttcaataactcaaagccatatttaatgctcttccaagtaactggagatgttgaattaaaaactgtatcaatgatgtcaccagaaggatataaaaatttgagtgcaaagactcttaagaaaaactaataggcgccaggactgctgttctaataacgcttggttgaatatgttcatatcatgaagacccattccaccttaattcttaaggagcatcatgtggctccaatatcataaggtcacaaccatacatatgttgaccatccattcattattaattgatagaacatataatctacatc

SEQ ID NO: 29884 - DNA, 434 bp, Oryza sativa
agcttctggcgttgccactctgccaatatatttgtaactttttaagacatgatcaaactgcaggcatgtgatcttgtagtttaattcatggtaagagaagctcacgtggtctctgaacaatgcatctactaccaaagaacatcgactgttgtttctggaaaccgtctaataaaaaattggaagctcctaatcagactatcagaggatgccgttggaccagcatacttgtcaaggaaatggtttttcttttgcaatttacagtattttaacaaatagtatttgttcttaataattactagcttcctttgctctctcggagaagtttacaagataactgcatgagctaaggttaaactaatcaaagaaaagtttgaagataaggatgagatatgctatgctatgcaaagctggtggtaccaaatcaaggatcagta

SEQ ID NO: 29885 - DNA, 461 bp, Oryza sativa
  unsure (1)..(461): unsure at all n locations
ttgataattgaacgtgctgggctatgcaatggtttctagatgtaaatatcaaacattttcacatcttgaacttagtataataatttgaaagttgtggaaaacgtggatgtttgttcctggtttaaatcgatcttaagatccacatcattcttcccagcaccttcattggatcttgtctctcatgaagattctttagtccctttcatgcatgtttcaaatttcgctggntcagctgtctatatatgcttaggtgttgcattgaaagagggcaaccaattaagagctagcattntaaacatgctatgtatgaggtgtacaatgtctcaaataaaaaaggtagccatggacagtgtttagcgttccgttcaaacttctaaaaattccgtaacatcacatgtttggacacatgtatggagcattatatgtcaaaataaccaattgcatacgttgtatgtaaatat

SEQ ID NO: 29886 - DNA, 446 bp, Oryza sativa
  unsure (1)..(446): unsure at all n locations
tctggtccaataaaaatatctcgagatactgtacctcacgctaataaatcggttccgatcattggatctacctggacaggacattgttagatccaacgatcgaaaacgatttggtacctcgaggtaccttttgttggatagaagcaaatctcacccaaattactctgcagctatagaattcagaaaatgaactagaaactagctctttcaaaatctcataagctatttatcaaactgtttctcagaaataaactctccatccgttagttaccgtgctggagntttaagaccataggaattaacacttctcttgaagaagtgctacctgctgctgcatagagcatcagaaatgactgctataaatcacaagccagtttccacggatcaacaggttgagatgaaagcctgaaacggatgcatatacactgagcacaaagctgcatctg

SEQ ID NO: 29887 - DNA, 436 bp, Oryza sativa
  unsure (1)..(436): unsure at all n locations
agcttaaaagagaagaactaactctaatttgtctaatttcattataaaanngggctagataaaattgtgttaaatactttgcttaattctataattcctagatttctctgggatttatttgagctaaagaagtatttttaataaatggaattgcatttcataaataatttatattgaaaaaggtttttaaaagtcttcttttggctttgggccgaaagtctgaccaaaaaccctctctcttccccggaccagtcggtctagtccgagccgccgctctcctctctctctcgctgtcgctgacaggtgggccccacctgtcaagttcgtttttctcgcgccgncgccgncgcccgaaaccctaaccgagccgcgtncgagccgccgccgtcttcttccaaatccgatcgatcctttcccgatccggtgaaatctttaa

SEQ ID NO: 29888 - DNA, 297 bp, Oryza sativa
  unsure (1)..(297): unsure at all n locations
gctaccacatttgggcattctgggggtatggaagaattcttttaagagcaaagaactcattttcctttttcaacaggggactttccccagtcttctattgctggagattaaagatatagatggcctcaaatcattaagcttcacacaaggagcgatgccaacgctttgagtgttgcatactgataatggtctacacatcgacaaccatgggttgtctggtgtgtcatctcttccaaagcctaaagaagttatgctcangggtgactacaacgacanattattgaagacctacgtaat

SEQ ID NO: 29889 - DNA, 338 bp, Oryza sativa
ccacggttgttcgtagggcgcactttttcctgaaaacttttatctcagtatatgcacatttatcaagtcgcactctccaatattacatcagtatcatcctttccatttgatcaatcagaggagcaagagagaatatgcctattaatttctgaatgaacagtcttagacacgaaaactgcatctacatcttgtgtagaaatgtgcccttttcttttgggcaactggattttgcttgttctgtggtctacgatcaaccgcggctacagacagaaattgacaaccctgtacccaatggaatttgataccagtgaagaatccgaccaagatctcaagaactc

SEQ ID NO: 29890 - DNA, 386 bp, Oryza sativa
agcttgcaaataatccttgcccagcactagtcaatgattgtttgcaaaatagtgccctgattgtgctagctagctagcatatatagaaataaaaacatttactataccacatttaatagtctagaaataaaaataaaagctaccatatatagaaaattaattgacgctagggcctagggaccagaactccagaagcgcaagaaatgcagtgaacaacatccattttctgtatgtgcgcacataaagccttccttacctcaattcagtttctgcagtgatgatttatgttcaggcagaatcctcttgcaccaaaaaccagggcgtgttaggtctaggatgcatccggaagaaagaccctatcctagtacttggttgggaagcaaact

SEQ ID NO: 29891 - DNA, 376 bp, Oryza sativa
  unsure (1)..(376): unsure at all n locations
actcagcttctttgattcctcttgggccgncccatagattgccatgatgatccattgtaagccatcatccttatttttaatgtggaacttaatataaaactcaccttcatcaacgcttgaaatgtcaaagaccgcctcattaattcctaacaaaatacctcctgatcttcccctatgtcttgtccaatgccaaaagaaatcttggcctccacaaaaactcttaagactagcgttggagaaatcatttttacatgtctataaaaaggcaataaagtctagctcttgctcttttgaggtatccgaaagaaatctgaatttaaccaagtctcccagacctctgctatttcataaaattcccctcatgatgccctctttt

SEQ ID NO: 29892 - DNA, 407 bp, Oryza sativa
  unsure (1)..(407): unsure at all n locations
agcaagctgcttaagtcctgctccatcaatccttggcgatacatgtttgaaactgcaaaaatgttaaacagcaaggtcaccaactgtcttgttcactgtgtaaataccaaatgcaggtaaacagaaaacatgctattttcacccatgaaactatacaccaaatttgaattacttttggcagcacatgccatcattactattaagcaatgtactcctgtgtagaggctatacagcctagtttgttttaagccaagatattttgatcatggaagctggcagggagtagtaataaacaggaacaaagaagtaggacaattgagcctgataagcttatgatatctcccgtgctgtttgtgtcattatcaggatacctataagttagacatgctaattntacattntttatc

SEQ ID NO: 29893 - DNA, 430 bp, Oryza sativa
tatgtcgaacagccgaaatgagcagcctgtagcagaatagtttcttgtctttgttaaccactggggcatgtttttcagtatcagtcttctggtcatcaagaagaaaattaactcttgcatctacttttccggcgtcatgccagacctttatagctgattcaatcacattaacaacaaaagtgaagatactttgccccaggtcggcatctccatattttccaccctgaaatggaaatgcatccaaacttaataaacaaccaaacatattcctttatccataggaagtccttttgtttccatttctgaaaattcaactggaggaaaaaattgatattaaacacttgacatttgcaggtgatctgtgctcatttaattcaaaagacttcccttcataatgtgtgacctagctgctaaatatgcatgacatctt

SEQ ID NO: 29894 - DNA, 444 bp, Oryza sativa
  unsure (1)..(444): unsure at all n locations
tgcggcatgcaagcttgtttgaaaataaatttcctagagattctactgattnggnctttatggcttgttcctgggtggattcctaagcatctttgcagaagttggaagtaaatcgaagaagactgcagttgggagccagacttataagacaggtggcaagtgacatcttctgctcaagacatggatggagacctgnaatcaggaggatagaaggatgaagatgttattagttttttgtgatctgttttatcctttttgatgaccaaatgatgtattcgtgttcagccatctagccctgtgaggcatatggataagctctttagctttctttcctcgtatttgtttttttgttcccctgactttgtaaggatatgttcatttctagtaagagaaatggaggctctctggccctagttctaaaaaaaaaaatcctcgtaaagaaag

SEQ ID NO: 29895 - DNA, 290 bp, Oryza sativa
tgcattaatatattttgtgatagtcaaagtgcaatatgccttacaaaggatcaaatgttccatgagagaacaaagcacattgatgtgagatatcactttattcgaggtctgattgctgaaggtgatgtgaagatatgcaagataagtattcatgataacccagctgatatgatgacaaagccagttcctgctactaagtttgagctttgctcaagcttggtaggtgttacagtatagtcctagagactatttggcgcgcggtgattttacctacatgagggtattttttt

SEQ ID NO: 29896 - DNA, 442 bp, Oryza sativa
agctaggacttcagctggagggctgtctgtttatatgttatgtatctgctgtactgtctaaaggagagctatgatgttgtatctcaaaaagacatagaaagccctggtgagaggtctctttctagcagtaagttgtcgattcctcatagaaactttttcttttgatatccataaccaggactccaatatccttatgatcttaccatttacagcttcagcaacctccagtcttagcacagcaggagcttcaaagggcaagaatagttggaagttaaagtaagacttaattattgcaatctttgtcatcaaatagcatacttgtgaaaatcaattgatttattagtaatgcgttgtggcaggtccattgttacacttgcattgacattactaacaagttctcaggcaatactaattgtgtggtcgaaaagagctggaaaatatg

SEQ ID NO: 29897 - DNA, 461 bp, Oryza sativa
  unsure (1)..(461): unsure at all n locations
tgacaagtttgggtatactaaatntataggcctcttatttcgtcaatagctatccgtgccctaaatatgaaatacccaatacatgtatactaacttcggtggagtccaccatataccaagttttatacgaaatcaagccttaaacatatgggaaaagtcctggatagacaatataaacttatgtaagttgatgtggtttatgataatttaaatttaaataataatgattcaaatgtaaaagttgttgtggttttatgtaaaagtttggatcatagattaatcatctaagggctaaaacaattgaggtgatatgacttaataagagaagaaattaagggagataatntgaaccatgaataatcatctaaggacaaanataattgatgtgatatggattaatgagagaagagagagagagagagcacattaacttagttaggagttaggatgaactatataag

SEQ ID NO: 29898 - DNA, 439 bp, Oryza sativa
  unsure (1)..(439): unsure at all n locations
agcttgcccgcaagtacaccaaacacacacttattggtgttcagctttatgcgggcggagcggaggttctcaaaagtttccgctagatctgaaagtaaagtttcttggttgcgcgtttttacaaccaagtcatcgacataagcctcaacattacgtcctatttggctacccaaagaaattcgagtagtacgttgaaaagtaggacctgcattctttaacccgaagggcattgatgtataacaataggttcctacgggggtaatgaacgcagttttttcctcatcctccctagccatgcgaatctgatggtaaccagagtatgcatctagaaaacacaaaaggtcgcaccccgcagtggagtcgacgatctgatctatgcgaggcagggggtaaggatccttangacatgccttgttaaggtcggtgtagtcgatgcaca

SEQ ID NO: 29899 - DNA, 441 bp, Oryza sativa
  unsure (1)..(441): unsure at all n locations
tatcttctagaaaccgggttttcacgagctggctcgtactatggagatgcttatcttctttttggctgtactttgtccttgaattggccaacgtggagacacctctgtacctgcgcctttctttttcgccgaaagcaatattctccacagtatttttaacagtcaaatgtcattcactgtccttgcattttggattgattcaaattcaattcatactttggtcattcgcaaatatagtcttcccacgcccaaagaatggatatttattatcaatctatattatattgctttattggtcaggcttgccatgaccacctaaatccatagtatctacatcagaaaaggagactttcaattnttcatcatatgcttttttcatttcttcaaattatcattcattctttcttaattcttaaggattcttctttcaatctttttaat

SEQ ID NO: 29900 - DNA, 255 bp, Oryza sativa
ggagacacccgaaaaaaatttacgaatcaatacaatagctcttacattccaactactgttgggagaaccatgcccttcgacgtggcatagttgctcatttgacaacagctggcgccgcccgtggggatacccagaccgaaagggcgaaatgggacccctttcgccacacgccacgcccttcgccatagtgccaataaggcacggcgtcaagggctgcgggtgaagaggattcgcccacccatgcccatcgccata

SEQ ID NO: 29901 - DNA, 456 bp, Oryza sativa
tgccaactgatgtgaacgcgatcatccattatgttgtatatctcatgaacacaccatccaactgtgtttagtacttcgtatatacttgttgcttgcattcgcatgagtaccgaagtctattccagcatgacaaggtttagattattaggcttacattatcaaaattaacgctattcaaacggtcattttaaatttgaaaataaatcctaacgtatgccatatagaagtaagagtatgtattttatttatcagctgaattttcagactacgaactagtacaaaagtatttgctattgttatagccatacatagaatctgtttggtagagctccaacccctatatttaactccaggagttaggtttagagtgaaagtgtagagcggcctataccaacctttctagtcattttgtagagcgctcacccagctcgctccatttacgtggactgaactgtt

SEQ ID NO: 29902 - DNA, 252 bp, Oryza sativa
taatcccattatctgatcccttatgaatttgcacggcttctggaggatacctcatatttatatgacacctttatggtggatagggatgacagctagtaagtatggattacattgtgctcttttctgttgataatgcgtggcaaagaaagcattctcaatctaatccaagttccttttgttatatgatactccatatttatggaaataatctattggaactactgaagtagcttctacgtaagttcacactac

SEQ ID NO: 29903 - DNA, 452 bp, Oryza sativa
  unsure (1)..(452): unsure at all n locations
tcttagcactcggccagtgagcgtgaggagcagaaagtgttatatataatgtgtccggagaatcaacacgattgcaccagagccaaaaactcctgaagtgcatttgtaatttgagcaagcggaagatcccaaggataaacttatggcccacagcactgggattaacgttaacctgtttttttttaattcactgactcattttattcgcttaatgtgtttaattggaccttcttataatcatcttgcctgatgaattctctcttgttttttatgtcccacagaaatctctagctcaagagtgcttgacttttctcaacagtgctaataagtgagtttggcattatctttacaaccgacttcacaccacttctgcatttctaatgcatggttgtttgtgtgttcattgcanggagcaattaataagcttaaaggtttgctctgaatcatatcgt

SEQ ID NO: 29904 - DNA, 438 bp, Oryza sativa
agcttcaaaagtgccatacctcatcttatttatcttttgtttggctctccaggcctttgcatagcttatggtgtacttgaatttgttctcgatgtgcctaataattgattttggttcaaagccaatgttaccaacaacactgctgtacatctcacttgccacaaaagctgaagtgatgtttcggtgatacttctccaccccttgtaagtagcacttgtgctcggtcacaatgctaactttccaataatcattccatttacccttatatgcatggacacgccacggacaatcttccttcatgcacctcacttcatacacataatttgttgacttgaccaccctaaactctctctgcaatgaaactgcccaatgcttcaccgcctccttcatctcatccttatgagcataccttgcaccctcaattacctcgtactcctt

SEQ ID NO: 29905 - DNA, 433 bp, Oryza sativa
  unsure (1)..(433): unsure at all n locations
tagggggttntagtgacgggcattagcgatcagtttcgactatcaatattaccaaaatagaggagaactagttatgcttgcaatgcatattcacgttagaataataatattccactagtagttggttcactaaccttttgcagggaataaccattaagtggagtacaatcgacatcaaatcagacgataaatcaatcggatgatgtcgagaatcagacttatgcacgaataggcaaaaaactcataattgacaagatgaattgagccaaaattaacaagtctgcgaagagaagcaacagaggatgccaccagccaaaacctgagctggttgggccggcccctagttcggccgaacccccctagcaccgttggatgcangatttcttctggacggtgtggatcactccccaatgacggntggagggcaatttcg

SEQ ID NO: 29906 - DNA, 427 bp, Oryza sativa
  unsure (1)..(427): unsure at all n locations
agcttaatgaanaagaatccctctcttttatctcagtcatcaaaatttgaattctgaattgcttaaattcccctcccacgcacccactttgcttaaaatgtatgaattttgcattagtatcaattctcataactcgataaattttgaatcctagaaatatttatattttattaagaagcgagtatatggctatgctatagttgggacctgtctgttcgtagttgagtttatgtagtgatcatttgcaattcagtaattgttgtagcatcaacctaaaaagcacaattcaaacttgtgtgccatctgttccgcatcatcctctatttggtgctgctttgatgatcctatcatctatcctctctccncaattcttgcaatctcaaagaagatacaatgtgagcacacgcttgcagaggagcacgtaatg

SEQ ID NO: 29907 - DNA, 394 bp, Oryza sativa
tggaggtctcccaacgtggctgatccccacgggctgggttattctggctagtcatgtccggtgggtaaagtgtaccccctctgcagaggttaacaaactgttcgataagccgtgcccacggtcatgggcggatgtgaggtgattcctaacgtagttatatttgactactgcttgtgaaattgctgttgtggaaaagggttcgatagttggaaaatctgcagctgatgggatcagctacgcccgggtggccgtttggaagttgttggcccgggtggccgtttgaaaagctgttggccgggtgccaaccttgtttcaatactaaagactaatacattgcacatactccgaccggacgagacgcactgtctcatccgtgtcgttaagaaacactcac

SEQ ID NO: 29908 - DNA, 430 bp, Oryza sativa
agcttccctcgcagcagaaatctccacagactcgccgttctatgtttccccggtggggaatagcgcccgcggcgaggtgctcaaccaaactgcggcggcggcggcagcggcgcgagaaatcgtggaggttttcccctcactaccactgtggattgggctggatttgttagcccaatttattccgctcaatcagaaaaaggatggcccatctcggcccaggaaataaatggacctgcatttttttcagtccaattcaattcaaacccaataaaccggacacaaatttataaactgttcctgattcaactcgtacagtttttatttttttaaagaaaaaaactattaaattcgtacagtgaagagatgaacaatgaaccctagaggtagcttcctctaccaatttccgccgaaggatgaaaccagtacgaaa

SEQ ID NO: 29909 - DNA, 439 bp, Oryza sativa
agctagtctaaccctagcttgcataccaatgtattattgtttttctaagcacagaagaatcatacacacaggagtagggtattacgcttcatagcggcccgaacctatataaacctcttttgtctcatcgtcttggaggagcctccgagatcaagatcacacacagtttcgctcaccaaattctcgaatctcacccgctgcccccggtcgaactctcaaaggggggcctcacagcctcccgctagagagggtcacccctcgacaatctgtgatgtatttaattcgtgtgtagttcttttaggaattgtgatgtatttgatctgtgtgtaggatttgtgatgtatttgatttgtgtgtataagtaacttgatatttgggatgttgatttggggatgtgcatcctattcgattcgggtgacaatatattgattaacactag

SEQ ID NO: 29910 - DNA, 387 bp, Oryza sativa
  unsure (1)..(387): unsure at all n locations
tctattctagnttatacctggcattgcaaccaactattcttcctagctgngattccatcattcatttcttgggccgtacgaagggcaatcgcctgcctacccctacttcgcatgcggtcttgtaaatcatgagatagatcgttagctaatccctgcttaaaataattctgcatgtacctaaggaacgtgtcctccacaagctatttttttaagagaaattagtccttcacgtttggttattaccttgttaattcattcggccatcttatttaaagtgtacatatggtttttcatgttcaacgtttgaccgcttatattatttaaaattctcctggtgatagcaatcttctctatcagattagtaaactaaaactatattttatacgt

SEQ ID NO: 29911 - DNA, 433 bp, Oryza sativa
agcttaaacatgtgtgatacaaaaaatcagtataccatgaactaatctttgcaaatagcgctacaaataaacaatataaattgacaaattagagagtccatgttaatcggaacgccctcaataggagtttgcctttttagagcacatacacccaagaatcaattcagagttcagacaagaaaacaagaattttgacaggaaaaaaatgctgttttgcatcatctgaatgatctgtttctcgtatataatcctaacatttacatcaggagctaatgagctatgtacaaacagcaagttgatggctgaacactctgacattgtggcaaggcctcgccatggagctcaagaatgccctctcaacctctttagaggcatctcttctaagcagacacaagacatactccatcactgacgcatcgcacggcaacgtgat

SEQ ID NO: 29912 - DNA, 415 bp, Oryza sativa
tgcttcggccaacagatgacaaagaccgaagcactgcagcttattgaaaggaatactcgtattagatagaaattgtggcaaattgtattgaactaaaataaacataaacttactgtggatatattcttcctgtcctgattgctcgttatttctcaagaaagcctgcagcctaataaacctctctttccaatcttgattgcttgatctttgtggatcaaccggataacatgctggaacagcaccacgagatgctgtactagtagccgaaacactaaaagatgcctaattagctgctatagaattctgagaaactgtagtagtaaacgccaaaatgcgaggtggactagcaaccgcaacactagaagatgccacaatggctgctataggatttctaggaactggagtagtatacact

SEQ ID NO: 29913 - DNA, 351 bp, Oryza sativa
  unsure (1)..(351): unsure at all n locations
agcttgctagtccatgactcggcaatctccttcacttatattggtgcctcatccctcactcncattttggtggcctctcataaacctccatgccagccaccttggcttctccacttacaccgatcggctttcacacaccaaaattgaagtttactgctactaatcgagcttcatcacgactaatcaactactttcgcgtgacaaatgaaggatatatatgtgatggcattgaaatcatctagaacatttcagatacttacccacattaaggaatgacattagtatttgatgcacatataagagaccgtcgagaagcttataacaaggatgtcaatgaaacacaacggacat

SEQ ID NO: 29914 - DNA, 263 bp, Oryza sativa
tgaagacaggaaaacattttcccagaacagaactgcccacaacaaacatatcaggaaatgagtgaataccttcccactattcacagtagccattacaaaacaatgattttgtccacaccaaactcataacaataatatgtccctgcagaaccaattcttcatgaacctaatcaatataccaagaacaattctgtccaaattgggacacttattgatgacggataagacttttttttggctcaaaaagatagaaaacgcatata

SEQ ID NO: 29915 - DNA, 408 bp, Oryza sativa
  unsure (1)..(408): unsure at all n locations
cattgctcaatcgacagtataactatgaattgggtcatgtatcgatcatagagatcacggtgccctgtatcattgctaaatctacagttttaagtgcttatagattcgatgatgttaacattaaaccggggatatttgctgaaatggaccntcagtctactgctggtccgatccaaggaaccagtagaaacatgtaacaaaaatgacgacgtgtcttgcaaacctgtaaaaagatttcatgtggcaatcactatgaccaatagcgcaccatctaaccaagtttggtgtaccaatcactcagttttcaagtttatgcattacactgcacccacctaatcaagtatgtgcttgatcttcaatgcacattactcggttaaattatctaagacatacaatgcacgtatcctg

SEQ ID NO: 29916 - DNA, 441 bp, Oryza sativa
agcttggaagaattggaagtcgaagctctttatttagtttgtcaaccctcccagcaatcatacgccgttcgatgaataccctcaaataaccgaagcggtgtgggaggaattctgctctctcaagaccacccaagagtttagggaatcaagcgaggcacatcgcctactgcaacagcggaatgagcacccgcatcggctgggcaccgcagggtacatcggcaaggaggcaatatgggcccaagaagatgtagccgctgcagcaacgaatgtccctgccccgttttcagacatccctgaacaaagagctcgcaacttggcgcgggcaaggggtaaggtcaacccggacggctctgtcacatttgagaacaaaagtgatgccgtcgtctatcaagaactggtgagtttactacttaacctaactaatttccgttcgtataaagt

SEQ ID NO: 29917 - DNA, 446 bp, Oryza sativa
  unsure (1)..(446): unsure at all n locations
tgacatatcttgtacctcttgttatctgcaatatgggcaatcacatcacactagctaattcctagcgccaacaacaccactagggttatgaggcatcaaaaaacaaaagaacgcactgctcattataccttgttctgggtccattcccaagatgtangaagggcctcttctgacccacgtcagaacttatacatgctgctactgcttcaagccaggggctagtcttggtaaagaccatctgctcggctggggcgatgcataacgaagtgataatttcagtgagcagacacgcagtgactgcacgatggagaaatggacacggggtttcatatcacttgtagtttaaaaattgttgtttcgaaatttgaacctctcgcgatgtcttcttttcaaggactgtacaagcacttgtagttctttcatgtgtggcacttcatgacggcatg

SEQ ID NO: 29918 - DNA, 370 bp, Oryza sativa
agcttgccaacttcctacgtcaccgttgatgcgagcccaacttcaccgttcaaaccacgaaaccaccgcaagcccccttcgttaaagggtgagcaaggtgggagccggtccacgaaggttgttcttcctccactccagagatggcgaacaccgagccactcataatcaataccgggcctcctccacaaccttcttggagaggtcaccgggcaactccaccaaaccatctaggaggtggcatcctccaagagtaacaattatgaaccgtgagttcctctcgacactcaaggctgttgttggcccgatctttcggtgagttgtgataactacgatttgggagaaacgttgatgatccgactacaaccgtacg

SEQ ID NO: 29919 - DNA, 459 bp, Oryza sativa
  unsure (1)..(459): unsure at all n locations
ctgagctgaatataagaggctctgttgtactattttgtattctataattaggaagagagtagagtataagaaatcggaggaatttcggagatgtcggtaatcctctcatgtttattttattctggtaattactctattttcaatagaaatatctttctgagtaatttagatttacttgtgagtacttgtgagaattacctcttataagaattattgatcacaaacatatattgatctcgccacaattccgtcatcaccagccacgccaagcaccaacccgtgatgtgtttgtgcttctaacggtggctgctataacaatactgccatttttcatttaagcaggttgtccatagaagtcaaatttgagaacttcatctcttcagtcctttggctcacatagcanaactctgagttatcgtatacatgaattgtcagtaagtcagagtagcatatacgtaa

SEQ ID NO: 29920 - DNA, 419 bp, Oryza sativa
  unsure (1)..(419): unsure at all n locations
ttagccgacttcgtcgccgagtggaccgagtgccaagatgtctctctcgaggaaaagatggagtggagtattggactatgcactctgacagggccggaggtgttntaatttccccaactggagaaagactgagctacatgctatggatacatttctctgcatctcacaacgtggcagaatacgaggcgctccttcacggactacggatcgcaatctctttgggaatcaagcgtctgatagtttgcggagattcacagttagttgttaatcaagttatgaaagagtggtcctgtcttgatgacaatatgatcgcttatcgacaagaggtacgcaagttggaggataagttcgatggactcgaactcacccatgttcttcggcacaataactaagcagncgacagattagcaaatttcgga

SEQ ID NO: 29921 - DNA, 439 bp, Oryza sativa
  unsure (1)..(439): unsure at all n locations
gcaagctagagatagcggagagcgtnctcacgtttattgctcacancctcaagacactctaatcctatctatgtgaaccaccgagttatcatatatgctgcataatctagattgatctcgtcatctaatctcatcggctagcctctatcatcgaaaacggccgacagaattagatatcaacattaagctagattatgcggtatatctaccatatcaaatgagtcttcatcgttcttgcttagatcttatgtttcttttcacacttaatgctgcattaggtaggttcgatctactaagtactgtcttgaaacattttatctagctctttctatgaatgctaatagagttagtatcggagtttcagccgatcttacctgaattagccatcgagtttccactacttgggtcttgatcgtctaaaattgccctttatattaaa

SEQ ID NO: 29922 - DNA, 468 bp, Oryza sativa
  unsure (1)..(468): unsure at all n locations
tgcgcgcggaatacgatggaggtgggttgggaaccctggattccaaacacagcccaagtctatccaaaatgtttagaccagaaaatacgtaacaagttggtttacagaaatacgaattagatcaatcctgcactacaagtagagtaaagtggtgatttctcttaaatctctcgaatggtgatttaagaattcaatgcaaacctaatccttgctataatcaaatgttcggtaccgcatcaagggaacaataaaaagcgcctggcgtaccataattttgtcattcttgttgaaatttgtaatttatgatgcatgaggccacacgaccttaatgttcaacgtgtcatgcagtagtgaaataatagctcacaanacgcagcacatatagctagataacggttgcaatccttaccatactaacgtataaagtgagcgatgagtcatatcattatctcccgcctgctaccatcg

SEQ ID NO: 29923 - DNA, 355 bp, Oryza sativa
tcactagttgggctgtgtgcaaagaaaatgatgtcactttctgtttgtccagagaagacaaggcagaccatgcaaagtcatcaatgcactgggaatttgtcagacaacatacctttgctacttacatcactgggttgaaacttgattcccagtcaaggatgccgccttcaagttcagaaaaatatagcttctgtattaatattcagactgttgagatatcccattggccaatgttttgttcataccacttgttagctgctatactatgaccaaaggagtgggttgactattagtaggcaccaatgaaaaattacgtgattgaagaaatgtttaataacaaatgatgtgatgtctg

SEQ ID NO: 29924 - DNA, 443 bp, Oryza sativa
  unsure (1)..(443): unsure at all n locations
nttccttcatgctattaaacagggaaaagcgggagcttgttcgtcctcccaccgccatatatacaaccaccacaacaactccttcgtttcatcattagcaaggaagaggacagaactagtccgcccaactgccttatcgttaccacgtaccagcctcacgttgctcgagcaacctatgcccaccactacacaaacgagtccgtcatggccattccatcatcgtaagagagcccaacgttcaccgagttgccatcgtttatctcaccaaaagttgacactactccgccatcgatgtaaaataacatgacatccattgtccccgcaatgtgaacgagctcaccaccaccctaccatagttaccatattgcctcacatccgctgagccactaaagcttatctcatggaagagccgttgccaccatgccgttgtggccacaaaccac

SEQ ID NO: 29925 - DNA, 386 bp, Oryza sativa
ccgaacggggctgagacctgtttctttcccgactggtttggatccgaatccaggagagagatcttgcctaagttgttggtgatgaaatcgaggctgtcgaaccgaaacgcctgcccgggaaggaagactaggtcttctatgccggagacggaacccatcgcactaatcggcaaagaacttgacgctgcccctacctggtgcgccaactgtcgaaacaagattttggcaatacttaaaggggttggctatcaagctagaaaagtggatgggtttgaagacaaggagttttatacaggttcatgccttcttattcaagaagtaataccctactcctgtccggggatgattccaccgagtatattggtgatcgtatgatatgggggaaa

SEQ ID NO: 29926 - DNA, 460 bp, Oryza sativa
  unsure (1)..(460): unsure at all n locations
tatatatattctagcaattatatacctatgtacttacacctcaatggtcagatggtttcgaacgaggagtacaagagcgtggagcacacggtggtgatcaagtctagccaagacgccagggtctccattgctgtcttcttcaacccagccaagcgcgatgcctccgacctgttcgggcccctcccggagcttctcaccgcggagaggccggcacggntccggcgcttctccgtgccggagatcatgcgttctcgaagggaatccggccatggcaagtcatcgatcgattcattcaggattgctgcagattaacgacggctcagcaggcaacattcatggacaaggtgatgctaccgagtaaaagatgntctgaagtatttcaacgcttaatggatatgattgttgtagatgtgtgtgcaataaggggtatattaatgggttaagcctgtacataacaaca

SEQ ID NO: 29927 - DNA, 323 bp, Oryza sativa
  unsure (1)..(323): unsure at all n locations
agcttcactattgggaccctagcccgaggttatgcctgctttcattcaacaagaggggaaaacacagcctatgatcgaactccaaccataatggaacaaggcctcaatgaaaatagaataacaccacccacagattcactatacaagaggttcatcccaatggaaaacacaaagcatgttgtcaatggaccaacataaaattgggnnnnaaacgatgaactcttgatatatgaatatctcacatgacacatgatttagaaagacattgcacgccacatcaacacattgtatagggaggggggggggttagagaaaatacctac

SEQ ID NO: 29928 - DNA, 268 bp, Oryza sativa
cgacatcatcatgggacaaaagttagccttcttatcgctacagcacgcacttagtatcaaatggctgtgagggatgttaggggcctactgaaacctgggaagcatggattacactccaagtgtccaagacccttgtttatgcgtgctgtgtgataggggcaaaacccaaatatgttgggagtgcctccgatcataacgagcatgacttggtcacggaatcttgccattgggcgtctttaattcgagctcaagcatgttagccgatgca

SEQ ID NO: 29929 - DNA, 363 bp, Oryza sativa
  unsure (1)..(363): unsure at all n locations
agcttgattcacctctgcccattaggccactcctgctgcatcgctntctgttcgattntgcagcgcagcggcattgattgctcacggtttcttggagcgagacacatcagttcatcgtcactcatgggggtaagcaagtgtgatctttgtctctgcaagtccaagctaagaccatgtgatattcttcaatgtttgtgtggcacaatgtagtagatcatttacaattctgtttcgccttcgtctgcgccgcagatcgtcaactgggtgcaagggaggctgggtgggaagacatctgcggcggcggagagcacaaggctcgccgccggcaacggcaatccttcngtggtcgcggcggtcgttgcg

SEQ ID NO: 29930 - DNA, 347 bp, Oryza sativa
  unsure (1)..(347): unsure at all n locations
tttatactttcatattaggggngaanagcttggatcttttaaaccattaacagctgtattattagnttgtatgaccaaatttgtataattaattgaaagttggtatgtatatcaatctgtgcgtgatcgaaaatctagacgatcacgagtggatttttggggcaccaaacctaaattgggtgtccccacagttgtcctcctacccacttcaaaaatttccttttttctctcctcttccccatccgcgcgcgccgtaagtctctctcttcctctctccctcttatccagtcgatctgtctctctctatccttcctctctctctcactcctccatatgctctctcgatc

SEQ ID NO: 29931 - DNA, 413 bp, Oryza sativa
agcttgacccagattatagaaaaaagtggtttctttttcaactcaagacaaagttattatgaaaatatattccattattaattcgatgaaactaatttaatattataaatattgttatatttgtcaataacttagtcaaacttgaaacaagttgacttttaccacggttaaaacctcttgtgacctgaaacggagggagtatatattccatggatggtgttttcacattaaaattttatccaatcacctctcttttctcttctttcatgcatctatccccttgtttttatttttggttttagagagagatggtttcttacatgagaaatggtgttttatctttttacctctctactcattaactctcttgcatattaagattttgcttctgggacatataattaatgatatgg

SEQ ID NO: 29932 - DNA, 333 bp, Oryza sativa
agcttgaaatctgtgaatatttgttgggcaaaggatcttgatgatatgggtattaatcagtgtgctactcacatatattaaggtatgcacttgtgcatgggtttttctgtttaatgaaatatgatggaaacagttgtcggttgctgggcttaatgaaatggtacttgtaataaatggtgctcgctacaccatcttatcttctggcttgcggaggtaaaataaattggatggaattgatagttgatgtaaaatacataaaatttgtcttctcaagccattcaggttatcagaatttcacaaaatgcacaagtttgaaatgttgtaatttttatt

SEQ ID NO: 29933 - DNA, 405 bp, Oryza sativa
  unsure (1)..(405): unsure at all n locations
tctacgatgttgtgttcgatgcggtatatgctccgaaagtcatccttcttctacgagaagcagaagaatgtggggttaaagttgtcagcggtgtggagatgtttctcaaacaagccttgggtcagttcgagcgtttcacaaatggtattgaagggattgtgtccctctaacttatatcatacactttgttatgccaaatgctatcacccattcctctttctgataatctactttctacagctcctgaaagcctgatgcgtgaggtattagcaaaacacacataacaggttcgttcttcagctnttgccttttcatttctattcttctagtcgaagtgatgatgggttagtatatttattagattctgttggatcatttgcattgaagacgttctctaacaccatg

SEQ ID NO: 29934 - DNA, 392 bp, Oryza sativa
agcttgaagccctcatgcattctcttgtatttatgacatggcttcccagcagccttagctgtcatacagtagtaatcaccaagctgccctttgtaggcaagcagagtaccggtgacatccacagtgatcaaccgcagcttctaaatgagcgacatgttttgacgatgatcttcttctgagcagcaaaaaaataaaacgatgaaaattctacagtggcggatctaacatggggaaccatcaaactgttactactactagtattaaggttgagggcagatctctagaacagaagctagaggcttacgcaatatttgagaagaaagacagaaagtgcgttggtagagaggtgtgccgtgtgcgttacggatgcgggcagaaggagcacaacgagc

SEQ ID NO: 29935 - DNA, 378 bp, Oryza sativa
gttgttgccttatcaacctcactacgggaagttgtgtttatccttctgtcattaacaaggatgaaattgttgaggctattgaggatgctggttttgaagctgcattcttacagagcagcgaacaagataagattttgctaggcctgactggatagcacacagagcgggatgttaatgtgttacatgatatcctcaagaagatgattggtttgcgacagtttgatgtaaatgctacggtctcagaagtagaaattatatttgatccggaagcagttggtctgagatcaattgtggatgcaattgagacaggaagcaatggaagattgaaagctcatgtgcagaatccatatgcacgatgggcttcaaatgacgcacatg

SEQ ID NO: 29936 - DNA, 431 bp, Oryza sativa
agcttgacaattcaacaattttccttgtctttctgggctcctgaccactcctaagttcagtacgtctttgctgatctccaagcaccttgggctgcttgataataattttcttacgaggtagatccttctccacttcagcaggaggccttattacaacagatggcttacgagtatcatgaggataatcatcatattttatcttgctagatattttaatcttattaacctttccagttgatttcgaatctgtagcatccatcatacgtttatcataaaccaaagaagctgagattgacatgttcctatccaatgacttctcaggtgctccacatttgaattttacagggacaggtttagccttttcaatactttcaggtccttcagattcaaaagcttcagacgaaactttagctaccaacctcttgattgat

SEQ ID NO: 29937 - DNA, 340 bp, Oryza sativa
  unsure (1)..(340): unsure at all n locations
tgcgtncgccaactcatcgattcccactgcacacttatctctttcttcgatcgattgaacagcttattcctcgcataaatgctagatgcggccggccggcggattaattgctagggtttcctcctcttcagttctttctcatgtaggccgggcgtacgttgtcttcttccaagatcccagacgatgcaagcctcatcggcggctgcggcagcagcgtgctcggctatcaagccggcggagcatcatcacaccgtgcatgtccaggaatgtaaccggccgccgacagctgacacacaactgttttatactgacggttgtgagccttgttctttgattactt

SEQ ID NO: 29938 - DNA, 434 bp, Oryza sativa
agcttctctccacttgatcgcaagtctgctctaattacctatcttcttctatatccctcatgaatagcttcttaaaattcatcaaactccccttattaagttgccccccttgccatcaaagaaacatcagactgaagatacaaatcaagttctgccatctaactcgtgagatggaaggagataagtttgtaatacatctccatgctcgtatattcttttcctttttgtcatatgtatgcactagtctcatatttttttatagagaaatgctagtaccatgttctgtacctcacattggaatggaattcaaaagtccagatgaggcttggatattttggcatcactatggaggtcaaaaaggctctgaggttaggaaaaggtacacaaactaaagacaatcatatgacaaagttacatcatttagatatgtttgt

SEQ ID NO: 29939 - DNA, 380 bp, Oryza sativa
  unsure (1)..(380): unsure at all n locations
tgatgagcctggcccgctgcacatattaataactcatgcaccatccttattccatccacctctaacaagctccttcgctatactaataccttnggccaaatctatacgatctagatcctacaacttgcaagtgccttcgcttatcaaatgccatccagtaaaaatagaaaataattaattccaacgtaacttgcctctatccgaatggactagattaagcagcacttagaccccacaaatccaatattgcgttccagcgatcaccggtagtggcaaccaatccgctatcattctgacagtgccgctccgtgttgtaactgctctgcttactagagagataccacatcacgccatttcgctggatctaacaaccctagtca

SEQ ID NO: 29940 - DNA, 351 bp, Oryza sativa
agctttgtactttatttagaatactcttctttatacatttatggaattgaaatactttccgagtatatgattggccactttacattatgttcatggtatattgaatatactactaactcatctaggaaatggtttaatgcgggtataatatttgcgtatgccattgctctatgccctgacgaagatattagagtagtatctggtagtttagacgtagtgtctagcttacgggatatcattatttggggttatatgctgcggatgagatgtgggccgctgatagtgacagctcagtacgggtattcctccgcgcgtgtatatagtactaagttaatttcctggagaggatac

SEQ ID NO: 29941 - DNA, 464 bp, Oryza sativa
actcagctgctggttttctcaacgacaagctgaattttgcctgcttgagcatggaatccagcggacttctccaactcgtgatgtctattgtcccattcacaagacgaagaatcacgacttctcaagctgcaaggtccttctccgcgccatgaagacgccgcttcctaaggtccagcaatcagaaatctctcttaaggatgcagataaggaacaaggagcgacgttgatctcgaatcgatttattggagtaatcaacatcgatccccacgagccgtcagtcctacacttgcttgaagactatggctcgtcatcctccagcacaccacgtgacgtgtttgccatcggtgggactagcacgtctatgcacactaacgcagagacggggaaccaggcggtcacgctggcccaacacctcgacaccatcaatgcaatactgagagaaacttcctatgatcctatactta

SEQ ID NO: 29942 - DNA, 414 bp, Oryza sativa
  unsure (1)..(414): unsure at all n locations
agcttggaccatgattattngcaactgcattatgtgtgntatgcacattttcctcatcaccagcggagcatattttgatgcacgatggaagacaccgctgaaatcatttcaaaatatttatgcttttatctagaataataaggtgtcaatgaaacggccgaccatagattgatctgcagaccccatagaccctggtttgctacggttctatcctacttttttttccttttcaaatttgtaccagcaagttcccgtttatcttattttaatcaataataaagggtgcatgcatgttatccatgagatacccactccggtgccctctaattgtagtagaaaataatatgaaccgttgatctcatttgatcatacggttcagatctatttctactaccatcacacttaatggtagta

SEQ ID NO: 29943 - DNA, 470 bp, Oryza sativa
tccatgcaattctctctgccttgagtccggatgagttcttctttgttgatgggcttgaagaggccaacgagatatgggatactttgcaattggctcatgaaggatcacccgccgttcctgaagccaatattgagttgttggaaagaagacttggaagatttgtgatggatgacaagtttacacctccagagacgtatgataggatgatgatccttgtcaacaagatcaaaggacttgggagtgaggacatgacaaatcactttgtggtcaagagacttctccgtgcttttggtccaagaaatcccactcttgtatcaatgatacaagaaaggaaagacttctagatgctcaccccaagtgatattcttagaagaattgtgtctcatgagatgcaagaagaggaagctcgtgaagtgatgcatatggtgaacgaatgccgcatgatcaaaaatcaagatgtatgtttgacg

SEQ ID NO: 29944 - DNA, 404 bp, Oryza sativa
agcttgagagctccagctagtcgatcttcatcagcggcacacacaaaaagaaaagtttttttcggtatacattatacagctgtactccatgagtccatgtatatatacgctatcgatggccaatgtggaaagttgtgaggagcaaaattagtttaagtctggagctgtgttgtctcgcgaaaagaaaagagaaaaagagttagagagagaggtggcccatatgtggtcgttgtgtcgtggcaagtggacttttttacgtacgtacgtgtgcacctgcagctagcgaccgaccaatcggtatataaaattaaaaatggcatcatccgagaatctcttgggttttttctttcttttcgtttattattgctgcgcacacatgagtacatgacacatgcgcaaatcaa

SEQ ID NO: 29945 - DNA, 297 bp, Oryza sativa
cggaccataaaactagcttgtggcctaaacccaagaactattaaaactttattcctcgcagactaagtagataaaatcaaacaaggcaatgatagaccaagttagcaaattaaattgataaaaaatcacactccattattatgatgatagcccccgactgacaacggcaagaagaaaacttgatgttgacagtcaaaaatagggaaatacaatgataagcttaagcataaaaacggcgaagatgttcaatattccaagagttgtcgacgagagtaccgtcttcgcgcttgagtcgat

SEQ ID NO: 29946 - DNA, 429 bp, Oryza sativa
  unsure (1)..(429): unsure at all n locations
agagtatataagcaggaagtggtttcccattgtggggggggaaaaatattcaaaggatccaagacacatcggagttggagtgtgagttgtacatttttttgcttgatattccaaaaagggcagcagtaaggtcatttctgattatgtcatattcctaaacccaccaagaaacaccgggttcgctggatttggntctgttgggcatcgcccgtcaacaccatgtaaaaaaataaggcatgccacacataaactagatggagaaattgatggatgcacaaaacagatacatagatacaatgtttgcaaaggaacgtgcgatgtggaaaataagccaaaatcgcccaagaaaaagagcatacaaaaccaaacgttttatatggagtgcaccgaaataataaaaactttgaactatcaaataggatattatca

SEQ ID NO: 29947 - DNA, 426 bp, Oryza sativa
  unsure (1)..(426): unsure at all n locations
ggcatacacatgatggtcccgccacttttccaacaccatattgagatggggccgatgggcttcctctgactgtgaggatatcagaatgtcatccatgaaaaccacaaccaacttattcaaatattccatgaacactttattcatcaaggtcatgaaaaaggcaggtgcattggtcaaaccgaacgacatcacccgggattcatacagtccatatcgcgtaatgaaagcggtctttggaatatcttcctcacgaatacgtaattggtgatatccggaacgaagatcaatcttggagaatacagtggcacctttaagctggccaacaaatcatcgatccggggaagagggtacttgttntgatggtgacttcattgagagctctgtagtcgacacacatccttttccgcttgcctttctttctacaaa

SEQ ID NO: 29948 - DNA, 436 bp, Oryza sativa
agcttgtttgtgctagaaaaaagattatgttaatctcctgtaatcaaagtaatttgttgcatctaatcatgccatgaaggggttgcaaggatgtttatcttacaagactagcaatgaaatacatcgtacattttcttttctgtggttaccattgtatcacccaaagtttatgtacatcattttcgtgtatgtgaaattgtttgcgaagttacaaatgtccatcactcaagtggtaattgcactagaaaagcaagcagcaaccagctacagcgatgtgtcaatgacaataaacttcaagctgaacaacttgccggatttcattatgtccatttcatcacttacatgttaaatattgtataaatgcctgccactatttcttgaaaagtttaatactttctcccttagaaaaaaggctaataattgtatgtattcatca

SEQ ID NO: 29949 - DNA, 463 bp, Oryza sativa
  unsure (1)..(463): unsure at all n locations
tgtctaaagaaattagcacattgaacagaanactgagcatgagtagatgtctnttcctttcaaagttgcgagaatatgtatatgaatcgcacaagaggaactgtaaaactacacatacctgcctaagccctttatcattgaatggggactgacgaacaattctgtgtgtccctttctccccagagagatacccataggcatatcttccttctaattcaatggtagctgattttattccagcttcttcaccaggggatttctcaaccactcttgtcttgtaccgctgcttctctccccacctaacatacatcctcagtaacatgtcagcccaatcctacaaatataagccattaaaaaaattataatcacaacttgctcttctacaatatgttttttctccagaanaacacgaaacatcatctatcgccattcttatatgagataaactcatgtaagttgaact

SEQ ID NO: 29950 - DNA, 438 bp, Oryza sativa
aacttattctctatggactctacaagcaggtcttctttggagatgtcaatactggtatgtatactgaatatttggtattattcagttgttacttctgttttgccaggcatgttctggatgtgtaacacaattcttgagttaacgactcgctgtgtttgattacattcagagacatgggtacagttttacatgccatggattatgagcctaacacaagatctcatagatcaccatgattgtttttatcactcccccataaaatctagtctgattcgaaacaagatcattctttcccatcaaaaattttgggatgtagtattgagtacttcctcattttgtaaattgaaattacaagtgcaaccattgatattgacctgcacactacaacatatatatctgctgcatctagcatctgagttctgatagctgttcatattc

SEQ ID NO: 29951 - DNA, 380 bp, Oryza sativa
ctttcaatttccaaacaccataatcaagacaattcaaaagatggcgagcattatcattatcagaaaattcttttccaacagatctcaacttcgaaataatttctccaaaacgtttgaaataagaatcaatggactctcctgggtgcatctcaaatctttgatattctttatgaaattgattctgacgaaccaattgaatatcattgtttccctcatggaaattgcatagagcagtccacatgtcatgagcggacttgtggtgttgaacacgattaaattcaccagaagaaattccaccaatgattgcatttcttgcacgataattaaaatcaacctgagccatatatgcaagcgtgatgtcagcatcatcgggcacagta

SEQ ID NO: 29952 - DNA, 273 bp, Oryza sativa
cattcgaaccaagcaaatctccaaaaacaagccttggggctttaaagttatacgaactgaccaaggtcatatttcactgcctcttctataaagctttctttactaacctacttcaccaaaaagttgcgccatactaaaaaaataaataagtttcaatgccaatcaaatcaagcatttaccttcactgctactcaacccatgtgcaaaagcatctaactttcaccggtcaactcagttggcatatgctgtttgaaatttactgcaagcaagtgt

SEQ ID NO: 29953 - DNA, 438 bp, Oryza sativa
  unsure (1)..(438): unsure at all n locations
agctncaatatcaatatctttgcatttcacacattgttcatcgcttgggacacattttgaacaagatggctcgctagggagagagacactattctttaaagtttcgaacttctcttcaagagagaggtatgctttgtccaaaccatccactctctcttgaagttgagcgttcgccacctcaagattagcatgagactctttggtttgcttgtaaagctgtaccaatgcctcatntttctctctctccttagcaagctcactcttgagttcatgacaccgctntttctcacgaatgagcaaaacatcttgcctctcaagtgttgcatattggtcctcaattttcctaagcaactcactcaagtgtggtagggattccttagttatggatttaaacaattcgtcatccataacctcatcctcctcatcactaacaagatc

SEQ ID NO: 29954 - DNA, 414 bp, Oryza sativa
tcccagatagtacctcggtgaagtgcaaatgagatctcagtgaccaacctcaagtcagaaaatagagaagatcaaatctaccgagaaaacactgactttagcactttctgcaatggtacattggagccaattcttcttgaagaaaacaatgaatcagctgcgactggaaatataatacaagaaaagaatgatgttcagctccatgtggtcaaggaaccacaggaagaagtaaatgtatctgcattcgcgccttctcacaatgatagcttgatgcaagaaactgacttatctgcatcaacggcttctcacaaggatagcttgcttgagggtaacttacccctgttgacagaatctcacaatagcttgattgaggaaactggaccttcattgacacattcccatgaggatagcatg

SEQ ID NO: 29955 - DNA, 432 bp, Oryza sativa
  unsure (1)..(432): unsure at all n locations
cattgatcaggcaacaacaatatttcataaagaaaaagagaagcagttgaaaaacacatatatagtttacaaactcgagtgtacatgatcagcacaagcactggcttgttattttaagttgtgtctgcaggaggttgcangaacagaaggtatctcgcaatagtcaaatgctatagcaaagctattgacaaaaaaaaaaaagctctgcattgatgcaaccaatcatgcatgtatggacgatagcattgtgacagggaatcaagcttgattctagcgcgtttgttgaacaagtttatcagatcaagggtgaagtttaccaccaataaaatactagtagcttattggctagattggactgtattgatgctgacaataggaaagatatcatacacacccagatgcaaaaatagcaaattaattgttttgatcatg

SEQ ID NO: 29956 - DNA, 356 bp, Oryza sativa
taactatatttagcacagtgagatcttgacataaagagcatatttagcatatcaagtaaacatgagaaaaaacaagataactaaaccaggtaagatcggctgaaactccgatactatctctaatagcaatcataaaacaagctagatattatgattccaagtattacttgataggtcggacccaaccgatgcagcattaagcatagagagaagcataagatctatataatgtaagatcaacgtgtgttttgattcttattctgtgatgaacaattggcgtctgtgattatcgagtttgatatttggagattatcgtcgaagtgggtatgtagataatcaattttcaagtgatgaac

SEQ ID NO: 29957 - DNA, 297 bp, Oryza sativa
  unsure (1)..(297): unsure at all n locations
agcttaccgcanaatatgaacattgatagcccaaacaaaacccagcaaccctaagtttcacctcaaacgaaacgcaaaccctaactggccagaacaagtagacaagtcgcacgagaaaccgggaaatcgtctcgcccccccccccccccttccccaaatattttccttttttcaatgccttgaaccgagaaacaaataaagcttggttgggtacccgaaagaaggggaccagtttatacgaaggaattgatgatgagattaagatgggaatttgatttttaatcccaatatcttggt

SEQ ID NO: 29958 - DNA, 389 bp, Oryza sativa
  unsure (1)..(389): unsure at all n locations
tgcctntgaacgacaggctgtggttccagatccagaacgcctccgacgtctagtctgcgagcatcgtgctgccgtcgaacacctaccgcgcggttctcgaggtgtacgtctcgttccacggcgacgacgagttctggtacacccacacgccggacggcaactgcccgttccgcgaggtcaccgttctggtcgacggcgacctcgtcggcgccgtgtggccgttccccgtgatcttcaccggcggcattaaccccctcctctggcggccgatcaccggcatcggctcgttcaacctgccgacgtacgacatcgagctgacgcctttccttgccaagctgctggacggcaaggcgcacgagctcgcgttcgctgtgaccaacgccgtcgac

SEQ ID NO: 29959 - DNA, 434 bp, Oryza sativa
  unsure (1)..(434): unsure at all n locations
tctaactgtagcatgctaacttggacaaaggtgtacatttgtcgatccgttagatgcagttgacatatgtgatggaaccaaaccaaggccgacttttgtaaacaaaaatatgagagtcgattataagggtaagataatcgagctacttaaagagtatgttgattgctttgcatgggagtatcatgagatgccgggtcttagccgtgagcttcttgagcatcggcttccaattaaaccaggtgttaagccttatgagcaatcacctcgtcgttttaatcctttgctatatgaccgagtcaaagaggagattgatcggttgttgaaggcggtgtttattangccatgtagatatgcggagtgggttctagcatagtcccagtggagaataagggaagtggcaagaatagaggttgcatagaatttagagattaaat

SEQ ID NO: 29960 - DNA, 364 bp, Oryza sativa
tgatgatttatagaggcatgtagaaaaaagaccaaaccttggtatattatcctttccagaagcgtcaaggatacattcagttactggcaacaaattaacagaagcaacagaattcatctatgattggaatagtttcattatcattctcattagacaaggctgaaatataattctttgacatagcgctcgctacattacaaacttgcaaaggctcccattcttttttcttgaaataatgatcatttctagctctccaaataaaccaaagaaggattggaactttttgaaggctggtttcagaattattagttgcaagcaaatatgctctaataatagaaacattttcattgagtcaataatgaga

SEQ ID NO: 29961 - DNA, 425 bp, Oryza sativa
agcttaagataccaatgcgagttatactcctggaagtggcatgaccacaactcactactgcccatccgtgacagttgaaatccaagggttgatttttccagccaacctcattcttctcgaatccaaggacctagatgttatacttgggatggattggttgacacggcacaaaggagtgattgattgcgctagccgcatcatcaagttgaccaatgcgaaaggagaagtggtaaccttccagtctccagtgccgcagaagccagggatcagtttgaaccaagctgttggtgaaggacaagaggtagcagtggagaaaaccactaagaagttggaggatattcccatagtcagagagtatccagagggttttctggatgatctgacaacaatgccaccaaatagggatatcgagttccggattgact

SEQ ID NO: 29962 - DNA, 378 bp, Oryza sativa
  unsure (1)..(378): unsure at all n locations
taacgaacaattntgacaactaagatagcatggtttgcgtatcatcaagttataggcactaatgtatacttattcaatgatgccatgcttctattatagcggtacttatttataaacgagagccaacaagttatttccaagaaagatctaagtgaagatttatatatatataatggtcaatgggtatgtcacatgatcacactcattcgagctatatacccattatgataaaacacactatctactattcaaacacgcaccttatggggttatatgaaacaggtttacatgttcaaaagtgatattacggacgctctatctacagattacagagagcttttcgactttgtccgtgtatatatgtgtaacactatcaag

SEQ ID NO: 29963 - DNA, 428 bp, Oryza sativa
  unsure (1)..(428): unsure at all n locations
agctttcgcggcgttnttgtatatgtgtgtgtgcgctacacgatcacaacgtgtggttggtggcaaactggcagggtgtgtgatggatgatgctaccaaactaaggtgcctggtcaccttctctgaatcgctggggatgccaagaaaaaaaaaagaaaagaaaaggtgatcgatcgatgcctcgtttgcttatggctcaatgctgtgactcgatcgatgggcagaaacgtgcgtttggcttgggacagaccaacctactctagacttgaacagcaattttcggttggatttgagttgataggaacgactatttgtgcaccgcaagtagaaagatatcagttcaggagtactatggacatcttgtcataaagacntagtttgatcggnttagctattgaactcggaatccatttcttgtaatcttgtca

SEQ ID NO: 29964 - DNA, 420 bp, Oryza sativa
agcttatctagaagagaccgagttcaaagagaatgcggcatggcaagttatatattaattaggaatagtttggtagtttccttttatctctaggaaagtgtgtttagtgtcctataaggactttatcttttctttttatctttaggaaagtttctttcttatccgacaaggacttatatcaacccatgggtataaatatgtacacccggggtctatgtaatctatcttcatgatcaatacaattcggcgcatcgccaccttttaccttttctactttattttatcgtctggcgggacttggcacctgacgcggggctgcatcggtgttcgatctccgactaaggggtaagtccaatgttccgccggcccatgcaattgtatcgtttacgtcggcgtcgttcaaggctgcatcagtacatt

SEQ ID NO: 29965 - DNA, 291 bp, Oryza sativa
gacacttgatactcagcttctgcatgtgagggtggatacaccacgagtgttgctcattatcagtgaaccagcacagaccgctgtgatccagaatagaaacccccacccgaaccaaatgactgactggaagacagcaacatctggataataagaatcgtaccttccagcggaggcctccatcggggcaccgcgccgaaaagcatacccctaaacgggtagaacagtacgagcacaagtgtggttgaatcatctcgacattagccaataatttctggatgaactgtcttggat

SEQ ID NO: 29966 - DNA, 391 bp, Oryza sativa
  unsure (1)..(391): unsure at all n locations
agcttctagggttcttggtctctgcccgaagtattgaggccaaccctgagaagatacaggctataaagcggatgcgcccccccagcaaacttatggatgtgcaatgcgtcaaccggtgcatggccgccctaagtcggttcatatcgaggctgggagagaaggcgttacccttatttaagcttctcaaacgcttcggaccgtttacctggacggaggatgccgaaaatgccctcacccaagtgaaggcgtatctaagctcttccccaggtctggtcgcccgggagctagatgagcccttgntactctacttagcggcgaccccgcaagtagttaatgcggcattggttgtggagcgcgatgagacaaatctcattttacgctttcccaccct

SEQ ID NO: 29967 - DNA, 332 bp, Oryza sativa
  unsure (1)..(332): unsure at all n locations
gctgcattngaagccagcccggangtggtgaatagacgtatggtccggcaaagtccgtgtggacttgatggtaatgcccaagcaacccggcaccgttgccagggggccgccagggaggctgctgctgcatgggccatggattaaagcagaaccatgggtcgttaacgcgaagctaatgccaacacttgctgctgctgctgaaagctgcctccagagtttccatagccgccaccgccgtcgtagttctatcgatcgccggtgccgccgccgccgctgttgttctgtccgccattgcgtcgntggttgcgcttccgtccgtttttggagccact

SEQ ID NO: 29968 - DNA, 407 bp, Oryza sativa
  unsure (1)..(407): unsure at all n locations
agcttggaatgtcatggctgatttctgaatcctgtaagcaggatcatcagcggaggcaaccaaaagcggagtcaacgatctgaacactataaaggtatccacattatcacgcttcaggagatgtgtangtgttggtgaagatggcaaagtataacacaagcgccggcggcgcatacttctttgcggtctggaagttgaagggatcatggtaaagtaatccaagctttgctagggtccatacaccagccactgatgtcaagtactgaaatgcagtcaggaggccaacgtagctgaacatggtcatggcatacttggtgatgatcgccagcaagctctagcacagagaggcagacgaaccacggagccctatcagatacaaacgcctctcaccaatcggccgagatgca

SEQ ID NO: 29969 - DNA, 305 bp, Oryza sativa
ctcgcatgtgcttgctcgaaaaacacaaatatatccactgtgaataccaggtcacagcgaccgttatctgcataactgtattgccgggactgtgccaactttagaatattccgaaagaatcatactttagcttcaacttctctcacgatatcaagtccgaacacttgactttctccaactttgtcccacaataacggtgaccgacatttgcgcccatacaacgcctcatatggtgccatttgtatgctggcttgatagctgtcattgctagagaactcggcataggggagactcttatcccaagt

SEQ ID NO: 29970 - DNA, 418 bp, Oryza sativa
  unsure (1)..(418): unsure at all n locations
agcttgacgcacctttggatcattgtaaacaagttgcgctaacgttggtttacccaatcctcccatgccaacaatggccaaaactgacatgcaacctccaatgcggcttccttccaaggtcatcatcttcttgataacagtctccttgtcttggtctcttccaacaattataggcgcaaatacaaaagagctagtctgcctcagactattgatatcagggataatccttctgtccccatcattctcagacaaggtgaaactaccatagtagccttcgatctcaccaaatctttgtataactatccttgctctgacagtcaactcttttggcactggaattatgccagcctcaatgaagtaatcctcgtcatgtacctttncacaaataatacaaaaaacatcgaagagggggactctt

SEQ ID NO: 29971 - DNA, 376 bp, Oryza sativa
  unsure (1)..(376): unsure at all n locations
tcattcttcaatgcgcgaagagggtgcccttcttcaagacccttccgggagcgggagagtttaactggatactatagtgccaagcagcattccacgagctaaagaaatacttgcaaagcccgccagctctgataagcccacctccatgaagcgaactgctattatacttagcagcttagccggtggcagacagcgctgcactccgtccaaaaacanaatcctgacagaaaccggtctactttgtctccgatgcactgtgaggagcgaagacaacggacattgaaatgggaaagctcgcttacgctctaatgaaggctttgcgcaggcttaggactatttccaggccacaaagtcataattgccatacagtaccctt

SEQ ID NO: 29972 - DNA, 435 bp, Oryza sativa
ctgcacgcatgcaagcttgctcacttgagttgcatgcatgcagaatctctttaagatttatccagaaataaaacaaatcaatcaacaaacacaatcagttcttgcatgaagaaatgggcaaattggcagtcaactagtcatcaagagagtgattaatcaatcattaaggaggaaatcatatgctcatatgattgattagtagtggtttctcaccttcttgtgcatcggcagggcgaggctgtactcgtgcatgacccagcagccaccgccggcggccgccgccgccgccgccggtgccttcctcccttgccgtgggacgaacaccatgcccttcttgacgccgacgaggtggcttccgccgcaccgggccaccaccaccggcttgtcccgcccgcccgccggctttcagcacccaccgctcgccgttacatgctt

SEQ ID NO: 29973 - DNA, 406 bp, Oryza sativa
  unsure (1)..(406): unsure at all n locations
agctcgagtgggatacttgttttcttacctgttttctggccatgttattatctccatcgactnttcctctggacatcacgtgagtatcatctctgtgtgtgagtgtatttatttattgagctcctttttcattttagatttttaaacctacattgttgttgaggatttgcagcacttttgacccatttacagagatcccaagtgatgtgcttctgttccaaatatgcatcccgtttgcaattgagcacttcaagcctcgtgcaacaattaaagcacttctgcgtcattggtttgctgctgatggttgggcattatgcttaactganttcttactgccaagacatgaagaagatggtggcaagagaactggaatggctgaactcgtacagatacggttcatggtggc

SEQ ID NO: 29974 - DNA, 438 bp, Oryza sativa
agcttgctgtctgacttgtcttctagagcctttattttcctcctggcaactgcattcctaactctggcaggcgatgcattcctacaggatagtgatccacagccgtcagcacttgcactacttgaaagctttttagggtgatcaatgttttgggaaggaaataagtcatcaaatagtgacttgccagccactgtttcagttttatcagctgatgattcaccagtcattttggtgtcagatacccgagacctcttggcaaatgtattcctcatactggtattgggtaacattctcggtgaatttgtttgatgtccctcagtagttgcattactcacaaacttcttaggggttatcccaattccagtattctcctcagaaatcatcttactggattccaagttggaagctgcatgtctaatcattttcatggagtgaaca

SEQ ID NO: 29975 - DNA, 404 bp, Oryza sativa
  unsure (1)..(404): unsure at all n locations
tcagtcattgagcactatgatgcccacactcgattacgttgtgacttttatgttctgtaataaatatagaagatcattcttctggctatgcacatttcgggagtatatacctcttctatacaaaatgttttgagtcgtccaatggctgataaaccaactctgtgggtcgctcataatggacgtagctttgaagaaccatttctcattgtatgaattccaacggagtacaatagagattcctggtgactggctatttgtagatacacttccaattgcaaggcaattgattgtgtctgatggtacgttcttttgacaatcgtcccgttacttgcctgaancatacttctctgactaattagcaccgctcgagaatatagctatatacagttcaccctgatattaca

SEQ ID NO: 29976 - DNA, 425 bp, Oryza sativa
  unsure (1)..(425): unsure at all n locations
agcttcaggtttattgtattggtcatattgtaccttttataccattttctttagttctcgttttatgatatctttcatgtcatggcattgcaaactatagtagcattgtacatgtgccaataccacctaggggcatctctgtctgtctctagcagagtattaattcttgtggatccaacagtactagcgaacagcagaaacttgggtggtctaggcatatgttcgatgatgttttgcggtttgtcgtttggaggacgaacacaacaagatgggtcactcatgttttgacaacaaatgctgggatgtaggccgtggcaacttggcaaggccgcttgctccactcgattgtacattntctactgactgtaccctccctggttgtgttggatggcaacatttgcagctaaaatctccacaacttttgg

SEQ ID NO: 29977 - DNA, 301 bp, Oryza sativa
  unsure (1)..(301): unsure at all n locations
cagcttgcgtgatcgctgatgtatcggtaattatctttcaagttgtctgacttgataacatctgatgatggttgtgaacattctatcttaagacactctcatttgcggtacatatctagtctcggatatgggcttaatgcacaacttacttctgaattctgggtatgaatatctgggtgtgacaattgttttctggcccaggattaatttctccacctcgagtgccttgagtnatgccttattcattgtggatttctcaagaaccatgggtggattatgagaaaaccaaattgttgtggag

SEQ ID NO: 29978 - DNA, 398 bp, Oryza sativa
  unsure (1)..(398): unsure at all n locations
agcttctaaatttttccacaaacacactccaaaattctattctattactaagtccccagaaaacctaaaatacccagaaaaattcttagaaagagaatagattaatgcctctagaaatgaatcataacagattggttgaagtgattcgctattgattggtcaaagggcaacgaatatgaaatatagctaaccaacctggtcctctgtgttttcagatgtcatggcatggtcacagcaagcagaacaaccagctatggtggaggattgatcagagtcgtttatatgatcctcaagcacaacactggaatgaaaaggtgccacatgtatagaaatacaaatctgaaatattaagtaaccatggggaanaaatggctcactcattggngaagcatgatata

SEQ ID NO: 29979 - DNA, 452 bp, Oryza sativa
  unsure (1)..(452): unsure at all n locations
tggaataatatggttggcaaatttatgtatatattaaatgtggtctgtcgttggggcatgtgtaaattttatatagccattgtttcttaagagtaaaataagacaccagttattaaaattctgtgtggaatatcattgtggttattaagctttgaaaatacatagtatattaagaccaaattaatttgctaaatatatcgttgcaggtctaaaatctaatacatcagatctttaatgctaacagccggatataaagaaagtagataaaactaattgaggaaacggatgttgtgattaatcgaaaagtagatgtatgtggaaaaaattgaatggtgaaagtttgtgattgaccgagaagagaataatggtggagttattantgtttatgacaacatttaaatattataagatgctatattttagaagtaccactccacgatacatttatgagc

SEQ ID NO: 29980 - DNA, 405 bp, Oryza sativa
  unsure (1)..(405): unsure at all n locations
agcttcatgattaggntcatttttccatgcactattcatgattctggcatcatcaaagttgaatcctttctcgtgtactgcagcacctgatcttttaccctgatgaggtgaataaagcgaaaataagaatagtaacacaaataatctattaaaggacaagaaaaatgttgaatacctcatcaccgtcaatcttgattccagctcgctcagatgcacctttttcgatctctgtgatgccagttccatatatctctccagcaatcgaacatttaaagaattccatcaagtttcttgtaagagttccagttttgtcagaaaatatatattcaacctgagccatcgtgttaatgacagaaattcatggtaagaggaaatatttcagaactcacaaatgtttgatttatc

SEQ ID NO: 29981 - DNA, 441 bp, Oryza sativa
  unsure (1)..(441): unsure at all n locations
tggatggtcctagctgcanggcattgcgtatcctcaaatgtgctgatgtcatactatcagaagacacaaggcattctggaaagctacttcaacattataacatcaagacacctcttgtgagttaactgcattctaatgtttttgttcatgaatcacaagtaattgcacatttgcaccatgttgtgtgatgagtgccattgaacttagtctaaactgtaaaccttgcagctcaactttcataatgttaatgagcgtgaaagagagcctaatatcttaaagagacttcatgaaggggaagcagttgcattgattagtgatgctggtactcctggaattagtgatcctggcatggaactggtaaatcacttcactcctttgaccattcatactctgcaatctgtttaataataatcctgctactctcttaaaccatgaataaac

SEQ ID NO: 29982 - DNA, 428 bp, Oryza sativa
agcttgctgatcccgagttttctgatacatgatgcgatctacgcagtcctctatgtcgcgagccaggtcgcgaagctcttcgatggacagcagcagcacgcttccacggctcaccgtccgcaagagctgctcgtcaatggctccggcgatcatgcggagctccttcaacagaaattctgcgtcgcctttgaatcccttgtacagattgtacttctgatctaccagagagagcatcctcgacgcgagtattttcaacaaaccgctcaaaatagctgcctccatctgcgatttctggctactcgacgggcttatcctcctattcgatccccttgtgcatcggggttgactcgttttttttccttttagtataaaggaagctttcattaatgtcaaaacgaatatattaaccactccctataattctatct

SEQ ID NO: 29983 - DNA, 306 bp, Oryza sativa
tgtgtggtggtggagcatctgtgcatcagtcgaggcttctttgtgcaatctcgtcggggccctttgatggtctagtggcggtcggtcacgcttagcggcggccgatccggtgctaaccttcttctggcgtgtgtgttggccattcgcgtgtggtggtggattattttccttacctggtacgactctttagggttgaatcctgtatttttttcctgctctatcaatagaacttcgcactgtctcatgcgagtcggtcaaaaaaaaaaaagaaatgtgtacccctaaactctcacaaacacgtcactg

SEQ ID NO: 29984 - DNA, 422 bp, Oryza sativa
agcttgccgccagcgaaaacccttttcgctagctgcccacggaatcctccgccagcgaaaatgttttcgctagcggtcggcgcgttcctctgccagcgaagatgtcttcgcctataagtagctagcgcgtgcggctgaaaatatcctaagtcccggaggcgcgcgaaccctaaaatttgtgccgccaggctgccaaaatttcgagcgccgccgccagcgatatccctagcgcccgccaccgccgccgcctcctcctccattcgcgccatccacttttcggacacagctcctccattcgcacctccaccgccgccgctagatccattcgcgcctcctctccaccgccaccgctagatccaactcctctccgaccgacgggcgccgcatcctcctcctcgatcggcccgccgtctccaccacca

SEQ ID NO: 29985 - DNA, 463 bp, Oryza sativa
  unsure (1)..(463): unsure at all n locations
tgagacatcgactctggaggatgagagaaatcattccacatatgagcatganagnttctatttcaaaatcccccaggattcatgctcacataaggaatccctagagtcctgttcgattagtgtcgcgtctctgtgcgaggaccacaaccaccttccggtccacatttctagcatgtttagaaggatggttgtagatgcttacatttatcataaatactgcaaatctcctatttgtttgtggcactaatcttgcatagcgatgtcccgttggtcaagcttgtgaccataaacaaagcactgccgggagataccctggattatcatggtaagttttctttctaataaaagcaagaaccagttgttatgatagtatgcaccatcaggtattcttggtcactataccatttaggtngaattaagaacgatggtcatacgatgcctaagaacactgtagctacatcaa

SEQ ID NO: 29986 - DNA, 407 bp, Oryza sativa
  unsure (1)..(407): unsure at all n locations
agcttttgaaggcactcaacactcaagcatataccaaattcttataatattctcaaagaatgcaaaacaggtcaatcaccgtggctggtagtggcacaatgacacgcttgatgagtggagcgattgcaaaccggacctgtaaaggttagtagtacgtggatcttggtaggcttaactatatcacaaggaatagcaaaaatcaaatagatttgcgaaattgaataatagtccaaagtactggtcaaaattgctggcgtagcctagactcaatcctagcttaagcaagcaaatgatcacactcgaacaatccacaactcgctatagcaagcaactctctccaagattccaacaaaaaaaaatccacactttctttttctgattttnttctctctttntttctttttctg

SEQ ID NO: 29987 - DNA, 418 bp, Oryza sativa
  unsure (1)..(418): unsure at all n locations
ggactataaatggactagggctcagtcctgaccatggattattgcgaatgttggaagnctctctatagattaggaattatgttatttagcatgcatctatataaatttcagaccaaagtattcatgagccagtcagtaacctgtcatgattcaaccattttgcttttgtcctgtaacagagagttggtacctgctacctaccgggctgcttcttggagggtacaatgatcgatcgaaaggtggttcaagtcgatgtcaaaatggttgatcagttggcaaagtgtcaaccagacaccaaacacatgcaatgcaagcaaacatgagtgaaatccaacgcatgctttatgtgtttggtggcacgtcgtatgcaaaggaatacaagatgagaagaaggcgtttggattaatgttcaaattac

SEQ ID NO: 29988 - DNA, 317 bp, Oryza sativa
  unsure (1)..(317): unsure at all n locations
agcttcaactccatgagactggttctataagctctctcttatgcagaggggaagtcgcatggcgtggcgtgtgtttgcgtgtgtgtgtgtgacagatacagagagagagagtagagattgcggngtgtcgctataatcttccagagtctgatgatgtcaccaatgatgtcatatgcaacttcgcctatctcttacgttgcataggcttaaggaacttcgtctatacttacggcttctcaactgctgtgagaggtgcgatatactacatatcaccccatgctggttgctcgtggatagatcgctggaccacaattttc

SEQ ID NO: 29989 - DNA, 266 bp, Oryza sativa
tccattaaaaaatccaaagaaaaaaattgattttaatacgacacgctatgttttacattcattacccttgaggatagtcgcggacttatataagtgctccccaccatgtattttactaggttaaaccatgcgcggtggagcgagacgttattatgataacaataagtaaaaataaatgtgtgaaatagcctttacagcataagcttacataaacatatacataagtttaaataagctgatgtgattacatgtaaaaagaactacct

SEQ ID NO: 29990 - DNA, 299 bp, Oryza sativa
ggcaggtgctaaccgcgcgactataacaacttatttgatgtgaagagtctcgaggcgagggaagcatttgagcagcgtcatcagcagctggatcttccggtcgatcgccaaacacaccttgacagcaagtatcttcaagcttcggagcttggcgcttgactttacaaacatccacattccaggctggcatttcattcccattacaccaatccaacaacacagaagaaattggttcgttgcagaatcaccaactgaatttgcaagtgcagagcacaacagtttggaggtataccctgatg

SEQ ID NO: 29991 - DNA, 416 bp, Oryza sativa
  unsure (1)..(416): unsure at all n locations
agctngatcagctgtctggaggcccgatcaagtctaatatcgatcggctttaagctcgtaagatggatctcatggcacaacttcaagaatgcaacgccgagctggatatggagcacaaaaagctagccgatctcccgcaagctgttgaagaacagaagacaaagctaaaatcggctatcaagaatgtcgctgatatgaccaagtcctcgaaagttatccctggaactgacgctcaagatgcccaagccatagaagaagtagaacagattaggcagaaagctatattggctatctagcaatacttgtctcaatgactttccatgtagtaggtcttagaaaattttgtagtcggctaagacgttctaatactttacggtcttgacaatcctttatgccgactaacatgactttgaaat

SEQ ID NO: 29992 - DNA, 344 bp, Oryza sativa
tatatgatgtatgatagctgtcttatacatgatcaatagaagtcaatatctgggggaatataaaaatttaccgaaaactgtaagaccaagcaatgcttttctattgcttcgctagttttctgaaccgtttggatgtgttaatacatgaacttacgtatggacatgtggaagcaatcacgatctagaggtttatccttctgtagtactaagtaaagttgtctaagactcaatttaatgctgtgccgggatgaacattgcactcatatgttgtcaccaatcaatataaaaatatgctagtgcctgttccattcattaggtggatataccatatataagttcctact

SEQ ID NO: 29993 - DNA, 425 bp, Oryza sativa
ggatggaccgtgatgcgagctgcatgatcgatcaataatatgaccagaatacacacgctgaataatgttgttccacgaggagatgagacagccttcgtaaccgtgaaggaaagagccaaccgcgaatccgcaatgtgctgcgtgtcagagaggccactgggatcgaattatggacaagaacgctttttctatggccctagctacggatggagcttgcaccacaagttctgcaccgacaaatgagatctccacttctccggccactacacttggcagttggcacctttctcctgtccccacgcccagaaaagcaagtgcaagtccttccctgtattaacaattatagactttggggtaatcaatgtgcacgaataatttgttatgattaataacctatcctaagaagcaccccaatggtaaagaag

SEQ ID NO: 29994 - DNA, 400 bp, Oryza sativa
  unsure (1)..(400): unsure at all n locations
agcttaattgcagattgggaaaatatttggacgtttctctctgtgaaggctaaaactgagatggacctcaatagttattttccttgaatttagcaaatgttgaattttgtcccgagctcatttttcttcttcttgaatattttgttctcaagagtcactttgctttgctatttttgttctacgatacttccattgattttcgccctatgatactttgcactactttatttaccttgatcgggtagaatgaatgtgataacgtttgctctaatcaacaagagtaacagagtacccattggaaattgaatnntttttatttataaatctttttattaaaaagtttacaaacaataatttccattttgaaaattgacggaagtagtcgcctaccgccctctgg

SEQ ID NO: 29995 - DNA, 136 bp, Oryza sativa
  unsure (1)..(136): unsure at all n locations
ctaacataaggtctgagctgntcttgtgtattgacaaaaccattaccagcttgcatgtaattcatcttccatctgggatagatatggactccctagtgtgcgtcaccatgcgtaatgtcattattcttgtttctgc

SEQ ID NO: 29996 - DNA, 234 bp, Oryza sativa
tcgcgtctgactcagcagtatgcatacatgataaagtgtggtgctggccttggccgcatgtaactctttgctgaaactagtaacatggtattccttatctctaaataaagctcagctcgatctatacgccaccccggagaaaataaaaataatatcgggtaagactagttactacacagccttcccttatttgtccgttggcttctgtccatgagaatcttctaactctacctt

SEQ ID NO: 29997 - DNA, 426 bp, Oryza sativa
  unsure (1)..(426): unsure at all n locations
gcttctagctagcattgtattgatgccatctctgtttgttcagatgtcaaagtctaacaattaaatcagtaggaaagcatcagcttctaaattcatatctaagcccacatttgcccgtttttccgtgcctgtaccacacctttcttgactggattttctggaacatatatataacttgccacagaaccttctaatttaaacagtgccaaacatgaattaatacatttgcgattgtgctcacaaccttaatttgaactaaacatttcctcgataatccgttttatattctagaactggtcattgcccagaagactagaaccggaagatgacaagaacgaagaacacgtngcccnctttacctggaaatctggacgtttctttctcgcgtcacaaattgccagttggtagtgagagtccagctaatgg

SEQ ID NO: 29998 - DNA, 326 bp, Oryza sativa
  unsure (1)..(326): unsure at all n locations
tgcctatgctgagttctcctacaacaacagntaccaggctagtctgcatatggcaacgtttgaagcattgtatggacggaggtgtcgcactccgctcttctggaatcagacaggggaacgccagttgtttggtacaaaagttttaaatgaggcagaagagaaagtcagagctgtcatggaaagattgagaatcgcgcaatctcgacagaaaagctatgcagacaatcgtcaaagggagctcactttcgaagcaggggactatgtgtaccttcgtgtcactccgctcagaggagtacaccgcttccaaaccaaaggaaagttggcac

SEQ ID NO: 29999 - DNA, 392 bp, Oryza sativa
  unsure (1)..(392): unsure at all n locations
gcttgacttcagcagcgggcgactccactccatatgctaaccctgtctgcagcgacgaaaccaacctttctgagacggcttcaactgagaagaacttcaactctggtgtgggggaaaagagagcaagactgagtactacccactgtactcagcaagtcataccggaagaggaggtatgatgcatgatataaccaaaggaagctaggggttcttttgcataaagcangcatttcanagcagtagttgaaagcagtaaaacagctgtagtaattaatcaatattaaccaatcactgtccaacgctacaccacgtngcaacaggcccaaccaaccacctgaactacaccagttcattaagctaaactacgggtgggactaatcacggtgaatctg

SEQ ID NO: 30000 - DNA, 405 bp, Oryza sativa
acttccgaacagacacgaagctgactgttcgtccttcatgttatatcaactaaagaattggagggacctctaggagaattctacaaaccgtttcgcaaataaatgccgaatgacgagaggagacattttgcatatcggggtttcaaaaaacttgtccttagggttcgaccatttggctcatcctacagccgagttggctctgataccactttgtcacgcccagaaatttagcccaaatttccagactatcttgtgtattaaatctctgtctaagaccagccatggtacacataactacaagtaataaacaggtgccaacgtggatgaagcggaaatacttacagaagacgcacttagttctcacaacgaaagatatatacagcagcggaaaaaaggcgatctagc

SEQ ID NO: 30001 - DNA, 430 bp, Oryza sativa
agcttctaaagttcttcatattgcttatgcaatctgagtaggataattcgtgagacgcacttttgcaattcagtacatagaagatgggcttaggatatacaattcgggttattatgtaattcatcagtagacatgaaaaaaaggagagcttcaattcttttttctgcatctatgtttgactggattttcatgggctactcaaacaatgattatatttacatactgccaagattatttggttatattttgacgtagaggtcttatgttttccattatctcccctttgtcaggggtgcagtgctggtttccttgctcccatggctgcatagtttgctcagtcaacacatgagtagcatagtttctcaggagttctctctgcttctgctcaactcactctatcatgtgagtatttattaactaattctgattg

SEQ ID NO: 30002 - DNA, 464 bp, Oryza sativa
ggtcgtgtcacctaagatcgagcataatactgtgtttgtatattgatgaagtcattatatctgctatttcggtttatggacaaatttacgactcggcaacaaattgagtgaccaaaagtgaacttattccaatttcgtatgttagaccgcttatgggctggcattttgacctgaggtcgtctgtgcgtggaatatttcttttgctgggcctttagtgggctgcgcttgccagtaactctctgtggatgggctgttaaaattttggaaacttttcttacgctccgggccgttcatcagcaaacgatttctttatgtgagctgttaatgggctattcaatgtgcgttgttaacgggcttttcttccactgacgaaagctcaggcaatacagcacacactttcaatggagtataaacagtaccacaataaactatgccttgtggaaaatctgacacaatatactaat

SEQ ID NO: 30003 - DNA, 422 bp, Oryza sativa
agcttgccagcacaaggaatttgtcaaaagggctgtgggattatctgacgtggaggcgccctattggtccggacgcgtcactggcgtgccactggacaaagcagccgcctccctcggtaaaagcagctaattattgccgagtcctcgggtgaaaacaccgaggaattcatcaaatttttttctcgcatcaatcgcggccattcccacaggaggagggagcagtacggatcatgcaaaggcgaatcttgccatggcggcaatggaaggaatctttttggttttttttttccctttttggtggtgtttttactgcttgcttgccggcgtattgcctctcagaatttgcacattttttctcactgtccccaaatgtttccagataatccagactgtataaaaaagtactacaaaatcagggggac

SEQ ID NO: 30004 - DNA, 429 bp, Oryza sativa
agctttctttgctagaatggcagttaacttcatagaaatatttgaaagattgcatccatggcctaaataagtttccaggccagctgcatggcatcatgtacttggtgaatgtggcatgctagagtattcaaagaattttgttttcttttttcaataatgtcaatccattgtaagcatgtccactgtccagataagggttgtggtttgtaatgccttgacagataatgaaactagtcccagtttcagaatgctcatctctaggtcaagttcaagaatcttatgccaagaggcaaaagtgatgaaatccaaggctgaatgaacagcaatttcacgagccaaagttttggtcacccacattatgggtaaattggctatctgttattttctggaataattttgttggatatggatagttccacagaaaatgga

SEQ ID NO: 30005 - DNA, 391 bp, Oryza sativa
  unsure (1)..(391): unsure at all n locations
ngggttgacgtacttggcgaatctcattattcataataattacaaaaggggaagatacgatatgtcaatacatgctatgactatgttatccttatgttaatgagcgctaaccataagatatgtcaatacatgctaatactatggtatccttatattaatgaacgctaactatatggaatacgattggttgggtgtttgtacatataaatagtcaagtaaggtttcattcttaacatgtgttcggtagttagggttggaaccttttaccctgacacgtaaaatagagctgcgaattagcgcacgattgattaagtattacctcataaaataaaaatgaattagtattttttaaaaaaaagtcctatataaaaattttaaaatatgtaccttt

SEQ ID NO: 30006 - DNA, 427 bp, Oryza sativa
agcttcatgatgctgaaatctggcttggtgtatcgcatgcgactgaggaggagcgcatgcctacctggaagagctgtagcatctcccactttggggagcaaagaccacctgaagatagagtacagcactctataatatggacgcaaccctcgaatagtccccaaacaatccttaggagcatccttctcatacataaaggtagtgctggttggtgacagagcatcctctacaaagatatgtggacgactcaggtcatcatcatctaaccccaaagctgcagcaaactgtgccatagaaaccctatactgctgcccctgaatggtccacttcacaaaatcaagccccttcttggtgatgccaaagaaagcagtaaagtagaactggtcaatcacttcctcattccatgaatactgcaagggcaacaaat

SEQ ID NO: 30007 - DNA, 414 bp, Oryza sativa
  unsure (1)..(414): unsure at all n locations
ngacgatgcgaaccactgggtctagcaccattgggtacctgcccgggtggaccactcngtcacggtgatccgagcagtcaaacttgatagctatctctaaccaccaaagatattgtggtgtgccgggctgaacagcattgatctcccgttcggtcaactcttgctttcgtttggattcataagccaagggtccaccaaagatgtggttaagttccttgcgatggtcttgaaaccagtcggggcatcatcttcatcatccttcttctttgacgtgctttgatctccgtcattcgtcttgcgtgcgttcttggcgtattggtctgcaaactgcttgtatacgaaacaatctttggccgtgtgattggaatttggatgatgtggacattgggagttcatgatcttatcaaaaggttg

SEQ ID NO: 30008 - DNA, 437 bp, Oryza sativa
  unsure (1)..(437): unsure at all n locations
agcttgctgtgggccgcatccgctctatagctcgtatcttctcggggttggcctcgatgcctcgggcagagaccaagaacccgagaagcttgctcgcaggcacgccgaacacacacttatcgcggttcagctttatgcgggcggagcggagactttcgaaagtttccgctagatccgagagtaaggtctcttggttgcgtgtcttcacaaccaagtcatcaacatacgcctcaacattacgttctatttggttacccaaagaaattcgagtagtacgttgaaaagtaggacctgcattctttaacccgaaaggcattgtcatataacaataagttcctatgggggtaatgaatgcagtgttttcctcatcctccctagccatgcgaatctgatgataaccagagtatgcatctagaanacacanaaggtcacacccg

SEQ ID NO: 30009 - DNA, 343 bp, Oryza sativa
taattccacacataagagtagggtgttacgcttcctagctgtccgaacctgtataatcccttgtctcttactcgcttgcgaaccacctcgttagctagatccccggcggagataggctcttgatcatcgcaccttatcccctggccgaactcacaaaggggggtctcacgttctcccgctagagaggattactcctcgacagccatccatttattattgcagaaataagatgattagatactactagaaccacaaccgcaatacgagatccgccgatttatgcaatggtttggtgggtgcatctggttacatattgactcgtagcagcatgacgatgcaaagc

SEQ ID NO: 30010 - DNA, 350 bp, Oryza sativa
  unsure (1)..(350): unsure at all n locations
acactgttagatgtgaggaagctgcatcaatgtagaacaccaatagaaactcttgagaacacgttcggtgcaaaagtagcaccattatttccggttagcgcattgtattgtagagattacaatatcttgtagtaagttagaaaaagatcgacccaaataaatagggaattttctgtatcattgttcttgttgtgccattttgtgacatttcaatcagcttcaatctcagttttcctttttcctctttgatgctacactgaagtactgatcattatcaaatgaacctacattgtgaaactgtgaccattgtntgaagaacaagtagccactgatgttgtcactagataata

SEQ ID NO: 30011 - DNA, 376 bp, Oryza sativa
tagttcctgtgaagatactgatgtgtgagttccccgctagtgatggccccgagaggaaacaagacgagttgtgaaaccaaggctctctagcttctccatggttacagtcgacctccttaacgaattgctaatgataaccatcttcgcccctttcccactgcaacaaccaaaatataacttaaccagtgcatcgcatcagagaaggggaaaaaaaagtaaactgaacactagtgcaacaaccaaatataacttaatcagtgcattgagtcagatgtagaacaaaataagagaaatggatatataagttagagaatataattatatacagtgtgtaccaagatacatacatgcaatgatggcaccaggtaaggcatat

SEQ ID NO: 30012 - DNA, 423 bp, Oryza sativa
  unsure (1)..(423): unsure at all n locations
agcttaagagaagaacagtgagcagattgcatcataaagaatggctagttaggaaggaatggagggggcaaggaaacctgccattgcagcactctctcatatataacagaggggcatgacatcaacaggttactttaattatctgtagaacaaagcaagggatgatattctctgcataggtaaagcctaaaggaacacatatgtcggaagcaacgaaccgtatcctgcatgctttaaaggaaaagagcaaaagatacaaggagaaaacgacttgccatgtgcatcaaagcctgctttaatgattatgctcggccatgtatccaaagcaatctgcctcaacgaatgatcatgagtagaacaactgcaagggttaatgggtgaagctagagttattnttctctattctgcagctgtgaaataagt

SEQ ID NO: 30013 - DNA, 274 bp, Oryza sativa
catatgcacctaaggtcataaaatctgtgactacaccttctctgaaaaatcatccgcgaagaatggtagcactgttgattcttcatagcgtcagatgaacgcattttgtggtgtatactatggaacacacatgggatgatatatattgcattgcaagtagcaacgtgcagaataatgtcttcaagatggactccaacacaaacgatagtcttcatgaccccgtagtttttgttcaccctataaaggtgctcttaaaattatgggctacaatagt

SEQ ID NO: 30014 - DNA, 436 bp, Oryza sativa
agcttagtgccatgacgccaaccacagtgctgcttgcgttcgaccatcccatcatccataaccatgagggcatccgatcatcctgcattcagatgcaggccacggcggaatacatcaagagaggtctcgctcaagcacttgtccactactatcctttcgccggccgcattttctgcgacgacgacggcggcgatttttacatcgactgcaccggcgaggagctcggagcgacgttcgcgtgtcatcgacaaccagcccactgacgccgagacggcggtggtgcagcagctcgccttcaactgcacgcccgacgacgaccacctacctcactgtctgctgtgggtgcaggtcaccacgctgtcctgcggaggcttcgtcgtcggggtgacatggaaccatgccgtggctgatggtttcggcatagcacagttcatac

SEQ ID NO: 30015 - DNA, 423 bp, Oryza sativa
  unsure (1)..(423): unsure at all n locations
gctttaaaatcaatactaattatgacttattttcttttgtctgctttagcattacacatctttttttctaggattaatatttgttgaacacctaattatttacttagtagtatgattgtaatacccaaatgcttgatntatcatatgaaggtattattagtaattaagggtatgtattgcatgcaccgtttgctcattattagtttaaacactcacatgtagtgacttgtttcatgtgaccttaagaatataatgtgctctattcatgtgtgcttgacaaccattcacttattctttntctcctanagctcaaacttgagacttaatttatgaacacatttgcccccctttgttttggtacttctctgtttctaggcttggacctatngtaccatttccattattcttaatacaatgatatac

SEQ ID NO: 30016 - DNA, 381 bp, Oryza sativa
ccgggaggaccactcggtcaggatgatccgagcggtcaaaccttgatgcaatttctgaccatcgaaaatattggggcgagtcgggctgaacagcattgatctcccgttcagtcaacttttgttttcttttacactcataagccaaggggccgtcgaagatatggttgagctccttgcggtggtcttgaaatcctgccggggtgtcaccgtcatacttcttcctcgacgtgctttgttcttcgtcagagctctttcgtgtagtcttggtgtattgctccgcaaactgcttgtagacgaaacaatctttggccacgtggttggagttatgatggtgcgggcattgtgagttcatgatcttgtcgaacgtgttgacgcgcgaac

SEQ ID NO: 30017 - DNA, 336 bp, Oryza sativa
  unsure (1)..(336): unsure at all n locations
ctggagaagatgtcttaggtggaggcctggcttataccctatgtgagctcctgtgaagatggagccggaggcccgctagttncgctgttgtttatttttgattgtcaaggctgaagcgcctttggtataatgtatatattattgatggtataaagatgaggcttttatattatagtgtgtatggtgtaccccggctttttctgggacggtgattaatacactatcgttcgggataagcaattttcccggtcgcgacagtggaggaaagcggtcatcatgttggcttgttgggcgacgatattggtgagaatggcgttagtgtctggttgttggtgt

SEQ ID NO: 30018 - DNA, 431 bp, Oryza sativa
cttcatttcgatgtatcgtatcttcgcccctcgcaaagcttctgaaacaaaatacactggtttctagcctgactcttgttcttgaacgagggctgcactgactgccaccggtgaagctgctaggtagaagtacaagtcgcttccccgtgctgggctgaccaaagcaggtgggctctacagatattgcttcagctcgtcgaacgctgcttggcattcgggtgtccaggtgaactttcccgtgccccggagggtcttgaagaaaggcaagcctctttcggccgctttcgagaggaatcgactgagtgccgcaattcggcccgcgagcttttgtacttcgcgtacgctcgataggggcttcatttgctgaatagcatcgattttctcggggttcacctcgatacccctttcagaaaacatgaaaacccaacaac

SEQ ID NO: 30019 - DNA, 452 bp, Oryza sativa
  unsure (1)..(452): unsure at all n locations
ttgctagccccacacccatatactntctcatggtatattaatatagcaaaagttacaggtgttaaaagtccatatgcactatagttacgggtgtaacttttgtagtttctcactgtaactgaatgtaggtaggtagattatttttatttactacatgtgtcatgactaattttttatatataaatttgtgctagatgaaattttctacgaagatcagatatgatgcataataataggtaagcatgatattctaaccttcaactgtccttgttacttgagcctttgttctatcaacccctacatgtaatttaacacaagtatggttggtgtatgtaattgaaagcattagaatcatgttgtagactacctaacttaaatattttgtgtttatgtagtatgaaattatagtattctaacctaaacatacttacagtgtactcatcaccattaca

SEQ ID NO: 30020 - DNA, 446 bp, Oryza sativa
agcttgctgtccagtgcggtttcattgaaccgttcagatgtcagctcttgttggagcatatctaacttgctttgagttgcctgcaactgcagtgacagagcctcagctctcctattggcctcagcgcaggcttctcgttctgtctccagtagactctcaagaacttgaactgtactggacctttgctggttgctccgttgcatcatctcatcaatttccttttcccgctcgtcaaccctttgttcaagcgatgaaaccttacatacagcatccttctcagactgaccaactcgctcaatttcttccagcatcttattcttctctctctccagaccttcaacctgtctctccattctttctattaacgcaagtctctccattgctagcctctgcgcttcacccttatccttctgggaagcaacagcttctgcacgagctacgtcagc

SEQ ID NO: 30021 - DNA, 424 bp, Oryza sativa
  unsure (1)..(424): unsure at all n locations
tcttccagatctagaagagaagctagggttaacgcgagcaatatcgagacaagagtgggcggaagggacggatgagcgaggaagatgatgcggatgctcaccaggatgcagcgcgacgacggcgcctcttccctcttccctgctctgctcgcgagatggggatcggcgcangcgaggcgagacgtacgggagacactctaggcacaatgattttggacgctgatattttcctctctcttttttaacttcctccaacccccaaaatgattatatttctaaagtttttggacatattcaaacaatatatacacaaataactataataaccctacttacctacgtaagacaaaaaaaatattgatatagataaggatgaaaacggnggcggatataagagtatgatatgtaggactagaccctaccc

SEQ ID NO: 30022 - DNA, 337 bp, Oryza sativa
cggaccttaatcactgagcagcacttacaagcaggtttttttatgttctatgcgtctcattatctgatggaatttgaattagaagagaagtgccccttagcaaaaagagaggcactcctgagaggcacaccaaacaatttttttcagatcttattttggaaatcaatgcgttccataaaagtttccctgtccacatggcattacaaaaaaaccatgctatatattactgtgatgatgtgcaaaattttttgacagattctcctagatatcagttactttgggctaggcggggatcagacaacttcacacctttttactaatgcattaataatgtgtc

SEQ ID NO: 30023 - DNA, 368 bp, Oryza sativa
tgtcatcaacaacaacatgtggattgaacctaataatctttattgtccatttagcctgtgcatcaacatctgtcccaatacgattgtgccactaggaatcccagcggctagcgagctacaagacaacggtgtgagattccgagtgaggggattgagtgagcacgtcaaaatggttgacgcgacatttcagggtaagatcattaggatccctcgttttcagataaatttcggctccaagatcctactggcaaacctcttcgcttacgatcaaatcaagggagaaccagctgacaacggtgctgctgtctgacctgtgacaagctacgtggtgctcatgaacgcgctcatcaacaccatagaagacgtct

SEQ ID NO: 30024 - DNA, 424 bp, Oryza sativa
  unsure (1)..(424): unsure at all n locations
agcttncttgtgtgttcaatcacgaaattcaactacttctagtaataacaggaaagaacaccccgactcgacgcgattctatcgtagaggtcgccaaacaattggcgtcgatccccttcgtggccatccaagcaattccaccattccatagcagcctgcaagcaacaaccaccaacatatccaaatcattcagaaatgtaacatgatcacgggttcaccataagagagagactacccaccaccatggaacccagcggatccgggcatcaacttcctcctccgcgtcccccgccgcgccgcccggcgccttcatctcggggagagaaggtctcttaacccctagcattgcccgccgcccaccggaaagtggtgcgcggcaatggaacatatactgcangcgatagcgggagcgggagcgcgcgcg

SEQ ID NO: 30025 - DNA, 430 bp, Oryza sativa
tcgacagtgacccgaatgatgcggggatgccaccagacatgctgttcgcactgatattgaacacccggagtttcctgcagttgctgaagttcccttgaatctcaccatgcaatccattccgtggtaactcgagatgtgtgagtcgagcacaattggtgagagacacaggtatgttaccgatcagagaattcccaccaaggctgatgacccgtatgcgaagtagctggccaagctccaacgggatgccaccagtgagacggttgccaaagaggttgagtgtgtggaagaaggaaagattggacagacttgggcttatcacacccatcaagttggatgacatgagctccagcgctgtcacacgaccagggtgctgtctggatcggcacgacacaccgcgccaccggcagatgctgctgtggcattcatgctt

SEQ ID NO: 30026 - DNA, 429 bp, Oryza sativa
  unsure (1)..(429): unsure at all n locations
agcttgtatagcaatntatctttgtgcgaaaataagttatgatagaactgacatttgaattacccaggtaccacccaattgctcatcatggatgctgtatggcctaccaaagaaacatccattnttcaatctgaaccacatattctgcacaacattcaagtagacatttctggtatgttgcgattnttaatagactcattcggtacaatgcaaattttgtctaaatcttaatgtgtattttatgggacttcaaatttaagttaagtgagatttatattgtcaataaccatgattccaggtatcattattacagtttcctacatcaacagagtgcaacaaatcattcatgagtatattctatataatgactgttgttacatatggagaaggaattagatggaaaatcatatgcatgtagaggattaaaag

SEQ ID NO: 30027 - DNA, 376 bp, Oryza sativa
ttggaagagttgaagtggtatccctgtgtttatgatatttgtttctcacagtgaccgtctctgtgttgtgtgcaacatgcccatctacccttctctgcccaaagtatgtttaatccaataatccttttattactatcttgtgaagatctgctacgtaacattacacatgctgttcatggagatctatgttccttatatgaaacttgcccaagttacacttgggttatataagatgacaatgttagaatattcctctatgtgccttgtatacttttaaatgctaagttcagagcactatgaactatcaaactgtgctacactaggtggctatcgtttaattaactagatcttggcagtatggacttgatcaacggct

SEQ ID NO: 30028 - DNA, 402 bp, Oryza sativa
  unsure (1)..(402): unsure at all n locations
agctntagctccatacccataggcagctcaactggggtataagccaaacgtcttctccttcacaacttcttcaactgaggttggattgattttcataaggcaagtcacacggatcccaaataaccctttgagcatattgaacccgtttaaagctattgctttatttcaactcatgcattattatttgatgataccgagtggtgaaccttccccatttaattatggccgaagatgactttatcttcctatgggatataatttgatcaacgtgaaccttatatattggtttggttcagctagatgcttataatagatgcttagccatgcttaaaaacactaacacactatagngatgatcaatgtctcactgttacttaataaaggactattaatggtagctca

SEQ ID NO: 30029 - DNA, 378 bp, Oryza sativa
  unsure (1)..(378): unsure at all n locations
ctagccgacttctgtgccgagtggaccgagtgccatgatgtcactctcgangaanagatggagtattggactatgcactttgacacggcaaagagacttttgggcactgcggccggagttgttttaatttccccaactggagaaagactgcgctatgtgctatggatacatttttctgcatctcacaacgtggtagagtacgaggcgctccttcacggactatggatcgcaatctctttgggaatcaggcgtctgatagttcacggagattcacagttagttgttaaccaagttatgaaagagtggtcctgccttgatgacaatatgatcgcttatcgacaagaggtacgcaagttggaggataagttcaatggactc

SEQ ID NO: 30030 - DNA, 414 bp, Oryza sativa
agctttggagaatatgtcttaggtggagtcctgtcttataccccagttgagcgcctgtgaagatggagccgtatgcccgctagtccgctgctggtttattttgattgccaggcctgaagcgcctttgtaataatgtaaatattatcgatataataaagatgtgccttttgtatcatgtttgtttggtgtaccccggctattcctgggacggagattaatacactagcgttcgggaaaagggcaatttcccggtcgcgacagaggacgtccaccttcccgcctctcaggaagtggctccaacagcataaaatcatcatgcaataacccatcccacacaagttaagaatttagagtctagccaagtgtaatacacgtcccggtgctcaataaccgcgagcacggctattcgaatag

SEQ ID NO: 30031 - DNA, 358 bp, Oryza sativa
  unsure (1)..(358): unsure at all n locations
aaactcagcttgtttatctgcatttagcctggccaactcgatctccattgtgtctgntaatttagacgaattggattaactgcttgcttgccgtacaatcttgatttggagatcttcctggccaacataattgactttgtttttaaataatggtggttttaaatttgtttaaagtttgatcttcaaccagaaaataacggtttaaataaatttatttttgtacttgtgtaatacgggctctctggttctgggctttaaagatgatgggtactgatttctgagctgtataggtagcctagcggccttttaatcttcatttttttttttctatttgaccgcagttcttatcggctttgac

SEQ ID NO: 30032 - DNA, 416 bp, Oryza sativa
cagcttttagagagctgcacaataaacacatttatacttcagatggaggtagagtgaaagagtctgttgtattcctagccagatgagaatgcatgtgtcgccgaccctatgatgcttacctttacaccgataattgtgtgtttgctcatcatgtcgagaagcaggaaattatcaattttttattgcaaaatccaggtaaccagggtgctcgtcttgttcttccaatcattggtggttgcagggtaggaaagaaatccttgatcagccatgtctgcaatgatgagcggatcagatcatacttttcttctattttgtacatcaatggagatagcagctgcggatcaatagcacatggcaagttcaaaatggagaggacattgattgttcgtgaatattttacggacataaatgaaaat

SEQ ID NO: 30033 - DNA, 437 bp, Oryza sativa
  unsure (1)..(437): unsure at all n locations
gcttgttaagtgtgttattccggtcctaactatttcagaactcttcgggatcctacaaggtatgccacatggacactaaagtgacatgccacacggatattccggtcctaaattttctttttctttttctcatttttttcccacacgagtaggaacgaagaagagaagaaaaggaaagagaaaaatattaagaaaatgagttaacacccgtgtgacatgacacgtgagtgccatataagatctcaaaggtgtcgtggtaatttgacacgtgagtgccatatangatctcaaagatgtcatggtaatttgagaacaaaataatacactttaacaatatcaaggacctagataagacgaacaaatntaagtgccagcaatacactntactcttttaaatgttatgtatgtagctaaaattttttaggataatgatgcta

SEQ ID NO: 30034 - DNA, 457 bp, Oryza sativa
  unsure (1)..(457): unsure at all n locations
gcttctgaagatatgcaaactggaagcatcagtcctttgccctatgctaaagcatgcagggcaccgagaaccggttcacacggcatgggttcagcttctagtttccaacgttcaactggaggaagcgacgaatgggaagaaataccatactcaaataaagcatcacttttgggaggcatgacaaaccgcaaacgttccatacattcaaatgcttcttcacctcctattgcttgggtcggtcaacgtccacagaaaatgtcacggacaagacgagcaaacgttgtttctccggtctcaaaatttgatgaagtcctatctgaaggatcaccacttgatacagctattgctgctaaaccaacatctacagagtcctgcngtgttgtgcttacaaaaaanggaactactaccaatacacaaatgtgaaaacaatgaatgatattccttctcctgttggatt

SEQ ID NO: 30035 - DNA, 442 bp, Oryza sativa
  unsure (1)..(442): unsure at all n locations
cagctttgataccagatgatatggatggtggcctgatcttcaagatgtatgatcttgaacaagataactagctgaaaatcagccaagataactagctgcgagcagccggataactaatgcaacctgacgacacgcacaaggagccaaccaccgtctctatacggcagcctgaaccaaggattcgcccaatcacactctcaaagaaccaacctaagcagcctgcacacgaagtagcaggagcacagattgggtgccgatgaagcggccgcctatgtaatcccacgaggaattcacaagagcaaaggggtagagatctctatctctcggtgtttgtagcacacagctgaacaaaggggtttgtattttgattctcaaaagtcttccanatgataaaacataagggatatttatactaggaacaacccttctagatgggaatgag

SEQ ID NO: 30036 - DNA, 409 bp, Oryza sativa
caatggttcctgaaatgcaggtattaaaaattggtaaaaccacgagtacagaaaattaaacaggatactcccttcagacaaaaataagtgacaagcatcttttgaacatttcaaatcaactattaaaagggatatggttagatttgtcttcaaaatagtttcaaaacaatttagctatgatatatattttttataggttctatacaagtaaagaagtgcattggtgtacatatcactgtccaaaatgacacttatttgtcaacagaggaagcattaatcagtataagatgagtccatcaaaacatgttatcacaaatttcacgggaaaattatatctggattttctccatacatacctcagccatccggattttccctgcttccataagattccttgcatctgtacata

SEQ ID NO: 30037 - DNA, 406 bp, Oryza sativa
  unsure (1)..(406): unsure at all n locations
atcaccatcgctggcctgagtctgagtcatgtttacagcgaccgccgtcgtggcatgttntttttacagaggctgctttctcttcctgtaaacttttcaatagaatttttttttaaaaaaaatcacactggttagcaatttaaaaaatatgcgctcggaaaataagggtataagttaataatgatagaagttgggaaaaggaaagaacacatcatccttatatgttactcctgccgtcttaaatacagcttagcactatattatacacaacttaattatacaatataggtagaagtccatttccacttaaatccgtaatagtttgctactaccttcgttttcaagtactccgttaaggtatattgatatgatgtatacatttcatactatgaacagatttctgttc

SEQ ID NO: 30038 - DNA, 409 bp, Oryza sativa
  unsure (1)..(409): unsure at all n locations
tcacttgtgccctcttgtgatcttcgcctacttgttccaaatctcatatgcggtctcaaggttgctcactctatcaaactcctcttggctcaaagagttgaacaaagcattcatggcttgggcattgagttggagggtgcggtgatccatctccgtcaagggcgtgccggtgattgcaaagcctacatccacaatactccaaatatggaagctcatagncttgaggtgagtagacattttaattntccaagtggaatagtttgtgccattaaacatgggagccttccctacgtggttcacctcgttcgacatcttctctctaggcggtgaagcccaatcaagagagaccacgctctgataccacttgtaagatcgagatgtcgactagagggggggtgaataggcgatt

SEQ ID NO: 30039 - DNA, 341 bp, Oryza sativa
  unsure (1)..(341): unsure at all n locations
tacaaacttactctaattcacaatgtgtntttgatgacctgcgacggtttctggcagngnacgtacgcttcgatgatcgatcatatcaatgcatcttccgatccgatgaaagctcagacaccaaggaaaccggcttgattcatgtgtcattggcgccgcagccgcgggggcgtgctcaccagcaaaagtgaagtctcgtcgtggggcaaaagcatgcaatgggcangcaagcagtatatcttatctcctgtataaatcgatctgcagctgagggcggcgaaagcgtcctctcccaatggtgggggtgggtcttcccgtgcgggcgggcgacagcgcgcact

SEQ ID NO: 30040 - DNA, 411 bp, Oryza sativa
  unsure (1)..(411): unsure at all n locations
agcttgcattaaacacctaaattcccgtggcttgttgagtacgattgttctcacccttgctctatatatgtatatatagntcctcccgcgtgaagtgaagatgaagtgaagtgaagaatatggtttcgtcctggttcccagccgtcgcctgtggcgttgggtgttagtcccgtggttccactgctgctgctgttggtggttcctcatccgtgacgtcngttgcattctcgggctgctcttggttccgctgctgctgcttgttgtggtgtttcctcgtccgtgacgtccggtgcattctcgggctgttctaagctgcaacctaagttaagggtaataagtcctctatttantttaagggattgcaatgattcatatntgtcaccgtgggtaccagcactatgtcctgngact

SEQ ID NO: 30041 - DNA, 268 bp, Oryza sativa
cgacaccacatgttccagtctagtcaatagcattcggaacagaaacccagtgattatgagatcatgagaatgagaaaattgttcacccaagtatctgtagggtattcctcacccacagtgaacaaatttcaacatgcattaaagaacattgcactgagtcacccaataacaggagagtaatacctccgatgcctctaagtcatcatcatcagatacaggtgggtggtcagcactcctcatgcttgaaaaggctgcatggatagaaaca

SEQ ID NO: 30042 - DNA, 415 bp, Oryza sativa
cacttcgtgaagacctcgttcattgtaagacattcttgatcatatcgcacctatgatgtaaatctaagaatttctttttcacaaatattgcatgaataggatttacacgagtaattctgccgcggcttgcgagataacctgccggcccccaatcctaattgctgcaattaccctccttgaattattgaacacttaaacctcctttgtcgactgttgtgcttcgatgcacgggccttcgggcacacgcatcggaacacctcccctcaaatttaaaatatccaacgatgggtaaaacttggtgttttacaaaagacttggacaaaaggacacttgggtcggtgcttgcgaactaatatgaatgtccaaaatcgcggaccgttggatgtaccgggaatacagattcccgttcttgcac

SEQ ID NO: 30043 - DNA, 116 bp, Oryza sativa
  unsure (1)..(116): unsure at all n locations
acactcaagnagaagtggactattatggatgagccgttctatcttctttcaacaccattgatcattggcgagaatattaaggaagattaaatttagtgcttaattgtggacgggtt

SEQ ID NO: 30044 - DNA, 425 bp, Oryza sativa
  unsure (1)..(425): unsure at all n locations
agcttgagctgaattataagaggctctattgttctatattgtacattagaataggaaaagagtagagtagaagaagtccgaagaattccggagctgtcggtaatcctctttcatttcttttattctgttcattactctgaattcaatataatattcttcctgagtaatttagatttatcctgtgagaattatcccttggttagttcctagatagcatacgagatcattgttcactatagtccattaatttatagtgattgctttagtgtttgatcggcgctagagtagttattaattgcgtacacacggtgtctgggtaattaatctccagtggttgctacgtatcccacagttcgntagaggtaggtgtagaggtggtgacagccctcaagagcactcaagtactccctatccgggtatgtagt

SEQ ID NO: 30045 - DNA, 460 bp, Oryza sativa
  unsure (1)..(460): unsure at all n locations
tactgcaatattcaaacaaccttgagccattcttattcagtttacatcacatntactttagcttaaagcagtagaatttacagcaagtaagccagagatgtttctgtgtacttcctaatgatattgacattttctctggtatgggcagtaaataagcctcaaacaaaccagcaaattatttgcatctaacatgagcaaacattataagcacaatagaaaattatcaacatataaggaagtgatcattgctgttgtaggagtaaatctgaaatcatcactgtcagttaattgtttcattatatttacttcagataaaactattcaacaccatataacccttggcactgacagatgaacagaggacacaatgctgttcaagtcntatatgaatcccctcactcacaaaattacaatttcctatatgaatcaacagatggcagtatggcactgacagcacatg

SEQ ID NO: 30046 - DNA, 392 bp, Oryza sativa
taattcaccaggaaacttaatggcattctttcagtgttacccttcatttgcaagaacagtattcctgtgcaggtttactaaggaaggtagttctcgcggaaggcctgttctggaaagatgttgagaggttgattgatgactacaacactgagcgcaagggcaaatgaatgggtagtccatgtgactatgagacgttaattgtctagaaaagaaaccctcttgtggaattccttgcttggaagaatccttagcttaatcaaaatagacaatcttgtcatacattactgtttcactggtgattgaaatactggcgaagacacccggtaccatcccaattctctattatgagcctacaagcctatcgatgggtaatcatagataccagcactgag

SEQ ID NO: 30047 - DNA, 379 bp, Oryza sativa
agatgggttattaatatatgatggcgtatattctattatctattgtatataatagcattgttagatctacggtatttagaaaaaaaaatttaggttggaccacccatatattaaatcctagatacgcctctgcggattagcacataattaattaagtagctaaaaagttaaaaaaagattaatatgtatttttaaataactctttatataatattttgtaaaagacataccgtttagtattttgaaaaacgtgcatggtaaaaactagaagtaaaaattggaaactagcactaaaactagcactaaaacagcctaatagaatatgtgagacttccaattcaggccggctggcccaccaacttatgaagctagctgaaaa

SEQ ID NO: 30048 - DNA, 353 bp, Oryza sativa
tgtgcacaaggaatctaacacttaaatatattatactatctctatgtgcgacaagacgaaactcaccgcttcggtcaaggatttccacctatcaccggctgctttcctactgaatttttgttttgaaaaataaaatccacgaatcatgatacaacatctaataagcggtgcaactaataataataattgtaattgtaagccagagactctattattggagtttttatttacgaacgagaggggaaacaataaagaataacttacagcagcgacagatttattcttggggttcttctccttgaactccttacggaactcctccctgagcgaaacaagatcaaacgaaaatcccc

SEQ ID NO: 30049 - DNA, 409 bp, Oryza sativa
agcttgacttcagcagcgatcgactccactccttatgtttttcttgacggcagcgaccaaaccaactatgacaaaacagcttccactatgaagatcttcagctctggtgtgggggaaaagagagcaagactgagtactacccactgtactcagcaagtcataccggaagaggaggtatgatgcaggatataaccaaaggaagcttagggttcttttgcataaagcacgcatttcaaagcagtagttgaaagccagaaaacagctgtagtaattaatcaatattaaccaatcactgtccaacgctacaccacgttgcaacaggcccaaccaaccacctgaactacaccagttcattaagctaaactatgggtgagactaatcacggtgaatctggttgatcgcccataac

SEQ ID NO: 30050 - DNA, 416 bp, Oryza sativa
  unsure (1)..(416): unsure at all n locations
agcttgaatatatgtatatatatataacatacttatgtaaagntaaatatatgtttttatagtttaatgtttccgtatttgttaccggtttccgatctgtaccgacatgtttccgtccgtattgttccgtttccggttttccgatatttccgatatcgtttttgtttccgactttaccgtttccaatttcgtttccgagaaaaatatggttacggaaatggttgaggctattttccgatcgtttccgaccgttttcatccctagataagggcatcaccaatgtatatttaccaactagtaaataaggtgggacctagtaaaagtaggtatttattgttaaaagtttcacaatgtataactagcagggttcactttctcgccggtaaccgcgcggtaaccgcggttaccgggcttac

SEQ ID NO: 30051 - DNA, 445 bp, Oryza sativa
  unsure (1)..(445): unsure at all n locations
gggatgcgggtacgcatacagtatacgtcaaacactatgtctatataaatgcataaatntggaattaataaatataaatgtgctcccatcttgggctcttgttntactatataatctatctatctatcttctattatataataaaagtctattaaacttcctataaacgctctcgagtcaccaagtgacatcctataaacgctctcgagtcgccaagtggcattctaataacgctctcgagtcgccaagtgtcattctaataaaaaaaagaaacccgaccattgattttcatttaaattggtggaccccattattctagatncgtagatctatttgacagtaaaaatcacatccggaaacttccctctacaaacaagaaagcgtacgtaatgtgccatggtacgacgtcctccatatatatccttccttggctgtatgaaaaata

SEQ ID NO: 30052 - DNA, 421 bp, Oryza sativa
agcttataagaggactaatggctagcactattgttgatttgatggaaaataataaataataactaacaagtttggtactagctgaaataaccaatttatggaagaacaacgtagtcttgcaccccaaatttccccaagctaacatatttgtacccactgtattattcagcagaagatgtctaacttctactgataacagaaggatgtaaataaattgcttttgtaggtagagcaatgaatccaaattattttccatggccaaaatagtgggaacatatttgataattacaagataattgaaactctcttctaatctttgtggcatgcagagtgcaatataagaggagcgctacatggatgcaacttatattatagatcatgctggcgcaagattggttagtatcgcaaacgttgtacttat

SEQ ID NO: 30053 - DNA, 387 bp, Oryza sativa
  unsure (1)..(387): unsure at all n locations
tctgtatactcctaaaaataacttcatatgggtattttacatgattgacttcagatatatgaggaaccaagccaggtcgatccatctcctggtatatgagacatacacgatctatatatagaactccttaataaagcccagaggcctagctcagcatgatgcagtaatttgcatttgaaaaaaaatcataaagcctctgtgaatagaatacagatgaggatgaaatattccacccaggtgaccaagatacccttgtacaaattggtttttgccagataggataccatgaattcaagtcggatttccgacacccattctgtgatttgagtaggaattcatatgtctatnttttttacattggacatgaaactgacttggattccaaca

SEQ ID NO: 30054 - DNA, 422 bp, Oryza sativa
cagcttgactacccaatcacaagcacaccgactaggggtataccccattaagttctcatcctagaagaagcaatcggaacccgcatcactcaaagactaagactaaacctgcaaacaaaaggttatatcaacagcaagagtcggtacattaaacaagttaatgtactggcaagcacaagtcaatcctactatactacatgtaaggcatatattcaaaggaaggcaatatgtagttcaatttcagcataaagcaagttttgttttgcaattcttttgtaaaggagttgatgcttcaattaacaaagacaagttttaagtttcattattaacttcttcataattccatcataaacaatctcttattgccatacttaacaataagtcataatgtatcaccacatacacaactcaacacatttatc

SEQ ID NO: 30055 - DNA, 371 bp, Oryza sativa
  unsure (1)..(371): unsure at all n locations
tatctcttacgctccaggaatggatcagtcagaacatcactaccggctcgtctctaccgccgncgactggtggttccgcctgcacagctggcctattatgccgccgntgttgggcgtctacgtcttcaccgaccggctcgcctcgaccgccggcgactggtgtttccgcctgcacggctggcctattatgccgccgttgttgggcgtctacgtcttcaccgaccggcttgccttcgccgccgccgactggtgtcctcgcctgcacggctggcctttatgccgccgttgttgggcgtctacgtcttcaccgaccggcttgccttcgccgccgccgactggtgcttccgcctgcacgggtggcctttatgccg

SEQ ID NO: 30056 - DNA, 436 bp, Oryza sativa
  unsure (1)..(436): unsure at all n locations
cagcttttaccggatacgaggagctttctcattttgtgcacaaaacttgtatcaattctcatgttacctactgaccttattcctactggaaatcttggattttttgtgaacaccttgaagagccatggaagaggaaaaagatcagacgttggcaataatggttcattcgaaccgtcacttgatcctgaaagtgaatatgcactttgggaagattcatcagacgtaaaagaatctgatatgagtgaagatgaaaatagaagtcctgatctgcagaggacttcagatagttgtttttacaacaaggtctcaagagacagtttcagtagccactcaccattttcccaagagaagggcaacaacatgaaacgacactacgactgtgcaagagaggaatatttacccctctgtagatcatctatggagcaacatnattatg

SEQ ID NO: 30057 - DNA, 441 bp, Oryza sativa
  unsure (1)..(441): unsure at all n locations
tcctcacagaaactcccaagaaaggtaggcaagcgcgcctatcatcaagctatataccgagctcaacgacccaatcgattgatgtgataaaacaagcgcgaggacaagatgcctcgctcgaactagctagcaggtggatccaaagagctcccttggcatcactaggtgaacgacatggcggcatgctcccttgaaaccgacgtgcccccaaccgatgccgtgatctgcaggcaaggcaagacggcgatcgagcaattagcagtcctttgtgaaaccacgggccaccaatttagtagctagcaaatagcattagcaagctgcgagatcagttgcattcaagagatctgtgcatcgagatcctactacagagggaatcgtagaaagatgaannacgtatttgtggggtatacagacaatcgactgggcttcatagagtgacct

SEQ ID NO: 30058 - DNA, 413 bp, Oryza sativa
gtacacatacgttggatatccactttcaaatcttgaggcactggatgagctagagctattctgttgtatgtcactgaattggtgctggtgtcggacttccggtgcaatggtagttcgttgagagcttggaacaccatgatcctggtcctgagtagcatgagtgaagtcgccctcacctgcaaatcaaaaaaatgcaagaaaattattcagtactgaattggaagatgaaggttgaaattgcaactgaattatatcacaccagtgatattaacggggctgtggtgatctgattgttgggtgtgacccctatgaggcacattagtagtgccttggcctccttaccatcgtcgtcgccgtcatctggttcagttcttgagctactattattggactcttggtactctgggcttctt

SEQ ID NO: 30059 - DNA, 316 bp, Oryza sativa
catgagttgagagactgattttgtacattttcatacctacataaacaaggaaaattcatcatggttacctatgaacccgacacactatttcacattgatatatatatgttctaagacactgaatgaattgcacatagcagtgcgaaacaagcaacaattatggcacaagatgaatgcgactctcgaaaataataggcagatgcaatgcatcactttcacagcagctggatgagcattatgagcattattacacgttattactctctattaacacctcaaaacagctcattggttgctaagctgcaaaatttcctaa

SEQ ID NO: 30060 - DNA, 273 bp, Oryza sativa
tagcttactctatgacagcgagattttgtgattgttatgcgcacgactgcatggggccatatattgcttgagggcacatgcatcggtagtttcctaacggcgcacaccgctattagtatagttggcatgttcattaagtagggatcaaggcgatgccttatactactgtttaccagagtgacatagctcatgtgcttacacaagtgattaccactagcttctatgctctaaacaacgcctaacgctctaaacgattaggtctgtcaactcaga

SEQ ID NO: 30061 - DNA, 392 bp, Oryza sativa
  unsure (1)..(392): unsure at all n locations
agcttgaccccaagatggatggcgcaaggcaaatgtataatgnatcttaaaatgttntcttagncctttcccggtcttggtgtttggtgtaaatcggatttgctaaataagcgccgtactatcaagaggggtctatgaagcgagcttgtggatgatcttgtgccatattagttcatatgcatgtanngtgtattggtgggcttgtctaaccaagtgtggtgagttttcttaagtcctaaacaaagatagatgtgggcaaatcctataagtttgtgtagcctcatgtggttatgtccggtggagtatcctttggagtgtgagccctttcttcctgagaaaagttgtgtttcttggatgaattgttcatgggttggatagccctttcaataagc

SEQ ID NO: 30062 - DNA, 439 bp, Oryza sativa
  unsure (1)..(439): unsure at all n locations
ctcaagcttcgcatgcacacatataacacacttatgtgtaagtcttaatctctaattcattatatnttggctctaacagaaaactctgattgttttaagagtgttaatctatcataattttatcttttatgcagccattagtgagtaagtatagattctttgtttggtgaacataatctttgctgctttctttttcttataatatttctattcacttcagctatgatatttgagaagaaaatacaaaaggtaaaggctgccctttatacccatacagagtttaaaaggattgttaagaaatntgaagagctgtacatccggagcaacatgcctgactgtgtagaccacgtgttcaaaatctacagaacaacggccctagaccagataccttgaaagaagacattcaagttgattgatgagagcatgaatgcttcaagga

SEQ ID NO: 30063 - DNA, 341 bp, Oryza sativa
agatcatatctaggcctggagagaaggcactacccctatttaagcttctcatacgctccggggccgtttaccctggacggaggaggctgaacggaccatcactcagatgaaagcgtacctcagttctcccccagtcctgttcgcccctgatccaaatgagccgatgctattctacctgacggcaaccccgcaagtggttagcgcggcgttggttgtggagcgcgacgaggactaccctcaccccgtgcatccccaccctgtgtagactctacccgtgatagagcatggaggagaggcccccgagccgaacggcggcccgaggacctcgactgacggagctg

SEQ ID NO: 30064 - DNA, 374 bp, Oryza sativa
agcttggctgatcggctctgttgtacacctttctccttgtacacatctggctctgataattgtacttctacaatttcaatctgttctcacacactctattacaataaagtgctaatggtctcattaactacttctattcacaatggtttcgtatttaccctctactacactctcactctgtacctatgtaccatttactatgacagataataggccctcttatcagaccgttagttttactatacagacgtagaatacaattattgtgggatggagagagccgttagatgcgagccaaattgtgagaatttggcaaactagaaaacgcggctgctgatgagctgttgtattttgtcctacattcataaactcta

SEQ ID NO: 30065 - DNA, 448 bp, Oryza sativa
  unsure (1)..(448): unsure at all n locations
ttctaggaatgaactcattcctagttgaactgtgcagtattgaatcacagtgtgctttcttttgtgggagagtaattattagacagacgtttcttatccgttattggttctgttataatttttaccaatcagctnaattgctcttttctcttattgattcttttctttactcgnctgaatgaagttaccatgcaagcacaacgtactgctccaccagacatgctattaaaagacaagtttttggttcatacaacagctgtcccttatggaacatcagatgaggaccctgttccttcttatgtaagcacataaaaatatgacccccttttttttggaaagagctgtacacatggtgttcttcaactcatgattgtttttacacgttctaaataaagcggagatataatcagaaagtaattgaaggctgttctgttactgcatctatcct

SEQ ID NO: 30066 - DNA, 429 bp, Oryza sativa
  unsure (1)..(429): unsure at all n locations
agctnntttcatattctttcaatcgattctaaacaagccattaatttggtgctgcaggttgcccaagagatccaaacagaggccaagtaccaaaatgatttcatctctcagctggtaagtaacttgtctgcgagacagtttgggccaaatcctgaatagcatttagattgagttatcggaatgttgatatggcacgcctattgtacctcacatggacattttttagcagatagattatcactgatcgcaaggttcctagtgtaatgtttcttcaaacacaatctgctgatcctcaatctcttgtcacttaaccagtcatgttcagtcatcccatcccatgcactgtagttgattcattatgcactaacgcatgtctaaaagttaccatgaattcggccttgtatagtggtatcctgggtattacttaca

SEQ ID NO: 30067 - DNA, 355 bp, Oryza sativa
  unsure (1)..(355): unsure at all n locations
ctcatgaactggatcgctggaatgggtntcactcagaaatttcttcgagatggccctattcacgttacattagctcgggtaaagaggaagcacaccacacatttaatggaccacgctcacggaatataactacttcttttcatagcaaattcaggttcttgactctgggataacaatatagcatactgtccatgtccaaattaaattcttattcaaattcagaatcagattcttgattctggtgaagtcatccacgaaaattaacattaccgtgcctgctgatgctgaggctacagaaactcctactcttccgcaccagccttctcaacagccggctccacgcacgcctgtagct

SEQ ID NO: 30068 - DNA, 429 bp, Oryza sativa
agcttgtccagattcagtatggattgaggaacatgacctgtgatattggtaaagctcaagtccctgtgccaatagggaagcagcaacatcgtcgatacagatgccttatatcaaactgaccaaaagtaaagagcaggaaaagaaatacttacagtaaggttaaccctgcaagcttagaaaagttaactgttccaagattatcagatatcttgcagttcctcagtattctgtaataaaagtatctaacttagtaacttgccactttgtgaagactaagcaattatgaactctatagcaaaagctgttcaccgtacaagacattcaaagatgtcagattagagataaacgacagcgaggagctcccatttagaatatcaccgatccgcctgaagcacggacacttagagaataaagtacttatattgatct

SEQ ID NO: 30069 - DNA, 376 bp, Oryza sativa
  unsure (1)..(376): unsure at all n locations
acacataaaactcaagctangacaatgcgaacgaagatgatcaattgaaccacactctatactactaantggaccacctctcttccttgtcctggcattattcatagctcgagcaattccggtagcaaccaaagccaaatcctcatcctcgatttgttcgagtggatcattagatgtggcattaaaagcagcaagaaaagagggctagatgaaaaacatcatcaccaaaaagaaaaaagaaccaagcactcgattaaatcactttgcgagagagaacatacatctcatgagttttcaatttagtataaagtgaatccaaagtcaaagtagacatattaacagactcctgaatagatgtaactttcatcttccaaat

SEQ ID NO: 30070 - DNA, 419 bp, Oryza sativa
  unsure (1)..(419): unsure at all n locations
agcttcagttaaaacatcatggtatcgtgactgggtcgttctctcatatatatcacttgactgttcccgaataaattggtattcaccaactgcccgcgaaccaagatgggaagaactttctgtcatggactttctctttccagaaactgtacttggaacaaaaggatctatgctatgcaagaatgcagatgcctgaaaggggaaaacatatattgaatacattgataagtaaagaaacaaaagactatactaaaagcagcttaacttgaagatgaacagaacaggagacgtcatctaatataaggacggtgaagtatttaaaagtggatgtgaatggtcatgggtttaggtaaatatctagtacaactacaatataacaatcgcagtctanaagtttggtttataagtattaattatta

SEQ ID NO: 30071 - DNA, 99 bp, Oryza sativa
agattgttgttacaacagcgtgagcacacaggtagtgacgcagctgacactgactgacagcccagttgtttggattcttcagaaaccatatgtccttgt

SEQ ID NO: 30072 - DNA, 408 bp, Oryza sativa
  unsure (1)..(408): unsure at all n locations
agcttagacttatgtatgcacgcgtagngactctttcttgactgnttttaccatcggntaattaagaaaacaagcaccactgtctattttttatcatgaacaaataggagtatttttatatcacaatgaattcattaataaaccggcctgaatagtatcattaataaaactgagaatgatataatttccagaaacaacattaaataatccggcaatgacaatgaggctccggttgatggttctgtgcgatagggtagttacgcaagattgaagtctcaacatttttaaccatattatttacatgaagttttccttgtgctattttttagctctgtatagnatggaaacttgtactccctccgtattttaatgtataacgccgttgacttttcgactaacgtttgacca

SEQ ID NO: 30073 - DNA, 355 bp, Oryza sativa
  unsure (1)..(355): unsure at all n locations
tcggtgtctgcggctctgccccgacgcgcgccgacactcttggcatagtcgccgccgtgtaccgcatccttgtcgcgcaccacgggccattccgctgcgtgcaccttctttgcggcttcatgggatcgtaccaggcccagctcgagcactggctccggttcctcgccgccaagggcgtcgacgacctcatcctcgtcaaccgcccatggtcgttcgaggcggntctccctgccgccatcctccgcatcttcacccttaacctgctgtacatctgtatgtggaaggtccccgacattgacgggcttcccaccaactaccgacttcccaaccttttgtgagctcgggatctacgccg

SEQ ID NO: 30074 - DNA, 414 bp, Oryza sativa
  unsure (1)..(414): unsure at all n locations
agccttatatactccactcgagtatcaatctacttatactattttggattcttgcaacttatggtaccatttatgtaatttgacaaagtagtcctttatccccgcctaccaaagaggtaagttgacttccttcttcgtggaataaaaaagtgcattgacttttgctgatcacacgactacaccatattttcgggatattctgagacactagattttctcagaggacatatatatatatggatacgaaaataaaataggaagtcctctcaaaataaaagaagagaataaaatatgaactcataagagagcttacgagatgaaaaaaaaatttggatgcgttctaaacagccaatggtgtatgtatccgatcgcgctntcagaattacgatatctcaagagcgttgaatatcatca

SEQ ID NO: 30075 - DNA, 353 bp, Oryza sativa
tggagcaagaaggctacctgtccatatcgagaatggggctatatacgatagtttcccacgaagagacaatgatgtgcccagctggattatattacaatgactctgctgaccagaacattctctggtacgtctccaggaagatgaacatcacccaggcaacaatctctagtgaaaagaacttgatgacaaaacgcccaataaccaccatgactatggagaaggttaccaaccaacttgaagagctctgtattgtactccttgataaaaagagcacgagactcgacaagcatcttgttgcgatatcatatcagaggttatttagataaatatcataattagcaagagttataaac

SEQ ID NO: 30076 - DNA, 378 bp, Oryza sativa
  unsure (1)..(378): unsure at all n locations
ctgccgcatgcagctnttaaattttcatatatatggtagaatattgtttgcaactccatgcctaggtatccagttctctttaaaaaagattcttgttattgataccattgttatttcacccaattatctaattattatggtattaacctatgattatactaaataccatatttctcaacagtgttacttttgaagcataagataatatgaaacttgttcaactcaacaagtggacccaaacttcatgtgtcaaataactatgtagtgatgatctgcactatttggtcaactacaaaaataggttttttttcttcttttttttgacactaaatgcatcttttgtttgtaacagggctatatgtaacgcatcaccctcta

SEQ ID NO: 30077 - DNA, 466 bp, Oryza sativa
  unsure (1)..(466): unsure at all n locations
nntattagtaaagcttactacttacaactcctaccgtcccataatctataagaatttaggtgaatgtgacaattctaatactaacaagattattaaccagattcgtaatactataatatatatcacatccacccaaaatctcttatattttatgacacaaagaagtataaatctattataggataataatttagctctatattttttcctctctctatctcactataaatttaatgcatatttntgaagcatgaactagctcttgcatgagagctaacactaatctttttctttatcttcctcttagcaacatatcctacgcacacgtgtacgcacgtgcacaccaactaataaatgtcataaaaagatctagagaaaatcatacatgtnctntcaatagtattacaccctggtataaattaacctcaaaattattatatgttatctgaaaaaaatctgcagttct

SEQ ID NO: 30078 - DNA, 277 bp, Oryza sativa
  unsure (1)..(277): unsure at all n locations
actgatattatttgaactcttctctctaaaaacatctacgcgaaggccttttaaaccacacggttgagaccattgcgtccgtccggtccgagtatgtgcaatgtttcagcnttttacaatttaaacaatgttggcacccagccaacagcttttttcaagggctcccgggtcaacaactctttatatgggccccccgtccaacaactctttaaacggccacccggtcctaactgatcccatcagctgcagaattttcaaacacagaacccctcttcac

SEQ ID NO: 30079 - DNA, 395 bp, Oryza sativa
  unsure (1)..(395): unsure at all n locations
ntnggcccgctagctagtaactgaaccataacatggctacttgctgcatagctagagtngcataacggttgcaactagtgcccacaaacagtgtgaattccaaaacgcagatgcacttgtttcctctcaagtttaggtactctgttaacctgtctccaaattacaagatagaggtctcttggtcatagcacgccacgtatggtaactgaagtgtccgaacagctgccaaggcaaagtggttgtacgctgagtgttttgttgcactttgggtgatgcccgtcataccaagaaatgaagtgcttctaagctctcctttttccatttataacaagaggctcttgtgaaagctaatctgagtgtcttctgtagtgtaccataattgcataaangatagt

SEQ ID NO: 30080 - DNA, 436 bp, Oryza sativa
  unsure (1)..(436): unsure at all n locations
agcttaattaacctttgcccgagctatcgcatttgttgttgcacgcccattactattgatccagtccaaaccagttctccatgtagtcatctatgctagcatgctctgaggcaaccggagagaaatttcacttgttagaaccctatacccactaaatagagagctaaagactaacaccacagcttcattctatcagaacactcaattctcgatggagagctaataactgaacactcactcttcagaattcacatcatccgtaccaaaattaaaggttcagccttattaaaattctttgtatggaattggataagaaaacatataaatgtgatgagagctgatgagaaacatgacctantggcctggtagttgtgatgaaccttgaactctgatgatggctgagatgctttgccggactgtaaggttgcgcctatca

SEQ ID NO: 30081 - DNA, 468 bp, Oryza sativa
  unsure (1)..(468): unsure at all n locations
tctcattttgcttttgcaaggcattcaaggaagtatactttgttcacttgcatctatatcaatatccttacacctagcacatgggttattgcttggaacaatattggaacaaggtgccttgctagggagagagacactattctttaaaggtgcgaacttctcttctagagagagataagttnttgccaagccatccactctctcttaaatgagcactctgtaccttaagattagcgtgagactctttggtttgcttggtaagccgtaccaaagcctcattttttctctctccttagcaagctcacccttgagttcatgagaccgctctttctcacgaatgagtaatgcctcttgcctctcaaagggtgcatatagatcctcaattcttccaaacaactcactccaatgtggagagactcttgggtatggactcgaacaacttctcatccataaccttattctcaacat

SEQ ID NO: 30082 - DNA, 444 bp, Oryza sativa
  unsure (1)..(444): unsure at all n locations
ntggagtcctcagacttgcaagataagaccacacatacaaatatactttattttgctntgttaaaaaacagctgtagagtatggaacattgcaagtgttgtatgtgacaacaaatggtattttatgtcaactatatggtacctcaaatcttaattttcataaaattgggatgtgaagattctataaaagttagcttcagctttggtggtatccctcacgttcgtacatacaggcaccaacgcacggagatactgctgtatgacttcacgcaaacagattccaaggcttcgaattttcacaaggaacatgtgtgtttaactattctttanggttatgtaaggacacacatcacatatcgacaatagggtccagatgattctcttatatggcacataatcatgtataaatcttaactntatcctatcgctatgcttcaagtactgg

SEQ ID NO: 30083 - DNA, 389 bp, Oryza sativa
  unsure (1)..(389): unsure at all n locations
agcttcagaanatagtgcataggcctcattcaatgttccctgaaatgcttgtataaaaatttgtaaaatccacgaggaccggaaattaaacaggatactcccttcagaccaaaataagtgacaagcatcttttggacatttcaaatcaactattaaaagtgatatgggtagaattggcttcaaaataagttcaaaacaatttagctatgatatatattttttatagggtctatacaagtaaagaagtgcattggtgtacatatcactggccaaaatgacacttatttgtcaacagaggaagcattaatcagtattagatgagtccatcaaaacatgttatcacanaattcacgggaagattatatctggattttctccatacatacctc

SEQ ID NO: 30084 - DNA, 147 bp, Oryza sativa
  unsure (1)..(147): unsure at all n locations
gcctagcacaggtgctttatcaccagtcgctgcctgagtctgagtcatgtgtacagcgaccgccgacgcggcatgttntgtttacagaagctgcattctctgtcttgtaactcttcaataaaaatcttttttaaaaaaaatcacact

SEQ ID NO: 30085 - DNA, 418 bp, Oryza sativa
agcttgcaactgatgttgctatctatagctattataacctattcagccacccataggtgctccggcaagtttctaggtcaactttgcattgtttatttccttgaaaccatcttcacattagcttttggtcttgtttatgagcaaaactggacacataattgaaatcacactactttggccattatgtctcatgcaaacttatgctaaatgtcaggccatattaacacaatataagtggaatttttgcaagaagctaaacacttgctagcttgttattcttttcaattgcattctctatagagatgacatttccttttatcaattgtaaggtgatgttcatccgagggaaaggcaggagcagagaagacggagtcagggaccttggaatagaaaggtgaatgtatggcgggagggggtg

SEQ ID NO: 30086 - DNA, 343 bp, Oryza sativa
atagaataatcatgtctctgaaattgacttggttcttaattatacataaataatgcgatgcactatttactctagttgataattaaactgcaaaacttgcatccatctctaattgtgtgacatatgacgcgcgcttactttgatttttttccatattaatattgctaactaggactttgcgcgtaaaacatctgtatatttttttctgatcgggtggagcaagggttgctatgccaaagttattttactgtgtaacattattgtttgttctttctttgaatgggcgtaacaagcgctgctgctctcttataaccaatcaaggttgttcggatggtactaaaaa

SEQ ID NO: 30087 - DNA, 411 bp, Oryza sativa
  unsure (1)..(411): unsure at all n locations
agctntagctcagggatcctccgtccgatcccccctcctcgctaggcatggtcctccttttatactctaaggggataccacatgtgctgcgagtgctacctatgtagacgacaggcctgacaggtgggccccacctgtcagcggcagcgagcgcgcgcgcgggctcggctagacttgggccgacttgggccgaggaggagagagagagggttttgggccgactttcggcccaaagccaagagaggattttaaaaacctttttcgatttaaattattcattaaatgcaattccatttattaaaaatactttcttagctcanataaatcccagaaaaatctaggaattatagagttaagtaaagtatttaatgaaattttatctggccccattttatatcgtgaattattaat

SEQ ID NO: 30088 - DNA, 293 bp, Oryza sativa
agctcaataaccttggcccggcgatcgctgttgttgttgcgcgcccattactatagagcgcggccaaacgagaactccgtgcacccgtctacgactagaatacatatgtggcaaccggagagaaattccacttgtctgaaccctatacgcgcaaaatagagagctatagactaagaccacagcttcgtctatcaggattctccaccctctatggagagctaataactgaacactcactggtgaaaattcacatcatccgtacaaaaataaaggttcactctaccaaaattttt

SEQ ID NO: 30089 - DNA, 393 bp, Oryza sativa
  unsure (1)..(393): unsure at all n locations
ggctatatattaacattacagaactcccatcttcaanatactatcttatctntagggtaaaactggtttgtgataaaataatgtaatgctgcaattatgagatatgaaaccatggaaaataatttctgcacactacttataaaatcgatgccgacattgactgaataaaacttctataccctctccttttggcaaagaaagtatccaacagatgtgcacaacatgggaaaaaaacaaattgcagtgacagcttcaacatcacctaatcgtttcagtaaacatcatagggttcagataccacaaaatatactgacctctgattgaaactcagatgcatgtgctctgggaagctgattgagaatgctcttgagacctatatgacacaactcatta

SEQ ID NO: 30090 - DNA, 429 bp, Oryza sativa
  unsure (1)..(429): unsure at all n locations
agctttcttgacacttactccggctaccacagatcagcatggcaaaagaggacgaggagaagacagcattcatcacgccgttcggtgtattctgctatgttaagatgccgtttggactaataaccgtaggaaatactttccaacgcacggtccaaggggcacttaacgatcagcttgggaacaatgtcgaggcctacgtcgatgacattgttgtcaagaccaagacaagcgactcattgatcgatgatctccgggaaacattaacaacctccgacgatatcgcctcatgctcaatccagaaaagtgcacattcggagtaccatcgggcaagctactcggattcctcgtctctggaagagggatcgaagaanatcccaagaagatcaaggcaatcgagaacatgaagttgcccacaagactaaaggaagt

SEQ ID NO: 30091 - DNA, 400 bp, Oryza sativa
  unsure (1)..(400): unsure at all n locations
tatcagttccaacacgcatgacaacttgctgtgcttctacttgcatccatcatacaacggcatctggcaatcttccaccaacttactaaacttctcataatctctgtcggtgtcctctgcgtcttcaatgtcatgcaacattgtagatagacattgagtgtccaaatctatggtctccacctaaaggagaaggtacgaacatgccttctcgagctgcggcggtgttctctacaccctgatccaacacttcttcagctgcgacatcaagcgcctcttgctctccatgcttggtccagcaggtatatttcttcatgaatccattcattatcacatgagcatgcacttcatccttgtcttcgatcatctngtcattcttacagtccctacatgggcacaacat

SEQ ID NO: 30092 - DNA, 420 bp, Oryza sativa
  unsure (1)..(420): unsure at all n locations
agcttgattcttcttgcttgaggtgtttgttttaatgganggagtgaggggtttatataggctggtaatgacggttatgacggttagaaaggtcagtaataccctccaactgtcattggggatcaatcccaaccattcagcgaaaccctgcatccatcggcgctgcggctggttcggccgaaccctatgctggcccaaccagcccagttcttggcaggtggcctccccgtttgctcctctccgcaaacttgtgatatttgggcttgttggatcttgtgaaaatggtgttctcaacccaattgtccataagtctgtttcttgatagtgtctgattgattgatcgtatgttttgctgtcacttatccttcatttatgatcattctctccanaagttagaaaacctagtgctaatggaatata

SEQ ID NO: 30093 - DNA, 448 bp, Oryza sativa
  unsure (1)..(448): unsure at all n locations
ctaaatctaccggtntacctccctcatcaaggtttatatggatcgtggctgctatangtgtcttgatggacttcacatactccaagccaaacctcttgatgtatgatccttgatgtacttgggttggctcacgaacgtcccatccttgagttgcttgatttgaactccaaggaagaagctcaactctccaaacatggacatctcaaattccctagacatcatattaccaaattccttgcacaatacctcattagttgaaccgaatatgatatcatcaacataaatgtgacacacaaagaaatcatcaccaatgattntcgtgaaaagggtggtgtcaacctctccacatttgaaatactttgacacaagaaaatctctcaatctttcataccaagctctatgagctngtttaaaccatacagaagctttgagagttataaacatggta

SEQ ID NO: 30094 - DNA, 418 bp, Oryza sativa
agcttgtgcgtagatctgcattgtggtatattttttccaaatgagctacccacgattgtttcaaaatctctccaatttaattctgaatgaaatatgctttcaccatatcttggctcgttagctcattaacaaaaatagtctcaaatgatagtaaaatataacaaactataaaaagttgatttcgaggaaaggtcaatggtcaaatcatttttccccactcaccaaacagatcacacttttatatatcctttttgtgaaacagaggattccaaacattagaagtttgtaccttggcgagctcctacaaaaatacaaaaaatatatatacaaatgtaatagaatataaatgaacccacataaataaaaaaagatcaagaaagtcacaacatcttttctgctaaaattctactttaaattt

SEQ ID NO: 30095 - DNA, 335 bp, Oryza sativa
  unsure (1)..(335): unsure at all n locations
tcaatagttcttcanataagaggtgtggtcattgccaaatttttattgaatataatttcggcgattacatacaaatctgaggtgcctaaaaagtttgctacttcatcgtccaatgttttttttgtcatactacatttgcacctatgtttagcacactcttttttctccaaaaattagttgtaagccgatgagagagaaaatgtgggtggggaagaaagaatatatagaaatttaactcatctgctaaacaacggtttataaaatagttgagaatgaaaactctagtgaaaggttatcttacataataaaaaacaaactaaaatgaaaactataag

SEQ ID NO: 30096 - DNA, 311 bp, Oryza sativa
  unsure (1)..(311): unsure at all n locations
atgtgcatcgactacaccgacctttacaaggcatggcctaaggatccctaccncctgcctcgcatagatcagaacctcgactccacaacggggtgcgaccttctgtgttttctagatgcatactcttggtaccatcagattcgcatggctagggaggatgaggaaaaaactgcgttcattactcccataggaacttattgttatacgacaatgcccttcgggttaaagaatgcaggtcctacttttcaacgtactactcgaatttctttgggtagccaattaagacgtaatgttgaggcttatgtcgatga

SEQ ID NO: 30097 - DNA, 417 bp, Oryza sativa
  unsure (1)..(417): unsure at all n locations
taatttaatcctaacgcgatacttcatgcactagccagcttgctgcttcatatgtcgctctactgtgtacccgaaaaaggaggaccttatgtgtaattgatggatgtcaccacctctacacccacctcaaacctactgtgggatatgaagtaatcacctgaaattaactacccaaacaccacgtctacgccattaataactactttagcgcttgctaaacactaaagaagccactatactttactgggttatagtgatcaatgatcccgcacgctaattaggaactaaccgagaggtatatctcactcgaataaatcttaattactcagaatgataattctattatagcgggtttttagaaagtataagacaaagaagagattccggcaactcangaatncctgacttctttactct

SEQ ID NO: 30098 - DNA, 421 bp, Oryza sativa
tgcaagctgaacccaagtcctacagtgatggatatattcgctattgaaatttctggggagttatacatttgcgtatggataagaccggtcacaatttcttgaagctcgatcttccccccagatgaaccatattgccaagagaaaccatgaaccagaatagaagagcttgccccacccatgagtaaattattcatagtagcctcattagaccgtagatctctcttggtatatccagacaataggtaggaacataaactgaaacattctggagctacaaagatagttattaaatcgttagcaccacatataaacattccccctagagtagctgtaatacgaaaacagatactctgtatagcatttctgtacattcaatgactctacggatagaggaatcataaagttgacatatataataaga

SEQ ID NO: 30099 - DNA, 368 bp, Oryza sativa
  unsure (1)..(368): unsure at all n locations
ggatcganttcccctctgaaacaagaagttctggaccggttatgttnatatcaatcacttgggcgccactccgatgcgatcgactaatggataatatcatatactcccatttctgtacgcagtatatttcttactacacctgttgacgttgcaatatagaccgtattgttactcttgctaccatcaggatagatctgtctccttccttggtttccccccacatatatgggatattttaagaaatgaacgtctttcttcatatcatggtctggggatagattgggaaagantagattactataatttttaccgggaacacggcctatcacaagaatattttattattgtgacgatactcttgaaagaga

SEQ ID NO: 30100 - DNA, 427 bp, Oryza sativa
  unsure (1)..(427): unsure at all n locations
acacatgacacacgaattctcagtttctactgctattgttgtcgngnntgcataaaaaacttcagaaatctcaatcagtacgatgtaaggcccaggtgcactattatcaaatcaataatgcagtcataaaaaataaaagaaattgttattaatgatgccagttgggtttgggtcccgttctgatttgaagaccttttcttggtgataatagtatactgacatgtcctgtagcagatgtttaattccatgatcaaagtgttgccacgttatgtatgccatgaaacttctctagcatacagtcacgactaggaagattaaccacagcattcgtcattaatacttgatgtatagcgaccagtgagtcagcgaccaactagtatggaacttcacatgaacaagatcagcccgatggcttttgcttaacggc

SEQ ID NO: 30101 - DNA, 454 bp, Oryza sativa
  unsure (1)..(454): unsure at all n locations
tccctggatctgngaagnttctctttcacggtattgagatcgcttgatcgatttccttgaacgctacttatgggcgtgcgctcaaaggatacacacacggatttgcatactaaaaagggaatatcgtagtcactttttcctgtcgcgtaaaaaaaaagctttacgcgagagcaatagaggttgggatacatctatctttctgacaacctcctttggattcttaagaccacccttgcagtatgataccgtctgctttgggttctttattatattatctccttccagggatttttaggatcgttcacgctatatttagtctattttggctcttactgtcttcttntctcatggaaatggttaaagacctcacaagatagacgagagcgccaggcgcagatttccggaatacttctacaggaatgctcattgaatgcgcattctccgtattatgcct

SEQ ID NO: 30102 - DNA, 441 bp, Oryza sativa
  unsure (1)..(441): unsure at all n locations
agctttataaataaactcgctgccctctcttgctttccattatacctttatccccttcatttctgttccatttctcatacatcgcgcgtcgtctccaccttttgtgcttgtgccaccaagctatctccctctctcctctctactagagcttctgcttgctcgatcagcagtgagcnttaagctagctagcaagcatggtggagactagtacatcccttgtgaaattaaagcaagatggcagcttgttcttgcctccaggcttcagattccatcccacagatgcggaggtaatcttgagctacctcctgcagaaattcctcaaccctagcttcacctccttgccaattggcgaggtcgacctcaacaagtgcgagccatgggatctcccaagtaagcctcaagtctcatatgcttacnatcttaattctcttcttctctcta

SEQ ID NO: 30103 - DNA, 397 bp, Oryza sativa
  unsure (1)..(397): unsure at all n locations
acacttcaatactaagctttaaatatgtagtttggaataaattgtgcaaatacctgttgttntatgaaatttactctataatctgagaacattattcttacgtgattgctctttttaatttttcattattaatagttaaagctaaaaatgttgatttaagactattctaaaaatgcttatattttagaacagaagatagagtatatattattctccttggatggttttgaaccacaaactctccattntactatataataagtgagctggtgatatcactgatatggaagcatagtggtgaaacttccttttcttttattaaaaaaatcagaaaatattttcctgctgtcaagatcaaagaccatgagaccaagataccatcctgtatgccattccc

SEQ ID NO: 30104 - DNA, 427 bp, Oryza sativa
agcttgagggtcggcacatcataactgaagtggaagaagataggacgtcctatgccccggccgaagccgccaagaactatgtacgtcacaacggttaggttgtgctggataacgtgcctgtcagtacggtgtactggcgaagaacaagggcacgcggagatcatgagagctttgtcccagattcggagaaagagatgctgtggaccacaatgctcgagacattcacccttcctgcgggtacagaggacaaagtgaaaaggtggactctgaagaaaatggcagaacagtttcagagcttcaagggagatctgtaccagaagtatatactgaaggggcagacaccgaacttcgacacattcccaaagctaagggatcactgggacgagttctgtgcatataagacaggtgaacaatggcaggcgatgat

SEQ ID NO: 30105 - DNA, 143 bp, Oryza sativa
ggcaacatttttaagtttagccaacatcgaaaatagcatggtgaatcactcgaagaccgtagtcgtacacatatagtactcgatcgatgatccaaatacggtgtacggaccaaagtcgagaacatattcttgatttgcatatg

SEQ ID NO: 30106 - DNA, 431 bp, Oryza sativa
  unsure (1)..(431): unsure at all n locations
agcttagagagcatgctgtatgccatctgaatgtcttgtaaagnttctcattagtgtgaaggccctcctaagaagtaggagctgcatgtaaacagagaacaaagcttacagcaaaagatcctgagaacatagagaaacatttttgcacaagaacacgataacagagctgataaaatagccaccaagaacaacagagcagcagcaaacatggacgttgtcacttggttctaggtaccagaatcctacattttaaaatgaaattagcaccttaaaatatatcccagcactctggataaacatggttcgtgtcacgtggaaatcaacaatcgagaatataccattaatctgactgcctccagcacctcatggtataccacgtttctagtcttagaactacacgcgccatcgtcgtccttaataaggatcctaag

SEQ ID NO: 30107 - DNA, 417 bp, Oryza sativa
  unsure (1)..(417): unsure at all n locations
agcttgtcagttggtcactcatatgaattgggcaagcacaagacgcgcgcagaagagctaaagatcggttagcaaaactcacctgagtgtatacatgagcgctggatttctcatggttgtccctgacatgcttgtatggaaacaccttttcacaccccgtgaatcgacatgcgaaaggttttacttgatcatgggacgcctttatatgtttggttaaatttgatttctgcaataggagggacaggtaacaagtttcaatccacaccagatacgactaaagctacagttcaagaggaagacaacaaacaatgcatcagaacatttggggataatagacttacattggaaaaagagcattcacagccctcaaaactgcattttatcctttcagtagatggcacctnctcatgggctcgt

SEQ ID NO: 30108 - DNA, 386 bp, Oryza sativa
  unsure (1)..(386): unsure at all n locations
cgtacaanataatgcaccanaataaaagagacacaagcagtctagcactcacaccatatataaaacagtagggatatggcatcaattgataatcctctcgtgttcttaggcgctgctcataggtgtccacacatttgattccatctgcattagttntatcatctctcttctgcaaaatccttgtgctgatcaagtgaccgatctgaacttaacatcatctgcttctgcaaaagttatcaaagtgactgagagaggaagaggactcaaatcgatggagggcaacagagcagcagcagtggccctctgctgcatgatcagcctgctgtcaagtgatgaactgcatcaagtttgtgccatgtcgaagttctgcagatgctacagggagc

SEQ ID NO: 30109 - DNA, 429 bp, Oryza sativa
  unsure (1)..(429): unsure at all n locations
agctttaaatcatcaacatgttaacctgttttttcagccaagacaacaataaattattatatggacagcctggacctggataggctatgatatatacagttcaaacaacacaggaacctaatcactagcagaaaaaaatatttatggttgctagggggatcttgntggctatatcaaaacatatgggccaataaacagaggcaatcacgtattgaagcatctagagacatttctcaagcttgcatgaagtatataacatagaaagtgcaaacatttattggaagtgaaagcaacaatattagcaaatcttgtggtaatgaacaagtggatcacaaagccgactggtaggatcagcagtttatttaacttaaaactaaacaaaagataatatgattaaaacacgttaaattgatctggaggtctagactg

SEQ ID NO: 30110 - DNA, 239 bp, Oryza sativa
  unsure (1)..(239): unsure at all n locations
gaatcagtccattctcgtcatgaggcctgatgggtagtgcgttattcttctcaagctcaagtttcagatcaatgccaaggctccactgatattgcttggcgtgatgcgatgctntagcatcgtgcatcacttctctagatgcccaggcttgatcaaacggttcttggtcaccggttcggccaattcgcgttggtttgttgcacgatgtgcggactgcctaactctgttactaattcatg

SEQ ID NO: 30111 - DNA, 429 bp, Oryza sativa
  unsure (1)..(429): unsure at all n locations
agcttgtatctttaaaataatcatgaaactcattctccatttgtgaccatgtagaaattgaattaggagcaagtaaactataccatgttgatgcaaagtttgacaaagaaagaggaaacaattttaacttaagcaaatcattactaccggccttaccacattgatcaataaattggccgatatgctccattgtagtcatagcattctcacctgtaaatttcgtgaagttagacacctcaaatccttgcgggtatgggaccgaatctacatgttcaggatacggcatttgatatgtatgtatagctactttggattctatttcactactatcccgcaagacattgtcatcattttttccagcatccacgtaaccgatttgtgactcggtcttaggtgacaatgctatttcactnttgcttgtaatacaat

SEQ ID NO: 30112 - DNA, 315 bp, Oryza sativa
gtttttttttttcgaggagacgggagatgcctccgtgcggcggcccttgtacactgtcgtccgctcggggcgtgatcttctcggcctctggctggggaagacgaaagagagggtgcacccggagtcccctctacgcgttctttacacgcaccgggtctttccgtgctttggtatgatcggctcatgcgagacagatgggcggaatggcgcggtggcggtgatctaaacgtgggggaggaatctatcggagggcgccttgtgtaaacaggaggcgatgttggctcgggaactgacctaggtgcggcaacggagcga

SEQ ID NO: 30113 - DNA, 388 bp, Oryza sativa
  unsure (1)..(388): unsure at all n locations
ctattacggccttaaaactaagcttcaggcagaatgcctcgcctgataacatctatgtatgctgatgacgctgtcattttcgtcaatcccacaagaggggatgtccaagcgctcacggaaatcctgcaacgtttcggcacggctactggactcgttaccaacttccaaaaatctcaagtcgcggtcatcaaatgcaataacactgatntggacgatgtcctagagggagttccaacagtgagagcatgctttccgatcaaatacctgggactccccctgatcctcgggcggatgcgaaaggcggacatgcagcacatctttgataagatcacagggcgtataacgggatggagaggcaaaaacatgggacttgccgggagggtcacac

SEQ ID NO: 30114 - DNA, 256 bp, Oryza sativa
agagaatagaagaatctactccaaccgatatgcccttatgcacggccatacataacatagaaatcacacgtggaatgggtgggcacatagctatagcagcaggtgctgtagcgaaactgattgcaaaagaaagtaaatcggacactttaagattaccatctggggaggtccggttggtatcccaaaactgcttatcaacagtcggacaagtgggtaatgttggggtgaaccataaaagtttgggttgagccgggtc

SEQ ID NO: 30115 - DNA, 264 bp, Oryza sativa
agcttatctgcctacaggagcatttttgtttttccttatagttcccacccgcattcgattgaaagcggtattgggcacatatagcttgaacattccaacggtatatcagtaatggcgatgacatatatctacgtgaaggcatgctgtcccaatccagcacttattgcttacatcacacaggatatatgtgctagtgttaaacactttgtcgcataggcaggtagcacctataccctcatgtatatgaggaataactctgctata

SEQ ID NO: 30116 - DNA, 456 bp, Oryza sativa
  unsure (1)..(456): unsure at all n locations
acacatagaatactaagcttcttatatattgganattatcatataaaggctaaacacatgttgcgcctgcactggtagcattatagcattataaagagcttctcaacacttctagaattagagtaacagatgtagtgatggcatgcaaattgtcctaaagttaactgaagtcctgacattagagtagcttctcacttagcatatctataggtcagggtgcatgttgtaatgttcttccgatttaacaactctcttgtattctctgcaggagttcagctcatcatgggatatccgcgcaacgccgacctttttcttcataaaaaacgagaagcatgtcgacaagcttgtgggcgccaacaaacctgaactcgaaaagaaggttcacgcacttgctgatggcagctgaaccttattatagcgcaacggctagaactgaaacgaatatggcatgtctgt

SEQ ID NO: 30117 - DNA, 355 bp, Oryza sativa
  unsure (1)..(355): unsure at all n locations
tcagtcattgagcactangatgccaaaacttgattacgttgtactttctatgttctgnaataattatagaagttcttttttctggctatgcagatttcgggagtntatccctcttctattacagtatggattgagtccgccaatggctgataaaccagttctgtgggtcgctcataatggacgtagctttgatgtaccatttctcatgtatgaatttcaacggagtaaaatagagatgcctggtgactggctattcgtagatacacttccaattgcaaggcaattgaatggttctgatggtacgttcttttgtcaaggttctgtttacttgcatgaacttacttttctgactaat

SEQ ID NO: 30118 - DNA, 356 bp, Oryza sativa
actcagcttactcgtatgggcattacataaagggcaagtacatactttatatttgtagaattcaaaataaaaactcacttgtacgagaaatacaagacatttctttatagatcttctcgagcctatttaatgatgaattattctgcacatgttataaaataagttactattagtacagcatttcacagttattaactactacttggctatattaccgatgttaaaagacgtactgatcttgacgacatgaactggccaaattcctcataaagtccatcaatcacaatatctgacgataactcagcttctgctataatcctattaagaatagtatgaacataactaccaggttgatc

SEQ ID NO: 30119 - DNA, 376 bp, Oryza sativa
  unsure (1)..(376): unsure at all n locations
tgcacgcagtcggattatacagggtcgggccgctatggagcgtaacaccctactcctgtngttgggattatggatgagttttacaaagatttcttcactctagaaagcgcactctgcttctctcttctggagttcaggttttctaggcgtcctcctctgtctcagtgggcagggtcctccttttatagctcaaggggataccatatgcgccgcctctacctaccctctatcggagggggatcccactccacttttcctgggctttaaaccgtgccttctcccggaagctaagcaacaaccggttctcgagtggaaccaggcgccgccctcgcctgacacgggggacagccctgtcattccctcataaatgaacgat

SEQ ID NO: 30120 - DNA, 405 bp, Oryza sativa
  unsure (1)..(405): unsure at all n locations
actaagcttacatatccagaggggcctgttccagtttaccgagacccagggaccccagattgatcatccatgatccctttcgcttaagatcttaatacataggttttgtatgtcactacactccatggggcggaattagcactttgagtagggataagggcgtgtccgggccccgaaacaatgaggatcctggactaccccttaccttatttctttaagatgagtggatgctaaagtacctatgaaagcccgggacccacatatagggcgggtccctaagtgacttaacctaagtcttccatctatttttatggatggcttatgcctgccatttatcttanatatgagttacttactaattcatcangggaatagggtaccctagttcccatttcacccacaatg

SEQ ID NO: 30121 - DNA, 409 bp, Oryza sativa
  unsure (1)..(409): unsure at all n locations
actcaagcttggctgggacatgcacaagcactttgcatttcatatctcttcttgatcaaagcacgatgagttagttctgagctgacaatactacaatcactgagtgtcagaccacagaaaaatntnttcaggagacattgtgcttgctttcatcagtgatcagtcaccatgattagcaccaggaagaagccgataatagggtctccgactccagctccagatgtgcgtgacatggacgtatagctatctgctgctttgccttttttttctcactacttttcgatcactcgcgtagccatcaatacatcacgaagtggttgcgagccactggagtgccaactcgctttctatatctgatggacaagccacactgagctggtgcaattggtcagtttattaaagagaaaat

SEQ ID NO: 30122 - DNA, 385 bp, Oryza sativa
  unsure (1)..(385): unsure at all n locations
acacaaganactcagctgcattgccctntcgggaactccactgttacatttagatatatgctcggcagaagtagtgcgacgtaaccaatcagcantntctatatcagctgtcacaaggccatactgaaagattnttgatacccattccgttagataagacactacataacactaattcaatcaacagtaccgaaaaacaacaatagggaattacagctaccagtaatgcanattcatgtaagaatgaacttagtcaggggcatgaagcaacaaaggcactagacaaaacatagattncagcaccaggaggtttatcatatctancaactataaacacacattcaatctttctacgtatgagctagggtgaataagaattcatata

SEQ ID NO: 30123 - DNA, 385 bp, Oryza sativa
  unsure (1)..(385): unsure at all n locations
ctgcagcanctaaaggctgaagccacaactaattaatggaaatttataaacttctgatgtcaaatgtgcaagaagcaaacaataccggctagtgatcttcataagtactcccaagagcaaatttaatagtatatcccactactagcttcaatacatttatagccaatcaaaatacccattagacacggctccatagcggggctgtgacgtaccagcccgcgtgtcactttcgaacctcgtgcaagtgagattgggctactgtgcccaacgccctgcaggagcgcagattgggcaagactatcgggacgcgcgctggggatttggtgagaggacngtaacgcgcgcacgaagctgctgcaggagcacacgctccgcatgagcccat

SEQ ID NO: 30124 - DNA, 403 bp, Oryza sativa
  unsure (1)..(403): unsure at all n locations
tacctaagaaactaacaatcgggcctatgttcctctgggtatgaatctgctgctgaagaccttganactgatgaactagatcatataaaagatgtcttagtggggacaccacagaataatggagtatccatggagcagcgaaagaggctaacaattgcagtcgagcttgtctcacacccatcagtcatactaatggatgaaccaccaacaggattagatacaagtcagcagcaatttggtattcgttgctgtctagaaatattatgcaaacacacggaatagaacagtagttgtgtacacatccatcatctcgagcactaacaatttcgaggcgcttgatgagggtatttaactctcgcaatgtgctatatatatcaaacataatcaacacaaatattttttt

SEQ ID NO: 30125 - DNA, 437 bp, Oryza sativa
  unsure (1)..(437): unsure at all n locations
tatctnnttgttactaatctagtgacaatccttctgtcgttatttattctatgacgaccatattcgtcgccatcaagccccgaaatcgtcataagattccatgtggcctttcaatgcccatgtattcacggcaagcctgggaggggggagccgtacatccactctaagcttccaaatcgcatgggcccgcacccacacaccttgactagtcccataattaaacattcgggaacctacattgttaaactatatcaatgtcacgccctgtaaatcgcctaatttaatagatcacttctttatgcatttttaaaattaattcaaaacctacaagctaactcctataatttatgagaaatttcaccataaattgagcttcataacactctattaaatacttttgcttgttatttattttctaaattttctgggaatttttg

SEQ ID NO: 30126 - DNA, 243 bp, Oryza sativa
ctcctctattactattccactagcttgacaacactacattaacttgtaagaatatgagagagctcttgcttgaagtgtgtgtgtgaagcgagaacaggagctctttatatatgctgcccatgaccgttgcggccattggaatgggccgaattgctctccaacaaccatatgggagtgatacacgccgtccacaagaaaacctgcatccaacggtgccaccggggaagtaacggccggcccaac

SEQ ID NO: 30127 - DNA, 417 bp, Oryza sativa
  unsure (1)..(417): unsure at all n locations
tgtcaaatcatgatntaatatttgaagatgttccatggtaaagcatatttgcctggcttggtcatatttgattatttgctggccatgtgtttttaatacttttatgatgacaaacagggcccaagagagccagctgctccagcagtgcctgctcaaactgcggcgtaagtagcattgaaccatccatttgcaaatatgtatgcttgttttcataaagtnttatcgtcttgcaacttcgtaatgatgcagggcaccaaagaagtataagaagtgaacatctggcatgaagtgtgatctgcatgattagtgaaaccgtntgaggtgttagcttgaatttgaaatatgaaccgtttggcttagtatttaagtatcttccatgtccgataccttanacactatnatgtcatgctgctggat

SEQ ID NO: 30128 - DNA, 398 bp, Oryza sativa
  unsure (1)..(398): unsure at all n locations
nttattggcgagaagtgtgcgggtgatctggacgcanatgtgttgtttcctgacggcgaactcctcgtactccggcgagaacaccacctnctncgcgtgctccaccaccggccccatggcgcgctccttcagcgccgcgctcgagctcagcttcgccacctncagcgttcgcagcacgttgcccgccttcacccccgccggcagccgcgcctngcaagctcgccggaggaacggcacgtcgtacttggcgccggcgaccagcagcgcgtgcaggtgccgctctctcgcgcacgtcgccagggagcccgtgtaaaggaaggcgaggaggtgggagagctcgtcgtgggtcagctccgggagcgacagagagtcgccggcggtggccctgcagtcgtcgt

SEQ ID NO: 30129 - DNA, 332 bp, Oryza sativa
  unsure (1)..(332): unsure at all n locations
ttcttagtcccttcccgggcttggtgtttggtgtaaaccggacttgctagataggcgccgtactatcaagaaaggtctatgaaaccagcttgtggatgatctagcgccatattagttcctatgcatgtaggtgcactttgtgggcttgactaaccaagtgtgatgagttttctcaagtccttaaccacgagagaaatgggcttgttctatagggatgaagttgatcttgcgggtatgttcggtggatatctttggagggcagcccttatacctgactaagtgngttcttgatggaatttcatggttggaggccctttgataagctttcataa

SEQ ID NO: 30130 - DNA, 378 bp, Oryza sativa
taccacagtgtacactcaccaagagttgagaattaggctctgtctttatacataagcgcttgaatgcacgagattagcactgaggtgcaatagcttcaggattaacacaagatggtctctttgcattgtagtagaaatgggcaatcatttgaactagttcgtcggcagttcttatctctgtaaacaagcaaatgacgcaatcatgtgatgtcagagtggcaattttgaccattgaaaaaggtgggcctaacatgaaagagcatattagcaatcaaggaatttaataattccaagctccattcaatatgttaactatgtgaacaggatttaccatataaatggaactaacttctcaccttttttcctgtataatatctt

SEQ ID NO: 30131 - DNA, 189 bp, Oryza sativa
actcagcttgcatagttccgagacaaccccatgagagccctgacgttctgtattttgcgattggatgcctgggtctgctttagagactcttccatgatgcgagctgagtactactcggtcacggatccctgtccactaaacagcatagaattgtcgagagcacatgcgtgcatactatgacgaccgaac

SEQ ID NO: 30132 - DNA, 360 bp, Oryza sativa
  unsure (1)..(360): unsure at all n locations
tggggggagacatctctnnccccactgaggtaagttgtatcacactgcatatttccctttcacattacatatttgctgtccaattgcatcttataaaaatgaaaacaacataaaaattatctaaatagaaaacaccaaaaaaaataggatagggttgagtcatgctatgtaagacaagctagttctctttgctgaaatgatgaataattgctctattttataatctctatatatgggttcataagaagtgctctctcaaaggttaaatataagtagccagccattatctggaacctgacgtaaatgagccgcacttgctgatctgagcctaagttgttgtaagatatgagatattaaata

SEQ ID NO: 30133 - DNA, 417 bp, Oryza sativa
  unsure (1)..(417): unsure at all n locations
cgcagtggtgtgtcacgcttgacagctgtggcacatatatggctaagagatcggccgataagccttatatcaatgcagatgcaaaaacttgcccagcaatggtgcagatatggtgtcaacgtgagcagctgcgtgtctgaggtaccgatccaacaacgagacaaacacctggagatgcttgccctcactgagctctccccatgccgtttcctctgcggtgtggagcatcgttntattctccaaaggaatgtgcctcagtgagtgtaccctgacactactacaagccactgcttccacctcccctcttctccatgataggatgcctcctacatggacttgtgaggccattnccccacatagcgcattgtaaattaatatatataattngagtggttaaaagttatgaccagaataata

SEQ ID NO: 30134 - DNA, 315 bp, Oryza sativa
  unsure (1)..(315): unsure at all n locations
ntgccgacaatggagcgtgcggcagcatggattccgcatatcccacaatgtatgtctttcagcaattgtctcccttcctctaaagatacgcagcgttgcacaatccctgaagggctattcttgtacaactcagcttcatgcataacgtaaagtttgctccgccttgaaatccgctcggcttcatctttatcttgggggagttcttgagaagtcaaaaatcgtatgaggggctctcgccaatcggcttcaaccatagctacatcatgagtgcccgcaacttgagtagtatctntgtgaggtactgtcggcgtataa

SEQ ID NO: 30135 - DNA, 360 bp, Oryza sativa
tgcagcctagtgtacaaaggagagagcctaatgttgagatttcatttaatcccgggaattgcttttctcctagcccttcgtaccacgtggggtcacgtgctaagcaagcctaaggcaagaagagttagaatcagaagagaaaagcacccgtgcgaactgaagaagaagtacgtaagatgactattaccagcaccgaatggcctccagcagggataactattcctatacgtcaaagaggaaatacctttcgaggtgcacgacagttgacccagcacctcctaagccatggtggcagagtatctgatagtgaagggtcagatcaagtcttctcggattatgaagatgagtctcttcgacatc

SEQ ID NO: 30136 - DNA, 418 bp, Oryza sativa
  unsure (1)..(418): unsure at all n locations
tctagatctggcgctgtggctgctgctgctcctgcgacccgcgaaatgggcggagccgttgaggcgagaggagatggagtggagccggatgctttggagagatgcgcctcgtgattcgtgcgagaggtgatcctacggcttgggagagggattccttgcctaattgttctttcaccccaatttcccttttttattttctcttttgattgatgagaggtgttgaaccaacttcaagttgattaaacatacgaatatgatgtcattcacacccttttgggttcctaatcctacatactctctccgtntcataaaagaccaacttaaaatgagatgtgccatttcctattatagtaaatcttaataggggtatgcccaaattcattgtatcagaacatattatatggttttttatgggacg

SEQ ID NO: 30137 - DNA, 357 bp, Oryza sativa
  unsure (1)..(357): unsure at all n locations
cggaccttagaaactcaagcttgaacttgcaatttctggggaaagggttccagaagagctcaacattnagcttttgattgctcagatgcatgttgtcaaggtaacaatcgacatcaagtttgagtccatgttgattntctatttctaatntatactttcaaaatgcagggccagttggatgttgcatcagagaaactgcaaaatcttatcaatgaggatcctcgagatttccgacctcatctttgccaggtacccttaaccgttcacatgtgtcatatgtgatatgttccaaattctttttatattgatccttgacaagaacaatgtgtccatgggtgttcaaaatgcanggcatcg

SEQ ID NO: 30138 - DNA, 476 bp, Oryza sativa
  unsure (1)..(476): unsure at all n locations
tctatggaattagcctgcatcacctgaatccaaactccatagtgtacattgccaatttcattcacgcctgcgaagcttttctgggcattaggcctcatttcgccttattccgccgaatcttcttcctcaagccccaaccgaacaagagcaaaccatgcgtggttgggggcgccagcttccaactcagaggaacactaagccaaaagtatttctccatgccctttaagacctcaaacaaaggctggcacgcaaactggttttacgttcaaaatcctaaacccgcactccccgagtactcctgtcttcctcggatttaccaggacacatggaattcattgcctatgggagatgaagctgctcangcagtggaattgatggaacgaatgctaaagctgaaggaacagggttngcagggagaacaaatcactcggcacttcatcaaaagtcggttagcttcaatcaaagagaggcccaca

SEQ ID NO: 30139 - DNA, 424 bp, Oryza sativa
  unsure (1)..(424): unsure at all n locations
tgccagattaccgatcgaggtggntggagttngatttgtgataactgatctggcctatatttatgtgaaggatgtgatccttctatgtggcatgaggtaaccctgtgtcggcttgggaaaggctttgttgcgaacctccgataccgacaggtgttcggaataagttcgtatcttgtgggtaaagtgtacccctctgcagagggtaactaactgttcgaacagccatgcccacggtcatgggcggttgtgaggtggttcccgttgcgtaaatttgtttgctggtgctttgtgacaagttgttgtgtgggaatcgtaaccagaatcagcctatgtggcagatggatgacctgagtggtcagaaacgaatctgtgtgaatcgggatgtctgcgggcatcatagactacgcttcccgagtggaagtgg

SEQ ID NO: 30140 - DNA, 386 bp, Oryza sativa
  unsure (1)..(386): unsure at all n locations
ntggacgatgtggttggcggcatcccggacccgcgcgcgcgcattgttctctgtcccgggagggaactcctccagcgccatccatggggagaagccggggtccctggcctggtaactcgctaacacgagttccaccgctccttgggcgaggtccctcgaggatgacttgatggtcttctcgagctcctcggggagttgttggacagcccaggccatcctcctaaggtgcggtgcgaggccttccagattggtggagcgcgaaattgtctggcctttccagaggcccgcttcccgaccggcgcgatccagccgggagactgcatcccatagcatgccgggccctatctcacccgacaagcggagggccttggcttccccggtggatg

SEQ ID NO: 30141 - DNA, 480 bp, Oryza sativa
tggctcttgtaccagccttcacatccaatgtattttattcatctaacttcaacttcttaccatagagattgtattaagaaccattaacaccagaaagaaaggcttggttgggcacagcgcacttgtgtaaaaggatatagattgccatcattcatattttgttttaattgaacagtgacatagagcgtgtggaactttaaggagaaactgaagttaaatatctgagtctttttgtacaagtctgatagtggatgtggattacaacagtacgcatgttgatatgcagatcgatgcgttgcttgaggaagtcaagaatacaccggtttacatgatcaccgatgacctaatgatccgaaccgtgcggcagtatgtaattctgtgaattgcagtttgtgtttttttggtctctatctggctgacatcctattactactgctcttcttgttgatgagaagtctttctggctcccagagatctgat

SEQ ID NO: 30142 - DNA, 474 bp, Oryza sativa
  unsure (1)..(474): unsure at all n locations
tctaaccttccctccaagatccaccttccttagtttatatctctatcattttgactntcaattggtgtgcacccacttctcacaacctctctgtcctcctcaagtagcaaggaccactgacgagcccaatgcgtccccccctaaaaataacctatatcacagagttagtttttaagccattaaagacgacataattcctagataaccaaattgtccaacacatcgccgatatcaaaaaagccagtttctcaacctaaatactaagccactcggccaaccacccaagagattagtgatagacgatggctcttggatatctagcattacatacaaggcattccacatcaagcgagcaacctggcactcaaagaagagatggtagatggttcttcccatagcagaacaacacttagtgcttcatttcatctcttttgaccaaatgtctttgtagaatcgctctttctaatatccaca

SEQ ID NO: 30143 - DNA, 395 bp, Oryza sativa
  unsure (1)..(395): unsure at all n locations
gctattacgtgacctatgaaactcagctggtgacggtgggaccggctcatggtggcataaacccacggtctcaaccatgcacaccggtnatggaatttggctgtcaataatggggcggtctcttcaagactgccacatcacctgagcggcgcacgaatctgggcgagccgatttgcctcgcctggagatacggtaatgtcgcttcggtcggcgagcgtaattaacgcgcgcacgatacgatctatctcgactgccgcaaccgcatatccatctcacgcgccgcaagcgggcgaatgggattagtggaagcgtgggcgcgagaaacgagggggcgaaataatgggtgcgagaaacgaggagccgggcacagctgtggcaagggtataaaggcactg

SEQ ID NO: 30144 - DNA, 434 bp, Oryza sativa
  unsure (1)..(434): unsure at all n locations
ntctttctcctccgcctatcgatttacccgaatgcgctgttttgatttgatggatggcttgggagaggtgaggaattgaggcggcggatcacgggaaggatttttaatcacttttcgaaggtggatttggacggattgatgaaccctatttcgccggcgcagctatttactgtatcaaggagtggggaaaatggcgagcgttccggcggtgaagacgaagcgtcgcttggatctcggattatttgttaagggtatcggaggtgcaagtgggcctatgcctgaacagtacctcagcccaatacttttaacagcgtggcccattgtgttccttagggacttangcatatcttgctttggcaatatttatgcacacaatagtgttgcccaatgctgacaaaatcctttttatgcggncatataattctttggagtat

SEQ ID NO: 30145 - DNA, 405 bp, Oryza sativa
  unsure (1)..(405): unsure at all n locations
actcaactctgaactatngacactctgctatacttttgtcttctacatatggactcncacagaaaatggatgcaacgggtgcaaacggtatactcttcaacttcttctactgttcctgtacatggagttccacgaaattcttttacatgcacgatgggtgtaagacaaagtgatcccctatcaccacttctatttgtccttggagctgagctcgtacacagaagaatgaataaagctttcgagttggacttaatctctaaaccaattaatgaaaatgatgggagtgggtcccctatcatacaatatgatgaatataccctaatcttgctcaaagcttctcacaangaaatcttcttgttcaagctattctgaacatgtttgcacagtccacaggtctaaaggtga

SEQ ID NO: 30146 - DNA, 385 bp, Oryza sativa
  unsure (1)..(385): unsure at all n locations
ttagctgacttcgtcgccgagtggatctagtgccnagatgacacgctcgaggagaagaatgagtattggactatgcactctgacgggtcaaagagactttcaggcactggggccggggttgttttaatttccccgactggagaaagactgagctacgtgctatggatacatttctctacatctcacaacgtggcagaatacgaggcgctccttcacggactatggatcgcaatctctttgggaatcatgcgtttgatagttcgcggagattcacaagtagatggtaatcaagttatgaaagagtggtcctgtcttgacgacaatatgatcgcttatcgacaagaggtactcacgttggaggataagttcgattgactcaaactca

SEQ ID NO: 30147 - DNA, 440 bp, Oryza sativa
tggagtgcgtgtgagaagtgaagtgattattttcttttatatgcatgtctgacgggtgtcgatcatgcgaaatgtctgacatgccatgccaccgccatcaagacgtcatctgtgagcgtcatgctaaaccccacactgaacggctgagattgtgggtcggcctaaccctggcttggctcaacaaacaccaattatggcatggtgctcattctcagcctaccttctacatttctccggtagttaggcttatttataaaatgaagttttaatggagtttatgagcccaactcttgtatggatagaactcttcttcactttagtctaaaattcctcccaactttgatggttattatctgcatccaaataacaccaacactcgtggaaaatgttagaaatagatcctaccactatgttggatataatattaactatgctctata

SEQ ID NO: 30148 - DNA, 312 bp, Oryza sativa
  unsure (1)..(312): unsure at all n locations
ngagcttcgtcccgactccatcggttccagcaacaagatattggtcacctgtggtaagaactaccaatacatatcacagaaccctcccaaacacacacccattaatgacgagcaaactaaaccccaatctacttcctcgcaaaaaaaaaaaaaaccaatctacttaatacaaacaaggagatgggtagtagtatagtaccgaaggggaagaggccaccgaagccgcctatcgctggagccaacctgccgatgcggcggacgagctccgtcccggcgtcgatatccacgccggcgcccttgtacgtcatcccc

SEQ ID NO: 30149 - DNA, 377 bp, Oryza sativa
  unsure (1)..(377): unsure at all n locations
cttaagaaatcaaagactnggctagaattatcaaacacagtatatttacaccagtactggaccaagtgagcctccattngttacattcatactcagtcagaatcaggtctttcatcatcagagttattgttgctcggctgaaggtcgctgttgcggaattgctctacaacgtcacttgcaatcttgtcagccgcattttgagcattggtgatgagatcaagagcagcttcttcgcttgtcccgtcttgcaagccatcaatggcgtcaatttcaattctcgggtacaatgatttggtcatcgccaatgccatgctagctcccatacttccagctttcttgatgttcttgaaatatacatccgggagcactctcagctt

SEQ ID NO: 30150 - DNA, 475 bp, Oryza sativa
  unsure (1)..(475): unsure at all n locations
ggctggctttcaatcactacagtatgtctgcctcctgctgtatctattccattcagggaggctgggtaattagcttgcgcagaaatgcaaagcatgattaatcaatttaatttaaccaaacctttgtcccatccttgcagtgtgagccaggaaactaacacatccatccatcgttttctccacgcctgataagtccagaaaattgaacaaagcaatatacagaaactaatttacggatataacttttacatatgtttttgttctttgcgatttaaaaacaatgctgcaaaaaccatgacgagaaaacatcaaaatcaactataaaaattagctntaaaacttaaattttcttttactctcacgagccaataagacaacgatggatatgttaaatgtagaactcatanaccagtcgatggcccgatattgggttgagttcatacttatgagactagaaatgagttatcacgcattg

SEQ ID NO: 30151 - DNA, 493 bp, Oryza sativa
  unsure (1)..(493): unsure at all n locations
tatgacgttattaattaattaactagggcaagaagccctatatatatccctatatttctcttggagaattcaatacattatctnaattgttcttacatactatacagctcgacgacaaattattacaatacttaattataactgcaattaagcaacagtacatattcatttgttgttaggtctcgatcggttgatccttgacccaactattatacgtaagcgtagataccgatgtttgccagccattccactattggagtttgtctgtatatatgcagaggtcgtcgtcgacgactcacttcttctttcctttcttattatcaccttgcttattaccatctttcagtgtttcactgcatatgtccaattaagcacaaattcagaggttaaccactgcacgacatataagacggctacaacacactatataanggataaataattttatgcatgcactcgatncaatgtgttcatataagtactaaaacatcgc

SEQ ID NO: 30152 - DNA, 434 bp, Oryza sativa
  unsure (1)..(434): unsure at all n locations
tcatatgtanacatattatcatcattcactagcaattattatattnttagatacaaacacgtgcaaatctgtaaattattgcattcaagagcttaacatgtaagcatatcaaataatcctcacattattttcacaatattttaacataaatccaactatcactaataaaaaactatttttttagacggccaaaactagatttttgcgtgtggatcgaagacccttatgcaccaagaggtatgcaaaaaattatcatttctccatgcgggtgacgcacccgcacgcaaaaatccaatttttgcgtgcgggcgcataagctgcccatctgcaatataaaaaaatataagtctaanaatccaaaccctagtcccgaaacctagatccgctgccatccagtctgccgccacccgctagccatcgaggtcatcatcgtc

SEQ ID NO: 30153 - DNA, 453 bp, Oryza sativa
  unsure (1)..(453): unsure at all n locations
gaggagaatgggacagccatgataagcctggattgtttctgctgtgagatgcaactgcagcagcagcagaaaaggggggcaactcaacagcagctggtggttgtccccatcanggtgaggaaagatggatgggcaagtgatgccatgctttatgtaagcaaatatcttctccattttatttgcctcccaattactatatttctagtgaaaatgtttggcgtgcattcttttaatgagttgtatgggtgatgattgatttcaggtgaatgtggagcttgtggacgcgaacacgccttctgagaacatcggaaggactgtttcattcatggagagcagggcgaggacgacgactccggcaccgacaatgcgggacaataggaagagcttganggagggacgtaccatgagggtcttgacctgaagcagctgcttgatctggctgacagggagcac

SEQ ID NO: 30154 - DNA, 434 bp, Oryza sativa
  unsure (1)..(434): unsure at all n locations
cacggaaaataaaactcagctacatctctggcgttgaatatgtgaaaacatcttctattacacacatgcatgttaaaatcataatatttgttatataatattctttttgttaccagctcttttcagttattactaagcctgggaattttgttaacattaactttcaaaaagtagagttgcctagttgaacctaacttccggngtggaaggcaatcgaatttggcctagagcttcttaagaaaggcattatctagaggattgataatggccagtcagtttgcatttggcgagatccatggatcccgagagacctctctcggaggccgattaccacgaagggacactatcgtttgaaatgtggttctgatcttttgagccaaatggttcttgngatgctctaaggtgtctcagaccttttctgccgatgacactga

SEQ ID NO: 30155 - DNA, 409 bp, Oryza sativa
  unsure (1)..(409): unsure at all n locations
ttacgaatcttcgagaaaaccctcgacgagaatctgattctcgtactatacgcaaacaatcgagaacctaaacaaaagaccaaaagaaagatcctatttagactaattagtagtgccattaaatagatctcaatttacggaattattggaagtggaacggagtcaatcggacgagcggttggggagatatggatttcctaagattatttggattttctgtctaaaggaaaaggatttatcaaatcccttggaaaagaaaaggaaggagggatgtcatttagacttactcgggcggcttaggctcggcccaaggggtcatgcgcagcgcggtcaggccattgngccggcgcgggcgcggngagagagaggccgactcnggtggacgcggtccaccgcgctggacccacat

SEQ ID NO: 30156 - DNA, 471 bp, Oryza sativa
tgtatatgttaagtgtctactagacatgattagtatttatgtcatatgtaatgtaggtacctaaagctaatttcctactacatatccttatagaggtggatctcctgtgtgtatccactaccttattaattattatcctaacccttgtttagactatggtgaattaattataggctgattaaggagatacagaaaaacatatctttatgtcaccactttccctgtggaaatataactacaatactcttgggaatatttatgtgtgaaatgctatagcggtatccatacgattgcggatttatctgagcccgaagtagaagacgacctcccctacattaacctagaagtggaacaagtccttgtcgaggaagtcgcaaatgaggaaattgatgatgctgctcaatggtctgcacatgaggagcctgccttgccgtactaatatatatctacagccgttacattgcataaaac

SEQ ID NO: 30157 - DNA, 370 bp, Oryza sativa
tatagcgggctcgctatgggtattttcaatgatatatctccacttaagctacactcatcatatattacaaagcggctggtatatcactctgatcatgttatccacggattcacaccgcatatgcttcatatcaatatccagtcacttggctgactataattatcaaagccactcgggtggctggattatattctccttaactatatgcctggattgctcaaataaccacatagtcaggggctacacctattacgcgcatctagacaatgcacctgactttatatttcagccctctacagacttacaaattggtaacagtactccggagaccatggcacagatgattgaagcactccgcttttgagtaatc

SEQ ID NO: 30158 - DNA, 306 bp, Oryza sativa
  unsure (1)..(306): unsure at all n locations
tgcggatatatctattntatgaatcttggtcgtaagaatttatacagaccatcattcggtcggtaacgtatatcggttaagacaatagaaattgtgaggattacgaattcgtgccaaatacaaatctcgaactagggtttctcaagaatatttcctattttattcccgtattataattatcttaaaattaaaagataatatatgttactcttacaagtttttgttttcctaattaatcatgactcgaagtcttaattagacccatatgcttcagtagttccatttactcttccgtagtctcattaa

SEQ ID NO: 30159 - DNA, 331 bp, Oryza sativa
  unsure (1)..(331): unsure at all n locations
tggtcgatctcnccggatcgaatagttaatgatgatggtttctatcttgtcngggcacgtactctggtcagattagatctccctctcaaccgaagtcgtcgagtaggttgttgttggagaatccatctcttaaactcatctcgtcgaaaccctgaagcaccaaaatccccctacctggggcgctactgtcgacgtttgatgtcgcaattctggtatttacatagtatggggatcgtcggtgctaggatatacgcgagactgaggtaaaagagacggagacagggatttttatacaggttcgggtccctgagttgcaggtaataaccctaca

SEQ ID NO: 30160 - DNA, 466 bp, Oryza sativa
  unsure (1)..(466): unsure at all n locations
tcttatgataatntgcctcgtttgttagccaccattgccttgatgaataataatacttactatgacctacatacatttacatcggttgatgatcgaacaaagagtgtgctgcaaagagcctttttctcattgggtgcttgcatcaatgcttttatgcattgtcgacctgttctatgcatagatggaactcttatgacaggtaaataccgaggtcagatattgacagcaattgggtgtgatgggaacaaccaggttctacctatggcttttgcatttgtagagagtgagaacactgaaagctggtactggttcctagagagagtgcacattgcagtggtgcgtatgaagcctcaacttttgcctatacatgaacgtcatgcgggtatgttgcgggctattgactacttgcggaacggttgggatgagaaatggacttcagctaaagtgcctgatgttctgagtcggt

SEQ ID NO: 30161 - DNA, 397 bp, Oryza sativa
gacctatgaaactcagctaattatataatccgcaaatctccatataacagcactattcttctgatgatcatatcttgggcatacgagctccgaatcgaccgttcaagtctcttaatgtttgatataacctaaagaaccctgtgctttctttttatgtattggtattgcttctttataggcttgtagctttgcttgtgtgcttcgcgtagcttctgtcgttccggaggttcccgaagcgtggttcgtggtcgtcgccgaaggttcggaagtccgttctctctgagcaaggcaagtcacatcatccttgagcatattgaatcccagtttataaaattaatttgaattaaataatgcattatcgctttatttaaattcccgcgttatcactgttttattt

SEQ ID NO: 30162 - DNA, 444 bp, Oryza sativa
actaagctagcctgcgtctatgaaagtacaggctcggcttgttgctaatggctatactcagaaagaaggcgaagatttctttgacacttactcacctgttgctagattgaccacaattcgtgtgctactttccctagcagcctcacatggtcttctcgttcatcaaatggacgttaagacagcttttcttaatggagagctggatgaggagatctatatggatcaacctgatgggtttgtacttgaaggtcaagaaggcaaagtgtgcaaattgttgaagtctttgtatggtctgaaacaagctcctaagcaatggcatgagaaatttgacaaaacattgacatctgcaggctttgcagtcaatgaggcagataaatgtgtgtactaatcgcatggtgggggtgagggaagtattttgtcctgtatgttacgacatactgatat

SEQ ID NO: 30163 - DNA, 423 bp, Oryza sativa
  unsure (1)..(423): unsure at all n locations
tgcacaagctgggagaaagacgggagtggctcggacagctttagcatcccgactntcgatggcatcgacgagcaccagtcgctgctcgtcctcaagaacgcggagatatggcgcgacgtcctccgcgcgcctccctacaagcaacacctcgtcgtcatccggctccgtcctcccgtcatccggttccgtcctcctccccttccggatggagctctggcgccacgtcgtctccggcgacatgatgacgaagaacgaggcgtccttcaccaccactctaaggttcatgatcatctcatctcggacggcggccgtgggcagcctggcgttcgtcgtcgtccccaccctcaacgcgcgcgatggcgccttaccgccggcgttgaacaccggaaactacaccatcaccaccaccttcattaatcatag

SEQ ID NO: 30164 - DNA, 376 bp, Oryza sativa
  unsure (1)..(376): unsure at all n locations
ggacctataaaactaagcttnagttctnagctcctaaaagacaaggtgttctttgtttgctcttggaaagtatgagaagcacggaggtgagaacgctcgcaatatacgaacaagaccaacatcacctcctatggagcgatttggtcattcaccaagacggccagaatcacctacatatcatcggcctcaagatatgtcatgggggccttacccaatgtcgccgccgggttatgcttttccttactacatgccatggggggcaacaccgtcaatgttcaatcatatgcctccaatgcaattcaaccaaggatggcgaggaccaagcangccagctcgtgagcgtttttcttcaccaaataatgtgccggctctatgt

SEQ ID NO: 30165 - DNA, 437 bp, Oryza sativa
agtaactgcggcataaaacgagtttaaggtattgggcacttgatcacgcgcactatggcctaagcaaagagcgcctatgtctctagaagaacgtgacaggccacacctgaagatatgggctgcagacatattatgcctacgcccatatatatgccttcgataccctttaaaggatgacacatgcaacatgctcccgggtgatatagaccatgtgatctgagtgattatcccttatgggatactccaggatagatatgagaattgaatcccgactggcgcaagtgttcggttgataacccttacagtgaataataaataggtcagtctttgagcatagaaaatagacgcatgatcataaattcatgtcgcatgtatccggaacaagtccaaattacagatatagtcctcacgctcgagttgatgagctcctgacatat

SEQ ID NO: 30166 - DNA, 467 bp, Oryza sativa
  unsure (1)..(467): unsure at all n locations
taaggagtcagaaactcagttactgcatgcataagcatttaggaggctattgtcgaacggcacagtatatttaagtcttcaatgtctgatatggagcaggtgattgatgatctaaaggaaaaatatttgaaagctgaaaccagagctgagaatgctgaatcaaaatgtacattgctgacagacactaacttagagcttagtgaagagttgtcatttctgagaggtcgagtagacactttagagaattcactgtgcaaagccaaccaactgaagatgtccgcagcaaaagatattggcattaaaactaaaactatcactgacttagttgcaaaacttgcattggaaagagagtgccttcatttacaggtataaattttattattcaagagaaaaatactggtggcagtattttaacttttgcctgtgtatttatgttcttnggatgttatgtaactggacttcgtatg

SEQ ID NO: 30167 - DNA, 319 bp, Oryza sativa
  unsure (1)..(319): unsure at all n locations
tgtgcagcgtatctcatatgtgtcagataatggaagaatatcatgcctttgctttcaagaaactacagccacttatattacagagtcagctaatcaaagagcaaataaaattcaggaattgaaagtgcaaaaatgagcgcggatgatactcggagaccaggatattatggtgggcatatgctctgtttccatggagaggtaattgggaacaatatgatctgtctgttctgctaacttggacgggtgatgagaacatgttgtgcgtgatgtgaaatactcccttcgtgccattttaagtgtagccacgattnttcatacc

SEQ ID NO: 30168 - DNA, 335 bp, Oryza sativa
tgtcgatgacctgaagttgagttattgattatcatgaaaacgctcttattccaacaatcgaaaaactgcacatttgaagctagatcatctggaagttacctctacaagagttatagaagcccataatgcggcaattccttgcaatcctataccagctttagcacataggtcttcaggactgctgaactgtttcagtttttttttaggaaacaaaagtatgatgagaaccttcatacgtaatcaggtgccttaaacacttattcagaacaatgtatggcatcaagttgacttcagtgataattactccaggtaaagtagcagactgtgaaagctga

SEQ ID NO: 30169 - DNA, 218 bp, Oryza sativa
ctcagcttatgcttggacgcctacatagacaccggtggacgtatctgtggctacttttgcgaccgaagtctcctgcagtaagtagacttcaacaaaagccgtgactgtctcctcagattagacagagccccaaacgaagaagacgatctcgccagtccaaaccaccattagcgctttgtgcggagatttcaacaccgttacatgcttacgctctgttt

SEQ ID NO: 30170 - DNA, 472 bp, Oryza sativa
  unsure (1)..(472): unsure at all n locations
tgagtcctcgtgaagatacaatattcccttggcattcctttatgatgttgtacagttgctcccagtttggtgtgtttcccctactggtatctgctgagatgaaatgtttaatttaatcataatcactcacctataatacgtcaaattctattcttagccatgtaacttgtttgtcagaaatgctacagtacatattcagtaccccacactaacttgcagttgtgcattgctcagtttattcttattgatgttagtgtttataggacagcgactccactattataaatatgtctgtgcatacagaanaggggggagttttgtacttgcanagtagatcagcactgcaatctttnttacattgacaaacgaagatagnagtatgaatatgcttctgaaaatgataattagaagggaaaataccgaatagaaagtatccaggctcccgtcttgcggattcataaacaacagtgtt

SEQ ID NO: 30171 - DNA, 390 bp, Oryza sativa
  unsure (1)..(390): unsure at all n locations
tcgggtagtatggtcaagaacaacgaagacacggataggaattgatgaagcccttggtggggtcgatgtcttatggaagtgaaggctcactacgggtcaagattctcaggggcatagaatatctactcgatccaggacagctagcggaggaagtttatgttggtcttctttgcttacgatggtactaaacggcggttatatcatggattctgcatgtatgccgtggtggcacgtggtgatatgtgaaggagacgtgtctggtgggtaaagaggtacacccttggctagaatataatctattcgtatagatacgccctccgatatgggaagcctagcaattacccaaagttagatgttntattctaatgaactgacataactggatgtatc

SEQ ID NO: 30172 - DNA, 416 bp, Oryza sativa
  unsure (1)..(416): unsure at all n locations
tcacacccctaggggctagggtgcacgtttcanattcctttcattcttttcatattacaaatatgcaaatataatcttattttggttccactcaatttcaggaggcagaanagcgatcagagcagacaagtgagtacgaaacagaactactttttcccccatgaaatatgtagatattttgctcatatcttcgtaatttatcaggtgaagaactagagtatagaccagttcctgcatctgagtcaaaacccccttcagatgaagcggtaatacaaaatgatgaactntatcttccattgacttggaacaatcagtggtgacccagaaaaaaattaccggggccaatcatagaattattaattatgactgatatactaataaataatatattagttgaatggatatctaccgagtct

SEQ ID NO: 30173 - DNA, 396 bp, Oryza sativa
  unsure (1)..(396): unsure at all n locations
tgtgggccgacacaaagaaagaaataaatgaactgtccttatgcatgatctgatgcctcctgtcactgacacgtgtcggatggattcgcaggggttactaccggtgcacgtatcgcaacgcgcaaggctgcccggcgaccaagcaggtgcagcgctccgacgccgacctcgccgtcttcgacgtcacctaccagggcgcccacacctgccaccagaagcagcgccgcgccgccgccgccggcgaccaaccgcctccgccgccgccgcatgccgacccgagcgtggagctgctcgtcaacttcaggcacggnctgaaggtggagaccaacgggctggctcctccgccgcctgcgcctccgacgacgacgacgaacttccacgacgaccagcacttct

SEQ ID NO: 30174 - DNA, 456 bp, Oryza sativa
  unsure (1)..(456): unsure at all n locations
ntgccgtgacgcgcctcatgtgttgagacgaggctcatgtgttgtgcattcgcggagtgcgagtaaagtgtacatccactgcagtgtgagtgaacgaaatctattctaatagccgtgctcgcgggtattgagcaccgggacatgtattacactcggctagtctctaaattcttaacttatgtgggatgggttgttgcatgacgaatttttatgctgttggagccacttcctgagaagggggaaggtgggcgtcctcagaaaaccataacgactcaatggcgggaagctatcctcgagatcacaatggatggtggacagaaccgtcgtttgttaaatacaaacactggtactaaaaattgatcactcaatgctaggtcttaagttcgagaaaagaattacaaactggcttagcgcaaaagagccatagccattctttgaaaaaccctttcatatgca

SEQ ID NO: 30175 - DNA, 406 bp, Oryza sativa
tataacctataagcgcatatgcggctagtgctttatacatcttgcgtttcaagatgtgaacctacgccctactggagctggacattcgacaaccagctacaaacatgacttcgatccacattaacatgcatactgaacctatagcagctaattactctaacagctcaggtcattgccaactgcatgttctatgtgcgaaacaaaatgttatatcaataaaaccaactcaacgcgcacattatctgcgcacaacttaaaataaataacactgatgtgacactgtcctctgatcacctaacctcattatccatgctggccgtctttgaattgtcgatgtccccgtactaacagggttggaacacagaactcacacgctgaagatctgcatcctagtggagaatgcaat

SEQ ID NO: 30176 - DNA, 422 bp, Oryza sativa
  unsure (1)..(422): unsure at all n locations
tatgttgatgatgtacgtgtcaagaccaagcttaaggattatttgactaccgatctagaagagacctttgcgggcatccgtgctttcaggatgaaattaaaccctgaaaagtgcatcttcggagtatcgtcagggaagctgcttggctttatggtgtcccatagaggcatacaagccaacccggagaaaatcaacgccatcctcaacatgaaactgtcgagttcctagaaagatgttcaaaagttaactagatgcatggcggcgctcagtcggtttgtctcacgacttggcgagcggnggaagccctttttcaagttgttaaagagaaccgacaacttccagaggggacccgaagcacataaagcctttgaagacttcaacaaacttctcactactccaccagtcttagcttcaccagaatc

SEQ ID NO: 30177 - DNA, 405 bp, Oryza sativa
  unsure (1)..(405): unsure at all n locations
gcttctgataaactgagatnttcggctaacccatcactaactcttctatatatctcttgctgaaagtatccctgatcccactgataacgagtaggcccaaacaattcaattggggtagttgctgacccataccacatagttccggctactacgaaagctgcaaaaaaaacagcagcgatactactggaaagtacaggttcaatattgcccatacgtaatcctttgtattgacgttgaggtggacggacactaagatggaataggcccgctaatatgcccaatgtacccgcagcaatatgatgagaagctattccccctggaacaaaaagatcaaaaccttctgcaccccacgcaggaattacagcttgtacttttccagttagtcataaggatcagacacccata

SEQ ID NO: 30178 - DNA, 460 bp, Oryza sativa
  unsure (1)..(460): unsure at all n locations
ctaagcttattgtacactntactaggaattcaatcaccaaacacacacatgctatctattatatcttggcttccatggaacatctaactaaccataaagcatgcattcttcacatgccttattacattgtaccaatctcatttttatatgatgacctggatagctaactagcttgcacatcaggaccaaccatttatttatttatatttattaaggaagatcgtatatagtggacaaagcctttactatgtattagagtataccccaagtccatgtactgctagtatttgtccttcaaacctacgtactatngcttatctacggcatgcttcactcacctttattcctggcttttttaaaaaaaatttgccaggactaccaatttagctagctcatgtttcccattttcagatatactgaattaatatacaggtatggtacatagttgagaatatgtaac

SEQ ID NO: 30179 - DNA, 426 bp, Oryza sativa
  unsure (1)..(426): unsure at all n locations
tcattatcgtgcttatcctagntggtggtttagtttattcttggttaaaaggagccttggaatggtcttaactgaatattcagacaaaacataaagaaggaaaagatttcattaagacagttatgagtttgattgagtttcccctacttgaccaaacaaggtccaattccgttatttcaactacactaaaagatctttcgaattggtcaagactctctagtttatggccccttctatatggtacccgntgttgtttcattgaatttgcttcattaataggctcacgattcgactttgatcgttatggattggtaccaagatcaagtcctaggcaagcggacctcaatttaacagccggtacagtaacaatgaaaatggctncctctttagtgagattatatgagcanatgcctgaaccaaaatacg

SEQ ID NO: 30180 - DNA, 259 bp, Oryza sativa
agctctctgactataatgttctataatgaaagagttagtcgaatgagccgaaaattcggagtgtcggcaatcccaccatatctatattctgtgatcattctgaatacaataaatattcttcttgagaatataaatctatcttgcgagaagtacctcttggctagtccctaataagcatacgggactattgttcgttataatcaactaaaatatagtgattgcgtctggcgagatataaacactagagtagatattaatt

SEQ ID NO: 30181 - DNA, 335 bp, Oryza sativa
  unsure (1)..(335): unsure at all n locations
cgctgcacgcatgcacgagaggacggagacagctcancgactcaccggcaccgcgcgcattgtgccggcgaggtgaggggaaccattgttgctcgaccgatcgagcgctggacctgcaggttgaagaggctgttgcaacccatcttctgggtcacggccactctngcggggaaacatatgcagacaccggtgcttactgtacatcgagcgtacgtaagtatactgtattttatcacattccgaatacacaaaagacgcacacgccgacacatcaccgcacacgtatattacgttcaacatccacgaatgtgtccctaacacaccaggtaagagac

SEQ ID NO: 30182 - DNA, 379 bp, Oryza sativa
  unsure (1)..(379): unsure at all n locations
tttgcaagcttggtanacaagttgagacataagataatgctcaatggtttctagntctcattctgaatcagtgctgcatagagtggcctctttggctctttcgtccgagacttctctgaactcggaactcagctttgatgtcgtcaaagaccacaactgtctgtgatatcgcacagaataattcagcttgaaatttgactcgactcgattcggttcagagacaccacatggaaagaatgatcagactttgtagcaagtagtttggttctaggttccatagcatgtgcgcccggacattaaactgggctntacaaaagcacttcccataacttcaggcgtgtgccagtggatcgaagaactcacgtagaaaccaagcatg

SEQ ID NO: 30183 - DNA, 484 bp, Oryza sativa
  unsure (1)..(484): unsure at all n locations
tgatgtacctccgggagcttcttggtgccgccctgccttgatctacaccaccataacctgcttcgggtgacctacctccacctagacatgagccagataaggaggatgcgagagacgagaggcgaaaagtggagctggcggagggagatggaagtcccctgcgcctggtcgcctcgatctgatcgtctctccacctaaaataggagctgaagctgggtggagcgctatcacaaaatgaactagagatttgaagttgggttttagctttccacaactccactccaaatccaactcctataagctaaatttggggttggagttgtgccaaacaggccatgaatttaggctactccacaactccactctagaattaactttctggagaataaattaagaagtgcagctctaccaaataggcactctanaaatatacatatncatctaaaatgtatcatttatatccaattaatagtctgtcatatat

SEQ ID NO: 30184 - DNA, 383 bp, Oryza sativa
tattaagggtagcccatgcatcaacataccgaagaaaatgacacatgtcttgacatgcaaataccatctaatagtctggagtagacagagaaagaagatatgacaataagcaaacttgggaacaaatatgcactcaaatgtaaaaactcgttttgaaactgccggatgctaaatgacaaatggaatggaagaacgtaatgtgggaacagaagtggaacaactacagtgggaacaactacgtgtttttaacatagtagcagtttcgatgtgaacttataacagccggaactgtgttttggaaagtattatctgcatggcccaacagctaaattaattgcacttacctacttagaacttccaaaagcaccgtaatcagcagcact

SEQ ID NO: 30185 - DNA, 413 bp, Oryza sativa
gcgctatacggagtatgtcttccctgagatacttgtgggtacacggctacaaggcttctaagactggtcacgatctcatgctcatgggcggccctttggacatagagttacacctcccagttctgagaatgcaaatcgaatgagagaagatggtgaaccttgtgtagatagtcaagctcagatacttgcatactacttccttgccgggaagaggtcggactgcccacgatctgtggttcctttgtatcctgcgtgactgtaaataccgatatggtatctctctgcttcgttcttgcctcttgccttttttgggtgatatgttgatatgtgggtattgtatgggtctagaactctagatggctagctgctatgtaccggaataagctactggtagctgagatgtacttggataa

SEQ ID NO: 30186 - DNA, 415 bp, Oryza sativa
tgatcttggaggggcttgccggcattgcatgcggcagccttgatgtgctcctcggcatcctcctccttgtggcgcggaacgcgggacttggaactctcggcctcgcgcccaatactcctccttggcgctctccaagcagtcccgacatctctcggcctccacaatatagtgacgctcgcgggttgccttggcatgggagttgacgactcatctcttcggcatcgcggctatctgtggtggcgggggctggtggcgcggcaggcccacccacagtcgcctttgtctcaacttctccggaggccgaggcgcttcaacttcgcaccatcaagacggctctccataagctccaatcgcaccgaagttgagcttgccaccgccggaagattcgagctcgataccccttacctgtcacccc

SEQ ID NO: 30187 - DNA, 325 bp, Oryza sativa
  unsure (1)..(325): unsure at all n locations
taatgtanctgatgaggacagtacatatccttacattgatatatggcttgatgttgctgctacacccaggattgaagagctcactcttacgctacataaaaagtacatctttgcatgctcacttttatctgatggtgttcgagactcaattcgatgtcttcagcttaccttctgtgcctttcattccatggctgaacttggccccttgagaagcctaacaaaactgcatctgtgtggtgtgcatattacaggtgacgagttagagtcccttcctttgaactccctttgtttggagccagtgagacttaatgtatgcaacaagata

SEQ ID NO: 30188 - DNA, 483 bp, Oryza sativa
  unsure (1)..(483): unsure at all n locations
tctgcaatttctgaatcaccctgtagaatggcctgttcttctctgtcggaatatgtagntccttcccctagaaccgtacttgagagtttcctacctcataccgctcagaaattgctatcttaatttcccttgtcttaactgaattccatttctcaaaaatcgatccaatttcttctttggttacgcagaagaagttaattacctaagtttcaaaccctaaattttgatcaataatcagtntgatcttttctcccacctgcagaaaaatgaagcatagatagacctatatccttcgtccgaattatctgaaaggtaactatctcggtttcatatatgaaatntctatagaatccttgaataagactttttccccataagcaagaagaaagaacttactatctntgggatctgatactacaccgctgcttaatccctcagtggatcggctctattacataagccgattcctanaattttgcccca

SEQ ID NO: 30189 - DNA, 386 bp, Oryza sativa
ataaaactaagctttatatgatgaatgtgaacatagtagagctgcgtttttttcttcttatatatggaagtttgaacagaatgaaacgatatgacagaaaaggtgtgtatgaaagttcaatgtgactgaaaagttgacagtctgaagaataaagttagaatctaaacagggcctaaggatctcataaattttgctactgtccaataaaatatggatagatgtcacaccctgaagcttccccccttttcttggcttaaaaattggttaaataaattggccgaagaaattatcttaattaacctagagctaaatccctaattaataaatgcaataataatcggaaatagcgtggtggagattctcttgagttacccatgctccaatgc

SEQ ID NO: 30190 - DNA, 463 bp, Oryza sativa
  unsure (1)..(463): unsure at all n locations
taaactaatgaagcatgtcaagtttttattaatcgcgtaatgacagcagagaaatactaaggacctgagtggactgaacaacatctgacgggtcagaaatttgagtaatcagccataaaatatggcgacatcattttagcaaatccgtatattttttctctccatacgtcggttcgtacgatggtgacacgtcagccactcagagctgctcgtttctcggcgcgccacgtcagatgctgtgctgcacgagagcaccccccccagccaataattgggtgacagctacggctgaaattaccgtcctgcccctcgggttctcgaagaatccactcacactcactacgacgtgatacatgcgccggagaaccaactagtccacactaacctncaggattaggagaaccacaattacacaactttatcccgtgatatattagaggagggtcacccatcccatgattgg

SEQ ID NO: 30191 - DNA, 456 bp, Oryza sativa
  unsure (1)..(456): unsure at all n locations
taaagcaagccggacagtgactgaatggaacaactttattattcataatgtgtccagtgtaaaacatcaagagagagattttgaagaaacatcatgatggatggatgatgcatggnctcagaggttcagaggcttgcagtgtcagtagcttgaattagcttcagaatacgtacaatattgaatttattttaccgattaggtatagatgtaatgatgaaaggaagtccaaagttgcatgttctaaacagaactgatctgtaccctgttcatgtatcaaaactggttgccttggttttcatcacttctagtactggtttctctgggcactggaactttggcccttgatacacttcgttagagcattcttactcatgcacactcagttcttaactttgtactccattccaagtgcaagccattatagccttcttaactcttgcctaactgtaatcggtt

SEQ ID NO: 30192 - DNA, 439 bp, Oryza sativa
  unsure (1)..(439): unsure at all n locations
tccaccnaatccatntggctgcagntggaganggatgatgtagttctccctctttcttctccgtcataaaataaatcaaactctcgtatctagatatanattttaataaaaaactataacatccttcattaacatagaaaaataaaaataatattgaccgctggatagatgaagatacttaagaatacaacttcttgattcttgatatntaaagtccaaaattgggtctgagaaattaatttactttaagacagaaagagcaggcttgtgtatacagtgcatgtcaattngctccaactgttgcaattaatgcaccttgaatggctctctctatctcnctcaccctaaaaagaaaaatgagatggaaggagaagctagcactgttcattgtgatagtgaaagatactatangaggagataatggactggtcatcattta

SEQ ID NO: 30193 - DNA, 386 bp, Oryza sativa
tgctgtcacatataacacgatgattgatctttacgggaatgccgggaagctccaggatgcgatggacatggttatgggtatgccacattattgggttgccgcggatacatgtaccttcaatacattgatcaacatattccggtcgtgtggtaatgtgaacgaggcataggcactgtttgctagcatgatagttaagggaactaatccagatgttaagacgtttaatgtgatgatgacattagttgcattcaacggtgatgttgagggagttttgaagcactactatcatattgggaaaatgggtttatctgcggatactgtgagctatgggattgttctcccggtgttatgtgagagaaagatggtacatgaagcacaagatgtga

SEQ ID NO: 30194 - DNA, 334 bp, Oryza sativa
  unsure (1)..(334): unsure at all n locations
gatccttataatgaccggtgatggtctcccatgcttcgatgcttcaaacctaggtcttcctgatgatgctgcttgcatcggcaccgtgccaacaactctagatgtggctgctaatcatggtgtagttgtagcggcaaaggacggaactgatggggagaactattccctgtgtctggttgataatcttctccagaagcctacagtgcacgagcttgtggagggccaagctattcgagatgacgggagagcactgcttgacacanggataatatcagccaagggtaaagcatggcaggagctagttagacttgcatattcatctagccatgtcatg

SEQ ID NO: 30195 - DNA, 462 bp, Oryza sativa
atcagtcacaaggggactcctgaaccttggcttatcctctttaaatagccatgctttccggagctatccttcgtcagctggaaaaataccttctttctctacaacgtttgcggtcgtcatctcctctgattatgccaacaggagtgctaattgggttgcattggtaatatctacaaacattggatcacagaacaacttgcaaggcatgtacatgggacttgatccctttgatgatgaaaacattttgtttgctgtcgaattcgaaccaaaaagacagtgaattctttacatcaacacaaccatgttgggtagacagcaacagcttgatttcccttcagactcacccgcagagtactacacccctgatgatatgttcaaagagatgacactctgatcaagacccatacacgcctgggtggagatacagcaaacaaaacggtaatgcactttgcacctacttga

SEQ ID NO: 30196 - DNA, 486 bp, Oryza sativa
  unsure (1)..(486): unsure at all n locations
agcatactccatccttcatctactgtagaattcatgtttgagaagtatagaaaggtttggtctttgaaacctgtctaaaacattgactatatggcttacttttttnttctaaaacataatctatttttgcaaaatatatatactcaccgtatcgacaaattcatgattttgcaaatttccgtatccctgtatcgtcataccagtatcgcgtatctgtgcatacaccggagaggaggaagatgcaagccgacgcgattcaaattaagcctacgggaagccccgtttctgcgcttggagccgagctcgcattctcgttacgttgctcctggagccgttcgatcgctgggctgtccacgcgttgttcatccagaatggcattggtgactcatcatgctgataagtggacccgnacatatgcctcatctatctattatctatctatctatctatctattatatactanaagtccattaaactccctataa

SEQ ID NO: 30197 - DNA, 393 bp, Oryza sativa
  unsure (1)..(393): unsure at all n locations
aaatcaatttacttgatcaattgggtaaaaaccctgggcaagttgctagagcaacttgatcgaacaattcagtgtggttgtccggctagttcattggccaactatggtcatgtcttgatcggatagtagaaattgaactagccttgatgttcgacagccctcggagtgtccgagactaaattgatctggcaacaattggacaatccgatagggtgtctgacaatctggccgcatgttcatccagctgggttgggaaaatggtttgaacgcggtggattgtccaccactatgccagacacagagtntcanacaatctcgatggtgccagattgtccaacacttaatgacccaatggctactttgcctagtaccgttggaaaatataaaggtggg

SEQ ID NO: 30198 - DNA, 468 bp, Oryza sativa
  unsure (1)..(468): unsure at all n locations
gcttagcacactccagataggtttagaaaatatatctttcttggtctgtgactgatgacggcagtttattaaggttactattccttgataggttcaaataacaaagtttttggaggctaccaatgttggcaggcaatgtttcaagagagcaattggagacgaatagactctgcatattttgaagtgtgtggcaagatttatggaaggatatgatatgaaagcctgatacatgaagataccccatcaacatcagtcgacaatggaagatcgacgactggacagcctggagacattgatcctcattgacaatgcattcngttcaattacgtatgtagtggttgagagaagctttcggngagttgcattgcgacattcttaaaacgagggttgtatcttgatgtatatgttaaaatactattagcttatgtattaccactgccatgcaacaanaagctatatcttgccatg

SEQ ID NO: 30199 - DNA, 295 bp, Oryza sativa
  unsure (1)..(295): unsure at all n locations
aatttattnttttggcaaatagtacaagttttcgaatgccaattagaattaaaagtgccaagtattagctttagaatccaagaataaaagagtcgaagcattaaaaagagaataagttttaatacaaacacccacatttcacaaaacaaaaggggtagccaaaaaaactaatacaactgaacacaaaacttcataaatctaaaaggtagtaccgtgatagaagatttcataanagggacctcaaatccaaaaaagaaacagttatagttcacctaaagctttagaatcaaataga

SEQ ID NO: 30200 - DNA, 346 bp, Oryza sativa
agctttggacagaaagtccttgacctcttttatacattgaggctggtcccaaagatcaatatgtcattgacatataaacacaagatcactccctctcccccaccattacgatagtacacacatttgtcagcttcgttcacaacaaagccagtagatggaagtgtattgtcaaacttttcataccattgcttaggcgcttgtttgagaccatacaaggacttcaacagcttgcataccattccctcctgaccttctagtacatacccatctggttgatccatatagatctccttctccaactcttcattgaggaaagctggcttaacatccatctgatggacgagta

SEQ ID NO: 30201 - DNA, 122 bp, Oryza sativa
aaaaaaggcctagagctcatagctaaacacgccaacgagtcaacatcttgatatgaacgcaataaaggcactattaaaataatacaattaacctttaatatatgacattcaacagtcataca

SEQ ID NO: 30202 - DNA, 393 bp, Oryza sativa
agcttcacaaagctatgtaccagacttatggttcgaaagttcttgagcttcctggcatccgacctcttatgcagtaaggtgatgaaagccttgttaaccttaccaaggctggacccatccattcgatgaagttgattcaaagccgccataatgtcctccttaatgatgtcccaacagcagtaatagaactgaccagaaaaaccatccggccccggggcgttgtcacgagggctgtcagcgattgccttccacacctcatccacagtgaacggttcctccaagtcagagagctgctgcccccttggctcaaagtagtcaagatccaccgaaaactcacgatgactgacagagccgacttcagagaagaaattatgggcaagggcggccttttca

SEQ ID NO: 30203 - DNA, 403 bp, Oryza sativa
  unsure (1)..(403): unsure at all n locations
tacggacctatgatactcagcttacaggtatgaattctcgtctattctcagttctcacacttctttttcatacctncagtctataattggtgatttgttccatgttcgtataagcttactgcatatttttacttacccacttgttagttctggttttgtgggttctagatcagcttagctgaaactgaaattggttgccttgcatgtagacttatacattgaattttctctggtccctttgatgggttagttcagcaccagtgatttgtaggttgcaatttgctatttcacccaatcacaaatctcaagcatagcagaatgttgcatcacccgtgctgatcnagttagatggggtgggtttctgcttccatgtgtttgtaaaataggactatccttacattct

SEQ ID NO: 30204 - DNA, 470 bp, Oryza sativa
  unsure (1)..(470): unsure at all n locations
agcttcttgaccaaatcagaactcaccaagttgttgcagcttcctccatcaatgatcacacgtgcacgacggttgttgatgacgaanaanatctgaaacaaattatggcattgcaacctgtcatgctgctgtacctgcgcgctgagcacccgctgcacaatgatggtcctgtagtccgttgtgtcatcacgaccaaaaacttcgccatcctcatcctcaacttcttcttctttcccctcttcctcttccacgtcggaggtggtgatgtagccatcttctgtagcaacataggcccgttgactagggcaatctttctacacatgcccaaacccttggcaatggtagcactgaatgcgtcccgtcgaggcgacagatgaagcactcttggcgggtacctacgaggaacctttacctgactctgctggtcgtggtggtggagatggttntggtgccgcaaaagcttccgatgc

SEQ ID NO: 30205 - DNA, 419 bp, Oryza sativa
tagatgcatcgcaatacacttggaaacccatctttggatccggcttaatcaaaatgggtgctgatattaagcgaattttcaactcttgaaagctctgctcacattcttttgaccacttgtacttcacgtctttctgaagcaggcgtgtcatgtgcttagcaatcttggaaaaattctctatgaacctacggtaatagcctgcaagacccaggaaactacgaatctctgaaactgtattcggttggttccaattagttacggattccacattactagggtcgacggcaacttctctggctgagatgacgtgcccaagaaactttacttcagacaaccaaaattcatatttgctaaacttggcaaaagctgatgttctcgtacttctctagtgccagacaaagatgtcttatgctcttctt

SEQ ID NO: 30206 - DNA, 509 bp, Oryza sativa
agcttagagtaaataggaagaacttagaagttcgtgatgtcgtaattgtcgaatattgaataactgcaaatgtatggaggatgtcatttcttctatccatttagtatatctgatcaatcagaaattcacaaggaagctcatgcatatatgacctgcagatactccattttctgtccttgatcaatccactcgtattcgcatgaagtgatttctgcacatccatcttgttcatgtaatcttcgatatgtgacgaatagcacggatcataccctgagtacatcctcgtgcctttaagcctcttctgaaatttgcattcaattatcttcagttcattctgttttcatatttgctacagtacaaatactagttgttaagcattacagttaccttagcattcatatcagctgtactggaggaggtggaaaagagggatgagtcatcagtgttgcacttaggtgcatacacattgaaaatatcgatcatatcgtactgatcatatatgtatccca

SEQ ID NO: 30207 - DNA, 202 bp, Oryza sativa
gcatctgtgtaggttgatggaagaaatatcctaaatttctaactagctcctatggcattatcccattaagggagttgtgttgatatgaactttgatttgcaagcatggtggaataaacttcattattacgcaacaacaatagatatcatagatcacatcatagagtttcacaaatgggtcataaatcatgatgcaatcgact

SEQ ID NO: 30208 - DNA, 310 bp, Oryza sativa
  unsure (1)..(310): unsure at all n locations
aacatttctaaagtgtagagtaataataccctaaggagaaacatacataaacttgcacacactgacattgaatngatngaacaattcagtacaaacatagtttagatgaacatggactgatggacatggttcattacagacagcttagatgcaatttggacatagttcattacagacatagacacatagtgtaaatgcaacttgcaaaattaaatcaacaaggtccggtcggtgtacattctatccctaccggagggaggccggagcacggaaaacattcatataactatttaaacaggctatgcttatt

SEQ ID NO: 30209 - DNA, 492 bp, Oryza sativa
gcttgttagcggatcggcaatgtttctatatcgcctatcgctatattgaatactatcatcaaaccatgggcggtccaagattgggctttggatttcattggtcaaatttatccttcgtcatcaaaagggcattcgctcgtgctagttgcaatggattacttcactaagtgagccgaagccgtgccgctcgagaatattacttgtacggaggttgttgagttcttctctttactacgctcaggctaatgaataagccgagtcgagtaataaaacattgttgaaattgccgttttgccagttgaggtaaatcttggctctcttcggtatttcaagcaacgcgacttgtcggttgaagattacaagaccttgatttttgaagatgtcatcgacgagcgttcgaagaacttgatggagatgaagacacttccagacggtgtttttagagatcaataaagggaaatacttgagaaatactttccgacatttggcaga

SEQ ID NO: 30210 - DNA, 501 bp, Oryza sativa
  unsure (1)..(501): unsure at all n locations
agcttcttagcaacaaaagtaaactataccctactctcaaaaacagataaaaaaagcatacatcatctgaggagctatcatcactgctatcatcacttgactcctctttagcaggttgtgcagacttcttcggttggacagtcttctttggttgggcctttacctgcaaagaattttgaaaataattaataagaagaaagcagtgcaaagaaaaaaaaaactccatgttcattataatttggaacacacgaaactacacaaaataaacagttaacgaaagaaaacatgcatcttcaatatgaaatgacctattttcatatgagactgaggcaaaagaggaaaacttctactgtttaaccaatgttcaaactattcaatctcagaggtcaaaattacagcttgacagcatatagataataatacaatttctgctacttctactgattcattagttcctccaaaaaatcaataantcctcaagcanacatttgtataacactt

SEQ ID NO: 30211 - DNA, 418 bp, Oryza sativa
  unsure (1)..(418): unsure at all n locations
gctattacgtgacctatgaaactcaagcttgacatgtagcgcanactaacttcattagtaagagttaacatagtttagaacattcttttttcacaattccagcaaaaatcaaatccattcccctggggaaataatgatttccagtaactactatgctttactctactcccttcgtcccataaaaaatcaacttctagagatgaatctgtacaaatgcaaaggtaaggttttagaagtcaacaattaccttctccaattcctcacattgngccctactagtacagctaaaggtgctactttccctcctgagaagtggggactggagagagtggtgttctattctcttttgagagagagagagagagagagagagagagaaatttctctggtttnnttttttgagagagagaatccagtc

SEQ ID NO: 30212 - DNA, 486 bp, Oryza sativa
  unsure (1)..(486): unsure at all n locations
agctctatctctggttttgtccggtctactgagtgcgtttacgcatgagtagtgccgaagatagcactgagacagcctgtaatgggaactttagctggaaaacttgattgaggtcagacggcagtgtttggcacaaccatcacttgctgactgataagatcaggtggaccgtcgtgattgtgctattgtctttaaagaaattaaaaaaaatcataaaaataaaagtcatgagaaaagattaaaatctcatgttctatgctttgttatcatgttgatactctntatgaactgggcattagcacattagcatggattcattgctttgattatgtaaatcttgcatgattatgagctggtttgcttccttttaagcttcttctagaaatagctttgcacactanatcactaattcacttgaaagctntntgcttgctggggatactaacttgatatccatgacatgtntcatacttcttatgcacatgc

SEQ ID NO: 30213 - DNA, 441 bp, Oryza sativa
tgaagctaaagcacacaggcgaatttgaaatcacaaaaacaggggaaattttatggaaagaaaaacttgaacatctttgatcaatcaatgtacaccatacaaactcatcatatagactttccaggacagctttatggaatcagcacaaaatgaaagtgaaacccaaagctacgactcctgtggtcattggaagtaagtaatcaatggcgtacaaccttcttccattccttgttcgcaaggaaaaacgcaaacagccttgagcccttgagtcgattacaggaaaagaatacacaatcatgattagtaggttttcaagtgagaaccacacctcgagcttggattatcgagatgcaggcacccaatggtgggctgagtgtggtacagagcctgatcgtataaaactgtaatacaaactcgtttatctgtatattgctatcaaat

SEQ ID NO: 30214 - DNA, 477 bp, Oryza sativa
  unsure (1)..(477): unsure at all n locations
agcttaagctggttccatcctctgtacttaataaaattaaaaagggtggaaaaagtccgatacatataaaaataaaaaaaattaaaaagtgaagaaaaaaagtctgattcctgacttaaaaaaaagacatatgaataaaaaagttaaataaacaacgataaaagcgccgtatgtaaaaaagcaaaaataaaaagtttgattcgtatacaatggaaaaaaagaaaaaaaaaggaaaaaaatgcggcatccataaaaaaaaagataaaaagtccgattcatatttatatctatacctaataataatctcttctctactatcttatattaactacttaaaagatttgtaattttcctttcgtcacacctgattttcgtccatcaatagaggaatccggctcgggaacgacgggactcggacgtggaaaaaaactaggattcttccgangttgctgggatagaaactgagccgaaattcgc

SEQ ID NO: 30215 - DNA, 309 bp, Oryza sativa
  unsure (1)..(309): unsure at all n locations
tacttgaagccgggggctccgttggactcttgtaggtgcctaagaggaattggagttgctttggtggtaaggtgcaatgatgctaagcaattatggcatgttggtaaccgggtgcatgaattggcattctctgggctttgggtattgctagtcgtgggaagatgaaaatacttgatcctttgcgatgggcttgacaatgatgcccttttgttgtgaagccagagctgctatgatgctgttggtggccagcccttatcaatgatgatacttntttgagatgtcgaggtattgtgtgcttaagtgggaact

SEQ ID NO: 30216 - DNA, 426 bp, Oryza sativa
  unsure (1)..(426): unsure at all n locations
atgagttagtgggttataactttatattcagatatgatatgacgggttctcttagtctagctacttgagatgcgctcataacgcaatggcaggattgctggcatgcaccccatccgcccaggtttgattctcctcgagcatgctcacttggaatattngtcctttcttcttaaagccatcagcaccaagccctttcttggtgtccaacttcttaatctagctacctaaaacttcatatgtacatgttctttatctgctagctagtctaatccaggtaactataggcaatgttttgcatcacatagatggcaacatcatatgacctattaaccttatctatgtttgacatgagaagtccatatattatgttttacttgggtgccatcttatagctatcagtgagctgtattnatngattattctaat

SEQ ID NO: 30217 - DNA, 478 bp, Oryza sativa
  unsure (1)..(478): unsure at all n locations
agcttcgagacagtggtacttgaagtttgatgtgacaataaataaatttgggtttcaagagaatgtcgaggacaactgtatttattcaaagtttaagaatgggagatttattttcctaattctgtatgtggatgacattctactggctagtaatgatgtcagtctactgcaggaaacaaagaaattcttgtcctcaaactttgacatgaaagacctcggtgaggcttcatatgttttgggcatagagattcaccgagatagaacaaagtatgcattgggactttctcaaaagacatatatagaaaaggtgttgaagaaattcaacatgtacagatgcagtgctacacctgctcctataatgaaaggcgaanagtatggggcatcgcaatgtcccacaaatcagtttgagctcaatgaaatgaaaacaaagccatatgcgtcagctgtatgaagcctacagtacgctcaagtgtgcaca

SEQ ID NO: 30218 - DNA, 464 bp, Oryza sativa
  unsure (1)..(464): unsure at all n locations
ccctagacactgnttctcactagtaaatcgtctctattctgttctatcattngcttggggtccttggatgaaccggaggaagatctgaccacacacgttcccttggattcgatacccttggaatactccgtaggggaagtgctacatggaatactccgtaggggaagtgctacatcggtatatccgtgcgcttgcggattatatctgtgaacgtaagaaataccaacaagcatttctggcgctgttgccggggaagcggttgctgatcatttccgaaccttcgtcatcctcgtatcccttttactttttttattctaccttcacccctgctattctagagaagtattcatgtcaaactcttcttgaccatggagcaacctcnttttgagctgtccgctcctcggggcaaaatctatgagccaccttcttcattggtgccccattatacactgggctatgaaatc

SEQ ID NO: 30219 - DNA, 401 bp, Oryza sativa
agcttgccgccagcgaaaacccttttcgctttcggttttgtaatcctccgccagcgaagatgttttcgctcgctgttggcgcgttcctccgccagcgaagatgtcttcgcctataagttgctagcgcgcgtggctgaaaaatttcctaagtcccggaggcgtgcgaaccctaaaatttgtgccaccacgctgccaaatatttgattgccgccgccagcgataaccctagcgcccgccaccgtcgccgactgcttcttcattcggacacagctcctccattcgcgcctccaccgtcgccgccggctcctacttctctcagtccgccgccacccgcactagatccattcgcgcctgctcttcaccgtcgccggtagatccagtttctcttcgactgacggtcg

SEQ ID NO: 30220 - DNA, 435 bp, Oryza sativa
  unsure (1)..(435): unsure at all n locations
agctctgcctnccttaattatttgtaatatgcatttatcttaactcaaattaaatagcaaatctgagtacgtttctctgttatctagacatactcatggntcatattgctttctaatctttgttcaagtttacttcttatattatacatcaaggttttatgcttttgcttggcagatgagggagaatgcgttgacctgaaattttacgcactccgaccttcttcatcggctgcgctgccgctcaacctatgccaccgccggatcgacgggaagccgcagccgctccacctgcgccgtcatagggagccttcaaccgacctccttcatcggctgcgcagccgctccaccttgtgccatcgctgatcgacnggagccacccgctttccccttcctacacctcacctgtatggtgtcacctaacttaaactgatgaca

SEQ ID NO: 30221 - DNA, 374 bp, Oryza sativa
gcaaccgaacccaaagttccgttcgcatgacacgttgtatatcttcttcttcggcttctcctcactacatgccaccacccaccaatcatccaaaattatgattgttctatgatgcaccaaagcactgggtgggtcaattgaattacacggtgttggaattaccttaccacgaacttggcgagggtctggatgtaacaatcaatcatctgctgcttgggggcgccctcgacgaccggctttgccatgacgattagccagtgctcgtagtcacacccagtgaagagcggtgccatctccgggggcgcgcggaccccttccttgccagaccgcagcggcgagtacgacgacttcggtcgtcgcgccatgcagcggac

SEQ ID NO: 30222 - DNA, 264 bp, Oryza sativa
ctcaaaatcttagaagacccctttcctggagagagcatatagcttcttctgtgccaatgttagagttgagacacatttgcaagcaagtcgaagaacagcatgttatgttagccaatatggttgagttgtgtgacctcttaccatacttgtgctgcttgccgacgcgtataaaatggggaaacgatcaactgagcttcttatgttctaacagcttaacacagcacttttctttggcgttaatttccgtgggtctttaaacttatc

SEQ ID NO: 30223 - DNA, 328 bp, Oryza sativa
cacaattgaatgactttatgaaacagcacattaccaaagctcaattgtgcatgaagcatgtcgctgactaaagtcattttgatagacagttcatggtgggtgaacaagcctttctgaaacttcaaccatatgctcaatcatcggtagtaaacatgccttattctaaattgggattcaaatattttgggctctatctagtggagatacgattggagcaccaacttataaattggcactgctggaagggagtatatggatcattcggtctttcatgtttcgcaattgaaaggccatgttcctgattattcaccaatatactctactttgc

SEQ ID NO: 30224 - DNA, 411 bp, Oryza sativa
  unsure (1)..(411): unsure at all n locations
tacgggaactaggctagtggtacatacaagagcaccaaaagaccttgtggccctggtaagttttggtttgataaaaatacataaacttttgacttgtcctacaataaggctacaatgatatttttattatcaaagatacaaaatcaatgtcctacgggaacaatatgtactataaagattagtattagttcaattcgtaccaaatataactcatatttataaaagttgcatgggtgtatttattgtataacacatatatattttgctaatgtacgtctcatactttngagtatattcaaagtttttacaaaaggaacgagcggtcaagtgaaaaagaaaaaaggaaatagtatcaatggtgagattatttaaacagagggagatattcaagttatttggacaacatgatgt

SEQ ID NO: 30225 - DNA, 344 bp, Oryza sativa
  unsure (1)..(344): unsure at all n locations
tcttcttgctaggccctctactggntttatcgaaatcattaacaggtccttccaggacttggattgaataggcgtgaagataagcttgtgattttaactcttacatatgggatttgcgcttgtgtaattgtgttgcctctagcacctggccacctgctacgagaaaatggccctgctccttttataagttttctcaagaattttaccacggattatttgctcctcacttcttaaaanatatgatttcttaaaaaaaaagactttctctccactacagtgagtagacaacctattctaaactatttntaagtttaggcttcaaaatattaatcattatattaatc

SEQ ID NO: 30226 - DNA, 418 bp, Oryza sativa
  unsure (1)..(418): unsure at all n locations
agcttagttattagctggaaagcttatctcttttgtcaacaatgccttaaaggtggattaaataataatattgacatgtcttattttgaaatgataaaaaaaatgctactcccttcgtttcatcatattataattcgatcaaattttttcttcgtcaaaattctttaggtttgaccaagtttatagaaaagattagcaatatctaagacatcaaattagtttaattaaatttaatattgaatatatttttgatacaatggttgttctgtattgaaaatggtactgtattttgctacaaactcggtcaaacttcaagaagtttaactaagaaaaaaagtgaaacgacttgtactatgaaatcggagggaatatttaattagaaagaaacactttttatttgtgactnttcanagtctag

SEQ ID NO: 30227 - DNA, 407 bp, Oryza sativa
  unsure (1)..(407): unsure at all n locations
cccgcccgncggtactcctccagcacgtnctcctccgttatcttcatgtacttggccgcttcagcgttcgccgaccggaagaaggccagcgtcgcctctatctccgccgcctgtcacttcttcacttcgggagcaaacctgaacggcttcgtcgtctcttcttccacgtcgccggcggcagcagcggcggcattattcgccaggctcctcatcgtctcgctgcctatggtctccatcccaacacggcgcanggcggaggggtcggatcggatgggtttgacgaacccttcgaatttatatgcctcgcttaatatcatgaaataattctgnggtttcgctggccttttgttggtcgaggggcaacgttgcagcacctatatttataggcggcacgggcccgtgtcatg

SEQ ID NO: 30228 - DNA, 428 bp, Oryza sativa
  unsure (1)..(428): unsure at all n locations
agcttgagctgaattataagaggctctattgttctatattgnataccagaataggaagagagttgagtataagaagtcggaagaatctcggagttgtcggtaatcttctctcatttcttttattatgtttattactctgaattcaatataatattatttctgagtaatttagatttatcttgtgagaattatctcttcgttagtcctccctgtccgggtacatagtagagcgacatctaggaacagcgggttgccagtgcctgaagtattgtgttaggattaaacttaagtgctagaggcggtggtggctcgggttggtggtggcggcggtttgggaaggggaagtggtggccaggcttgccctcacggcagcgaagccggtggtggtggcagcgccatgcggcggcggctatggcagcggtagcaca

SEQ ID NO: 30229 - DNA, 316 bp, Oryza sativa
cgctcacggtccttgataaggattgaattccttgtatctgaactacgtttgaaggtcatcgtgctgttggtgcatcacgttgttgatgtggtgaactgaacatcagcattttgttgccaatcttgcgtctgtgctatgtgatcctcgaggtagattggaactcttccgtttgcatatcaaggggatacattctcctattgattcacctaagtcccaacgagaggaacttgaacgccattcaccgagagatggaggcataccgcttgatctggtggactgatagttcatgccttcccattgtttgtcatgaggcact

SEQ ID NO: 30230 - DNA, 488 bp, Oryza sativa
agcttctgcgctcagaaaatgtggtatctatagtcactcggcctgccccttctgtgcttaggatctgaagacggcgaaccacatcctcctcaattgtgtgtttgctcggcaggtctggctccgcgtgcttttgcctcttggctgggctgccctctctcccccgtggcagctggttctatgactggtggccgagcaccagggcccgctttacctgagcatcttctcgccggcttcgactccctggtgcttttggtttcttggcagttgtggaaggaacagaacgctagggttttcgactctgcgctctcttctgtctcagtggttctggagtccatccactcggagggtcgtctgtggtctttggctgggcattgccgccttggggaattgttgggagtgtagcgtggctctgccccctcccgctgtttggagtcttggttttagccgccgtagtttttctaagttttcagctttgatgttgccttttt

SEQ ID NO: 30231 - DNA, 194 bp, Oryza sativa
aaaaaatcatatcggtaatgcagacagatttatgaagatatgatttttaggaggacaaagaaattgggggggaaaagtcccccaaactaaaaccggaagaaatgctattgcgtgacatgttattccaatatcttagtgacccactcatcatgaactcatttttaaaaaaaaatgaacaaagcgcaaagactgcg

SEQ ID NO: 30232 - DNA, 497 bp, Oryza sativa
  unsure (1)..(497): unsure at all n locations
agctctataaaatcaagctctttctgttctttactgggaaaacagcaggcgcgtgagctgtataaatactcgataaagtctcgttgcccaccaagttgctcctgaacactgatccagccagagcatctgagtcaaaatttttaggcgagtccatcttcaggaagaacatcgggacagcaactttgtggtgcaattccaaatcgccgacaagtcccacaaggtgcccaaagttctcaacatattgacgtggtatgtaaaaaagctcactgccacagaatgcaatcttatcttcgcccatgctttctntatagcttgtctggagatgaactgtggaactgccaatgacctgcttaaccattgacccttgctatacaaaccattcctttttgttgttctccaatggaacagtaacgcaagaatgtgcgatctgcagtatgagaaaatatagtatggataatagcgcatcatgcgaatagaataagtatcaatacatgaag

SEQ ID NO: 30233 - DNA, 437 bp, Oryza sativa
  unsure (1)..(437): unsure at all n locations
ggatccttaagtcacctgcggcatgcaacttataccttcttgtcatctttcttgctgctgccggngattgtggcatatctcccaatgtgtacgtctcaaattatttcaggaaagaagcaatctttcatacatggagtgaggagatatatgggttcgggatctcaagatcttacacaacgctgagtgcccaagttttttatattccagatccatctaagttaagggtgaaaaagggtcgacgccaaactagacgcatcagaaatgatatggatgagtcataagcaggtgggaggactttacgctgcagcaagtgtgatctgcgcggccatacttacaagaaatgcccgaagaatgcagaagtttcaagcggcgcagatgctagtccatctggccaggcaagtgatggtaggcgaccacctggtgaaggaacaacaagc

SEQ ID NO: 30234 - DNA, 295 bp, Oryza sativa
  unsure (1)..(295): unsure at all n locations
ctttggaaatgcattntcatgcgaaggagacggtaaatggtgatggccaaaaaggcattgactcagattcagctcaaatagacagtggaggatatagtgatatgccaagtaaattatgctctgataagaggaggaagattcataagaagattgagagagaatcaccagctaatctagaggattatgcagcgattgacatgcacaatatcaatttgatttacttgcgccgcagcttgctagaggatcttattgatgataatggcacgttctcttgacaaattactggtgctttcgt

SEQ ID NO: 30235 - DNA, 499 bp, Oryza sativa
  unsure (1)..(499): unsure at all n locations
agctngtgccactggttaggatgcaaggtactgcatgccacctagttcgccatagccatccaaattcgccttgtgtagcggcaattcgccaagaagtggagggccatttcctgggcctagcgacacaaaggacagacggagccattcggccaccccctaatagctagcctgtctgaaatccaaactctgttctgaatgactagctaggcgaaggttttacattntcatggngcccaaggtttccaaattaaggtgttgaagttggtggccgttgtgctgagaagctgtacgttgtatgccgacgccgccgtgtattcaccgtgactgttgagtttccatgttattttatcctcctcgtgctcggacaactcaactgtctgggtagcgctccatatcataacaagttggtcgatcagtntccgtgtccatcctgtatccgctggaaggggcacgtcgagtagccactgatttgattgaatgctttgtggagcgatctgtc

SEQ ID NO: 30236 - DNA, 418 bp, Oryza sativa
  unsure (1)..(418): unsure at all n locations
tgatagaaaatttgctcgacatgagaattatgttaggcatcttaaggcgatggtaagaatgtggtaatcgacaggctcatttctaaagtaaatttctttttctacttttttcatacaaacacctgtcatggctagaaaagtattgtgaaaataaattcagaatgagactgacaaataaaactcacaatacaaaattatgagaaattaattaatcactcataccaacaaatagggcctttcaaggaataacgactcgtgaggacagcttttaaggaatattaaagatgacagacctgattctgggtgagagggcagctgtcccaagagctattccgtcgcgtcttgtacnaccagctcctaatattatctgatacattccgtgataataaagatgaggaccagatattcacacttacta

SEQ ID NO: 30237 - DNA, 406 bp, Oryza sativa
  unsure (1)..(406): unsure at all n locations
gtcacctgaggctgcagcttatacattggccgtgtgagataagagtttctgtggttggttctaatgtgctcctggttgtgaaaaagatatcaaaanaaaagttgggcctctatactcatcactatagagagcgagcaaaaaaaaatagaggatccagcgagcacaccacaccattacccctttggcaccaccttctaccaccggatcttggtatcactgtcgtttgggaatgagttttgaggcgtcctttgtggttaggctcgcgcatgtacttccactagcctaggaccagcactgtgcactatacccttgagcgattatataatgtgctttggctaacgtggtttctaaaaatctcttgagcgatgcttatagcccaccaacagcttcaccacagacccgacta

SEQ ID NO: 30238 - DNA, 227 bp, Oryza sativa
tggcgctggcctgtagtacgaatccaccccggatgaatcctcttccctttggatcctctgcatcggtcctgagtaaaacacatgtgcacgtgttttcgggatatatagaagaggaatatgaactccagaaagaactcacctgatcgtttagttgacgtgcacgagcacgggtaataggaccatcatgctgtacttggggggatgtggatgttacttggtgggaacac

SEQ ID NO: 30239 - DNA, 497 bp, Oryza sativa
  unsure (1)..(497): unsure at all n locations
agcttggagaagaagtcttaggtggagtcctggcttataccctagttgagcgcctgtgaagatggagccgtaggcccgctagtccgctgctgtttatttttgattgtcaggccttaagtgcctttgtaataatataaatattatcgatataataaagatgtgccttttgtaccatgtttgtgtggtgtaccccggcttttcctgtgacggggattaatacactagcgttcgggaaaatgtatttttctcggtcgtgacagagattacgttgatgaagcagaagaagatacttcaagcaaagccttagctcccctatccgatgatgtgagaaaaacactggaagatatttctcatcggctagaaacatcactagacaacttggtgaccaactgtggctcgatccgggtaaggtntacagacatncaagctctactcccagatgaactagccgatgcccttacttcagctggttaccttgagcaacaccgattcaagct

SEQ ID NO: 30240 - DNA, 308 bp, Oryza sativa
  unsure (1)..(308): unsure at all n locations
gagaggggtatcgaaccggccaccactaaatggctgtatctatctatantctgggactatgctcacggtggaacgctcaacccagatgatggcttcctggtcttcaacgatcaaatacgcgaggctgcgcgtcgactaacggacacagtggaagcctcttctaaggcacgtttcgacccgacagagagaatgacgagctgtcactcgccctgcagactttagagcatccaggacgaacacaagggaaagtggtattccttaaaagatgggctaacgaggacatccacatgacaggagccgatgagagt

SEQ ID NO: 30241 - DNA, 472 bp, Oryza sativa
agcttcaaaatttctctaagaaagaggagaggtcaagctcaaatttcttgtgaaatttttttaatgattatatacaaatcggaggtgtctaaaaggttagtaacttcatcctctaatgttttttggtgttatattacttttggagctatgtttcacacatttttttttatctccaaaactttgttgtaagttgatgagaaagaaaatctgtgtgggaagaagaaatatatagaaatttgtttgtttacttaaaaaatttttattctcatagtttaaaatatgatgaaaattaatcttaaaaaatagaaaacaaacttaattgaaaattaagagaagtacaacattaatattagtttagaacttcaaaaattgttaatcagaattgtctgtggattattttataattactaattgtatgagtaatgatatgtcattatcggatgctcgtcgaaagagttttaaaatatttatc

SEQ ID NO: 30242 - DNA, 362 bp, Oryza sativa
  unsure (1)..(362): unsure at all n locations
aagagaagacaaagatggtgagaagaccttctttctcttgccgaagggtacattccaagggaggaagttcaaggagaatcttangagggcttttgatcaagtctatgccacatttgagccattaaacgatgtaaatggtgagagtggaaatgatgataanggaaagaacatctccagtgtttgctttatggcgcgtgttgaatcagatatagagtatgaagatcatgacgtaagtgcttttgaagaagctattaatattttgagtgcataacatatgacgtgtgagaaaatgtatagaatacaggaanttatcattgaatctcttaattctgaattgctagattaaaatctcttaattctaa

SEQ ID NO: 30243 - DNA, 413 bp, Oryza sativa
  unsure (1)..(413): unsure at all n locations
ctggaaaacctgaaagaatattctgtactatctgtcttcaatgctgttgatcaccttggtactgttgcatacaaattaacggacctgtntgaacagcaagcttctgaggtctctaccgttgagctgaagggtgcacgcttaaaccacgtaaagctatatctgctttgcatgcaggatgtgctgatcaaaccatgacaatttaactgaccatatcacgttatcctatcctccaattatagcaaatcctcacctgccaaatcttcaccgacagagcaggcctcaagcagcagaagaatggtggaacaacttttaaacatcataagcactatatcctaccatgtaaggatgtatacagttaagaacttcctcactggtttttcccaataaatgctaaatnttgctatacttacttg

SEQ ID NO: 30244 - DNA, 393 bp, Oryza sativa
  unsure (1)..(393): unsure at all n locations
agcttccatgcctgcttactattgtgccgatgctctagctactgccacatacctactcaaccggagacctttcacttctgttcgcaactctatcccattccaactcctgcataacaagcttcctgactattccaaccttcgagtcttccgttgcctttgttatcccaatcttagtgccacgacacctcacaagctctcccctcgttcagcaacttgtgtctttcttggctacccggcctctcacaagggttttcgatgcttggacatctctactcgtcatctctatatttcccgccatgtggtttttgatgagcagacatttccctttgcggccgttccccaagatgcctcgtcttttgattntcttctacagggtttctccaccgcggtagc

SEQ ID NO: 30245 - DNA, 271 bp, Oryza sativa
acgcattaagtagatagatatataggagtacaatatatgtgagctgtgtgtacatgtgtagatcgtgtagctcaatgattagaccactcagggagggaacatacgatcgagaatctggcgggtccacacgcatattaattaatcagtgggccgagggcgtacgactgatgcagttgatgcatacgcatggctagctagccgactgtcgagtacatgaacgagtgaaacggtactaagattaaatgtattcagtgtaagactaaaactacta

SEQ ID NO: 30246 - DNA, 510 bp, Oryza sativa
  unsure (1)..(510): unsure at all n locations
agcttctaaatcatacaactaatgatccgtgttaatctttagattatttataattaaatttatagttgaagatcatatttcactgtaatttagatttcaaaaaatatcattttggtttatattttttgacttttgggtgccatttaagcaatttaaaaatatatataaataataatagtatagattttttttcatcatacataacttcataaaaattaaattaggtctacaatcatagcagtaaaatgaatatactatgagtctccaaagtatgttagttagaaagtaaaacttatgcaaaaaaaataagcaactataacatctaaatcaaagaactagtatttgatcaacttatttctttagattattttacatttaaagatccatatccactgtaatatcaactntgagaataaatttggggctatattttctaatntttgtgtgctaatcgaacaattataaaattatagaaagaatatgatatagaatttatcaccatatataact

SEQ ID NO: 30247 - DNA, 391 bp, Oryza sativa
  unsure (1)..(391): unsure at all n locations
tcactgctattctccttcaaacgccacatccggctttcttggcaccaccatcttaggccttggttcaccaatgaccacttcctttcccttagtagatttggcttgctctggccgaatcaacaccttcttatcattaaaattaattgtattcaccggaaaaggatcatgatcaagcttcatcttagaaccatcggtgaatttcaatcgtccttcatctatggccgattgaacttgtcgtcgaaacacattgcaatcattagtagagtgagaatgagaatcatgccacttacaatatgctcgacggttcaactcttcttgagaaggtatgacatggcctttaggtaatctaattntgttctcttggcaaagataatcaanatcttatcacact

SEQ ID NO: 30248 - DNA, 433 bp, Oryza sativa
agcttgctttcttgggtagcaatcctttattttcgtgccgatctgcttgggtgggctaaaggccctactaaacacaaccttttcatctggcttgcgttccagcagtgttgttggataggcgatctcctggaaaagcgtggtattgacaaccactcgccttgtccgttttgtgtccaagaactcaaaatggcgaatcacatcctccttgactgtgtgttcgctcatcaggtctggcaccgaattctgtctgcacctaactggcatgaccttacttcggctcggggttcctctcttcaaatatggtggccgacttatgctgtgttcaagtttcacggatgggaactaattcctcctgcacggaaaatggaacgatccattggcgtgtgaattaataagtattatctatggttttaaaaaaaaggattaatttgat

SEQ ID NO: 30249 - DNA, 369 bp, Oryza sativa
tctatactgatgactattgttcttgcatggaaagttttcttttccctgaacaatctggtgagtgcagctatgtcattactgctttgaaagcttatactattaatgaagtctagtttgtaggtactaccagaaataaaatactaactgtctggtgacctgttaaattcgacttgcatagcagttcttgaacataggaaatctttctgtaaatatgcttgcaccacagtcataacatctaactagggtttctctccctccatatatttaccacgttggctattctattttcatcatgtcatggaatgcactcctcaactactttctacattgataaagaagcatttttcttgttggtagcttggttaacac

SEQ ID NO: 30250 - DNA, 430 bp, Oryza sativa
  unsure (1)..(430): unsure at all n locations
agcttttaattatgaatattnttttaacaactctcaccagacaatgcaaagttcacattgataaatcaggaaaaaaaatacatgattacaagtgtggaatgtcgtaatcaggagaacaaagaaaacattaccactacccacacaccgacaacaccaacacagaccccggagaaggctagcaccaggccggccggcgctaggccaacaaaggacgtatagccgggatctcccaaaacccaacccttacaaccgacacagaaccctactctatctatgtctttgggattgagggagagaaggtgataaagaagagtggaaccgctttccccctaggtcatgcaacgtggcctagtagcgtaagctaggcaccgacacaaggtgtcaagaatctagagtaagcttgcaccggttgtttcagaggtttcggcaa

SEQ ID NO: 30251 - DNA, 417 bp, Oryza sativa
  unsure (1)..(417): unsure at all n locations
ccctcatcgacggcggagtgcactctatattctcttcgccaagagcttggatgatatgcaggatcctcgctccgagctaaaaccaagcaatgcgccttttcacggagtaatttcatgattattcgcaacttcactcggacagatcaccctaccggtcacttttggcactcgggaaaacttgcgcatagagaatatcagctttgaagtcgtcgatttcgagacagcataccatgccatactcggacgcccggcgttagccaagtttatggccgtcccgcactacacttacatgatgatgaagatgcctggtccccgaggagttctatccctacngagcgacatcaagcaagccgtcacatgctacaaggagagttgcgacatggcccaaactcgcgagatgacgtcagcccgagagga

SEQ ID NO: 30252 - DNA, 401 bp, Oryza sativa
  unsure (1)..(401): unsure at all n locations
gcctcgaacccccgggatgctttctttatacgttcgagctggacaaaaatatctgacgggaccctcacaactgactaaacagaatcagtagtagtactcaatagaagcatacatcggttctaaaaacttttagatatgcatgtgtagaggacccacataatataattgttttattttttccaaccaaagccaacaaccaacaaccatttgaaacattaaaatttctttttttcttaaattacttatccgggccgtaatctgattataccattgtattcatgagaattaaatctttcgaacaagatctcatatgagtatatttcgagtgaaaaaatacatatgagtcaacctntagatgtgaatgtgccaaccgttacatttgaacgcgtcccatgtgagaa

SEQ ID NO: 30253 - DNA, 286 bp, Oryza sativa
acattcatcatattttacaaaacagtcggtatatcacttggatcatattattcggggattcacaccgcatatgctatatattgatatcaagtcacttggttgattacgattatcaaaaccactcggttggttggattatttattccttgactatatgcttggtttgttcaattaaccacattgtcgggggctacacctattaggtgcatctagtcggtgcacctgactttattttccagccctccacagtcttcagatttggtaaaagtactcgggagactatgac

SEQ ID NO: 30254 - DNA, 435 bp, Oryza sativa
agcttcccatcattcaatgtcttgtatgcctttctcaagtcggagtgcatcctatccattcccctcatcacggcgcacatgtggccaaaggtggtgtcgttcttgccggctatcaggcggaaggtgctaatgtcgtcgccacttgcttggcgagggtggaagcggtacgccgtgttgcagaagatgtatttgtggcgatcgcgaagcctggccatcatcagatatgctgcctcctgacaggcgtgatctgcggtgcctccagatgcctcaaccaccatgttagcgaggcaggtgcccacatagcgatgcaccaccagacgaatacggtgaggaagctcgccactgagcggccgaatagtcgagtactctggcgcgttgtggtagcccaccaccagggtcatgcgagccaactctgccacaaaatcgtccatgcct

SEQ ID NO: 30255 - DNA, 279 bp, Oryza sativa
ataatttctggtatcctatggatgaccagttcattcggatgcgcgcggatctaccagtgatgtcttttacccgagaggatttcacgttatcgcattatctaatccctgggaagatattggagagaaccgtcatatgtcatatgtacttgcataccaagttatgcggggtgattaatcgagagtgactgcctgacaaagcataacttcatatgatattactagggacaaagaaagactatccatctctgcacgaaaaatcaactctagttatatcctttc

SEQ ID NO: 30256 - DNA, 499 bp, Oryza sativa
  unsure (1)..(499): unsure at all n locations
agcttgataccttgggattatttattgtatattttaactatccttacgtacttttcaagcatagtaaagtttctctaattttagctaatggtgatcgatcgatctcacacaatgattttactgctgcttttcccagctcgtaatggatgccaaagcaaccgcctgttgcctcgacaacaaataccgcccaacccgtgtgttcccggagttgtcgacaaagttacatcagttcttcctgtcataaacggctctttgttgctctcatgacaagaagtggatgaaccttatgtgctctaccggtgtacagagcaaggcacaatttgtntgatctacatnttttntaccagaattatgaagcatactgtagtaaataaagagtgaataagttagtgctgaccggcttagccgtgagccgctttatgtgaggattagatgtagatacgcaatacagatgtgcacctgttcagcagctttcatttcaatgggcattccatttaaa

SEQ ID NO: 30257 - DNA, 490 bp, Oryza sativa
  unsure (1)..(490): unsure at all n locations
agcttggttcccagtacctnctaaccctacaagagctcacttaaaccgactgctctctggttctacctgtcgttgcagcggtggagccagtggtgccggtgaacccgagcgactaacaacgtttttcggtggtcggccaattttttgtttttagacatgttgacatttatctgtagtggaaaaatcagaggcggagtccgggcagccacccaatcagcctaagagctggctccgccgctgtgttattgtgagtatctgcatatatgtgcgctaaaaagaggatgattcccgagcactgtggtgtccacgtgtatatatggatatggacaccttaagatcattgactgcccttaatgtcagttcagtctatgtgggttaattctaaaaaaaaaaaaaactctatgagggttnggctgcttctntacaagtagttccttccataactatggttggtggtacccttcattatctacgtgctattttttactat

SEQ ID NO: 30258 - DNA, 501 bp, Oryza sativa
  unsure (1)..(501): unsure at all n locations
agcttcatcttggatctgagattcaacatctttattttgttttatgataatcttgctctgatggggtaggctcatgttgaatttcagtaccatctatgaaaagctaagtgttgtcatatttctaaataccagataggaacaagcaatctattctgatttcctttgaactcaaaagcacactcagctgtgttagaatagctacgcttatgggtgaaaaagagtgaaggtagttttgatatattcttgactgcattagcttttgttctgcagtagtttgtgtttaatagtgccgcaatccatgactaattngaactgtactttttcttaggtcacggaatcaactgatttcacagagctcgtcaaccaagagccatggctctcgtctatgaagttggttgtgaaacccgacatgctngttggcanacgtgggaagagtggccttgtggccctcaacctagatcttgctcaagtccgccaattcgtcaaagagctggtgggagt

SEQ ID NO: 30259 - DNA, 450 bp, Oryza sativa
  unsure (1)..(450): unsure at all n locations
cagcttataaaccctcccttatcaaccagtccttttattaatttgatgntnaattnggctattctttatagatgaccaaaccatcctcgtatcatatgctcctggaggtgtaccggcggcaacgttttcaatccgatgtatcttgaatgtaacatcggatatatctaaataatgtgttttttttaaaaaatattggtacactttttcaaaaacttagtcaaacttaaatatttgattaacttttttaaaacaacttataattataaaatggagggagtgtaccacgttaaattaaaacagcaaataatactagactagctcccctccttcctgttacttctccctggccattctctattctttaattatcaaccaggttgtttattnaattgatgctcaatttggccattctttataggtgaccaaaccacaaaccattcttgtcacacg

SEQ ID NO: 30260 - DNA, 258 bp, Oryza sativa
ggcgcgctgacagcctccctccaaaactacgcaggcattcccctctgtttgagaaaggcgcgcgccatggacaccactgtctgatttcgccgctcgaccacgccattttgttgggggggcgtaggcgcggagaaatgaccttggatacccctcatagtgcagtaggtggcgaactcaagcgacgagaactcgccgcctgtgtccgtgcgaaatacacacagcttgcgcccacagtgagtctcgggttgcatctgaatt

SEQ ID NO: 30261 - DNA, 457 bp, Oryza sativa
  unsure (1)..(457): unsure at all n locations
agcttggaagagaggcaaggttgttntgcaattcttttatttgaagacattctgaaatcactaagtgatttatttctttctaagtttggggcgaaaagagacttgcgtctcgattcgactttaagagatgtttttcaacagctcatttggcaatgtaccgacctcccgggtcagatcattacttctcggctcccagagccattccacttgattaatcggctcccagagcctttttcattttctcggactcccagagtccagctacccagcagcacaacaatccgcttccactcgggaagcctagtctatgatgcccacagacatcccgaatcacacagattcgtttctgaccactcaggtcgtccatctgccacataggctgattctggttacgattcccacaccacaacaacttttcacaaagcacaggcaaacaaatctacgcaacgggaaccac

SEQ ID NO: 30262 - DNA, 295 bp, Oryza sativa
cactcaagcagattgaaatggtgaactaatagctcttgttcttattaacctgaaataatggactataattcgatgtttgcttcaagaacctacatccacacctttacatactcaccagcgagcgacggtcaaagaggcggtgctggtactgtggaaccatgggagaggagcggcgtgtgactgctactcggcggcaaccggctcgccggcctcctattcccactctcccgccagcacagccggccgacgtggtatcctcctccttctccgcggtggcggcggtgggcggtgtcga

SEQ ID NO: 30263 - DNA, 504 bp, Oryza sativa
  unsure (1)..(504): unsure at all n locations
agcttgattcgtcttctttttagctaaaatatgacagatttcttggtgccatttctttcttcacagtgttctttagtgagttcatggtctagctgaagtgatttgttcttccatgattcctatattaactttgttttgaacttcattgagtagtatgtggaagtagatgtggctttctgctaagatttgatctattcttggtgtttaatttgcaaagggacagtttttttttctgtttacttgtgtatgatctggatttacttttggtgtttcctaagttgaagaccaagaagtcttcttgtgacagtattttagatgcttataacgtgttaatgtcaaaggaatgattcccatganaattctgctgtgatttgtacattntattaggagttaagtaacagagtgaattgagtgatgctcacgtcttctctaaatcttagctatgaattgntcctaggaagctttgacttgtattngagtgcctggnttgcgaagatgtgattc

SEQ ID NO: 30264 - DNA, 479 bp, Oryza sativa
  unsure (1)..(479): unsure at all n locations
gcttctcacactttgcacatacatttaaatattctttggnttctccaggcctgaagaaagcgaatcacgacggcaagagttaaggctgcttgtgctccattttcgcctcaaattactgccccaagacgcgagatacggaactcttgatgttgttcagaaacttttccctgcagaaaaacaactgggctagtaaagaaagtgcaacaaaagaaactcttcaactatggtgctcaaaacgataatacagatgtcccgagctgcattataaagtgtcagtacggtgccagttcaatatatatccagtattctcaatgatgcaggtatgcaggcatagtgcagcaaaccaaaaagaaattgacgttatgttgtgtgtaaatgtgaaagttccataaaacttcatcgtanagtatatcaaactatcagtatcttctcatcaatgattcanaaaaagtaagatctctaagggcttgttaatgata

SEQ ID NO: 30265 - DNA, 135 bp, Oryza sativa
cgattctagccgatttatattccagccctacaggaatccaacgcgcatactactactgctggtggaaattccactgctgctatggcaaagcaccaaaacgatgtcgcgctccattcgatgattactccccggatc

SEQ ID NO: 30266 - DNA, 444 bp, Oryza sativa
  unsure (1)..(444): unsure at all n locations
agctntcattggactacaaatctgttaacctatttcatagaactacatatttaagacattattgtgtcactaagctactcatttaaactgagtagtcaaatactacctctactaattactatagtaggaatttctgggttttaattattgggaaatctatttctgtcatggtaaaggctgttttagatttatcttttgtcttggcagaaggctattttagattatttgttcacacgacttgtcatgcttgcatgtttggaattggttattagatccagtttttagaaattccttcctatgtatttataggcttttgtttcattgtcctgttgtggcagaggcttgttaaagaatcaaaattgcttttgtaacaaatgaaaaatgctaaagtatgcaatgtgattntatctatacctagtaaactgttcaatgcatcanaacatc

SEQ ID NO: 30267 - DNA, 412 bp, Oryza sativa
  unsure (1)..(412): unsure at all n locations
ataatttcagataaggctgcatccttcatattatctcgctgagaaaattgtgtgccagctcttccatttcacctatttcacatgtggccatgccatcgnttctctatagctttcttactctgttctttctggatcgccatgaggcctttaagtggaagtatctggtgttacgatcaccttccttcagccacatgatacgtgatcgttgcttccaccagatttcctctctatgcaggagctcttctaattctttttttatttgtcggacttggacatcggaatcaagggatcccatgctcctgcactctcttaacttgtctcgtaaggcagcaatcttctttcttacattccctatcttctctttactccatctagataacttgcacattgtatttntcatcttcgcactaat

SEQ ID NO: 30268 - DNA, 255 bp, Oryza sativa
gtcttggatgcagccgcggccagggatttttttatatgccgtctgcgggcacaacggatgtcagtcaaagactggaagaggatctcacgaatatgtaatcatccgccgtcgagtaatgttagagcgacctcacagtcgtgcaccttcacttcctcgagatgactatacagactgatcatttctgaggcaaacgatgtgggctctcatttatgatcctcacttctgcgctaaccatagttggacccaccagcgatg

SEQ ID NO: 30269 - DNA, 430 bp, Oryza sativa
  unsure (1)..(430): unsure at all n locations
agcttgcccgtccacgacgccgatagtcctttagcttgacacgcgacctgccattgccactgccaaattttatggcattattcagaaaacttatactatatgctagttgattcagggaatgaaagtagctagactgctcctaattcagagttcagaaagttaagatgaatgggtggtcggttttcaaaaaaaaaaaaagatgaatgggtggtagcttattcagatttcacaaaagggaagagcaattgtggtattttaactcggatcaaccctctgaatgatgctgtcagttactggcactaacggttttacacagaaattaaacaaaagtagaatctataaaggtgaatctgctgtctagtgcagcacataaaacgatatgaggcaatcattntgggggcaaatctgtgaacaagtggttaccaaatcg

SEQ ID NO: 30270 - DNA, 353 bp, Oryza sativa
ggtgattagctcagctcaactgatcgttttcttatgatcttctgctatccagtatactgtagactctatgaatgtgagtgagaagtccctttctgatggatgcacagaatccgatggatctttgatcacatggttcaattgtgcatatgcatctcatatatcactttcgcccatctgatatgaaggtaaaaaataatttaattaaccgacaggaatatgtgcaatgcatacattaactttagtgatcaccacactccatttcatctctgcgtgctccagagtgacacgtaccaaatacccccacatgatttgacagcacggaaccgaaagaaaatggctgaattgattgatct

SEQ ID NO: 30271 - DNA, 511 bp, Oryza sativa
  unsure (1)..(511): unsure at all n locations
agcttataaatacacaaagaaagagaagcatcgatcccttatatgactaacatagaaatcagtaggagatccacctaaacaagcccgaagagctaaagccagggagttctcattcaagcaaaaggtcgatcgcgaaacgtcaacaaccaaacgaaaaggagaaggactgaagtacgaagaaaagtgaaccggagtaccatgaatttgccagcactgatcccttagctaattgccgggggaaaaatcccagccaccaggggggagggagtcgccatgaagatcaatcgccattgcaatcgccaaaggaatcagctctggagaaaacggaagtcgccatcctgaacgtattgagcaccctgtttattccgaaaccttttctgagagcatgaggaaaacaaatggtcgcttctcctttgctacattaggattgaacagttgaacctctaagttcaactaaaattatagaggaaaatcgtgtatctctgaattntggctcaccatctatatgccc

SEQ ID NO: 30272 - DNA, 325 bp, Oryza sativa
  unsure (1)..(325): unsure at all n locations
tactaactntctacttgtgganggactatggatatctgacgatggtattcccganttaggaggcacatatgaaggagatacttgctttgctgatgaagtaagaagcctttatttcctaaggttgcatggtgcttatcatttactgtttctgtgctgctttactaaatatgacttaattttacaggtcatccaacctgctcttacttatcctggtgcgtatagaccagttgctgttgagcttaaggtaagccttttcaacatacaataaagtatggcatgcttattttgtatcttctggcaattgaattacatgtgcacatatttc

SEQ ID NO: 30273 - DNA, 496 bp, Oryza sativa
  unsure (1)..(496): unsure at all n locations
agcttcgattggnggatacaataattccaatcttctttgccaatactactactcttgcttgctctatcttatttcaactactactactttgaatcccgttttattatctctatactacttcttatctcttggattccactgccaagcttcaacagctggtcttgtctctacttgattgagctgcccctgcaagtctgactatgcaccagcggcattgaaggaaataaaaaacctgaaaattgattagccagatcaaagatcaatggggaaactctcactagctggctagaacgatgttcgttcttacccacagccgcaaggggcgcttgaagggcactaagatccgctggcaaggaactgtgaggagatgagattctctttgccttatttataaagttcttatatagagtttggggcatgcatatagntagggcatatccctttttatgtgttggtatctcgctgncnccttttcatgatagatcatttttatctg

SEQ ID NO: 30274 - DNA, 319 bp, Oryza sativa
atgtcatccatgaaaaccacaacgaacttattccagtatttcatgaacactttgttcatcaagttcatgaagaaggcaggagcattggtcaagccgaacgacatcaccgtgaattcatacagcccatatcgcgtagtgaatgcggtcttcggaatatcttcttcacgaatacgtagttggtgatatccggaacggagatcaatcttggagaatacagtggcacctttgagttgatcgaacagaacatcgatccggggaagagggtacttggttttgatggtgacttcattgagagctctgtagtcgacgcacatactct

SEQ ID NO: 30275 - DNA, 493 bp, Oryza sativa
  unsure (1)..(493): unsure at all n locations
agcttcgatggtggaggtgattttaatctgtctctctgtagactatcttcgatcatatcacttggttcataactgggaatagctcccacgaacaagcaacgcagattcactttctttatgttcagcttacttcccattattatcttcaggttgtcctcagatagcattcaacgtattcctttacacctttaaccttgatgtgttctttcccattggatcatctcccaagacatggcattacctggtaaccggtgcttgcacttttcactccgtgtagcatctgataccgaggtgaagatttcactccttgccttcatagaaacatttttacctaggtcatctcgcttacttaatgacaaggtgactggtgcggtgcaattactatcangggtcgtccttgagcgatgcagagcatggttcttgttatcaatcacctttcgggctacttctttcatgctagagaacatctttgccaatcctttataatcatctt

SEQ ID NO: 30276 - DNA, 411 bp, Oryza sativa
  unsure (1)..(411): unsure at all n locations
tcttcgtcgcgggctgctggacgncagctagatatgtggattacaatggtcgccccgagcttcattggcacagtcaggccaccacaatcttcgtagtcaaactgttacgccaccagacatccaagagtttcttcggtgccaccactggtcatctatgagcttaatttgccgcagccactggttgtcgcgaccttctcgttctcaagctcgttagtcggcccaatacattgttgggtttgttcatggcttgggattgttttttcaaacccaaaatttgggtatacatactgttccaaagatcgattcaaattttgttaggttcgttaagatctaattcacttccaaaagtattttccatgcatcagaaatacttttgggttcatgcccaatatttgggtatatgcatattca

SEQ ID NO: 30277 - DNA, 495 bp, Oryza sativa
  unsure (1)..(495): unsure at all n locations
agctngaagcgctcagcattggccatggaatggaacaacctgagaagantaactcatctcttctctctctgtctcttcttaagcccgggcaaagatggtaggttcccctttgcctgtgtttcttccaactgggttggtcgggtttctgcaaagggacaatgaactttctcttcaagctaggtagtgccacgtgctgcttgtgttcccatcaaagatgtaaagctccccttttgctttgtttcttccaactgcgatggtcgtgtttcggcaaaggagcaatgaacttctgcaagctagttagtgccagctggttgcttttgttcccatgtcacaagaaaatgtctatcttgttaattggaatgtgagaggtataaattccaaagcaaagcaggattctgtgagatgtattctacaacagcatggtgccaccatcgtatgtctacaggaaactacagtggcttctatcagtgatcgcattattctcaatactctggg

SEQ ID NO: 30278 - DNA, 441 bp, Oryza sativa
  unsure (1)..(441): unsure at all n locations
gagangttaccatccggagagagagagagagagagagagacatagagagagagagagatataatatgcctcgtctctggagccctatgcgggcatgttcatttattatcataaatgtgatatgtgagtggcactgccttttcttacgaggtctcgtttccattgcaaaactgacagaagctggtgatcgatgtgcatgcaacaagcgtgcctgggaacatgtacagcgaggaaaaatgcaaattaattgtgataatttctgcagaacactattagcaatgcatactcctatgttgttaacgattgactgcatgattagatcaaggaaatgatgggtgcagtgttgttgtaatgcttgaggtgttgtacgatgtttcgagtgttattaacagatgcacttacgggcggcagtgtgtgacatgctcttggttcgatataagct

SEQ ID NO: 30279 - DNA, 277 bp, Oryza sativa
  unsure (1)..(277): unsure at all n locations
taattaggcactttaatctcactgacccgtgttacttattcctgatctatactatacggcgactaacccctgatcanaagataattcacatgttttcagtacttgcgatcctaattgccaaattcatatgcttagccatatcaaatgatccatcgtgaagaataaactatatattattttaaaacgataacccaaacgagctttgcaatatattattcataatatgctatgcaataacaaacgatccatcttgactcagcaatggntgttcgatgca

SEQ ID NO: 30280 - DNA, 400 bp, Oryza sativa
ggggcgggttggctccttggccttctcctgccttgtctggacgctgggttttggttgatggatgccctggtggtataaatgtggattagtggagattggttcttcccgaataattaactagtatttgtcactcttacagtgggtattagagtaggtacaatagcatactataaaccagctataaatatagtttaaaaaaataaaggaaaagagagaagagcatcggactacagatttgcagccagctgtaacacggactccaagacgtaatatgtgtatgacacgtgagacctattattaatatgatagtaaggtactattgtatgaatcggttattacatcggctatagatgatttggagctagtagtggactatactattaacggcctgtttggtaca

SEQ ID NO: 30281 - DNA, 344 bp, Oryza sativa
agcttcaaggtatcccaataccagaagaactctctctcttgatcagcttttggggtccaagatcagaagatgggtgtattgaagcatgagatgcaaagctcgacacgaggtcaaatgaatcggaagtaactccagcagtaatatgttgcggtcaaaaccattggattcagttaaggcagcaagctacaagctaaatcagagcacctcgctctggtcagattttggttagccaatgtcagatgatggatgtgtcagatgttgataccgcaaccgcagagtccaaagcagcagatgcaacgacaatgtctccaacaacaagtactagctcagatgcatgccggaat

SEQ ID NO: 30282 - DNA, 200 bp, Oryza sativa
  unsure (1)..(200): unsure at all n locations
tgacgcaatggctcaacaccacggcggcgcggccgccggactggtcgccgacggcgtcgacgccgtgcaagtggtcgcacgtcggctgcgatgccgccacggngagcgtcacctccgtcacgttccagtcggtgcacctcgccgcgccgatccccccctgcatctgcgccgcgcttccgtcgctcgcgtcgctcgtcgtc

SEQ ID NO: 30283 - DNA, 393 bp, Oryza sativa
  unsure (1)..(393): unsure at all n locations
ctgctcgtttatcttttccgctgcatttgtaatcttttattattttgtaagacgtggatctgtatgtcaacaattgtcgtttgtgtaccctggctggtcctggacaggggtttaatgcacattcagcttagaaattctggttcgtgaaattctgggcgtgacagtggagccggagcttctctagatcgttattccgctgctattttctcttttcatttgaaagtatgtaacgttgtattattgatgaatctgtatattaaattgtcagcttgtgtacctcggctgattcctggacgagggttttatgcacaaattagttcggaaattactagtgaatttcttggcgtgacaagntggtaccataatanatggcgtcgtcgtcgtcttcatgtg

SEQ ID NO: 30284 - DNA, 441 bp, Oryza sativa
cgcatgcaagcttttcataacctcgcattggttgtcttcgttccatgaacttaaatcctgatgcactctatgcgttcatgtttctagcagtgagaggagttctggcgctcctcggaaagagaagtctcacacacatattaaattatggttcaagttaagttctctctctcacacactcatggcagtcctaccaatgacgacaccgatgtagggcacgcctctcggccctacctcaacggctgtcccaccgtagcgcacctgcctcactcaggggtgaaccatctatgcagggatactgcctccgctcggctatctaatccgctaggtctatacccattcgagaagtactggtgtacgggggtcgtttcatgcttaacttcatggctcggtccttaatagaccggagacggtactagccttttccagatccacccaaatcct

SEQ ID NO: 30285 - DNA, 260 bp, Oryza sativa
ctataacccatttggataacctaacattttgaacccattctgtcctcaggacagatgcgccacgaccaaactaaggaaagggtccgcgaaagaaagcggctccttgggcagctccagacttaaacttatatggttgaacaagaagctacgactcggttattcaacttttttaaattccactttcatacataactttctcaacaactttactttcgcactggtcattcaataactctatttggggactaacaccacctgaa

SEQ ID NO: 30286 - DNA, 465 bp, Oryza sativa
  unsure (1)..(465): unsure at all n locations
atcaagcatcaatagacgaccctgtccatattattatctgtaaagaattccgcacagcttttaaaaatactttcatacctaatgcaataattagaatgaaaaagaatgaatttcggagattgaggaaaggattcatgacagtccaagaatacttaaataaatttacacaacttgcccgatatgctgcttcagatattcaagatgagaaggaaaacattgaaagacttattgaaggactgcgtgatgaactacgaggaccgatgatcggccaggatcatgagaactntcaaagtctagtcaacaaagtagttagactagaaaatgatcaaaagatgatcgaaggatttcggaaaagaaggataaatctgcaatgacaagtacctacttaaaatccatttcagattcggaagacttactctnttcagccatctgtacctaatactagacctggtattgccaccattc

SEQ ID NO: 30287 - DNA, 321 bp, Oryza sativa
  unsure (1)..(321): unsure at all n locations
agcttcacaatgcagtacctcaagtggggtttacaaaaatatagntttccttttnttttctccacctttccgctctctctctctcccttttctcgagcccaacgttgctcctttccctctctcacgctcgagcggagccggcactgaggcgttcgagcggagcggcggcctcgacggcgacggggccgggcggagcantggcgagcggagacggcgctggggtggccgggcggagcgtctgtggatctggggacgacggcggtggcggcaaggaggagacgacagcggcggtcttggcatggaggccactcactcggcagc

SEQ ID NO: 30288 - DNA, 448 bp, Oryza sativa
ctgagctagcatcattctctggggataggcttttatatttttagataatgcagaatcaggagctgaccgagaggtggtggcaccggcacgacggttgagaacagatattatgatcaccccgataataatggtaccaccacctgctatggcaatgagggtggaaacacttaatatgatcttcttgtggtgcatgctgctaagggcagtcggtgtggcctgcgacaatgggtttgtctaggagttgggattgaacactatgggctctggcatgatagcaatgcatgtagtgttcttcccgagctgtagaggccttgattgtcatacaataaggtgtcatggatgttgtcgacgagacgactatttgggatgttccctgatattaggtgtgggagacattaagatgcgcagcttggcagattatatagcttcattggtaatgtctcattca

SEQ ID NO: 30289 - DNA, 383 bp, Oryza sativa
  unsure (1)..(383): unsure at all n locations
agcttcaccactagattaaacactttcacttttcatatangtgtcaaagaaacaagtcatggaacttgcttgacctttggcttgatgcaacgcgtgaatggttgccaccaagactgttgcaaatgtaagcagaattacatgaggcgattcacaagtctctcctaatcaagaatcaaaagctaaaaacggttggattataaaggcataatttatggagggtcacatctatcctttatatagaagtcttctagtagcagccttccaatgcaaataaccttttgctgaatactataagaagaaacagtagttgattctttttctgccacattgcagtttctcttactggcagttacaatttatttttcttctattatatgcccata

SEQ ID NO: 30290 - DNA, 337 bp, Oryza sativa
  unsure (1)..(337): unsure at all n locations
ctcctactcgatcaggatcagtacttcagctgttgtgtcctctacgaccagctgcgcagtctccttgtagagacagggaacaacggttttggtggcactgaggccggagtaaggagcaagcaaacaagagtgccctcaaccggatcgggtcccggctatccctacaagaaactggcccagagcagcgctgctccctatagcagaattgccagatggctggactacccgggaggggagccggaggcgggacgattgaattgtcacccatcgagtattcgagggcgggatatgtagaggatacccagctngcagcttctactcgatcaggatcagtact

SEQ ID NO: 30291 - DNA, 485 bp, Oryza sativa
  unsure (1)..(485): unsure at all n locations
agcttgcaaatttgtttacaacgatgcataatttgtgaatgaaagagctcaaaatgatattctcttgctttcacggtattcctttcataataatctttaaaaaatatatcccttggtaaaaacaagagatttgtacataacaaaattatgtgtctcatttctaatcctagtggcataacaaggctgaacaaacgtgcgtgccaggatgttgctgttttagggtcaggatttctcaagcttgatggtacatgatttcccttttagctgacaagctcttagtttctttggtatgatttaactatccatctaaagctattatttactgaaagctcgtgcaaggaaggacactaaaaaaattgaccacagtgtgaaggaaagggcagcgcggcttacccattttgcgagagtatgatttttcaatatgtttagataatngaaccatccatgtgctntactttnntgtcctttctacctctatgtacttt

SEQ ID NO: 30292 - DNA, 369 bp, Oryza sativa
  unsure (1)..(369): unsure at all n locations
tgctgttccagattatctgccagcattctattgtgtatgtgaaggcctcacatcacttaatctgagttatgctactgtgcgaggtcctgagctcatcaaattcattagtagatgcagaaatttgcaacaattatgggtatgcaactcttgtcaattcttttttactactatgtattcatcccattcgaatctgttaacttttgaaaaactgttgcatatctctttgcaatacaagcacttgattccctacaagtggattntgcaaattttttcttttcttctgtgacctccagtaaaaaagttcctgatgtttcttacttatcatggtcactagtaaaagtccgactacatgtatttctttttcacaat

SEQ ID NO: 30293 - DNA, 156 bp, Oryza sativa
ctggctgcctcactcctatattattttgagaacaagacactcgctgatatctaagcctagttacttagctgatactaacagctatctgtgggtaaactatatgtggctaactctgtagctgcataactggtagactaagctaatacaggaagcgct

SEQ ID NO: 30294 - DNA, 481 bp, Oryza sativa
agctttgtctatctataatctaccctattatctggttagaacaccgctatcttctagtgtgactattttcaattactacataggatacgcatatgtagctattgggaaatcatgccataatcaggttttgcacagtcgcacgattatcatgtgcggtaatcttctcagatcttaaaaccgaggtaatccttacgacaaccacacggttttcacagtaatcgcggtaaccgtcttatcgtgggggtgacattaaccccatccaaaatagtttggtgaactccgatcgtaacgtaatttgtctgttcaaagagtaaagatttttttccttcatagaagatatactacttagctaccgtatgaatcaggttaaaaatccctgtttggaaacatgtgtttattccaagtcctgttacatggatgtttgatactaatttggagattaacatgcattattacaaacccattcaaaccttgactattc

SEQ ID NO: 30295 - DNA, 296 bp, Oryza sativa
  unsure (1)..(296): unsure at all n locations
acggacggcactataaaaaaccgaatagacttctagagttcggaatgaagcacctttgagtggcacatggtaaatggtcacaatatcctaacatgtaagaacttggtntattaaagacaagaattataataactaacatggaagcacctgcgtacctgactntatgagaatgaaacacgccgggaatttacaagccatgttaatactctgacagtgctgctctggacaacanaactaacaaatattgcattatctaaaacatccacantntcaatagatccattctgagactctac

SEQ ID NO: 30296 - DNA, 437 bp, Oryza sativa
  unsure (1)..(437): unsure at all n locations
agcttaaactcaatagataccacatcaattttcacttcattgcattggtntaactcccaacagacctttaatttcatcaataacggatggaaaatgctgaaccaactgagcataacccttattcagcacggccaccttgaagttcttcttctgcacaaagaagtcgaggcaactcgtcttcagctccgggcagccgtgcatctcggcgtagatcaacattgtcgcgacattttccaccgatactttctcccacagcttctgcgcacacatcagcttcaacctgcttagatcatacctatccgcgaccgcgaccaaattctggagcaaatcggttgccatggagtccttctcctcgagttcgtcggtgtagatgaaccgaagcatggctctgaacgtcaccggctcgacgtcgtgtatgggtatgcgtgacatcttgg

SEQ ID NO: 30297 - DNA, 439 bp, Oryza sativa
  unsure (1)..(439): unsure at all n locations
agcttgtcgaaccaaccatcgatccaatcctatacttgttgttgttcgntcgggtaagcgactttaatgtctcgagtgtgtgttcatgctttgtggtgtaataagaacatatttcgctgtcaatcgtatgcatccgagtactactcttttacgcataatctgaatgtggatttgacgcaaaaacatgatctattacgggaactcaactcatccggttggagtcttggagatggcgcgacggtttggtcactttggtgcatgcagtgcagcagccgaggttttgagcgcccgcctgtcgaggcgggattaaggtggccgtgccatgccagtgccggcgcctactgcggctgtcgcggttggagaggtggtctatctcgcggcggcgcccgcgatgtcgctcggcggccggcggcggcatccactggtttccgttcatgtg

SEQ ID NO: 30298 - DNA, 402 bp, Oryza sativa
  unsure (1)..(402): unsure at all n locations
cttatgtagtaagactagaagctggttacttttgaagctgtagaaccgtgatagtcctgtgtgtttttggaaattctaagccattcatttatgtctatgaatatatttttcccttgtagggctcgttatcttgtggtatgaatgcagaanaattaataaacaacttctcattaccaatcgaatcggccctgagttcttgtaaaatgtcaaattcatcttttatagctgttaatttcaattttgttgcatcgtaagctttatcttaaacgggcgcccaatggtcttaacaatgtgttgttggatagttggcaagattgtagctgcttgggcagtgtgttttcaacagacaatgaaacaagatctagtagtacatattttcaagttctcaaaccataagacaag

SEQ ID NO: 30299 - DNA, 484 bp, Oryza sativa
  unsure (1)..(484): unsure at all n locations
gctgtgtcactgtcaaatggatggataattagtcatattatcaccaacctcggtgcataattncgtttctgatatgaccgcaatttgcttgtgtcactgtccaatggatggataattaatcataagctcaacaactgtgggaaagggtggtacaatccgatattcatactaccaaccaaacaaaaaagactagatcatcccatcggtattcattctaccaaccaaacaaagctcgatagcccgattcatctgaccaaagaagtaagttgatggcctctcttatatgattcttgngtttntcatgtgctctattcaaacagctatttgttgtgcagttcttctatagtttcaacgctccgtangagttggagcactctaatccttttctattcatatgcctngagaatcatgggttccagcgaggtcttaaatatctgtagattgatgattcaattaacatcacagtctattggatcttaatgct

SEQ ID NO: 30300 - DNA, 404 bp, Oryza sativa
cattggcatgttcttactggtctgaatggaacatggcctgcaagcgagtagcgactatagttcagaaaagaactcgacttctctgtttgggaatgtctgttccaatatttattacatcgaaaagaattacaatttcctcacaaaaaagagagtgctattagaactacatcttgagaatttccaatgaattaaaatataactctttagaattattggagattaaagtctgatgcattttacaacagtgttgagaacactatgcctattgtcctggtgacaattattagatcatttttctggcttctctactcctctctccaagttatatattcgtcgacaagagacagacatgagctaagaggagtgttaccaactaatgacgcacattgcattgaacttacaca

SEQ ID NO: 30301 - DNA, 433 bp, Oryza sativa
  unsure (1)..(433): unsure at all n locations
agcttccagtctcttttggtttaagcccaaatcgttttcttattacatcagcaatcacattggcccacggtcgttgctgagctgttccctgtgactgttgttgcatgggctcgaactgaccatactgagatgcaaactgagggtgagccagtccccctggctgatattgggcttgcggggaaggagactgatattgataattcaagttgccccccctggtaattatgaaggatcggttgaatattacgtgccaaatgctcgggaacaacttgaggcattactgtgtcatctggctatacgtggtgaaccaagtgttctgtgacgacttgatttaaaaattgttgtataggctgtccaccangcgtcacaagcccggccgatgcgctcattgagccttggtgcttgatcngctgaccgatttgctgtcttaatg

SEQ ID NO: 30302 - DNA, 367 bp, Oryza sativa
  unsure (1)..(367): unsure at all n locations
tcatctgagagtacagacggcagaacatgtaaccacaacttattacattaaanagacttaattccatataatcaaagaaaaagtaaaccttcatgaaaatcaattatacaagcatgcatttttatggtacagaagtacaaaagactacctctaactttcgaattgctgcctctgctttagctttctgcagattttcccaagcagtgatcttcgcttcctccctcttgcaccttgacagaaataaagtctcagcaatagaacaagtcacagtttgtggccttaattagtaagtcaatattacatactaagcactgcanaattctctctctttgtttttgctcatgatttaaattatgacactattgac

SEQ ID NO: 30303 - DNA, 428 bp, Oryza sativa
  unsure (1)..(428): unsure at all n locations
tgtgagaaaacatgattatgctcataatctgcgcgaaccataatatattgtctacgggatcatcttagaatctcctacatttgatcatgatcgatctctcctctcaaaacccatttcatgtacgatgagctcattcaggggcggagccacgttgctccttccttgtgcacatgagtatgggacacaggaggtccaaaatttactacaaaacatgttgctcattgcacatcaattttaaatgttaattagagtattaactgtgtgtaatagatatgcatggcaatttctatatatgtataaaatagcgtaccatgaattatgagttcttgggcttggatactctaattgattcagtaagtggtattttccttttgtgtgatgagtcataattagtagataaatgtngcattgtgagccattatatgttc

SEQ ID NO: 30304 - DNA, 483 bp, Oryza sativa
  unsure (1)..(483): unsure at all n locations
ttaagtcacctgacgcatgcaagctngtgctactaactctatttctttgagtgtttcgcaaaagcaaaaagagaagcttatgggactccttcacaatggcctacttaagtgccatatgggtagtaaggccctaaaggagtacctaagctatcaaagggacaacttcaaccatgagggtctttggtatgttcctccaccaaaaggaaaggtggacaagagtatgacgatcaagaggccccaaggtcttatcaattttgttaaggccaaaagtatccttcctaatgattatgcttcacattgttcttttgatgcatcttatgttcttaggaagaatgctagtggtcgtgttgttgctaagtatgtatgcccaaggtgcaaaaatgtttccatcaagagagttctttgngtgcctaaggcacttgtcactaacatgagaggacccaagcatgtgtgggtacctaaaactagaaatagatctcttgt

SEQ ID NO: 30305 - DNA, 298 bp, Oryza sativa
  unsure (1)..(298): unsure at all n locations
atattggtgagtacatacagatctcatgcgcctaataggttcgcaacgtcctccctccatgctaatttctgacatactacatctgcacctatgctatgcacactcctgtttacaccagaaagctagtctgtaagcttgaagagagagaaaatgtgtgtggggaacaaagaatatatagaaattctaatcatttgctaaacaatgttttatataatacttgagaatgaaaactctagtgaaagttaatcttanataatccacatcaaactacaatgaacattacaagaagtggaacaca

SEQ ID NO: 30306 - DNA, 499 bp, Oryza sativa
  unsure (1)..(499): unsure at all n locations
agcttgagccacatcaaacgccgataagggtttatccaaagccacaaaatgggcatatattgaaaacttgtccaccactaccataatgcaatcaaatcccgacgagtgcggcaatccttcaatgaagtcgagagagaccatntgccaagcatgctctggcacaggcaacggttgaagcaacccaggataacgtacccattcagccttggcctgcttacaaacagcacactcatcaacaaactctntgacaatacgccgcaaaccagtccaagcaaaaagatttttgatgcgagagtaagtcacttgaactcctgagtgaccaccaggggcactagcatgtaaggactgaagaatacgagactgtatggcaaagttattgccaatccacactcgccctttatagcgcagaataccagcatcaaaggaaaaatgaggtactacatcctttttcaatgtgagctgagtaataagatgagaggcatgggcatcagaagcataa

SEQ ID NO: 30307 - DNA, 389 bp, Oryza sativa
  unsure (1)..(389): unsure at all n locations
taagagccgcttctaatctgcccttgtctaacacattcatttatctttaatctgntatccatgcctgtccctgagaagagttcataacaagccttgtttgttaaacattccgattcattacatgaatacgaagcttcctcttttttctatacatgagcagcaatcgaagatggtctccatactctctagcatttcttaacctacacaagttgaaccctccttctcctgaccgaccaacgcaccgagctggtgaccaaactcttggctaacttccggcatttgttgtgcatatgtttcatgaaatctttttcatcaggatgcaaaagccaaaaaaaaaggccgtcgtgatcgggatcacgacttggtctttgaagggacgtagtgcttga

SEQ ID NO: 30308 - DNA, 471 bp, Oryza sativa
agcttggcatatttccatatgttatcttatttgtaaagagcaatacttgattaatttttcaggccacaatacatgaatagattccactggaccatgccaaaatattcaatagatgcacatgaaaggaaaattagcaatacttcaatgagctgatacaatagttcactttaatagaaaggaatggggaaagcctgaacttagcattggattattagttcagaacaactcatttatgtaaaaattacctacaaccagaaaaatataagctcatttacatgtctatacaaagaatagcactccaatatatttgcttagccaatccacacaacagacagataagagggtataatgcacacttagttatatgctatgaaggcatggtatcatcacgcgcaagtacagagcacgaatggtaagaaacaattgcaccagatattgattttagagagatagttgatttgtggtcgatag

SEQ ID NO: 30309 - DNA, 418 bp, Oryza sativa
cacaggtgttagtaatcttaacttatcttatacttgtgatatattacaggtgacagtgttaattaactaagtacctatgataaattaaagatgccggttttgtagaggcgattttcaaattgcctctaaaatctggacctctatagtcgtgagacactttttagaggcactttctaaatcgcctaaaatactttctgtcgacgtttgatgtcgtgattccggtattagcatagtatggggatcattggtactaggatatatgcgagattgtaataaaagagatggggacgaggattgttatacaggttcgagcccctgaattgcaggtaataaccctactcctgttggccgaagccgggtcgttgtcttattcaccataatcacaccaatacaatatttggggtagcctatctatcta

SEQ ID NO: 30310 - DNA, 329 bp, Oryza sativa
ggggcacgaacggtgaacatggatatgtaaatggagctatgcccaggggctcttcataattcaagggagctactataccctttgattacagcagacttaccattccgcctcacaactttgtctgggtgccttccgggcgagctcctcaatttgatgtgacacattacgccactaggaagcacacgatgaagttgcatctaatctctttgcatccaagtatttggaatattgtatgtacaggtgctgatgtaccccatgatgacatggagcttacttaggagcaagaccaacttatccaccgtaaggctcaagcttacaatgcaattctc

SEQ ID NO: 30311 - DNA, 341 bp, Oryza sativa
aaatatgtgggtcagtaatcttgcacattaactcatgtatgatacagagtataaaaactgtgggtcagtgatcttgcatgtgtacctatggtaatggttccttaatgatgagaaaaatatttctcaagcttgtgacacttctataaactatatgagagagtacctgtttgttgcagctgcaattcagtgtctaaagaaaaagaaactgtatgaaacacaaattgagcagctagcaaatttccaattgccagttcatgatcaggtgatgagatatatgggcgcataatcaatcttgacttttgaagcattctgatattccagaagggttgttataattcaaa

SEQ ID NO: 30312 - DNA, 495 bp, Oryza sativa
  unsure (1)..(495): unsure at all n locations
agctcttcgttgattaccgcattatgctcgtcttctcttgacgnctccaagcctcgacccatacatttgcctctgcaagcgcacgctctctatcagcgccgttcggggtaactctgccccttcccggtcgatgcgaactgctccggcaattctccttgacttcttgtaccatgtgatccgtcccggcaagcggtggcatatgaactccatgttgactgggcaaggaagtgtcttggttaatctgattatccagcactcttggtacagaagggccaggcagggtatggcgagcagcagtgttctgactttcatgtgtttgtgatgctaaataagagagagcaacagcaacctccctaatggaagggcggntcttcgctttctcctgcagacacattgctgcaatagccaaagcctggaacagaacccttttcgggaagtggccgtgtaatgagggggtccgcatctttggaaattnctttggtctttgacaatgga

SEQ ID NO: 30313 - DNA, 321 bp, Oryza sativa
  unsure (1)..(321): unsure at all n locations
tgatggtgtaaacgcgtgctcgatgacgattggttgtattttttactaggcggngggcgacgcaaaccgatctctgatcggaaaaggaaaataacagcagcaagcagcagcgcagtacgggagcacatcctctgttcctccatggtcccgatccatagaccaagtccagcagccttgcagcctcagccgtgccagcaggaagccatgaccaagtcaacgaggagattaaatccttcacttggccacagcctattcaccttctcccgaatatccatccacacacatgcagacagacagagataagggagggagaggagctgt

SEQ ID NO: 30314 - DNA, 372 bp, Oryza sativa
ccataacaattaagttgatgtggtttatgataatttaaatggtatatagattgataatttaaaagttaaactaaggtgatgtaactttatcagagaagaaaatgaggaaaataattcgcactatagattaataatcaaaaggctaaaagccattgagatgatatggtttaatgagagaatatagaaacattaactaaataagaatgaactatatatgggatattgtagaaaatgataaagagatatatgttgaaatattatgtaaattatgtgggatgatgatttaacatacttatatttttaaaggtttaacgtatcataaagtatagatgatatagtatgcttggattatgcttaagatgtaacaattct

SEQ ID NO: 30315 - DNA, 426 bp, Oryza sativa
agcttcctggactgcagtgaatcaatttgtttatgaagacactggaatcagcacatagaagcatcaccttaacatcctcagcataacccaatctcactaaatgacttgtcttgaccccagagcccagttcaagaaccttgtttagctcagctgtcctctgcagcacccatctggtaacaccttcagaacagaccttcctctcccatatttgaaggctgtcgtacgacagagtgacaaggccaagataaccaccttctgccagaaagatctgagacatgtagtggctataacaatttggattggaaggccactcaatcacagcaagggtttgcctatccaaatcaaactgaagaatggcactgccaagaccagtggggaaccaatacagggaatggccaacgagtatgccaggatcaacaaaagcaa

SEQ ID NO: 30316 - DNA, 394 bp, Oryza sativa
  unsure (1)..(394): unsure at all n locations
actcagctttggacctcgcctggagttaagcagatcttccaagcctcttgtttntacatcaacacattcgcaacttaccatgcttctacccggacaagtggaacatataccgcatcaacacgtgagtctggagctcggatattaacgagtgctggtgggtggtgggagataaagtacattaaatgcggcagcgactttgatttcatgtcgagcaccatagtcacttgagccgtccactgggtgggtggtaaggaaggggacacaaatggtttcagcatcaagacacaaattaatatgcattgaattgacatatatgagacttcagcttcttcttgaaataaaatctcaagtgttcacttaatgtgtaaaaggaatttattgacctggtgatgca

SEQ ID NO: 30317 - DNA, 481 bp, Oryza sativa
  unsure (1)..(481): unsure at all n locations
acctgaggctgcagcttggctagggattctagtccgatcttttctcctcgctatgcatggtcctccttttatactctaaggggatactacatgtgctgcgagtgctacctatggagaagggaaaatattctctatattaattacatgtcttgtgctttagcccaaaagctatctgcacgtcggttgttgcgcggagcccctcatatcatgcanggcgcctttgtcattcgccatttaatggatgaggacttccgggttctcgttcacaccagaaaacgggaacccgggtcagttcagagtggttggaccagctctgaccgaggtaagaggctgtgaagcccctcctcattatgatgggactggatggagcatgccactcgccgcctgacacactgatagggtggtggtacacagtcggcgtcccatcggtcattcaaccggtcacagcccggtcagatgcgcagcacgccgcaatttatgc

SEQ ID NO: 30318 - DNA, 401 bp, Oryza sativa
tatgtgttactgcagaatggcgctcaatgaggtgtacacatactttgagctggagaaggagccttactggccatttgagaagctgcggatctcgattaccggagctggcgggttcatcgcatcccacatcgcgaggcgcctcaagagcgagggccactacatcattgcttctgactggaagaaaaatgagcacatgactgaggatatgttctgccatgagttccatctttgtgatatgagggtgatggacaactgcctcaaggtgaccaccggtgttgaccatgttttcaaccttgccgctgatatgggagggatgggattcattcaatccaatcactctgttatcatgtacaacaacaccatgatcagctttaacatgcttgaggccgctaggattaatg

SEQ ID NO: 30319 - DNA, 316 bp, Oryza sativa
aattgctacatgcccataaatgacgtgtaaaatctggcacccaagaagctgctgtatctgtcactgtgcggcctgactactggctgcaccgcaggatatctcaatgtggaagaggcgactgcacgaagtggttggccttgatcaggactacaacgttgctatatatactcctcgtgctcgaggctgatcatgctaacatggctggacaatctattgtggacagcatgtattcactgtagctcccgctcatcgtgatgcgagcgaactaccaacttaaatcaccgcacatccattgatccaataatgggatctaatt

SEQ ID NO: 30320 - DNA, 378 bp, Oryza sativa
ggggttcgaaataattctcaactatcaattggcccgcctccgtattacctcactagctgggttattgcctcaagcgctaagatagccttctcccggtggcacacctcctctaattatacccgcgccccttctgcacaggttgcttgactaccgagggggtactaaatcaatcacaacacgcggagataaaaaagaccaatcaagctcgaagtccaccgccgtttcacgggccgatttgtgggtcgaacgggccgcctcgttcggtccaatataaaagcaaactgaaaccacaaattcgatcagcccagcataggtctgtcatcttgagcgataaaaaaccatattcaaaagtgtacggcatattttgattatttttcc

SEQ ID NO: 30321 - DNA, 190 bp, Oryza sativa
ttacattaaagcatgagcatcatatttatactataggcttaggctaacttgagaaaaattggctaaggaaaaaaatcaaacgacttataatattaaaccgggtggctgattctccgtacaattaataaatagagtttggagaagcactcgtgatggacgctaattgcgggatttggtcgatgatgactgt

SEQ ID NO: 30322 - DNA, 323 bp, Oryza sativa
acccaactcttccaaccaatcatctatctcccactgtcgcttagattcagcgagtgaattatgtagacttgctgctgacctacattgcgtgatggtgatccattggtgttgctgaagctgactaggatcctgaccataagacggtggtgcttacttctagttgcatctactacatccacgaccggttgaacaaccgacgcggattaccttatccgccgtgcttcgcatcacagtgaccatcccacgtcacgaataccggactagccttcgtgggcctgcacgcccctaaccctaggtccgcacttttcacatcataggggagg

SEQ ID NO: 30323 - DNA, 466 bp, Oryza sativa
atgcaagcttcaccgctttgagtaatcctttatgtcttatttagggggaaagaaccgtgaaaatggaaatgaatatggagcgagcagcaatggaacttcattatccaagggagctactataccttttgattacagcaaacttaccattccccctcacaactttgtctccgtgccttacgggcgtgctcctcaatttgatgggacacattacgccgcttggaagcacaagatgaagttgcatctaatctctttgcatccaagtatttggaaaattgcttgtacaggtgttgatgtaccccatgatgacatggagctcacttcggagcaagagcaactcatccaccgcaatgctcaagcttccaatgcaattctctccgccttgagtccggaggagttcaacaagtatgatggtcttgaggaggccaatgagatatgggatactttgcaattggctcatgacggatca

SEQ ID NO: 30324 - DNA, 416 bp, Oryza sativa
  unsure (1)..(416): unsure at all n locations
tcctggncatgtcttacattacccatcaactcatgtattatttatatgtgaaaatatgtgggtcagtaatcttgcacatcaactcatgtatgatacagagtagaaaaactgtgggttagtaatcttgcatgtgtacctagtggaatggtttcttaatgatgagaaaaatatgtctcaagcttgtgacacttctataaactatatgagagagtactctgttgttgcagctgcaattcagtgtctaaagaaaaagaagctgtatgaaacacacattgagcagctagcaaagtttcaattgcgagttcatgatcaggtgatgagatatatgggcgcatattcaatcttgacttttgaagcattctgatattccacaacggtgttatatattcaaattgacaggacattggttgtttggt

SEQ ID NO: 30325 - DNA, 485 bp, Oryza sativa
cttgaaaggatgaatgcaaaacaatgatgtggatataaatatgcgtgttcatattataaacgcactctccttgagaaattagaacatctaatataaggtgacaaaaccgtgcgggagtactttcataactttaaaatttgtatctcttatagtggtttaaaagaaagcaatgagaacacaatgactagatttttttatagggcttaattccgatattcaagctgggcttattaacatgacatataatcatataggccacttgttcatacttgcttgcagtgttgagagcaatatgttaaagaacccaagggagaaacaagctatgcttgtgcctcctattactgacattctgtaaggagctcagaacattcaccgtgaggagaagagaaatatgatcgagatgccatctccatcgctcacgaaggaagaagagaagactgatgcacctacatcatccgaagagagaaccacaggtaatattaatg

SEQ ID NO: 30326 - DNA, 433 bp, Oryza sativa
  unsure (1)..(433): unsure at all n locations
taacgaacattccatcgacggtcatttaatctcatcatagatcaactggccgtgaaaagaagaaacataagtgcttcatgcatagaaagtggtttcaattgtatatccatcttgtggatattaagacaaaacttgaaggagaataactattccacattggttccagattattaatcacatccttttcatgagacagcaacaattaacaattacttttgttccccataacacattgtgccagctgtacttcccaactatcatgaacaatntgtttaaacaaaaattagcaataaagcacatgggacattattcanataccagtatgtccactatcattgtcagtaagttccaaacactgtcaatggattgtagttcctacactatatgaactacctcatccaatatcctactatcccaactggttgcaataact

SEQ ID NO: 30327 - DNA, 424 bp, Oryza sativa
  unsure (1)..(424): unsure at all n locations
gatgccaatgcaaagaaatctagttgagctatcatataggctatagcttacacaacgaatttaaccattacagttacacagatgctaattgctgccctcaacaatgctatcctagaggcaaatcctaaattccaatcttttcagtggcactccatagctaagataatatctccacattctagaacaaacacaacaatatgtaattgaaattcagctgacctgaagaacactgaccatcctttgtcatcaagtatacaatcctagaggcaaattcggtggcatttcatagctaattaacaaaacatctctacattctagaacaagcacaacacacatagtatgctaaatatcattcagcagagtaatcagagcactgaccatcctgcgtgacgaggaggtaatcggaggcgctgaggtngatgaa

SEQ ID NO: 30328 - DNA, 293 bp, Oryza sativa
tttatcggcggaacgacactcaccacgccggcgcttgatagaaccttataaatcacgaacgcgctccctacctggcgcgccagatgtctgagacagaactccttcaccatggaaccgagacgcctctccttgtgagatcggtccggggctctggggagacttgaggattaggtgagcgcaactgtgtggtctcgagggcggcagatccctcaaagatgatgacaccaaacgggtttatatacattcgcgcagcttgagatgcggactaccctactcctgtgtttgggatatgg

SEQ ID NO: 30329 - DNA, 342 bp, Oryza sativa
  unsure (1)..(342): unsure at all n locations
tttttttcgccaaatctgggaattatccgcaaatgtttatttaagagcatggcataaatgggcccatcttattctctgttccatgaacaattgcacatctaaactctgttgacttgcctatgaaactctcaattattaaatccgtttccaagccatgttacttgagtctctagagcctaatggcaagcaatggtgcccattttgattcaaatttctaataatagctgaattagcgacccttttacggagcagccatagcgaccttgttgacacttcacgtnatgcaagaatcctccaatgcttgcatggtggattgcacctacagactctttgacatgttaa

SEQ ID NO: 30330 - DNA, 331 bp, Oryza sativa
tcggaccttgaaactcagctgccaccgccctgggtcgcttcttcttggacgatataccatgcatagctccggggtcgaactttttgttgaagttgcaaagtgcttgtggcgacttgtgcatgtgctcgagcgcctcgactcttattccttccaagagttcgagcgatacttcgcgcccctcttcgccctcagagaacatcacccttggtgagttagcccctagctctgctggggtcattgcctcatcgccataaagaagcataaacgggctaaacttggttggtcttgtgggggtcgtccgaagggcccagaggaccgatagcaattcctc

SEQ ID NO: 30331 - DNA, 236 bp, Oryza sativa
cccaagatattcactactatgtccacgtgagcgctcagcgagaggagaccattacctttgttatgacggaacggggaatccattcttaatttcggtgcctttaccttctctctagcgaactctaacaaaattcttcgaagaaaaattctaaaaaatctgttgaggccctggctaaagactaggctatcttcctccggtagagaggagatatgagaaaaaagacatttccctctaag

SEQ ID NO: 30332 - DNA, 345 bp, Oryza sativa
  unsure (1)..(345): unsure at all n locations
gcacaataaactcacaatgggccatcatgtgcgcgtactaaacacacgcttggtagaggctgtaggcccagcaagccgcattccacgtggagtacccacacaatgcccacttatctgggccctcaatgtaataaaccgcgtcagcctcgctgggccttaactgggccggatccactcaaactggctagaagagtangagtacttaatntcagccccatactagcccattccaaagcgaggacgagtcggtgggcgccacgttctgaccgggaggagacgccgacgccgacgacatggttcgacgcactccacgatctccacgcacctccctacgctttgacacac

SEQ ID NO: 30333 - DNA, 482 bp, Oryza sativa
ccggaacttaagtcacctggggcatgcaagcttataacgaaaacatgttctatgtttattcttactgggaaaatcgctgccaactactatcacctaattgcaaataactgtcctggtggactatattagttgacattctagtaagctagtagcaccctcataaagattcaagaaccatcacgctaccatgggttatgttatctttcttcagtcccaatgcagtgctatcagatgcaaccttgaggccgggagctgcaacagtgcaacctccaattccttggcttctatgctatgcttcgccaaaacattcaatcatgagccaattacaagtgaaaattattccttgctttccagattgaccaagtgtagcagcagtaaatttattcactacttatttctggaatcacttacaaagttgagtgacagcctcagaatctcaaccaatttatctgcggaatagatccgagttatctgaaatctca

SEQ ID NO: 30334 - DNA, 441 bp, Oryza sativa
  unsure (1)..(441): unsure at all n locations
tctggagaccttttctttattaacactgctaatcctgtcatgggactggtgagagactgcaggctatgctgcttattatgtcattgcactgctcaattcaaatttgggtgctgaaaccattatgctccattgcaatatcagtcatcttcactgcttttatacagcccacttttagtgatatacatagtttcttgccattgaccgaattctcaaattaaaaaacacctgatgtaagacagctgggatttattgtataggcaaaccacagctttagttgcaaagccatgggcattttattatttaatatctcgtgcagaccatcatttagaactaacatgatagcttgcggcatgggacaagacatgganacataatatctangtggaacttagtagataggtagaaaactatgatagtaatctcccacatacttgatcattc

SEQ ID NO: 30335 - DNA, 471 bp, Oryza sativa
agcttagtttagtattctcaagctagtggtgtatgaatagaatagaagtctgagttcggaagtcttcggaagagtttgggtatggttctagtagctctcatttcttctttcgtaagacttgtactttatttagccccagttgtatggtcatgacggactatcgtaaagaacttggtagtcaggggtggcttctcgaagtaccaggagggcatcggaaagagggcattagctagttaatcttatagctaggatgtatgtataatatgtatactagaagtataggaatagattcttttctattttctttccacttagctcagataatttaatatgagagtgagtagtcttatccttgtgtgtcactctaccctatgcttatcttaacccctgcttagacataattattacaagtaacatattaatattagctcggctctctctattataatctttctatgggataaacaaata

SEQ ID NO: 30336 - DNA, 360 bp, Oryza sativa
  unsure (1)..(360): unsure at all n locations
tgcacggaatgaatcaatgaaacaaagtttatgtaacaatttttatactctactagggtgtatgggttgagatttatccggctctatcacaagagaaatcaagaatccagtgaggggggagagatcgatgagacttacctgcttccgagatcctgcgcagataangggaggattggaggaaggggagaggaccactggaggaggaatcgatcttcttgagggatggggaaaaacagagcgtgagtgcgtgactcttctgccgtactgngtaggcctgtagcttcttattttttttttttttttgcgggaaggcctgtagcttcttgtaccaactgtgctaaatattggggacaatttgtt

SEQ ID NO: 30337 - DNA, 468 bp, Oryza sativa
  unsure (1)..(468): unsure at all n locations
tttttaaaaaagaattaatatgaaattttaaaataactttcatataaaaaggttttgcataaatcacaccgtttagcagtttgaaaagcgtgagcaccgaaaaccagaagatgtgttggggaaatggggaaagaacaacagcgtagtgcctattatataatactacctcatgtactaaattttatactaaaaagtatcttgagggaaaaaanaatagtggtaccacgaggtataaaatgttaaacgggaaaattgctcgggataaccgtacgtgcaatgtgtccatatgcgtgtccaacacggtcagataagaaagaattacagggctagtagtcagtcgatcggtctcgcacgcaaagctatcagtcgatctgtctcgcacgcaaagtcatcagtgtcaagcaaaaaaagcatctctcattcaaagtacttcgtttgatcgtcgtcagatcgtgtactgcgtgatcg

SEQ ID NO: 30338 - DNA, 477 bp, Oryza sativa
gctgctaaataccgatcgaggtggttggagtttgatttgtgaaaaccaaaaatgcctgtatttatgtgaggatttgatccttctatgtgatatgaggtaaccctgggtcggcttgggaaaggctttgttgcgaaccttcgataccgacgggtgttcggaataagttcgtatcttgagggtaaagtgtacccctctacagaggttaactaactgttcgaacagccgtgcccatagtcatgggcagatgtgaggtgtttcccgttgcgtagatttgtttacctgtgctttgtaaaaagttgttgcggattgagaatcgtcaccagaatcagcatatgtagcagatatatgacctgagtggtcagacacaaatctgtgtgattcgggatgtctgcggccatcatagactagactttccgagtggaagcggattgctttgctgcgcggcagcaggactctgggagtccaggaaaatgaaaa

SEQ ID NO: 30339 - DNA, 395 bp, Oryza sativa
  unsure (1)..(395): unsure at all n locations
gaataataaccacgacacgcatagttacagttttttttagcatgttgctctcatgatgatgcggtttatatgatgaagcctcggtctgatgatgcctccaaaaggctattctacaaaaggatatttaagcatgataatgggtgtcctccagaactggaacaagtatcaataggtatattgaagaaatgtgctgggatgccgttagccattataactatagctagtctcttagccaacaagcaggtacaaacaagggatcaatggcatgatgtgtttaattctattggtcgcggacttaccgaagagccaanggtgaggacatgactaagatattgtcttttagctattatgaactaccgtgtcacctcaagacatgtttactgtatctaagtata

SEQ ID NO: 30340 - DNA, 404 bp, Oryza sativa
  unsure (1)..(404): unsure at all n locations
tctagtgacagtgacagacatggtataagtgcttatccattgagtactctactaccatggggaaagggacaaacagataatccatactttcatcactataaacaaggggcgtttgcctggtgcaagacgtctcttctacctggtccgtggaactgtggggttcctcttgagcttatctttcattcttccttttgatttagtaaccaaccatggaaatctgaatttacatcaccataacacctcaatttgatctaaaacttaacaacaaagcacaaatgctaaataattaccctgagctcaaatattcaaactacaaactaataatgctctcaagagcagattcngacatagatacaggaacatacaagcaggctcactcacaacatgcgaagactactcctgaa

SEQ ID NO: 30341 - DNA, 380 bp, Oryza sativa
  unsure (1)..(380): unsure at all n locations
tcggcgacctcaaccacctcatctccgccaccatgagcggtgttatctgctgtctccgcttccccggccagctcaactccgaccttcgcaagctcgccgtcaacctcatccccttccctcgcctccacttcttcatgggcggcttcgccccgctcacctcccgcggctcgcagcagtaccgcgccctcaccgttccggagctcacccagcagatgtgggacgccaagaacatgatgtgcgccgtcgacccccgccacggtcgctaccttaccgcctncgncatgttccgcggcaagatgtccaccaaggaggtggacgagcagatgctcaacgttcagaacaagaagctcctctacttcgtcgagtggatccccaacaat

SEQ ID NO: 30342 - DNA, 497 bp, Oryza sativa
  unsure (1)..(497): unsure at all n locations
agctctcggccggacgggtggtgggccggggggaatggttttagaccacgccagggcgtgggggcacaacgcgcctatgcacttgcgaaccatatcctccgcacgtgagaggcttcgtataacatggcttgatgaaatgggtgcatcctctggagggtatgctccccctagtagaggcgtgacagaggcagatgtgacgctcccacaccgtcatggtgagttggtttcactcgtcatgtcggtgcattggtcatgccataaggtcgtctggtatcacaaggttccctctagtagaggcatcacagaggcagatgtgacgttgcgacaccgacgtggtgagttaaatccattcgtcatgtcggtgcattgttcatgccatatggtcgtcttgtaccacanagtgggcctaggttntatataatagcacttgctgtagtgtacagatggtaaaggagtatcgtggatcccactatataaganatatctctccttaatta

SEQ ID NO: 30343 - DNA, 475 bp, Oryza sativa
  unsure (1)..(475): unsure at all n locations
tctntatagctggtntgctatgtgaattatcaatgatgtaaccaactttatgttacactcatcatattttacaaagcagtcggtatatcactcggatcatgttattcacggattcacaccgcatatgctacatattaatatcaggtcgcttggttgactataattattaaaaccactcggntggttggattatttattccttgactatatgctttggttgttcaattaaccacatagtcgggggctacacctattaggtgcatccagtcgatgcacctgactntatntttcagccctccacagtcttcgtatttggtaaaagtacttcggagaccatggcgaagatgaatgaagcactcagctttggagtaatctagttcgagagaagatatcntttcactgtgaagtctcagggctactgggagatatgggacccatactacatgcatagtatccactgctatagggatactat

SEQ ID NO: 30344 - DNA, 498 bp, Oryza sativa
  unsure (1)..(498): unsure at all n locations
agcttcaatcaggacgatcttacctctctttaccactgcgtcactccttgggtggttatcaatcgagctgaaacacgattgacctcgccgataaggctatctcctacgagcgaatcgaggacacaagctagagagtataagatgcaaactgaatatattgcgaatataagatgaatctcacaaattggggatctacaaattgaactagcggcaaaactgcaattgcagaataatgtaagcaaaacataaccctaattcattgacgattaccgaattaataggttctaagggaaaccaaggatccctggatgtgtccctgatggacttcaacaagatacacggcccaacgggtctaaagacggtgatgtagcacatcagacagatcatggacgctctcttatttcaacaattctcattgaatcacaatgaattttgacatgagaccaggcccattggaaagggtgatcttgtagctntccatatatatgtataacattg

SEQ ID NO: 30345 - DNA, 449 bp, Oryza sativa
  unsure (1)..(449): unsure at all n locations
tggaatagtagagttgggtgactatggtatattgtgagcttgccaaatcaatgacttactgattcaactcttgaccacttagtatttgtgtagatgtagtgcttaaaacaccattgttgactttcagatggtctgtactgtttgtctcgagagatgatgttattgaaggctgttatgtgtcttgcaaccaccaccacctgcaagtttagatatctgaattctcgttttggaataatatccttgaacattntgtaatgatacgttttaacacatttcttggtgaaatgtaggtgcgccatgacgaaattgttgaacatgtttcatcaattctaaaaagcaatggcattgctcattcttgggaaagcatttgacacttggaaacttgaatggttgacatctactggctttatatatatattcagttcatggttttgtgcatataatttatg

SEQ ID NO: 30346 - DNA, 444 bp, Oryza sativa
cttgccgaaccaagttatatcttatgctcttttatttaaaacgctgaaacaatgcgctgagcttaaatattttggttgaaatagaatcctgagggcccgctcttcctttgctagctataagaataaagctcatagaactgaaacaaaactcaggtaaaaagtgagccaaataaataacttggagccttgaaataacttggagttctcgtaatgcacccttggaaatgagtaatgtgatctggtttttctttctaatgcagatcctactttgatatggttgagacttcataaattagtacacttcctcgatgacccttcaatgaatgcctaaatactagaggtacatatttcttaactgaattatgatcttagatgtcaatttggacatgcatgtacaatattaatggtgacaatctatccaatatccatagaactctagcttaa

SEQ ID NO: 30347 - DNA, 342 bp, Oryza sativa
  unsure (1)..(342): unsure at all n locations
ggaattcaatgcaccttatcttatcagtccaaacatcatcccaaaaaagagctgatgatcctgtcctgatgtagcattttgaaattcccctgaagacatcagacagagccactatatccctccaccaaaaagagcctttatttcaaaccaaatgagacactgtggagtcataataagaattccagatcagttgaacccatggcagatcctgccctttgtaaaattgaccaggtgtttaaaataacgtggtcccttatttggttctatgaaatgttgcttcgtatatatgctatggntatgtataattaatcctcttgaacccatatatgctgctgatgtatg

SEQ ID NO: 30348 - DNA, 483 bp, Oryza sativa
  unsure (1)..(483): unsure at all n locations
agctttagccttatcttattggcacgacttgttgtactaaaataggactagaagataaacggatagtcaaaaattttcaattgaaagtttaggcgtgcagtagtctaaaccttttcatggaatatcagatcttctgatgtttcgattgtcatagaacaagggaagccctgattttcttatcaaggaaaaaactgaagtacacagctttaggtccatcaacgcagttggttacatgtttattgcagtatgacatgaaaaatcacgtggaataaaagcatcatggcaggagagaatgcttaactttcttccggagatgcttgaacactttgtttcaagatattgtgccattatatgtatgattntccaattattcagttgtttgcagcactggacttgtgaatttgacaggcttgatagctgttttgattatcatagcgttctatcctaagtacagactatttaagacattaagtgatatattca

SEQ ID NO: 30349 - DNA, 286 bp, Oryza sativa
tgtcgcgcgccgccggcgacgatcggacattgtaggatcgattcattgtctgaacgaactaaatgaaatctcagtctctcacttacttagtcagactcatacacgcatcggcacacggacgggagacataattcaggcttgctgatactacgttgacaattgactggctgtaaactgaactacacacttgacaaactgatgatggacactcatgtaaacgtatgaagacgtggacctgacctatgcgaatagcggtgacggagctaatgcaaacggacggcgcgcc

SEQ ID NO: 30350 - DNA, 428 bp, Oryza sativa
gcttgtggtgtgtacaagtattacctatgcatcgcccaacaataacccaagttttagatatgtttgagaaagctttagacgaactgtacatgcctgcaaagcaaagcttctgtgaatcactgtaagacacctcattatcttcccacttttttgtgctgtttggtacaagcattctccatgaaattcaccgatgccatttctttttgcagagaacatccggttcacaagttaaatgcggaaagcacaagctctgctactgacaaagcatatgctgttagtgaaatactgaatgttgaagagaatagccttgtgaattcagaattcctacaatgactaccaactctgtgaaaagataccttcatattcagaattatacaaaccatcgaatttggcgtttggctaacatctctcactgtagtcttgatgtg

SEQ ID NO: 30351 - DNA, 386 bp, Oryza sativa
  unsure (1)..(386): unsure at all n locations
tgtcagatgacttatttcatcagcgatgtaatcttntagtccttgacttgcaagatccctgtataggacatagaaaccacatacatacaggttataagtttgtagcagcataaatatcaatgtcacaagatttnttttagataattttcacaaatatataatatgtgtttgctcaatagagcttttacgaaaaaggaagttcactgactcccttccaatcaagggcggagctacatagagctaggggggtgcccaggaacccggttgaaaanaaaatttagctatagtttgtccattgtcaccatatatatactctgtcagttcaaattaggcacccgtatcaagctaaatttggttcacactagagtaaagtaagcaagtggaac

SEQ ID NO: 30352 - DNA, 460 bp, Oryza sativa
  unsure (1)..(460): unsure at all n locations
ttattgatcctacatatgtcaaaacgatgaaatcatatttgcacctagaacggtcatgtctgggagtacctggttcaacaaaataacgaacgaccgattaatttatgcaggccccaagatatgattgccgctgatcaattcatgatgcccacttttactgctaataaatctttttgcatcgttcagggcttccaggcgtctagcgattggcctgaattctgatatggtgatatatctgaaccgtggagtaagtgttgatcaaaccactacgagggaagatctctgggttgtttctataccatccaaatagttgcgagaataccaggaagaaaatatagaaaaccagctctatatggtgtccaaaaattcagctattatgagttgtatgcttggtanagctggatgcactccgtaaataattgggagtaccatgtgctcattatatctcagacgcttatag

SEQ ID NO: 30353 - DNA, 385 bp, Oryza sativa
  unsure (1)..(385): unsure at all n locations
ntattatttcacatgtcacgctcagaaagtgcccgaatagttatttttgctcaacgtgcattaaaatccgcgtccatgaccggtcggtgtacacaaacgaccatgatgacattcagacccacgtcttacaaacattataaaagtcttacagtaaatgcatgcggataagcgaaagacaacaggagctaagccttgacttgaactggagcgggaacaccactccacaggcattctcgacggcacggacgaagcctactcctcggagaaaccttcatctgacacatactcgtactctggggttggaaaaanatagagcaagactgagtactacccactgtacttagcaagtcataccggaatatgggtatgatgcacggaattatca

SEQ ID NO: 30354 - DNA, 410 bp, Oryza sativa
  unsure (1)..(410): unsure at all n locations
agcttgcagtctttcagcttcagtacacttatggtaaaagnctgagctgactccctcacaattatatagatcagatgtaatttatatctctcaaccgcaaaaccatatgtaccgactcttcaactattaaaaccggtgcgaaatgactctatcgacaatattgatggtggttctcaccaacgttacattgcatgacctggtccaatcgaccgagtcaacatatgggtccatgtgttagtggcctctcttcttttctccctctctctttcctttctcttgctttctccacactctagtatcatttcctcatgtcggggcgatgcgagcccatggcggcaccacggagacgacagtgtctaaggggaggagtttgagcggctagcgaatcgacaaacccatggcgaggctgg

SEQ ID NO: 30355 - DNA, 350 bp, Oryza sativa
  unsure (1)..(350): unsure at all n locations
tgggtttaaattggttttaaaccaaatataaactctacctctattggcggnatcaaaatttactatggacctgttcagattgttactgctattaatcttactaaattttggcattacaaaatttgttgtaattcattctattcaaaggatctctaaaacacctccagaagggagcaaacaaaccctgaggcagagctaatttctggacaagacagacggttgcttggattccaccactatcatctctattacatataactgtcgataccaataaaaattagacgacagctaaaaaaaattctggcttaaggatgtcaatcaacagacctgtttaccataagtcatgtact

SEQ ID NO: 30356 - DNA, 439 bp, Oryza sativa
  unsure (1)..(439): unsure at all n locations
aacttgtgttagntagatatttacaggaggaagaggataagaaggtagaaaacaagctttctgaatggcctgatcgacaattccacaaatatgatgttatgatgttggaagcatcgaacagttttgtgctggacggactgagactacacagttcggttcttctcttttttttgccttttctaaaggagatgcttctggcaacttgaatgaagtattcttcttgtggaagttttaacttctcattaacatctatttttgccaaagaaaaacattaagagaagtgaaaagaggaagagcttaattattcgagtattacatgtctatatttttcagcttgaaagcagcacttgacaactccttgagtacttaatttgttcactaatacagcacatttccaggaagtacctanacaaattaaagaatacttattattatagct

SEQ ID NO: 30357 - DNA, 390 bp, Oryza sativa
  unsure (1)..(390): unsure at all n locations
agttttctacatgcctaagaatgctatttaagctgtgcctaagattgctggtctcaattgtttcaggagggtgatgacagttaccttctcaagctgaaggaagctacttgggttcctcacctgttccgcgtcagcgtaactcagaatgagtacatgaatgagaagaggcagaggatcactgtgaggagtgaagctccggtagaccacgcagctgaagccaagtacatgctcgaggagatagccaagctgacaggttgctagatgcanaattatcggtgaagctttgagagttcatgaaagcttacatgcagtgtttctgtgaagcttttgaagtgcctgtccatgaaagcttttgaggtgtaatagctttataaattatggttctccact

SEQ ID NO: 30358 - DNA, 462 bp, Oryza sativa
  unsure (1)..(462): unsure at all n locations
agcttcattgcggccaatgttggcccaccctatgaatgtacagcctatatgataagtaatggtatttaaggcattctacttattaagcttcaaaatggtcccatctggattaagccactcgtgcacattagtggtcgaccactcactctgccaccgaaagcactggtgcgccgcaacagacttgcaacatcaaatatatgagttcactaacaagtacacgtgtctattatattgcgaccaactggtaatctagggaaaaaagggcagcaacccatgatcaaacataaactagattagctttacaaatactgaaacactctaacggcactagccaagtacctccaaaatgtggtgcaagtctctagacattgccaaagtaaattgggcgtggactatacattntgcaaagcctacagtatgtctgaagttcagtgacactctcnctgaacaaattgtctcaag

SEQ ID NO: 30359 - DNA, 363 bp, Oryza sativa
ttctcatccttatccacccatattctcatccacccgatcgctccgcctccgtcgccatccttcttttcgcgggcgccgggtaagcgccttacgcttcgaccatgccggcgtgacgccagcctgtctctttgacgtcgtcgtcgtccccaccatcgccgctttctcctccaccaccgacgcccacgccgtcagcagtggtgatgacgacgcgcgcaggcgctcgtgccgcttcactcacctctgtctccctctcccctccactcactctctctctctccctccctctctctttctctctcgggagaaggctgagaaggtggagatgaagccggccgagaggaaggggtcgtcatcgtcgtcgtc

SEQ ID NO: 30360 - DNA, 262 bp, Oryza sativa
  unsure (1)..(262): unsure at all n locations
gcgaagcatggaacaaacaagtttgtttccataagataaggtaagagactaaaataaattcttaatttgttggctttgttaggtcctctgctgctgtttggtctcagcaattgtctgtatgtaactctatatgacaaacttgcagaatcattntaggtgtaggttttatccatgtcctgtcccttttgcagtaatttacatgcctcatctgtgacctgtgtgctgacctgtatggtggctatctgcatgtatctctatcatt

SEQ ID NO: 30361 - DNA, 461 bp, Oryza sativa
  unsure (1)..(461): unsure at all n locations
agcttttgtcccaagctccactataatctagagcgcaagctatcaacatatcctccaagatttgattgacacgctcggtctgaccatcagtttgcgggtgataggccgtgctgaagtttaaacgggtccccaattcttcctgcagcttctgccagaactttgaggtgaactgactacctcggtcggatactatcttcttgggtaccccatgcaaacacatgatccttgcgaggtacaattctgccaatctctttcccgtataggtggtatgtactggtataaagtgagccaccttggtgagtcggtccacgactacccagattgaatcatgtcccgatgatgtccggngcagtcccgttataaagtccattccaatctcctcccattttcatttccgggatttgagagggtggagtaaacctgcgggtctttggtgctctgctttcactcgctggcaaaca

SEQ ID NO: 30362 - DNA, 385 bp, Oryza sativa
ctggatggaacattctgataacagctgatacatgtgtactgtttaataaaataacataaggttattattccaatcatacgtgtttaataggggatatataatattccaatgaatataagtttaagaatgcatttatattataatttagattttaaaaacaagtttaagtgatgcgggtattatgttgtgtatttaaagtgcttttgagctgacgctggagtgaagatggaatgcgatgtatgctattcatgtacttggggtgacgggcaaagtaaagttgcatagtttctaaattttcactcaacgctatgtgtgaagcatgtagtcctatgggcattctcatttttgcgatgtctaccagcacataacacaaattttgagtcat

SEQ ID NO: 30363 - DNA, 439 bp, Oryza sativa
tcgacccggatccttaagtcacctgcggcatcaagcttgtcctggcttgctgtttttctttctagagatgcatcatgcaagaatgatgttgtttcttgacaactgtcgagaacaacatcttaatggccagagggacaaggttcaggctcgataggaggttgtgatggtggttctttggagagaaattcaagagtctcgccagaatcttttttaatgaattgaagatcatcctgttctataatagactcaggggaatcatgaagcagaaccgccattacttcctctatcagcatattattagggaggatgcctgtcaaggttttctcataatcagtatgaggatcatccctgaatttaggagcgcaaccctgagcttgaatttctttggaatccggcgatggctccacggaggactctttattcagacccgaagatgttg

SEQ ID NO: 30364 - DNA, 410 bp, Oryza sativa
  unsure (1)..(410): unsure at all n locations
caaccactagtccagcaaaaattncagatcaattcacatgaatcaactgatgattatcatgagcaatggctgcagcggacatgcagacacagtgacgccatgcaaacagaaattatttttaggtgagaacacgacgcacgcgccgttgtggaaacacagatatggcgatgagaattttactggaccgataaagatagattgagatatagcaaattctatggctatttggatggactttaaggataaaaaggcgggtgctaaccaccttaagtgaataaaaggcacacatttactctaatgaaatctaagggtcataatgatatgatctaatcaatcaacgctcggatttctctaataacgtgagacctcctaggaagagctccattatagaaaatatagagttaaataga

SEQ ID NO: 30365 - DNA, 286 bp, Oryza sativa
  unsure (1)..(286): unsure at all n locations
cttacaattgttttgcttaagaatgggggtgttttataagaataagtccactntgactcctttaaaagggacccggatctaattcatgaccctaaaccgcaaaaccggatatctcgacccccgaactatcgaaaccggggcattttgactcccttcgtagttttgaggggggcttcgctgacgtggtagtggtgactagtctgtgggattacatggcgcttatgtggcatttgaattaaaaacgtatacgggggacccgtttgtcattcacacacattaaaaaact

SEQ ID NO: 30366 - DNA, 454 bp, Oryza sativa
  unsure (1)..(454): unsure at all n locations
ggctcacacttgctaagnntattttactttatacaaaattnccatggagttaaaaattgctcagagtttaaactgtctgcaattttatatcttttgctcatatattacactctacaccaaatagtacttgctctacaataggaatgggttagtgtggcaaaaatatagagctgagacggatgaggcattttgtggttaaaagtgttttatattgcacattctaccaaatgctaattctacaatgggtgtcgtgaaaaaaaaatatttattgagtaactctttcctggaagtatttattttttgttgtgcaatagctattctcatttcgacataaacagtaatttacatgaactatgtttttcttgatgtttatccttttgggaagtacaacattattaataattgtggcatggcatctttgctttttattgaagataactgactaatacagcat

SEQ ID NO: 30367 - DNA, 358 bp, Oryza sativa
  unsure (1)..(358): unsure at all n locations
ctaccagtgaaatcactttgaaacttcagcaatcactagattctcttaaaattaaggacaccaaggatagaggaacattacatcttcaggttagcatgagacttttgttttgtcagtttctacatgtgacgtgcattcaacacgtaactccactctaatctaaactattaatacatggaaaacatttactttatttctctactactagtatatngcacgtaccttgcaatgtgagttttaaagaanaatctcatacccgttttgccgtactttctgcacacctcttatgcctgcatatcttttgagctgaaaagtgggccctttagacttggtactctattttttttcttaaaaaaag

SEQ ID NO: 30368 - DNA, 398 bp, Oryza sativa
  unsure (1)..(398): unsure at all n locations
gagagcttanaagaacacacgcagaatcccctacctggcgcgccagatgacggagcgtggggctcctcaccgggagaccgcgcacgcccccctttgccgggtcggccgggggccctgggtgagattctaagctctcggtgtgtggaaggttcgcgagaatggaaacacacaagacacgggcgatgtatacaggttcgggccgctgagaagcgtaataccctactcctgtgttttggtggatctatgtatgaagaagctacaaaagagctggagaaccagagagctcttactctctccctctctgatcgttctggatccccccccacaaaaaatatcctccttctaagtgggcagaggcctccttttatacctcaaggggataccacatgcaccatctc

SEQ ID NO: 30369 - DNA, 321 bp, Oryza sativa
ctgcagcttacacaactcaccttgttgttttttttcgacgaaaacaacacagggctttcttgcggcgatggaggctttcgcgacggcgccggggcattgaggtaggtggggcttcacgcagggcggaggggaacctcgtgcgatggtggaagaactcccccggtgagggcaatggctgtgtacagtgagatttgatggaagcacgcatttgttggcctggagctaggcgaccaaaacggtctctgactcaggcatttgacgccagatccgtcaggcaagctagtggaaatagtctgagggagcaaccaacaagactatatc

SEQ ID NO: 30370 - DNA, 450 bp, Oryza sativa
  unsure (1)..(450): unsure at all n locations
agcttctcttcattcacaagtatctgatattttgtattgagaatgcggaaactagcatctttgtggagaaagggcaaaactcacatgtttagttttacgcgcctataatatggaaggaacgcaaatgaagataataaatacttcttgccttcgataaagacgtatggggttgatgtttttccgaagaaccatcctttcaggaccccaatatggaagtatctttagatcagggcaaaacctgattacctcttcagcccaattattcacaacagatgcgggagccacaacaagaaagggaccccatatgtttttgtcctgcatggtgtacatgtctatatcaaaagcttggcacgcgtgttaatattngaacctataaattacacattgtgtgatgcttctaaaggaagaaatagaacatgatgattaatcatgaatcaaccaagatcaagc

SEQ ID NO: 30371 - DNA, 453 bp, Oryza sativa
  unsure (1)..(453): unsure at all n locations
gcttgctaaggaaggcgatcaaatttgtgtccacactttggctagcaatctataacattgccacacttttctgagacaatgacatgtgggaccaaagggctagaaaaagaatcttgccacaagtgtggcaatgaaccaaacgcctggctaacttagtcaaagctgcctaacttgaggtgtggcaaagtgtggcaacatgtggtcacgaaccaaacaacccctaaaataccctagattctttttttaagcactaaatagtgaataccatggtgtttggctattacttttctaaaaaatatttgttatgcaaatctaaagttacataagaatatcttttccctgcattgggaattatcaacaacactactctcttaaacatagaatatntactccaaagattgtgttctgtgatgtattgtgagacttaacaattgaacttatatgattgtgttt

SEQ ID NO: 30372 - DNA, 454 bp, Oryza sativa
  unsure (1)..(454): unsure at all n locations
agcttggcgcacacgaaagagtacatgtcttataanaatacgcgcgccccctacctggtgcgccagatgacggagcgtgaggctcctcaccgggagaccgcgcaggcccccctttgccgattcggccgggggcgctaagtgagattcttcgccctcgatctgaggaacgtcagcgagagaggaaatacgcaagacactggcgacgtatacaggttcgggccgctgagaagcgtaacaccctactcctgtgttctggtggatcggtgcgtgaaggaatcccgagaggccgagagcgaaagagagttcaggctctaaaaacccttctccagagacccaactcccctcctttcttctctctctctccctttttttcctaggcctgagcctnctttttatctggtcaggggcaccacatgggcctctagctgcttagaaaggaacatgcttttacaat

SEQ ID NO: 30373 - DNA, 333 bp, Oryza sativa
caacatcaatgcgccttcaactggctgattcgtcagttcgttacccaacacggatagcggaggatgtgccactcaagatacgggatttcttcatcccggttgacttcatggtgctggacatggacatgggaaaagagatgcctgctgcatcacctccggagatgggtagaaaatctgcaaactgaactggctagaagtacagtcttggacgtcggactttaaatgacgcgaccttcgtcaataggtaaattggtatgaatccgcatatttgctttcaacaattcgaatttttgcatcatccatgtttgaaattcaagttgcatttagattttt

SEQ ID NO: 30374 - DNA, 422 bp, Oryza sativa
  unsure (1)..(422): unsure at all n locations
ggggggcgcattctctctatttctcgatcttctccgggttggcccttatgcctctggcanagaccaacaaccccagaagcttgcccgcaggtacaccgaacacgtacttatcgggggtcagctctatgcaggtggagcggagactctctaaagtttccccagatctgaaagaaaggttttcggtcgcgggtcttcacaaccaagtcatcgacataagcctcaacattacgttctatttggctacccaaagaaattcgagtagtacgctgaaaagtatgacctgcattctttaacccgaatggcattgtcgtataacaataagttcctatggtggtatgaacgcagtttttcctcatcctcctagcctgccaatctgatggaaccagagaatgctttagagacacaaaagtcgcaccccgctg

SEQ ID NO: 30375 - DNA, 206 bp, Oryza sativa
accaaacgggaaacccaccaaccacaaaaaaaaaaacagcccagcggaggggccaacccaccaaaccaaatcaacccacaaaggagcggcccacaaaacccggagacaccacaagacacaaaccaaaacacgaaaacaaaagcaagaaaaaacaaaagcgagcaaacaggaagcaagacaccgaagaaaacgaagataacacaaca

SEQ ID NO: 30376 - DNA, 431 bp, Oryza sativa
  unsure (1)..(431): unsure at all n locations
agctttatcactcatcctccttctagatttcagttagccaagaggatanatggtaagaacccaccacatgtggcacaagctcgtcatcacaaaataatggcctagaaggcaattgcagactatcaacaccaccttcaagcatctcaatgacctcactcattgttggccgatcatgagacttcatctgaatgcaatgtagcccaacaatgcacaacttcttttccaactcatgcatattaaaggcagtgaccacctcacccaactcttgttgaaccagctaattatacacccatgatggataatacgcttggcttgagctcgacatatcctgcttagagttccttcgccctccaaccatctncaacagaagcattccaaagctatacatgtcagaattgctagatatggcaccacaagctccagatatcatc

SEQ ID NO: 30377 - DNA, 409 bp, Oryza sativa
gcccatgtcgtagataaacaattgaagcgctctgctcaacacaaaaatgtagatgcgcagcccttaatagatgtcaaacctgaagaactgagacctggacaaattctgtttctttgagccacccaccagggacctcaaatgccaaagcaacagtctgtgttctgtttttcaagaagaatccacaataacacgagagaacctaaacgccatgagagggcgtaaataactctataaatgccctaccgatgaatcagcaggtcttctatattccccaccaacataggtagactttggctgtgctggtccactacaccacgcatgtcagacagaagcggttaacaatatataccaattcatcatgatcaacacctgttgcagctagaacaagttcgtgagcagtgtaattctc

SEQ ID NO: 30378 - DNA, 446 bp, Oryza sativa
agctttacaaattataaaatattttaattaaagaacatcaagaaaaaacaaaaacaacgaaagaaaggaaataataccgcacgtcacacagcgaatttcaaaacaatagacaaatgaaattctcaggctccattaaattacctgcaggatgttaagaacagatctaataacatcctggttcttcaggatatcaatgctttggcttgcctgtccaattatctcggcccatttctgttcaatgataagaaaacctgtcaaaactacattttccagaaaaagtataaaggcatactaagaatgtagaataaggaacctgattagggaggctcatcagtcttttgaggtattcatctctcttagtgttatcagattcagcttgaatcatgtggccaacctgagcaagcaaatcagatagcacaaaataatattaatgataaactattctg

SEQ ID NO: 30379 - DNA, 393 bp, Oryza sativa
gttgtgccactctgcttctagtcttccaaacaaaaactaagaaatggtcaaaaagagctggaaggcaatctatggctccagtccttcatgcaattcaccacggtggaagaaatcaaccaattagtgcaactaagggagatgctacagcaaattcatcttaacccgccagtgcaggatgacattgcttggaactggtatgagaaaggtgtttacacagcagaaagcgcttatttggctcagtttcaaggatcctttgtaacacatgacttcattttcatctggaaagcacctgctgaaccgaagactcgttctttggatggttgatcattcaccataaaacgttgacagcgcatagcctccttctcaagcattagccttgaactagatctgtaa

SEQ ID NO: 30380 - DNA, 362 bp, Oryza sativa
agctctacctcttgtcacaaatctccgactatctcaattcttttgcataaatgaacaaaaaaaagctgtataactattgctccctccgtcttaggttgtaatacattttgactttggtcaaaatcaaactactgtaggtttgactaattatatagagaaaaatagtaatatttacaacactagcataattgtgcttatgtagtggcaatctgagaaacttatcacaaatatctttaccttacggaatgtgcaagtttatcccccatactgagatcacaatctttggtgacctgtttattggaaatactatcacgtacttctctataccccctttgcaaggggtccaaaatacgttaactaat

SEQ ID NO: 30381 - DNA, 375 bp, Oryza sativa
taggggaaagacggcgaaaatggtaatgaagatggaacgagcagcaaggaaactccatcacccaagggagctactataccttttgaatacagcaaacctaccattccccctcacaactttgtctacgtgccttctaggcgtgctcctcaatttgaagggacacattaccccgcttggaagcacaagatagaagtgcatctaatctttttgcatccaagtatttggaaaagtgtttgtataggtattgatgtaccccatgatgacatggagctcactatcgagcaagagcaactcatccaccgcaatgcttaagcttccaatccaattctctccgccttgagtccggaggagttcaacaaggttgatgggcttgag

SEQ ID NO: 30382 - DNA, 392 bp, Oryza sativa
  unsure (1)..(392): unsure at all n locations
aagatatctattaattaggaatagtgtgttagtttccttctatctttaggaaagtgtgtttagtgtcctataaagactttatcttttccttttatctttaggaaagtttctttcttgtccgacaaggacttgtatcaacccatgggtataaatatgtacacccggngtctatgtaatctattgctacgatcaatacaattcggcgcatcgccacccttttacttctactatggtttttatgttccggcaaaacttggcacccgacgcagggctgcatcgtcttcgatctccggcgaagggatagtccaatgtccgccggccaagcaattgatcgtctacttgggtcgttcaagctgatcagacatcgactcttgattgtctgttggagaata

SEQ ID NO: 30383 - DNA, 356 bp, Oryza sativa
tgtctaagacccttatctcctgcctcgcatagatcagattgtcgacttcactgcggagtgcgacctttgtggtttttagatgcatactctggtaccatagatccatggtaggagatgagaaaaatggttattacccctagactatgtatcacaagccttcggtaaaatgcagtctattttaggactacttattttttggtacccatagagtatgttaggctatgtcatgacttggttgtaaagacacgccacccagagaccttactcttggatctagcggaaacttttgagagtctccgctccgcccgcatgatactgaattcccataagtgcgtgttcggtgtaccttgcggcaa

SEQ ID NO: 30384 - DNA, 214 bp, Oryza sativa
acccaaacaagggcaccgcagcacggggggaggtttttgatagcgcgccagcagaggaaaaaggaagcagcaacacaagccgacggggggcggcgggagggccccaggcccggcagaggacggccctgagggaggcaaaaccccagcgggcaagcccaccggtaaagaggaaggcacacacagcggaaaaaaggagaaccgcagggacacaaaa

SEQ ID NO: 30385 - DNA, 440 bp, Oryza sativa
  unsure (1)..(440): unsure at all n locations
gacctgcggcatgaagcttccaaaattcatgcttttttatttttcttaatgtcatgtcttctgcaatgaaacacctctgctctcatgcacccaggatatcttggaggctttagacagagaaatggttatcaatattggtttcttatggaattgaaagccttaagaacagtgagaattcattgattgatcttttctgcacattgttgagtcatgctgaaccagaacagcgctctgttgcattgcagcaacttgggaggattattatgagtacaactaaagttgattatgaatatactacttataagcaaaattcactctcatctggttcaacagtaacatacccttttggttactcatacctgngaccgagtagcagcattggctntctatgattcttctatgttattaaggaagcatgcattggctntgcttactgaata

SEQ ID NO: 30386 - DNA, 410 bp, Oryza sativa
  unsure (1)..(410): unsure at all n locations
agcctcgatccatgaagggtgtttattttttatctttangcgccaccacgaattactgtaatagaagcacatgaagcaactaatattgtgaaatggttaatccattattcatggatgctgcaatcaagttaacaagcatcagactatcatgaactaaaaagaaatcgcagcgcaattaagcacatatattggtcctagatcaatgctgaggacaaaaaagaattattagcatgatgttggtcaataaaaaatatataaacttgttagtacctggcatccacaaactctatgttcatagatgcgttccacgtgttgttaactcgatcaacctgtacatgcattcctcttgcatgtgcatcaatagtacttgtggtgaantcaggtccatcttacataggccaatcgttgat

SEQ ID NO: 30387 - DNA, 262 bp, Oryza sativa
caagcacgacgacttattatattatcctgttcactaaggccccccatctgtcgcgccaatgttgacgggggatacctgtatactggatatagacggtatctgggtacgccgataccatgatctacatactactaactatagcacacagaaaacagggattatactggttcaagccccttgataggtaacaagcctaatccacttggcatgggactatatgatcaaaaccaccatctacaataggaataggataactcatcga

SEQ ID NO: 30388 - DNA, 317 bp, Oryza sativa
  unsure (1)..(317): unsure at all n locations
aagaaaacaataataaaagaagagtgactgactcgaaacccnnaaccaaaaacnacagaccaccggggaggagggagaggtgtagaacaaccccccggcaggaggcaaaatgaaaacagcaacacgagaaacaacgcgcgagatggaggaaaacagcggagaaaacaaaacaagaccaagcgggaagcgggagcagggacgagaggagaagcgaagaaaaggaaggggcgaggagagggaaaaacacaggagagggggcgagcaaaaggaaccaagccaaagaaagaagaggcgccaaaaagacacaagaagaaaaa

SEQ ID NO: 30389 - DNA, 417 bp, Oryza sativa
agcttgttaggatggaactagcaacctctctgatagtatatatggccttatcgcggatggaatcataaatagattacgaaagtacacgtaacattctgcttggaagctactccactaaaacattatacttatgagttagccgtacatgatttaattcgtttgagtatggatacactaccacatagcatctttagagattataggtactgtacatgggcggagctagaacaaaatgtagagggatgccacttgcttaatttactctacatcaagtccttgtctaaatttgtatccaagggggtgcacacataatgaaaatgggtgaggtacagctctaactttttttaccgggttcctgggcaccctatgagatactctacctccgcccctggtacctataatcgtttaaaaaaatga

SEQ ID NO: 30390 - DNA, 239 bp, Oryza sativa
aaaaacagattaatttaagaggaaccaacaagggggggacagagcatatgggtcaacgggaaagccaaacagagtcgccagcaaaaaccggataaagaaacacacaaggggagaaaagacggacttttcaggaaaacgggcccctaggaacaacaagcaggaaggagacggaacaaaccattaagataaaaaaaaaacagaaacggagggggaaacaaacgctacaacaaaaaaacgga

SEQ ID NO: 30391 - DNA, 353 bp, Oryza sativa
tgccgaacaaatatatttgatgagctgtatctgatgtaaatataatacttgaggaaacatcaagtattctaaaaggtgcataaatatgtatttctcctctcggcaattttgatttccccgagcagatgactcattacgtttaaacactctgtccgactagtcataaccatcaagcaccgggagtcgggctaggcacttcccacacatgcatatgagtgatatgagttcgtcattaatggaacaaagtttcacggatcggagtttactactcgggtacttttgcaattataaagagcagaaaatagaattatcttatctctatgctgttggattatgccaaataatacttagca

SEQ ID NO: 30392 - DNA, 258 bp, Oryza sativa
ctgcagccaaccttcttttttaaacttgtcaaacagctaatggggtgtttaaatggggccctactgtctcttatgaggactggtttaataataatgttcacccatgtcaaaggacatgttacactttataacaatagcttttttgaagaaccaaatgggcttttctataacgcagttagagcctattgttagggtgactaaaagaaaatttttaaacttaaattctctctatggatctaatgggcatttgccatgatt

SEQ ID NO: 30393 - DNA, 384 bp, Oryza sativa
  unsure (1)..(384): unsure at all n locations
ccgaacttaagcgactgcggcatgtaaccacggntttatgatttcttttcaaaacagcacgaaacgactttggtgaccgatactcccattgctgatccagatgctgttccgatatgatactaaccatgacgttctaccaatacaaaatttactgtacaacgactctaaagattacggatgtgtagatacatcgcaaacgagatttgctttagatcccagaacttggaattagctactggacattatcacacaatttattatctgccggagaggagagacatgttggtgaaatgtatttataccctttctcttgaccatatttcagttcctttttgtcttcatgacatcagcagactcccggcctcttctagaaatgcaacattt

SEQ ID NO: 30394 - DNA, 335 bp, Oryza sativa
  unsure (1)..(335): unsure at all n locations
tcttgtggccagccccaccataatcgatgagaaatggtcattgattatatgcacttcttcatcatgcattgtggcctaaccatatcgtttggacagacgatgtctatggtttttccttccgcgggcatttgcttttagtttgaagaacctggaatttgcatcgccttcatgaatctgtgttacacgggaagcttgtctttttctttggtaatttgatgttagctagtccgagcactctacactctagagccgntctcagacgtctctctgcttgagaaagacatctacattccttggccatctcaagctgctctattatctcaagtgccatgtgg

SEQ ID NO: 30395 - DNA, 385 bp, Oryza sativa
  unsure (1)..(385): unsure at all n locations
aaagaaanncngccgggcttattgatgagtctcgagacctatcacaaaaggagcaaatgggtgtcatcttgaggttagtagttcacatatgtacgttntatatgtttgatttttcagattctattttgagtactaacttagaaataattattgttgtgcacgtttgtgaatgatgaacgaaaggtgatggagaggtttcttggtcttcaacatattgagagatgtacggctattgctttgaacgaagctttatttggtatgatctctagtcataagttaaccatctctaagattcggggccaacgttatgacggagcttctaatatgagaggggaatttaatggtgtgcaaaaattgattcnggatgaaaatcttatgcttttat

SEQ ID NO: 30396 - DNA, 290 bp, Oryza sativa
  unsure (1)..(290): unsure at all n locations
aagagggagcnggaggcngcgaggaagcggagcaaggagccgcacccacccacacaganggaggcgaaccanacgaaagggcagcngaggcnncnaaagaaccaggngaaggcgcngaagnccaaggaggaggaggcagccancaaggacgcagaggngcagaggaagccgaagaagcncaaggagccggaagnggagggagnngagccgaggaggaagaacaaggagcncncgcacgagaaaagggaacacancgnnaagccggacgcagcacaaggaaaanaaacaga

SEQ ID NO: 30397 - DNA, 60 bp, Oryza sativa
cgagcactacaccaccccccccgagcggcgggagagcaccctgagggacatgcctgggga

SEQ ID NO: 30398 - DNA, 212 bp, Oryza sativa
  unsure (1)..(212): unsure at all n locations
gacaggaannncaaaagnaggggccaaaanncaaaacncnggagaaaacttctgacaangnnattctgntatttnggngccgcgccatcactaccttcctgagaaaaatcttatacacaagcttctaagacccagacaagctggcaaaagacaaattggagagaagccaagcgattgcttggcggcccatttcacctcaagaagagaaaaac

SEQ ID NO: 30399 - DNA, 370 bp, Oryza sativa
  unsure (1)..(370): unsure at all n locations
gtgagcagagtttcacatgccttacattngaccttaaaanccatttctcctttcttcttctttgatggcacagcgcattcttcaaagaaatcccacaatggagatttctttttcctggtggctttagatgggtttccctcttggccctcttctccccttacttcacctagtactagctgctgattcgggtgtgcttctgttgctgctatgccatccctattgctcggtgactcgatctatatagatagctggctttgcaggtttacagacatctacaaaaattaaaaataccaactgctatcaagatatattctgcacaagggaaggaatcaaacaagtacaacaagaaaagcattgccatcaatttacc

SEQ ID NO: 30400 - DNA, 301 bp, Oryza sativa
gagccccatctgccatatatgatcgccatccatatgagctgaactaaagttactccaaacattttttatttaaaatgtatcatatttggtcagacctttaaaattatcaatttagtaaaatcacaaaatctaataaatttgcaatattgtgatacttgaaagtaaatcgatctacacacatcatttttgaattgacgaagcatttcaaaaattattaatcgtacccgaagtttcacatatttataaccagattagagtaatgaacattaagctatcaattaataacttgtgcaagtacgta

SEQ ID NO: 30401 - DNA, 200 bp, Oryza sativa
  unsure (1)..(200): unsure at all n locations
cattctgctacgatacccaccatatccatngnggccataaaataaaaaaaagataaaaaataaaaataaaataacataaaataaatttggctccttagtcttccaaccaagtgagtcatttttgcttcactcttgtctttgtttttcttttttgtgtccaacaaagagtcccatgtacaaagagaagtgtgggggtgatc

SEQ ID NO: 30402 - DNA, 371 bp, Oryza sativa
attatacaggtgtaccccactgagcccacgtatatatacgctatcgatggccaatgtggaaagttgtgaggagcaaaattagtttaagtctggagctgtgttgtctcgcgaaaagacaagagaaaaagagttagagagagaggtggcccatatgtggtcgttgtgtcgtggcaagtggacttttttacgtacgtacgtgtgcacctgcagctagcgaccgaccaatcggtatataaaattaaaaatggcatcatccgagaatctctcggggttttctttcttttcgttattattgctgcgcacacatgagaacatgacacatgcgcaaatcaatttggtgccagccgccgccgggctcggcgttcgggtga

SEQ ID NO: 30403 - DNA, 342 bp, Oryza sativa
tgatttatttctttctatgcccgcgcgaaaagagacttgcgtcttcgattcgacttttaagagatgcttttcaacagctcatttagcaatgtaccgacctcccgggtcagatcattacttctcggctccaaagccatttcacttaaataagcggctcccagagccttattcattttctcggactcccagagtccagctgcccagcagcacaacaatccgcttccactcgggaagcctagtctatgatgcccgcagacatcccgaatcacacagatttcgttctgaccactcaggtcatccatctgccacataggctgattctggttacgatttccacaccac

SEQ ID NO: 30404 - DNA, 359 bp, Oryza sativa
  unsure (1)..(359): unsure at all n locations
tacgaactctgaatcgacccgcccaagactcctaatggttggtataacctaaagaaccctgtgctttctttttatgagangntattgcttctttataggcttgtagctttgcttgtgtgcttcgcgtagcttctgtcgttccggaggttcccgaagcgtggttcgcggtcgtcgccgaatgttcggaaagccgttctctctgagcaaggcaagtcacatcattcttgagcatattgtatcccagttacaaaattatttttaatttaaaatattgcattatcgctttatttaaatcccgcgtatcactgtttatctaccataccaattacctttgtatgacctattattaatggatggta

SEQ ID NO: 30405 - DNA, 351 bp, Oryza sativa
  unsure (1)..(351): unsure at all n locations
caagcnggcccgcagggacaccgaacacgcatanaaatagtgtncagnnnnangcaggcggagcggagactcacaaaagattccgctccacccgagagcaaaggctcttggntgcgcgtctttacaaccaagtcatcgacagaagcctcaacattacgccccatttggcgacccaaagaaatccgaggagtacgttgaaaagtaggacccgcattcaaaacccgaagggcaatgtcgataacacaaagctcctatggcggtaatgaatgcagttttttcctcaacctccctagccaagcgaatctgatggtaaccagaaaatgcatctagaaaacacaaaagatcgcaccc

SEQ ID NO: 30406 - DNA, 242 bp, Oryza sativa
  unsure (1)..(242): unsure at all n locations
aaaaaaacgcggcacaaaccaccnctatgataccacacaacacccccaaaaaagagccaagcacgaaaacaaacgaagggtacagccaaataccaaacaacccacacggcccaggggaaaagacgacggaccacaagaggcaataaaccaaccataggggaaaggagacaacgcgaaaggcaggaaacaacaaggcaacggccccacttccccagaaagagcccagggacaccaacggaaaa

SEQ ID NO: 30407 - DNA, 201 bp, Oryza sativa
  unsure (1)..(201): unsure at all n locations
gaagcagagaacggccanggtggtgtgggtggtggnggcnacnacggnngaggagggtggtagtaggctttccgggcgggacgaaagatgggtacaaaggggagcttttcgcggcctcgcgcgcgcggtgcaacaccgtanagagggaagaaaggagatttgaggaggagaaagcgcaaagcagaggatgataaaaacaga

SEQ ID NO: 30408 - DNA, 196 bp, Oryza sativa
  unsure (1)..(196): unsure at all n locations
agaacgcaangccgagcaggacttanaacacaagaagctagatgagctcccacaagccgttgaaaaacagaaagccaaacagaaatcggcgatcaagaaagtcgccgacacgaccaaagctttaaaagtgatcccaggaactaatgcgcaagatgcccaagccattgaagaaggagaacaacacaagccaagagca

SEQ ID NO: 30409 - DNA, 356 bp, Oryza sativa
  unsure (1)..(356): unsure at all n locations
caaaaacgccaccangcgaaatgaagacaactcaacacgcccctcgangcgcgggcacgagccgaccacgtggcaaccacccgccaccattntaaatgataatatcgacaaacgtcgaaaactaagcgcaacaaacccggcgaagcgaaacgtggccagatcaccactccatccaaacaaagagtcgccccagccgctataaaaccagccgaaacgaggcgagctgaggccaaccacggcggcggcggcgaacgaaccatcagttcatcggcagggacaagaacggcagcagctacggcgagagcacgtcggacgacagggaggcgccgatgctgctgccggcggcgaggggcggg

SEQ ID NO: 30410 - DNA, 296 bp, Oryza sativa
  unsure (1)..(296): unsure at all n locations
gaaagacgcgatacataaagtaagcagaggcanccggccggagggagaaccaacggagcnncaacacgacgagacaaacccagngagcgcagggggcaaacacagccccggcaaacgaaacagggaggaaaccggggcaacccgacnccnnccaagaaaagggaaaggcgancacaacgaggggagggaagaccacacgngagccggcagagcccaaccacccaggaaccaangggaagncaaaagaaacgccanccgcggacgcggcagacaaggagaaacagccaaagaagaca

SEQ ID NO: 30411 - DNA, 364 bp, Oryza sativa
  unsure (1)..(364): unsure at all n locations
agacagactgacttaccgaaagggtaaatcccatcttggaagacatgttgagagcttgtgctttatacttcggtggaagttgggataagaatctaccttatgcagaattctcgtacaacaacagttatcaagctagtcttcagatggcttcttacgaagcactgtatggtcggaagtgccgcactccgcttttgtgggatcaaacgggagaacgtcaggttttcgggatggatatcctaagggaagcagaagaaaaggtgaaaatcattcaagaaagattgcgtgtggcccagtctcgtcataagagttatgccgacaatcgtcgnagagatctatagtttgacgaacgagattatgtgacctt

SEQ ID NO: 30412 - DNA, 119 bp, Oryza sativa
cgaaaccaaagggagatgagatggacactcgaacctcaccaaaaaaaaaatccaagcccaacgggggagaaacaaggggaatgaggctcctccacaaaccaaaccaacgaagtctagcc

SEQ ID NO: 30413 - DNA, 127 bp, Oryza sativa
  unsure (1)..(127): unsure at all n locations
agcttaacagaaaaagcattaatacagtaactggaagcacanagcagagaaactaatctttgtgtaaccacatatgcatatgctagcaagggttgcacacaaagccctcattccctaaatgtttgac

SEQ ID NO: 30414 - DNA, 240 bp, Oryza sativa
gaggaagaaaggcacaggggaacggacaggccgggcagaaagaaaggagaagcgagaccggaccgacggaaaggcaagaaaaaaacgacagcgggaagacagagcaaaacaggaaaacaggaaagagggacaggggagcacaaggagacgaaaaggacaaggagaggaaaaagggaaggagcgggaagaagaggcgggagccgagaaagggaaaaaaggcaagggggaggaagcgcgaaa

SEQ ID NO: 30415 - DNA, 283 bp, Oryza sativa
  unsure (1)..(283): unsure at all n locations
ggcangccggcagccagcgcaagggaccgcaaaggccaccccgccaccgcacgagacagccccaccgagaaccccgaggaggcccgccgcgagaacncacngagcggcgcncgccacgggaagaccaggcacggcagcgcacgcaacgacgacgcgcaccaccacgaccagcaagaagacccgggcacccacaaccaggacgccaaccgcaacaacgaaaaaggcgccggagaagggcagcgaagccgcgcggcaggccgagggggccaaggacgccggcgac

SEQ ID NO: 30416 - DNA, 310 bp, Oryza sativa
agcgccatcgagcttgcagaaaacggcatcgatgttgtcgccaccgaggcgtcatggttcgcggacatgaaaataagcaaagggcttctattcggcaagctctccatgccaccgctggtcatggacgaactcaatgcatgctggctcctcaacaaggtggcgctcgagtcttacttggcatttactggtaagaatgacgtgcaaacgggcagcttcgacatattcctcctcgcgatgcttatgaaccggaaggaagaagtacaccagctgcggctgaagggatattgcatggcaaatcagtgacaagtgc

SEQ ID NO: 30417 - DNA, 278 bp, Oryza sativa
  unsure (1)..(278): unsure at all n locations
ggcaacagcgaaccaaacaacggcagcggacaaagacgcgggatgggaactaaacccaagcataaacagagcgacagaaaaaaggaccggaaacaagaaaaggagcaaacagataagcaaaacagcaaaaccgaggagcaagaaggaaaacacggcgcggaaacgcggaagcggagntaagagccaccacacacaaatcaaccgcctcgtgacgcacgtgcgcacaccaagggaagagaagtgacacgcgtccgcaaacggcggggacgagacgggac

SEQ ID NO: 30418 - DNA, 302 bp, Oryza sativa
  unsure (1)..(302): unsure at all n locations
caccaccaccaccactgtggttcgacatggtcgccccctgcaanatcaccaccacacctctactgccttcttctcctcgaactccggcgaccgaccaccgtcagcaaggttggtgatcaagccgacgacgtacggacagtgagagagcaaagaaaatgtggaagtgacagtgtgagtgagtgagagtgagagcactagctagtagcctataggtttcagtagaagcagggagccagggagtggttgtatggaaagagatgggtggagggaacgtgtattaatagggggggtggaggggagat

SEQ ID NO: 30419 - DNA, 375 bp, Oryza sativa
aattttagtataaggacacccacccaaccaaatgggatcagggaactaagactaaagatattttgaaagggggactccaatactaaatatttacatttggtagcaaatggtaagcataggtaaacaaggatttatcagctacacaatggtgatagggtaaatagtggtgatgcgatttaaaggcacatatcaccacttattatagtctttgtggctctcctatagcttgttctttaacgttagatgaatgccaaataagtgatattccccagatttctcaattagaaaataatgctttattacaagatgtttttaagaaggaagataaatatgtgaattttcaaatgggacaataaaaagccccgagtctgaatg

SEQ ID NO: 30420 - DNA, 286 bp, Oryza sativa
  unsure (1)..(286): unsure at all n locations
ccaaagaggcattanatcgatggcttccgagaagcagcaactgaactaagatgtcaacgttattcatcactctaagaaaacatacaacaggaacgaaagtcactctaagaaaaaatacagcatgaacgaaaggcaccgggaaaagaaaaagctgcgaaggatggagcgagagtcattgaaagcattattgctggagtattcagatcaagtccatctatagcttgacatttaatctgctttttctgaactttttgctaggtattgatgcaatccagcttggtgacaa

SEQ ID NO: 30421 - DNA, 372 bp, Oryza sativa
tttttttgattgggagctaccccaccaaccgaatttaaaaagcatggcttgtctgagaaacaaaatgttaagaatgcctctagtgttttacttaaaaatgcttcttatgatttggaaacattctttgtaggcattgcaaaataccttcaccttacaaagacctgaaacaatatttgggagatgctgacattgtgttcaacaaaccgcaatgtttaaaacatgataacagaactgttagttcatactattatgatgtgcatacttgtttattacattgtggtttagatgaatgcgaagaagctacagaattgaggttttcacgtaggcttaacaaataaattcaagacatgcttgcttgtcacgatataaatc

SEQ ID NO: 30422 - DNA, 392 bp, Oryza sativa
caagcacaacagggagagatataattaaacgctatatggcactcgcccggagcagcaatggttaaccattaatgcaacatgatacttattcacacattcacatttcaagtgttaggaagataagatcattagatatgaaaattttttaaacaattgttttaaattattttaacaaatttcagcccatatgccccctcctgtcaaagcaagtatcactgtagaatgtgtgcaatcaaaccatctttaaccaaacataccctctagaatattaaataaaagctttcactttccatcggctaaaatgaaaggtgttgagtacaagtaattttcttatattacactagcagtctagcacaatcgataaaagatattattttgcaagacaaactcag

SEQ ID NO: 30423 - DNA, 336 bp, Oryza sativa
  unsure (1)..(336): unsure at all n locations
tcagcgtgcgaaccgcttccgggaagaaccgatcggngacccgagcgcgtgcgttctggcacctatcaaacccttgtacacaagcgcatggccccgcgtgagattcgcgccgtttttcttcccttctcatattacagngacaaccaagcaggcgtgccaaatccactggacacggccaagtcggctaccattcctgcgcctacatataccgcggcatctcccgcgccattgctgtgcccagagagctcgacacaaatacagggggactcgtcttcttccccgagctttgcgagcagagtcgttcagccatggcgcggcaggagcnagcagcacacc

SEQ ID NO: 30424 - DNA, 362 bp, Oryza sativa
  unsure (1)..(362): unsure at all n locations
tacccacttacaaagaattcctgagnctggctgtgtttagntcacaccaaaattggaagtttagttgaaattggaacgatgtgacggaaaagttggaagttggactttagaggtgtttctgtgtgtaagaaagttttgatgtgataaaaaagttgaaagtttgaagaaaaactttggaactaaacacggcgtcttgtatcctgtcgcacatctcctcgctgtcttttctcaatcaagccactagaatagcacaactcatagaacgattagtctgaaatttattctggaaacacattgcattgtggtgtttcattaagaaattaaataccaccaaattngtcagtattgtactctcaaaaatg

SEQ ID NO: 30425 - DNA, 446 bp, Oryza sativa
  unsure (1)..(446): unsure at all n locations
agcttataaactcaactctcaacgagcgtgatatggacattatccggttatatcatggcataggaaaacaatgccatacatgggaggatattancagacagttagtattatttcttcagctcttatggaccaaggtcctgtacatgttcaactgcctaatcaagtttgctcgccataaaaaaaaatctaatacttttccattattatcaaactattcataatacgttcttggtatatttattagtgtataatatttggccttgaagaatgatcctcatattcgggttgtcgagggagagggtgaggcaagtatgactcatcgcaatggagaagctgaagcatgctgcgaagaggaaaatttggaggcattgcttgaagattattgagttgaggggctttttgttgagtatatccacaacacagcgtgtgatatactcacaaacata

SEQ ID NO: 30426 - DNA, 318 bp, Oryza sativa
  unsure (1)..(318): unsure at all n locations
gatgtcaaatcatatgtagtaacaaaatactatggtagccaacctgcttgagatgacacgcttgtgtatgattaagcgtgacaggccatgatgcatgcacaacatgcctttgctaatccaccttttgattcaaaagaaatggttagtttctctagctcttatgtgcacttgtaaccaggattgatgccactgcaattcttttctctctttatntttagnttttttttcccttggggtcagaattaatgatgggtgatgataccagcatcttgatttagcatggacatctggtcttgagttggcaatcaatcactgata

SEQ ID NO: 30427 - DNA, 267 bp, Oryza sativa
acccctgcggccgccggcccgcaacaattctaagttgacagctatatcgaattctgccatcatccgttattacactattcagcgtagcaccagcgttaaaggccccatactgcctaaaaaatacgcccgcctgcatcatgcagactgtgaatcattagcatcgccgactggaacctcacaaacgctgagaaccgaacccacggatagacctgcgcctgcttaaatttgcctgtgaaacgggcaaaagtgccatatgcacgtaataaa

SEQ ID NO: 30428 - DNA, 413 bp, Oryza sativa
  unsure (1)..(413): unsure at all n locations
tctttgatccatttacacatggagaaattgatggccttggataactactagctgtcgcgtgttgatggttgccggcaattgacttggcacgcaacgctggatggctctgctctttcggtccaaaactanggaacaagtataatatggaaaattgacaggttcttttcaacaaaagcaaggtcctatttagcttagtaatcttaactaaaatttaaatttcagaaatatattttaaaattgtttttgaggttctnttatcatagcttatctttttacattagcttntaaaatactaaggacacatatataagttttttactcataaattattgttttagcttgtaataaaccattttacgatttgcatctgtaggccaaacaattacacttcggatgacatatacattttttag

SEQ ID NO: 30429 - DNA, 289 bp, Oryza sativa
aggggaggagaacgggagaatcggcttgcgggcggtcgggaggaccacatgagcggtgtggacttagcgagaacggaccatgccaaaacccagttttaccccttcactttgttaaggcgtgcgggcgggagaaaattgtgatttttctatcgcataaaaatggtttcgctggaatactatcccttcaaagtgaatcattaaaatgctatcctatactaaggcgtgttcactgaaatgctattttggatctattctgttgctataaatgatttactctatttaaggtttg

SEQ ID NO: 30430 - DNA, 392 bp, Oryza sativa
  unsure (1)..(392): unsure at all n locations
gcttntacacctatttcgattaaatctcaactcttataatctagatctattatgatctaatggtgtagactttntatttctctctgattntcgtgaaaatttctagacctgtagggcaaacgtgatgtctcattttaaaattatcttaataatgtactttttaatgatactcatataaaaatgtagggaggatgtcttcagaaatttaaaatgacgtgtacatcttagttcttatttggttgaatatctaaaaggtgcttggtagtatttaagtttagaaacttgaaagcaaaagagaactcatataacttataatttttaaaattagcatgtgctaatcattaagagctcgttgtaattaaggagtataattatcaggcatcgatgattac

SEQ ID NO: 30431 - DNA, 453 bp, Oryza sativa
  unsure (1)..(453): unsure at all n locations
ggctagaattgtaccataaccaccctgaataacaatgagttgatcatcagtcaacatggaagaaacagtctgctctagtaaatacgagaatcagcaagcaacagctacaataaattcaaacctgctggtaggtgcgtatccgctcctctagggatgaaaacaactgcttccatgcctctaattcangtgcacggccagatgctttcagcaccttcaagcatgcttgacaatacctaaagagagtagtttaaagtcaatgtgtgtaactaagaaaccaggggaaaaactggaatagtaactcagcaaattaccttaatgaatcagaaaccttcccaaccttcacaagcatgtatgcatatatcagcttatatggttgaaatggcaagaggatgtactgagaaataccaagaaacttttgcatattcatacacctctgtcgctgtttgtacattg

SEQ ID NO: 30432 - DNA, 383 bp, Oryza sativa
  unsure (1)..(383): unsure at all n locations
tgctctctcgnttctcttaaccctaaaccacacaaagcacatgttaaatcatcattctatttagcacactntctcatgtcaagcatatctcctgtatttaggcgatcacagagtaacagccacatgaagacccttatcttgttaacacattctgatttccaaatccaggagaacgaccttgggggagaaaggtgtttacacccaaatttggcacctaggaataaaatagagaaaattgccaaagtttggaagtctgccagttttcctctgattgngccggtctgaccgccggttgtcggccggtcaaaccgccgacagtgggccggtgagaccggtggtgtgtggccggcttgacacgcagagtccgagcccgagtctgtttt

SEQ ID NO: 30433 - DNA, 349 bp, Oryza sativa
agcttatgacacccaggcccccctggctggtctgcaagcatgtctttgcccagttgaccttacactttcccccggtgatatcacccgtaccaacccaaaggaagcgacgtctctgcttgtcaagttgctccagggattccttcgtcaccttcaaggcagtagtgaggagataaattggctgcgcttgaagcacagactttacaagcgtggttctcccgaatttgtttgtgagttcgtacctgtgtttcttaaaaagcacctacagtgtcccggagaatatttatgtggagacgctgcttttgcatccagggactttgcaatattggctgctaggcaagaatgagatctc

SEQ ID NO: 30434 - DNA, 461 bp, Oryza sativa
  unsure (1)..(461): unsure at all n locations
ctacgtggcaccttttaaaatgcattgtaccaactcctaataaggtgagtaccaacggtataaaaggaatttaaggtattgggcacttgatcacgcgcacttttgcctaagcaaaaaaatgactaaatccctaaaagaacatgacaggccacacctaaaaatatgggctataaacatattaagcccaggctcaaaaaatgcccaccgatacccttaaaatatgatgtgtagagtacaacaattaatctgctcccgagtgataaatttcctgggtgatataaatngaatgcatctcatctaagtatcttacgatccgagtggctatcccttatgggatgtaccaaagtagatgtgataatcaaatcccaactggtgcaaatactcaactgatggccctcacgaggaataataattgatttagtctttgagcatagaaaatagacccatgatcatgaattcgt

SEQ ID NO: 30435 - DNA, 449 bp, Oryza sativa
  unsure (1)..(449): unsure at all n locations
agcttgttggcaggtgttgagaattctatggtttggtaatctagaactttaccaaagaatagcttttgcagatgggcagccaaccagcctgggtttctggaaaatttcttcgtgactgcatggcatatctggaaacagcgtaacggactcatcttcagaaattttcagccttccttccattcttggaaatctctcttcacagatgagattcttctgcatctttgcagaatgaaagatccactgaagcaatgtgnttctaattggttacaaactttatagggatattttcatttcttttggtcttcatgaattttactgaaatattctttaatatatgagcatcacactgctgggcaaagactctgcagtattttcagtctaataaaaagaaaacttccatgtagagcaaactgaggaacacatgataatcgtgaatctattcaattatt

SEQ ID NO: 30436 - DNA, 427 bp, Oryza sativa
  unsure (1)..(427): unsure at all n locations
tatattgttganctattctcataatagttttatttactgctatcatactacagttaaagttaagtaccaatgcgcgagaattcacttagtatttaagtatgactgaagtacactttgcttgctgccaggccttcaaccaaacaatggtcactagtcaggctgtgcaaaaatcttttatgtttcaagtattccttttcgtagcatattgcggaggttgctaagcanacaaccaatatcgcataatgttgcctaatatttaagtgcttaatagaaaatataacactggagaacagagatggcgtgaggagaggggcacatggatggataagtacgatcgatgggtggttggattgacagagggtgccagtcatatgttatagttatcagttttcaatataccggcacctatagttcggttattgtatgt

SEQ ID NO: 30437 - DNA, 395 bp, Oryza sativa
  unsure (1)..(395): unsure at all n locations
agcttatctttatctgtaggctggtaatctaagtaaatttcttgttttcaattaagctatgattttataatacaaattaatttaacatgaaatgtttttaataactaattatagtttctttaaagtaaaggacgaaatgattttcattatcaaaagcaattcatcttgaccaacttccctcctgatatgcatactcgggcatatactataggaggaagggaaaaaaaacagggccggattttttttactcctttnttcatgatgcatttttctttatccacgatcatcaagtgcgcggtgtgcatgctaattagctactactactaanntattgttcagtacgtagtagtactagacagtntgcattngtacatcattagtcgtttcttgatcat

SEQ ID NO: 30438 - DNA, 409 bp, Oryza sativa
gaagcaggaatactcaaacgcagataaactataaaaatctatgtgcataaaaaagaacatctaccataattcggtcaccacagaaagtggtccatcaagaaaatttcatggactgtgttccataaattatacaaatataaacagccaacactccacaaaattctatgacaggcgaagtaataacatagtgtatgcaatgacatggtcacaactgcaagtcagaacaaacagtcaggctccacatgacttgacttattaagctataatttctggtctctttgtggcacccacgacagaaatatccaaattttgaaccatgcatttgtcgtttgcctcagcccaaatcactttcaagcatcattgactgtactggtaaaacttggattctagcactcaaaatttggacatt

SEQ ID NO: 30439 - DNA, 452 bp, Oryza sativa
  unsure (1)..(452): unsure at all n locations
atgcaagctttttgggtgtctagataatttccgtctcatttcactcccccacctaattactaaaaccagatcacttcatgtgggacaatataaggcaaaaaaaaaaaaacaccttctgtccaatgtaatttctagtaaccaattcagactgacagaagaaaataaaaaaaaaggggaaaaagaaaagaacatcaggtcccaaacaagggaacaaaccaccatggtttggagttgagggggctctgttccactggtccacaatggtccccctcaagcacaaagtctgcaatntattctgtgacacttcatcgatngtggtcatggtaaaatgctgcctctgttcaatagtgccatcgaggaggcatcaccagttatatcatggccatcatgggaatgatcacctaggaggtggatgaggcatcctaantttacacctttcccatgtcttgact

SEQ ID NO: 30440 - DNA, 426 bp, Oryza sativa
aactttgaagaacgagaagattctttgctagctttggttaacaactaaataccttgtaaattatgaatggtcctacagattcctatcaaatgagactaaagttgccacatcttgataatcatgataactgactattcgagctcaactaaaatatatttaattgattagagggtgtgtacttaactatatcacgtaatatgaactatgcttggggtgattctaggactcggcatattttagactccatttgggtctcatcataacaatcttgagcaaaccatgtgttaatctggcatgtggcccatgtatagagcaattgataaaactcatataactgaatatcagtgacattatcaagggtttcataataaagggacttgaatgaaaacatttacttatctagcgtcacgtctctcaattctatac

SEQ ID NO: 30441 - DNA, 294 bp, Oryza sativa
atcgatacagagcaaagacatgggaacagagcaacaggacattatgtgcagtacacattgacgatgcagggatgcacgatgcaatacctgaggacagcgcccgttgtacagcccaatcgccagtgaagcggttggcgatgcagtagctcggcggcgcaaccagctcggcctcgcactccacaaccttgcgggagcgcacgtcagatcgagacctccgttctcgcacccgcgtcgccgttcccccgaccacagcgcctgcagctctccgctaccgctctctggccgcaacccacg

SEQ ID NO: 30442 - DNA, 379 bp, Oryza sativa
tatatgttgatagagaacgggtttcatactatttgtgtatgcattgtatatcaaaggcaaatcacgagtctgctgccatcactgaggaagtgaatcaagaacaaacagctgctagatttgtcgcgagtgaagctcacgaggggcaaagagttgagttgatgttcctcaatgagttgaaccctcttgtttttacaaacgaaaaaattacagctgaggatggtacagctatcaaaaatgccatagttagggataatcagataaatacatctggtccactttattctgcaagaattgaaattttggctctccatggaaacttttatgatgttgtccctgatcattggaccgaatctgagtttgatcaccgcatattaagtat

SEQ ID NO: 30443 - DNA, 313 bp, Oryza sativa
  unsure (1)..(313): unsure at all n locations
ctagaaaagacaaaagggtaggatcaatgcatgctccaaaccaatttacatgaagccagagaggactcacattaaataagcgaataagagcggaatttatgcatagatcatttctttgcatgagagcgaataaataagatagacttacatagcgattaaataatgagaaattagatacttactaataataacaataagagcatnaagaccttgcaacccatattcctgagttaggacctaatgcattcctctcatcaaattccgactggactgcagataaatcctcaaataattcactaaaaccctagactga

SEQ ID NO: 30444 - DNA, 201 bp, Oryza sativa
gctgcttactgatacggcgcacttcactagctacttctgacctctattaagaggcagcaggctcgtgaagcacaaatacatttgatacgaatgcatagctcattttggatcggagatcaagatatggacgatgaaagttggaaggatgcatagagatggctgtaagcttgtgtctatggttttttatattaaggtgaatag

SEQ ID NO: 30445 - DNA, 457 bp, Oryza sativa
gcttcgatcacttctcgaactccatcaatggttactatgagaatcaagaactaagaacctacctgtgtagaagatcttggcccatttctgctcgagcagggtggtggtttcggcgacgccaccctcgacgaccttgatgcagctgccgtcgacgtagcgcggcagcatctcggccagcaacgacgaggtcgccggcgccacctccgacggcttcagcaccacggcgttgccggcggcgatcgctccgatgatcgggtcgatcgacagcactgaaatggataagccaaagtaatattagcttgatcaatgctactggcaataaataaaatgctaactcgatctataccacagataacatgaggaaattaaaagaatatctatgcatgctggttccatctaagcatatagctctagttacataatttaccctcgacgaaaaaaacaggtaaattttgga

SEQ ID NO: 30446 - DNA, 364 bp, Oryza sativa
tgtcaaggttggtacttggtactagtactaccacatgctctattattcatcaaatgttggtcgtggaaacatactatactatgcatttatatgcatggttataccgctttataattgattcatatatatttgcatggttttagcgcttataattcatttagatatgcttttaattgttactgctacacattatagcatgataaaaaaaactgtatgcatggttaatccacacaaaaaaacactcgtagtagtataaattggcctacttccatgactagactttcgacaaagaaatccaaatagactttttctattatatgttaaaagtgctgagagttagcaaaaattacaatttaaggatata

SEQ ID NO: 30447 - DNA, 403 bp, Oryza sativa
  unsure (1)..(403): unsure at all n locations
cttaagcccatgtgaaaacctcaactttgtagattcttcgcatttatctaaaccacagtgtaataaacaagaatgcatgatgaggacaaaaccagctcggatataaccatgactaccttatttattaatcaaccaaagtgcttctatattagatttacttgttatatatttgaacaaacgttgctacacaatgagtttcgtgtggtttcgtttgtagagatacttgcttgggcgaaggaaaagagactgagcataaataatgcatggatgatcaaagaagttgattggggaccaaaccaagaccttctccaagtctacttctacctcactacgtcacttttggtccatagaagacaagagatgaagttctacatgttntggattcggattcgggccttctgac

SEQ ID NO: 30448 - DNA, 331 bp, Oryza sativa
  unsure (1)..(331): unsure at all n locations
taatgtattgggcacttgatcacgcgcactttggccttagcaaatattgcctaagttcgctaaacaacgtgacaggccacacctgataatatgggctgcacacatattacgcctaggccaagacatatgccttcgacactctttagaggatgacgcatataacatgcgtccgagttataaatcttccgggtaatatacaccaagcagacctcatatgaatagcttatgatcctgatggctatcccttatgtgatgcttccaaatagatgtaacaattgaataccgactggcgcaaggattcnggtgatacncttttcggggaataataatt

SEQ ID NO: 30449 - DNA, 280 bp, Oryza sativa
  unsure (1)..(280): unsure at all n locations
tatcattctacccaataccttttttgacttgataacggactaacctatgctctcatgatctatggctgagacagctaaccgcttattctactacagaatgtaacagctcggctgatagtactctgactcaataatctatactatcattaagagacatggcgttacggcacatgacgcttgccgtcttcaccatacgaatgataagctncgctaatagcataccattatttgtgcatttaggatgcccgcaccccttgcccacgtgggaggggatgaaatg

SEQ ID NO: 30450 - DNA, 410 bp, Oryza sativa
agcttgcattaaacacctaagttctcgtgacttgctgagtacgaaagtactcacccttgctctatataaatatatatatatatagttcctccgccctgaagagaaggcaaagtgaagtgaatattagggtttcgtcctggttcccagccgtcgcctgtggtgttgggtgttagaccgttggttccgctgctgctgctgctggtggtgtttcctcgtccgcgtcgtcggttgtattctcgggctgtctgagctgcaacctaagttaaggtaaataagtcctctatttattttaaggattgctatgattcatatttgtcaccgtgggtaccagcactatgtcctgtgactggtaccgagatcgcggtttcgtaggaagcggttcacgccgttttccctacaacacgctccta

SEQ ID NO: 30451 - DNA, 368 bp, Oryza sativa
  unsure (1)..(368): unsure at all n locations
cttgaacaccgccgctgcgtcggcaccgccaccagcgcaaccaccttcagatcacgttaagaaagatgaaaggagatatgtgtacgtcaagaaatgatattaagtggttttctataaaatgagataggtctttcgtgtcaaagccgatgcggcaattgtgataaggtggaatggtaacatggcaattnttgtttacgtggcaacttatgcactatgggcgcacccacctagccaagttattgtaccgctacgctggacagtgtattttcaagtttttacacctaatcgcacccacctgccangttattgtaccgtcaacgcaatttactnntaaaataaattaaatttgctaaacangaggatgaatg

SEQ ID NO: 30452 - DNA, 339 bp, Oryza sativa
  unsure (1)..(339): unsure at all n locations
agcctgcgagccagttgttggccatggttgtttactatatgtgtgaagcgatgcaacgtgtgtgggtggagatgttgggcttctccgcgagcacatgctgagggtacttgcacaccaagagcttaagccagggaggggagtacctctcctacgtgtggctcctcttgaggtacatgggcttggagagcgtggcagagaggcatcatagatcagatttcaagagtcacgtagaaagagtagccagcagacaactaccgtgtaccgaaactgagagctctcatgaaccgagattcaagaggaggaaagagcatntgtgccattgtttcaagagggaaacat

SEQ ID NO: 30453 - DNA, 387 bp, Oryza sativa
ttctccgcgtcgtggcgccggagagcagtccgaacaccgactggatccacctcaacgacaccacccatgcccagatcatggacaacctcatctccacaggtcagtgtgctgtgcatgccaatgccatgacaaaattcggaatgtacttgcttgcaagcttggactaatcttcagtttcagatgctgactttctgagacagtgtgtcagtgtctctcctacttctggtcaaactaattcagctatctgattccatttttcgcattttgttattcaagataagatcaaatccgccaagtcggcgcccaaaatcgaataattgacctggaaaaggaatacttgaaagttgttaaattaatgtagttgattgataaagatcatgtcataca

SEQ ID NO: 30454 - DNA, 367 bp, Oryza sativa
  unsure (1)..(367): unsure at all n locations
atgattacacaacaagcttgtacagaatgattgtggaagccaagaacaggcgtgtaatcctcaagagaacgtgaaggctaccataactcaactgtgtgtactttattatctatctatatatatcctacaccagactcatgggtgcatgatttactttggttggtgcaaacatttgcttaaataacaacacacgcccaacatctgatcatgtattgagtacatcaattcgcaccctgcaaagtatctatgcacaaatttctaaactatgcttangctcctacgaactacagtacgctatatctatggaatcttcaggtattaattgagatgcatgtgtttgtctccattttgttgtttgtggcacatt

SEQ ID NO: 30455 - DNA, 455 bp, Oryza sativa
  unsure (1)..(455): unsure at all n locations
agcttctggcccagtaggtccataaaactttctcactcggataagctgtattattgaaccagacaaaacaacaagcgataaaaccaaagacagattaagcgcctaaactataagacaagtaagcttctccagaccatacaaatgcacggcgagcccatgcgaagggtttggttaagatatgccaaattccgccaaatacacaaatgaaacccaaccatacatgtcccccaattatatcttctaaatcatccacactaacaatccaaccctctcccccaaaaggggattntagtatataaccaaatataacaccggggctaagggtcaaattggtaatttttcttacatctcctccctcaggagcccaggtatcatatataccgccaaaataaagagctctgagtactagaagagaagcacctnatacctaacaaaatatgtgaatacccaaaatt

SEQ ID NO: 30456 - DNA, 371 bp, Oryza sativa
  unsure (1)..(371): unsure at all n locations
gtgctaggatgctatgggcccatgtggatgctagactgcgagaagcttcttcgggccggctctaccggttcgctttcatcctctgtacttttaccttccttcatgtagcatcgtacaataaggtgggcgatgaccgcgttgtgttgtgccttctcctgatcgtaagtaattccgtggaacgattgaaatcttcatgcatgggcttaccggttacatgcatatacacaagaaaaccacttttttacagttacacacganatatgtgtactatcacaatggcctttaacacatggcaaatatatgaatcaagactggaaataatgcttatataatcaaaaacagaaatagacaaagggtaaatcgtatccttt

SEQ ID NO: 30457 - DNA, 441 bp, Oryza sativa
  unsure (1)..(441): unsure at all n locations
agcttaagaaaagttagagcgccttataatatgatatagagtgagtagaaagcagagagcgactgaatttcctggcagccagagtttagtttgcagtgttgtttgttttttaagtcataaggactgtaagaagaaattgttttgccatacatagtttggtggcactaattccatactattgtgatattgtctgaactgcagatggctaacctaaaagggtcactcactagcattacagggagaaatgttaatattcacagcagtttgaaatgttttgtactgagtgggatcagaccagagaaataaaggaaaccatttgggagaactaattggaacgaccagctcacctganagaccacctgaggaattgtgagtcctatcagtgccagggcataataaggcttgccggaactgaaaaggtatctgaaaatggaattattt

SEQ ID NO: 30458 - DNA, 392 bp, Oryza sativa
tttacggaccttaaaactcagcttcacgtaaaacaattctgccgtgtttattatgatcgtggctatgttctatttttttaagtacgattatgtcttattgatataattggctgagttagataaaagcttatattatctttaaaaaatcatcatggaggtatatctcaaataaactatgtgaaaccccgcgcgttgctgtatgagttcagtatgataacaataaataaataatgtgtaagataactaaacaatataaacttagataagcaaagagagaaatagcattaaccaagtgaggatgaacttacataggtacatatgatattattaaacaataatgaagatatatattgaaatattacgtgcatcatgtgggatgaagatttaacatg

SEQ ID NO: 30459 - DNA, 404 bp, Oryza sativa
  unsure (1)..(404): unsure at all n locations
gcttggccatctttgtgtcgtatctatgaacaagaaagcatctaacaaacctgtcaaccactgtacatatattatttgaattaatatatgggtgaaattaagttttaacacaagatggtattagtatcagcgaacgattactattntctaaataataaatggttcgtactctggattattgcaaaagcataatataagtgactctaggagtatattgtacaacttttaactaacgaaataaagaaaacatataatataaaaaagtatatgggtgaaagctttaatttgagattgtattaggagtatcaatgaacgattgagggcttctttattgcaggaattntagagagagaaaaaataatggattccgatactaatcacttcatttgattggaagaaaagta

SEQ ID NO: 30460 - DNA, 284 bp, Oryza sativa
  unsure (1)..(284): unsure at all n locations
gctgtaagaaatgcgtggagggatcttctcggttcatcggagtacaacgtgacggaggttttcgtcgacagttcagaagcttctccatctggcaacccatcttccgctgtgttctggacgccggacatgcagtctctagaagttgaaactatgaggtgatgtttacngtctagactgtttgcagatatttagagttgcattgtctgcagacgagangcaaacgtgtttgttcttgttataaactattcctatgtggcttacgtgactgttctagctgtccattc

SEQ ID NO: 30461 - DNA, 394 bp, Oryza sativa
tttctagggaatatgccaaatgctttcgtactattgcattgagataaaaagccttttgcaaaatgatctaactatacatatggtataggcattagatccagcaacctgagaaaaaaaagtattctttttaactagttcccttttcagaatttacaacagaagtgctcttctctacttgagatgcttgatgatccagaggaatccaccagagagcttgcacttactctattggttgaaattcttgaaaagcaagtaagtgtttctgaagttatttaagagtgtgttcttggtgtggcatcatttaaatgccatcttccatgaaaatgacatttgtcatggtcatgtaatccagcgaaaggcaatggagaactgtatcgatactcttatagttaaa

SEQ ID NO: 30462 - DNA, 387 bp, Oryza sativa
  unsure (1)..(387): unsure at all n locations
cttggacgtgaaccttgcttgggccgtgtgatgatgaggtgaggccaagcccatgaaacaagatgggctatgtcatcgtgggaagcagaccttggctgttacggctgctgttgtctttatctaccggcctggccttcttatccaactgcaactaacaccaaccggccagctgccgtcaggcctgacgtcagcacaagcatggaagcagacgaactccacgtttagctccatcagaccatcaccattcggcgcggattctcgattagcatgtgcactcgtatcatcacaattagagcangttcaatagaatagccaaccgttggctctaaatcatctataactaatataatagtttattcatacaataggtatctataaaaatatact

SEQ ID NO: 30463 - DNA, 404 bp, Oryza sativa
  unsure (1)..(404): unsure at all n locations
gagtgatatgagcagattatcttttctactctattatgccttgntaggctaagcaggatttcctttgtgttccattatggcttctataactattgctactaggtaattgctgcatggtttacagtatgctgaatagtcacgtgatgtaacatcatctggcagtcgccgccaatatctgtactatataagcgacggcattgtgcttgctaaaactcaaaattaatctcagctgagtttctatttnggataaaatgaaaagacgtggctagaaaagttgtagtctctttggtgtgagtgatcagtgatgtgccatgccattgtgtgtgtacatcaaccaacgatggaggtgttaagtngccatgctttatgtagatatttctactccaatcatgttccctttnttt

SEQ ID NO: 30464 - DNA, 410 bp, Oryza sativa
  unsure (1)..(410): unsure at all n locations
agcatgataacatgaaaatgaggatgacatgctctncaaagaaaacgattgagcttgatgacgtcagctcggacgatgagatcagtatagtgctaagacgctgatagcgtagtttcattgccctccaaagaaaacaattgagctggatgatgtcagatcggacgatgcgatcagaatagatgctgagacgctgatagcgtagttacactgccgagtggtatacagaggatcacactggctgtacatgttgtcaagcaacaaattattaaacatatgcatattgtaaggtccttgtcgaaccatgtgatgcagtcagcagccatacttctcaacatggagacatggtttactgcatattgtgtacaatgatgagaaggaatattgaaactctgttatcaatttgtcaatgt

SEQ ID NO: 30465 - DNA, 335 bp, Oryza sativa
  unsure (1)..(335): unsure at all n locations
taaacatcctgataccatgtattctttataccgacaatacttaataaacggaaccctgtattgtttatactgacaaagattaacagctaatcatcctttaagaaatagaccaaataacttcacggccttatctgcttccgctaacacaaccagaatccactctctgctaagactgaatacaggcaaccttcaaattccatactgttgtcgactaaactgatagtgacaactactcagagctatctggaattgttagattatgatgttgcaatgaaaaanatgaattgatggctgcattgcacttataattgattccacaatgctgaatttgattc

SEQ ID NO: 30466 - DNA, 309 bp, Oryza sativa
catgtgcagcagcgcttcatccccaccatcataggctccccgatgttcatcgccactccatcgagctagagcttcacgcccacggtccaccaacaccccgtcaagttcaagcaacccatcctttgaagcacggtatagaggaagacagaaagaccaatggcgcatgttagccccggtgagagtgatgacaagatcccctggccatgctgcgtgtgggagaaggtggtcgtaacagttggagctgcaccggtggagcatactggtggcgacattctctgggttggctggtgggatagatccgttacctgc

SEQ ID NO: 30467 - DNA, 444 bp, Oryza sativa
  unsure (1)..(444): unsure at all n locations
gcttgagagaccttgtgcatattcgtatttttatgattaatatcgnaccataagctgcttttgcggccaaagtacttgcaccatctcttgtagttcttaaatagcttcttcatgactgtgtccagtgctcggtcatccaactgaaaatgtgagaaaaagaanagagtatacaccataatgacacaagcaccaccagaatgacacaagcaccgatatggacgttgagtaagagtgagaccttgggttgttggtcgggcttgtgaatctgccttatatggacgttggcaagtaagagtatgaggtgttccctttggttggacacgttatctttctgcagagtgatagttgaattgcaaataagtgacaaataggtgaagagaacgaanataatggttaagttagtgtgtgagcctgagggcggtgtgattaccttgaatccaaaca

SEQ ID NO: 30468 - DNA, 409 bp, Oryza sativa
  unsure (1)..(409): unsure at all n locations
actacgcttatcttcattaagcaaagcaaattaatagtactagtaatttattatagacggacctgcgtattgtgggtgaggaggagcttttgcatgttgtggtggctttccctcgagtggcccatcttggccttgttcctctctgctcgaagccgatccagcttctgctggtccttggcgtcaactgcaatcgacattaactaatttgacgatcgatcattggttattgatttatgcagnggctgcctccactccatgcgcaattaaggttgagaaagaaacaaattgacgatcgatggaggaactaaggacttactgaatttgtggaagcgggcaatggcggcgaaaagcaatgcatcaaatgcgggcactgacaacagcacacccagcagtagctgcttcttcttct

SEQ ID NO: 30469 - DNA, 448 bp, Oryza sativa
  unsure (1)..(448): unsure at all n locations
gcttggttgatgccgtgtgtcgaactctgtcatggtnacttaggataggttagctgttggtgtggtgttgtagatgtgggtttcgctcaattttccctaattaactgagcacttgtagagcactgtaaggttngatcaatgtttctccttaaaataggatatcttcttaatataaaacgttggcaacggcctgaccgttcgaaaaaaagaatggcaacaggcgcaacctaactaatcttacaactttactcaccggagatgtagatgacgatcggcacgacctcctcacaagtggatctggagtactccttagtcaccagcatgaaagacgaagccactggaagctaacaccggaagaagctccaatcacatctttcatggagccaggataaggagataatgcccacaacccgcttgcgcataaccaaaagaaaccaatgggcttgac

SEQ ID NO: 30470 - DNA, 246 bp, Oryza sativa
gatgtctgaaaacggggcagggacattcgctgctgcgcggctgcatttcttgggccatattgcctcttgccgatgtaccctgcggtgccagccgatgcgggtgctcattccgctgttgagtacgcgatgtgcctcgcttgattccctaaactggtgggtggtcttgagagagcagaattcctcccacaccgcttcggttatttgacggtattcatcgaacggcgtatgaattgccggcgggttgac

SEQ ID NO: 30471 - DNA, 344 bp, Oryza sativa
cagttacctgtccgtaacagcaggaatgagccttcatgatgtgcgaggaaagataccgtcttggcaaccttcttcaagcactccttactctgcacgaacaaccaatcgcaatttcttctaacattttagtccaatcgaatattaatcaagaagaagaagagggagaatctctctctgcataccaggtagggagggtcggcgacgacgatccggtaggcgtgcttcatcgccgccggaagctcctccggctggttgtagtcgtagaaggtgaagtcgccgccgtactgcccgaaccgcacgtcgtactccagcagctgcgcggtcacatcagggctgctcgtctt

SEQ ID NO: 30472 - DNA, 372 bp, Oryza sativa
  unsure (1)..(372): unsure at all n locations
ctcgaaatgctcaagattgtacggaccacatcagcaagacatcagtcttggatgattatggcttttacgagaaccggcaaaagctgatgcatgagaagagagctaatcagcagctgcttaatgacaggcaagcattctattcacacatagagccttgtgtggttaaaaaacctgttcagaatgctagcaccactcagagctattggtggtgataggttctgatgcctctgtttttatgcactttgtacagggctctcttgacaatgcttcacatgaagaggagaagaatgcaattgatgggaaatccacagctcaaacgcaggcattgagcaagganggcacccctaatggctgcgaaatgctgaacgcctc

SEQ ID NO: 30473 - DNA, 433 bp, Oryza sativa
gcttgcagtaagctgagatttcttcttttgagattccttgggcaatacttataatgttaagattatcatttaactctttgatttgtgacatcaagcgttcctcttcagaagaattaagcaatagtatttcgtgctccaatccctcgatgaccttagatttgtcttccagcattgcttttgtttcactaatcatcatagcttcctcttccaacatcactttgagattgttgttttccttgaacaactctgatgacaaactttcagaatgttctaactcagaccttaagattaggagtgcagctccattttcagccagctcttcctctagcaccttttgatgtttcagtatgctttccattgcagaaggtttcttttcaagttctctctgaacactgacaagggcatctgatatttcaataactttgtctttcat

SEQ ID NO: 30474 - DNA, 442 bp, Oryza sativa
  unsure (1)..(442): unsure at all n locations
aacactgacagtttcttaaaagacttgagagttgcaccaaaagctcgaatcatggcaaatgatgtgagctttgttaaagtctgaagaaatcttttgtgatgtttaatgttaaaattcgaacactggagggtcataaaagacagacaacagttagagtttcgaagcaagatcagatatgttattaacacctcataagatgcatgatttttgtgagtggactcaaaagctgcatgatggcatgcatacattgttcagtctacttcagaaagaaaaataaattacgttcattggaagttcaaatcgaagtccattcaaaccaaacatgccggacataataataatgtctgaatcgttgaatgttaaacacaatagattagagaaaaaaagcaacattccgtactgtaaaaactactactangaataaatattntaacatggatac

SEQ ID NO: 30475 - DNA, 443 bp, Oryza sativa
  unsure (1)..(443): unsure at all n locations
tgtagctcggctacatccatgttctcatgagaacttntcattgctntgaagagagcatggttgcctttcaagtttcaacagggctgaggcaactcttgctcagtagccaggacatggatggcagctgtgttaagctgtgttcggaagtacgtgataccaacccacacagtatacacggaaaacggagcggntcattagtgcgtgaattattaaatatntgtttttttcaaaaatagatcaataatatgattttntaagtaactttcgtatagaaactttntttaaaaaaaaaaacaccgtttagcaatttgaaaagcgtgcacacgaaatacgagggagagggtagtaccaatgaaggctcgatatntgttgggcctcacttgtcagttagacccaaggccatagaaggacacaagtctcattgtgcaatctaaccataagta

SEQ ID NO: 30476 - DNA, 348 bp, Oryza sativa
tataatttcttaaccacggtgcaccaaatcaagcttcttaaataattactcggccatcaccttcaacccaagataacagaacttaactgcatgtaataattcaacatcattctagttcgttgtctccaacctagcttttgtggcgatgacgaccatgacaaagtagctcacgccatgtaaaacaacacttcaccggtgcatcctatgacaccctccttggaaaaacaaaattcaacgtagtatacttgtgctctttgtaggcttcttccctcggtttcttctatgcaaaacgtcggaaatatattttttgttcactgttttatatgttggtgttaaaaaaggaggggg

SEQ ID NO: 30477 - DNA, 338 bp, Oryza sativa
  unsure (1)..(338): unsure at all n locations
gatcttaagtcaccgcngcatgcagctgaaaaaatgaagaccattatttgtctcgtgaggactccttctgccattactgtcaatatgagactaagtggccattcaaggacagtccggaaaacgcgggacaacactattctgagagcatatagatgctggactctggcctacacaaactatctgaaaaatcttgttaattaagtcctgataggagctctttaacttgggcttaaccttggagcacatgttatagctgagatttttccggaggggacggggtgtatctagaagtgctggaatttgcaataacagattgtgggtaaactccatattatctg

SEQ ID NO: 30478 - DNA, 290 bp, Oryza sativa
attacgccagccatctagatctcccgcactatgtgcacgcacgatctaactgtggtccgctactaagatagacacaccgtcattggcttcacctgatgatgatgacgatgatgatagctccttcgtccaccaatatgtgccaatcatgggcgcagcgaccgtgatacacaatatacgctactatacgtacgtggcgtgagtaattaattaacaacacgtattggatgatttcatacgcatgaaattctagaccgtgcaagtctccgacgagtatctattgactatgtata

SEQ ID NO: 30479 - DNA, 220 bp, Oryza sativa
atgcttcttgcacctcgtaaaatgtatcgggtcagaagagaggtcatcagcagtgatggcatgcttgcacaacaactataacatatgaatcctattactgagaaacgaaagacataatgggtgaaaatgcagaatgtatagttcacgagataatacatacacgtgcccgcacaatgatgcaagacactgaagccaatcacatagattaagaccataatct

SEQ ID NO: 30480 - DNA, 406 bp, Oryza sativa
  unsure (1)..(406): unsure at all n locations
agcttgtcaaatagatgctgcggctttctcctatgttgtcccttcgaccttcgccgcttgcctccgtcccatgcctttgcctatctcctcggttttggtaggcctggtcgaaggtcctcgtggtatacctccaacaagcccctcacggcaagggtgagtagggagcttcggccgaggctgtgcaaatcgtgtggtataccatgaggcgcctccttccggccgatgttcctgccgaaacctatattntgtacttgcgaaaaagtctggcgttttgcattagcagatctggtgatcaatgttctttcctttcctcgcttattattggngaaatggtngaatatgttgggattctcgtgaacaggaatgggctagatgagccggtctgccgtactttcgggctttcact

SEQ ID NO: 30481 - DNA, 351 bp, Oryza sativa
  unsure (1)..(351): unsure at all n locations
tgggacttgatcgaagttcgcggcttgtacgatatatccaaggacatcagttctaaggcccattntgtgatccgcccgtttgctntgtgattatgaagtatatcgtcgagcggaaacgatgtaaccaccgtgaccgagtgaccctggaagtagtgagataatttcctgacggtaattagaacaccatataacagcttctgaacttgaggatatcttgtcttggagtcggccaaaacctcgctaacgaagtagaatggtcgctggactctctgaacatggccttcttcttcacgctcgacaaccaataccgtgctcacaacctgagaagttgccgatacgtacagtactagc

SEQ ID NO: 30482 - DNA, 443 bp, Oryza sativa
agcttcatcgaagcttgcagcgatggacggtatatggaaccgggagtacgtactcttgagggtacagaatcattttcatatcttaatcttaactaattaaaagattcatatttttccgttcgtcactttcccgtttcatccgtttttcgttcgtcacttcagccgcgatcacccgtcgctcctcctaaactctttttcatcctcagaatcggattaagaaaaccaagtcataacaacagaatcctcgtatgaatccaatcttagacaggcacttttcaaaatcagtgtttcacagcttccatacaaccaaatcagatgccataacgaaagcaagatcagaagataaacagcacaatccaaaaatttgttctaccttcagccaccgcttgagagacaccatcgtcattgcgtcatcatctacaaaccgctaaagcctgggctcc

SEQ ID NO: 30483 - DNA, 367 bp, Oryza sativa
  unsure (1)..(367): unsure at all n locations
agcgacgaaacccactttgacaaaacagctcccactatgcaagaacttcaactttggtgtgggagaaaagagagcaagactgagtactacccactgtactcagcangtcataccggaagaggaggtatgaagcacgatataaccaaaggaggctaggggttcttctgcataaagctagcatttanaagcagtagttgaaagcagtaaaacagttgtagtaattatcaatattaaccaaacactgtccaacgctacaccacgttgcaacaggcccaaccaaccacctgaactacacccgttcattaagctaaactacgggtgagactaatcacggtgaatctggttgatcgcccataaccgcgggcac

SEQ ID NO: 30484 - DNA, 449 bp, Oryza sativa
  unsure (1)..(449): unsure at all n locations
agcttgtgctcagatgttactcctcgtcgtcgtcgcgtctatcaatcaatccacatcatccacatatacgtgtcatacagtattgtcgacgaccgaaccagagcagatggttgccggtgaggacacggagttcctgaaccacctcttgctgaaagcgacctatatcgtcaggaagccactctaccaggccacaatggcccaattgtggagagtggttgcatggcgtangtgctgcctanaagaaaggattcctcgtgactccatggacgacatagctgcccatgccggtgttgntggcaaagacggcaatgacaacgatgtcatcatcattgaggagccgcangtgcacttcaaggtggtgaggtcccgtggcagcccggaaaagcagctgaccatcatatgtgacagtggcagcagcgacggtgcaggttcttctgaacaccaaaaca

SEQ ID NO: 30485 - DNA, 439 bp, Oryza sativa
ggatgagaaaatctatagggttaaactcataccaaggaaaaagagtattatatgaccgaaataagtattttccagaggaagaatcctcccctggattctgcgcaattttaagtccgtctcataccaattcctctcgacacatttaaaagaatgtggagtatggtagagattttgtgaataaatcagcaagattatcacatgacttagtttgcaagatgtttatctctccctgttgctgaagctcatgaggataaaataatttacgagcaatatgcttagtgatgttgctcttaatataacctgtttccatctgaacaacacaagcggcattatcttcatagataatggtaggtgagtccaatgaaccaataccacaagatgttaatatgtggttaaccattctgcgaagccatacacattcacgtgatgcctcatataa

SEQ ID NO: 30486 - DNA, 363 bp, Oryza sativa
gcttggccatctgcttgacatcgtcgagcggtctagcgcatattgcagtctttgcatcctacgctcgaatatggaatgtggtattctacatcagcatctaatatgcttcactggatattccgatgctgattttgcgggttgtagaatctatatgaaaagtactactgcaacatgatatttgcttgagccatcattgattgcatgtatgactaagaagcacatctactgctcgaactaaatatgatgctcctgctatatgttgagcacagattcgatggcttttatatgctataagatattgaggtcttactttcgagagagggcctctcttttgcgagaatactagtgctagtaacattgctg

SEQ ID NO: 30487 - DNA, 251 bp, Oryza sativa
  unsure (1)..(251): unsure at all n locations
atgacgccacggacggcacgatactgacgggcgaccacgcgtaacttcagagagacggagtgacacggaatgaaacaattcccgtgcttggtggggatgaaacaattagagtccttaatggcatgttttgaaaaagttgcaaattgagtggcaaattctgaaggtggtgtgaattgagtggcatattctgaaattctcaggcacggggattacgaattcatctgcattatcttttaaatacanattctctc

SEQ ID NO: 30488 - DNA, 198 bp, Oryza sativa
tcgcgccaccttctctcggatgaaggcttgacgtttccgggcctgccgtcgcactttctgtcggaccggccttgcgccccgccccacagggagacagtgctcaatcacctccctggggaccccgggcatgtccggcggtctccatgcgaagacgttcggcattgcccgcaagaaagagaccagcgcgtcttcctattt

SEQ ID NO: 30489 - DNA, 269 bp, Oryza sativa
acatacataaacacattgacgttgcgtccctcttaatagcacgggattcctaagactcaatgttgataagaagaaaagtataccgctacgaacgccttcttttcatctttctttcattgtctatagggacgccaatgccataccggttcaacatatattcttgaaatgaataacgtggttacttcttatggtccatcatgacaaagccgacactcgtcctttaccaccggatatggatattcggcgccaagccccttgcttgcccttca

SEQ ID NO: 30490 - DNA, 426 bp, Oryza sativa
  unsure (1)..(426): unsure at all n locations
cggatcttaagtcaccgcagctgcagctgattagttgattataggaagatttatgattattctcggcaatggcatactcggctggccgaagcattatggtcttatcggatggcttgtcatggatcgatccaggtccctccttataaacttgtttatgggcatgagactgttttgccatgggaagttcgaatcggctccaggagaacggaattacaaaatgatttaacagccgatgagtattataaccttatggccgatgagagggaagatctagttcagtcacgttttgtgagcccttgcaaaggttactaaagataaagaacgagttgctcggcattacaacaagaagctaatacccanagattttttggaaggcgaacttgtgtggaaattgattttgccgattggaactcgagatagcaaatt

SEQ ID NO: 30491 - DNA, 398 bp, Oryza sativa
  unsure (1)..(398): unsure at all n locations
ttctggcctacagctgtgtacgatgcggataagattgtgcggaccaatggcggcaaagcttaccggcaaggttttttctggcctacagctgtgtccgatgcagacaagattgtgcggacattgcaagggtgtcaattatttgccagacaaactcatttgccagcccaagagttgcaaaccattccgttgtcctggccgtttgcggtctgggggcttgacatggtcgacccgtttaaaagggtagtcgacggttacacgcatctctttgtggctatcgacaaattctccaagtggattgaggctaaaccggtcatcacgatcacagcagataaagctagagattttntcatcaacattgtgcatcggtttggagtacctaatcggatcatcactgataa

SEQ ID NO: 30492 - DNA, 352 bp, Oryza sativa
  unsure (1)..(352): unsure at all n locations
gcttgagctgaattacaagatgctctattgtcctatattgtatactagaataggaaaagtgtanagtagaaggagtctgaagaattccggagttgtcggtaatcttctccctattttttttctatttattactctgaattcaatataatattcttcttgagtaatttagatttatnctgtgagaattatctctttggtagttcgtaaatagcatacgggattattgttcactataattaattaaaatatagtgattgctntggtgagttataaacactaaagtagatattaattgcttagacgtggtgtttaggtaattggtatccagtaattgttgcgtatcccacagtgt

SEQ ID NO: 30493 - DNA, 381 bp, Oryza sativa
  unsure (1)..(381): unsure at all n locations
aatcatctctctggatgttgtttattggatagcatgcatgcatctaccccggatcagtagaattattcttttcttgctctagtggaagtagagccatatgcattggaaattgttgtcatggggctagctaggtacccaatgttgcagcagcactgtacgaaccgtctttcttcttcgcacgtagcactgcagcttgtcttgtaatggttttgggatgcagcacagattcatctgggccgtcgtgttttccggcgggttgtactgtcgattgctgcaaggcaggataatcaattaatatgatagagatctgatgaactgttgatagactaactgtgaatgctnnttaatttctgtgcatatatatatgtatagaagaattgg

SEQ ID NO: 30494 - DNA, 407 bp, Oryza sativa
  unsure (1)..(407): unsure at all n locations
gatagccaaacccccagagatggtcttaggaaaaccgtttctctattctataggaatctttgactacgaaactactgttcttttttcgactaattgcacatgtccaatatacctggtaatcactaaaaagaaaagaaacactactgtgactgaatcaccttatgaagtatcaaaactatttgggagcaaaatgttntgacaaattatatgctgaaaagacttgttccttctgtgaattaaggattagtttggagaaatatgaatggatggatgtcgttataattctgaatagactgaaccatcgatacatagtctcttgtttgtccattcattntttttctagaatgctaagtaatttgttatatttgtgatgaccagtcagaagtgagcaactcgtgctagatcat

SEQ ID NO: 30495 - DNA, 427 bp, Oryza sativa
agctagccgcaatacacaactccgtttgttttatataaaaagaacgactcctaactatgaattccgctcattcagatcatagctcaatgttggttattatttttttttaacggagggagtatgtagatacatctgaaatgttaattaggcatttaggcagattatataggtcgaatgcataagcattgcaaaagtactagtacacgtgtaaagaaaattgtcttattaattcctccgtctctgagtgggttcatatttcatccctcccattgatcccataataaatttatttttcagctaatattacacactataatatataaaagtaatggctccggcagtgggctcagttacataagaagtgtgatgaagatggagaagttttgattgtcgcatgtcttaagctagagatgacggttatgtaact

SEQ ID NO: 30496 - DNA, 357 bp, Oryza sativa
tcgaggaagtctaaggatgctaattcttgtggaatgactcctgaaagctgatttgaagatagatccaaagcttccagctgcttcagcccaccaagttgagatggaattggcccagtgaggaagttatgtgacatatttatcccatgagttaaaacaagttccccaacaatttctgggatgctaccattgaatgcattattggagaaatcaatgaatacaagggttcttagtatttgagcaagtgtggtgtcatgacctttgtatgtgagtgaggctttatatctatatactagtcctacacttggcacagcatgatccatgaccaatgatgtatttgtgtctatatgtagcatcgac

SEQ ID NO: 30497 - DNA, 420 bp, Oryza sativa
  unsure (1)..(420): unsure at all n locations
atacacagactgatgctcatactagctctgcactgattggattgtgcatataccatgaggccatgattcgtgcaaaaggagagagctttcgtgattgtacttatatcaaggctttgacttagtattacttggtctgtcacatgggttgattcactccaaattgatggatggttgatttagttgccaacagtagattgcggaaaggttgaatgtgctgcctgaatgttaagcgcccaatatttctaagtccagggcatgcactgtaaaggtggaattttctttgtacttattggcatgaaccgattcanaatggccgtagtcttccatctgtangcgtgctgctggcagagtggccaagttaacatggactgtaattttgttttatgtccataaagctacatatctgatgaacgccaatgc

SEQ ID NO: 30498 - DNA, 423 bp, Oryza sativa
ctcccattgcaatgcatttatacacaggtacaggcataaagtagaaagtataaacagaatggcatcatgcaccgaagcttcacatcatcttcagtagtgtagcactgaagagtgaagacatctgaacaaatgtcataagacgcacgatgcaaataacaacaaagtgcatacttaactatccatcatagacagcaagatcttaagtccttgtctgccttagttaaagacgacagacaaatcaccaggcagcacacacaccaggcaatgcagtcatacactgacaggcttcaattcaagttcatcaaatcaaaagtatataattcattacatgaatgagcatagacaaaatggcaccaatgcttcaattcaagttcaccaaaaagtataattcattacttcaacttctcataaaacattacaact

SEQ ID NO: 30499 - DNA, 372 bp, Oryza sativa
agcttgtcccgtcgctgccgctggagacactgtgctcgccgttcccactgcgccagtacggcggcttctggctaccggagggcatcctccccgcgttggaggccattcacaccaggttcgagacgaggccatccgacgtcttccgtgcgagctttcccaagttcggcaccacctggctcaaggcgcttgccttcgcgaccatcaaccgggacgagcacccgccgtccgacgagcaccacctgctctgccatcgcgggccgcacgactgcgtcaagttcttcgagcccaccgtcgccgccaccggaagcttggacgacttcgcggcactcccttcgccgcgtctactgtcgacgcatgtgttacgatccgata

SEQ ID NO: 30500 - DNA, 401 bp, Oryza sativa
tctgccggtctttatagcacagcgctagaagacctatctctctctctcactgactgtgggccacagctaatggacccaatcctctcccaaatacttagtatttggcttcttgagccggtctgatttcttgggctgcgcggttggaccggccctgggctgtgtgctccttgtactgtagtcgtcatccgttgtcgctgctgtgacaataaggctagggttttatttttatatgctagaattttggtgggttggtctcttttggcccttccatgggcaacattttaaggtttaatatgcatccccggggtcccgcgggtcacccgcgggtgaaatgcctcccccgttcccttcccacaaaaatgcggtgccccgaccccacctgtcaaaaattgaacccattc

SEQ ID NO: 30501 - DNA, 371 bp, Oryza sativa
  unsure (1)..(371): unsure at all n locations
agctntagagaagatggcatcatacatatattgaacaaagagctatgtcaaccaaaaagtaagacaggccgattaaagaaggagatttagtcttgaagaaagtgctcaatgaggtagctgttggaaaactcgagtcaaagtgggaaggaccattcatagtcaaaaagaagacagaaacgggagcattcaagttagcatatcttgatggtgaagagttaaagcatacttggaatgctatttctttaaagaaattttatgcctaaaaaaaagaataaaagaaaaaaagaaaaaaaaaagagaaggagagagagaaagagaaaaaggagaacaccggagctcgagtttgtagtatactcactcagatgtaaata

SEQ ID NO: 30502 - DNA, 335 bp, Oryza sativa
ttcaccagcgaattgctccatcttctgcaatggccaccaccagcgacgtcccagaggtaacttcatgacactctaccttttcttttcttatttctcatattagaacaacaaaacccttagtttacttcatttgcacctcgtattattcatgttcaccccttttactgttcatcttactgtagcaaatgagatatcaaatagcgattccactagccgatcatgcattatattattttcttggatcgatgggtgacgaggagcccatggaattcattaacgttgatacaaatcgtatttcatttaagcaatctagcccttgcatcccgattggatat

SEQ ID NO: 30503 - DNA, 430 bp, Oryza sativa
  unsure (1)..(430): unsure at all n locations
agcttgcatgcataggtcctttagtatatttctgaatattngntagcaaattatttgaaatatcagtatgatgctttntacttaaagaggttgtcatctttgtgtctttgattttttggggtttgcaagaaggtaaaactgttgatactctggagggtgcaaatccagccagcttggccaataaggttgcaaagttagctgggcctgccagcgttgctgagtctgctgtgcctgctaacctgggtgtggctgctgggcctgctgtacttgaaaaggttcaagagatggcacagcanaatggagcttctgccactagtagtgcagaagatgcattgaacaagagattggagcagcttgtcaattcccatcccgtcttctttattatgaagggaacccctgagcaaccaacgtgtggtttcagtcgaaaagt

SEQ ID NO: 30504 - DNA, 463 bp, Oryza sativa
  unsure (1)..(463): unsure at all n locations
tatattccattattgaggaagtgttttctgtccgcacttgttctaatcatgtttactgtggacttgcattattggctgcttgaagacgctgctttgagaacccaggctgcnggcaaactgaacctttttcttgctccttgtatctgctcaactattgctttatattcatttgctagcgacagctttggttgtggtatattacgatactgctgcttgagtctgttaccgtcactgtggttgcttaattttcctttcctttgtcccttntcttctcatgtatggattggactagtagaagtatttccctcactgtattcctcgtgtcaatttctattatcctcggtgtagactggtaactttctttaatttaccctcgtttcgtaatatgtatccttgctatgtgtgatgttttacacctacttctgtntgacccattacaagcttatacaagctgcatatatat

SEQ ID NO: 30505 - DNA, 434 bp, Oryza sativa
  unsure (1)..(434): unsure at all n locations
gacctctaagcgactgcagcatgcagcttatcgatcgatctatggatcctgatgatttgctgtaactaaacaggaaaatatggtattttgcaaggaagcatgcacctcgttttcctgactgtacccagcaactnttgcacgagaatgatgtgtgtcactctctgtatcattagctaagctctgggatgatggngcttacttacctgcaggtagtactgctgcttttgctgatatatngccggnggttatcagggtttcaggaaagccatgttgtgtactcctacatgtaatgtgttcatagagattacagggtactgctgctacatatgcagtgtggaggaaatatttttcagtgcgtactggaggtctggagccatggcatctgtgatgtgcaatatccttgtgcgagttcaacgatagatggaggcgcttac

SEQ ID NO: 30506 - DNA, 402 bp, Oryza sativa
tggatgataatactttacttcaacacttatgtggtgatattatggaagaggtgatggatttaagtggtgtagatgataattattctcaggccactttgaattctttggtccccttctctaatactaagaaatctgctaagaagggtaagaaaaagaaatccataaaacaatagtttcttatgaaagggattctttggaattgtgatgggtttaaggacccaaaaaaacataagttcgtttctgaattaactaagaagcatcagcttgattttattgctttgtctgagactattaaaaaagaattttctccaaatgcacttaaaaatctttgtgctggcaaagaatttttgtggcattgcaaacctcctagaggtaagtttggtggtcttctattgggtatta

SEQ ID NO: 30507 - DNA, 272 bp, Oryza sativa
gcatcccatgctccgcttgcaaaattagttgaggggaaagattcctcttatactcctctatcttttcccccaagaatcggactttatcccgaagaaatcaacgcggaatcgaattcgctttcgagtttatctctccaactaaccctcggttattccggcttctattactctcggttggagtccgatctcttcaatccaagcctataaatagcatcccctggtcgtcctctttcgtttgccccaactcccgagctccaccgtcgcccgtagag

SEQ ID NO: 30508 - DNA, 439 bp, Oryza sativa
gctttgctgcgatcggctagattaacttgtatataatccttataagccgatgcaatacttcaacatatgactcgtcggctaacactcttatgaaacattagtatgaacctatcgacttaacaagatttagattatcaacagtctagtagatcgaacctagccgatgcagcaccagattatatataataataatataatactcaataagccgagatatctgtctaatgtgatggatataataaatttatttaaaacaacattgggggtgtagagatatatcggctaaggcaaaagatcagatctaaccgagatagtcacaactaaaccgatccatctctaaacacaatgcgatgttaggtaggaaatatattaaccaaacaagagcaatttaagaggacgaagcgatgcagccttgaacaatgccaatgtagccaataca

SEQ ID NO: 30509 - DNA, 346 bp, Oryza sativa
tcctttttgctgttactagtgtcatattctttgagccatctttgttatcactactgtctaggacacgagtagtccaataactaagggcaagtgacttgggatttttattcaccattactatctgtcattggattgtgtaccactcatattcgtatatttggcctttctagctccacttattacttctggacagcacaggttcttgatccctgcaatcactgactacgccttccaagtatcctttgctttgctggtaagaaccttataagagcttggttaggaactccatattgctgagaatcgttgaaaggcaccactacacctgcgtagtggattattagggata

SEQ ID NO: 30510 - DNA, 391 bp, Oryza sativa
  unsure (1)..(391): unsure at all n locations
taagtgtgatggaagaccatatatacaattatctagctatcatgttggagcattcaatgcggcagaaagatgggtggaaggcangtgactttgatatcatatctttctaattgatattaacttactntataggattgtaacctttctttttatggtaacattatatctgggtttttccaggatgtagaggcaacgatacattgtgcagaatggctttcaatggttggaggatctaacactgttgaccaaagaattaggtaaacaagaagcattggccccataacatgttttccattcatcctgtcattgtttgatctactaggcactaacagaaattntgaggtgataaaccaccacaatcaataagggtgctaaagcatgaatacttaca

SEQ ID NO: 30511 - DNA, 406 bp, Oryza sativa
  unsure (1)..(406): unsure at all n locations
agcagctttctataggatatatacgatgggagtacttttcatcttttgaaagatttttatgatcgtatcacacagattnttaatctttggataaaatctgatcatataataaaagcaaaaaacattaaaaacacctaatggcactaaataccattcctcagaaaaagaccaaatccaaacaaaaattaaatttacatgcgaaattcaaattacagtgcaacttacaaaatacagtgtagttttataattcactgtacttatagaaaatgcactgaaatttgagtgaaaaatcagtgagagaaagaaaatttttcagtgaaatagctaatcatctacgatcttattaataaatgactatcacggtcagtttctaaaaatataatagtatgggtaattataatttaag

SEQ ID NO: 30512 - DNA, 386 bp, Oryza sativa
gctttggcactgatgacttgcatatgggctccatcaacggtctactatgaatgggttgtaacgctgagatgttgtacgtgctgtgaattcgttcggtcgacaacggtagtatttatttttgtggagcttggcaatactttctcggcacgatgctgtctctttatcgtaacccgtctgagtttttattcctgcttattaaaaatataattggcagccactgtctgccgatttagtttcagaaaaaaaaaagactcgagcagattgctgccgatcgatctcgatagcatcaactgttcttccgtatatacgatatagcaacaaaatcgaaagaagaggttgattatctagctagctggtaatagtatgcagctggacggaacatgtga

SEQ ID NO: 30513 - DNA, 451 bp, Oryza sativa
agcttctatggtctcttgaattaaatgatatattactggaccagatagtaaactgcgtatatttatcaaatatgcatgctcaactgtgtaagaactaagaacattaaaaagcaagtaatgcagatttttctttgagagttagaggttttgaaggataataacataattctgataaggaaaaaacaatacaaaaaagtaattaccagatctgtgcacctgtcaaaagagtacatatcagtaacgcttctcctcggaatataggcatgtttagtgatttgtccagtttcaaggtaattgattacagacttgagtgtgcggaatacatgacgactaacaggatcagtataatactgcacaagaagataatgtttcttcagaaaacattaatcaatgtgttcccatatgccagcatattatattaaaagaatcgcatgctatattgtaatgtacc

SEQ ID NO: 30514 - DNA, 421 bp, Oryza sativa
  unsure (1)..(421): unsure at all n locations
tgtttccttgggttgtggatatgacacccggacctcgtcgcttcngaagttgtccttgtcggctcgtgattcacgtcggaaggacaagatttggccgcactatgatccttctcgggctcagatgtcgttgatgttccgttctccacttctgcaggaggatccttcgacatggagtcatccagggttgtaaccatgacgttctcgcttctggtcattgatggaccagtagagatcggcaccgtggtgtaaaccgggaagacgatttcgccgacttgagtccacaccagcattgtcgaggtagaaactccttggttgatgccggtgttgacgctgttgtcgacgaagcttgatgacatagtagtagaaccttgagcaccaagtgcccctacctggcgcgccactgtcgacgggggatacccgt

SEQ ID NO: 30515 - DNA, 352 bp, Oryza sativa
atgacctaagaacctacccccgcctcgataaacagacgtgacaccactgcgggtgcgacctttagagtttctatagcaaactctggtaccatcagattccatggctcggaggataagaaaaaactgcgtcattacccccggagaacctattgtatacatcaaagcccttcggttaaaaatgcaggcctactttcaacgtacactcgaatattttgagagccaaaaagacgacagttaagcttagtctagacttggttgaaaacgccaaccaaaacttactttcaactacggaactttgaaacctcgctcgcccctaaactgaacccaaagtggtgttggtgacctgtgcaac

SEQ ID NO: 30516 - DNA, 436 bp, Oryza sativa
  unsure (1)..(436): unsure at all n locations
tattgatctgcttgaagctcgtaagaatgagctcttggcacaacttcaagagtgcaacgccgaactggatttggaacacaataagctacccgatctcccgcaagctgtcgaagaacagaaggcaaggttgaaatcggccatcaaaaatgtcgctgacatgaccaagtccttataagtcatctctggaaccgatgctcaagacgcccaggccattgaagaagtagaacaaattaggcagagagctatatcggctatccagcgccacttgtctcagtgacattctgtaataggatatagtagattntgtaatcggctaagacattctggtacattatttaactggtcttaataatccttttgtgccgattaatataactcctcgttntgctcacnaatatttcaactttgcatatatgtgcccnccataatttacaat

SEQ ID NO: 30517 - DNA, 444 bp, Oryza sativa
  unsure (1)..(444): unsure at all n locations
gcttaacagctcacaaccagctgttgagttcacctgttggtctattngaggaagagggaagtgatccttggggcacgccctagtgagggcagtgaagtcgacgcacatccttcacttcctgttggccttccacaccatgaatgggttggctagccactctggatggagtacctctctgatgaaaccagccttaagaagtttatcgagctcttctcgtatggcatgtttccgatctggtgcaaatctccgcagtttttgctttactagcttggcatcgggtcgcaccataagtttgtgctcaatcacctccctggggacccccggcatgtcggacggctgccaagcgaatacgtccgcattgtcgcggatgaaggtgatgagcgcgagttcctatttctcgttcagtgatgccccgatcttgaccgtcttgtcggggttggcact

SEQ ID NO: 30518 - DNA, 407 bp, Oryza sativa
  unsure (1)..(407): unsure at all n locations
tattgcggntcgttatcatccatactttcgtaatttcgtatgatgagcacgtcatggacatattcctaatgccctaatcaatatcctgcagttgcttatttcttaagagaaccttactgatttgctaatgctgaatgctaaattaatgtgaatggtcccagttctcctcgtctagaacaggcagcaacaagaagccataagggataaattcctccatttgcaagtgattaacagttaagcgaacctgcttctattccattctaaattcctcacttcatttcaattaanaagaagatcaaacaattcctatgaggtcatggtcatgtcctccctcgatgccgctgtcttcctatgcatagaattcatacattcagggtcttcgtctttcctgcattcattgccgtatc

SEQ ID NO: 30519 - DNA, 453 bp, Oryza sativa
  unsure (1)..(453): unsure at all n locations
agcttaagaagatgttcttaagaaatctactttacttggagagatgggcagncaatattttaggagatcctagtagctncatcacgcttccccagctcgagatactaagaatcagtgactgccctaaacttgcaggcattccagattgcccggttctagaaacctgaatataaatagatggtcaaatattgctgtcagctcgctcgcacacgtaacaagtttgtcctatctcagttacgacgcagaagggcttgattctatgaccatgccgctgggctcatggtcatcactcatgagattaaaagtaaggtctctcgcaaacatggtgatttctctggaggaccaacaaaaccaaggagaaagtaatctcgtaaatcttcggcgttagaatctacatggccccaaatgcttcacgactgtattcgggttctctgaattgaccatgggatatgg

SEQ ID NO: 30520 - DNA, 379 bp, Oryza sativa
  unsure (1)..(379): unsure at all n locations
ttagctgatttcattgccgagtggaccgagtgccaanatgtcatgccagaggaaaagatggaatattggactatgcattatgatgggtcaaagaggctcacaggcactggagctggggtcgtcttgatttccccgactggagaaagattgagctacgtattgtggatacacttttctgcgtcccataacgtggcggaatacgaggcgctactccatggattaaagattgcaatctctctaggcattcgccgattaatcgttcgtggagactctcagttggttgttaatcaagtcatganagagtggtcatgtctagatgataatatgaccgcttaccgacaagaggtacgcangttggaagataaattcgatggattcg

SEQ ID NO: 30521 - DNA, 378 bp, Oryza sativa
tctagctagggctttaatacaatggtgggttacagacttacagttagttctaccagtgcagagcgagtgagtcttgacttttaaacaaaaggacaagtgaaaaggacaagactggaattcattgccctgggcgagggcgttttgcaagaaaaaaccacaaaaggcccaatcaatatgcatctcagatccgtcgtcaacgcagtggtaccaatgtggccatatatacacaacgtacgtgcattggctgcgtgccagctccacgctacaatacatgctctatctcagctcagccgaaatatgatggacaaaattggcacgttggcctgtgctactggtgagcagatgcacatcttgtgttcccgacctgaggacggatat

SEQ ID NO: 30522 - DNA, 396 bp, Oryza sativa
cttgcgtgctgatgagtcacactgaatgctaaaatgcttgtacaatagagatgaaaggtatggctccgttttttcctgtgcactgtgtggttgagacttctgtcgccccttatcttcactcaatcatttttcatattttgaaaacagtctcacttagaatcttattctgctttcaatttttccgtataattcatcatttttatttggctcagacaaggtagttgacgttacaataatttgattttggatgtttgttttactgggctatgatggttatgtacatgattaggaaaacatgtagaacaagacatgattacgcttggctatgtcaaacttaggctatggttacttggattcttatttcttaatatggccatttttaatgatatttcacat

SEQ ID NO: 30523 - DNA, 340 bp, Oryza sativa
agcttaccatactctcgctctgcccgtctatctccgacgacttctgaaccccgcgcgcgccggtgcctatatataagtgccgtgatccgcgggcggatgccccggatggggctggagatcatgacggactaagctgctgctgcgccttcttccgttgcggtggcggcgcgctgacagaattacccgctctgccgctctacttcgccccaacgatgttgccgctggtggacaggtgcgggtttgagaccaacgccgaccgcgcccttcgactcaggtcgagcaccccgcgcgcgcgcactttctgacatctgattaacaaacgcttgcaatcatgaatctt

SEQ ID NO: 30524 - DNA, 322 bp, Oryza sativa
aatgagcgctcgcgactctttaaatcagtctgcaggttcattctgatttgagctcgcaacacatgttctctaatgagaggttgcatgttatccctttcatgcaggcaaacgaccaactctggtgctgcacaagcagctgcagctgtcagaccaagataacgatgcttgtgcccatacaataactaaaatggtgtggctcccaaagaataatgaaacgaagtgttataccaatactcagccaaggcgagccatttgctccattgagagggacaggagtgcacaaaacaacgtacagaggtttcaagacactgattcactctct

SEQ ID NO: 30525 - DNA, 429 bp, Oryza sativa
  unsure (1)..(429): unsure at all n locations
agcttcccagaccctcgctctgcctgtctttctccgtcgccttctgatccccgcgcgcgcggctgcctatatataagttgcggtgatcggcgggcggctgcaccggcatggggctggagatcatgacggacgaggctgctgctgcgccttcgcccgctgcggcggcggcgcgtgtcgagatttacccgctctgccgctactactacggcgccagggatgttgccgctggtggcgcgggtgcggggttggagaccgccgtcgaccgcgcccttcgccttaaggccaagtacgcacgcgcgcgcgcactacccgccacctgctcgatcaaatgcgtgacgatcatgtaatttgtgtgtgtggtntggatgatctgtgcagcttcgcggcgcacgggctccggaccagcgtccatggcgtcctgctggttga

SEQ ID NO: 30526 - DNA, 464 bp, Oryza sativa
  unsure (1)..(464): unsure at all n locations
atagacccaatcgccacagagaagagcgctccgatctctttaaatcagcctgatggttcattctcatttgagctcgcagcacatgttctcgaatgagagtttgcatcttattcctttcatgcagacaatcaaccaactctggtgctgtacaagcagctgcagctgtcaaaccaaaataacgaggtttgtgcccatacaatacctcaaatggtgtggctcccaaagaagaatgaaatgaagtattataccaatactcagccaaggcaagccatttgctccatcgagagggacaggagtgcacaaaacaacgtanaaaggtttcaagacactgattaactcgctctgtttgcccatcggattgagggtgataagaagaactcattcgcaattgagtgccagccaatttgaatagtgtcgtccaaagagtgctagtaaaaattctatcacgatctgaaataagagct

SEQ ID NO: 30527 - DNA, 460 bp, Oryza sativa
  unsure (1)..(460): unsure at all n locations
gccagcttcgagagatacccacaccgggagatctaactaagatccttttcgcgggcacgagatcttcccccatgccatttaaatacttntaacgttaaaataaattatcctctctattaatgtagaacggcaaagcttntgccggtgttaaaaacataatattggcatgacatcaaccttggagagatgccatgcgagatttggagtgctgcttaaagagaggagatatgagttgtccatgtacttatattatcgatagaattaactattcctattatgtaacggtacgagttctctacgaaatcaaataatataattaattgtataattaacaaattaatgaaatattatacaagtttggctataaattatctaaataatgtgacatggaaaacttatacagtcaactggtatttaaataactagtcttatatatacgcagtatattataattgtctct

SEQ ID NO: 30528 - DNA, 447 bp, Oryza sativa
gtagtgcttgtcaagccggcaagcaagttgcaggttcttattctactaagagtatcatgtccacatctagaccattggagctcttgcatatgaatttgtttggcccaacaacctataagagcattggtggtaatagtcattgtcttgtgattgatgatgattattctcgctatacttgggtgttctttttgcatgataagactattgttgccgagtttatcaaaaagtttgcaaaaagggcccaaaatgaatatagttgcactcttgtgaaaattagaagtgacaatggttccgaatttaagaataccaatatcgaggactattgtgatgatcttcatatcaaacacgaactttccgctacctactcacctcaacaaaatggtgtagagtaaaggaaaaatcatacattgattgagatggcaagaactatgctagatgaatatggtg

SEQ ID NO: 30529 - DNA, 341 bp, Oryza sativa
ctaaaaccggagttctttgcgtgggcgctacatcttgttatcttgctggaatgagagggtgatcgcttctgtgctcaggaaatgactaaagaagcacacacatcaacaaatctttgtctgctctcgagatgcatatttctttgtcacaaaagatgctcatgtaccgaccgaacagcaagctacacaagtcctgcaaaattcttgggtgttacctttgcaatcgattgatacattgtttacatattaacttacacagactgacaatcatgggacttactttgcataatgatacattgttactattgttacctaactttatggaggggcatcaaacctgatgt

SEQ ID NO: 30530 - DNA, 353 bp, Oryza sativa
ctgttgcgagaaatacataaaggattgagttgcagtttctcggatatcgtagggaggaagagggggcccgagtttaattcccatggggaatctgcatctgcttttaatgacccccgtttcacgaagcctgacggcctcagtcccaacaatttcaattcaggttctcaccaattattactggatatatatcagatgcagaatgaatctccaatcaacatcgaccagaaagaggatcgattaccatgcatgataaaaacaaaaaggatcttttccattgcatggccggtgatcatcatcatcaagaggaggaagaagaagaagaatgaagtcttgaagagaagagtatgtacctg

SEQ ID NO: 30531 - DNA, 438 bp, Oryza sativa
agcttatcaagtctactttcaaatggatctatccttatgttcgtatctggtctggaacagccgcaattatcattttagtccccactgctttctgtccatggtgctgcgtcaccttctttgcccaatgggctgtgtatcaaagttgggcccattatgggcgcgtttaggggtggagcacgaccctgtgttggtcttccccttatcttataactctagtcgccgaaagaacaccggtgttttgatgatggagttagctacttactaccggctcgcaacgcgcgtgttggctaaaccgctcgtctgcttgtaatcagaaccctaccatattgtgtttttgattgagaaaactttcatcttcatctagcaattcagggcttggtctacttgatcttgcctggtctatcaatgcttgcaagacgagagccctcttggcccggt

SEQ ID NO: 30532 - DNA, 408 bp, Oryza sativa
tgaagaaacttgttagccctcttgtattgagaaggacgaacgagatgttaaagaatagcgcctctaaacttggtactaaacatgaattgactgtgtggttgaagatctctgctgctcaagtaaacttactaaagcttatcaatatgttatcaaaatttattcgtcatctttaacttctttttttttcttactctccacaggaatatctttacaccaatcttatcatgagcaatgtattgggagatgagcctggcacacctttggcagcttctcaagtaatctcccctacaatctgaagtctattttttgtcaactctacctttcgatgtaccgatctttcacctttcgttttgtctaatcacaagttgcgaggagtatctgcaatcacccaataatggtgaatgggtc

SEQ ID NO: 30533 - DNA, 418 bp, Oryza sativa
  unsure (1)..(418): unsure at all n locations
atatgcgaataacatactttttacttcaaaattgtcgacaaatcatcgtaacccatatgtaggcgtacttacttaattattaaaaacttctgcttcatgcattataaactggatatagtaaagggcatttcttatattcgattgtattccttgaggacctgcttggcagacctgaaattccagtcaatccatgtggatgtgctgggatttcactcttcccatgtaagccctaaaagatctccactacgaaactggattattcatgtngaagtttcttcataggcttctaataaccaagtagctcatactatataactctttgaccaataatatatcatctttacttgattttggaacagaatatttgtccttgtagagatatcaaattagttctgaagttgaggatttaccacacact

SEQ ID NO: 30534 - DNA, 297 bp, Oryza sativa
ggagaagaattcgccctcttgctcctttttgcacgaggggggaggtgccgcctgctgtcaaccttcatacccggcgttcccaaaatcagtatcatactgtaattggagatcttcatctctttgttcaacggcaggagggagagatacaacagtttgatggggacgcgtcggcggcggaccagaacatggcgctggccttggagttatattgatctcaatgctgtgcttgggccattgaataaaggtcccacgtgcagccccaagggtcagaatctcgtcattatgtgtgtccgtgac

SEQ ID NO: 30535 - DNA, 437 bp, Oryza sativa
gcttgctttccatacatccctgaacaatttattctccaactgctcttgacatatctcattcagaatttttttttctcaaattagttggactgatagaaaaatattgcttttcaagattgtaaaataaccaactgactgggaagttgatgtcatatgttggaagcaatctgctaaaatgttaaagaagtgcatctaacttttgtacccagtgaattgcaaatctctatctcgtttttttttgtttacagtttctttggttttaaagtaaaataggttgacatgggaactttactagcagaggaataggcttatattcttggaaaaaatacatttctcatgcagaatgtgattacaataatgatacttgctgccatgatttctatcactcatgcacgcattgcccttgatgattgtatgcagtgggatatattgtgagt

SEQ ID NO: 30536 - DNA, 474 bp, Oryza sativa
  unsure (1)..(474): unsure at all n locations
accggatcttaagcgactgagcatgcacttagttgataccgacatgtattgctcatgaccaanaactacgcccacaatggtaaccactaagtagccatggggataaggccctttgatagcccatgcgcctgtgcggcacggaatgatagttattgaaatataatgcttatcaattaaaaacactagtaatatgcccgtgctaacgctacggggtgacaattgataactcaaattgaaaaagatataacgtcatagtgacatttgatattttaaaggcattacatttccccatagaaggggtgggattaaggttcaagcaaaaaattacatatagagctaagccagtgataatcacgtggtaccgcacgtgtttcttctggtatgctatacaaaatcaaatgacagtagtcagtaggattcgaatttgtaatttcttcttctacacaatgaatcgtaaaaatcatagtatctatg

SEQ ID NO: 30537 - DNA, 391 bp, Oryza sativa
  unsure (1)..(391): unsure at all n locations
tccatgtctatgtagtcctcttctcggagtggttggacatggctattanggccatgtctcgacatatgtgttgctaccttgacttgtgtggttggagtgcgattatggattggttttggcagagatagtggatgtgttttatgaaagaagtggaacgagtttccgcatgctttanagcaggatgcctgtagctaacgagtcttattaattggcttatactagtactacttatgagggacctacccttaaaccctatgatctgccttttgttagcatcctaatcctctttctgtcacggcaatatgcaatgcactactactatggtaccngtatggtgcatatatactgtcgtgctctattattgccctaatttttggctgcagtgcatttg

SEQ ID NO: 30538 - DNA, 419 bp, Oryza sativa
  unsure (1)..(419): unsure at all n locations
tggagttgtgaanaagaacacagcttctatnttcacgtgactttattgcatggcccttagaggttaagtctatggtaaaggagattgcccaaaacccctcctagtgagctagtgttaaagagcgctgccacggtcgaaaggtggctatcctacatggtggccccatggtccaaccaccctacccgatggtcattgtcaagatttaccacggatctacaaaggaaggccactctataggctntagcgccaacatggtcaaggtggctaccctacctggtggtaacggtccagccaccttaccaaacggtcgtagttgaggtttccacagatctactacaaaagaccactctatgtgtctatggtagtagcagtgcaggatacacacttgctacgcccaagacatgatgaggctttcagct

SEQ ID NO: 30539 - DNA, 439 bp, Oryza sativa
agctggccgttcgccttgggaacgaccactttgttctccagccactccagatggatgacctcgcggatgaatccggcctccagaagtcgtgccacctcctcgcggatgaaggcttgacgttccgaggcctggcgccgcactttctgccggaccggcctcgcgcccggccgtacggcgagacggtgctcaatcacctccctgaggaccccgggcatatccgccggtctccatgcgaagacgtcagcgtttgcccgcaggaaagagacgagcgcgtcttcctatttgccgtccagaagaccaccgatccgtgtggccttggacgggccgtcgcccagtgcaaccttcttgaccgggacctcatcgcacgtgactatccgctgcctctgggcggcgggggcggatgtgccaagcctctcgtcgccacccttcggcttggaca

SEQ ID NO: 30540 - DNA, 378 bp, Oryza sativa
tccaatagttagattgtctagatattgtcttatttttcatacttatggctgcatcagttgagtttgacctcataagtcgtgtttagaactatagtctctagcctgcttcttggttgctgattagagtagcatcggggtttcagccgatcttacctgatttagctttatgtcttatatgctcaattgttatgctaaatctgccttttatgttaagatcctattgcatttaggtgtattaagctctatgtttgatatattctactttctttaatatcttaatatagagtggtatcggagtattagccgatacacgctatatctatctgatgagcatctgtggccacctgtatgacgcactgccatcgatgtccgcaacca

SEQ ID NO: 30541 - DNA, 445 bp, Oryza sativa
ctgcagcttattcaagcgacttcccctgctgttttattacaggtaccaaccttctccttccattgataatatggagtttgggagtcaggtttcatctttatatcatgccattttcttttgtgttcgcatccacgccttttttttcccaatgatgcctcgtaatgtggcatggacctgtaatgtaaaggatagtttgcttctcctattttccaggttcttagagctgtttctcaagtagctcctttgtatggcactggtgttgatgagaggctgctcattcatatttcttacagcccaagaaggtgctccactatttattttttgcggctattgcattcttacccctactttgaagttcaattgtgattttaccctcgtgttttaaggtttgaattatacccttgttttttaatgaatgaagaatagatttgcccctacttggatg

SEQ ID NO: 30542 - DNA, 430 bp, Oryza sativa
  unsure (1)..(430): unsure at all n locations
ggccagcacanataagaataanattacacgagtactccctccattttttaatctatctttataacgagtggttaattcatatttaacagcaataattgctaatgaacaaattatgacaggtgagaacaaantttgtcttgattttaatagatagtttaatccaaaccatcaaatttgtgcgattgatgataattaattactacaacaatgaaaaggtgatccaaatgaaaatactctattttcagaatgtttaatgagtgagtaggctaaaaacagaaattccatgccatttttccttgccatcatttgtatctccatgcattggacacttcaccggagcatctctaatagagtggatatttntagctctccaaacatttatggtccctttgaatcgcatgaatgaaaaaaacggacgaatagaaaaaaa

SEQ ID NO: 30543 - DNA, 391 bp, Oryza sativa
agacttctgctaccgcattattgggacctttattatttatatataacatcttatgcatctctataatcagaattcatgagatttcatccatcgataatctaaaaggaacactatctagacgtcattcttttgagaatgtggatagtagaaagctataacaatttattacaagaaatgtactttccatctctcaattcaggtgcagtttaatcttcgtatatccatttcatcactcaataaaactcattcatcaactcttaaaattggataggacagggtcttctcccaatatatttgaccatgcaaagcattcacatggtgttcaagtactgggatatcagggggtggggggtgtcatagatggtgctcaatgaagcgctggagcatacac

SEQ ID NO: 30544 - DNA, 173 bp, Oryza sativa
  unsure (1)..(173): unsure at all n locations
taattaattaagcatatgacactntggtgatagtaattagactcttccataaatatcactccatgagacagccacatatatatgcatatggttaatagaacactggtaaaacctgcaaattacaccccaagttgaaacagcagccgagtaacagtgacagacagagtgaacta

SEQ ID NO: 30545 - DNA, 401 bp, Oryza sativa
agcttcttcacctcacggtatccaaaccaagagccatcttctcttttcaaatggaatgtgattgtaaggcccattttcagaccttccacctaaaacataattcatagaatagaattgataagtgcagagagctagcagaattcaagtgggcacttcagaatatcttattcataatggcttgttcttatatggatgacaaataatccaaaccaatggaagaaaagtaaataaagcagcagtaattcttaataagaagatagaaatataatgagatataacttagttatggaaccttggaatactgttggccatatattgtgcaaacatttatctcattactgtgcttcaagtccagcattttgtttctcacataagtagcaagggatgtagtttgcctacaa

SEQ ID NO: 30546 - DNA, 393 bp, Oryza sativa
  unsure (1)..(393): unsure at all n locations
agctctcactctctctcttacttcgagtacggtctactgcagcagtggtagtcaagcagatattacttctaaatatctaatccaatctttctcttacatgtctcttgtgcacaggcgctcacccttgctgcggcctcacggtctccgactctcccgccgcttcgctccccaaaggtgtggccgctatcatcagagatctgacttatgcccatgtttcttttgcgaatcatttttggaaatttggaccaaggttgggtgttactactggcattcaacttttgggcaactttggagcagttttctcttgtacttatggatgcttangagacttcattctatctttagagcaatcaattaccagatgaatataacagaatcaaagactctctacat

SEQ ID NO: 30547 - DNA, 439 bp, Oryza sativa
  unsure (1)..(439): unsure at all n locations
agctttattcatacatcaaatatgatanctttaatgtcctgatgtgctctcatattttccatcagagatcgaaagatcatgtgaggtggctattgaagcttaaatccaaaactaccttaattatggaccgatagcaattaccttgtctcttttcggtaaatttattggatgttactctgaggaaatttcttgaagaactcaactgacagtctgaaaccagggcatagttaactgaatcttaagagtgctcgtattctgtggtagaaaaatacaacttgattcaacatacaggtaaacatgcccttcttttatattctangagttctttcctttctagaaaaggaagactttgttagtcaatttgagcacctatggtatcatcaacattaatgatcgctgntgtgggatattatgaacaggctgaaaggcaataatggaa

SEQ ID NO: 30548 - DNA, 340 bp, Oryza sativa
aaaccgtagctctcatgtgtcacgcacgaatgatgaaaaagaaatcataaccgaaccctaaaagaagaataagttcgaacggcctccatatccaccgagctatgatgaccaatgctcttctcctctttcccgccacctacaactacaaatgttcctggttagtgccacgtcaccctctcactcatcggagtatatcactggcttaattaatcgccactcataaggaagcaatctccataaaagcatccattcacgcatgcacgcatcagagttcacaagtgatcctatcggcgttccactggtttactcatgtgggcactcacgttccaacgacagatca

SEQ ID NO: 30549 - DNA, 390 bp, Oryza sativa
agcttcataatgggccccttcacacctttaatgatcttcttcctatcctggaactcaacacaaaggttacggaaatctacctggaaagccgaatacattctaattatgaagataatctccacactaagaacaaaaccagaggatggactatgtaattgggaagtcatttgacatgctacttcatgtccccataaaaaaggtatggagtcaacatacaataatagtctcagagaaaaaaaaatataacctacctttgcacttccatgcttgaggcaactaactcctatttttaatccttctctggggttcataatccgaacaagaagggctctgtcaacctttttttcttacttcagcttcttttgtaatcagggcaaccgatggtcatct

SEQ ID NO: 30550 - DNA, 430 bp, Oryza sativa
  unsure (1)..(430): unsure at all n locations
ctttttgtgactggaagaaatttttgttattaatgctttggacaacagccggattttatagacgatctaattgagttgtgaagacaaatctcgaaatggcagaatttgtgatgctgctttattaaanaaccattaacataatactccctcccgttcacaatgtaagtcattctagcacttcccatattcatattaatggctatgtatctagacatatatatctatcctaattcattaacatccatatgaatgtgaataatgctaaaatgacttacattgtgacacggaggaagtatttcctatagttactgtgaaaacttttgattgctcacttccctcaacgtaagtaatacctttacacgccttttgctaaatgttcaattaatcctcttttcacctgtacataatgctgctccaagtgcatgcataa

SEQ ID NO: 30551 - DNA, 410 bp, Oryza sativa
cgagcatcagcttactgcatgtttaaggcttattcttgtttgacatatattttgaaccttcttgaaccagtaattggtgatcaattaaagatgcttgatggctgggatgacaaaaaaaaatgacttcaattgtgcgacaatgccagcccaaaagatggtgcaataccttgatggctaagcatttgttcgcctaggaatttgaaagacagaagaggaacaatatatacggctccaatggcatgagtgcatttcatttggtgagaaattacaatactcatgcaccaaaacattcctgggtaagctcgcccttctcttgtttctgattgtgattccagaacgttcctagatttcctaattgcgattctgattcaaaaaagacagaggaaaggaaataatgacatgaagctttc

SEQ ID NO: 30552 - DNA, 340 bp, Oryza sativa
tgctcaacaaacatttattcatgatatcaagatataggacttttttgtccaccttgatcttttaaccggtgtatataatcccattttgtaacctatatatctttttctggctatcactgctccaaaaaaagctcgatcggtagtaattcagtctttgaagtacacctcgaggtatttcaaaaaataataacatgaacatgggaaggctctaaagaaccgagttaagaagaaccaatctcccaccataggagttatttttgcccttacatgtgctaagttttctttgaaacatatcctccacacatttccaatcagaatttctgaggtttcgatagtgtat

SEQ ID NO: 30553 - DNA, 367 bp, Oryza sativa
  unsure (1)..(367): unsure at all n locations
actcaagnaactgggcatgcagctttgcaccgaccaaccgagaatctttttgtgactcccactgttcagaccaggttaaccatgacgaaagccaaaagcttctgctggggtgtccctgctgagagctccatgtcagcgacccgataaggccttctcgcagagcgtatccgcactctgttcaacacccaccctagttcattctcaactttgggcgtacaaattgatagcgatggccctgacttggctccacatggatagtctagacatagaacccaaatttgggagcaactttccactctccttggaacacttctataagacctccacaaatcggacctctatgacccaattcttgctcacactttaa

SEQ ID NO: 30554 - DNA, 223 bp, Oryza sativa
ccatgttcctgtcctgaaccaccttgtgtccggctccatatactgctgacttattcactatgttctgaacaatttcatcctcgaatattataaaatctatgtcgtatattactcgacactgtctaaatcgtgcgtatataatactgacatatataggatatgaaataacactatcctttgatgggctacccttcaagacgtcagcttcacatttgggccacaa

SEQ ID NO: 30555 - DNA, 304 bp, Oryza sativa
  unsure (1)..(304): unsure at all n locations
agcttcacacgtgcgaccgatctgagatgaaaaatatctcttgatcatgcgttgaagggtgcgtctgcatttcttaatcggaaaggcatggggattgtacaataagccccgacaggcgtgatgaatgaaatctttaagcaggcggatttgatgataacctgaatagcaatccaaaaagctgagtatctcgcagccggcggttgaatcaactacctgttaaatgcgaagcaacccaaaaagatctttgggacaaaacttngtgaagtcggagtagtcaacacacatgcgccagttgtcccatttt

SEQ ID NO: 30556 - DNA, 261 bp, Oryza sativa
  unsure (1)..(261): unsure at all n locations
ctcccaagtgatataagggtttttattaccgtntgcaccatgatgctagaaaaaaaagagcttatcaaacgtagatccgtcatgactatatttcaactatattttaacgttgttactgcgtaagacacagtgttactgtacagaggtcctcgtgttactgcaccgtcctgtgacgagagatgagaaaaggtgcgtggtgggtgggtggtggtgggagttaatccgccggaccctcctttactaagaaaatatgtccttgga

SEQ ID NO: 30557 - DNA, 376 bp, Oryza sativa
acgatatatctagggttacatcaaattcttactagcgaattcaagtataattcccatggcgagtttgaaggatgatctatcgctcctggagcgagacataagattctcactgtggcgagtgaagatgcaagccgttcttgcacaacaagacctctatgatgcgctttctggatatgacaagacgactcatgaatggtccggcgatgagaagaaacggcgtcgtaaggctctgtcatatattcatctccatctatctaacaaatatttgcacgcggtgcttaaggatgagacagccgctgggctgtggttgaagctggaacagatatgcatgactaatgatctgaccagtatatgtatctaaagctaaattattttt

SEQ ID NO: 30558 - DNA, 394 bp, Oryza sativa
tatcctgagcatgctaagctgaactttcttgggctatcacttcgtcctgtaaggttttctgtacatctttacttgtggggatatgtccttcaccacaaagttatgttaagccgatctttttttacaagctttaattctctatggcttcatcatacatctcaacatggctcctttaatactgccatttcaatatttcataaatcacaatttgattggtgataacatgatatatgtaattccgcaggggactggattgtgctcatactacatgaaccgcggaatctgtataattggcaagaattgcaagtttcaccatccaaattcaagctcatgtcatgagatgtgggatggctctttccaaaccgatcaaatatcctcgggagtgacatttact

SEQ ID NO: 30559 - DNA, 232 bp, Oryza sativa
tgaatttaattactttcccattatttatcactgaaatgatcttgattcgtaaactacttcaatgctaaatattttagaaaattctgaaatcttggacgctcatgactaacaaatatactgacattaatgtaattatacggggaattacagtcttgatgataattagaatggcctcaaaatcgcatatcctgagtttttaccatgaattgataaaaaatcatcagctttttta

SEQ ID NO: 30560 - DNA, 447 bp, Oryza sativa
agctatgatagtgtccctcaaattcatattcttatgctgcatatataccaaggtgcttttggtgaaacttatccggcgggtgaaactctttgctattctaatccccgccgagttagaccgtccttgctccattgtgcagaatgaggaagcagctgtctcgtctgttcaaagggtctggcttttcgtcagtcatcatgacgagtctagcgctcattcattcactgatgtctctatataggacaccgaagctacgcgacagctcctgaacgacgccgacctctaccttgatgacgattgtgaaagacaagcctactacattctgagcgaccgggagtacgctcacatgcgagaatactctccggagctgctgaaaaagaatggaatggatgatgaatttcgtgctattaggaaagctgttggatggcatacatttgctgtggtagatga

SEQ ID NO: 30561 - DNA, 323 bp, Oryza sativa
cattaggtatttcagtctacagactcgtttgaattacatgccgtacatgtgttaaatgactgatagatcactttgcatatgaaaacgatacgaatccatctgggcggaataagtgattaatactaactgataggatatctggctcatgagtcaagcccactcaccaccttggctcaggtacacggataaagagtacgacggcgtggaaatacacttattatactgtaggttttgctaccttgttttgctatcaacggaacagctgatagcggacatcttcttctctaaacagattcaggccccccccccacaccacccctaga

SEQ ID NO: 30562 - DNA, 276 bp, Oryza sativa
  unsure (1)..(276): unsure at all n locations
agcattacctgctagtatgccagtgattgttatctgagaacatttnctagtgcatctgacaagcatgantcggactgtgctgcctagaaatgatatgaggcatcatctttgacaacgatgctgcagaaagcacgaataattgtaactggtgaataaccttgagacagccaggtttcttatatatataaatagggagtatagggacgaatacaccttgaagcaggggagtgctaaccctggtcctagttgagtaccaaagaaatcactgctttgctg

SEQ ID NO: 30563 - DNA, 169 bp, Oryza sativa
gcacgaacaaaggaacatgcgtaactaccgaggattctatgatcaacgcgggtcacaggctcgcattggaactctgctaaaccacaaatgtaaacacgctgtatatgcaaccatgttcggtatatgctcttatactttatgacggatatcgtaccagccaatctaccgt

SEQ ID NO: 30564 - DNA, 353 bp, Oryza sativa
gcttgatctttattgaatgaaagattgcttatataagcttatatgcaactgaattgctcattaaaagagattagaactaatgcaacataccgggaccaactaaacaaactcgagataagatcctattgccaagccgtactgtagcgcgtccgaatcacgccattcatgctgccagtgcgcgatctgattgatcgccctcattacgcgccgacgttcccgtgcatcccgcattcatacgcctccgatgatatccaattccgaccatgataccttaaccttaaactctgctaaaaaaacctagcatacttatatattttcgaactgaaagagtattcgttaacgttatttctcaa

SEQ ID NO: 30565 - DNA, 420 bp, Oryza sativa
tcagctggatctcttattataggaagtttacaagctgcgttatacttgccgctaatttgcttgaacagagagagtcctttttaattacaatggtcatggtgtaccaaaacctacagctaaaggggagaattgggtatttaacaaggtgaatgttgcaaagacacttcataaactgctgcattgtttattcttgggtgtttttgacgaagtgccctttttactttttggtccatagtgatagtactaaatagttgaagttgaaagtgataatgatgaattcctatctggttctattgttagactgtttataatatacttcactatgactactcatgttcactttagcgcctagactggagttctagctcgtctgatcttcatcgaaggactgcattctcttgcagactgagaggcgtaata

SEQ ID NO: 30566 - DNA, 451 bp, Oryza sativa
  unsure (1)..(451): unsure at all n locations
agctntactgggctgctcatgatcagggaataaacaaagaaaatgtccgaacttctagttcatgatttctccacttcttctttttcttttttttaaaaaaaagcagttcaggataatttcagcgtgtattaatcaactggatcaatattgagggttatttggtcatgctgtcatgtgccatgttaatttaaatcagccataccttaggacttgagccttgcaataacgggagcaaatttaccttcctggtttgaggctactactatatatggactttattttcagagctgcaacttaataacgtactattntgttggttccataaatataaaaataaaacattgaaactcatataaagaaattagcagacacttgtttaatacatacaaaattaccaagatgctaaattatcattaattgttaacgacgtcacacagaagctaaatttact

SEQ ID NO: 30567 - DNA, 394 bp, Oryza sativa
  unsure (1)..(394): unsure at all n locations
gggaattccacagtaaattggtctcacatctttcaatggcttggaccacaaagatcttttcttcaagcctttcacatagttcctttgactcttcaattctattctcacgaccttccatatttctcctggaagaatatctggacacagtgccgaaattccaaaagattaaaagtggcattgctctgacaacttaactgaaatagatatggatattgaaaatacaaagaaataacatttttcccttagcttgagcaatccacataagtcatttgtttgggtcatgaatatcanttggttaggtaatgggcacagaactattgacacaaatattngtcactctgtccaagaaatagctagaggaatttgtaaaataggtatcatacctttctgatat

SEQ ID NO: 30568 - DNA, 436 bp, Oryza sativa
  unsure (1)..(436): unsure at all n locations
agctntaacacagtattggccaatataaaataatttcctgctactgcatccctgaaagcacacaaccattctctactctgtttcattagattgttgttccacacccatatcaaaaatatctctgggcttaaatctcgttacgacgtgccatcctttagcttttgcatcttcagcataaaaaacctgttccactngtgatgaaaagacaaatggatcatgatctaatttatctccactatgtatctttcgggagaagtcacaagggtgaaatcaaattcatcctttatgatgccggctttatgatggacgtcataccaatcacatctgaagagcactaccttgtattntctatatgacaattctacgatgtccgataatctgccatagtaattaacaccatcatcagcaatggttactacgccgctgtttgagtgga

SEQ ID NO: 30569 - DNA, 317 bp, Oryza sativa
gctaacatacttattcattcgataatagtgagtaagtttgtattatttttaagcaacttctaaagtgtgataatttatgaaagccacattatagcatcatattagccctagtaaatctaatattaaatatatttcaataagtttctttggttatgttgaaaatattggtatatttttctataaacttaactaaagttaaaggttgatgacttttagaaaatcatagcgacctataaatctttgattctatatgtactagaaaaatgaccgtgcccttgtgcaggcgaatgctatattaaatctattattggcatatg

SEQ ID NO: 30570 - DNA, 446 bp, Oryza sativa
  unsure (1)..(446): unsure at all n locations
tattttaagaggtatgtctctccggacttaacacgagctcacttctaaatatgattaccttacccactcgatacgtgtcctccatcctagtcatactggaaatatgacctaaaaccgttaagtggcgggcccacgccttgaacttaacgccgtggtggcggacacaacgggaacccacccacgtggcacaataccgttgtattggacagacttagtcacctaaactaccacgtcggggtaaataggaagttcctctgagttatccgaactcatacacaccggcctaccagaatgtaaggctaaaccatatataatttactaagctnggactatcccatactagcacatgtggttgtactgtatacgaaatgaactgacattgagtgaagtccttaggtcggtttgggcgcactctcctcctatcggtacacaactaatcaccatat

SEQ ID NO: 30571 - DNA, 417 bp, Oryza sativa
gcacctagagcatggtatgataggcttaagaaccttttgcttgcgaaagttctacaatgggaaagaatgataaaacgctttttgttcttaagcatggtgataatcaactgttcattcagaattatgtggatgatatcatctttggttgcttaactcacgctttggttgtagagcttgctgagactatgcgtatggaatctgagatgagcatgatgggtgagttatcgtactttttgggattgcaaattaagcaaacacctcacggtacatttgtgcatcatacgaagtacatgaaggatcttttgacgcggttcaagatgcgagaatgcaagccaatttcaacaccaattggttctacaggtcgtggatcctgatgaagagggcgaaactattgatccaaaggagtatacaagtatg

SEQ ID NO: 30572 - DNA, 449 bp, Oryza sativa
  unsure (1)..(449): unsure at all n locations
atctagttctattgcaggttgtagttgaactttcttacatctttctccaaaccttgatatatggtgtgatagtgtattctatgatgggatacgagtggacatgcaccaagtttttttggtacatggtcttcatgtacttcactctatcatacttcacattttatggcatgatggcggcaggtctaactccaaactacaccatgtcctctattgtttccacaactttctatgccatatggcaccttttctctggatttctaataccaaaaacagttaagtatactagctgttctcaaatatcaatgtatacaaggttcctagccaaattatctcaaagccaagactagaagagaaattaagaagtactaccanacttcactcctagctttcctaaatatggcttcttttatctgcagagaattccaatatggtggagaatgtactattgg

SEQ ID NO: 30573 - DNA, 463 bp, Oryza sativa
agctttaccgagtttagctcagacttaaggctgtttaaagggtaagaagagggagaaaagcgttgattgcaatcctacgtataaagaagccagggagggagtccatggcatggagtaatcggacaaggaggcgaatgcccctgcagttcccatgatgatttctcatggcagcccgtccgactgcgagggcggggaatgagtggctaaggcccttcacagtgcaacaccgtggatcggtgctatgatgcaccacgtcggaatcgagcttgcgtggcgctaggttccgcgcctcagaagagacactcgctcccacggagagaagcgctatagagcgcgttgccccgcgcccccgcccgctcgtgacctcgcgccacccgtggaagtgttttccccaaattcgcccaccaaattcgccgcaacaaatcaaggaacacgcccaccaaaatagtggcaacaaatcaag

SEQ ID NO: 30574 - DNA, 368 bp, Oryza sativa
  unsure (1)..(368): unsure at all n locations
atctcactcnaaatatgttataagttaaaaattctaataacgtcggtcccaaaaataccccaaaacacaaaatttcgcaaatttccttcatctgtgtgttaatatgggtcattaatgcaaggatggagggttatcatagcaaaacatcatgaggagaagaaacatgagaaaaaaaaaaggagaaaatagctttgtggcttgtgctactttttgtttgcacacgtacctttttttctttctaataatgttgcacatgtacctgagctatagaattattcatgccagtgtgtatgggagacttttggaattcctttgttctgcgccatttatttgcttttagtttgagaactcaaagcattattccaaat

SEQ ID NO: 30575 - DNA, 478 bp, Oryza sativa
  unsure (1)..(478): unsure at all n locations
atccttaagtcacctgcggcatgcaagcttcgattggtggatacaataattccaatcttctttgccaatactactactcttgcttgctctatcttatntcaactactactacnttgaatcccgttttattatctctatactacttcttatctcttggattccactgccaagcttcaacagctggtcttgtctctacttgattgagctgcccctgcaagtctgactatgcaccagcggcattgaaggaaataaaaaacctgaaaattgattagccagatcaaagatcaatggggaaactctcactagctggctagaacgatgttcgttcttacccacagccgcaaggggcgcttgaagggcactaagatccgctggcaaggaactgtgaggagatgagattctctttgccttatttataaagttcttatatagaaggttgggcatgcatatagttagggcatatccccttttatgtgtt

SEQ ID NO: 30576 - DNA, 358 bp, Oryza sativa
  unsure (1)..(358): unsure at all n locations
attcgcagggtaattcggagttacacgaagtggaaggaccaatggcgaaacgaaagagggcatttgcgttccggggagggcgtcgcgtatgcatagttccaatggtaagctgattccaggtacgcccgttcctctacatcgtttgactatcaaagtcaggtcaaatgtatgtgagtgttgcgactcagtagccgtacctggtccacttgcttattatgggaatagttgattcattgtaaggttcaatcaggctgcctggctctacctaaagtcttagtccgtcccttctttctacttagctctcctcacacgagaagcatangccgcaggttgacaatgcgctaccgatgaaagaaag

SEQ ID NO: 30577 - DNA, 195 bp, Oryza sativa
aactgcatgaaaaagaattttattttctccaattgcctttaaaaccgttctaagaatatatcaagagggttaaacatttctaacctacttatgtgcaaataaaaaccagttaacttgatgaaggggccatacccgataatgtcctctacacctagaataattaataattttaatgaaacgcttaagaatctaaac

SEQ ID NO: 30578 - DNA, 370 bp, Oryza sativa
tcgcagaaccctcatcgacggtggcagtgcactcaatattctcttcgccaagaccttggatgatatgcagagtcctcgctccgagctaaaacccagcaatgcaccttttcacggagtaattccaggattattcgcaactccactcggccagatcaccctcccggtcacttatggaactcgggaaaacttccgcacagagaatatcagctttgaagttggcgatttcgagacagcataccacgccatactcggacgcccggcgttagccaagtttatggccgtcccgcactacacttacatgatgatgaagatgcctggtccccgaggagtcctatccctacggagcgacatcaagcaagccgtcacatgc

SEQ ID NO: 30579 - DNA, 438 bp, Oryza sativa
agcttaaatgccaagatccaatatagataattggtgaacaacatggatctacaacatgcacaataaatggataggatttgctccccctaaatatatgcgtacaaataaatatacaagagatgcaagtgtatgcataaatagagaatgaccaatgggggtttaatctgtacacatagagaaagcatatgtagtaatgatgtagaccaacataaaacacatacattcatgatctccatgttcttaatgtaaatgagactaaataagatacgactcgagtaaacgttagtctcacacttatataacaataacatggaaatcatatatatgaacctatcaaatagtaggagataagaagtggacataacgtttatctcatgcatttatcttatcataataaggccataccaaagaatgctattaccacattattattggaaa

SEQ ID NO: 30580 - DNA, 254 bp, Oryza sativa
atttgatagggattctatgcatcatggtaaggtccaccagtactcttttcttgtccatgataagaaaattgtgttgcattccatgtctcctgaagatattttgcgtgatgatgttgctaaggctgccaaatccaaatgtgagagtgataaaaaagcccaatctgatggcaagaaacctgagacaatcaatttgaaccccaatgctacttgtactaatctgatattatgagtgattgatcacttcagttgctatg

SEQ ID NO: 30581 - DNA, 353 bp, Oryza sativa
atcaaccatcttttgccaatagaatcccgctctattaagtaaccatttcatcttggtgtaggatccacgaagttaactagaggggggatgaatagcggttttaaaattttttgtctgaaaccgagttttgtatgcggaagcataaatcaaaacggttttgcacaattcaaaacctaaacaactagtctaaactaagtgcacaaagaagcctatgttgaggtttgcaagcctaggatgattctagcacaaataaactctagtatgtaaacttgctcaaagtaaattggcacaaatataaattgcacaaaataaagaagacaagagacaaagtattttttcacctgatgtttgga

SEQ ID NO: 30582 - DNA, 441 bp, Oryza sativa
  unsure (1)..(441): unsure at all n locations
agctngctgtctcctattcacatgctttaaaatagatttgagtttaataattgcgcgtagtcttttatgagagtcgatggttttccatatccaacttgttatgagaaatgtgagaaaataaagttctgttgagctgtattttatagtcaacagtactgcagaaccaaatgttcgaagcaaatgcacagaaactttggtgtttttcccttacaaagcaagttactgaaaatttataaacacattttcaaatatgtgacgatacgctntgactttntagatggcttgctagcagacaagagcgaaaatacagcttcgtccgagctatttgatgaacgcacaagcacctcttctttatgaaactcaacagatccaactgatcctgtgtgccctaattaggatatttctctcaattaatttaagggctgtaccagagattttatt

SEQ ID NO: 30583 - DNA, 424 bp, Oryza sativa
  unsure (1)..(424): unsure at all n locations
tactcagcttctcggtggtaaggacggtgctgcctgataatcatggtgttatgtccaccttgatgtaccatcttgttgcgaggcttatgactgatcctctgcgaagttctaaactgagctgccttcctcttacagctcattgtgttgcactgctcctcttgacagatagccctgttcactagcttctcaaagacctcatagtccttggagatcagatggttggtcaattcatcatcaagacttgacagaagcttttcttgcctttcgggttagtgcgcacgtccttatgaacgtatcgcacaatgcngttaaactcatgcgaaaactctatgactattctggatacttcgtgcaaagaacgggacctccttttcttttgtccacagtcctctagtgacctgtgcctattaaactttgacaaact

SEQ ID NO: 30584 - DNA, 413 bp, Oryza sativa
agcttcaacgggaagggagctttgttgatattgcatttccgcctaagatgtgctttatgcctcaatactctatggtgggcgggaattttcagaataatgtgatttcaatgcgagaccgcgggtttcagaaaaaaggctcttccaggcaggacgaatatggtcatgagagaatagaaaaaggtacgtccacttctaaattgtggtgtgacatttgcctaagatctactcatactacatatatgtgctggaagaaaatgacctgcaacaagtgcaaaagaaagggtcatattgcaaaatattgcataactcgggaaaataatcgggctaattcttcacacgagcaggaatactctgacgaaaggttttctcttgccatactgctcaagacgaaaaagatgatgtttgggttattg

SEQ ID NO: 30585 - DNA, 408 bp, Oryza sativa
caaggcgcacgacctctccccgagtatgagcggtgacgacagggagccaaacccacgccgtcgagcttgtacttcaaccgccccttcacgccaaagttctatgcgggagaaggcgctcgagagggccgaaggatccgcgacttccacacccacaggaggtggagaagggcggcgagatggggagcgtcgccttctcgtctacggcgacggcagcacgctccagggcgcgctccaagctgcgggcgcgctcctacatcacccgcccgtcgcccatgacccggagtctccagcccaacgttagctggacgatgtggccaaattggtcatgactgcacggcagcgcctagatgctggtgggcggtcctcccgcaccaaggcctctggtgctgctaccaccggctccgcatc

SEQ ID NO: 30586 - DNA, 387 bp, Oryza sativa
  unsure (1)..(387): unsure at all n locations
gaatctggagttgcgtaattccggtattcttctcagcaatattgagtgctcctccctcacctccttgtcctttaaatgtgtgcacgtgacagccattcccatacaactcttgagtggtaaccttccatctctacaaaagttaaacataatcgagtgtgaatctctcacatttattggagaatcgtatcccctcaatggagcattctcattccttactggcctaatcattgaatgctgccacagattgccaaccctcgatggcctcctgaagaaagaacatctgcccgccattgagattattanaaattattcttgtactgggttactgtccctgcccggtgaaagggttgggagttttacttgtctcagtgatttgagaatttctca

SEQ ID NO: 30587 - DNA, 410 bp, Oryza sativa
  unsure (1)..(410): unsure at all n locations
cgctgagcaaaactcatacttaacaatatgaactgactntgttatcatatcagcatgattatcatgagtgcgtatcttgtttcatttagcttaccttgtgccactacatcgcgaacataatggtacttgatattaatatgcgttgtactctcatggaacattngatctttagtgaagtatatggcactttgactctcacaaaacatgctaatgcatgaatcaacttctttttgtttgatcaagcaatgatgcgtcacgctcaaaagttaaaatgcttagtgggtcactcgaactatgctagaggcctcatactagatacttctttgaaatgcatgataatgctaaagaaaataatatgaatatttttcaggggcatgcatgtatatagatcatgcatggtcaacactaca

SEQ ID NO: 30588 - DNA, 440 bp, Oryza sativa
  unsure (1)..(440): unsure at all n locations
agcttggtgcaactngataggttgagcaacttatgttcatcaagaccggagatagatgaaggtaactcacggatttcaggacagcatgacaggctgaggtgttctagcctcttgagatcaccaatgttttggggcaagttcttgagtttgccacatccatgtagattgaagtatttcagcttatcaaaagctccaacaaacaagggcagaacttcgatgcatgtttttgagagatccaaatactcaaggcttcgcaagcagcacatttcgttgggaaagtcagttatcctgaagaacgaaacgttgagatatctcanatgcttcaattcaccgatagaagtaggtaattcttgaaagaggcatccactgagatccaagagacgtgagtatcttaatattgggaatatatccgcaataggcattgntgcctcacaatttct

SEQ ID NO: 30589 - DNA, 261 bp, Oryza sativa
  unsure (1)..(261): unsure at all n locations
agcttgatgaggagaaggggaagggaggtgttgatgatgtttatgtggntgctancccggtgtggatgccgacgttgatgagtttgctcttcaacaaccggaggcgccgtggcggcgaaaaactgccgagtgcttccccatgcaatgcctcctccctcaccgttgtctaggtgatggaccacacccccggattgggcgtggagcgtgatggtaaatagggggcgggacgtctgctgttaattattttacatcgcacgtgtg

SEQ ID NO: 30590 - DNA, 442 bp, Oryza sativa
  unsure (1)..(442): unsure at all n locations
cagcttaccggcaagggtttttctggcctacagctgtgttcgatgcagacaagaatgtgccgacatgccaaggttggcaattttttgcccgacaaactcatttgccagcccaagaagtgcaaaccattcccgtgtcctggcccgttgcggtctgggggcttgaatggccacccgttaaaagggtagtccacgggtacacgcatctctntgtggctatcgacaaattctccaagtggattgaggctaaaccggtcatcacgatcacagcagataaagctagagatnttttcatcaacattgtgcatcggtttggagtacctaatcggatcatcactgataatggcactcaattcactggcggagcattcaaagatttttgtgaagacttcggcattaaaatttgtacgcctctgtggcacaccctatgagtaacggacaagtc

SEQ ID NO: 30591 - DNA, 350 bp, Oryza sativa
  unsure (1)..(350): unsure at all n locations
gccaacgacccgggcgcattggaatgagcccccaggcccccgccaatctccaaatntttctttttctttcttctttttggatagaacaacttaatctgcaatcaaaaatgatgaaaaatttctatgttaactttgttttgttatgcatatgagttgaggatgatttgtgccgtggtccttttgcattttagcttgatttaagggctcgtgctcaagtcccgatcctcaaatggctcgggtcggggctagtgcctggggagatccacatgtcgagactggccaggccgggaacatggtgaccgagggttatgggtgacccgattgtgggtttttgccgattccccccggag

SEQ ID NO: 30592 - DNA, 440 bp, Oryza sativa
atgcatagaaatgttaagatatcttacataaaaatctcctagtttgcacccaaaaatatttgaatattgctcatgactttccttagcttggccaaagcaaaataattcactcttgtggaaatttatctttaggccagataaattttcaaaaccagttaaaatcaatttcatatttttagctttctataaatcatgctctaaaaaaatgatagtatcatcggcatattgtaacatagataaaccatcatcaatcagatgttggaccactctagaaatttgaccatcatcttttgctctctttattaatatagctaacatatcaacaactatataaaaaagaattggagataacgggtccccttgccttaaacccttgtatgtttgaaaatttgatcccacttggtcattgactttaatgccaacatgtccaccttgataaa

SEQ ID NO: 30593 - DNA, 436 bp, Oryza sativa
agcttgtatcttttgcacatacaatccatgatataaggcaactgaccatgggctgcaagaagtacatttcttattttctttttgtcagatgttctttaatggcccatttggataagggggttctgccacaagggtagcaaattgctgcctctctctttttatcactttatttaatatattcagggtgctatgtgatggaatttattctactttttgactgagaacttgctcatctatccattgacttcataagattccgcaacatagtttggtagtatttctgctacagtttgaggacattgtacccagggccatttggttctaatctacatattttaactgtatatcttctgtttggctcctaaataatgtcatgactagctgcttctcttgcttggcctttatatcttacttctggtatcttaattgacttctg

SEQ ID NO: 30594 - DNA, 285 bp, Oryza sativa
aagtggggacagtctcatctaatcccacgcattacagtgatcacccatgtctgagatattcggatcccacttcttttaatctctaattatgacatccctgtatatatacatgcaagacaatatcctatccaagacgatgctgctgcttggatggaagaagaaaggttgataggtctatgtccaccttgtttggttattcaactaacatattcaagcgtagtctgatcttattcttgatacaacagtgggcgacttcatgctcatatctttttacactgatattga

SEQ ID NO: 30595 - DNA, 369 bp, Oryza sativa
aatacgggtttatacatactacatgatataatatcgtcagtgctttgctacttagtgaaacgtgcagatataaaatcactctgaccttgacaagagctgcgtgctagtcaaatagttaatgcttgtgttggctaaaaaaatgtttgtcaaacagaatagtcacgactaaccacgcgcatcattataatcacccatcactctaatgatgcccggatgaagaatacatctgtggaatttaatttctgaatataaaattttcttcatactcaatatcttaggtccaggctatcgagatatggcgtcttctaaggattagatccccatttgctcgcataatcttccgatatagaagaagtctagttatatatg

SEQ ID NO: 30596 - DNA, 373 bp, Oryza sativa
agtctttgcttataccccagtgaacgctgtgaagatgttcccgaagcccatatacgtgctgatattttgatggaagcctaatggcttgaataaggcatatatcatatataagatggctttaatcatggttgatggcgacccccgctttcctgggaccgggaataatacacctcgcgttcggataaaaggcaatttttctccggttgcgacaagctggtgtcataaccattccgactgtaagttacgccaaatggatataaccttaggacatattttatgaatgaaactttgtgggaaaggtcctttttctccttcccgtatgctatatgcaaacgggtacttcgctttccttttcggacttttactaatacta

SEQ ID NO: 30597 - DNA, 430 bp, Oryza sativa
  unsure (1)..(430): unsure at all n locations
gcttacctttatcctcttatgcatctctcaaaagaaaactcctatcattcctccacgtgtaattcaggctagcttcttcttgttaaagaaacgtcaacagctcattccacatgtcagaaggctacaaaaggacatatacagagaaatagggatccccaatactacggtatgccattattccactttgacaaaagaatttgtcttgcactcaagctatactgaaatgatcgctgaaaattntgcaggtttcggtttctatgcatacatccaaatataaggattccacttatgtaaaatttggtattctaccgaacccaagaaattcctccataagtgcacaatccattattgccctgagaaaaaacttgatacaacttacgcttgagcagtcgaatntatctttgacatcatctgtctttggagatccaca

SEQ ID NO: 30598 - DNA, 451 bp, Oryza sativa
  unsure (1)..(451): unsure at all n locations
gcttatactttggaagacgagtgtctcccagcttattcaataataatgctcatcctgtataggggcataaatggtcagagagtacaaatcttttcccataagggcagataatattcaataaaaatctattgaaataattcattaacagaaaagtcagatgctacaatgtcacaaatattctggcagttcaactgcacgttgtttctatactccctccgtcacctaaattgaaggagttaaattttatcccacaacaatagaagaatttatacgtaaccgagacaaagtgattttttaaatactatcacgataatctccaaaataccatattatattntgacaaagtgtactgcatgctagttcggtgtctggtttgttttcaacaccgattggtgttaatcacatgatacacctttagtaacttagagaatacgtatgtacannttaaatt

SEQ ID NO: 30599 - DNA, 448 bp, Oryza sativa
  unsure (1)..(448): unsure at all n locations
agctttcgccggcgacctgctgctcatggatggccactgcacgcctcttctctctctcaggccacaggtcgatcaccttctcattcacttcattacttcttctctagctctactcgtatacgtatattatatcgctttagcagcgacctgtttactgatcgatcagtttagtttgctagtttggaatcatgtatatatcttaagataggttgggacttgggactagcgcgtctttaattctctttcattcatttctcactttaagtctttcctatcataatctatagacgatggccgngtgcttactgcttctgctttgctttcagtccaaaaatttagggtacttagataaagaaatttcagggtatacttatntagctgcagattatataatctatcaaactaacaagatccctattatatacatgcgcatcaagtttaaattctc

SEQ ID NO: 30600 - DNA, 443 bp, Oryza sativa
agcttctcattcttgccttaccaggaacccggtttggctccaaccgaccccgccccggcgttcccaactattggcatgtgagggttccctgaaccgactagttaacttagccagggtgtcccattccacccttgtggtgcactttgattatgctcgatgagtttcccacaggaatcggtccttatatgcgaatactggacagcgccacgtagccacagctcccgcatcgtgagttttcacaattcattttatttttcaaacacaccgacatcacatgtcgggttttcaaggcttcacaaacccatttcccaagttttcgacaatcaacggtgtatgtgggatatttggtatgcgcgctcagagagcacggatactgatgtaccacaagggtggagcaacaaggaatcagggtagtacaacctacaggagttagtgcgactact

SEQ ID NO: 30601 - DNA, 222 bp, Oryza sativa
tgtccaaaaagccaagcttgatatgaccgaagaattcacataatccacggtggatttcatcgcacgttatggatgaccaccatatgtggcgagatggatgtatgtggcgtctgatataacacgtgtatgagaagatgccttggactttgagtgggctcaacggtgtgctggaggtgagcccatggtctgagatgtcaaatgtcagcccgtgagttatctgat

SEQ ID NO: 30602 - DNA, 391 bp, Oryza sativa
  unsure (1)..(391): unsure at all n locations
agctntgtactattattagaatactcttgaatatatatttatggtattgaaatactttccgactatatgagtacctacttcacattatgttcatgttatactgaatatacggctagcttatctgggagatgctttggtgcgggtataatgtttgcgtatgcaattactctatgtcatgacgataatattacagtagtatctggtagtttaggcatggtgtctagattacgggatatcattatttggggttatttatttcggatgagaggtgggccgctgatggtgacagctcagtatgggtattccttcgcgccggtatataatcctaagttaattccctagggagggtattcctccgtatttaacctctgntgtatggttatgatgggct

SEQ ID NO: 30603 - DNA, 446 bp, Oryza sativa
agcttatatgcaactgaattgcttattaaaagagataagaactaatgcaacaaaccggaaccaactgaacaaactcgagatatgatcctattgccaagccgtactgtagcgcgtccgaatcacgccattcatgctgccgttgcgcgatctgattgatcgccctcatcacgcgccgccgatcccgtgcatcccgcattcatacgcctccgatgatatccaattctgaccatgataccttaaccttaaactctgctaaaaaaaacctagcatacttatatattttcgaactgaaggagtatttgttaagtttatttctcaaaatattaatttaccgtgttaatcaagtagatcatccatttcatttcacccgtgtttcatcactttcaaatggggccttattttgacaaaactatagttttaagacacaataccacacagctagtatc

SEQ ID NO: 30604 - DNA, 268 bp, Oryza sativa
tactctagtacctatagtaaagcttcttgggtgtacgtttttacaatcgagttatcaacatacgtgtcaacagtacgatctatttggctacccaaagaagaatcatgagtacgtttaaaaataggacctgccttgtttaacccgagaggcattgttctatatcattaatttcctatgtgggtaatgaatgcagatatttactcatccttcctagccatgctaatctgatgataaccagagtatgcctttagaaaacacaaaatgtctc

SEQ ID NO: 30605 - DNA, 359 bp, Oryza sativa
  unsure (1)..(359): unsure at all n locations
agctntaatttcgcaccgacgcatatatgcttctggtggtctttgttcccgggtcagacgaggaggaggctggtagccacgaatcggccattgcacgcacgcggacgcggtacagtaccatacttgtgcatgcctttcacgtcacgtaccagtgaactgcatgcgcgcattcgtggagtaatggtgcatggcccggcagatctttcccaattgaccttacctctggggattactctcgcaccgccagctactctactactatactcctacgttacgatggatggatggacgtacgtggaggtgaagtaagcacgtcaaactcgaacagatggcgcagcgcctgcgcgcgtccgaacttg

SEQ ID NO: 30606 - DNA, 412 bp, Oryza sativa
tacatgcatggacacattccatctttttttccaagatcgagtacgagtatacaaataaaatacaatgatgcatggatgcgtacgtccagaagcagatatggttggctgagttgtttaattacggtgtgatcttttcttcatgataaattaaataacgtaccatatgtgcatgtggcatctcattgcctacttttatcgagtcccatatatatatgtagaacactagctagaacctgcttacaagctggcccagcagtgatgtagaacaccacaactctcttacgaaaacaatgcgagaatggtaacaagctatagctctagtgtcgatgggtacacacaaaatcttcatgctatatatataggtcttgctagttcaatttttcatcatattcccaaggcatatcgatcaaca

SEQ ID NO: 30607 - DNA, 367 bp, Oryza sativa
  unsure (1)..(367): unsure at all n locations
cgatcctcaactatttctcgcgatatcttcttacaaagtttgttagggcatctataacagcctctggtttaggtgggcaacccggcaagtagacgtccacaggaattaacttatcaactccccgaacagtactataggaatccgtactgaacattccaccagtaataagacaagctcccatagcaaaaaaggagaagtcattccaatcctcaattctcctttcgagattcggcgatagtgaatcaatngaacgcgcttcgaagatatgttctacttttggaagaccttgcgttatgtcactagatctcgctttttcgtatataaacgtaactaacctatcccctttgtaaggatttctccataatga

SEQ ID NO: 30608 - DNA, 355 bp, Oryza sativa
  unsure (1)..(355): unsure at all n locations
gttcgtctctgacgagggagttactgggccgaatagagagcccattgaaaagcaaggcccacattgcattctgggtatatcataaattttaaatagaaaatttttgcacagaacatattatataaacggtttgaaatgtgctgttggaaactttaaaacaagaaagttatagtttgaaagtaaagtttaaactcgtccaataagtattcaaagttattttggtagtcgagaattgcgatggtatttcattcttttattctattattactttcgntctaaaatattattattaatttatttttattggatgataacatataaatacttctgtaactatttttntaataaaattttc

SEQ ID NO: 30609 - DNA, 306 bp, Oryza sativa
  unsure (1)..(306): unsure at all n locations
aaccaactttgtacaaacaactcccactatggagatcttcaactctggtgggggggaaacgatagccatactgagtacctcccaccggacctcaagaagcatacctgaagaaggaggatgatgccggatataacctaaagacgctaaaaggtccttngccttaagctagcatttaatagccgttgttgaaagcactaaaacagttgtagtaagtaatcaatattaatccagctctgaccgacgctacactccgttgcgacaggcccaaccaaccacctgaactacaccagatgtattagctaaact

SEQ ID NO: 30610 - DNA, 440 bp, Oryza sativa
  unsure (1)..(440): unsure at all n locations
gcttgtagggntaggaaaaccctactcacctagttataattatactcattgtactcttcgtccacattgctgattaattcatccatgttactacaatttttgaggtatgtcttcgattgaagagaagcaaagagacccacatcaagcacattcatgtttggtgaattagggcgttggttcatgatgcgtatgtctaggcctacttgggccaccgcgagggcaaatgcttcgtcgtttggcagaatatgtgtccgtgcattgtcttgctgaatccaaatggtcttccctacatcttctctcggccaacaagaggcaatagttggaataaccttngtaatcaagaaagccctacttgtttctctcgacaccgtaatagattntgtgaccaatgtacccttcggcctgttgcgactactcctttgtgctggctcctaacatat

SEQ ID NO: 30611 - DNA, 427 bp, Oryza sativa
agcttcggatgtgcatcgactacttttaccttatcaaggcatgtcctaaggatccttaccccctgcctcgcatagaacagattgtcgactccacagcggcgtgcgaccttttgtgttttctagatgcatactctggttaccaacagattcgcatggctagggaggatgaggaaaaaactgcgttcattacccccataggaacttattgttatacgacaatgcccttcgggttaaagaatgcaggtcctacttttcaacgtactactcgaatttctttgggtagccaaataggacgtaatgttgacgcttatgtcgatgactcggttgtaaagacgcgcaaccaagagaccttactctcagatctagcggaaacttttgagagtcttcgctccgcccgcataaaactgaaccccgataagtgcgtgtt

SEQ ID NO: 30612 - DNA, 408 bp, Oryza sativa
  unsure (1)..(408): unsure at all n locations
agcttcacataatttacatttgtcttataatgcagagatgtctgagtaattgtcacaaattacactctacctcatatattaggatttacagatgcatgacacgctccaccatggacaaaaaattccatcttaactacaaaattgaatggctaattaagagaccaagtctttcacaccatactatctcggtctcaacatatagctatntatgtcattttttggagagattaaagtcgaagtgattgcttaagatgagaaagtaggtaaaagaattaaatgagaaatggttatgattagttgagataggaaaataggtgaagaagtagctatattataagacaaatttaaatcctagatatangggtacatgcataaaggangaattagtaaacaggcttttggacacac

SEQ ID NO: 30613 - DNA, 420 bp, Oryza sativa
  unsure (1)..(420): unsure at all n locations
agcttttaagaaatcagagacttggctagaactatcaagcacagcataaatacaccagtatagtacaaattatgcctccatttgttccaatcatactcagtcagaatcggtcctttcatcatcagagttatcgttactcggctgaaggtcattgttgcggaattgatctaccacatcgcttgcaatcttgtcagccgtattttgagcattgttgataagatcaagagcagcttcttcgcttgtcccatctgcaaatccatcaatggtgtcgatttcaattctcgggtacaaggatttggtcatcgctaatgccaagctagctcccatgcttccagctntcttgatgttcttgaagtatacatccggtgcaactcttagcttgtcaaagatttcggttgcgtcaagtgcactcggaccact

SEQ ID NO: 30614 - DNA, 354 bp, Oryza sativa
agcttggaagagaaattaaacttgtttgactcttaaaacctaatatgcacaactaggatagagtttccatacgacaatgaactccttaatttgctccccggccgccgacgctagatatacctactggctgcgatcccctgctcgccgtctggggtaggggctgaattctgaattctgaattcaatcacaggtttacaacgcaatctgaattctgaatgaacgagtagtaatgctaggagtattccaagatcaagttagttccatgtactccaagatttctgaattgaattctgactgaactagtgctacgaatatatttcttttttcagcgagaaaaagactgaagtatggact

SEQ ID NO: 30615 - DNA, 361 bp, Oryza sativa
tattaacattggatacttgctcaactggaaacatggagcttcttaatcatgtcatcaatggagagcctagcacagatagagctgttgtgtgaaaagctttacaattctaaagactctgctgagcgagcacacgctgaaagcatcctcaagtgcttctcggagaacagtgactacatttcacagtgccaatatatattggacaatgcctcaacaccatatgccctgatgctggccagttcaagcttgttgaaccaagtcaacgaccgcaggctttcattgcaatagcgccttgatatccgtaatgtttcttttccaaaatctatcatgaaatcagctattcaactattgttgctattctatt

SEQ ID NO: 30616 - DNA, 440 bp, Oryza sativa
ccctgttggaggggctaatggttgaaggccgcgaggcgagagccttgccacatagggcatgggtttcgccaattattgaacattgccaggagaaggcccagcgggccgacacgccttccagaggcttcgccagggacaaggccatgtcacttggcccattatgaacccatacgaggcaaagacactgtatacccataaagatgtccctattaaaagggcaaccatgtaaatttccctgtaaagcctaaaccgccatgtaacagggggatttgaaaaaaatttactaagcaatacaattgtctttacttccaaccactgttaaaagaaccacgtccttcgacgtgacgcagttgttgattcgacaacaatatgtatactagaagtataggaatatattcttttctattttctttccacttagcttagataacttaatagga

SEQ ID NO: 30617 - DNA, 383 bp, Oryza sativa
  unsure (1)..(383): unsure at all n locations
cttagggatgtgcaatgcgtcaccgggttgttttgtctgttctaagtcggntcatatcgaggctgggagagaatgcgctacccttatttaagctcctcaaacgctccgggccgtttacttggacggagaaagctgaacgtgccctcactcaattgaaggcgtatctcagctttcccccaattctggtcgccccggagccaaatgaacccttgctactctacttagcggcgacccctcaagtggttagtgcggcgttggttgtggagcgcaatgaagacaatcctcattccgcgcacccccaccctgtgctggcttggcccgggaaagagcaaggaggagaggcccccgaaccgaacggtggcccaaggcccccgacgaccgga

SEQ ID NO: 30618 - DNA, 429 bp, Oryza sativa
  unsure (1)..(429): unsure at all n locations
ctttactttggctacaccgtgatgttcttcctctgactaagaattctttgcggggatcatttaaacttggattcattggatttcaaaatgccacttggtctggtttgacaccacgtctttggtttaagtgctgttggctatctaagatctactctctttgtgaggagaatctacagaaacatctaatgcgactaaattgctactctgaacatcaaatgtgaccaaagggctactccgttgccgatagatcctatcagcgaagtgtgtgttgctggcgcangtccattgtggagtaatgctcataagattctgatcaacttttggaagctatacaggagatngttctccctttggtttacgcttctcttttatggttntcttttacttcatttntcttcctggagctggcctcataaatgtatacctcat

SEQ ID NO: 30619 - DNA, 450 bp, Oryza sativa
agctttgtactccctccgtcccaaaagaaatgctaaccttggtttcccgtgccaacgtttaactgttcgtcttatataaaatttttttataattaatatttttattgttggtagatgataaaacatgattaatactttatgcgtgacttatctttttaatttttttcataattttttcaaataagacgaacggttaaacgttggacacggaaatcatagtttgtcttttttttttttggtacggagggagtagaccagtcggataggccatactttggttgtttcttactacagattggactatgctatgcatgcttgaaaactgaaataattgagaatttgagatctcatgaacaatttgagaatttgtgaccatcgtgcagacttggagtaagcaaatgcaatgcaccttcttcagtagagcatgtgtgatctagtcatctacaaaca

SEQ ID NO: 30620 - DNA, 389 bp, Oryza sativa
catgcacaggaaaaataaaaagatgttggagtggattggttggtttcctgtggaatggattgccaaggaaattttccttcgaatttcctctgattttcctacaggggaatcctttgatccgaatgctgctacagtacccgaatccataggaatgcagatcctatgtttttcctgagattaccctccgatccgaataagcccttagcgttttagatatgatctcatttacaaggattgatttatttgggtgcctattctctattatgccatattaaatacggtagtttgcacattatacttaattctaatgtagtctagtggattgagtccaccattgaattttgtgcatgttgggttcgaagcattgccatccttggaatgtatacata

SEQ ID NO: 30621 - DNA, 369 bp, Oryza sativa
agtgaatgttcactatcttttattggctgccatcatataactaataattgagagtgtcaagcaatagggtgtcatataattaataattgggagtgtcaaacaatggcggcgccatcatataactaataattaggagtgtcaagcaatggcggcgtagccaagtgcagatttttcgtcgacagccgtggagtgaaggttcactttcttttattggccgccgcaatataaagtaataattcgtggaatgaatgttcactttcttttattggccgccatcatataactaataattgagagtgtcaagcaatggggtgtcatataattaataattgggagtgcaagcaatggcgatgccggcatataactaat

SEQ ID NO: 30622 - DNA, 346 bp, Oryza sativa
  unsure (1)..(346): unsure at all n locations
gggatgggagaagggaataataatgccaaaatagagagaaatgccagctttgactgcactgcaccacaccacctatctcactcacactctctctctctctcgtctactctctctatcgctcttgctcctcttgcttcccctctgagagaaggcgtaaatccttaaacattctaactggccaaaatgcctgggcaacacctgtccgtctcttcttccccacactcacaggctcagcagatataaaataaaaggcacccgtatccggtggtgagctataacaggatggagagagaataangtgcgctccccactactgcagacacatccctctgttgcccacccaaaa

SEQ ID NO: 30623 - DNA, 329 bp, Oryza sativa
  unsure (1)..(329): unsure at all n locations
catccgtttcacaatgaaaatcatattagcattttccatattctactgaggttaatgaatctacatatgagaaatgctacaatgacttacattgtgatacggaagaagcgctctgtagtatcttcagactacagaacagagttacactcgagataatgtgtatagatggctcagacgaattgaaacttgaagagtntgcgaggacaacacatgccagagagcagtatgagcatcgacttagtagagaaaaatatcccttgaaattttacaatcctattcctatataaagatgcattttttctagacagtgtgcgctttgtttggcatca

SEQ ID NO: 30624 - DNA, 435 bp, Oryza sativa
ccataaagaccctaatctcctgtattgtctatttaccgccttgttcttttcatgcataattttagggactatattagggtctagatcaactcatggatatgcttttgattctgccccaactcacttgttatatgtagcttaaatattggatttaatatctttctgctataatgagttgatgccaataatggttagaggatttttgctacatatcttatccaatcgttaaatgataggcagagccacacaacggactaaattagtgctactgattttgttgcgaatgtttagacaactcttttgtttgattcccaggtgattgtcatgacgcatgcatatgggaatcgttctggagtacgatatgttacaggtggctttgaggtttattatgttccatggaagccattcctgatgcagaatacattgcctacatta

SEQ ID NO: 30625 - DNA, 404 bp, Oryza sativa
  unsure (1)..(404): unsure at all n locations
acctgcagcttgtgtgcatatgatacgatttctctattattgtgtagggcagccatacatcaaaccagtgtgcaccctcgtcaggtcatctcaaccagtcagagttaattcttgctttcgagaacaattggatgtacttagtgaggtaacgacgatgtgcgtgagatttactacaatcgcaatttatttgaaacagagacagtactgataaagtgagcctatgtatcaagtttagaagattgctctaaggtgatgagtgtactttaacacttgtaaagagcattggcttttatataactagaggataccccgcgcgttgctgtgagaccttggtcacatcaatntgttgcctacgatgtgccctcttacgaataaacggaccgaaccaataagctttttggaga

SEQ ID NO: 30626 - DNA, 277 bp, Oryza sativa
cctatgggatgtgaaattttgcgatttaattgattcttcaaaggtggaaaaagactgaaacgatgatctctagagcatggacagaacttgatgctcatttacagcatagtctatgatcttatctaaaaacaaatctgattgataagtaacctgcagaagaagaaacatgtggttacataagtctccactgcatactatgcatgttcaactctataaaaccaaagttgatgccactagtttacacagcaggctaattcatctcgaacatacatatatt

SEQ ID NO: 30627 - DNA, 336 bp, Oryza sativa
  unsure (1)..(336): unsure at all n locations
gcgagatatcaaaatctcctcttatgagcttgtcaactcttgtagatgcctccgcttgcccattagcttgtgcataatatggcgaagaatacaataatttgatacccatgctatcggccaattgaacaaactcatcggtacatgaagatcgagccctgatcggttgtaatggtctgaggaataccaaactggtaaataatatgctcttgaacgaattgtatagcatcctctgaatcaactntcttcanagagatcgcttctacccacttggtaaagtaatcggttgccaccaatatatacttatgtccctcgcttgaaggtggattaatcataccg

SEQ ID NO: 30628 - DNA, 380 bp, Oryza sativa
  unsure (1)..(380): unsure at all n locations
ctcgtcttggttgggccatgccaccggcacaccctacctggagccgcattggccccaaccacaccacctncaaggttccaacttctcttcgaggtcttggatagacatcggcaatctcagatccaccgccaccacctcgtcgttgcctaaactacaccaatcaactctaaccccgacatcgccggctgtacgccctccacacctggatcatgctgaacctgcctctgcggcctcatcgacatcgccacatcagcaagacacccctttaatctgatgctcgtctcctcaacctccaccgcgttgtctagaatgagcatcccaggtgccagtgatctgttgtgtacgattcataccatcttatgntgtattgtaacggaact

SEQ ID NO: 30629 - DNA, 428 bp, Oryza sativa
  unsure (1)..(428): unsure at all n locations
agctngtaatactcagctacttgctcaattttttctcaatatggtttagatattggtgctatttgcttggtgcatcgggttgctaacagactccgacgactaccatggcgacgccgacgaccaccgagagaaacagggcacacaccgtctatgcggcggtggaagaagaggaggacgccggtcaccacgctcgcccgtctgccgncaccgncactccgcgccttcgctcttctccgcttcgccggccgccgcgcgctcgtaggccacctgcgtcgaccgccggtcaacccggctcgctgctgcctgttccgtgtgctactccctcacggcaaagagaagttaccaaaggaagagaataaagaaaggggaagtaatgggtggtgatgtggcacgctgacatgtggggtccacgtgggtcccacaccgac

SEQ ID NO: 30630 - DNA, 432 bp, Oryza sativa
cttgccgttcgccttgggaacgaccaccgtgttctttagccactccggatggatgactactcggatgaatccggcctccagaagtctcgccacctcctcgcggatgaaggcttgacgttccggggcctgccgccgtactttctgccggaccggccttgcgcccggccgcacggcgagaccgtgctcaatcacctccctggggaccccgggcatatccgccggtctccatgcgaagacatcagctgttgcccgcaggaaggagacgagcgcgtctttctatttgccatccagaagaccaccgatccgtgtggtcttggatgggccgtcgcccaaggcaaccttcttgaccgggacctcgtcgcatgtggcaatccgctgcctcggggcggtgggggcggaggtgccaagcctctcgtcaccaccctcgggctt

SEQ ID NO: 30631 - DNA, 432 bp, Oryza sativa
  unsure (1)..(432): unsure at all n locations
ttgatacctattgatctcgtagagatgtagcctagagggggggtgaataggctttcctgaaattctctcaacaatcgcagcggttaaattaacagtgcccggaacctcctggtgaagaacaccggaactttctggcagagatgagcagcccggaacttccggagttcttgagccaggaactttcgggcaacagagaanatcaaaatttggggaagcaaaacaggtcctagctatagacaatcaggcacaagggtgcacaagatgtaaatcacaagataccagccgattcaaacacagatcatgcacgagagagacaaaggcgaatttttcccgaagttcggatcacacggatcctactctccgtagaggtgctcaaagagccgggtctcgattaacccctcgcctcacttatgcaaagatcccagaagaagg

SEQ ID NO: 30632 - DNA, 189 bp, Oryza sativa
gcttcatataaatatcgtactacctccatattttaatgtatgacgccgctaatattttgtctaatatttgaccattcgtcctgttccaaaaaattatggtactatcatttattttattgtgaactcgatcgtcatcaaatgttctttaagattgaacataaatatttttatatttgcacaaaaattctg

SEQ ID NO: 30633 - DNA, 344 bp, Oryza sativa
agcttccttgaattgctagaagttattttattttagggttttgctcgatgtagtggtactagcccattcctccttgaattccatcttacaattggcgagctaaagattttattgagtaccacaacaacaaattagttaaatattatctaaaaaaacaaattagataaatgaacacgcgctggattagaaatataatctattcactgcatgctttaagttcaagtacgggaatagcatatgtatatatgttcacatttattaatttccacttgcagtggggaagaagatccaggattacagctcttggacaattacgatcccactcgaccatcgcgattagaaat

SEQ ID NO: 30634 - DNA, 247 bp, Oryza sativa
aaacctccttctcaaccatcattccaaaagagcatgaaacttcatctccttaaacatctggccaatgccttctaaaaatccatcatattacaaacattcttcaccaaagaccccttgtcgataataagaggccaaataaaaatgacccaaggcaaattctttcgaatatagaactagtccagatactttcagataggagagccttggtttctgaatatgtaagattgattaccctataccccctttt

SEQ ID NO: 30635 - DNA, 424 bp, Oryza sativa
  unsure (1)..(424): unsure at all n locations
ccctataatgtgtatctatatggcctccttactacagctacatggtgcatcactaggtacttgcacgaccgccaattatttttcctaagaggaagcgatccctgccgatctaacaagggttaatttgatctanaactagttctgagacatactcctgagtatcttcatcagtatggcacacgaaacaaccatgatgttataacagcaatagagtaatagactgagtttagcaattttgttaattcacttcttagcaagttattctaacaattagcatggagtttcaactatgtattttccctttatgactgatattaatagctgtgtccatctatggttggaaagttacgatgttactagcatgatggcccacgcagattgtgcggctagcatacttatactctcatataatagcatatatatg

SEQ ID NO: 30636 - DNA, 414 bp, Oryza sativa
  unsure (1)..(414): unsure at all n locations
agcttancttaaaataatacgattctgtgttatatctttcacaactatattaatgtgctaggcagaaaagacacaacatgttgctactaaaatagaaaactgtgttcaattagtgcacaacttataacacaatataattgagtggtttacaccttttgagtgngttgtgagcgctatttaccactcttagatctgggaaatatgagtaatcataacatgctttaaaatctaactgcatcattgactatgcagnaagagattattttggagctgttccatggatattgctcccctatgtgtggatatagcttaatccaaattatctttataaatatccacacatctcataaaataaatgtccaaatgtctctaaacttctgagatcattggactttataaatattaacatgttac

SEQ ID NO: 30637 - DNA, 254 bp, Oryza sativa
  unsure (1)..(254): unsure at all n locations
acaccctttttgacacaacatatgtgtggaangcttccaatgggaatggtttcacgtcaaaccttccaagtcaatgggaatcgatgaaacaagagatcatccaaaatctgttcaggtgctgcatcatcgtcattaggattgttgggttgtgtatcgtgttgaagtccattatggagtccaagcgttctagaacctatntaatcagtagccgtcatcgagttagagttggatttcgcttagattattctatcatt

SEQ ID NO: 30638 - DNA, 274 bp, Oryza sativa
ggtatgaagattctattaatcctaataacccctatgccaggatattaaattgggggtattaaatgatttcaaatggaaaagacaccaaaaccaaagttgtgaaactcatcgaggcgcaaaatctttattttgggcatttctcatctgactctatttaacaatatgaaaattgaattcaaagcttgaaagttaaactaaattctgatcaggaacgacttgcactgaaaagccctcaccacaaaggtgttaactcacaaaatctatactctatttt

SEQ ID NO: 30639 - DNA, 411 bp, Oryza sativa
  unsure (1)..(411): unsure at all n locations
tcttatcaaaaggtctttattacaaagaagaatggatcccctccttcctccctacctgatgttaacatgccgcttaataccgatcacatcatgaggcaataatagagcgaataattctaagagcgcttcactacgctcgatcacatgctgaggcaataatagagcgaataggtctcacaatactccaccatgagcagcgaaagcatgctcaaccaatcctcacttgacaccaaccagatcagggagggtcctagctactggtggngttaggcatctagaaagctggactacatctcattttagattatggttggatatcaatatatcatctggaatttcaacaactaatcataatcngagagagagagagagagagagagagnctgaaactcacattccccacattgagca

SEQ ID NO: 30640 - DNA, 422 bp, Oryza sativa
  unsure (1)..(422): unsure at all n locations
agctttgtgccaaagttggagacgcagattcatatgcttttaatgccgacagaggctgccggtagtccattgtaaaaacgtcatcgncaatttttccaaactgcagtactactgtcttatccgacggctcccctggttcgactggagcaataagctggaagttcttcacagatgcaaccataacccggccgtgaaaattcaagcaccagcactgaagatgctcatgccaacttggtactttactgttcagaaccaatgaactagggatgctattgctaagtcgttttccgtcttgtggatctactgcagtacccttgaggacgggacactgaacactgcagctcattcttcttggacctcttggtctgagtaaacttgtattataggatacctctcccacttctacatcacccgtggaaacc

SEQ ID NO: 30641 - DNA, 392 bp, Oryza sativa
  unsure (1)..(392): unsure at all n locations
caactacgcactccatatgtatactcttntgttcagcttaattttttaatgtntaattcatctactgtgtataaaatgacgatatctaaatttacataactgattaaacaattcatgacagcatgcattccaaccgtcaggaaattttagttctactctgtcgccaatgaaatggagtagtcaattttggtgatggcataatttagcaaaaatacaaacatctagtattaattaacattgaattagctaactgagtccaagggcttgtataaatactagtagaccgatgcatctggacgttttctagttttgtaaggtcgtacagatgcaaccagtcaaatcggtcattaacccctgaaagctaattaaacacgtatatttggttaacttat

SEQ ID NO: 30642 - DNA, 457 bp, Oryza sativa
  unsure (1)..(457): unsure at all n locations
agcnttctttgattgatccgattccatcgagtacacaatcatcgggcaatttgacgactcccatcgactgattcccccaatcggctgattccagccgatattaactctaagccgatgatgaacttgggctttaccaaatttcgctgttaacagcctttccatccaccccgagtcccacgccgtcgccttctccttttccgccccggcggcgttttccctttctctctgcacccggcatctcgatcttcctcacacagtcccccattgccgccacctcctcgcctnctactcactttctcatccccatccccatcccaatcgcagctcanaaaagcatcggatcacagctaaatattttggtaagtcacaaactcagaanaatccaccacctcctatctttgccttctcacactatagccgggaactacatataanggtcaaaaaataacagtaatag

SEQ ID NO: 30643 - DNA, 403 bp, Oryza sativa
cacctgcggctgcagctgtgcacttacatagctctacattttattttgtgggaccaatggagagatccaagccagccttgggtgggtttggaaacgccttgtgatggtgtggataggaacctcttcgccgcctcaacaaagataactgtgggcgaagggaatactacacgcgtttgggactccgcatggattaacggcctaagaccaaaagacctaatgccgttggtctatgagatctgcataaataggaagaaatccctactgtcagggaaagaagacgacttctgggtgcatgacctgaccctctatgcgggtttatctatcacaatcaaccttctcgatcagctagtccgcctgtgggaagcggtacggaatgtgcacttagacagcgaggagccggatc

SEQ ID NO: 30644 - DNA, 436 bp, Oryza sativa
agcttggatgttagagctagctattgtgggtttttgatcggaggggctttatggttggagtctggttatggattccggaattacgcgatatttgtggttagggtttctggattgaaatccgaatagaagcattcgaacttcgagattattttggagcggaaattttgaggaggcgatcattgatatcagggtattgagacaagggagggattttaaattgagatctttggcacaacttagactcaacactcaaagaacggaattttcgcaattaggatttttgtaaattagctttttaacgccacgcgaaaagcggagcgttacaataggttttttttaactttggcttttcaatcactaagaacatatatacaaaagttttactcacatatcatggtttaatcgcaaataagccggtatggcttataataagcct

SEQ ID NO: 30645 - DNA, 400 bp, Oryza sativa
cgacccggatcttaagcgacgagctgcactaagaactatgaactttttttcttactcacttggagctctcattgatgttggatatcttggatttgcttgatgatagtgctactcgccatattgctcatgttgcatcatctagcatttctacctcttgtgatgatcttgaggatatgtctagctctagctctagctcttgtgtttctatgtgtgatgcctcactccgttgtgagaagaatgagcttaatgagcaaatggctaagctcaacaagagcttggagaggtgcttcaagggtaagaacactcttgacaagattttgagtgagcaacggtgcatccttaacaaggagggacttggattcattccaaagaaggggaagaaaccttctcaccgtgccac

SEQ ID NO: 30646 - DNA, 416 bp, Oryza sativa
ggatcataactgactgcggctgcagcttggtcaattagtcattgtttatttaatcattagtcatagagttttgtgctcccgtaatttcggattcgatctccttcagcttgtgctttaattatatactcccttcgtttcaatatgtttgacgccgttgacatttttaaacatgtttgactggtcgtcttattcaaaagatttaagtaattattaactgttgttcctatcatttgattcattattaaatatatgtttatgtaggcatataattttatatattttacaaaagtttttgaataagacgaacggtcaaacatgtgctagaaagtcaacggtgttaaatatttcgaaacggagggagtactaaattagcttatagcatgtgaaatattaccaattaaacatatagttcatta

SEQ ID NO: 30647 - DNA, 417 bp, Oryza sativa
  unsure (1)..(417): unsure at all n locations
agcttgcataaataaacgtaaattatttttggtgtctaatcctgtgaataaaataaatacatgcagaacagagtagtaaaacactgcacaatggcaagttggcagtacacaaaaggaagtttacgacaagaggtcgcgaccatagatacaaaatcaggacgggaacatcagagaaacgcatttagtatttctgatatcatgtctttgcctttatgtactgacatttctgttcattaaacttcatgagaagacataggtttcagacgactctattcatccgtcattacctctgaactcaagtctaaaggctaaaacagtgcatggcctgcaggcactagtaaagatgatatcatatcactatatatatcagntgagttgatcaccattatctaattaccaacatcagttgagttcatc

SEQ ID NO: 30648 - DNA, 431 bp, Oryza sativa
  unsure (1)..(431): unsure at all n locations
atctagaagtggcattcttgctaccaaaggtgatgacttggtgatgccgtaactatggttgcaaaaagtggatttggaggaatggaagccaggtgcttgagcttcgagcttataaggtgcagaatctatatcccgatggtcatggggggctacctctaacttttgcagcgagaaccctacctgtgatggaagcctcattgaaagttgaagcgactagagcaagggagatgaagcgacagtatattatcaaaacgtcaagggggtgaataggcgattntaacacctaaccaaactaacctaagtttctaggcttggtgagggatatgtctaactaagaaattagattatgttntgaaaacctaagatgacaaggattctaggtatctctagaaatgtaaattgaaataagtaaatgaaacaagagaatcgtt

SEQ ID NO: 30649 - DNA, 371 bp, Oryza sativa
  unsure (1)..(371): unsure at all n locations
tggcaattggcgcttcaaagagtgtggcacaaattactttatggtgataaaaggtcttcttaacttgattaccaataaacattcatgtttctattggtcatatgcaagtatcttggtgaaaccagttactcttaactcgaagatgatatctgaatttagaagcaaacggtgcaggtatgaacaacacaaattccagtgagaacagtctgngttttgaatcacttccacttgcaatggagtggctgaggacaaatgcccgacaaaaccgatcaacttcttttcaggtaggtgctttcatcaaactataacctataacttcagaaatggtttccttttttaaatgctagtgtttcatcctaatatgtattcct

SEQ ID NO: 30650 - DNA, 404 bp, Oryza sativa
  unsure (1)..(404): unsure at all n locations
acacagtctgcaaagagattctgtatgaacgtagtacgtcaattgattatttntttaaacctggcctttttcaagttcaagtctttaaactttagacggggactcacatttatttacgggtaattattcatgtgataaatttattataaggtgttttttaaacatgttaatagaaaaaagcgtacccgtttgtctagagggaataaagngcaaaatttcctctggtttatattattataacgccgctcatttttttctagttattctttctaagtttaattaagtttatagtaaaatataatagtatttttagcaatcatattatcaaaaaaatattatatgttaaatctaataaaactaatttaatattatatatatattactaaacttctctatagatttga

SEQ ID NO: 30651 - DNA, 421 bp, Oryza sativa
gcttcttcgctgacctcgtgcccgcgtgttcttttttgtcaacggagggttgactaccactattctcctactcctgggtccctccacatccctttccacgtgcccctgctggattccctccgcattcctctacacgttcccttcctcgttcaagtactggattggatcctccgtcccctcttcttcattccaatactggctgcttccctccgcgattgtatagtacaatatctgttcctcatcgcggtcagccatctgttgatacaagaaacatctgctaaggcacgagacatttattgtttaacactctaagtcatgtatgctaagtgtaaatgttcgacattagaaccctacacaaccttacgtgctaagtctaattacatatcgtgatataagctaaggctacgtgacgtatattata

SEQ ID NO: 30652 - DNA, 303 bp, Oryza sativa
  unsure (1)..(303): unsure at all n locations
tgcggcaatggtctgagaggactacttcaagccgaactgaaaggaatacttcacaatcaattggtttccagtcctgagaagcatccaacatctgatccaaattcgggggacatccttcaaagaggagatccggagccgtgaggattcacctactttataaacttgctgtgagtatagcagaaaccagcgcctcccacaaaagtcctaccaattcacggcgcttggggagctaaaatggcagtaaaattaggctttatcangtcagtcagacgattctcaaacagtcgggctaaaaaaaaaatc

SEQ ID NO: 30653 - DNA, 442 bp, Oryza sativa
  unsure (1)..(442): unsure at all n locations
ctgagctgcagcttctcggtgtctggatatttcttctgttgactgggtntctgattacgagttaacctccttggcgacaccaatgttatatatgatgataaaagtatagggcataacttcatccaccatagttcattgttttaaatttgtttaataaattatataagtgaatgggctttcaacatatctgtgaattttgtggcgatgatgttaaaaattttctggtagtctccatctatttaagtgtgactttaacagagtatgttgatgggtttgtgttagtaaattttccgcgtaatattgcattttacatcaagtgaaaacgcacccggtttcgctgtgcaccagatttagcatgtacttgtactttgcaccaagttgtattgaaataagtctcacttaacaccatgatacataatcaaatttacaaaactttcatgga

SEQ ID NO: 30654 - DNA, 327 bp, Oryza sativa
  unsure (1)..(327): unsure at all n locations
agcttcgactgcgacacctgtgagtcttgattttgcacatcgtgccctacccatcacggccacacgatactacagtaccgaatagagaatagagagagaggggtgagccgaccaaaggcacccattcgtgcccgtcgtcgttcatcgccgaccatatcgtgctccctaccgagcctgctgtctgcctgcttgaccgaccgcgtcggtcttgccatcgtggactgacatgtgctcaagtctccggcctcaaccgtccanaagtatggttaatggggttaagcgtccaggtatattagttgggggtttgaaatgaccggatattgagtt

SEQ ID NO: 30655 - DNA, 395 bp, Oryza sativa
  unsure (1)..(395): unsure at all n locations
gatcttacatcgaccgcagcatgcaactntgtgagcctaaacccttataactattttaatcttcagncctcgcagactaagtagaaaaatcgacaacgcaatgattaaccaaataagcaaactgaattgattaaaaatcacactccattattataataatagcccccgactgacaacttcaagaagaaaacttgatgttgacagtcaagatagggaaatacaacgataaacttaagcgtagaaacgacgaagatgttcaatgttccaagagttgtcgacgagagtaccatcttctcgcttgagtcgataggaacctggccgggtgacttcagagatgataaatggcccctcccataaaggagataacttgtgccgatcccgtgtagtttgaattt

SEQ ID NO: 30656 - DNA, 189 bp, Oryza sativa
caagcactgcgagcttagagcgcgtgtctttcaaaccttacgcctactaactagggagggcatctgaggcagaggcgccctagattccgggcgagcgctgccgagaaactctaacactgcctgtatcctttgcctaccctggcaaacgtgctgcatgtcccccgcaccacgccttttctccttgactgt

SEQ ID NO: 30657 - DNA, 313 bp, Oryza sativa
gaccggatcttaagcactgagctgcatctgttagtctggcaaactgaggctatggtgtgtaaaaaactgcacaaaagggatgcccgcccttacttattctgctggaactcctggcttgaaaaacatctcctgggtcaaaaaatcacaatacggcttagctgaatcgcaagaaatatctagattgatgtgccaagagtccggtactatctgagacacgaatttcggcacctcaaggacatgtcggttggcgcgaaaaaatcggtgggcaaggctaatagaattgagaaggatctggccgcttttccataaataa

SEQ ID NO: 30658 - DNA, 337 bp, Oryza sativa
ctctctctttcttattattatggactcactcttcccttcacataggctagggttgaaaaacatgaatgatacgccctgttcctacccctaaaccattgaaaggactcacccttatattgttggtgtgaaagaccaagaacggctatagagtggggggtgaatatagcaattcaaaactttgccccgaaaatactcatcaagaccgatttcttaaattcttactagaaccgcggctatttgagaagcccgatctagataagaagagagaaggaattcccgaaactagacgaggaagagataaggaattccttgaactagaagagaggtgaggaggaga

SEQ ID NO: 30659 - DNA, 406 bp, Oryza sativa
  unsure (1)..(406): unsure at all n locations
tatgattaacaaacagataatgcgcctaatcaggtgaatgtacccacaagtatcataccaaactaccgcgattggttggaatgagcaagacattggtcttgaatgcctgaaatctattttgatgctaaattctaaacaatcacaaaactatttaacaccggtccattgcccccaacaagtaccctcaagtttgtagttcaacatatggtgaaaaaagtatctggggccactggaaagctaagacaaagccaaaatttgtgtatgcgaaaagatactaagactgccatataacaacttctaaagccccaataacagcagctcgcacatgattaactnttngcaattggctggcttggtttatatcacgacagccataatcttatatatgtagcacaattcataatag

SEQ ID NO: 30660 - DNA, 432 bp, Oryza sativa
  unsure (1)..(432): unsure at all n locations
gcttacttactactagatgctggaagttttgtttttaattgccatccccatgatctggtacaattcttgcggttaaaatcatgcattcatgatggcgaacaagtacattaccctttccgaagtcgcgctacatgccatcatcatcgactggcctctcctagagaccttgttgctgaacacatatatggcttccattggtccgaataactcccaaagctttaaacaatagtgtgctggttggcttccgaaagcggtcaacgttggaagaagtcattgtcgatgatacccccatggtttgaaaatttggaccaactggcaagcacaaacctccatcgaattgttcgaattttttcaaatattcgtgaatctggtcaaatcagncaaaatatattaaatttcaaataatttccgtcagcgaaatagtggatattt

SEQ ID NO: 30661 - DNA, 418 bp, Oryza sativa
  unsure (1)..(418): unsure at all n locations
agctttgtatacgtatacgcgtatacaaactttttatatgtgatattttntctggggtttttttccaatcttttaatatgtagatatacaaagtttgtatgtgtagatatacaaagtttgtatacgtatgtatacaaagtttatatacatgtatatatttttatacgttaaaaatgtatacatattaaagaaaaaatatattttatatatacgtttggacatactttatatatatacatataaactttaaatganactgattagtttggcaatgatattatacaaatgttttattggcacaatagctataagagataaacttaacacaattaccttacacggaacaattattatatatatgcatgttgtgttacattttgcaaatgagctatagatactcgccaggctaataatctat

SEQ ID NO: 30662 - DNA, 416 bp, Oryza sativa
  unsure (1)..(416): unsure at all n locations
tttatttgaagacattttgaaatcactaagtgatttatttctttctaagcttgggccaaaaagagacttgcgtctcgattcgactttaagagatgtttttcaacagctcagttagtaatgtaccgacctcccgggtcagatcattacttctcggctcccagagccattccacttgattaatcggctcccagagcctttttcattttctcggactccaagagtccagctgcccagcagcaaagcaatccgcttccactcgggaagcctagtctatgatgcccgcagacatcccgaatcacacagattcgtntctgaccactcaggtcatccatctgccacataggctgattctggttacgatttccacaccacaacnaactttcacanagcacaggcaaacaaatctacgcaacggg

SEQ ID NO: 30663 - DNA, 351 bp, Oryza sativa
  unsure (1)..(351): unsure at all n locations
agcttnctcagccacagcaacaactatcttgttatctcctgtgagatagatcaccaacccatgcatccatgaattggaaacaaaaactatgaaatgaggacgggagggtacatatacttggactggggaagggaanggagatggagtgtaggaacctctttgttacacttgatgcttgaccgtgctatagggatcgaggagcccactaacgtcgattggatccgcttgccagcaccttccacagctagatctagcccttccatggccggatccgttaccttcaccatcgcagtccatacctttgtacgcgcttgtcgacacaggccttacctccccctttaccaccaaagc

SEQ ID NO: 30664 - DNA, 359 bp, Oryza sativa
  unsure (1)..(359): unsure at all n locations
tggggtcactaaacaggttgaatcatatggcccatggctatcatcgactgtaatatgttgcatacctaanaagcatttcttattaatcttgcattcctaaatataactgtaaaatgtacaaccatttaaaatttgtcgatgatcaaaacttataattatagtactaattgaagcaataatatgttattgatgtcagaacacaggatataatgtcacatgaactgtctactggttcattttacgaatcactcttggtttcgaagaaatcggattgtgaggaggattaattacttactaattttctgtaccgcattacttataaagtcaataagtcaatgatatgcacatgcatagcttga

SEQ ID NO: 30665 - DNA, 398 bp, Oryza sativa
  unsure (1)..(398): unsure at all n locations
tttgtcatgccaaaatttatagtgaatttactttggtgattatatacaaatcgcaggtgcctaaaaggttatcaacttcatcctccaatggttttntttggtcatattacatttggagctatgttttgcacactcttttgtctcaaaaattttgttgtaagttgatgagagagaaaatttgtgtgggaacagaaagaatatatagaaattttgtttatttgctaaataaggttttataaaatagttgagtacgaaaatatagcgaaagttaatcttaaataaaagaaaacaaactaaattgaaaattaaaagaatttaaacttaaaaaatactaaataagaattatttggnggaatatttataatctttggatgaataataatatgtcattattggat

SEQ ID NO: 30666 - DNA, 299 bp, Oryza sativa
  unsure (1)..(299): unsure at all n locations
agcttgacgttgcgaaccactgggtctagttcctangggtaccgccccgggtggaccactcggtcaggatgatccgagcggtcaaacttaattgtcgtctccgaccaccgaagaaattggggcgtatcgggctgaacagcgttgagctctcgttcgctcagcttttgctttcttagattcataagccaggggtccaccaaagatgtggctgagttccttgcgatggtctngaaaaccagtcggcgcatgatcgtcatcatccttcttcttttacgtgccttgatctccatcagaggcct

SEQ ID NO: 30667 - DNA, 238 bp, Oryza sativa
gcaattcgccgttgtaaacccggttcgcctgcccagctgcttgtcgtgtcagcagctggctatactcgacgaccgacacgttgccgatcatcctacgggtttcggcttcagcctggtcgagagtcaacacttgcaaagtaaagggtgtagctacattaaaggtcagacaaggcaaaataacaaagcacaggagtgtatagcgaaagaacagtcttactgttcgttccctcaaggagaa

SEQ ID NO: 30668 - DNA, 349 bp, Oryza sativa
  unsure (1)..(349): unsure at all n locations
agcttaacgacgcaccgagagtcatcaggattttcatttgtcaatctgcttcaagagcttgatctcatccatggccgactctgtgtagagctgtgcactcttgtgcaccttcagcgccacatatgtgtgtatatatataacccactagttcttatacacacagggtatattaaaacagactcgtttcgtgattgtgatggtgggagtaactgaatcagcagcactcattatctacggaattaggcgatatgataccaccaaagcaatgaaacgaacaggttgcggggacaaacgaaactcgccgcaatacaccagatgattaanacgcatccaggtcgagatttcccac

SEQ ID NO: 30669 - DNA, 185 bp, Oryza sativa
acgactggcgtcattcttgataggacagcgcacagcacatggctttggagttgaacgtgaaaattgaactctggacagagatgagagatggaacactgacttacttctagataatttgaccacagatagaaatcggcgctccttgagggaaagaagcttacccacatatcttcacactcagcaat

SEQ ID NO: 30670 - DNA, 249 bp, Oryza sativa
taagaagatgcgtgatcatacatgtgatttacagaagacaacgcatacacagaccttcagcatgctatcagcttacatattttctgaccaaaagcaagaacctaattctcccatacgttgccatagaagcaagcttacaaagaggcccaatggagttaatctgtgacatctcaaaacggagatgaaagaaacaaactagcaatgagtctttagtcaacaatgcgcatcataggcgatcgacaacaaacc

SEQ ID NO: 30671 - DNA, 353 bp, Oryza sativa
  unsure (1)..(353): unsure at all n locations
taagcgacgcagctgcagctgtaaacaattatatataaaaaatttggtctattagcctattcaaatagcttaactggttatatgccaaatcatttgattgatgaagcccaataaattcataacatcattcagacttagagaactcacaatattcttgggccttcgcttgctcttcttcttcttcgtggaatgcttcttcttttgaatcctctctgcaaaatcacacacaccacacactggattactggcatacatcaaagcttatatagcaggtacgagtgtatcctcagcataatttgcacacttncagaatagttgaacatgatttcaagtaagaacaatataactggttt

SEQ ID NO: 30672 - DNA, 330 bp, Oryza sativa
  unsure (1)..(330): unsure at all n locations
taatttctctttggtgggcttattccaggattctgttgacagatataacttataccagaacttctgcggcttaattntgtccactcaagccttctctagtgccatccccatcggtggcagatcactcaggttaggagagcaaggccaaggctgctgcagctgcaacttggcctccatggctgaaacaagatgaactgacttgaatcgattttggtagtatgaatgctgnggttctggctcgcatggaaataggttttacatttcttgctaccttgcagaattgcatatcttgtttttggatgctagggagttagaaagatatatgcgcat

SEQ ID NO: 30673 - DNA, 411 bp, Oryza sativa
  unsure (1)..(411): unsure at all n locations
cggaatctaataatcccttgcggcaatgaatacccttgagaattaagagaatgcacacccaactcaacttgtaactgctgagcttgaggatccactgtataagaattgatcacctcctgaattcagatcggttggaccaccgaaagagcactatattgagaggaggaaggcattctagataaagcatcacgcacaatattatcaacccctctcttgtattggaaagaatattgccaacccatcaacttagtcattgcgctttgctgtaattcagtccccaatatttgatcatccaaatgacacaagctttngtgatccgttttaatgatacatggacctctctgcaaatacatctncacttatccacagccatataatagctagaaactctcttcgaaatggacaattctg

SEQ ID NO: 30674 - DNA, 425 bp, Oryza sativa
  unsure (1)..(425): unsure at all n locations
agcttcacgactgaccacactgatggacctttgcggttggatgcttctcttgatgaggaagatgaggccgaacactatcccaccgacgccgagcaccaccgcgacgctgatccagaacttctcccacggagtcagggccaccggaggcggcggcggcggagaagccgccgtgccgaccgattcgtgagtctccaaatttgcgctctccaccaccaccaccttcttcttcttcggcggagaggaggaggaagaagacgatgacctccatgagtcgctgctcgaggaccacgaagaacaggaatcggaggacgacgaggaggagaacgatgacgaatangaggatgaggtgtccgagcacccgcccatggatccacccgacaaggcgagcgcggcgtgcgggctgccaccgcggcatcggcggcggc

SEQ ID NO: 30675 - DNA, 347 bp, Oryza sativa
  unsure (1)..(347): unsure at all n locations
acatatttgaacgctcgtaatattcaaaanatctaactaattattaattattctcctatcatttaattcattgttaaatatactactactactcaaggtttataataatattcacaaaaagtctttgaataaggtgaacgggccaacaagttaaaaaaaagtcaacggcggtaaatatttagaaagcccatgcagtaactataacccggcatgtgtaggaaagccaagaaactagtgtagtactatgagatagcataatacatgaaacgaataacgacaggagtgccgcgtcaatgcatcattccaatgtttacaagtctgaaggtcaggagtaccaaacaatatac

SEQ ID NO: 30676 - DNA, 454 bp, Oryza sativa
  unsure (1)..(454): unsure at all n locations
accttaagccaatagagagaatgttttctattatatggngcatatggaacacagagatatttaagccatacattaactcactaaaataaaactaaggtgctatcaattgatataataacaaagggattaattcacttgttctagtgataggaagaaagagctggaataacctagntaagcagcacatgaagctgaaaagccatacatgttttcgcgtgccaatgagaggatatgaagtaatactttgtcatgaagaagatgcccaatgagctctatagntatcacattattcatcttctgtaacttgtcaacgttgtctattctttggtcagagaaagttccatcaaatgcactcacatcatctgatctagatggccaatgagccttcttatccggtatcaactctaacatgccttcgtcatctaatgccagatcaaccaactgccataacatg

SEQ ID NO: 30677 - DNA, 473 bp, Oryza sativa
  unsure (1)..(473): unsure at all n locations
agcttanaaggcatcattcagtaattcatataatctgatgcatatagcttcttctgtgcttaatcaaaattaatatccacagaacaatatttgtgccttttctctcactatttggagaaggtcttgccgtgatctttcagttacactgaacatctaatttatttaaggaagcaaagatcattatagccagttccatacaaactagtatgcgttagtcctttaaaacaatggatacatgaccatacatgcataacagcataagcgccaaaatttagctctttcatagaaaaagaatggtggattctatgtacttgccagctgaaatccaatgtccaattcattcaacctggtacacaggactgcatgattngcgaatgaaaaggccgaaagacctangctcaatgtaccgagtngaatttgtcagtacccttggacatgtncaactagttttatagctagatcggtcagtcttt

SEQ ID NO: 30678 - DNA, 389 bp, Oryza sativa
  unsure (1)..(389): unsure at all n locations
agcttattcagaagagaccgagtncttagttattgttgcatgacaagntatctattaattacgaatagttagtagcttccttttatctatacgaaagtgtgtttagtgtcctataaggactttatcttttacttttatctttaggaaagtttctttcttgtccgacaaggacttgtatcaacccatgggtataaatatgtacacccggggtctatgtaatctatctctacgatcaatacaattcggcgcatcgccatcttttaccttttctactntattttattgtccggcgggacatggcgcttgacgcggngctgcatcagtgttcgatcatcagctaaggggtaagtccaatgttccgtcggcccaggcaatggtctcatctacat

SEQ ID NO: 30679 - DNA, 381 bp, Oryza sativa
  unsure (1)..(381): unsure at all n locations
ctgcagcttggatgaccccaggcgcaattgactctttntctgccatttggtgagaaatttggacaccccaatcagacgtcaactgtacactggaaacaccacactaattacttacaaaaccgagaatatatacacacatcttttcacacattagacattcacaccaaatggaaagtgtggcctccatttgtgacacatagaaattttctcgatttctccgataatcgaactgattcatatgaaaatactgtatttttttccagaacacgtgcatataccaaaggccagatggtgcctgaagaggccataagccattccggccattagaggcaggttagctcgagctttaattgcttaaactagtgctggctccctcggatc

SEQ ID NO: 30680 - DNA, 401 bp, Oryza sativa
  unsure (1)..(401): unsure at all n locations
gcttacggatgcaacgcgaccactgttgtggcagccttttctttgtgcatgcattctttcatacatcctgccaagggtgtaattaaccatctctgctaccctctttgctaaggaattgaaggacaaatactgcgggacgaaggggatatcactcttctcccagattttttgaccaatttaatacataccgtccaggttgttgtgcattaagttagtagctctcctgtaattaaccaattgtttttctgtcatgcaggccaaatcttatgcagagaacttcaagtggaggggtcccccgaacgcagagcaagcctgagcactaatcttgcatgctacattgctagcaggacatgcacaagatggtgtttacccncatatgtgctgatattggttctccaatc

SEQ ID NO: 30681 - DNA, 419 bp, Oryza sativa
  unsure (1)..(419): unsure at all n locations
agcttcggatgtgcatcgtctacttcgaccttaacaaggcatgtcctaaggatccttacccnctgcctcgcatagatcagatcgtcgactccactgcggggtgcgaccttttgtgttttctagatgcatactctggttaccatcagattcgcatggctagggaggatgaggagaaaactgcgttcattanccccgtaggaacctattgttatacatcaatgcccttcgggttaaagaatgcaggtcctacttttcaacgtactactcgaatttctttgggtagccaaataggacgtaatgttgaggctcatgtcgatgacttggttgaaaaacgcgcaaccaagaaactntactttcagatctagcggaaacttttgagaacctccgctccgcccgcataaagctgaaccccgataagt

SEQ ID NO: 30682 - DNA, 477 bp, Oryza sativa
  unsure (1)..(477): unsure at all n locations
tgagtatactagctggtcttggggatcttgttactttttgtgtagctgctgaatntcaagaacaaccagcttgcgttcctttctcctgaggacatcttgaaggtatcatgtaccctttccgtttacaaggtgatccacttggctgtggtgatgaagcttatgagctagtctgtagagatggcagagctataattcacatcaacacaggaaaatattttgtgaaagacatctcctataacgagtctagattntgggttgttgatgctaatttagacaacagcagttgccctcttccactgtggaataatcttccctacttcaatgacatgggcactaagctgtacacttctggcagtcggtgggctacatttctaaattgctcacgggcgataaacaatggcatgtacattgcctgtgctcgcttgagtgggaatacttctttttgttatgtcttgactacatcgagctcttactatg

SEQ ID NO: 30683 - DNA, 452 bp, Oryza sativa
cccagagccacctgcggcatgcaagcttgtaagtagcaagacttctctgttatgtgcctgaagaacaccgatgtatcgccgtaattatcccttacacaatggtaatactatcgggcactctcagtatagtcaatccatctgcaccttagatagacccctgcatgttgattccttgcaataagacgccagctcgatccgcttaactatctccctgcatctctactcccttgggctaagtaacaaaagacgtgtcggaatcaattctcgcaactccctctatctcatataggacgttttgattttttcttctaagtcaaactcacgtttaacaaagtttatataaatatatacccattcctactacaccaaattaattttattacagctagacattaatatatattctaatagcatgtcgaaaatattatcatgttctttaataaattcgatcg

SEQ ID NO: 30684 - DNA, 422 bp, Oryza sativa
  unsure (1)..(422): unsure at all n locations
ttaactgaaaccaactcatcctctaagtacctgtntagctctgatctacacgcgtttgctgttggactcctacttgtaacacgtgctgcgactgaagacacttaatcacaatcgacacgtggaggagctgaaatttcgtgtatcctcatcatcttacacttcatactcactcatcagatcatatatagaggcttcacctcagcaacattcgttgcacactcttcacttgactgaccagtgatggtttcaatgaacccaacgaggtagtcaatcttaaacctaggatctataacggtggccaactctattggtccttgaatatctcttccagacttatcaaacttttgaatcatttcactgacttttctntatggagaatcacacatactgccactttctaattgctcttagcctccagattt

SEQ ID NO: 30685 - DNA, 423 bp, Oryza sativa
gcatccttcccaggcgcctgctcaactctgaccttgcccaccttctctcgaagttctacaggccgcaatgaccgaaagagggaggagaattgatctttgtagccacgaggaacaccatcgaggcaaaagtcttcatactagaaaattgaaggacgtccaaggtattggtggaaagatggcagggcaacatttgcctagagacacaactagatatcctaagttcacctatgtcttggtttactaccgggaaggtatgaaaacaatatggagacgaactggtgaatggcgatgaagaaacacatattcgaaggcacaatactacgtggaaatcttttgcatggatggttaatggagatttggtacccaatgtgcacctctcttgagatgacgatgctgtatctcgcttacagagatgaatatgta

SEQ ID NO: 30686 - DNA, 290 bp, Oryza sativa
  unsure (1)..(290): unsure at all n locations
tgtgcatcgactacaccgaccttacaaggcatgttctattattcttaccccctgcctcgcatagatcagatcggcgactccactgccgggtgcgaacttttgtggtttctaaatgcatactctggttaccatcagattcgcattgctagggatgatgaagaaanaactgggttcattacccccgtacgaacctattggtatacattaatgcccttctggttaaagaatggcagggctacttttcagcgtactactcgtaattctttgggtagtcaaatatgacgtaatgt

SEQ ID NO: 30687 - DNA, 415 bp, Oryza sativa
tgcaagctaccttgctcgatgaaatccgcgaggttcattgatttatccggatatgcacggactcctcaagaatatgaaacagggtaaagccgctggtttcacagaggatgaacacagaaccctatggaacggaaatcgggtatgcgttccagacgacagggaacttaaacagttgatacttcaggaagctcacgaaagcccctattccatccatcctggcagcacgaagatgtacttggacttgaaagagaaatactggtgggttagtatgaagcgggaaattgcagaagtcgtggccctttgtgatgtgtgccagcgtgtcaaggcagagcaccaacgaccggccggaattctcaacctctcaagtaccacaatggaaatgggatgaaattgggatgggattcatcaccggact

SEQ ID NO: 30688 - DNA, 481 bp, Oryza sativa
  unsure (1)..(481): unsure at all n locations
actaagcttcctaattcctatataactaacatatntataagagtacttctattcgtactataattnttttacaaaacttttactaacaaatttctcaaccgtttaatttaactagatggaagttgcaagaaatctagatttactcacagcttgacacatcagagnttgtaaacattttgtaagaaaaaattagtacgtatagacttttcctatntagaatataatcataattttaatatttatgggatctggtaataatagcacgtaataatagctctcaccttcgtattccatcatcataattaaaaaattggattaataattataaagcttccataattccatatataactaacatatttagaatataatcataattttaatatttattggatctggtaataatagcacgtgcaacgcacaggttagtgactatgtttaataattctattagcctactctcactctntaaaattataac

SEQ ID NO: 30689 - DNA, 412 bp, Oryza sativa
  unsure (1)..(412): unsure at all n locations
agcttccactcataatttaattcgtccacaatatgatatgtttcataacatgattcaccttatttatgaaaatagttttgatatggcaattaanttttttaatatatatatatatatatatatataanggctaatcatggactaacttgctaattaagttttttaatctatatataatgctccatacatgtgttcaaagaatcgatgtgatgttttttggtaaaaattatggggaactaaatcaggcctcagttgccaattatgactctgtgggcccatgaaaaaccatcgccttgagggaggccttcttctcctcgccaccgtgtgcttgacaaccggtgacggcatgtgcgccgcgcggcaaagggagccagcggccatcactcttcagtcttccgtcagaatcccctgt

SEQ ID NO: 30690 - DNA, 407 bp, Oryza sativa
  unsure (1)..(407): unsure at all n locations
tcggatatgcatcgactacaccgaccttaacaaggtatgtttctattgtatccttacccctgcctcgcatagatcagattgtcgactccactgcggngtgcgaccttttgtgttttctagatgcatactctggntaccatcagattcgcatggctagggaggatgaggaaaaaactgcattcattacccccataggaacttattggtatacgacaatgcccttcgggttaaagaatgcaggtcctacttttcaacgcactactcgaatttctttgggtagccaaataggacgtaatgctgaggcttatgtcgatgactcggttgtgaagacgcgcaaccaagagactttactttcggatctggcggaaactntctagagtctgcgcttcacccgcataaagctgaac

SEQ ID NO: 30691 - DNA, 444 bp, Oryza sativa
  unsure (1)..(444): unsure at all n locations
agctgggctgtttggttgagcaatgttctttcggtaattgagcatatnnngntcgacattgtaatatatttttccaccgattgtaatctgaggctctgagcctattattaaaaacatgaaatagcacatgtttttcttaaagaaaatggaacactttcttccttctcttatatgcgatcaatgagaacgaaactcctgatgattacaaaaagaaaatcggagcacacacgacattatgttagaacgtagagccaggaagcatttgggttgaacgcctaggtggattataagacaatgggttaccccataagaaaatggtttttcaatcatgttcaatngagaaaaaaaatccgtagagatgctttttgttgcagtgagaaccaccactgctntagtgtgcacactacnaacaagagaggaatgaactaacaaaatatacgatga

SEQ ID NO: 30692 - DNA, 477 bp, Oryza sativa
  unsure (1)..(477): unsure at all n locations
ttgcaagtatatataagaggagttggtcatttatttcctgtgtcaatagcacaatcatgcatcttatacttctcccgtacacaaatacaacaaattaaacgaagggtttaaattttttccataattaccaagaatcccatggagtactacttccacccaactattcctcatttaggtggtggttgaatcttctgaagatgaagatgaagattaactgtttcacgcanaacgaggtggtaatagcgtgtgctcaattgagttttaattattataaactngaaaaacggattaatctgatattntagaaacaattttatatagaaaattntcgcacgacgaaacgcacagtttaacagtttgaaaagtgtgccatgaaaatccaaaacttcatccagtggttgcagtggaaacaaacggngcctttaattgtcatctatttttatccctaaacaccttttcgcttcccatcatgggttc

SEQ ID NO: 30693 - DNA, 427 bp, Oryza sativa
  unsure (1)..(427): unsure at all n locations
agcttatcctctgttaaactatctctatcttatgtcttttttagcacattctattaagaatttgtcaatacattcaatatttaccctgtgtaaaaaacatatcaactgcttaacaagaattttattgacactcagaaaaaggattttcgtgctcagaacttggcctgtattttactgttatttattttaaataaattggttttgcaaggtatgagaaataccatggatactatggaggaaaagaagaagcaagaaagtccaactacacagacatggtaaatcatcttagtctctcagaagacagaattattacattnttgtgaatatcttattntgtaaatttgttgctctcctactcaagtcattntctagatgctcagntaaaaggattatatctgcataatttgcttcaacctgttgtctgtaa

SEQ ID NO: 30694 - DNA, 375 bp, Oryza sativa
atatccaaggtacttcagttattcactgaaagggatcaaggtaatataatgccacggttgtatatacttcagagtataaacctggattgtagtgtgacagacatgcttgcaaaacatagattttatttgaggaaatacgaagatagcttgtgacagatctacaatcaagcaaaggtgcctaaattttggactcataccaagtgctagccatcttaggagatccaattatgcagcattcagcgtttagaagtattaccactggtaaattgttgtagaaaaatatcatgtactgcttgaccttgaaatatgtggaagggtggtattagagtggcagtcaatgtacatgtataactcacagaagacagggagacatgt

SEQ ID NO: 30695 - DNA, 448 bp, Oryza sativa
  unsure (1)..(448): unsure at all n locations
agcttgagggtcggcacatcataacttgatttgtattatgatggacgtcctagtgccccggccgaagccgncaagaactatgtacgtcacaacggntgggttgtgcgggataacgtgcctggcagtacggtgtactggccaagaacaaaggcacgcggagatcatgagagcttttgtccagattcngagaaagagatgctgtggaccacaatgctcgagacattcacccttcctgcgggtatagaggacaaagtgaaaaggtggactctgaagaaaatggcagaacaagtttagagcttcaagggagagctgtacaagaaatatatnctgaaggggcagacaccgaacttcgacacattcccaaagcttagggatcactgngacaagttcgttgcatataacacaggtgaacaaaggcaggcgatgatggaaagaaacacataaaatg

SEQ ID NO: 30696 - DNA, 501 bp, Oryza sativa
  unsure (1)..(501): unsure at all n locations
cttggatcatcagtaaacgacgaaaccttgggttctatttttattatgtcttgatactcanaggctgcctctcttagtgcatcagttntgctctctggccaatcaaagtgctttaatactgcccgctcatcgacctaaaacgttatttgaccctttttcagtactaactattttgtcatgtgttgcattgaaaaaaaaatagataagcttaccaagaaggatagttcctcatcaagccagtttacaaatgcaacaacgtcgtcgatatttacaaaactagctgctcggacctcatttgctagagactcaacaaagtctccttgtgtctccacatccactnttgacctgaaacaaatccattttttatataanaagtaagtcctcataataatctacctgaattagcagtggactaaaggaattcagtagtatatatttctgaaaggtagcatcatcttgaataactacagctaagaagaatggtgatctattctcaatctc

SEQ ID NO: 30697 - DNA, 450 bp, Oryza sativa
  unsure (1)..(450): unsure at all n locations
agctngacacaagctgctacattgattgtctaagcccactcacctctcttgtgtcaccactccaaaggttaatattccctcttcttttgatgccagattggtagggtaagttcgaagaggagatgcaaaaaaaaaaaaaaagaaggaatatgtggggagcaaatgtttgttttgctctccatgcagggcaactgcatcaatcttttcagaagttgtagggttaagcatcatcgatagcaaatgtgcttgcctttactttcttgagagaaaaaagtgcacacattaactatgactatgagtattacatgcagtaagcccttttgtacattntgagaatgtgagagtggttttgactgttaacactcaccctcaatcaagtacacacaaaacagcatatgaagggtgtattacactctgaataatccccatggtcaaagaaccttttcatca

SEQ ID NO: 30698 - DNA, 433 bp, Oryza sativa
  unsure (1)..(433): unsure at all n locations
tcgagtaacactgacatagccgaggacaatgtggatacctgttacagatatggnnnctagagaatatttttctttttcttatctaaagaattaaagaaatggtaaaaaggtagtttctttcaagattaaaattaaggatcataccataatatatgcccagctggaggcacaagatataacgttgagcatgcacagaggcaatattaatatttggcacgttgcaatgaactttccaatgattttccttggccttttcctctcgtgtagccgcatattaattacctaactcacgaagacgtacgtacgggtctactactacgtgttatagtacgtacgtacagcatgcgagagaacgtggaaagactntgactggtcttgtactgtcacacgtttacctctagtatagntttttgagaaaatacagtagcggccc

SEQ ID NO: 30699 - DNA, 391 bp, Oryza sativa
ggaccttaagcaccgcagcatcagctttcctgtcagcctttttgttgatttatctaaggcgcacgacctctctcttagtgtgagtggcgaccacggggaacctaacccaccccgtcgagcttgtactccaccggccccttcacgccaaagtcctaaacggggggaggcgctcgagagggccgaaggatccgcgacttctacatccactggaggtgaaaaacggcggcgagatggggagcgtcgccttctcgtctatggtgacggcagcacgccccatggcgcgcttcaagctgcgggcgcgcatctacgtaacccgcccgtcgtccatgacccggagtctccagcccaacgttggctggacgatgtggcaaattggtcatgactgcacggc

SEQ ID NO: 30700 - DNA, 387 bp, Oryza sativa
  unsure (1)..(387): unsure at all n locations
ttgagatgaagcattcatcctgccacagcatcttttgattgttgcaagctctgcaagcgtaggaacatggccaattctgcttggagtgcaccctcaggaagggcctaaatagccccaaccatatgcacagaggtggtccaaagatatgcactctcccataccctatcaacataacagaaactgaactagctctacagattcggtaccgacgatgatctcgtcgcaattgcgatcacatgactgacgatactgcgaatatgacacaaaacaatagcagaaagcgattgcgaaatcgcctccagaactatcatatcgccataacacggtctntcactacaacagattggttacatcgagtaccagacagaatgattgctggtgagtgag

SEQ ID NO: 30701 - DNA, 160 bp, Oryza sativa
  unsure (1)..(160): unsure at all n locations
agcttgtctgaactacgggaacagcagagncttcttgtgtgtgtgtgtccgcgtgtgcgcattttgacctattggccaaaagggccaaacttcttaatggaccttggctggacacacaggcaacggatgaatggtgaattggaattttggtttttaactt

SEQ ID NO: 30702 - DNA, 170 bp, Oryza sativa
  unsure (1)..(170): unsure at all n locations
agcttgtaagatcctggtagaattactgcggtattantctatccacatgatcaactattagtttctttgccattctagccgtggctactcttgattgaccactttgctaacttatctttgggtgctggccatgaataatttgactgatcatggccctggtcatggctatt

SEQ ID NO: 30703 - DNA, 412 bp, Oryza sativa
  unsure (1)..(412): unsure at all n locations
tattcgnaccatggaaatgataatctcttagcgccgagttgacacacatttagtagatgtatagttaaaataagcttaaacttaaactttgcagttgatatgcacaagaacagaaggtatatttgtaccatggaaatgataatcttttagcgccgagttgacacacatttgagttgtttcgtcgttcttgtgtttggtggtacgcaggatctaaaagtcacgtttctttctcgtcgcgcgcggagcgcaaagcgacaactgcaaatctgcaatgccgccactccactttaattagtccactccatgaactggcaattaatgatcaaatctctggcagcataaatgctgatgaggaggatatgtgcattanaatgtgatattctttagtacagtttaatctttatgtagaaac

SEQ ID NO: 30704 - DNA, 123 bp, Oryza sativa
  unsure (1)..(123): unsure at all n locations
ttactgaaaggaagaatcgataagagcatgacttanaatatttcgcacaaaattttccctaaaaatttaagtccattacatcgtggtacggcgagccggccgcccggtggttttttctaccct

SEQ ID NO: 30705 - DNA, 102 bp, Oryza sativa
agctatctcttacgctccaggaatggatcagtcagatcatcaccaccggcttgccgtcatcgccgtcgactggtgtcttcgcctatacgggtggttggtcac

SEQ ID NO: 30706 - DNA, 171 bp, Oryza sativa
gacctataaaactaagcttattacaccgcacataatttttttagacttgaccataagatatgtcctcggaagaaaaatagtatgcttgaagtacttatgttttggtccaaaattctaatgctagaagtgattatattttaaaaataattaatgagggccttgggtcggtat

SEQ ID NO: 30707 - DNA, 437 bp, Oryza sativa
  unsure (1)..(437): unsure at all n locations
gcttctagcatctagagcaaagnacagntatatgttctatctgtttgcagngatccagatcaaccgatcaaaaagccagaaaaaagaatcatgaaccaagatccaaaaatcaaggggaaaaagacccccacaaaatactagaggttggttggaaattaaattaatcgagcacacgtcgacgagcttgtatacagtgtccaggcaagtgtcacgtgacttgtgagccctagcagctagagggttatacagagatacactgtacatgcctcactgctgatctcattntcagctctctttttaccgacttgatgctgaccggcgactggcagcgtttgccggagctgcacggctaaccaaacagcttccaaataataaattctgagtcaacttaattagcagctagcacaccaccatgatgcataattcatatatttttg

SEQ ID NO: 30708 - DNA, 194 bp, Oryza sativa
gcctatgatactcagcttccttagtagaatcaatttcttaaccgaatatagcaagattccgtctacttacgacttgacaattctcatcggccaattgcaggacttcaaagccgatgctgactctaagccgatgactactccgggcttaccaaatttcactgttaacagctgggggggagggaatgcggggagcg

SEQ ID NO: 30709 - DNA, 305 bp, Oryza sativa
acgtgaagttcataatctacaaaataattaaagaataggtgaagatgttttacgataaaaggtgagggtgtcattcttcggacgcacaacataataatattcataaaagcacggatatcttctcaataatggtaaaatagatctacatatgtaatggtgatttacttactatgactaaactaaacatacatcttaagggtccacctggtccattttgtcaaagccactaactaagctaggcagctagctagcaaagctgctggctataagcagccatgtatggctgccttcagatacacctacac

SEQ ID NO: 30710 - DNA, 420 bp, Oryza sativa
  unsure (1)..(420): unsure at all n locations
aattaaggatcagatcatatatatcatattattacaaatctagatatacttcttatcccatcggatcataggttcttataatttggtatggaggaagtatattagctaatgagtgaaaaagagcatggcccttagactgcactactgcagtggtgatacggatccagctcctctgactttgggctcgtacgtcagaggagcccaatattttgagtcacatactacaatagaaaacagtgtcttgacttaatgctatagcaacagtgaaatgcactgtttgaggctactggttagatattactatggcatagtgatncgtcacgttcactcgcgacggctganaatatccaagttagagtaccgtacgcctctgacttataacgccgaggatctcattccgtggtgatacgtggtgacata

SEQ ID NO: 30711 - DNA, 399 bp, Oryza sativa
  unsure (1)..(399): unsure at all n locations
ctaagctagcttgtcctgttcgaaacattctcttcatgttctctgtaattgtgagaaaccacaccacctttgctgggcctgccctctttgacttactttcttcaccttcactctttgctcgnttggatcttgatgccccacagataaggcagacatccaagtcagcgtattccttgtaatacaaaatgcagtncgtcggacatgcatgaattcttctgaccttcaggcccaacggacataatacttgcttcgcttcatatgtcggctgaggtaaatagatcccctctggcaacagatcctttaacagcttaaggagttctgtaaactcttgggcgaccaccattactagccttaagcttcatgagttccaacacgcatgacaacttgctgtgcttcgac

SEQ ID NO: 30712 - DNA, 218 bp, Oryza sativa
cactcgattaagtttctgactatgttcgttgaacatgtctgcctataacccatagtcgggtgctggtgcacttcagtactactaatctattcctgaccgaacgggttggtgaaagaaaccggttccttcgactgaggacgttttacaaatacgatagactggagactgagagatgcacatgagaaattggaaccctggtgccatactgtcgtactata

SEQ ID NO: 30713 - DNA, 472 bp, Oryza sativa
  unsure (1)..(472): unsure at all n locations
agctttaatgcacatatctcacactgtgntttttgtttagaatctgntaactccatctccattgttctgagaattaactccatttggttgaattggaaggtggatttggagcttttggtggtaatcaagggtctggcttctcggcctttgctgggagtggctctgctggatctggaggacccccagcgaatcttttgacacagatgagaaaataacagagttgtttccaagtatcctagttcttcattcctttcggctgcagtggcccttatgcatgcaccaaaaattgttcttcgtgcattagctgtagctattgtggaactcccagcacctggtaagttcaacctcgatatttgtacatcgaacacagtggctaatatggaactgactgacgaacatnntttggacccctatttctttcaacaagagatagatgagcagtgcgcatgcatgaatcagaatctaagtaata

SEQ ID NO: 30714 - DNA, 502 bp, Oryza sativa
  unsure (1)..(502): unsure at all n locations
actaagctgcaaacccngaattactggagcaaaagaggtcgtcattcatagcaacgaactactaaaggatgacataagttgctatagcccaataaaaaagttcatgggccgataaaatgtagcactcaacgagtttaaagaaaaaataatattgcctcaggaaggtattagtagcacaacatatgtgataacgatagcttccactgaaaatttcaataatacaattactttgatcttgaagcagcaaggtatcaccatatcggtataacatcaaatgtgaaaaagatagtctcagttggatattttttttacaacataattcctgaaataactacctaacttacattttcgaattcagcagatgccccatctgtgcaagactgatagtatccctgatgcataacccaagaaagcttatttggttcaatgggtcatctggcacatgttcatccggcagctgtatgtcatatgaatgtcccacatatctgatcatcggtgtgta

SEQ ID NO: 30715 - DNA, 499 bp, Oryza sativa
  unsure (1)..(499): unsure at all n locations
acctcagagncacctgcggcatgcaagcttcgtactctaaccgaatgcgtttgactggtatagtctacctgcangctgcagcacaacaaagtggctaactgtttcagtctttgacaagcgcatgctggatgatataattaacctatctaatttaaaagaagcagctatatagacaccgtacactacactttgcattaattataatggagcatttggagctgaattaaagtggacgcccaacttatgaaaaacaaaaacggtggaacttaaagggagaaaaaaaaaagagaacgagtgatctttaccctntttttttctctcccgtgacattcttaggatgccctgcactcgacagttgataggatgctcagctgctaactatactntnntgtatttcagtagcgagccacccacccagagccacttcttccgattctgccatcaattcgcactgatttaagcttcgctttccaatccctctttttattgagacaatact

SEQ ID NO: 30716 - DNA, 346 bp, Oryza sativa
accgggaggtataagatcaatcacttggagtgcatacgatgcattgactatggatatttcatatacccccttttctttacgcaagatttttcttactacacctgttgacgatgcattatagaccgtattggtactcttgctaccatcaggagagatctgtcccctttctcggtttgcccccacatatatgggatattgtaagaaatgaacgtctttcttcatagcagggtctggggaaagaatgggaaagacgatttcactatatttcttaccgggaacagggcctatcacaagaatattgtgtttattgggacgataactctgaatagagagatttcctatcttt

SEQ ID NO: 30717 - DNA, 168 bp, Oryza sativa
  unsure (1)..(168): unsure at all n locations
agctgtatatagctgctccgctgactntnttatatagtcatgacggtgtttgggtttatgaagcaattgattggatacaatatcattgcttttcgccacgtaagtgtgcattttaatggaccataataatggctaaggcgaataatcaatggtggccatttcttaggc

SEQ ID NO: 30718 - DNA, 472 bp, Oryza sativa
  unsure (1)..(472): unsure at all n locations
tccttctgattgctattagaagcagagaacggtcttctgcttggtatcgccctcctgagatagattgccctttgctcggcctggagtaggtcggggagagacacaacttcttccatcgacaacaattctttgctgaggctgtcggtgcacagaatggttggtgctgaaggtattattgctatgatttattgcagagtcacgcgcagcaggaggagcattggtgctgtggatgatatcgtcgatgttgctgttggagctgactagctgacgagacaatcgtagggttgttcgttggatttctgcggtcttggtcaacaacacactgangtggcaatccttgggcacatggtttgtaccttcgcacagaaaacatgtgaccttgcgggtgggaccactccctggtggatggtcttcttcacaacgagggcagagtgtgagacacctgctagcaatgtgtccatttctcacaacg

SEQ ID NO: 30719 - DNA, 434 bp, Oryza sativa
  unsure (1)..(434): unsure at all n locations
acatagtatagagacttacatcctctgcgnagttctgtttctttattaaccctaaggaattcgcacgcgtaatagccgcaaaggaccgttcctcacggttgcttgtgacacttcangacatatcatagaaaaaaatagctaaattttgcaattagtgaaacaattggaatacattaagtgagtggagtattaccggccaataggtacgtattatcagcttctcccttgttcgggtctgttctccacccttgaacttgtagtactcgtacgcgctgtatggatgttgtaccgtctcacattaaggaggatatttatttataatacattcatataaaaatgcaagagtcataatcacttactactataagattgttagaaattctttgtattgcttgtgactgtaatcgagagggtccatgactaccacacattcg

SEQ ID NO: 30720 - DNA, 180 bp, Oryza sativa
  unsure (1)..(180): unsure at all n locations
catgatgacagaattatccatgtatgtgtacatatnnactcangttgttaagttngaaccatatccgaccttgtggttaactttcaatcatgttggaccatatggtcctgtttggtatgcctggatgcacctaataagaagcttttggttccacattaatggcccaccacccaacttatt

SEQ ID NO: 30721 - DNA, 470 bp, Oryza sativa
  unsure (1)..(470): unsure at all n locations
agcttcaacagtttgagatctattngcatgagctntatgcttgngtaatggctcctaaaatacatttcgagatactttacaaccatacaaaaagaattaatacaaaggaccaaagaattatcctttctcactatgagtcatgctaaatattgatatttctgctaatggcacaagttttaagagaaaggaaatataaacttgacttaaaaaagtaacaaaagagactattaattcctgatgaaatggaacaaccacattaggataaaatgcatattatctccgntataattactagtaactgattttggntgctaagcatgcagcacaacttttgatttctttgttcagatccatgtcataagatcttccacagtgcaaatatatcaaatacaactaaatatatgtcaaattacactgattgcatatttgtgaagctacaattatggaatctgacttaccggatgcatatg

SEQ ID NO: 30722 - DNA, 473 bp, Oryza sativa
  unsure (1)..(473): unsure at all n locations
tactaagctaattgaanatctttggttcatgggtatactataatacattgcttgtaattatagatgcgctcatcttctttttattgcaacacatgacttgatatgctatatgtgtgctaagctcttgaacattaatgaacataattcccatgctcgatgaaatcattgtcaaaaaggggagaagtaagggtaaaaattttggttttcttggattttatgacaagcaaagggagaagagaagagtctttaagaagagcatgtttttgactcaattgngaatttctttcttttaagagtgctttttagttttatttttctaaacaccacaacactttttgatgagggttgccaatgtattcataaggcggagattgtaagatcaaagtgtgttttgatccttactctgtgatgaacaatcggcatctgcgatatttggttggaatttgagattatcgcaaggcgtttgagatatc

SEQ ID NO: 30723 - DNA, 423 bp, Oryza sativa
  unsure (1)..(423): unsure at all n locations
agctntaacctatcctttgagtggttntagttcttgtnntttgatgagttgggtagtcctctgagtgagctttccatagagtccaagttcataaaaaacggactcccgagcgaaaagttatagtcgttttactctgtgctttttggaaagtccgaaaaattaccggaaactccgaaaatccgaaaaattttcggacattccgaanatggctacgaatctgagatttgcttctataagttttcgaacttgtccgaaaatgcttttcggaaactccgaaaattacagtcttggcctccaatggctagtttttgaggggctcgggtatataaactcctccacccctcctttgagtggctgctgctcttggnngagtatagacacatncaaagccaaatagccatccccatttccctacctttatgg

SEQ ID NO: 30724 - DNA, 329 bp, Oryza sativa
  unsure (1)..(329): unsure at all n locations
ctcagcttctcttctccgcctgaatgtgaactgatggttaatttgttccgagatatggctggaaggggatggggaatcggagcggtggatgcggggagaaatttcgtgaagttttgaggatgggatggagcggatngatgaacccctagtttgctggcgcagctttgtacttgaacaggaaatggggaaaatggcgagagtctctgccgggaagacgaagagaacgtttatttcacttcggccgtattagggtatcgggagtgctaacaggcctgggcctgtacagtgcttcaacccaatattattaccagcgcggccccatgtgatct

SEQ ID NO: 30725 - DNA, 165 bp, Oryza sativa
  unsure (1)..(165): unsure at all n locations
cacgttggttggggtgcaagagagtaacgtgcaagtcgcatgaattctgggaggacgacgcaatcagtcgagcaacatacaggaatgcagnccactcaatggttggcgccttctgtaaaacgtaatgacagattctcaaatccatatgtctgcgtaacatgaact

SEQ ID NO: 30726 - DNA, 438 bp, Oryza sativa
  unsure (1)..(438): unsure at all n locations
agcttgcaacataattatgagatggctcagtgtatgtctggaaataaatttctatggcacaaaggatgttacagattgcctgatgccactcctccttctatccaattcaggaaaagtgataaatcttacctcaaaaatttcacaactccaggtaaccttatccatgaaagaattatatcgaattacttntcttctgataacataaccgtgagaatatctgcatatgtagtttgaaaacaacaaaacagggataacctagttctgccaaaaatattatcacaaggcacctaatcaggagaataataagctaaagtgatttagccatttttggtagaaacaacctttgaacagatgaattgcaatatgcaaaatcatgttctgcaatgaaactttatcatgcaatgagttgaattggttgattcttttccacagttcatc

SEQ ID NO: 30727 - DNA, 452 bp, Oryza sativa
  unsure (1)..(452): unsure at all n locations
tcgagaagaactggntagctngattatgcaaacatttagttatccaatatattntnttactctggcagtaagaaatagattaatttatccccccgcataagctagttaggtttaagcaacagctatgtcgataaatttgcatctccaataaataatcaccacatgatttactcattccctgttcttttactgaggccagcagtgaccagtccacccgaaaaaaacactaatacgttttttagctttgagttagatagacagaataaccagtttacatgcgctntatgtttttctttacttttttggcaagtttatttgcaacccactaatttctacaagtacagatgtatnttcgtatctacaaatatcatcttggttggctattatggctttgtgcatcaatgaaatctgaatctaaactgcaacactcacgtagnttcatttatcttcta

SEQ ID NO: 30728 - DNA, 424 bp, Oryza sativa
  unsure (1)..(424): unsure at all n locations
tctgcccaccaccaaatggagtgaagctggcattgctcatgtccttctcctggtgagaatgattgaattcttgaccaattagcacattattagacttcccaaatcaaataataatgataggatgcctcaacagtagtacagcaccatcatttgcctagattaattatttgcatatcatngtcagagcttacagaaagtatacaataacggaaaaaaaggtgtgtattcatttcgttgacagcttaagcttatgttgtctgaatttaccagatcaaagaactaccanatccatttattttgggggattcaactgacttctgcctaggtgtatatatcactaatgcaactttgagggaatctctgtattttctgcatacaagtgttagtacatggcaatgtcaaatcattatgagattatcgatat

SEQ ID NO: 30729 - DNA, 480 bp, Oryza sativa
  unsure (1)..(480): unsure at all n locations
ntaatcctgngntctctctcggattaagatggcatttattttatttttaccacggcttaccacagctgtcagaaacttaatgcggntctataatagtctatattatntaatgccaatttctttggttataactccatttttttttcataagaacttgtgtctaactctattgttacaatatgggtaatggtagtcatcctaaggttatcagaaatgtttggagaagagactaggacagtgtactaactcgcaaccattgtgtattcttgaattggtttcttatacccttttatgagttggcaatgtggcacgtgtttatttgtacctctattttatgtctcaactatttaatgcctgaaatgttcattttctattcctgtccttatccaggctaccataccctctacgagtggtatcgcaaggtcgaaagtgagcattttcctgatcccacangacttcgcactcgtcttgaacaatgga

SEQ ID NO: 30730 - DNA, 476 bp, Oryza sativa
  unsure (1)..(476): unsure at all n locations
agcttgatcgattccccctctgaatttaattttctggaccgggaggtataagatcaatcacttggcgtccatccgatgcatcgactatggatatttcatatccccccttttctttacgcagtatttttcttactacacctgttgacgttgcattataaaccgtattgttactcttgctaccatcaggatagatctgtccccttcctcggtttccccccacatatatgggatattttaagaaatgaacgtctttcttcatagcagggtcgggggaaagaatgggaaagacgatttcactatatttcttaccgggaacagggcctatcacaagaatattttttttattgggacgataactctgaaaagagagatttcctatcttttctttcaactcaggagaaatacggtcgggcggcgctaattcgaaatcctcgggcanaataagaacagcacccacattcaacccttcctttttc

SEQ ID NO: 30731 - DNA, 412 bp, Oryza sativa
  unsure (1)..(412): unsure at all n locations
gtaatcctaatgtgggagttttttgtcatggggatgcacanaaagtgcttcaggatccattacgcggtcaaggcctcttgttcttcttcgcatccgttattntggcacaagtttttttggttctcatatagaaacagcttgaaaaggttcaattgtacgaaatgaatttctaggtcccgggatttcttaccatcaagttggtaaaaagccgcgatttattggcgattgctagaattctctatgatccattttggaaatcttttttttgtttagactatnttttgtttgcgagatgtcttgtctgcaattccttatttctatcatctcatgcaaaacgaggagaatgcaaggcaagggcgagaacaataaaggaacaatcctttaggacggatgctggcttcttatcctctat

SEQ ID NO: 30732 - DNA, 422 bp, Oryza sativa
  unsure (1)..(422): unsure at all n locations
agctntgtatctggttntggaatactctcttcngtttataatataatataacagggtactctctttattgtaaaaattaaggatgtaaaaagaacgcgaagtacaattgatggtacaaaagagatggtataaactaatttaaaaatgatagacgtagaataaattagtacaaaagtgggtgggtaagtgagaaataaagaactccctccgtaaaaaaaaataaaaggccaacctagtttataccatcccgctgtctagattacttgagtagcaggggcagggtttacgattccgacgaaatccggttggatttcgcgaaatttcggcgaggctcgaaagtagaaaccatctaagatttcgaggagtgtaatcacaatccaattgaattgataaaaaagaataaatttataatactttgattt

SEQ ID NO: 30733 - DNA, 414 bp, Oryza sativa
acactatgatactaagctcttacttctctttgagcattcgcttcaaaacatgtattattattcatccatgatgtcctcggcatcgtagacagcatctttcagctggcggagtaaagcttgctgattgcaatcaagtgttctccgcctttctgcagtgcctactaccaagagaatttcagttaaaatagtctccagctttttaaggtcatccaccaaattggactgccacttgtactgagttgatatatatgattggaccttctcaaacataagcttgatgacaggagatactacccatccaactccagtggctagtggtaaagtggccatgttgctcaatatactgtctcttggctcttcagtttctccttacagctttcaactgatgtacctagcattgataagataattaat

SEQ ID NO: 30734 - DNA, 360 bp, Oryza sativa
  unsure (1)..(360): unsure at all n locations
agcttccctaacattgaatgtgnttttattctgcactaaagggataaccaacgatcacagtggtataattttgaaaatgcataaaccacatacctatctgttattaagaacgtggagattcctttgttcttaatgttctgaagcattggaagaagtgatggatctttatcgatgtacctgtcagtttcaaactacaaaaaatagtggcatggataacatgcgaaatatattcaagtagcaaatcaatgacagatcgagcccatgtcataagtgtgctctataggggcaatgaagagaatttcaatatttgtgctctccacgtaacttagttaacagatcaggagaaaattgattagtcta

SEQ ID NO: 30735 - DNA, 404 bp, Oryza sativa
atctcctgcctgagactggtgagaaccggaaccaaaccccaggaaaaaccctaagaacggccagggggcgggatcgacgcttacctcccggggtccacgacgaaacctttggtgagcctttatcggtgaggggagctcgacaggcggcaagcgcgagtaccaactgcggcggcggagaggaaagcggtggcggcgatggcggcggagagcgagacattggttgcgaggatgcggcggtgggctgggctgctcttatttacggactccggagctattatgggccgagcctgccggcccgttctctcttctattccctctctaggcctacaggcccaagttggaatccatctcgcgacaacgactcaacgctactactggctccggcgggcatcgttaatgagcgg

SEQ ID NO: 30736 - DNA, 413 bp, Oryza sativa
  unsure (1)..(413): unsure at all n locations
agcttatggctcctgtcaccttatgtacattatagaagacaattntcccccatcttttgcaaactgtattagcttttctagtgtgggctaaatagtacacaaactatttaagtattaaaaaaacttctttcttttctgggcaataaagttaatcagaaaatagtgtatgatactagtattctataaaacaatcaattntgcatgcttcctttgctaattaagcagtcctgaaccctgctgtcttaaattccaagtcacaccagtattgtgctctggtactcaacaattcaacatgactaaataagtcttttgccgagcaatgtacttcctttgattcagtcctttttgatgaccctagaactccccgttcttgaaatggtctcttcgtccagcaacttataatacgacatctt

SEQ ID NO: 30737 - DNA, 473 bp, Oryza sativa
  unsure (1)..(473): unsure at all n locations
tcatacagaggtaaaaaagggagatgaagtataattacatttgcatttgntgcgaaaaagggaggtatcangatgaaattaccaagagatatcctatgtgcttgctaatccaaaacaatctttatctgccaacatttatctctgagactgactaatattttggttcacaatgtcagtacaaatgcacagaacatctccaacagcctccatatcccactctctaagttaaattttggtaattttgaagcaaaatcatactccagcagactagccaaccggatggctttggctaaactcttcttcgcgctggccaaatttggccagctaaaatagcctagccagattgtgggtcccacgcctttcccctataccatcccatcccgtactctctctctcttggcgccagatcgagcgcgcnctctgccatgccgtcccttcactctaccacccttcgccgggtgccgcccttcatg

SEQ ID NO: 30738 - DNA, 143 bp, Oryza sativa
  unsure (1)..(143): unsure at all n locations
tcgcacatcaaatgtttggacatatgcacgangcattaaatgtggacggaaaaaaaccaaatgccagtttacatgtaaatcgcgagacgatntttttgagcctaattacgccatgatttgacaatgtggtgctacagtaaata

SEQ ID NO: 30739 - DNA, 373 bp, Oryza sativa
  unsure (1)..(373): unsure at all n locations
ctgagtcacctgaggcatgcaagctttgatcgggccacgtggtgcctttctcttattctattagtctataanaatcgagggaaaaaacgacgccaatacatgatcattttgcccaaccatcttcagattcccacgctcggctttgtggagaaagaaagagattcctcaagaaaaaaaatccgttcgaaataaagaaacataaaagaaaggagcccccctggtctatcgtataccaatgggacagaagcgcaaatcaacaatggggttgttcataagaaacatgaggattttcaacctagaaggatcgatgggctttaacactatttttaacagagtgcaaagcaacttgtttatagcacgacttctatatatt

SEQ ID NO: 30740 - DNA, 465 bp, Oryza sativa
  unsure (1)..(465): unsure at all n locations
actaagcttcctgtctgtaagctttctgtgtagagcattggattagagttctttattctgcgataccgnggtaagccgtttcccctaaaacactgatacatgatcgcgtgcgcgcgtgtgtgtgataatttanaaatataaaagttagatatgcaatggaggggattaaggtgtatacgttgtatggtagctgtagagttggcagccttaaactggcttcttttttttttttgaaaaggaagctttattaatcttagacaattacatcaagttgataggaccatactaagaaaactctcagcctctgcataactaagatgcacacagccaaaacacagacacaaccacaaaagagtgtgtacaagagaaggaaagcagtaaaatctattgagcaccaatcttcatgctatgccgccacccatgtccntaggtaaaacattccctgaacacctgcttcaagcgctg

SEQ ID NO: 30741 - DNA, 226 bp, Oryza sativa
  unsure (1)..(226): unsure at all n locations
agcttcgtgttcttggcattgaatgctacnncttccatctctaccacgctgacgatgtcggcgccgttgctagaggagctgaaatcatccttcaactgggaaactttggagaggctcgacgtccgcgacataatgtcgtgcgtgccgagcctcaaaaatctgtacttgagctctgatgggctccgcatcggcttcggtgatgtctccggacgccttctccggcgat

SEQ ID NO: 30742 - DNA, 143 bp, Oryza sativa
  unsure (1)..(143): unsure at all n locations
ttgaatcctactctcgctgtcccaagacgatcatctcccaagaagataatcattttaggttgtatagttgntaacagcgaaatttgaaatttggtaagcctcgaaatcatcatccgcccatagtcaagatcgggtttcacagc

SEQ ID NO: 30743 - DNA, 472 bp, Oryza sativa
  unsure (1)..(472): unsure at all n locations
aactgagctgcagctaaaaccccgtctaaaaattngtatatgattacatcagaatcatagaactaccattattaagttacaatgtttttccaaatcgttgtcattcattcaatactacagtgaatggactataccaacccactgtgtcggtagcgtacgaagtacccctacgtggtcgtacgtatgtagccatgtgatgagtggcgtactcctactggcgtgccaccgcagcaacaaactatagtacctccgttacaaaacaagtgcatacgtggatatccgtgcccaacgtttgaccattcgtcttatttaataaaaatgtgaaaaatttgaatatatttagtcatacataaagtactgttcatgttgtatcatctaatagcaatgaagatactaattataacaaattttcaaataagactaacggtgaaacgttgaacgtgaataatgcaaaactgcatttattttggga

SEQ ID NO: 30744 - DNA, 453 bp, Oryza sativa
  unsure (1)..(453): unsure at all n locations
gctcgccgatgactcctatccatctaggaacctatatctttatattaacaaacacgatcgagtatttacatgctatgaactcaatggctcanacaatacagtgaggctcgctagctctcaaccttacgacctctcaatgcaacccttctcttttcttctcatatcactctcacaaagagctaacactaagataaggtatttgggagggctacatggctttggataggtcttctcttgcctgccccagaacaacaagaacaacagcgaaggattgaggggtggaggggtttaaatactcgaaccccacatattagtcattaggctcatatatgcgagccaagaacctccccgctcaaaagtaaggcatgcgcagcaggccttctaggaatcttcgggatgtcctccagctcgccatacttcttctgagagtccaatatcgactcggaaccttct

SEQ ID NO: 30745 - DNA, 464 bp, Oryza sativa
  unsure (1)..(464): unsure at all n locations
aatctaacactattgatttctttctccacccagcaaanatcttgactcttgagtcttctaaatcagggtggatattgtcatttctaaagtcagatactggtccatcagattgatccagtgtacaggtgcatcattgcaagtcctggagaaccttttttacttacatggtttaccttaacacctattaactccaacaggcataagccatgcaactatttgtgttctgcaataaaataaactaaggatgtggattcataatactaatccaactggttcanacaaaacgccaaaacagaactacataaccctaaatctaccctatagtatnacctttagttaacagaagtgctgtaatgaaactgatttgcacaagaagggagaaaatattggtcattttaatctaaatagtttaatagtcaagaaaacagcagtggtaagcaattgtgattatgtactatataatg

SEQ ID NO: 30746 - DNA, 318 bp, Oryza sativa
ctccaaaccaaagcctcaatccgaaaacaatgccaaaactcagagagttaaataagaacttatcaagttcctgatgggcttcatttctcatacaatgtaggtccatggcaggctgtcctcatagagaagccacctgaaagctcaatgcataattaaatcaagggactcccaagatatagtaattgccaattctttctggaacacatgcgtgatagattattccctgacaagtttaaaaaccaaaggccctgaaggtatgtcagctattttgtggtttcaatgtaaagtgaaatgctgtgtaaatcaatacctgtcatt

SEQ ID NO: 30747 - DNA, 365 bp, Oryza sativa
  unsure (1)..(365): unsure at all n locations
agcttcttttcagaataagatgttctttcttaattctactgcaaaagataagcaattatttgaacatgcacctgttaggtttaaattctaccttaggtcacaataaattcagtctagctttgnttaggcaaaatgttctattgtgctttattttcaacatggacaaacaattattcgaatataaaatgtgcacacaacatatctgcaaaaattggctcctctcaacactacgattttctaaagtatgtggggttggtttatcatatcaatttttgtgcagtgaatggaagtgatgcgtacttaaaatgacatcataagaggtaaactcatgcgcgctaacgacatttatgtatgaagtaccacat

SEQ ID NO: 30748 - DNA, 360 bp, Oryza sativa
  unsure (1)..(360): unsure at all n locations
tcanagtatcatcgatcagacattatgcatcattctactttacttcatgggaacgctgcagattggaaatgatatggacctncatggtgagcttcttcttcttcttcagntcgaacagacagaagtccccgacacgaaggccgttgtcgtgagccaatttgcgcaacctgcagtaggaaccaccctcntccctttgtatatctacgacgcaccaccaaatggatttgccagaatcatcccttgcattggagcaccaaagnttgatgatttttatncggaagatatgaggcagcatatcgcgaactcagcttctgatattacacagatagaattggaacaagctacagtgacagggcttac

SEQ ID NO: 30749 - DNA, 346 bp, Oryza sativa
  unsure (1)..(346): unsure at all n locations
tctggacggacgcacaagacgaacgacgaattatctcccctaccactactactgatgaactactgatgagcagcagcagacaagcgtctaaaagggcggagtaatgtggcgatgtggattgatcttatccagtgtctgtcgacgtaacccaccctctctagatcttttcgctcgacgccaagcccgtccccgctactcgacagggaccaaggacgcaccgcacgctgcacctgcaccttcaccttcacctttacctgcacgcatcaatgaagntccaaatcgatttccagttgctcctcaacatgcattgcatgcggctcaacttgtacaaacagcctccgcacgt

SEQ ID NO: 30750 - DNA, 413 bp, Oryza sativa
  unsure (1)..(413): unsure at all n locations
tctcgggttcttggtctctgcccgaggcattgagtttcatctttataagattcgagctatcgagcggatgcgcccccncagcaaacttatggatgtgcaatgcgtcgccggttgcatggccgccctaagtcgtttcatatcaaggctgggagagaaggcgctacccttgtttaagctcctcaagcgctcggtgccgtttacttggacggaggaagctgagcatgcccttactcagttaaaggcatatctcagctctcccccggttctagtcgccccggagccaaatgagcccctgctactttacttagcggcgaccccccaagtagttagtgcagcgttggttgtggagcgcgatgaagacaatcctcatttcgcgcacccncgccctgtgctgacttggcccgggagcgagc

SEQ ID NO: 30751 - DNA, 468 bp, Oryza sativa
  unsure (1)..(468): unsure at all n locations
ctgcagcttagctatacccctacacctttgtcggtttccatctctcctttnttttggtcctttcagatatcccatttctcttttctctctctgcaattatttatatgggctttctttttgggactctcagtttttctctctctctctatctatatttttcctttgctgtttggctcgcaatattatcttcaaacgatatactttatttgcaacttttttcttgaatctgaaaaaaaatattaaagtggtatattatatggcacatgggaacttaaaccgaaatttcaaatcaaatttaaaataaaacaaattatagaaatttaaaggagcatatacttctttcatattggcactcaaaatcaaactcaaaataaaaaaaatttacaaatgacacaatccatttgtaagaataaaagtgagtagtcaagagaaaagaaacctatnttgcctacctctcataatatatat

SEQ ID NO: 30752 - DNA, 462 bp, Oryza sativa
  unsure (1)..(462): unsure at all n locations
taacttagtgggggttgattcnaaaatgaagaaccttttttttctgtatcttagaaagctctaatttacacatgtattggccataacataatcttaattaatcttaatttatgagtctttagagtatagatccatgagcacaagctccacttaataatttgatcttggaatatatctttcacaactatattgatgtgttaagcagaaaacacacaacatgttgttactagaatagagaactttgtttaattagtgtacaacttataacacggtatacttttgagtggtttatgagcgctatttaccactcttatgtatgggaaatattcttgaatatatgattaatcatatcatgctttaaaatctaacgacattggcgactatgcggtgatagattaatttggagcttttcatggtcattntctcctaagtgtgacatagcttatctgattaactaatatc

SEQ ID NO: 30753 - DNA, 403 bp, Oryza sativa
  unsure (1)..(403): unsure at all n locations
cgtaggcntcactctatatgatgtggaggacaantgtacctaccttctatcacgaaatgcaanaggttcgacagcgtatgagcgataataggatgcggggggaagctcaatcgaccgtggaacacaccctatctcattacgagcaacctgatcctacttaatttaagccgcatatgggaccctactatggaaaactcaagatgatagctgacactataccattactacgagttaataccgcagtgagcaaccaggtcgctcggtccgctaacatagcgtgccgagcccacccatgggttgacagagactcacgacggcccatacatttcgatctggccgggcggctttcatcattcacatggagactagattgctcacctacatgataaatcaacctattttt

SEQ ID NO: 30754 - DNA, 436 bp, Oryza sativa
  unsure (1)..(436): unsure at all n locations
agcttccctggatctgggattttctctttacgggattgggatcgcttgatcgatttccttgatcgctacttatgggcgtgcgctcaaaggatacaaacagggattcgcaaacaaaaaggggaattcgtagtcactttttcctgtcgcgtaaaaaaaaggctttacgcgagagcaatagaggttgggatacatctatctcttctgagcaacctcttttggattcttaagaccacccttgcagtaggataccgtctgctttgggttctttattatattatctccttcgagggatttttaggatcgttcaggctatatttagtctattttggctnttactgtctccttttctcagggaagtggttaaggacctcagaagatagaggagagcgccaggcgcagatttccggaatacttctacggggaatgctcattgaat

SEQ ID NO: 30755 - DNA, 353 bp, Oryza sativa
tgcccttatgcacggccatacataacatataaatcacacgtggaaggggtgggcaattaactaaagcaccaggtgctgtagcgaaactgattgccaaagaaggtaaatcggccactttaagattaccatctggggaggtccgtttggtatcccaaaactgcttatcaacagtcggacaagtgggtaatgttggggtgaaccaaaaaagtttgggtagagccgggtctaagtgttggctatgtaaacgccccgtagtaagaggggtagttatgaaccctgtggaccacccccatgggggcggtgaagggaaagcccccatcggtagaaaaaaacccacaaaccccttggggtta

SEQ ID NO: 30756 - DNA, 399 bp, Oryza sativa
  unsure (1)..(399): unsure at all n locations
agcttcaattagctactggttaacttatatatccaagctacaacgggggctcaagatgtggtcgatatgagaaaattcaaacccaatccatctgattcttgttttgtataattcaactcagtatcccagatgatatggtagattgacaatggataggcattttgtaagattatactgcacatgcaaaaatatatcatccctatttatggatgaaatctattattgatattcgctntccaataatgcgattcaagcttccgatattatatatctcggtgattccaattattattaaaattgaacattacataatatgcataggaaacattatagtgatgatttattgatagtagcaacgcataataattctatacgaatagagctatatgaagctatccg

SEQ ID NO: 30757 - DNA, 239 bp, Oryza sativa
tcttataacacgcaaaacctttattctacattgataatgccctcctgtgaataaagcataacaaaaggacagagtacttttctttcatgaaactgttgaacaataactcgagtaccaatgctacaagttgctgagctctgtatttcatttggtttctgtgggttatatcctagacagcgagagatattttagaatatttgtgacactgcacaacagaggtttgtataacagtagcacct

SEQ ID NO: 30758 - DNA, 475 bp, Oryza sativa
  unsure (1)..(475): unsure at all n locations
aacctttgctcgtcccgagtgaaggacgaaaggaaacttattctcggttgttgatcangagntgctactatgctgcatatctcaaagatacaggtgcaaggtatatgtactctctatcagattaaataatctttggcacggtggcttacctttacccctgattctcatgagacactgcttctcattgccttgggtggttgaaagacagaacagcaattagagcaccaatcacccaatttttattcaactcttattccggaagttctcaaatgattttgcaaaagatagccaagttcctcaattgattcactcagcctctctaagtgtatcaacatgaattcctcaccaaatgttgccttggtgattcctactctaaggtttatatgtggagcttggtaggggtcaaacatggcatacttacattcacatctattactaagtcaanaacttagactagagcagataactaaacata

SEQ ID NO: 30759 - DNA, 175 bp, Oryza sativa
agcttctctaagggccgcgtccttttccaaggtgtttggatatccgcccctcccctccgtacgaaaaccagacccatagaatatcacatgaataattaaggtttaactattaaaaatttaaaaaattgattatattattttttaaagccacttttatatattaaccttttaccaa

SEQ ID NO: 30760 - DNA, 409 bp, Oryza sativa
  unsure (1)..(409): unsure at all n locations
ttagactaatgcaagttgccgtcatttatcaataaagtgtttatctattatattntatccttcattggtcagggagatgcagattatcttagatatcatggtatgcaagagtttgatcaggccatgcagcatcttgaggaaaaatatggagtatgccactntttttatctttatggcataataagttntagttagatttctaccttgtcaaannatttatgtttcaacagacaacagggaattatagtataactagcacagttcccatgtgctgagccgttngtttcaatatactctgtagtataactcaaaagatgccatatatatccatacctatagttaaatatatcatattgaactggccacttacatacacgtgttcacaatgctatcatttctttagtcatct

SEQ ID NO: 30761 - DNA, 450 bp, Oryza sativa
  unsure (1)..(450): unsure at all n locations
agcttatctagtggaggacaacacttttttttctcttactttatttcagccacaatgtgagatcaactaggaataagatccctcgatacgatgatggttcctctacatttgagagttcttgtaaccttcaaattttccagtaccctggtcggtgttttaatcgtcgcacatgtcgtgatctaacagtggaggagtacaacgctgctttcttgtatattcttactaatatttctgagatggacactntgtttgagtaagtattcatattaaaaaattgttttaacttaataaattcctattattttccctaatccatccctacatatagacaatttgataaggaacaatggaagagcagaattgcacctagtgataagcaacgtcatgacttaagactaaatggttggaaatattaccgtggaactaaacatgggccataattctttgact

SEQ ID NO: 30762 - DNA, 471 bp, Oryza sativa
  unsure (1)..(471): unsure at all n locations
agcttgagggtcggcacatcataactgagtgngttaagatggacgtcctantgccccggccgaagccggcaagaactatgtacgtcacagcggttgggttgtgcgggataacgtgcctgtcagtacggtgtactggcgaagaacaagggcacgcggagatcatgagagctttgtcccagattcggagaaagagatgctgtggaccacaatgctcgagacattcacccttcctgcgggtacagaggacaaagtgaaaaggtggactctgaagaaaatggcagaacagtttcagagcttcaagggagatctgtaccagaagtatatactgaaggggcagacaccgaacttcgacacattcccaaagctaagggatcactgggacgagttcgttgcatataagacaggtgaacaagggcaggcaatgatggaaagaaacatagaatatgccgccangaagaagtaccatcacca

SEQ ID NO: 30763 - DNA, 501 bp, Oryza sativa
  unsure (1)..(501): unsure at all n locations
ntaacttgtctaacggccaacagtgatgagattcattacttgtctgctcctgctcacgatggggaagctcggaacaatctccccgctgttgctccagctcgcgatgcagtaccgggcggcggtcgggtctctcgtcgctactcatggcgcctctggtaggggagaccagcggcggcggcggctggtacgaccagcggcgggacgacgatcaggtcgatgaaagcctttttgagatggtagatacactatataatctgaatcaatattggtatataaccctatcagctgttttctggcaacgaatgctagccgatgaggccatatggcaatgttggtctagaatatatagtatatatgataactagacgatttacataaacaagattagagtatcataaagatggaagcactaatcctgagaacacaaactgccacgacaagtngtaccttctgctggagatcgaagccgatgcagccccactccaaagcaagaactcgtcg

SEQ ID NO: 30764 - DNA, 401 bp, Oryza sativa
  unsure (1)..(401): unsure at all n locations
ctgctgggngaagagaacactaattttttcaaagccattgcgacttanaggttcagatcgaattctatcgcacaggtgctggatcagaatggataggtagtcactttacacaatcagaaagctgatatgttattccatagtttcaaaaacagaatggngatttttcttttgcctcaaatggactttaatctgatggatctttttcccaatccggtgaacctggattgcttggtggatcagttctatactcaagaggtggacaatctaattaaggtaattcaaccagataaggcacctagccctgatgggattaatgggtattttcttaagaaatgttggcccatcatatcacnaggaatttactggttagcagcacacttccatgcctgttatactgatct

SEQ ID NO: 30765 - DNA, 314 bp, Oryza sativa
gaatccatatggtcttttatgtattttatcctactatgatgaatcttgatatacattggcgttcacaaacatttcgggaaaaaaattgttactgataaagttttattagcggcacactcatatgggtgtagtacaacttatagcaattatccgaagagtcaatgaacctctattttaaaagataggttcaatgtgggctttcattttgctataaaccttgttttagattgtgtgggtgtgttatttataaatgcattcctgatttacccgctgcatggagttcgtcattcgctctgattgtgtcatggatactg

SEQ ID NO: 30766 - DNA, 402 bp, Oryza sativa
  unsure (1)..(402): unsure at all n locations
ctaagcttataagactcgttaaaacaccagatgatacattccattgattctacccccggcctttgcatagaatgcacacagccaaaaaactggacctaagaagacttnctcatcacnaaacacagaaactagtgactatcaatctggagactaaatcggcaaccatgcctctgggtgaaaaacttctgtgccacttgtccanacgttgcgataccacaacaatagtatcccgaagtcccgcatagtataccaaaagaataccaccaatgctaaagagagagatagaccgaccgatacaacgctgcgccgccttgatagctcttctcacccatctgacactcanacctttcttatgactggatggagcaaaatatcaaattagcagtaatcacaaatgagtct

SEQ ID NO: 30767 - DNA, 462 bp, Oryza sativa
agcttataacctgaaaatatttctttccttatccatcactcgacatcttgggtcgtactaagtttgttccagttcaacgatttgccattgacactgtcgattgttttgcaatataccagtgggctgaccttttttttaaaagaaacacccaaaaatacccttaacccttatagacatacaatgttaacaaataatttatctcattagaaattctaaaataatatgaaaatatttatgtggccttcttatacaacatggaagtttgtgtataagttttaagttctttttggtatttttattttttgaaaaaaatattttttggggtatataagagagaaattgcttacacaaaagatagtagcacaaaaatatcttatatagcatatgaaagatgatctacattaaaaactattaacacaaaatgtattttacataacatataacatataggttatatatata

SEQ ID NO: 30768 - DNA, 326 bp, Oryza sativa
  unsure (1)..(326): unsure at all n locations
acccccgaatcccacaagacactgcttttccttgccttgagcgattgaaagatagaacagcaattagagcatcaatcacccaatatttattcaactcttattctggaagctttcaaatgaatttgcaaaagaaagccaagttcctcaaatgattcactcagtctctccaagtgtatcaaaatgaattccttaccaattgttgcctttttgattcctactctaagggtttaatatgtagacctcaatanggatcaaacatggcatacttgtattcacatttattactaaatcaaaaacttagactaaagcagatgactaaacatact

SEQ ID NO: 30769 - DNA, 431 bp, Oryza sativa
  unsure (1)..(431): unsure at all n locations
tctgaagaagagggggaagataccgaaggttctttttttttatccactttganggggtagtgcaaaacaatgttatattttcgctctatttcctaaaggtgctgcttagcaaaggataaaatatttatgattntttcataaaggcctatcaaaagttaattatattttctagtagctggtatcttcttattgctgaatgttctacccatatttagcacccgagnattcttccttttttcattttatctctgcttctattattattagcttacgatagcaattggaaagaacctatggcacaccgatatgcaatatagctatatggctgtaatgatacagtagtttccctatagcaccaatttggcagttcagatgtatgtgtgtgtgtatttaaaagaacgaaagtgataatgatgggtaagagttaagtg

SEQ ID NO: 30770 - DNA, 458 bp, Oryza sativa
  unsure (1)..(458): unsure at all n locations
agcttctncatagatacagatcaacatattgtacattattatacaatgggaaaatagntatcaatttggtattttaagagnggaagattatcaagtggatatgaacagttacctgcaaatttgcaatcaagaaaacatttcagtttgagtaccaaatcaacatttaaaagggccttgcttgccctttcaagaaaaatagttatgaagaaaagaacaatagtagttacaaactgctgagcacagatctggattaaacaaaaaactagttagttcaattttactgggttgcaggggtggagacaatgtcnggctggcagtgccttggttccaaccatggatcgtgcaatgtacataattagtatgatgatcanataatttaaatagtttacttattatgctgctgacttccctttgattttttttggtgaatacaccanaanagttgcgtatcatttcat

SEQ ID NO: 30771 - DNA, 406 bp, Oryza sativa
  unsure (1)..(406): unsure at all n locations
acccctatacagtgaccgccgtcaccgattggaagcaacccaagacagtcactcagattcgcaggttcttgggtttggcaggatactaccggaggttcatcgagaacttctccaaaatcgctcgacccatgacacacgtgttgaagaaagaagagaagtttgtgtggagcccgcaatgcgagaaggcgttccaaactctcaaagaaaagctggtttcctcgccagtgttaatcttgccggatactcgcaaggatttcatggtgtattgtgatgcttcgcgccaacgattggggtgcgtgctcatgcangacggtcatgtggtagcctatgcttcacgttagctacgacctcatgagggcaactactctacgcatgacttggaattaaccgcagtggttcatgctct

SEQ ID NO: 30772 - DNA, 466 bp, Oryza sativa
actcaagctggaccccaagatggatggcgcaaggcataggcatcatgtttttttattgttttcttagtcttttcccggtcttggtgtttggtatagaccggatttgctagataggcgccgtactatcaagaggggtctatgaagcgagctggtggatgatcttgtgccatattagttcatatgcatctacgtgcattttgtgggcttgtctaaccaagtgtgatgaattttctcaagtcctaaaccaagagagaagtgggcatgtccaataggagtgagtgacatcttgtgggtatgtccggtggatatcctttggagtgtgagccctttatccttgacttaagttgtgtttcttggataggattttcatgggttggatggcccattgaataagctctccatagagtccaagaacgccaaattccgagacccgaggcaagagatatcgccgttttactaacggtcg

SEQ ID NO: 30773 - DNA, 375 bp, Oryza sativa
  unsure (1)..(375): unsure at all n locations
agcttcatanaatacgttacaaaacttaatttggttccactatngntcttatgaagnactttgagtgaaaacaaatatttgcttttgggtggtccttcagaagttcatttttgagatcattaatggtctacgaggaactggaaccaattcatgcagttcatcaatagatgcatcgaaatttccaaatggtgtgttacgttccgctcttttgcttcctttgagttgaattgtataacaaggcgctattcactaactgtatctctttatttcagctacaacaccagtagttgaattgctgtcagagagtgtgaatcagctgtccattaagaatgacagtgacttggtaggaatgctaatgatacgttcgtgcatgat

SEQ ID NO: 30774 - DNA, 245 bp, Oryza sativa
ctcatgtttgggttccgtcgatgatcaactacaattgtgttgtagtgttgaattgttgtgtgtgctgtaaatttatctagccggcaacggtagtattgaggagcttggcgagaatttttctcggttaagtggtttttctttttttaaaaacctaatctgggtttttaatcctgcttataaaaatataatcagcagctctctaccggttagttcctcaaaattcgatggccttttctacctctgac

SEQ ID NO: 30775 - DNA, 323 bp, Oryza sativa
  unsure (1)..(323): unsure at all n locations
cacatggaagcttaagcttnttgaagagagtgatcaacgtcanctggcccgacgaactaatgaatcaattagatcaccagctggcattccaatcgacgaggaaaatcaatcttggcacgattcgtatcaactagctcgtgaggtgtaaaatcttcttgaccaaaaaccgatacctattttcatgggtgtggtangttaattaacgagttaattcaccctccaaggttggcggagacatttggaagtgtgccttgcatggacacactatcctcatgtatccatattcatatatcaaagccaaagatggaacctaggtcaattat

SEQ ID NO: 30776 - DNA, 420 bp, Oryza sativa
  unsure (1)..(420): unsure at all n locations
ccgaacagnaacaggctaacagtacacctaaccactgcttctgttaggtagtaatcacctcaatcaatacagaggacaccttataagcctgacagcaatttttggcaacggcttcatgcaccaaaacattngagggcatacagctttgctctggattctctcccgaagtcatatacagtgacctacaagtatagcagcaaaaaaggtcactacgcaatgcatgagaaacatangtaagagtggccatattggcatcaccaaaataggttacagagacactgaaaatgtaatggccgctaaataccataccgaccaaacggtatctcttaaaaggtgaccacttacacttntaaacgcctgaactattattattgtcaaataaggcgcatgcctagagccaacatacaactaggtatacat

SEQ ID NO: 30777 - DNA, 434 bp, Oryza sativa
  unsure (1)..(434): unsure at all n locations
agcttcctaatatattgtggagaggatgcattctcttccctcccggtctcatccaatgctaaacaagcaagaactccaatggcttcaacaagtagctttacttggcttctagggtgttgtagtatcttgctaatgttcctgagtacatagacattgtcagagactttgcacctaagcactctcccagaatcaccagcagcgctaactagcttgtgcaacacctgaactgcctccaaaatgatctcttcgtctctgactgcagatgatgagactatgctcaagctgcgatcatcaccagtaacagctgtgaggttcacaatgctngcaatcaccttgccatcagcatccgcgaccttgttgcagttgtccggattgtncatgatcttgttgaaggatttcacaccgaaccaggtgaactccatgctcacagtcac

SEQ ID NO: 30778 - DNA, 403 bp, Oryza sativa
  unsure (1)..(403): unsure at all n locations
ggacactataatactaagcttatcagtgaataattcctcattanataatgtattaactttttctttttttcactgagacatgccanattatatgctacaccacttttgatagtagctaaactacctcgaatggtcatctgctacataaggtgatggaattcatttattatggtatgaagtggacaatttcactcgtgctagtggccaaggctagtctttggcccttatattctaattggtgcggccattagcttttcaaatgatgtttccttgaaccttgaaatcttgaatgcagcattnggtaaaaagcatcttttttgaggtgattntttcttaaaataggtatggtgaacttangaagaagngaaacangatagcccgtcttctaatataattctgtctt

SEQ ID NO: 30779 - DNA, 438 bp, Oryza sativa
  unsure (1)..(438): unsure at all n locations
agcttactgctggtacttacttacagtggtttgttctttggcaaaaataaatagtactaactgctctcccagtccataaatataagaagctatacatttttatttgttcacaaatataaaggatttgggttcctgagacatagcttttgtactactgttacatccggctcagaatataacgagcttagaattggacacgggtataaaaaatatgaaatattatgattagttgagaagagaatatagataaaaaaattatatttagggacaatcttaaaggttaaaaattgttatattttaagatggaatcttatctactcctacctatntatactagtctattcctcaactatgggtgtgttccgcacttcggctgccctatcttagctatgacacagccatgttgcacaataatttgtgtcactacaagcagctgtg

SEQ ID NO: 30780 - DNA, 450 bp, Oryza sativa
tactgaccatggaggatgtgccatgagagcccagctggtcctatcaccaataagcacgagaagcctcgaggacctcaatggagagcacagctccggcgaacgcccccaatccagctccccggagcacgccgctgtctgaagcccttccggccagcgcgccggtcaccgctccggtcaaggccccagcttttacaaagcaccacatcaaacaacggacataaaaaaaaatcggaacacgtacgcgacgcgaggccagcaaagaacgagctctcacgggcaatgctcgctgtcgctggcgtcaaagaatcacatgaacagctcgagcaaggggggaaagaaggggcgggtggtttggtgagtaccgagagcgaagaggccggtgagagcgccggagatgacgccggcgagaagcctgtggagggtacaccgcacgccgctcttcttcagcgc

SEQ ID NO: 30781 - DNA, 240 bp, Oryza sativa
cgataatgaaataagtcctcgaactcttttatgaaattacaaaaaagctgagcctactgtgctgcaccaccagagcacttggcgagcctccaccagctcggaacagtcccagggccccaggtcatactttatttacttacatcgaaatgcaagaatgttttgccctaagggtgtcactctagacacgccctacaagacccgccacctgaacaggagaacctttaaccaacgtccataaac

SEQ ID NO: 30782 - DNA, 446 bp, Oryza sativa
  unsure (1)..(446): unsure at all n locations
cctgcggcagcaagcttaggtgacggggtgtacatgnttttttttcgganngacagaatgaaccccaccaacggacgcgacgggcgtgcatgctccactatgggataccgtcgttaccttgttcgccgtaatatactcctcacttatttagtgcagcatgattttttgctcttaattttgatcggctatcttaattannaatttttgaanaaatttaaaaaataagtcacgaataaaagtactatattcatgttttatcatctcataacaacaaanatactaattataaaaacaatntaaataagacggacgattaanattaaacatggacactcatggctgtacttaaaatggaacgaacggangtaatttttnttctctccttctttcaagggcgaaaacaacaagtcgagtggcggatgccagatgggatgtactatccttcg

SEQ ID NO: 30783 - DNA, 421 bp, Oryza sativa
  unsure (1)..(421): unsure at all n locations
tccagtcttatatctagggtgtttcccctctttntttntcttctgtcttccgtgaccgagtgcagtgtgtatctacgtacttctcaattgatgtgtaanaattttgcgagttcaaaaaataaaaatctttatagcacaattagtgtacatggccattcgctatctccactacttctacgattaattaaacctgtccatgaccaataactctttttagatcatgatttggtaatccttaaaaaagagagttattagagagaatttatttcgtatttattatagtgtaaaattattattacttaagggcatgtacaaaggtagagtcggatatgagctctacgttatttagagactaacaatcctacaacagntagagacaatatggttactaatcattaatatatcaaaatactttttctta

SEQ ID NO: 30784 - DNA, 425 bp, Oryza sativa
cttaaggcacgtgatatctgctaaaggagttgctgtggacccctaaacagtgaccgccgtcactgattggaagcaacccaagacagtcacccaaattcgcagcgttctgggtttggcacgatactaccggaggttcatcgagaacttcttcacaatcgctcgacccatggcacagttgttgaagaaagaagagaaatttgtgtggagcccgcaatgcgagaaggcgttccaaactctcaaggaaaagctggtttcctcgccggttttaatcttaccggatactcgcaaggacttcatggtgtactgtgacgcttcgcgccaaggattggggtgcgtgcttatgcatgaaggtcatgtggtagcctatgcctcacgccagctacaggcccatgaaagcaactaccctacccatgaattggagttag

SEQ ID NO: 30785 - DNA, 395 bp, Oryza sativa
  unsure (1)..(395): unsure at all n locations
accactcaggcaagatgatccgagcgggccaacttgattgcaatctatgaccatcgaagatattgcggcgtgcccggctgaacagcattgatctcccgttcagtcaacttttgctttccgttagactcataagccaaggggccgccgaagatattgttgagcatccttgcggagggcttgaaatcctgccggagcgtaggcagacgccttcttcctcgacgtgctctgttcttcgacagagttctttcgtgcagtcttggtgtattgatccgcgaatagcttatagacgaaacaatcttcggccatgtggttggagttacgatggtgcgggcattgtgagttcatgatcttatcgaacgtgttgacgcgcgaacgctgtcnggaagagtgactgg

SEQ ID NO: 30786 - DNA, 429 bp, Oryza sativa
  unsure (1)..(429): unsure at all n locations
agcttatatagcaagggagtattcttccttttatgttataaangcnatagaacagtgatggcaacagcgtttctctttagaaaatcaaatgctagttttctgaacctatgctgatgtttgatacagccaataattcagtatgcctgtctgtgtggcacaacactctctagttgtgcaatggtgttctgctattcctttcacagtgatatcatccatcattattgctgttgtaatctcaacaaaaaactacatggtccatgccatttatgttgcagcatgtttcagtgattgctnttagtatagtacaatacctgtagtacaaaagatcctttatatagcaagataatggtatgctaatatttctccccaactttagctaaaagatactgctgagcgtatcanagcagttgatcgtgcggcttcaatgat

SEQ ID NO: 30787 - DNA, 235 bp, Oryza sativa
  unsure (1)..(235): unsure at all n locations
tcacacataagcggctcatggctagataactcgttctgcaaaactacacaaaaagaggttaataaaagtgaggtccatgctaaaaatgcggcatgtgtactcatcacttgctacgttttcactgccaagtgctaaccatcatggacactcgccacgacgccaaccgggccactcaatgaactccttcctgtcatgcgctaacgtacacttaatngcagctgattcacatttaaac

SEQ ID NO: 30788 - DNA, 454 bp, Oryza sativa
  unsure (1)..(454): unsure at all n locations
agctacatgtgtgttaaatcctcgtccagttttctgnctangcacacaataacaaattggtaatagagtactatcaaacagctaattaatattcgcaaaataataaattattaccgaggtggataggtcctcttcaaagaataaaattctacgccgcggaaaataaaccaaagacttaacagctatggcgactccacttcacaagcaacttgacccgaacaaagcctaatcctcctgatcatcaccttcactgaagtactccttctctgatgaatgaatattggcagaatgatcatatgacatactcaacaagccacacagcaaatatgcaagtgcacaagataacaaaggatggcacaatatagcttatttgcataaacaacatttaataaacatttgagagaatagtaaaacagttgagtaattaagcaatattaaataaacactatacaac

SEQ ID NO: 30789 - DNA, 319 bp, Oryza sativa
  unsure (1)..(319): unsure at all n locations
atgacctcgcggatgaatcaggccttcagaagtcgcgccacctcctcgcggatgaaaacttgacgttccggggcctgccggcgcactttctgccggaccggctttgcgcccggccgcacggcgagacggtgctcaatcaccctcctgggggaccccggcatatccgncggtctncatgcgaagacatcagcgtatgcccgcaggaaggagacgagcgcgtcttcctatttgccatccagaagaccaccgattcgtgtggtggtagacgggccgtcgcctatggcaacctccttgaccgggacctcgtcgcacgtgacta

SEQ ID NO: 30790 - DNA, 432 bp, Oryza sativa
  unsure (1)..(432): unsure at all n locations
acatctatgcctaagaccggaattgttagtgatcctctctctgttagttctattgatgttggcaaaaagaaagggaaaagtgttattattggggatcctcggcccaagaataaaataaaaaatgcgaaagccgaagatcagaaagttgcaaaggatgagtcatctagtttccaaaatgccaaaaggccgaagctcacttttgagatgcttatgactaagtacaagaaaggattagccggtcaacgatntgataatcaaactagtgattcaaaaagaccaagatcatctcgtacggagagagttggtcatacaccaaagcaattggagccatcaactataccaactccatacaaacctcgcggtgtgatgccatggtatctacatccaatagtcaccatttggtattcctctatgtattacatgccatggatg

SEQ ID NO: 30791 - DNA, 92 bp, Oryza sativa
actcgttctgagacagaactgaggggtgaaaccgaccttatggcagcaccccgacaccgtggaaacgctcagccgtgcaacgcgacaaccat

SEQ ID NO: 30792 - DNA, 370 bp, Oryza sativa
  unsure (1)..(370): unsure at all n locations
tacagaaaaataagtaagggcggagtagtacacatcgagaacataccaaaatcagccaaattggttgaaaagaatatttctaggcatggcgttttaccaagatcaaaagcaaagttttgggcatatcctctgaaatctgaatgaatcttacttcttctggtgtattcagaaattgagatgtttcacaatttacaccttcaccatatntagttgctattgtgatatttcacaagatataacactacaaaaaatggatggcctgccatataatctttgtattaatgggtagtttaagattactgggtgttcattaaaaaaattactggcgcattctgatacaatnttatttgaaatgggagtttttcttttt

SEQ ID NO: 30793 - DNA, 427 bp, Oryza sativa
  unsure (1)..(427): unsure at all n locations
gcatccgagatctcatgggattatgaaagtgaacaccattcttataaggcaggagttccatggtggcggcaagatgcagttgaatctgacttgatctgaagaagaacaggagtatatgagaattttagccctgaacctcagccttgggtggctcactttgtgtgttctggcagaggtcggatctccaaagttatttggccgccaaagagaaacataaaaaaaaatgccaaatatgaaaaccacagaatgcgtggtgccaccgatgaatagcttacacgccaaaaatcttcccacatccttccaaaatatcttgctacagattattctacatctcagatgacacttactgacagagttgagttgtacacttctagctgttatatctggngtggagtagctcatttgcttgcacacatgcacatttact

SEQ ID NO: 30794 - DNA, 336 bp, Oryza sativa
  unsure (1)..(336): unsure at all n locations
agcttgcctccatctcctcccacttctgatttgcttcgctatagccgcctgaccccaagtggngatggtacttcttcttggcagcattttctttggttctggccatcatctcttgcccttggtgcccttgcttggaagcaacgaactcgtcccagtgatcccttaagcttcgtaatggtgtgaagttcagtgtctgccccttcaggatgtatttctggcagagatctcccttgaagctctgaaactgttctgccattttctttagagtccacattttcactatgttctctgtacccacaggaagggtgaacgtctcgagcattgtggtccacagca

SEQ ID NO: 30795 - DNA, 363 bp, Oryza sativa
  unsure (1)..(363): unsure at all n locations
ntgactagaactgcagcgggatcaccactccacaggcancctcgattgcacggacgaagcctactcctcggagaaaccttcatctgacgcatactcgtactctggggttgggaaaagtagagcaagactgagtactacccactgtactcagcaagtcataccggaatatgggtatgatgcagggaattatcanaaaagagctagagtggttcatctgcataaagcgagcatttataaacagaagttgaaagactaaacagcctgaataattaattaatattaactatccactgtccaacgctattccacgttgcggcaggcccatacatccacctaaactatccaatttcgaaagaatacact

SEQ ID NO: 30796 - DNA, 463 bp, Oryza sativa
  unsure (1)..(463): unsure at all n locations
agctttgatggtaacctctccaagattatttccatcaccaatgtaaccctggtgaccaatctgagtacaaagaaaggatctgggccctgtgacatgactgcaaaaaaggtaattgtatttacaacattgtcaataccctggtcaagaagttatcaatcaaatgtcaaatgagaaagatctcatacttccgagaaagtttatcactgaggataacatcaaaaacatggatgatttcttgggctatgcccctgtgctttccgagcagaaagcgctggaggtggtacaagtttgttttgccaacaatttcaattgtgatcttaaattccttttgcgccctgcagaagggcaagacataataatctaatattgagaaacatgtagctcggtacataagaaaattcttagctagaatcacacanaccttttcttagcattcttttcttgatcaaatactttgaccaca

SEQ ID NO: 30797 - DNA, 476 bp, Oryza sativa
  unsure (1)..(476): unsure at all n locations
gntaatattgctggatatatttcgctctgacatanctattttanttgcctgctgtgctgccaaatgctcgtgttatagcattaatgtacttcaatcatagtggctacaaacttcaacaccacacctttgacacatttatcaaaaatcctaatgatcgaggtacgcggacaccacccttcgacatatatttttactgcagatgtgcattatatttgcagctgtagtgaacagttctaaaatcatcagctggatgttgattcttgttgtggaacttctttaagagctggacctgtaaactctctgtagattatgtggacttgaaactagcaacaacgaagatacgaaagcttttgcttctagacaagcgagtttctgcgtaccagcatcaatttctcagattaatggcatgtacatatcacgggagaatcaaggcgaaaaaatattgcgcgaatgtaaaagtactcatcttcactgtc

SEQ ID NO: 30798 - DNA, 458 bp, Oryza sativa
  unsure (1)..(458): unsure at all n locations
agcttggttactactgggatattgatgacttacttatcaaatccaacccaaaactcacaaggtaggatactctatagncgattcatattcattcccaaacgctcgttatattgtatagtcctagatattagtagaaagggttttgattggtagctntacacatcattccattgacgttggtagaattgagtttagttctctcanagtcaaatatattttactggagggagtagttattttttgttaagaagttgatcactgatgctgacctctgttcttctttttcctttcagngatgttaaggtgcaagtggaggcagaagacatggcaatgatgctgcagctcaagcctgaagacttcgtatgtttcagtacctccttatattctagagatcatatgtagctcatcttgtaggtnntcgtatctgtgtattagtggttngacattgatgtgcatat

SEQ ID NO: 30799 - DNA, 456 bp, Oryza sativa
  unsure (1)..(456): unsure at all n locations
ccttgcttgatcgattcctggcggcgtggctagcattatatctaccacatggaaacgattgacaacgtgcggaggtcacgaataagtgaaaaaaacgggtgtaaaggatcgtcgaaactgactgatgtacacaatagcacaatcgtcatcaatctgattcattaattaatagctctagaatggcccggaagcgatccggntagctttttgntgggatcggactactatacaatttcgatcactctcgatcatgaagcgaagaatgtctagttcctgacgtattctcgcgatctcaggagtagcaaaggctcccatcggttgccattttacccaaaatggcttatttggcttattagaaaattaaaattaatttataagtaaaacttttgtagatttgttntagcgacttatagccaacattaacaaaatacgttaaagcatttcaaatcaacttca

SEQ ID NO: 30800 - DNA, 383 bp, Oryza sativa
  unsure (1)..(383): unsure at all n locations
agcaccgaggctgcagctagccgangaagcatttttttattgattctancgnaccanatcggacttaacggagataatannaaaacgaagccgataagaggatatttaactactgagtatacacaattaataacaaaattttacttaattaactaccatctaatagatcagaatctacccaagacaagattgatagcaataggtagatctaataagccgatagatcctataccaagtagtggatatataagtcacgctacgatagcaaacaatcaaagaaaaagcggatatatgggaagacggtggttgtaataaattgattagaatgtccgaccgaagcgagagtcataactaggtcgatacanaacaaagtgatgaaactt

SEQ ID NO: 30801 - DNA, 348 bp, Oryza sativa
  unsure (1)..(348): unsure at all n locations
ntgctaatggttttttctaataaaagaagtcatagcatanatgatctcttgatggaaccgtaactntataggagaactcttccttccttaatagaaagtaattagttntactcatcttggtttttttcatcccaaatataagaaacaactactactaacgcaaaaaaacagaaaaaaaaatatcacatttttatttgtatcactctaataaatataatatatgtatcgagggtgaaagatttaaaaaataaattcatgggagaggaatatggtaatatattacatgcatacattngtgtcttatattatgaaatatatatatatatataagttaagccttantatatt

SEQ ID NO: 30802 - DNA, 466 bp, Oryza sativa
  unsure (1)..(466): unsure at all n locations
agcttgtgtnngncccctcaatntttactattacataanggcgccaaaaatatgttctctatgtagatttgtccttactttcctataactttatgccttttcatttgctttgacatcaagcattatgacataattttacccctattttggcttttcacactgttaagtcggctaagaaaatggagcccaagcacaagcttcagttaaacaaatgagcaaaaatcataaaattggaaaagtaagagtaacaatcagattgaaattgaaaacaacaacaagaacacgatttcctctctactttaatgacaaggataagtaacaaaatcgacttaaaaacactgttaataattctaaaatataaaattcaaaatngattgtggttataaaccgtgcgcgagccgggccaaactctcattaactcgcatgttgaatngacgtattcatttgcgtcanaactaaaagcatg

SEQ ID NO: 30803 - DNA, 426 bp, Oryza sativa
  unsure (1)..(426): unsure at all n locations
aacgcatgagagctgctggttgtgctattgctctgttccttatggtgttctttatatatgcttctttgagatatttccatgtctttctctcggaaggaagccctgaatactatgttattcttgattgtggaagcactgggacaagagtgtatgtttacgaatggtctgttaaccatgacgatggaaacacatttcctattgctttgaaacccttaggaaatgctcctaagaaaaaatctggtaaattaactgggcgagcctatcagcgaatggagactgaacctgngttgaacaaacttgttcacaatgaaactggattaaagatgacaatagagcccctccttcgaatggctgagaagttgattcctagacgtgcacacaaacacacgccttgctttttatatgccacagctggtgtgcgcaagc

SEQ ID NO: 30804 - DNA, 464 bp, Oryza sativa
  unsure (1)..(464): unsure at all n locations
agcttngacgaattgagccttcttggattgttatccctgatgaccttttgatcaagacatgcggtgacaaaataagggctatagtagatgagatctttccacactttgcaaattgctatacagatcattcttaccttgcatgtcgggcaattgtttgcccgaataactcaacagttgatgaaataaatgattgtattgttgacatgatacccagcgacgcaaaggagtatttaatatgtgatacaatttcaaaatcaagagatcatttacctgactttgacatcctttaccccctgaatttttgaattcaattaatgtcaacaacttcccatcgcacaagcttgtgctcaaaaaaggtgtgacgattatgctactacgaaacctaaatcaatctatgggtctatgcaatgggacaggttattggtcacttctcttggtatangttgtagagtgtgaatttaact

SEQ ID NO: 30805 - DNA, 345 bp, Oryza sativa
  unsure (1)..(345): unsure at all n locations
ggctttctgcttgcaccatctctacgactgctggcgaaagatgagagcctacgcattttcctcggtgaagttgctgatttctttgtgtgtggccgccgtgacttgtccgtatcatgctctgagatctttntcttaccgctgggctttggtcttgatgcaggtctcgatgaatgtgacgatcttgcttgccttggttccgcaggttcgctcctctttagcaagttgttaagactgctagttgctgggcgcagatcatttcggctcgccgcagaactactatctcttaaaacctccacagttatagggtaaccgacaatgggcttnaccattcatntactcatgaga

SEQ ID NO: 30806 - DNA, 344 bp, Oryza sativa
  unsure (1)..(344): unsure at all n locations
agctntactgggtgacacattataagatgcattgtttcatctcctaanaaantaagtaactgcggtataaaaggatcttaaggtattgggcacttgatcacgcgcactttggcctaagcaaaaagtgcctaagtccctaaaagatcgtgacaggccacacctgaaaatatgggctgcagacatattatgcttaagccaaaaaatatgccttcgacaccctttaaaggatgacgcatgtgacatgctcccgagaacaaatcttctgggaatatanaccaagtgagctcatatgaatagcttctgatctgaatgattatccttaatggatactccacaataaatat

SEQ ID NO: 30807 - DNA, 214 bp, Oryza sativa
  unsure (1)..(214): unsure at all n locations
agcttactctgtggctagtttgtggatgaagtgatgtgtagagatctggcgatgaggctctcgacccggtagtgagcggcgtcgatggcagcggtgctctggtagattttccctgcaactgattgagggtatcatcttatagaggtactangagtgtgattgtcctggatgacacgaancggtgaggggcagcggtggcggcgttctggatgac

SEQ ID NO: 30808 - DNA, 266 bp, Oryza sativa
acttgtggcaatggcgtgccgctgtcttaactgcggtgtcttacctacttctgttgttggaatgtattccggaccgctcggtccgatgattttatactgtgcctgcgggcttatgatgttatcatttgtactagactctcgtatatgtgcacttgatatttcagctataagttcgtgtgtaccacactacttgatccatggaaatggtactgtttacacgattgattcctgttatataaacggtgtccacatatggaaatccccat

SEQ ID NO: 30809 - DNA, 414 bp, Oryza sativa
  unsure (1)..(414): unsure at all n locations
gcttaagccatgcataaagttgccagaagattgttatttacagttaatcaataacttgtggaagtaaataattgtcatttaagtcacagattatagtttcatgtgatcaagaatgcttacatgcttcaccttcttatctgtgagctagcattacttactctaatgcttactttggcaggcacattgcagcagagtgttcttccaaagatctctgctggaactgcaaagaacctggccacatggctaacagctgcccaaatgaagggatatgccgcaactgtggcaagtcgggtcacattgcaagagaatgcagtgctccaccaatgctgccaggtgaaatgaggctntgcagcaactgctacaaaccagggcaccttgctgcggaatgcaccaatgagaaagcctgcaacaact

SEQ ID NO: 30810 - DNA, 236 bp, Oryza sativa
tatatagccgctgctgagcactctaagatccggtacgtcttatttcctaaagacgatgacatccggcgtctttcacgtctgacggaaacctgggtcccaacttattgctgtacacatccctttgcagctgggtatacaatatgcccccgatgcctccacagtggcacctgagggaatggccctgagcgttttctcttacctctggcgattccaccgatatggcacttcagtcaatt

SEQ ID NO: 30811 - DNA, 365 bp, Oryza sativa
agcttgtaagtgtaaaaattatcaatagggtctttctctctggcctatagcatgttggaaggcatttccaaaaacaccctattagcatgttaatgcactgtagtgaagatcagcatataactgattgcaatcctgatataattttttcatcatacacagctttttcccttcgaaacactttgttttctttagaaacttattatattcatgaacacgaatctgctcaacataacaattccatagggaacctagcaacccaatgaaaataataccagcttgtacaaaaactggttattattggattaagtttaaataaagaccaatccagtacaacatttcagtctggggctttcaattatttctta

SEQ ID NO: 30812 - DNA, 459 bp, Oryza sativa
  unsure (1)..(459): unsure at all n locations
agcttncatcatggtggacatcaagtctatctttgtggatccagacaatgtgatttcaataaccatggacatgctaacatcagaacagaagcaagggtttgaagggatgataaatcaactgcaaaatcggtacttacattcatttgttctgactcgttcgggtacagtaattcaaagacacaaggtggatttgccaccggttgatgagaagcctgagtcaagctctgctaatgatgataaacttaaggaagtcaaagctgaaggactcaaacgggaggatgatggtgctccagagttcaacaatctacaagatcgatcagtgtggtcgtgacactgaannatttgatttaaatttgatccatgttgctctgaaaattcaattgataattgcacaaaatcaacctaatgcatttcttaaaaaatcaacatctttgtgcngaatcaattgtgaaacaatat

SEQ ID NO: 30813 - DNA, 261 bp, Oryza sativa
ttatataggatttagaataaaaagcgggcagttttatgtgcatgggtgcttttggaggcagatacggtcttcatccacccgacggtagatccgagcatgtgcatttgtggcggtgcgaggcatcatgcagcggccagtatcccgagaaccccgacctcgatgccctaatgggcgtcacgccatatgtgacggagatacgcgacgaattgttggtgagccatggagactgcgcgaaccatgatcttgcgagttgcgagcgct

SEQ ID NO: 30814 - DNA, 273 bp, Oryza sativa
  unsure (1)..(273): unsure at all n locations
gcttgctctccaaaaaagcatacggatccactacctgtttatctcccattctacatggcaccaaatttcaagtgaactgctcctttccaatggagccttggcacgaaagcgacctgtatttttctaggctgccactacgtgacaacaattgtgataggcactttggtggtggccgcatgcagctgcttgacttgactganatatgattttccagcttgtgaccactgtttctggctgtcaccttngctcggagatacataccatgtgacccca

SEQ ID NO: 30815 - DNA, 294 bp, Oryza sativa
cgcgcgcatccaatggctccgcagacgtgtcgccgccgtctatgcgtgtaacatcgattactacgcgcttctgggtgttcgacgcggatgcacgcgctctgatctggaacgcgcgcacttgctgttgactctgaagctcaagcctgaccgcgccgtggtgttctgcgaacggctggagctggtggacgatcaccgtgacctggatgctgtgcgcgaccatgcgcgcatgtcatcgctgttgttgtacaggatgctccataagggttattctttcatcatgtccgcggtaattga

SEQ ID NO: 30816 - DNA, 347 bp, Oryza sativa
agcttacacatttcgctgctcttcgcttctcttgtccttaagagctacttcttggttagtcttgtggacaacgactacatcaacggtgatctcttcgcggcgttcaaagagatttgatgacatcttatagtctgcaacctctcgtgtctgaattcctatctttatcaagtgttattgcttccacgactataggacagctttcgtcgaaagcttttgctcatgtgatctcgaaggattcatctagtctgatttttcgtgacttgtatcggttttattggattcatccaacatatatcaataaaaaatgagttgtgtttcctttcttcctagttcagttaaaaatattt

SEQ ID NO: 30817 - DNA, 258 bp, Oryza sativa
atcctcttagtcacctgcggcatgcaagcttgatggtcggcacatcataactgtagtgctttaagatggacgtcctattgccccggccgaagccgccaagaactatgtacgtcacagcggttgggttgtgcgggataacgtgcctgtcagtacggtgtactggcgaagaacaagggcacgcggagatcatgagagctttgtcccagattcggagaaagagatgctgtggaccacaatgcacgagacattcaccctttc

SEQ ID NO: 30818 - DNA, 442 bp, Oryza sativa
  unsure (1)..(442): unsure at all n locations
agcttcgtcaggagttcagaaacaacaacatctttactctnttttatagtatcatgactntgtgaactttctcctggagaaaaaggactgtctatatcagtatgtgctgcatccatagctccactaaggcgaccacgtatccttgatagcgtgtgccgaccatggcgatgtatgctggcagcagaacgcactgctgatataatatcttggttcatattccatggtgatacagaggacgttctcactganacaggattcatatgtcttgtaactgatagctgcattgtgtcatcatcactatccctttcagataaatttgagactgaggcatctncaggcacatcatcttngtccatgtcttgcttctccacctttgaatcactaagtaagatatctgcatgtgacctcatataaacctaccctagtcctcatatctcacatc

SEQ ID NO: 30819 - DNA, 295 bp, Oryza sativa
  unsure (1)..(295): unsure at all n locations
tagtatataattaattctttatgcatgcttatgacattgcgatggacaaatttgacctatatacgctactcgcaacttatacacgttgatcggttacgcgatatggaaatcatgtagacgtcttgatatccttatatatactgagtgacttgtttcacataacttcgtgtaaaattaatctaggctttgctttctcctatatactggactagtacttgtagtctactacatcccatccaccgacatacacnctgcgttatgagagcangtctatggaatcatcggcttcaacgtc

SEQ ID NO: 30820 - DNA, 286 bp, Oryza sativa
  unsure (1)..(286): unsure at all n locations
cacaaacgacaagtgttgacatatagatccacgtcttacaaaaatataaaagattacaaatgcagcggaaaaaggtaaaacgagctagacttggaatcttgacttctgcagcgggtgattccactccacaggcaatccttgacggcagcgacgaaaccaacctctctgagatagctccaactgggaagaactccagctctagtgtggnggaaaagggagcaagactgagtactacccactgtactcagcaagtcataccggaagaagaggtatgatgcatgatata

SEQ ID NO: 30821 - DNA, 350 bp, Oryza sativa
ttcctgctgcaactattcgttcctaaaaactgctagtctgtgtcacgaacatttagtctggcaaccttaacagatttttttaaaaaaaaatgtgcgaggacaaccttagagtgttagctaaacgctcccaaaataaaatttagtctgcaaatgaaaaaaaaaagagatgaaatttcgagtgctgaaagaagaaactgaatcgcccaaattgcaacagtagtgacagtgtagatacctttttcttgacgtcgtagtactcgagctcgtcgaggtgcctggccaaatcggtggctagccgctgaaccatgtcgatctgcggaagtagctggtcgttcccaatcctgacccct

SEQ ID NO: 30822 - DNA, 333 bp, Oryza sativa
  unsure (1)..(333): unsure at all n locations
agcttatcgaatttggtagattactcgatgccccgcatgtgtgctttaaagaacataataaaacaacttcgcttggggtgataccatcggagatgctgtgccagttggcgtcaaagcattgcatcgcgtgttcatttggaaccacaaggtaaatcttttgtcgattctactataacttctgcgtgacatctgaatctctcaacaaccacataataacggtgtcttgcaccatacagacttctccgtgaattttctggtgcctaattngcattccctatgacgtcaatataatgagttttctacagccctctgagatatgatcttgatctctca

SEQ ID NO: 30823 - DNA, 247 bp, Oryza sativa
ctcaatcagccccacaacatttcgagtacagctccctctactcgtccagaggggagtacaggtcaaggtgcacctagttggttgccgtcgaaccatccgaatctgggggcttcggcatggagtcagacacctcaatactacttcgtcaatgccgcccatgcgcatactgttctgtcgcatagaccgacaccatgctttgtgacaagccaagcaccatcccaagtcgtcatgacatggtcgcatgcag

SEQ ID NO: 30824 - DNA, 332 bp, Oryza sativa
  unsure (1)..(332): unsure at all n locations
gtcacctgcggcatgcaagcttatagcttcatcccaagtattaaccatattaacattctacatctgtatctgcggcagggatgtctttctttttttctttcgatagctcggtcttatttctttacataagcattaatactacgagaagctgctgcagatgcattgcaaagtaccttagaagctgataatgcggttgcccatatnttctcctctcctagttcagcttgatcctgcaatatgaaacactgatgttggtcagacaagcttggcttcagtggaagaagaggactataatgagatagcagcaacatagtttggtccaaaatgcaatc

SEQ ID NO: 30825 - DNA, 377 bp, Oryza sativa
  unsure (1)..(377): unsure at all n locations
taagcctcgtcagcctgatttaattagaaatgcatattgtgtcgcccttatttgtagtgtatagtcacattatacgacctccatgtttgctatattttgcagcgatatcttaagattgtatagatttgntccacttagagattaactaatcactggtggataattattcatctaatatattgtcttacctatattactactgattacatatgtaatttgggacttacatatgtatttgagattacatatgtaattttggacttacattgtaatacgctaaatacatatgtaantatgaacttcaatattaatcatgncactattttgttgaaattgacgcctaatatattcccttgcacttaatgctaatgacaatg

SEQ ID NO: 30826 - DNA, 468 bp, Oryza sativa
agcttgagattacgtcacctgctgccacacatcttactatcattctttctccccggcgacacgccggtgctgtcgacgacccaccgccacagcgacgacccggtcttcgagctacccatcatggtgatctcaagcgcttcgttcgccaggtcgaacagcatcctgtgatcagctgcatcttcttcaaggatgtatgtctcctctacctcatccaaaacgtaatcgcagatcggccttcttgccattgagtccacccgggcattgttcatcatcgatggagacgagtacgacgacccgtcttcgtatagtcccacggcaatgacgacttgctttatgtacgccatctcagtatagctctgctcggtttcagttgcggacgtgctggtcttgcatgatgatgattcattgctggctatgggtggtgtataaaatctgaccagctttctggctcagtctgacaacattgac

SEQ ID NO: 30827 - DNA, 389 bp, Oryza sativa
  unsure (1)..(389): unsure at all n locations
taagcttgcagacatttcttgctcanatcagaatcttatataactttgtggaataaactgtcctttacaactgataatgcaagcatgaattaattaacctgccatgcttcacaatttgatgcatgcatgcctgcaatgtttatcatcaagaccctagcatcttgaatgtcaggtgaacaacctggaaataatggcatctgctagctcaatctgcagcattgcagtgtcctcacaaagagatcctangtttcaacctaattcgagtctctgtcatctgtntgcgtggtagtaagcatttagcctccaaggaagatccataccaagaaattcatgtttcagagcattaatccttactccctagtaatccatctgtgccctcggatntcata

SEQ ID NO: 30828 - DNA, 306 bp, Oryza sativa
agcttgggatagaaaggcatgttataacatgttcattttttgtccaactatgttcctcctgctgcatgacctattggttcaatcctatggcctaaaatctaatagcaaatccacctcggtagaagctcttgcgatgtttctttggatgggtggcaccccacaatcagttaggcaagctgaggacagacttgagacgtccatggggactgtaagtagctttgttaacaaagtgttgcagtctgtggtcaagcttgctgatgatgtcattaagcctgtggacccgcaattcagaacaatgcacccaag

SEQ ID NO: 30829 - DNA, 370 bp, Oryza sativa
  unsure (1)..(370): unsure at all n locations
ctacaacaatattgttgttaacattgtaatagcccttttccttggttgctttccatgacatcatgagtctcaatgttgtcaactaataaacccttctatttttgtctgttcaagttaaaaatgagctttgtactggtcttttatcaaattgttttcatgagatctgtgggtccacatacgcccatgtcaactttactgccaaggctgatgatgatgatcangctaaaaagagactatactttgcagagctcaagttgaatccggatcttctggcaaaaggacggaacgctntgtataattgagccctgatccaaatattgttggatgtgctgatgatatcgagcccatgtgtgtcgtctctatacacaat

SEQ ID NO: 30830 - DNA, 335 bp, Oryza sativa
  unsure (1)..(335): unsure at all n locations
tggacagcacttgaatcatcagctgatgcagcttcttttgaaggctctgatacattatacatctggcgatgtaaagaacataattccatggaaaggtacctcacaaaaaccatactgatgctgccaaaaaacaaatggaacggaccataatacttagaaactttaatcgatcttggtgtttgtaacatggtgaaatatttggcattgctggaacctatttgatctttagcccttatcttgctcttagagattatagcaatgtgacaatataccatggtactggacaaagcagaggaacacttaanaaatgtttactaacaactattatctatttc

SEQ ID NO: 30831 - DNA, 341 bp, Oryza sativa
  unsure (1)..(341): unsure at all n locations
cggaccttgtgcgtctaactaaaataattttccctgatactgagaggagagagaaggacgagcanctacacgccttgtgaggatatctgccatgaccttggatgatgcctgcatcaactgacagtggtgccatcctagtgactatatggcggtggcctgctttacatcctctgggtgtacccgcccctattcccgttgggaaacttttccactgaggtttctcaaactgatttgtataactgcttaacatctcaactcgagaatcgtataccactcgaaattgtaatcaattctgaaagactaaaacctaaccggaaaccggtttaactttccatccaaaa

SEQ ID NO: 30832 - DNA, 227 bp, Oryza sativa
  unsure (1)..(227): unsure at all n locations
gaaaaaatttgaatcgaaacctgtctttgtttntggacgacaaacacacaagcgctagctttcatctatcgatcgtcagggggcgcagcaaaaccccacagccagagtgtttcttcgcttgtgcactccgggagttgggttcagtgtgagcgacactgttgctgctttgactgcaggacgacgagagctaatctagctagggccggngagcacgggtgagatgaatg

SEQ ID NO: 30833 - DNA, 423 bp, Oryza sativa
acttgacaatgggtagatataaatatgccattgttgctctactttttgttttcaatactcctacgaggaggtagaaatggttctataagcttaaagttagagctttctatatactcctattttggattacatggtttggattaacctctcgtgtgaggaggtggacacatcaattgatcaatcattcaccaaaacgaaatgcgccgatcgattgcctcacctcaactgccgttagttcacaacgacacctatattttatcagcagcttagcaaaaaccttcgctccccaatcgtgtccgggcacgtgacgtgacgccgttgccgtacatagtctacgaacaattcgtaacgtgttgtcttcagacgaaaggactatgaatgttgtgtattgcaaattgatatatcttatgatatatgtcgatc

SEQ ID NO: 30834 - DNA, 424 bp, Oryza sativa
  unsure (1)..(424): unsure at all n locations
agcttgtccactatcatnccatgcccctatctttcactatcaaaaatgactaaagagtgaggatcctttggtataatctacggacatacagagacctcatgcatatgataggattcacatcagtagcttcatttgttcatgcaaagcagcaggagacatttaacataagagaaaaggcctcaacctgtcaactacattcgtataatcaatgttttaagaaaaagcaggacccactcagttcacatgtgaactcagaagtctcaatttggcgtgtgatgttacaaaacgaagcatatcttttgaaagcttaaattcgccatcttatataagttgacaagttggtcccgtagatagactgcccctttatctagaattgatatgcagactgttcacttatcccttgattttgatatgctattcacat

SEQ ID NO: 30835 - DNA, 334 bp, Oryza sativa
gattgaagaaggagatttaatcttgaagaaagtgctcaatgaggtagctggtggaaaactcgagtcaaagtgggaaggaccattcatagtcaaaaagaagacagaaacaggagcattcaagttagcatatcttgatggtgaggagttaaagcatacttggaatgctatttctttaaagaaattctatgctaaaaaaaagaaaaaaaagaaaaaaataatgaaaaatgaaagaaaagagaaaaaaaacgaatataaaatgagagagagaaagagaatatggagaacacgggagctcgagtttgtagtatactcactcagatgtaaatacgaatga

SEQ ID NO: 30836 - DNA, 358 bp, Oryza sativa
agcttcgaacgtcataattaatcgttttctgttatatattcctttcactaacttctctatttcctctagaagagctctgcccgtgtgcagtttgcaccaatctagcatcgacaaatagaaggcgacgtagaaattcttgtcatgcaacttctgattctcttattgctgcacatatttttatccttaaaccgctaattgggcgacgataaaactgggttgagaggctgaggtggaacgccaagttcccacacgagtcctcgactgtcattttcggctcctcaccatctgcacttcatgttattttatagtaacttagtcttgacgtactacatcaaagaatgatacggcacatgtcatg

SEQ ID NO: 30837 - DNA, 371 bp, Oryza sativa
tatactatataaattataaattaacttcattgtagccatgttcaaatgttagagatattattgaagagttattcaatctataagctgtgggtcaagtataaacatgtcctataatatcgacatatttagaatacggtaattaccatattatatgaaacggtaatttccgcaagaatacggtgaatacggaaacgatcggtataacatcaaaaacatctacgttttcatgtacatattttttaccatctacatttttgtttctgtcgattaccatttacatatggctcggccggtagaaagtcgaatacgaatgccggtcggccggtaattaccgttaccgtttttacccctacgtgttcacgcgtgaaatt

SEQ ID NO: 30838 - DNA, 330 bp, Oryza sativa
  unsure (1)..(330): unsure at all n locations
agctnttatgcacctctgatttgtatataatctctctaataaattcactagaaattttggcatgacctcccctcttttttgaagaaatattgaagcttgctcgggctggaggaggaagaagacatatatacaggggtgggactttagtcccggttggtgttatgaaccggggctaaagatcgccgggatctttagcnccggttcattacaccaaccgggactaaagtcccacccctgtatatatgtcttcttcctcctccagcccgagcaagcttcaaaatttcttcaaaaagaggggaggtcatgccaaaattcctagggaatttattt

SEQ ID NO: 30839 - DNA, 320 bp, Oryza sativa
tattatatatgtggaaacaaatatggaaatgacccttctatcatgagagtatgaaagatatctaacacgagtcacatatatttgacataactcaatataatgtcaagcaatcatatgcataataagggttatcaatgatatacttgcatatggccttggtaggtataaaatgaagtcaattggaggaatgaacttcttaaaacaatattatttgttgataacaaactcccaagagtcataacagaagttgcaagaattccctttcatctctaatcatctcaaataaagcaattacgtatatgcttatggttcctaacatg

SEQ ID NO: 30840 - DNA, 408 bp, Oryza sativa
  unsure (1)..(408): unsure at all n locations
tattacggaaacaacttctccctcatacacttcaatgccatcaaatgctcggatctaacatcatcaagcatatcttttgtatcttgtaacatgagagaccgatatgtttccaacataacagcctccttgtgctccatggctgcaaggtgcgctaactnttntgattcaaggttatcactagcaacatgcctctgagtctctagtagttcatcacgacctttatttgccatctgctgaacttctttaagcttgtcaatttcatcatcagtatctgatagataaaccttntgcttccttntgcagttgcctttaccattacgttgcgcctagcagtttttgtcctactgacgtttatatctcangactgtangagtgacattgctcatacttcactaatatcatcttggt

SEQ ID NO: 30841 - DNA, 365 bp, Oryza sativa
  unsure (1)..(365): unsure at all n locations
gcttgttgcggcataacacgatctttaatttttaacccattttatcaagcaactgcgacacaagacacatgagatggcatatgattcctttgtgaatatggcatatcgcattttaaagaagctacacgacggaataaaataactatcccagccactgtggagatcatagctaataaaaaacaaacactatatttgtatgtaaagctttgtttcataagtgatgtactgtggagctcacacattattgcccagaaacanactaatgtggcttcatagatggataatccaatagacacagaatccgctgtattgcaacaagccatattgcatttcttgtctgtgaaaaactgaaaatgacatatcgc

SEQ ID NO: 30842 - DNA, 453 bp, Oryza sativa
agcttgcaaagaaaccctgatgacatatagtatgtgtaagattcacaatgcaaaacatttacacggtcaggctcttccatcgaactcaagagattataagaacataatggacactacacactattacatagaatttatccccgcattgaagccttacatcagatatgctatatattccttactataaaagaactgtgttgaacacaaataacacaatttaaacaggtattttgcatcttcaggctaacagtcttgtcgaatcatgatttaaccctattttgcaagtacaaaatatgtgcacctcgaatcggtgaatggacggtctaatacataaagaactaatcgacacgatgataaaaatcgcggaaaaggtccccaaaccctggctactcggaagaatttttttgagggaaactcggaagaattcgtcccataccaatacagagaattcgt

SEQ ID NO: 30843 - DNA, 367 bp, Oryza sativa
  unsure (1)..(367): unsure at all n locations
gatttgatatggctcagattcccaagctcccatggaatttctcctgacagcatattcccggataagtcgataccagacatcagatcgaagaagttgtaaccatatgtatattgtcccccttttgtagcaaaggtgaagtctattgggtcatgaacaattatgtaagcctctattataacataaataagtagcaatggtgaatatatttgagctgccgtatcactctcacaagagatgttgccaacacatggtggcagtgagcctgagagtttgttgtgtgagaagtcgattatacttgggcactntagtttacacaagtttggagtgatttggccttcatagtcattccatcccaatgaaagtgtct

SEQ ID NO: 30844 - DNA, 429 bp, Oryza sativa
agcttcagaaggaattagttgcattggcagatgtgaattatgtttctgcaaaggcatttgatgatgagaaagcaaaaatgatgatggaatctgtggatcttaagagtaggctagaggaaatccagggtaacatggatatgattaagagtgaaaatgataagcttcggtcagaagctttggttgcagagcagaaactaaacatatgtgaagcagagattgagaggcttaagatggaattgggtgcattgacagaagcgaacgaagcagctgcgaaagcatttgacactcaaaatgaagaaatcacgaaggagctagaggatcttaagacaaagttggaggaaatcaaaacaaataaggatctagcggaaagtgaaaatggtaagcttcggtcggagcttttgtcagcagaggagaaatacagccagtctg

SEQ ID NO: 30845 - DNA, 301 bp, Oryza sativa
atcgagacatcggctgatgaacgagctatagactagtcatgatgacttgatgaagagtcggaccccttgaacaaacgagacaatcgccttctcattctacacaatggagcaagaacggactaactcggcgagggttagaatagcaagaatgtcacccgctggatagtttgaccaaagcaacttgtatgtatgcaactaaatattttgaattaaggaaaactatcaaagctctgatgaacttgagagaaactttagagagggaatgaaaatgtgttgaaatgggatggaattccctctcttg

SEQ ID NO: 30846 - DNA, 428 bp, Oryza sativa
  unsure (1)..(428): unsure at all n locations
agcttcgacttagtcttcgtgaaatcagnntttttataatatgtatattaaaanccttatggcctatgctgtatcaaaatcaaaggatatgtttatagaattatagggcccctgttgcttcagttgactatttctcgaccaaaattgagcttcggactttcgggcctatataacttcccttctcttgcagagaaaaagcttactgtacttgagtatgaaagagaatatatataacataaggataaatacgataagagagtaacatatcttacacacaagttttccgtacacaataactaaaaaatatcatagaaaagtactactatgattgtacttgtcttggtcctagaagagaatgcatgaattaatttcatagcttatttacgggtacatccatggatagaaactctgcacagaatgagacaact

SEQ ID NO: 30847 - DNA, 301 bp, Oryza sativa
tgatgaatctctaagacaatggtgactccttcggaaataaccaacctgtatgccagattcattctcccaatcactggatctcattatcccatgaaaagacacaacaagcatgaattctgcaagcaaaggtgcatacatgttttgccaatccgttgagaaatggaagaatatccagttcagaataacaccatcatttcattttccccccgacatctcaagctgaatcatcatatcagcatcatcgtacaaccaaaagaaagaagaatcgtatagaatacaacgaaattcgtgtctgactgag

SEQ ID NO: 30848 - DNA, 355 bp, Oryza sativa
  unsure (1)..(355): unsure at all n locations
agctngaggttggaagaganaacccgccatagttgantttatataataccatgacctcatgtgtgtcaggggttgggaatgcttcgccgcatgctggacgccacccaatgatctcttttgccggaagaataccgtgcgccaccatctccttcaggttctcctccgttacatcggagggcgcccactgactctcaaagctctctctctctctcttccgccatggatgcgatctggatgatatgatttggttcggagtgtggctgggactgaatgggagattgatgcggtggttgcgtgggagattttcgtggagttttggaggatggattggagtgaatcggtgaaccctagtttc

SEQ ID NO: 30849 - DNA, 405 bp, Oryza sativa
ctcccgatgtggctgatccccacaggctgggtgatccgggttatttatgtcgtgtgggtaaagtgtaccccctctgcagaggttaacaaactattcgaacagccgtgcacaccgttatgggcggatgtgaagtgattcctatcgtaattttgtttgactactgccttgtgaaattgccgttgtgaaaaaagggatcgatgtttgagaaatctgcagctgatgggatcaactatgcccgggtggccgtttgaaaattgttggcccgggtggccgtttgaaaattgttggccgggtgccaatcttgatcaattcaaaagactgatacattgcacatactccgaccggacgagacgcactgtctcatccgtgtcgtttgagatgcactcacttaattggttttataaa

SEQ ID NO: 30850 - DNA, 378 bp, Oryza sativa
  unsure (1)..(378): unsure at all n locations
agcttagtgcctatctctagctntcctggaatgatcttatgatttaaattagnaacatactagcatagagcctactgttgctacaatacttaaataaacaattaatatattctatacttgacatatataaattatcaacaagcttggataaaactgtaaacaaaattcaaaatcagatcaagcataaacatgtgagaagagattgcaatcatttatgaaaaatcctacaaataacgtacacgagctaacaaattcagtactatgatgtgttcagactagaattattgagattattgattntgtcagtactagcactaaattccatgtgttgcagcagaaactatttgctttgcacatgagcttttaaaatataagttt

SEQ ID NO: 30851 - DNA, 353 bp, Oryza sativa
ggctcctcaacgaattgtcatccatgcataccgaacaatcctatattcctcgttgcaacagctccaactccaatgagtgcactaccacattgtgtcaatgctcaatttcagccccagtcaccagctgacatgacagaggccagtatctgcgttgtacctttggaagttccaatacagcagctgagaaatcaagtacaagatgaagaacccgagtgtgagaaagttattgcttgttacaactgcagcgaagaatggcattactccataaactgttccaaccaaggcaaaatcgacctccacattaccgtcaattttcacgaagcacacattccaatcgtattgtggtcactgga

SEQ ID NO: 30852 - DNA, 429 bp, Oryza sativa
  unsure (1)..(429): unsure at all n locations
gctntcccggtgtctactctacccgtcttctttctctccttcgcctcccctcgtccgttgcgccctagcgccgtgtagcttcgagccgccgtcgccgccgtcgctccagccgtgcgccgncgccgttccagacgtcgccgtcgctcgggaaaaccgccgtcgtggtcgccaagtcgtcgccgtcctcgtccgctgcttcgccacagtcggagaccgccggagcatcgtcgccgtcgtcaaaccgaagaccgccgccgtttcaacctcgtcgccgtcgccgtccgttggtcttccgctgctcttttggtcaccggtgagttcgccgcgtcgcgctctacccgttggtgccctcccgtcgtgccgaagcgccgccgttcgccagcgagcgtgcgccgtncgagccgtctgagccgccgagcctngcgcgcc

SEQ ID NO: 30853 - DNA, 323 bp, Oryza sativa
  unsure (1)..(323): unsure at all n locations
tcacttatatccccatgtgttcagcccaccgatcacataattgtataataaatggcaagtgctgagaggccggcagttggctgtattatgggaaaaaaataccatctccgatgttgccaactttttttttttcgaggaagaaacaatgatacgataagcattggctaactctatggttagcagttatggtaggtagaagatgcaaggggtattcanaataattcggctttggaaaaataaggacggtaagaagtactggatcaagctagagtataatataggggtaaatatgtggttgggttagataaactaccaatatatgc

SEQ ID NO: 30854 - DNA, 425 bp, Oryza sativa
  unsure (1)..(425): unsure at all n locations
ctgcaagctgtagaattgttttcaaaggtctatgcnatataagttccgaagcttctcgccacaaaaacagaatcttgcaagcggaatttggcgaatttaaatttgccgaacccggcaaagccggagagaatcggatgtaactttttctgtagatgtccgtggatatattataagcctaatctcgagtccgtatgaaaaagatatgactgttttaaggaaggtcactcgaatcagggttctatttcctttctagtggcggcaggatacaatgcaactcacaaaagctatcggcagctgatcaaacacaaatagaaagtgatttggtgggtgactgcgacggtggtgacggtggtgatgacggcaaaattgatgattgtggcgatgtgcggtggtggcaagaactcggaactctaatcgcttaacac

SEQ ID NO: 30855 - DNA, 324 bp, Oryza sativa
gcaacttccgagaagctgattgagatggattctgttatattgaataatatcatatctccaatcatcggctgatatagtagcgaattccaccttgatatccttcgtcatcggcttgtaccccgatgctccctgagccaaatcattagcttcaatattttgctctcgagacacatgtttcaaagttactagccgaaatccatccatcaattctcgggacttttcattggtaaacatcaacggatcatttttgcattcatactgtcttgccaattgactgatcaccaacaaagaatcacccataatttcaacagcatcagcttcaac

SEQ ID NO: 30856 - DNA, 415 bp, Oryza sativa
  unsure (1)..(415): unsure at all n locations
actgctgtaagctatacaaatttttttttgttgctgntggatangcctgagggacaaaagatctacattaactgtttctgtcctggctgggtaaagactgccatgactggttgggaagggaacatttcagctgaagaaggtgctgatactggagtatggctcgccctattaccccatgagcaagctacaatcgggaagttctttgctgagagacgtgagataagtttctgaggggatcactattcaaacagcaaagtcaattgctcaaaagaaataaaaaaagaatgtcaaaagagccttatgtttataaactacttctactttgagacgtgctgacatgctctattacaaagcatttcatatgctcatttactggangcagtanatnacccatctctcagaatacctgtctgat

SEQ ID NO: 30857 - DNA, 439 bp, Oryza sativa
  unsure (1)..(439): unsure at all n locations
tgcagcttggtcgctgcaccattactggttgcatctgattctctggtaatcctcttgcatcagctagctctgtcatcttctttccctacattctccatgcctggcttcaattctcttggggtggagaagaatggagcttctctcttgtctgaatgggagttgagaaaagcttcgctttttatacttgtcctgatgagaggagagagaaagagcagcacaggttatggtgattaagagaccccactaagtactaactgatgggaaaatattttaatatgtacctgaatataagattacgtgcataagatggaaggtgaactccatcaatcgcacaagtgacacaatcagattagtggcagcatgacaatgggaatctactggtccaaggtcctncattttcatttggttgaatggcaatatataatgtcagttgtcatgg

SEQ ID NO: 30858 - DNA, 279 bp, Oryza sativa
tccacatactgtgctggataagcacagctgttgctcactgcttcttgttgatcagcttgggcatctcattgaccctcttgttgcggaacacgccgttccttacattacaggtactgcatgtgcgagtgactggaggtagattaaatggtactgctggtaatactcatacccaatggcgagacatgtgaccgtgtcgcgctgcgccggctgaatactcttgtacagacacacgtgaccgaaggaatggatcatggaactggatacacactgatgtacctt

SEQ ID NO: 30859 - DNA, 399 bp, Oryza sativa
  unsure (1)..(399): unsure at all n locations
agcttgagctctctctcccctctcctcatatttatcggtgggccgcgacagcgacaagggcagtgaggtcgccggatgccgccaccgctgcctggatgccgcttcctactggtggatgccttcgccgccgcccactcccatctttccattgcctatcccctcctccgccgcggtcatcttcttaaccctacctctagatgacccaccccacgtgctgacattctgaggaagaaagcgaagcggcggtaggcacggaatacggcggcgtggtcggtcgggttggtggacgggggaagctggaggacngccagcgggcggagccgcccccccgccgctggatgcttgcgttgttgtcccaccgcggatgccgtccaccattcccctttctcaccctacatg

SEQ ID NO: 30860 - DNA, 314 bp, Oryza sativa
tcagcttctatcacctgttgctaccaagtgagatctaattgtttcgctaagaaatacatgaaagaaaaaaaggcttcgaatttagcagcagaaagggagaatgcgaaggcttacctgatcgactaatacccttgctaatgaggcagttggattatttgcaggatcctccatcgagtcttcccgaacaacatccagcacccttcagacaagttcatgtcaaagcatcgttaatatatatactaatgagcacacttggcatcatgacaatacatcatgaaatcaagaatcaatagctaataattgaattatcagat

SEQ ID NO: 30861 - DNA, 410 bp, Oryza sativa
  unsure (1)..(410): unsure at all n locations
agcttggatcaaagagaagaatgcgatcaagttctcancctcttcaataaatctagctcacccaagaatccaccaaagtatccaacgagatcaccccaccgacaacatcttatgagacatcaacaagggagtatccactcgttctcatattgcaaatttttgtgagcattactcgtttgtgtcttctcttgaacctctaagggtggaagaagctcttaatgatccggattgngtgatggcgatgcaagaggagttgaacaatttcaccaggaatgaagtgtggactntggtggagcgatctcggcaaaatgtgattggcacacagtggatctttcgcaacaagcaagacgaaggccgngtcgtgataaagaacanagcgaggttagtggcgcaagggttcacccaaatcg

SEQ ID NO: 30862 - DNA, 422 bp, Oryza sativa
  unsure (1)..(422): unsure at all n locations
tactcagctctgtgaactagagtggagatagatcatgtatgcttgtgtttattttgtcatgttcctttntagaaccaaagggagtaatacagctactatcttaatataattcacgccctatttgggtataactctatgctgcgttcgttcgttgtgatgagataattagtctgtgtgttttgttttccgcgcgtacgcttccaaactactaaacggtgtatnttttgtataaaattgtatacaaaagctgtttaaaaaatcatattaatccatttctaaaatttaaaataattaatactcaattaatcatgcgctaatggctcacctcgttttgcgtatcttcccaatcttctccatctgcattaccccaactgacatgatttgtaatactttgcgtcacaaatattacacatggatactta

SEQ ID NO: 30863 - DNA, 396 bp, Oryza sativa
  unsure (1)..(396): unsure at all n locations
agctntacctaaatttcctaaattgagtatctttggagtaagagagtgaagcactaaggggttgtttggttcgtgaccacatgttgccacactttgccacatctcaagttaggcagctttgactaagttagtcaggcgtttggttcattgccatacttatggcaagattctttttctagcactttggtcccacatgtcattgtctcagaaaagtatggcaatgttatagattgctagccaaagtgtggtgctaaatttgttcgcctaaccttaggcaagcttagcaagataactatggcagccttagacaatgttagtatataaaccaaacaacccctaaatccgcttcttgccgcatcgttctctacacttcacggaaatatagagaaaagaggg

SEQ ID NO: 30864 - DNA, 397 bp, Oryza sativa
tttccacccgacgttcgtactccatccaagcatgaatgaactgtatggtcggttcatgttgcgttatcggcccgccacttgaagtaactctgactgtgtcaatccattgtacgaattgacatttccttacatcctcctatgtacatccattttgggatagttaagttaatgatagtactgaggagtgatgaaaagaatagttgtaattaccacgaaatcatcgtcgacaatgtttggacacacgatacacctttgtcctcgagttcggtgccttacggaccttatgacctgacaacggtcaccacaacgacactccggatgctcacgccacgtggggagtcctatgggatttacgtgtcattctaaagcctcagcagcaattcgacgttcatgctca

SEQ ID NO: 30865 - DNA, 328 bp, Oryza sativa
  unsure (1)..(328): unsure at all n locations
ttgactcatgaagaaattgatattctatattatttgaggaatagactttgcgtgttactgagagaagaagagattaaatggtatcaacgtactaagactaaggatattttataaggtgattctaatacaaaatattatcatttggttgcaaatggtgaacatatgaaaataagaatttatcagttacatgatggtgaccaaattataaatggtgatgcgaatttaaaatcgcatattatcacttattataaaggcttgtttgggccaccagaagattctatattacaattagatgagactangatacatgatattcctcaagtttctc

SEQ ID NO: 30866 - DNA, 318 bp, Oryza sativa
agcttgatgttgcgaaccactgagtctagtacttggttgtttgacctgagaggaccactcggtcaagatgatccgagcggtcaaacttaactgttggctctgaccaccgaagatattggggcgtgtcaagccgaacagcggtgatctcccgatcggtcagtattgctttctcttggattcataagccacgggtgcgccaaagatgaggatgagttccttgcgatggactcgataaccaggcagggcatcatctttatcatgcctattctttgacgtgctttgatctacagcagaggtcttgcgtgagatcttggcgta

SEQ ID NO: 30867 - DNA, 298 bp, Oryza sativa
  unsure (1)..(298): unsure at all n locations
agcttgtaaaanattctgaggaaatggtcaatgtttgtttagtttatgttcttgagaatggatgctcatcctgcaatgatggcaaaacattagagttaactggtcatcgnaactttggtgtctcaacatgttcaaataatggtggtattgatccgttctctgtgttctctcctgtgttagaggacttggaatcttaaggtattattcattctcgtaaacactggataaaaggagaacctgtggttatcatgaatgcgtttgagccttctctgtcatcacgctgggacccactaaatat

SEQ ID NO: 30868 - DNA, 378 bp, Oryza sativa
gagaggagtgacaaaaacactggcgctgccatccgtcaatggctcaaatagagacgagattgtgttttcacccgacagccccattgtgaaatatgagacggcacgacaacgccctcaagatggaaagagaagctcgaaaacgccatcgttgccggccaggccaatgctgatcaatgttttcacccgccgtccggcgactacgaatccacagttgacgcacaatgttaggtctcgctatatacattactctgtaagacaattatacgtcagcaacttatactaatttatatagcacatttaaatgaatgctgaactaatctaagcatacatatttcctatattgcgagcagctccattcgcgtatattcattgtactga

SEQ ID NO: 30869 - DNA, 441 bp, Oryza sativa
  unsure (1)..(441): unsure at all n locations
agcttatctagaagagtccgagtttaaggaggttgctttatgacaagttatctattaattaggaatagtttgttagtttctttttatttttaggaaaatgtgtttagtgtcctataaggactttatgttttccttttatttttaagaaagtttctttcttgtcctacaaggactagtatctccctatgagtataaatatgtacacccggagtcattgtaaacaatctctcgatcaatattactcacggcgcatcgccaccctctttcccgaggtttttacttatcagctggcggaatttgacacctgacgcggngctgcatcggttcagttcgatctccggcgaaggggtaagtcctacattccaccggccctggtgaatctattggctacgtttgatgtcaaagctgcatcgcttcgatctcttggatcgctctaggttg

SEQ ID NO: 30870 - DNA, 376 bp, Oryza sativa
  unsure (1)..(376): unsure at all n locations
acataacaaaataagtggatatcacctcattacataaaacaatctcccggtacagtgcgtgggatttgctgaaactgtgatagcctattaccagagacagctcataattggcaataactgcacaaaacgggaaaattaaagaactctctgatgatctgaactaagctccccactttccacaaacacatgaagtacgtataactacctttgatggagttttgagtacgtctttagttaatgacatgtgcggagtatatgctagttgcacaaaggagaatagagcangggagctgagtagctgtgtgtgggtggctggttgcaaagaataatataccaacaactatatactacaaccttatcgggtatatatatatat

SEQ ID NO: 30871 - DNA, 457 bp, Oryza sativa
agcttgggaatttaacagatgtcttcgcacttgtggcagtcggcatggattcactgtgaggctttgcagttgtactggatttgactgtggatgacatttttcctacagtagttgaagactcagatggcatgttttgagtttgactggagaaactagaggccctggcaggaattgaggttttctggaatctagaatggttagtcgaaccaggagaggctgttaaccacataaatcttagtgtatgccctttacaagatttgccaccaataaatgctttctcagcagattgtcgtgtcgtgtatgtcacacaagctgagcaactcagagaaagtgtaaggtagcatcatggttgtacgcttcaatgtcttccagaacaacagatgaaagctccccaaatgacatgaagtgatctttcaagacagattcctgtaacaaagtagtatttgacatcagaaca

SEQ ID NO: 30872 - DNA, 334 bp, Oryza sativa
  unsure (1)..(334): unsure at all n locations
agcttaaggaagctcatgacaacctcctttcctctactcaacatggagctcacattgatgttggcatatcttgtgatttgcttgatgatagtgctacttgccatattgctcatattgcatcatctagcatttctacctcttgggatgatcttatggatatgcctagccctagctctagctctagctcttgtgtttctatttgtgatgcctcacttattggtgagaacaatgagcttaaggagcaagtggctaagctcaacaagagtttggagagatgcttcaagggtaagaacactcttgacaagattntgagtgagcaacggtgcatccttaa

SEQ ID NO: 30873 - DNA, 328 bp, Oryza sativa
aacataatattggcatgacatttttcttggtgagatgccatgcgagatttggagtgctgcttagagagaggagatatgagttgtccatgtacttatattatcgatagaattaactattcctattatgtaacggtacgagttctctacgaaatcaaataatataattaattgtataattaacaaattaatgaaatattatacaagtttgtctataaattatctaaataatgtgacatggaaaacttatacagtcaactgttatttaaataactagtcttatatatacgcatatattataatctgtctctcgcactactattgcaaattt

SEQ ID NO: 30874 - DNA, 337 bp, Oryza sativa
  unsure (1)..(337): unsure at all n locations
agcttagcaggggtggatctagtggccacagttcttggaaaggcggattcgccgttgttggccttgggtgcggccagtggcggagccacgttgagtttgggtggtgcacaggaaccccctaaacttacaatgtctcacttaaaaacactagaatatgcagctttgcatcgaaatttttatagattttcaatggttagtgcaccacccttactttgatgttagctctgcccgtgggagtggcggngtctcaacaaagatgatagtggtagcggactgcatagacgatggtggcggaagggcggatttgagctatggttttgcctatttgaaattttat

SEQ ID NO: 30875 - DNA, 487 bp, Oryza sativa
  unsure (1)..(487): unsure at all n locations
acactttaatctcagcttacagtgatatatttttatgtaatgtaatggttcttgttgtgtacttgtgctaaagtgaagtttctacatgattgtgttttttatgtatgattcttgttgtaaagtgaagtttgtattgtttgttcatttaactcatgtccaagctgatgtttatttattgttctttcagatgcctcgtgtccaaacatcaaggttgggtaaaaatcccattgaagttgattctgatggaggtgaagatttacatcgtgattatgaagttggtaatgaatgtaagtatatcttaaatttttattattggattatgcctgttaagtttacctttaatttggtattacattatttntctttnttttangttgatgaaggtcctgaacatggttgaaatgatgggttattctctgttgtgctcangaaaatggtttgtgaatttcttttgttgactgtgtaaattaatttatattgttaatgg

SEQ ID NO: 30876 - DNA, 429 bp, Oryza sativa
  unsure (1)..(429): unsure at all n locations
agcttctatgattggaatctgatgattatcttttgtgtggcaatgcatttagtggtgaaaatgtgagcaagctcttcagttatgatttcagcactggattgggaatttcaagaatctgatcctggaaaaaaaatactgaaacttgagttgtgactgtaatgtagctatatgtcttgagttaaggagctttatggctactggaattttgattctgaggtataatttttttaaagatgggattcccttatatggtactgaatagtgaataatgtccaaagggttcatatcatgaatctcccttgcattggttgatttctagtcccaaccatcgttntatagaactactcgaacactcgtcgcttgtcagcanactaaatagtgctntgtgctgtctgtcgacctgtgcgtattcagctggacatcatcaca

SEQ ID NO: 30877 - DNA, 374 bp, Oryza sativa
  unsure (1)..(374): unsure at all n locations
aaactatcggtaaaccttctgcttttgcgtggtcctttgtttgctcttgtgagttgtgaagcgtaggctccttgcatcacatttttttctggaatgggtcatgcctcctcttcactaaactctgcctttcttttaagaattgcttggtgttgaaatctttctttcagatttttgtataaccaatttgtgagttctgagtaacctaagttttgaaaatctgctgctttgtatgagatacctttttagataaatccaattcaaagtcaagatttgaaactagttacaccaatcatatactactagataatgtggagtggataatgctgcacanactgaaatanggcatcacttctcaacttactgttgagcgatga

SEQ ID NO: 30878 - DNA, 492 bp, Oryza sativa
  unsure (1)..(492): unsure at all n locations
ttaagtcacctgcggcatgcaagcttgcaagtcgagtttcaagagtctgtttcttctaactgagtagtaatggaactgggcttcttattctaggacaatattgaagagaacaaagattaaaacaattacaggtgctatattacacagttactaagtggaaaacacaaagtaaatcttacagtttctttatcagcttcaccataatccatttcaagccaggtgtatttatgtgcataacaatgagatcccttgcgataggaccaatggatatctgctttatcatggaactttctctcacattcatctattgcttgttctcatgagaagggaccctgtagcttgcctttaccccgtgtccctaccctgccacatctactgtataccatgaagttgtcaccagcatcagattctatgaccataacagcagntaatgatcgaacactatacactatttcagagatcgaatgatgtactgacaagacatgtgagtat

SEQ ID NO: 30879 - DNA, 353 bp, Oryza sativa
tatctgcaccaaaagtgcaggaaacacctgtgtcactctcttcccacccttctgagtcaggactaggatcagaccatactatatcacacaaaagaccatagtcaggaatctcagtgggcctctcgatatcctttatttgatccaagctattcagttcacgtgagaggccaccatgcatgcagagtatcttatcgtcaatgagtgctgccatatgcaagcagttgaagcaatcacagaaaatcttccacagtcgaacattgaatcgcctcttacattcatcataaaaaccatacactctgttaattttcgcatcttcatggtttccccttaacaggaaaatcttatcaggatac

SEQ ID NO: 30880 - DNA, 285 bp, Oryza sativa
tagtaaataggtgtcacttatttataatatatcatttaatttttatccttcgataaaaggacttgtactgaatcacgtaattttaatgtctaaattttacaaaaaatctctcctacaccttatatgatgttgtttggaaatcagatgatcttcaaagacaacattcctagagtaacttgggagagtatgattgtgaactattaacataccattctttggaatcaatattgctacctctataggcgtgaaaaggataaagctgtctattgacttgtcatgtgaatg

SEQ ID NO: 30881 - DNA, 376 bp, Oryza sativa
ctctacaggcgagctgccagcctgcacgctgatgattggacggctttatttctattgtatgcgcctactaccatgatggactctaattcaagacaatgcttgatacaggttccaactgggtgatgctcttatacaccattatcttatactgtatcacttgataactctttaataaacgtgcttaacctaatgactggataaaccgccagggtgttctacaccacacatactgagaagttggctctgcccgtaagaatgttacattccgaaacgacattataaatggttactgctgtataccaatttgatcatgggacactgaattttatccagcttgggccaccaagaatcatgatgagaggcgtattctaggcct

SEQ ID NO: 30882 - DNA, 282 bp, Oryza sativa
tcttgtgcttaatttggagatgtgtgtggtgtgtgcttgctaactaactaagcttctctctcactctctctccctcaaattactctcttttgtgtgtacaagcttctacaaccacatccacaatcttttgagtacttgtactaaggtactactactaacctttgtatactctctctctacactttctctctctagattctctctctatctcaagagaagaacggagacattatggagggatggatgaattggaaggactggaacccgtttcatgtgttgtct

SEQ ID NO: 30883 - DNA, 402 bp, Oryza sativa
  unsure (1)..(402): unsure at all n locations
tgcttgccaggcaaggcatgtcttttctctttgtccanaaagaaaagacaaaccctagattgtcgtgccaacatttgaccgtccgtcttatatgaattttgtttatatttattatttttattggtggtagatgataaagcatgattaatactttattcgcgacttatctttttaacttttttataattttttcanatatacagacggtcaaatattggacactaagaccatgtgtttttttccggatggagtataatagaagttaattgcatcgtagtgcgtcgcaagcttaaccttctcacttcttgtatccgggacgaatacgtgacaatcctatcgaagatccgactattgacctagagtatatatatgtgtaatacttgctgatatggataatgtact

SEQ ID NO: 30884 - DNA, 341 bp, Oryza sativa
  unsure (1)..(341): unsure at all n locations
ttcatgacaaggcatttcgaaagccgacacaggtttaccatatgtccgcgagaggggtcccagaccaacaacaggttatgtcccagaccatactgtgctatgaagcccatgggtcctccccgacaccaccccagcgagtccacatgtctctcggcattaatgctcccctgataagctagttacttatccaggggtgtcccattccacccatgtggtcgtacttgtcttatgtttggatgaaattccaaggaatcggtccttaagtgcgagagcgggaaaccgtacacccggtacgttccccggtccgcggntttggaaattcatttagttcgcaagcaccg

SEQ ID NO: 30885 - DNA, 416 bp, Oryza sativa
  unsure (1)..(416): unsure at all n locations
agcttcacagnttgccctggagagttcctcctgctcattgcaagctgcagcaacggcagctcatcagatcactagcaagtatgcattgcaaggtaataataataatcagcagcagcagcaacagcacaagcctagcaatccactagatggatcttcatgcaaggtcataaacttcaactgcagtcaatctgcagaagtccagaactcccagatcatactgccatttgaggcacacacatcgcagaagaccgctacgccgctgctcttcgacacgcagtttgggcagcctgaccagatcagcagatttgtggtcgattcatctgtaaatgcaaatggaggaagcatcagcaacaagagccaagatccatcagcaagaaagcctggcagtggcttcagcatgaacagtgactgggatg

SEQ ID NO: 30886 - DNA, 380 bp, Oryza sativa
  unsure (1)..(380): unsure at all n locations
acatatcctatgcatacaaaccttntgtgcacactccgtgcacaataactaagaaaatggtacgataaattctatataagataggcgcgatacttaaacagtattacatctacttgtaaaatgatatctccaaatgtcatataatttaaccataataaaaaatatataattctgacagatttatacccttaaaactgtaaaattgggcatcaatgatactgtgacaaataatgaattggaaacaaactaccacatttgttgaaacattaggagaaaagttaattttcgagagacttcgtaaatttgatttatagcgcctataaccttgggggtagaaaattttagtattcacgttaaaagcaaattttgtacggtagaaa

SEQ ID NO: 30887 - DNA, 411 bp, Oryza sativa
taagctttcaatctattagtagtgcgagatggaaacacgatctttatttttcgagagatcccattaagaataatatgtcgtgctctgaaattgtgttcaaaatcagtattttgagtagcaatttcaatacgatcaggaatcacataaacattggcaactttcaaccagatatcatagtcttgagctgtaatgtaagactccatcattttcttccaataatcaaaatcaactccattgaagatgtgaggtttgtttgtaaaattttcagccatggcaacaaatctaaagatcggttaagatcaaatagaagaacgcggctctgataccacttgtatgatcgaacaagatcaaacaaacctaccatagtggggtgaatggcatgataaaccaaaaacccaaaatcttttgcgg

SEQ ID NO: 30888 - DNA, 343 bp, Oryza sativa
agcttatcataacaattctggattgtccggagcatgtatgactgtccagtatgtgtaggttttcccaaatgcgcaaatacattgcacaacacaatctacacagttcagactattcaagtccacctggattctccggctagttcattgtcactgtctgatcaacacatgatcacaaatggacaatgaacacttgatcaacgcatgataatgcttcggactatatgatccagctgttttagcctgccagacaagtgctagcctagacctagactgtctggctatttcatgtttcaaggtaaaagcaagaaactttcaatgcaacttatgctcgaaactttcacat

SEQ ID NO: 30889 - DNA, 454 bp, Oryza sativa
  unsure (1)..(454): unsure at all n locations
tactaagcttgagtcttctcatattctcctctggtgtatttgagttnttatacgatcatcatatctatgtgttgntccttccttattcctataaatcttatattattgcgtgggatgtttttgataatgtgttggatatgtgtcatacatccacatagtattgataaggaattggattgtgatgattaatactatctccattttacgcttgtaactttttgaaaacgtttgaccatttgccttattcattttttttacaaatatgaaatcatattttaaaatacaaaaacatttaagtcatgcttaaatttgatgataaatcaataaaataaatgatagttatataaatatttttgaataatacaatggtcaaacatatctaaaaagtcacgacgtcgatattaaaagcggaggagtatgtaatggtgttcatgatgatanactgtataaaaag

SEQ ID NO: 30890 - DNA, 342 bp, Oryza sativa
  unsure (1)..(342): unsure at all n locations
agctntgtatatccaacaactntactaggacattataataagagtttcaaagtttatacgtatgtatataaacaaacatacatatatatatatataatttttttatatgtatacagntataatgtataaaaaaatatatacacatgtacaaagtttgtatatatacgtattaaaaaaactaaaaaaaaaaacaagaaataaattatgaaaagaaacagaaaagaaaaaaaaaggaaaaggcgcgccgtccgctctacgcacgccacgtgtcctagtcatggtgggggtggnggaagaggcatgtatatatgtatatatgttatgttgcttgcagctgaaatc

SEQ ID NO: 30891 - DNA, 440 bp, Oryza sativa
  unsure (1)..(440): unsure at all n locations
tcccatccggaacagtgattacggaaaacggagtgatccatctggaacagtgattactgaaaacggaacgatctattagcgcatgattaattaaatatttgctatttttttcaaaaatggattaatttgatttttctaagcaactttcgtatataaacttttttaaaaaatacactatttagtagtttgaaaagcgtgcgcgcgaaaaacgagaaagaaggggtgggaagaggggcatccgaacacaccgttcacagcaccctatcaagatattgaaatgcacaagttgttacattattatcgttacatttatgtgtgccatactgtcattttctattgacattgtgccaatgaaagaaggaatntcctggacatgtgcgtattactgctaaagagatatttggtgagcgaagtctgtatgatggggttatgcaacaatg

SEQ ID NO: 30892 - DNA, 431 bp, Oryza sativa
  unsure (1)..(431): unsure at all n locations
aagtcanctgcagcatgcagcttatatgctaatgtacacaactacggtatcttctattgtgagtgccntaagaattcgcggaatggttcactctcacatttgactatctacatttgattaaaacgctatgccatatctttgtgcttttcataccgataatcactaaatttggttctgcgtaggttctcccatttacttataggtgaacatttctcttgaaatactagattcatgcaccaatagttgttttttaacatcatgtccacataagatgcactgtatcatatctctcttgtttctcgcaaaagaaaatttattagtgttaaatattgatgaatgctagcaattatacataataaataggtcttttctacctcatgtctcgattggagattcattgaatatgcatttattattgcatatatgaaaac

SEQ ID NO: 30893 - DNA, 93 bp, Oryza sativa
  unsure (1)..(93): unsure at all n locations
tctagaggaaatatcacaanactacatggtatcatagctgggtcaccgtcgacctcgccgacgcgaaccctattcggcgtgggcgctgtgacc

SEQ ID NO: 30894 - DNA, 349 bp, Oryza sativa
tgcttctcttatcgatctagtcttttagtatgaattcactgtgtgcctaccgctaccatgttggctcattgaatatatctgctctactcttttaaatggcatttcttactgctcttttttatatctcataggtaagagattatctatatatagaaattttacgtgggtgtaaccaatggtaattggaggcagatgtgattaagatcttatagttcttataaccaatacaagtgacagaagtttttactctgcatcaacgatctattgtgctgaactactgattcatccctttacagattaattaatctgatttactgattcaacgaataccttctttttttttttctat

SEQ ID NO: 30895 - DNA, 303 bp, Oryza sativa
  unsure (1)..(303): unsure at all n locations
cagcctatattttctgtttcctaatacaccacatactcttggctttattaaacagttttcttaataacaccgctgtggcttattagaaaatataggcaaccaataacgctcttatgctgcgttcgggagtgagggttgggaacctcactcctggcatataaaactgatcagcatttaatgcgcgattaattaagtattaactaattnttctaacaacaacatctatatgatttctttaagcaactgtcgcgtagaaactttgtgcaaaataacacaccatttaatagtttgataagtgcgcgc

SEQ ID NO: 30896 - DNA, 442 bp, Oryza sativa
  unsure (1)..(442): unsure at all n locations
agcttcatcagttcgctatgtaaaattgtcattttcgcatgaccctcagattctgctccgctcttaacatgttagatagcctttttctgttagctggctatcatgagttatgactattgtgcttgcctataagtcatgggaatgggtgaatttaactgtgtatgcttgcagcttgctctctgatagtctgaatgaacaagaactgataggattatatggagcactntgtttggagaacagagccacggatgtcattgagataggggtggcaaatagttatttgccaaatctaaaagtggcaaatagttaaaaccccctctccttgtactacttaattggatcaattttttttaccatggaacatgttanggcatgattaaaactcatattaaagctggagtctgaagcatggcagactctaccgtagatggataaatatggc

SEQ ID NO: 30897 - DNA, 366 bp, Oryza sativa
tggtgctatcgtgtgtcggcagtggcgacaatctccacatcccgagaggggtcccgaaagtgtgcaagcgatggggccctattgacagtggagaatcagccccccctcccctaatccgcgcccagtatgtggcgagttctcgctatcgcgtcgttgccgttttcctcttccttggccgcgtcctcgccgccacttatgtcttccaactaccaccatcctcacttggtcctccatcccgttgcaatcgagatagagaggggaataatgtgagtgagaaaatgacatgtgggacctatggttagaatagagaatgtaatagacaggctggtggagtggaaatataaattggctctccttttttttttt

SEQ ID NO: 30898 - DNA, 386 bp, Oryza sativa
  unsure (1)..(386): unsure at all n locations
agctngacaagtagtagcacacanatttctttttataaagacttgagattatgaagtgtgaatgcacgagaccagtggtggacaaattataatttgaagcttatcttaaggcataatgcatatctcatcatgaatgtgctggctaatacgttgtctatggtctgtacaaatacacggccaaatacatgtcattttgaagtcttttctttcattatcactgacacagcataaactagaatccgcaacttggttgttttctaactaaactccaagtttacagaagttcttccgtctaatntactcccaactacatttggagtggtgagcagaagttgaaaatgattttatatgcaagttgaaaatcactactatcatgccaatttatg

SEQ ID NO: 30899 - DNA, 404 bp, Oryza sativa
tgtgtacatgcggcatcggcggttcctacgcacatatcacttgttccgcaagatgaatgcggagttcgatggtactgaagagactgatcctgcactaaaacctacatcggaagaaaaggtgtgtgcaatgacagagaaaattgcttgcgagtttggaaaaatgactaagaaaccatcaaaggggactaagcgcatgaaacccgagaagaatacgaaacatggggatagttagaagcaagataatagttcgaagccagatgatatactccctcccccattcaagaagcattccatattttttaagtacctcccgtactggaaagatctggaggttcggcatgccatatacgtcatgcatctagagaagaatgtgtttgacaacatagttggaacattgttgacat

SEQ ID NO: 30900 - DNA, 357 bp, Oryza sativa
agcttgtgagaggcaaaagagaagacttatattgtgagtttaccaacaacaataagtccaacaacaacaagtcaaagggttcataccaagggaggaagatggagaatcttatgaaggcttttcaacaagtttgcgccgccttcgagccactaagtgatgtagatggtgaaagtggagatgatgataagggaaataacgtctccgatgtttgcttcatggcgcgtggtgaatctgacatagagtatgaagataatgaggtgaatgcttttgaggaagctattaatattttgagtgcaaaaaataaaaagtgtgagaagatgtaaaaaaacaggaatttatcattgaatctcttaatct

SEQ ID NO: 30901 - DNA, 316 bp, Oryza sativa
  unsure (1)..(316): unsure at all n locations
aatctctagtcccacgccaccattctgcatctattcagtaggctctcataattggtgatgatgttgccttcatagctatatatattatatgttnttttacacgccaacactgtacagtggtaccaactctcaaccgttggtattaccggatccaacgactagcggaggtatcacgataccacttgatcttttagatggtaccgcataactgaagaacaagggaagggtaagaatatattttcgtgttggatggatggattggctgtatgaatggatgatgtggtcttactntctcattggttcacatacattattc

SEQ ID NO: 30902 - DNA, 354 bp, Oryza sativa
  unsure (1)..(354): unsure at all n locations
agcttgagctatgcttgccgagttgcttttatagttatggccctctgaaatggaggattatcaaaggaattntgaaggatttattttcctaaagattttttcctatagagccctttgattcatatgaagaggataggaaaacttccatatgattgtattcctatgatcaattccataggaaaataagcaagaggttagacctcttgtgaaactctccctttgtgagtgtatcctgtggtgtaatcaaatggctcttctctccatttcctatgttttcaattcctgtaggattggaaaaacatacaacttcaattcctacgttnttcctattcctgtattttcctatcctgcttt

SEQ ID NO: 30903 - DNA, 378 bp, Oryza sativa
cgtaggagtagtgctagtggtgttgtgcattttatactgtgccatgataaataaggaaatcattcaaattggcgaaagcatctttgggatgataatgaaattatgttactgatgtttttttcatctatcactggtcaggtattgctaaaaaaagtgtttgataaaatactactagtagtaacttgcaatcttgccagcatctgatatatgattgttcacctgcaccgcacaatccataatgctaaagcttttcccaatgagcactacaacgctgttcagtgtcacactctcactgcactgtctgctcagtatagatcacaagtcaatctccaagaatgcacagccgttgtctcatgctgagctcaactttaatcctgg

SEQ ID NO: 30904 - DNA, 365 bp, Oryza sativa
  unsure (1)..(365): unsure at all n locations
atcatgtcacacgtactacaaaatgatcaatcactaagatcaattcataactcaagatgacgaaacaacatcgctcattattgagaaactgagtatctctataacaaatgtagaaaacatcacatatcatatttcaagtttctcctataagcatgtttgatcaaaatactcacagtggaacttactgctatgggagaacttacaagatatacatatgttagcctttntactttccttaagcaagtttgaaagattatgatgaggcaagcacacttatgtagtacttagatgaggcaagattgccatttgaatcttattataagatattgctagactgtaatacatatgcgtgcttgcctcatcac

SEQ ID NO: 30905 - DNA, 387 bp, Oryza sativa
tcagcgtaattgattagccctggaaagatggcagtgcaagatgattataatttggccttatgaactggattcgaactgcagtcaaatattacatttacatggccaaaatatagcacaaagaatctgagaaagaaaggcacaaacagattcaagaatatttttggttgttcttaccgggagattgcctgcctgaaacctccaccgagatggagatggatgaagtgcagaagaactatgcacgagagcttatggctctgcttggatttgtctcctttttatatgcacatattttcttttcaactttcttgattctgttttgaaataaaaaaagggtagaaatagagcaatatatttggctgcattacagtgtgctctaatccggtctct

SEQ ID NO: 30906 - DNA, 405 bp, Oryza sativa
agcttggtctttctggtgatttagttcctggttaaccaagacttaatataaaacacatgttactttcagtgacgaattcgatcctcgattcgttattatgccatttagttttatgacgtttggtaggaggattgtgttgcttattgacaaaaatgagatgttcgtcattgagaccaaagacaaattgacatgaactaatccaatgatatatcatgacaaatgtttttctataagagaccaaccgggacaaatatttttttataagagaccaaccggcaaatgtcttaagttcatgattgaaagcaccatggcctgaatttgtaagctgtcaaaaattacttaatggtgtttagaattataataatgtgcaaaaatgaattaagtttaatgaagtaaacaggagaa

SEQ ID NO: 30907 - DNA, 298 bp, Oryza sativa
cgtcgtcaacgccactgacacacttgacgctatctcatgtgaatccgcccctcctatggccatggccacccatcattgtcatatccagatctacaagagaggccagtggcggtggatccaccgctcctgatgccgccgccaccagatctgcgagggagaaagctggctgtgctggtttgcatggaagaaagccgttgccatctggtctgcgatggagaatgccagcatcgccggatctgcgatgtggctggcagctcctgatgaggtgatgctgttaccagcgtcaacgcgagccttc

SEQ ID NO: 30908 - DNA, 451 bp, Oryza sativa
gtcacctgcggcatgcaagctaatagatgagataccacagcactcgttctaatcatatgttagtatgatcttgagtatcactatctcaaaacactcaaacgaaagattacagctcgaacacggtaccattttacagtacagcgcaaaagaatcccccctccttgaaaacttatttggactcatatttttatttatacttatacttatcagccaaaatttaaatttttaatttttaatatggagcttatttagaggttttctcatcaaagtttatttttcggttcttacttttagatcgctaaaacaagtatataaaagttttattcacaaattactttgtgttcgtaaatatgccgcgaataagcaaaacgatgggtccggtagatgacatcactggttcgtttattgcggtatgtcccaagatttgaacttttatttatatgatcaagta

SEQ ID NO: 30909 - DNA, 404 bp, Oryza sativa
  unsure (1)..(404): unsure at all n locations
gcttcttaagaagagtctagcgagatgagaatggtgctactctagcaaaaattaatcagatgtttatctaacttattaagatgtctggtgtattttgaactcaaaaacgagtgtgcatatggtaacctgttaccgctgttgatcatacgtgttatggcgcttggttttgttaatagttcaatgctgcgggttttgaaattgcatgtagtattggtcttttttaagacagaacaatccttgtacatgttcaaatttaatatttatatatatcatgatttgaatggaagtactatctccattccaaaatatagcaatattttttctatgtatttggatataacattgtcctaatagctcgaaagagttatattantttgtgctgaacatggacgcgtttcacgtgc

SEQ ID NO: 30910 - DNA, 285 bp, Oryza sativa
  unsure (1)..(285): unsure at all n locations
acgacgtggccgataaggacctttgtgtgctgctcatgatagtgatatggacagaaggacggcgcagccttaaaaaatggagagaaatttacctttgctcgaagaggcaaccgataaaatctacgagcccaacttgtgtaaactctgttcggcgattaatagccatatttataccaacgttagaagaattaagaagtatggacaggcccttcattgattgtgtctatatgacgtatgttactctttaanaagctaaacttgataaatttggactagaaatcatta

SEQ ID NO: 30911 - DNA, 218 bp, Oryza sativa
tcaatgattgatctgtatctgatgaatcctgaatgcattgggtcaatcgacctcattatttctcgctgcaatcttcttttcttacgactcacacgaaatggtgcgaagttctactgattgatgacgaacaaattacaagaattcaacccctataggtcataacacggaataatgaataaatatactacccccacacaccgacagcgccatcacacacg

SEQ ID NO: 30912 - DNA, 313 bp, Oryza sativa
  unsure (1)..(313): unsure at all n locations
agcttccacaaaccccaagatcagctgaggatagtattggacatattctgaagaanagcaagagcattcagctagtacatatgacacccncaatattattaaacatgatagaaaaaaacaagttcaaagccagacataacttataaaaaaaaaacataacacaagtgcagtgaacgcgatagaggactaaaagatatatatgcagctacgggttcacaatcctcttcttcagctcagcagctatgagcgggaatttctgcaccagcatcgcaaaaccatcggtgaacacggctctcctgaaattctactcgac

SEQ ID NO: 30913 - DNA, 353 bp, Oryza sativa
gaccttaagcacctgagctgcagcttgcatttaaacatggtagcgctttctgttatatactgaaagctgcgctgttgacatgcggaccccacatgttaacctaaaggaccgctggagaccgagtacacagagtctgtccacgggtcgactgaagcggatcccgtgtgttaacctaagcgagagaccgacaaacggactcctctggacaccacacaggctgcacacgttgaaaccacgcgggtaccgagcggacacactaacactgtcaccacgcgcacaagcgaacgactgccgattccgatacacaggtaccggggccgacaaccgcacaacgtgcaccggcgactctcgaa

SEQ ID NO: 30914 - DNA, 439 bp, Oryza sativa
  unsure (1)..(439): unsure at all n locations
tggcatccttgtactcacttgtgccctcatggatctccgcatcttgttcatatctcatatgcggnctcaagggtgctcactctatcaaactcctcttggctcaaagagttgaacaaagcattcatggcttgggcattgagttggatgttgcggtgatcaatctccatcaatggcgtgccggtgattgcaaagcctacatccacaatactccaaatatggaagctcatagctttgaggtgagtagacattttaattttccaagtggaatagtttgtgccattaaacatgggagccttcccttcgtgtttcacctcgttcgacatcttctctctatgcggtgaagcccaatcaggagataccaagctctgataccacttgtaagatcgagatgtcgactagaggggggtgaatatgcgatttaaaactaatgacacctaat

SEQ ID NO: 30915 - DNA, 258 bp, Oryza sativa
atgtgccagaagatctgccaaaaccaatctttatgcatgaggatcttcccatgcgggcgcttataccggccgcatgctataataatatcagcgaaaataaatcaaaataaagaaatcccaaaccctatcccatcggcgacactggatccggtggtaccgccggccgacatcgtcaccgtcaccggatccgccggccgaacgaccttggcaccggatccgcatggggcggtgccgccggatgcggcatagccacacccg

SEQ ID NO: 30916 - DNA, 252 bp, Oryza sativa
tctcatagacgtatacacgcgtacacaggaggtcgcggatcatcctcttttcatagactcgctctgggaccagaaagaaactaacttgagggattaagacactactatagactatgatgtgccctataaaaaaaaagccaacctaggagatgcaagcaccactgcatactaagatgtgccatatcccaatgcgtaagtaagggggctttgcttcttagaacagaaggagtgcatgccgcacgagacaaaatt

SEQ ID NO: 30917 - DNA, 400 bp, Oryza sativa
  unsure (1)..(400): unsure at all n locations
gcttattaataatttggtggatcttttggtttctagtcttggaaaaccgtactactaaaacggttaccaacagattatctgcgcctgtccaagtgctcgaagtccaattatagataagagacacggttgcacaacactctatgttggggttcaattatgtgtgggttagaatctctggctgttctaggctggaagttctgggaccatgcttttctacatagtgttaagagttaagtgttgggcataagttcatggcgatcctagcagcaacttttggacacatttccaattcaaagatgtgagtaatgaanacatgatgttagggagtgggtacaaattcccatcaccctttctagtgatcctttgtccattgtgtcagtgttacggataagacataccc

SEQ ID NO: 30918 - DNA, 428 bp, Oryza sativa
  unsure (1)..(428): unsure at all n locations
acttggatcgaaccatgacaagctattctatatgaccacaacgcttctgccaatcgagtatgccactgccgangataatcagaaatctttctcttaatcaatttaatgaaattcttgttagatccctcggcttgcccattaacttgtgcataatatggtgaagaattcaacaatttgatacccatgctatcggcaaactgatcaaactcatcagacacgaagatcgatccttgatcggttgtaattggttgaattgtatagcatccccagaatcaactttcttcaaaggaatcgcctctacccacttggtaaaataatcggttgccaccaatatatacttgtgtcctttgctcgatggtggattaatcataccgatgatatcaattccncaacctctgaatggctatcgcttgatgatatgattcata

SEQ ID NO: 30919 - DNA, 369 bp, Oryza sativa
  unsure (1)..(369): unsure at all n locations
agcttgttcacattggagacaangcagatgcttacaaagtttataccannttgccgnagaattttaaaagaagcaagtgatatgtttgagatgtatatatacactatgggtgacaaggcttatgcaattgaaatagcaaaacttcttgaccctgataatgtatattttggctcaaaggtgatttcgaactctgattgcactcagcgacaccagaaaggtcttgatagtggtcttggagatgaaagtgttgcagtgattcttgatgacactgagtatgtaagtgcaaataatccagtgaacatgggtgataaacattttatatgataatactgccagtaattaccgtctgtagtttgtagaactaggtaa

SEQ ID NO: 30920 - DNA, 354 bp, Oryza sativa
ctttcctttcctctcccattcgcctacactccattgtcgccgcctcccgtgctctgttcgctgtcgccgttcgccgtcgcacgtgtcggaggagccggcacgagcgatgacacggaatgggactcctggcgctcgccttctttctctttcccggcccgatgacggatagatcactcccgtgccgtcggcctctcgtcacagcgccccgcctcatctcggtagtgcattcccccgttctccctcctcgatccatctcctccccttagttttcggtagtagcatgtgtagccttcccgtatctagctggcgccgccccgatcgttgccgctgctcgctgtgtgctcgccgccgtct

SEQ ID NO: 30921 - DNA, 378 bp, Oryza sativa
  unsure (1)..(378): unsure at all n locations
agcttaattataataatccgcacatctccatattatatcattaaacttcggatgatcatatcttggtcatacgaactctgaatcgacccgttcaagtctcctaatgtttgttataacctaaagaaccgngtgctttctttntatgtattgttattgcttctttataggcttgtagctttgcttgtgtgcttcgtgtagcttctgtcgttccggaggttctcgaagcgtggtttgcggtcctcgccgaaggttcggaaggccgttctctctgagcaaggcaagtcacatcatccttgagcatattgaatcccagcttataaaattattttgatttaaattattgcattatcgctttatttaaattcttgcgttatcact

SEQ ID NO: 30922 - DNA, 284 bp, Oryza sativa
  unsure (1)..(284): unsure at all n locations
tcatttatcatctncacaggtatgtcagtgtcagtgtattccaaaacaaaggtaaccagttgagtcatttggcccaaaaatttcaccataccactcatagaacttttgaagtcactgaacgatgttctgtccaaatgaaacgtccaaagctctttttgtttgccattacttgctggataaaatcctctactaagaatttaagataaacattctttagagaaccgatattccaccgggacttttgtacaattggcttcaaaagtggatctgttgcctccaccctc

SEQ ID NO: 30923 - DNA, 353 bp, Oryza sativa
  unsure (1)..(353): unsure at all n locations
ctgcaagcttgcgagtctaggactatcggnttggctatgaagtttacttcctcaattctaaggttaacttccgggcatatttgagttgcccttatattcctcccaggggaatgtactatcattggtacacgtaaattttgggttttccaaccatttcttttcacaaaagcttgtgatatgaaagagtgggaagctcctgaatcaaacagaactattgcgggtatggagttgacagagaacatacccatcacaacgtctggagcatcctgagcggtctcggcttgaatgtggttcacccggcctcgaccaaagttgttggacgcacgagaaccttgtccacttgcctgagagct

SEQ ID NO: 30924 - DNA, 377 bp, Oryza sativa
  unsure (1)..(377): unsure at all n locations
tatcgattagctccctcatgataacggtgcagcttgtggccagatgctcaaacccatccgtcgcctccactgccttgagattcccgggtgagtagatgaaatccatgcacgccttcttcaatctcgggcagcggtgctgctcatccatcgccatcgtggtcgcggcggagctcacgtctatccgcttgcacagcttgtcctcgcaaatcagcttcatcctctccaggttgtacctgtccgccgcgacgagcagatgctgcgccatggatgatgtctcctgtgtcagcanaacggaatgatcaaactctgaaatcgctcacactcgctcactctgaagattgcggacaacgacagtaacctgaagaagttcatgaaac

SEQ ID NO: 30925 - DNA, 381 bp, Oryza sativa
  unsure (1)..(381): unsure at all n locations
agctttaacctcgttagcgtgccttaagaaattttgtgatcatgggttgcaggtgcacatcttgcccagggagatgctaggtcagncgaccttccggcttgcaatgtggctgctcaaatggttgccgatccatatcgtagaccggattttactgcttgttgcacgagcgattcttggtgatacatcacaatttgggttgaaaaggcctagtcttgggccacttgagctgaaatcactgtcaggaaagacacccatccttgacattggcactcttgcaaagatcaagtctggagatataaaggtttattttcactatttttccaaaaatattcatgaacattcatagcctcttacaatcatgggttgatttaatttctggat

SEQ ID NO: 30926 - DNA, 227 bp, Oryza sativa
  unsure (1)..(227): unsure at all n locations
acacaacagcccacacatgttttcgttactgatcnttccgaccaaacgacacaacagcttcgacttcactgcaatgctaccctaacgccaaatgaacaagcattaacgatacccatgaatgacattatcccaaacaaccaatgaaccacttcctacatacagctggcatcaacaatcttataaagagattgcagtgtgtcatcgttgccgaacttcgtcgcacccct

SEQ ID NO: 30927 - DNA, 240 bp, Oryza sativa
  unsure (1)..(240): unsure at all n locations
cgacaacgacataagatatgctataattgggtagtttggctagcggaacaaggtactatctgagatttgtacaaattaaagcttcaattcatgtggtaaacgtgcatgcatattccaactaccctgtcaatcatttccaagcttgttggccggcctgttccaatatcccccatatatatatatatatatgcgtatntctcttatcccattataagtgaattcgcgcttcctctagtcatg

SEQ ID NO: 30928 - DNA, 363 bp, Oryza sativa
gtgaagcacactacattgcattgatgatttgggcgtgcaactgtgtatctgtcgctgtcaaatcaaggcctaatcatattcataccccaaataacaggaagcacagtgattagatctaatcaggagtagacagactcaccaaatcaaggtagggaaatgatattgtgtttaccagccgatgccacatgtcaatcccaaattaacactgttgcacatataccagatctgcacacttctttggtcagttacctgcggtgcggagaagggaatgcagcgatcgatgcaacgcatagcatggcatcgacatgcgtggccgccgccattgccgcatgtctaatctccggatgtcgcggagagcgacat

SEQ ID NO: 30929 - DNA, 446 bp, Oryza sativa
  unsure (1)..(446): unsure at all n locations
agcttncttattaagatttcattgntttttttgacggganggggacatgaagacttcatgtgcatagctataaagttattgtgcacaaagtttctacggtaaaaagtccatgtgcataaagtttatacatcaacaagcttacacacaaagttataatgtaagagaaaaggaaaattgtatcgcggattagatgtaagtgaataaaataaattcctcgccctccgctgctggctggcgcgggtcgccaggaccacctgtccctcacgatgcctncacccccatcgctgcggtcgtcaccggcagaaagaagaacctggtgtcaacgtccctccctggctctggtttttagtggtgctggatgctggtatgttcctcttgctgaattgtatggatttgttctgctcacatgacctgaaatgtcagngctattatcttattgttctaat

SEQ ID NO: 30930 - DNA, 314 bp, Oryza sativa
ccatatatacactctcctgaatatggccatgaagaaaaacattctgaacatcaagttggctatatgaccaccctcttatacatcaatagatagaatactcctaattatagctgccgtaacaacaagacttatagtatctacgtagtcaataccatatctttggttataatcctttgtcacttatcgagccttataccgatccaaagttccatcataattacgctctatctcatatacccacttacagccaatatattgtgacctctacaaggcggtactaattgccacaggttattattcatcagggcattata

SEQ ID NO: 30931 - DNA, 439 bp, Oryza sativa
  unsure (1)..(439): unsure at all n locations
acctgcngcatgcaagctntatgcncatgcttcaactgaaaggcctttcgtttctcctcttatataggacaagcaagtnttccatgggtgctccaacaagatactaagccataagcaggaaagtcatgaatagtccacactactgcagccttcatattgaagttttgcttcaaaaaacgatcatatgtgacagctccattcatccatagatcaagaagctgatcaactagaggctccatgaaaacatttaagtttttccctgcgtgctctgggccaggaataacaagtgaaagaagaatattattatctttagtgcacatttcaggtggtagattatatggagcaacaaagactggccaacaagagtatggagttgaagctatactaaatggtgtaaaaccatctgtngctagacaaagccgcacattccgtaccttct

SEQ ID NO: 30932 - DNA, 339 bp, Oryza sativa
ttcttcttatggaattctcttaattactcatcgattacgatccgattacccgtttggtcattatatttaatctttatagatctgcatgattatattttttaaaaaatacacattattttatatatatctaaatacgttagaattattagattattcctagacatataaagtaattaataatcctaaaaaggtacttcatatatattatatagtactcaaataaagaaaggacttgtcacgacatcaaaagtatttttggggggtaaaacatagtcaactataattaattaatcacgtatattaactaccatcagtaatggcccgatgctgaatttttta

SEQ ID NO: 30933 - DNA, 435 bp, Oryza sativa
  unsure (1)..(435): unsure at all n locations
atggactagttgtggcacttgttcttttatttgcgaacccttttggttaatcctaaaaaagaaaacgagtcctttagattaaatactttcttctttttttaagaaattggtatttgcttctgcaattccaattatatcaatactttactcctaatttattactcctagagttttctatttatggggacagacaataccccaccccaggaatagctgatttgaggatgatcaatttagaggatatgttcgccgtcttgcttcccgccctttgtttagggcagtggaaagtatttttccttttattttaaggaatttgggaacatttcaacaaaggaggtctttcacaggtcanacgagatctaagacttaatctaaaagaaattactaaatngaatctatttctattaaaaaaaatggcatttaaaaaaccgatca

SEQ ID NO: 30934 - DNA, 357 bp, Oryza sativa
  unsure (1)..(357): unsure at all n locations
caacttactgccaattgtagttattttttcgtccgatgggtacaaaagtggcagtaaactatttcgtcgtccagctcacggatgttcacatgatcccatacgcgaagatttataatgcgggctattgaccgtgagcaattacaaaatcacaccactacgtcgcccttgttttcatggccacaaaggacagcaccagctcacaaaatagaagctgctttgtatgaacttttgggcatcgatcgtgccaattctgctcctgcctgttgagataaactaccatcttcaagggctttttctcctcgacgacnacgatgttaggttcacgaatgtttggatgacatggaatcacgttgcgtg

SEQ ID NO: 30935 - DNA, 343 bp, Oryza sativa
  unsure (1)..(343): unsure at all n locations
agctntctcgttcggttntgcgtgtacgatgtgtctctgtcctgcttaattntaatgggcttagttgtgtaggcccataatgggctcttcgaaggagtaggcccatcgtgggcttaattgaagggtctgatcaatctgtaggccccattattttggtgatgaagatacaaattctatcttggttttttaacacgctttttagacattgtatttcgtgtaaaactatttttatagaagtttctttaaaatatcatatacaaattctttaaaagtttaaaataattaagaattaattaatcatgcattaatagttttctcattttgcgtgttcatagttaacaac

SEQ ID NO: 30936 - DNA, 94 bp, Oryza sativa
taggcaaagcgacaaagaatctttggtaaaatgcttggtccacaatcacaacatgctaaatggggttcgatcactacacgtattgaacacgggg

SEQ ID NO: 30937 - DNA, 323 bp, Oryza sativa
tactgccatcgagtatcactcatgatcgatccgtctccttcctacaattataaaactaggtataacgcatttccatattttaagaccagtgcagatcgactcattcaatggtttgggaagtacgattctgccgacaagatagatagacagtggttgacttggtaagtcatatgaggggccagatgatagtgacacataatagtacctcccataacaaatctataatacatcctcctaattattactagaataacttaaattcgtgtgaaagcactcaactattataacgcgcacagtaccaagtcaataatgctgcgggattt

SEQ ID NO: 30938 - DNA, 462 bp, Oryza sativa
  unsure (1)..(462): unsure at all n locations
gcaagcatgcaagcttatgacagctnntttttttaaagaagttttctttattatggatttccttgtaacagctttaacatatgtaagttacactaacaaaaacatgtttatggctctcaattccatctaatttcatatacactggtgactggttcatctcttcctctatcaactcaaggctgcaccactgtttatttgcatcatcatgggaatataatgatgcaagaccttgctgctgctgctgctgctatattccccccagaaaatggggggttgtcaacaaaattactgacatggacagtagtaatcaacttcatcagattcagaagtcaccaccactggttaaggtgttctgcagatggccaatgttttggctaaaccttgtgaccattggcggatccattctgctcaccgatcttctggaattcagcttggatgacctcacaatcttttggtcatcgg

SEQ ID NO: 30939 - DNA, 319 bp, Oryza sativa
tactaagcttctcagccagctgtggtgatctgattattgaaagaacacaattgaatgactttatgaaacagcagattaccaaagctcaattgtgcatgaagcatgtcgctgataaaggtcattttgatagacagttcatggtgggtgaacaagcctttctgaaacttcaaccatatgctcaatcatcggtagtaaacatgccttattctaaatcgtgattcaaatatcttgggctctatctagtggagatacgaatggagcagcaacttatatattggcactgctggaagggagtatatggttcattcggtctttcatg

SEQ ID NO: 30940 - DNA, 164 bp, Oryza sativa
agcttgtgacagctcttatgaacacactgtctcttgtgtcaggacatggacctccatggtacatgcgctcacatgcgatcggatacacctaccgccatgacctgtctacaggcttgacaatgacgctcgaacgagcgtatacacgcgggagactaggagcatct

SEQ ID NO: 30941 - DNA, 345 bp, Oryza sativa
  unsure (1)..(345): unsure at all n locations
agcttaatgtgtgattcaactgatcactctctttctccttgggccttattcggntaatcctatgacgaaggaattggagggaatttattccatattgtgaaattatttccccttaatcccctccgattattttcaatcccatctaagttgaacaaggcctcagacaatcatgcttaagcataggaataaaatttaaattgcagacatgggcgataatttgtggcaattaattaatattataggcaatcaagctgaatgaagttttgctagaacttagataaaccagccaagtgatatataacagtttttgaaagaaaaaaaagggaaacataaaggacaatgtaa

SEQ ID NO: 30942 - DNA, 377 bp, Oryza sativa
  unsure (1)..(377): unsure at all n locations
agctntataatcgtagtaactaaatgctttatgtctcatcaatgatgctaaaaacatacctaacctcgcctccctactggttataatgcaatgcagtctatcagactcatcaaggtgccattttgtgcatatgcggacttttatgtttcatatctctaacctgtgggtcctctgcttaatccttaaacaacaccagcaactcctgcgctttcatcttccatcgaaattttcatgttgccgctaatcagccataaaatcatttgcagatgcgctctgtcgaggtagtctcataaggttcgtttataaatcgacggcaatgtgagttaccttttccatactaattattaaaagacagtacaaacaggatcattatggac

SEQ ID NO: 30943 - DNA, 260 bp, Oryza sativa
agcttggaagagaggcaaggggtgttttgcatatcttttgttttgaaatcattttgaaatcacaaagtgatttatttctttctaagttagggtcgaaaagagacttgcgtctcgattcgaccttaagagatgtttttcaacagctcatttggtaatgtaccgacctcccgggtcagatcattacttctcggctcctagagccattccacttgattaatcggctcccagagccttttacattttctcggactcacagagtc

SEQ ID NO: 30944 - DNA, 369 bp, Oryza sativa
  unsure (1)..(369): unsure at all n locations
tcataatatctcaacaagttgcatagcacataaagcaatgctgggaacaaatattatttgctcctgtggtcaaaatcctaaggaaaagtattcactatatcgaccaaaacaacaattgactggtcgaataagatgcaagtactgatcaccgtatgaatatattgtttacatatatgacctagtaagcaatctaatgatcaagcattaccattctttttttctcttgtgagcaactgagcaatatgacttcaacattgatctatgatgaacccttctcaggcttgcatcaccacaagctggggaagatccaaactgatggtctgatgagtgaactggttgttcangggtggtgagcctggatagtcagca

SEQ ID NO: 30945 - DNA, 378 bp, Oryza sativa
  unsure (1)..(378): unsure at all n locations
agcttcattctncaactgagagacttgcgggtcatccactattctattctcatcaaattgcagagaagagtcttcaggaggactaaataaacctttataaaaagtggtaatatgcgcttttaaattcgcatcaccattttattattgatcgccatcctgtaattgaaaaattctagttttcctatgctttccatttgcaaccaaatgaaaatactttgtattagaatcaccatccanaatatctttagtttagctctcagataccactttatttnctcttctctcagaaatgaagaaagcctatttctataaaaccatctaatatcaatttcctcttgagtcaaaagggacatttctgccttttatttagcaaattaa

SEQ ID NO: 30946 - DNA, 383 bp, Oryza sativa
ttaccgctatatcaatatgtatcatcatactatcccgtactgctggttttgtataaaatagttgtgacattatatgccactaaaaatatgtatttgcccttccgagtataggacatgcctaacaagttagaatggcaaatacgtcatttgtaacttggatttatcagtcaacacacggaagtaacatgaaagggtgtgcaaatttggaccaatgacatatatgggaagagcaattttcgaagacataaaagatcgaccaatttcagtggatataaggatttctctcttctagcatgggcgcagtaatgcatcatgtttctgaaattaattaatcaccttcctaagctttttcactatcatttatgcaatgatcttccctttgt

SEQ ID NO: 30947 - DNA, 440 bp, Oryza sativa
  unsure (1)..(440): unsure at all n locations
cacggaaaaatgcgtagtaaatgggaatgaccgttcatcgtcatcaatacctcttcgcacggtgcaatcactctccgcaacgattcaggtaatatattcaaggtaaacggtcaacgcttaaaaattttcctttagccaaatgaaactttagatgaagaagtggatgtcgttgaattaatcaattatgaaccatgatgatctcatcttatgcatgcttaaaaccctttataattgtcatgtttgtgcttagcttaaaaattagtaggcttatgaaagaaaatggaggcctgccggacccaccatggttcggtcgaaccattgcggcacccgttcggccccatttttggatggtagactcccccgcccgtcctgagtctgtttagatgcgagtttggaggtagagcgatcggatcactcntctgagctagttcctctctttc

SEQ ID NO: 30948 - DNA, 430 bp, Oryza sativa
  unsure (1)..(430): unsure at all n locations
agcttgaaacactcgtggagttgaggttntatgcgccgaaatcgctaataagtcgcgcggtcggtttttggtccacaaattattttttcggtacgtatacggttgtatatgagtatatctataaagtttggtacatacatttatatcattttttatacatttgaaatgtatacgtaagtataaaaattatacatatgtaaaaaactatataaacataatttatatgcatatatactttgggtatatatgtataagcttcatgtatatatacaactctcttgatgtccggactagcatgtatcacatccttcaaaatcccttatattntgggacggatagagtatatagataaattatataataccttcgtttnttaatagatgaataacgtgattttttgtcacacgtttaaaccattcgtttaatttaa

SEQ ID NO: 30949 - DNA, 317 bp, Oryza sativa
  unsure (1)..(317): unsure at all n locations
tgttctgaactcgttgcacaatctgcacctcttttatcactctgtcagttntgttacgttggtgcatgtaaatggtctgcgtgataaccatgtagccatcaagttatccaacttaattgaaagccgtcaaatttgtggggttccgtttgtcactctgtctggtggttgcattaagcggagcttattgattctgtggcaaccactaattaagttcagctcacacgttggataataaaatactgcttataagacaaatttaatgtagataactagacatgtgcccaatagtgaaagttcaaccttacaaagagcaatac

SEQ ID NO: 30950 - DNA, 427 bp, Oryza sativa
  unsure (1)..(427): unsure at all n locations
agcttcaagtgttcttgtccccctggatatgatatgatagatccaacaaactggagcagaggttgtcgtccactattcagcaaaaactgcagcaaaatagaagaatatgagttcttcaagctcgctcaaaccgactnttatggcttcgatctaatcatcaaccaatccatctcacttaaagaatgtaaaaagacttgcttggacatctgctcctgctcagcagtcacgtataagacagggtctggaacttgttacatcaaatatgtactcttcaatggctacagctccacanattttccgggtgataactacatcagactacncaagagtatggtttccaaacagtccgatctctcatgcaacccaccaaagagatngtactangatcttcaagtatgtatggaatgaatgatgcaaataaaattat

SEQ ID NO: 30951 - DNA, 282 bp, Oryza sativa
  unsure (1)..(282): unsure at all n locations
agcttattntatggagtgccattctgtcttgtctatcttcatttgtatggactaaactacctatcattgttgtcgagtgagacatctcatttgtacggaccaataaaatatatcgtgtgtcagatgcttggatcgaaatacgagttgtttgcgacatttgtgatagggacgaagccacacatgagtctgccacaccaaatccagtttggaaggagccaaatgattggaaaagtatatttattgtcaatctatcccttccatccaaacacctctagggctaga

SEQ ID NO: 30952 - DNA, 423 bp, Oryza sativa
gaaaatatagtcgaactaaaatgactgtttgtgttgcattacaagccaaagtgaaatagcattgttacctaagactgagtcacaaaatcggtcatgtgaatggtggaaaagatagtgacaatgtcttgcggggtattaataaaatatagtccaaagtaactattcatatatatcaaaggcagtatctgaacatatagattcggtcccgtccccatattgatttgatgtgcccaacttcacaaaactcacaggttaagatggtagaacaacaatggaacatatcggccaatttattgatcaatgtggtaggttaaaattggttcctctttctttgtcaaactttgtatctacatgtgttagtttacttgctcccaatacaattcctacgtggccacaaaaggagcatgagtttcatgattattt

SEQ ID NO: 30953 - DNA, 404 bp, Oryza sativa
  unsure (1)..(404): unsure at all n locations
agcntttacacataaaactatnttagtggagctcttattccgtatgatagtattgaatcaatatactcccttcgttatagaaaaacatagctcattttacatcataatgatatttttattctttcaaaatttttatatttatcttcatacaagtcatattaaacacaccaagagacagataattataattcaattcagtaaattctatcctttaaagtaacttccatgggtttctctacaacctgcatgtataagcctctaaggtggcaatataaaataagtagcctttcttataataatattattaaaaagttatttttcctaatatattattattctacgattcatgttggctaggtcttttccttaaaaagaagcgctatataatatatgtatatttgatc

SEQ ID NO: 30954 - DNA, 350 bp, Oryza sativa
  unsure (1)..(350): unsure at all n locations
agcttgatagtgatccgttcccagttaatgtgattgactttgggaacaagaaggtgcagattcggtctcatcagaccgaatctactgaggggaagaatgtcattgttgatgatagtattcctcgaaggatgataaaaccaaagaatccagaagtgggagtgtggaaagtcaacgaanaaggaaaagacgtactccagagccgaagccagcatttcagcggatgttggatagatatgcttctgaaaaaaagggtgatgtgttttcttgactcggaggtgttaaacggccaaggtctccgcctaagtgtgattntgatgattatgcatgtaattggcaaaggggtccacctg

SEQ ID NO: 30955 - DNA, 372 bp, Oryza sativa
ctcacagagcaactttagtctctccaatgcataacgatccgcatctgctagttaatgctgagccatcaaagtggatacccaagttgtatttatgccagtaagctcttcgatatcatgcaactcatcccagtacataaaatggagtaaggcctgcgaaaaatgaggtgcatcaaaatctcaggagtatgaaatattttaaagctagtaagcacaaatcaagttacatgaactccactacaacagtatatgcagttgtcacttgccaacacagtgcacaaaattatggttgataacgcatacaatatcagcaacaatcagaacggatagcagttgtcacttgccaatgctatattgcattagtacacaaaaata

SEQ ID NO: 30956 - DNA, 377 bp, Oryza sativa
  unsure (1)..(377): unsure at all n locations
agctgggggggtctttgaactctgagaaattttttcgaatcattnttctgtattttttcaagacatggagccataagtgaacatgattctttctgaatatatccgcaaacacattcactgcgacgaatgagccaccgagcaacactgacagctcatttgctatagacaccatttgaggatgctcctctgggttagtgcttccaaatgcgagaaccttgaagaggtagctatactcctcatgtgacanactgttaagatgaatnggccttacgggtccgaaccttgatatcctctcaatcctacttacaactataatcttgcttnctcttnccatatgtgtgcatgatgcatnaaacttcttccaattctcatcatct

SEQ ID NO: 30957 - DNA, 81 bp, Oryza sativa
ccacttgctacatacagattgcatcaacaatcttataagagattgcaatgtgtcatcgttgccgaaacttttcgcacccct

SEQ ID NO: 30958 - DNA, 255 bp, Oryza sativa
  unsure (1)..(255): unsure at all n locations
gcattgtcaccttggtcctgctgagatggatcgtctccaagagtttcagccttcggatattgtctggcagcatggtgacattgctgctcatccctatgcttaggtatcttaggttccagagcttgcagatgtcaacgaggtgatcgtcgctcaaagcagtggtgcactgctcgaggtcaaggactctgangagcttgcactttcggaggttggagacggcgtcgccgccatcttcgaagacggtcagcgagcgga

SEQ ID NO: 30959 - DNA, 268 bp, Oryza sativa
gatatcgtgccgtgtgctgcgattggtctcgataccgccgtctcgcacgacaagggtatgatataccgtgtgaacttgcgacggatgtatgcgagaccgcatgagtcgcgagattaacggatcagatctggatcatccagaattaatcaattaactatcattgatttaatgcgcattattcgcaatgaactaatcactcattaagaactgaagactgttaatgaccaacttgccgtcgttgctatcgcactctgatctagagatttca

SEQ ID NO: 30960 - DNA, 325 bp, Oryza sativa
  unsure (1)..(325): unsure at all n locations
agcttgactggccctgcatgccatccctctggtactgctgtcacatcatctgntcctgagtcaagaactgctgcttcttctccatctctgccatctgaacatangacggtggtgggaagctaagggacgccgcaaacgggtctccaccaacattctgcattgaaccatctggtgctggcagagccagcacttgtgttttctgtccagccggaggtagagcaacgctgctggcactcccagttgtcacttgtgcattgacatgctggcgcacggcaccctgatcatacataccattcagtagcaatggatccataccacctgtcat

SEQ ID NO: 30961 - DNA, 411 bp, Oryza sativa
  unsure (1)..(411): unsure at all n locations
tctcacctatctatggaatgcctatacagntcttcatgagtcatatttgtagaatcaaaccgctcgagacaataatgcacatactgaagcacatcgagcgggcaacaaactatgcatacacagaaattctaatgaaaacaaaagataatacataaggtattcccaaacaaatatactgaaacgaagatcgaattaatccagatatgttccttgtgatatgtagcatggtcctacaaatgtttcatatgccaaataccagaatgcttcaatcaattacgattgtttccctttccctttccaattagcaaaaatgagagcaattttcttgtatgctatgtctctgaacgtactcttgcgagctganggttagcagacagcaaaacatcagtcaacagatagtggacataatcg

SEQ ID NO: 30962 - DNA, 405 bp, Oryza sativa
  unsure (1)..(405): unsure at all n locations
agcttaanattcaagtataaacatattataactttttttaaagcaatgacatagattaaaatattataatgtgaatacatcacatgttttttattagattggaattggacatgaaattttgcaacaacgtaagccgtataagaaagagcaaatgcataataataccaattagttccaaattaccatgatcggtatttttatatacttcaaaattattaagacaactttgaaagaagacatcacgtacactctggggtctagaaattttcatattaaccgaagaaaaaaaatctacacagttagatcatgaatcagacacgtgaaagagcatggactagaatttgatgtgtgctacgcaatagcaattgaaatcaaaattggattaggaaacttaatttactacac

SEQ ID NO: 30963 - DNA, 309 bp, Oryza sativa
taatccccttgaagtgtcatagagaagaagagggtttaaggtcttgctgtggagctatggccacatgtctctgtggcttgtgattggcattgtaaaataaaaagttaggaagataaaaagaaaaaaggttcatcatgcattcacgaagccttctattgtcaatgatcttgcattgctagctatttattcatctagatcagacaaagctttcaactgtggattctgataaaagatcaattgagaattatgaatcatctacatctttagtatttcatatatgtttccagatgcataaacttcactatattc

SEQ ID NO: 30964 - DNA, 247 bp, Oryza sativa
  unsure (1)..(247): unsure at all n locations
tcaagctgctcctctgcttctgttcggccacggcttctcctctttcctgtacagcgtgccggcgagagcactgctgccaaagagggtgggcgacagcggcgtctacgacatgatgagaggccaccggtggtggaccactgcgcanggctggctgctcatggcgcgccgcggctctccgtgcactttcctgtgggaccctttgaccggacgacgtgtccggcttgcccccgaccacgacggcaccgtc

SEQ ID NO: 30965 - DNA, 314 bp, Oryza sativa
tgacttcattcttgccaacatgatgatgtccttggcttggtgtccactaacccatggtgtcattcattatcctcatcgtagtgggacctattccttttcacacctcataggagaacattattctcaacaaatcggttgtcatccttcacttgatgaccaaccgggtgcatatgaaatatatggatatgtttgttgagtattcattaacatcacaagtgtcatatactcgtatgcaagctcaagtgcatagatccgatatatataataagtgaacaacatggatctagaacatgcacaataaatgtatatgattt

SEQ ID NO: 30966 - DNA, 457 bp, Oryza sativa
  unsure (1)..(457): unsure at all n locations
agctntactatttgacaccttttaagatgcatttgtccaactcctaaaaagttaagtaactgcggtataaaaggattctaaggtattgggcacttgatcacgcgcactttggcctaagcaaaaagtgcctaagtccctaaaagaacgtgacaggccacacctgaaaatatgggctgcagacatattatgcctatgccaaaacatatgccttcgacaccctttaaaggatgacgcatataacatgctcccgagtaataaatcttccgggtaatatagaccaagcgtagctcatatgaatagcttctgatctgagtggttatcccttatgggatactccaaaatagatgtaacaattgaatcccgactggcgcaagtattcagttgataacccttacggngaataataaatagtccagtctttgagcatataaaatagacccatgatcatgaattcatg

SEQ ID NO: 30967 - DNA, 291 bp, Oryza sativa
  unsure (1)..(291): unsure at all n locations
tgttatatcagggcctcgccgtcgccattaagaggtttgctaaggattcctccaagcaagggaagaaatattatatgtcggagatcaaggtgataagccggttgcgccaccgcaatctggtgcagctcattggctggtgccatggncgcgacgagctcctactcatctatgaactcgtcccataccgagcctcgacattacctccatggaatggaccttcctacatggccgatgtagtaatcccgttctcttaaactatctaacttctttgtatgtaaataattggcgggt

SEQ ID NO: 30968 - DNA, 388 bp, Oryza sativa
  unsure (1)..(388): unsure at all n locations
agctttcttgatgcctactccggctaccaccatatcagcatggcnaaagaggatgaggaaaagacagcattcatcacgccgttcggtgtattctgctacattaagatgctgtttggactaataaccgcaggaaatactttccaacgcacggtccaaggggcacttaacgatcaacttgggaacaatgtcgaggcctacatcgatgacattgntgtcaagaccaagacaagcgactcattgatcgatgatcttcgggaaacgttcgacaacctccgacgatattgcctcatgctcaatccagagaagtgcatgttcggagtaccatcgggcaagctactcggattcctcgtttctggaagtgggatcgaagcanatcccgagaagatca

SEQ ID NO: 30969 - DNA, 497 bp, Oryza sativa
  unsure (1)..(497): unsure at all n locations
tactaagctttgtgagcctaatacccaaagaagctattaataactttcagtcctcgcaaactaagtagaataaccaaacaaggcaatgataaaccaagtaagcaaactgaattgattaaaaatcacactccattattatgatgatagcccccgactaacaacggcaaagaagaaaacttgatgttgacagtcaaaatagggaaatacaatgataaagttaagcgtagaaacgacgaagatgttcaatgttccaagagttgtcgacgagagtgccgtcttcgcgcttgagtcgatatgaacctggccgggtaacttcagagataataaatggcccttcccatagaggagataacttgtgccgatctcgtgtggtttgaattttccgtaaaaccaggtcgccgactagaaaggcacgagatcgaacattgcgattatgataacgtcgcaacccttgtaagtaccgagctgactgaatcanagctgcttcgcgggcttct

SEQ ID NO: 30970 - DNA, 356 bp, Oryza sativa
  unsure (1)..(356): unsure at all n locations
agctngtagaaatttttcaaagttctatgcgtttatgtcccgaagcttctcgccacaaaaacagaattntgcaagaggaatttggcgattttaaatttgccaaagctggggagaatcggatgtaactttttttgtagatgcccgtggatatattataagcctaatttcgagtccgtatgacaaagatatgactgttttaaggaaggtcactcgaatcanggttctatttactttctagtggcggcaggatacaaggcaactaacaaaagctatcggcaacagatcaaacacaaatataaagtgatttggtgggtgactgcgacngtggtgacngtggtgatgacggcaaaattgat

SEQ ID NO: 30971 - DNA, 284 bp, Oryza sativa
  unsure (1)..(284): unsure at all n locations
tcgacaatgcagaacgaatgtgatcaagatcacctcattcttatcgatgagntggaccaccttttttcctgtacctaacattattcatagctcgagaaatcttggtagcggccaaagccaagtcctcctcgaactgtttgagttgctcatcggacatggaatgaatcaaagcaagaacagtagaatttgatgaataagcaccaacatccaatgaagtcgcggaagatccaaagcactagacttagaatcatacttacgagaaaaatattcatctgatgtgtttg

SEQ ID NO: 30972 - DNA, 264 bp, Oryza sativa
agcttggctctaataaagaccacaagaaaagcttatatctccccgccacttatcaaaggccagaagcgtgaacgcggcaaggggaaggtcgggaagttggcaccggagccaaaaaggggcaaggctgtgacgtcgatgccggtgagcaaagcggggaaagtcgtgagggcgccggcccaatttgagctatgcatgctattggtggaggacaatgtgttcaccgtgatgggtattgcttgccgagagctacataagcaatacatg

SEQ ID NO: 30973 - DNA, 411 bp, Oryza sativa
  unsure (1)..(411): unsure at all n locations
cagcttgacccttggtccacctatttccttttcttatttatcctgatatctactctatattcatcctcatccctgcttttagaaaatccatctcaccttctgttcatattcccctttgaaaagctggntacttggattattggatcattctatcatgtcgtgtaagaagcctatggtaagactaaagatgcctccgctaagcccgaaggctcttttaatcactctttttcatgactctgtgagttatgcaagcatgggactggtgaatgttgactggttcagtttgctccttttcatgattgccacaatagcgctttgccatcacttgcgacttgcttactcctgctagtgcagagaccaacagttctatatttgtacttgaagggcctttttatataatctcattgttat

SEQ ID NO: 30974 - DNA, 507 bp, Oryza sativa
  unsure (1)..(507): unsure at all n locations
atacaaactcaagcttaaaatgatacctatggcgtgaatgagcagatctaagcttcgtttatatctctccncctatatctaacacactttacgagagagaaacttctgggagaaagaacggggctcacgaaggaataagacttcataggggcatctttgcagacgggccatataagcgacgcctgcgaagatcgcctgcatagatcgatcttcataggcggaccaccccctccaccccaggtatcgtcttctccggtggagttttggctccgagaccatacccgcctgtgaaaatggaacccctacgacatcgaatatgtgttttctagaagtgcattctactaccaagaaatgatcctactcaccaattaaaagggggaaatatcatttccttatatttacgcgcccattttatataatttaatgttgtacatctgctgtcccaccattgctgccacgtcctgcacgcagtcttcacggccgccgttcattaactttacctcttgt

SEQ ID NO: 30975 - DNA, 450 bp, Oryza sativa
  unsure (1)..(450): unsure at all n locations
gcttgatctctggcgccagagctcatccacgatctttagctaagtctctataccgatgccaccaaccggcttgacctcgctcattggccatgttgtccgatcttactagagatttacatcggtccaacaaaaaaataatttgagatatatactgatacctcacggtatcaaatcgtttttatcattggatttagacattattagatccaacgatcgaaaacgatttactatttattgaactggagtaaatctcttatgattaacaagtaaatctcttgcaagttggttatcttttatctttgattgattgatagtatgaatcacagagtgagatccgtcgtgtagtaattgcggctgacatgactaaagatccatgtcattgaatggcaagtagccacagctgcagatagcagttttaatttctaaaatagagaataaaaanaatacatg

SEQ ID NO: 30976 - DNA, 411 bp, Oryza sativa
  unsure (1)..(411): unsure at all n locations
agctntatgttcggcgcagtactaatactggaacttatgagcaataattgctctatcaatcaccatctactttagacatatcttctgaaacttttttcaaatccaaaagtccagtatcttcctacaaattagtgaattaagaggagctctttgtgccgaanaagaaagagcagggcaatatttcaaacttgcattcgaactgcgaaatatttatacaaaggaggagagatcaagataatgcagcagggttggttatctaattggctagtcaaacatgaggtggttcatagatctttgggcttcgatcatcgaggaatagagactttgcaaataanagcagaggattgggattccattgcttgcattntatatgtatatgggtacaattatttacgttcccaatgtgcttat

SEQ ID NO: 30977 - DNA, 357 bp, Oryza sativa
  unsure (1)..(357): unsure at all n locations
cttcctggatctgngaagnttctctttcacggnattgggatcttttgatcgatttccttgatcgctacttatgggcgtgcgctcaaaggatacaaacagggattcgcatacaataaggggaattcgtagtcactttttcctgtcgcgtaaaaaaaaggctttacgcgagagcaatagaggttgggatacatctatctcttctgagcaacctcttttggattcttaagaccacccttgcagtaagatacccgctgctttgggttctttattatattaatctcttcgagggattnttaggatcgttcaagctatatntagtctattttggcttttactgtctccttttctcaaggaagt

SEQ ID NO: 30978 - DNA, 236 bp, Oryza sativa
atccttaagtcacctgcggcatgcaagcttccatccagagactcaatagtgtttttgttttgttcgacgaatgaaaaggcgctgtccatcacctcattcctcagaagcacatgctaagctattggatgaagaatggagcccttcctcagattttgtgggatgatcctatgatggatcgtgctgtccaagatgggtttcatgtggtgattcctcaaaccaaaacaacctgtaagtga

SEQ ID NO: 30979 - DNA, 299 bp, Oryza sativa
attacactatggttaatacttcaaaagagattcgcatatccgactttgatggacacggaacaaatttaccctggatcttacacagtataagcaccggacaactggatatttccctgcaatctgatcgacacacacctctcataaccgtacactattcacagagaacctgaaacacaggcatagttgaagaagctacatgtgaccaactctcacatcacaaccacaaaccatgccaccaccatggttgcttcaatacagctcattgaagcattaacatgcatgctctctctctctctctc

SEQ ID NO: 30980 - DNA, 435 bp, Oryza sativa
atctctaagtcacctgcggcatgcaagcttataattatcatctagactagcttgttttgttgtgacagaagctgttatggctcaagaaagtgtccatgcgaaatgcgcaatatttgatgctcaatagacagcgatggatggatcatggatgaatgtccttgttagctaaggcacgtaatctggtgccgaaatcaccacacgcgtgtctgataagtgtctaacaagagctagcaaaacttttttataatgtttcttttgcgtcgagtctgtcacctgctaagccgggcaaatgcacggaaactggcacctaagagaaacaacaaaagttatagcttcccgtgttattcaaaataatcttcaacttcaatttttatacatcaaactttttaacacaactttatttttccccattgtccatttaatcaactctattta

SEQ ID NO: 30981 - DNA, 313 bp, Oryza sativa
  unsure (1)..(313): unsure at all n locations
cttcggtatagcacgttgaatacctcaaccctgcttcatattctttntctcctggccttgcattgataaattcttctgcaatccatctacttaccaaactactctctgctatttcacaatcttctggagatgcactcaagtattacaggcaacttcttatatcatgtggaagaatataataactgagtgctaacactgactgcatggtctcgaatactcatttcctggtagtggagaactgataatatttttcacctcattccaatgatataacgattcatgatcagcccagaagctcgatatggaaataatt

SEQ ID NO: 30982 - DNA, 495 bp, Oryza sativa
  unsure (1)..(495): unsure at all n locations
tcgataacatgctatgcttgntagatattctntacctgcctattctgntaccttctcatctttgatagttcaccctgcggactatgtaggcacttaaagtttatggccttgtaaagtttgaaagttgttactgcttantattaactcattttggaagattataattgcataattcttctttagttgatgtgtcacatattgttgtttcctaaccatgaccacaatacttgattttgtcctgactttngaaattctagtgctattatgttgtcatattactctactattctggtaccagcttatgacctacgagtgtaccaatatttacggttattaagcaccgagtgaaggctgngatattttataaaacacgttgcttcccagcttttcaattgaaagttaaattaagaaggctgagaattttttttgggatatacaatcttttatgggagatcgtgtaagcatattttggtgcatcagcatcatttcaatggt

SEQ ID NO: 30983 - DNA, 387 bp, Oryza sativa
  unsure (1)..(387): unsure at all n locations
agcttccaactccaggtgccttcagtatatctgtataggtctctgaagatcaaagagcgtcttgagacttcatctatgctaaagaagctgcttttgatgcttgttctttttggtacttctatggtgatagcggatggtgttgtcacaccagcaatgtcaggttcacatatttctgatgcgttgctcattgaatttctcttcaccgnggttaatgatcattatatatgcttttatgagtgatattgtgctaaaccaggttttctctttcctgtagaactaattccagttctttctattggtaaaaatctgcagtgatgtctgctgtcaatggcttacagggtggaatatctagtgttaatgaaagtgacctcagaatttcagttattg

SEQ ID NO: 30984 - DNA, 446 bp, Oryza sativa
  unsure (1)..(446): unsure at all n locations
agagaagagcagcttatataagcagtgaatcataatactctggtacagactctgaggttgagggaagcaaactcttcaaaaaagatggggtcacgtcagtctatacatgtggtcaccagccaacctctaagaataagggtgatccgatgaatactagcaagtcaaggcagtgtggaagtattctgaagaagctcatggatcacaaaagtggatggatttttaatacaccagttgatccagtggtatatggaattcctgattactntgatgttattcgcaatccgatggacttgggtactggtaaaaggaaactcacaagcaagcaatatttcaacccttatgagtttgagcagatgtgaggctacattctcgatgcgatgaagatattcctcagaaatgtgtcacgaaagctgtcaatgacaaatattgatcgatggaatattgaa

SEQ ID NO: 30985 - DNA, 408 bp, Oryza sativa
  unsure (1)..(408): unsure at all n locations
aagctgtttntgaaaacgaaatcaacctgttctgtattttctgaaacagaaacgaattcagaaatattttatcagaaacggaatcgaatatgataaaagcagttttcgttggaactcagaatcggtcgaaaactttccaaaaactttttcggaattttcaaagttacaggcgcataaaatacaaataatccataatacctccccaggccagcctattcagtatgatacctcccatagtctataatacctcacgtaacctagagacttaaagagtagagagtgagggactgagaaagacatctaagattctatagccgggcggcttttacatcgaagaatctagagccgggctgcgaagcgacacatctagatctcatgtcgtctcgcccctgccgctatctgaagttt

SEQ ID NO: 30986 - DNA, 395 bp, Oryza sativa
  unsure (1)..(395): unsure at all n locations
actcagcttcattggaagntagtgaagttagtcctaacattatgatttccagccctcataaaagagtgagacacactggtttcgtggagaatacttatttaattataaaagggtggatgatgactngaagatttccataagtaacctttttatgacgaatgatgaagatacccaattactacaatgctagctattgactagacaagttattatatgcttgtaattatatgcagcanatgtntggaaagtaagattcaagcgcactaagaagaaatccaatgtcattgcagtgatctctgtttgccctgcaggtcccctaacctgaatggtaaaataggtagcagatacaagcacaaccataaatggatagatatacatttcattgttttactctt

SEQ ID NO: 30987 - DNA, 358 bp, Oryza sativa
  unsure (1)..(358): unsure at all n locations
acacaagatactcagctttgtcaatactgccatattggcatacgtgggtgttatgtttttcaccggaaggaacaagttcaacaagcaccaaaacatgattcttggacatattggagtgtgttgggtgcattcgtggcacacagtcacttcgtgattcccgcggcgaactttttgcaattaatgccaatattgccatatattggcacacgtgttggcgatgcttttcaccggaatgaaatagttcaaaaggcaccacaacatgatttttggacgtattggagtgtgttgggtgcgttcgtggcaaacaatcacttcctgattcgcgcggcgaactnttgtgaattaatgcccatattgc

SEQ ID NO: 30988 - DNA, 263 bp, Oryza sativa
tcgggttctcctctccctcctccccaagccctgtctctaacccgaccgacttacacgagtcactaaaaacaggtttagttaaaatcaaagaaaccatttcaaacacagccattggcgcaccttggtcggcaaagaaaaaactctctaagactatatcctctcttctcgaatcaaattcaaaataggtctttggggctgataaaaaaccaaaccaccttggaatgcaaaatagaaaaccagcctgtttcacctccattccagaa

SEQ ID NO: 30989 - DNA, 339 bp, Oryza sativa
agtcatattcgccgttgaaaggcgacccacgtgaccgagccgtcgccgaacgggaggtggcgcaagagcccctctgaaacaaactccggcgcgacgcctcttttgctgtgctgcgtgagatcatggccttgactggataggaaatctatcgacttgccatggtactttggcgaattgacgttgaagtcgaagatgatctccagagctatcagcggcgagggagcttgttcgccttcaccgacgaatgcaaatgtgatgcccatctgaaaaatgccacctccgttcacgtacctgcgcatgtgttggtagcagctgatggaagttactggcctatggctc

SEQ ID NO: 30990 - DNA, 417 bp, Oryza sativa
  unsure (1)..(417): unsure at all n locations
agcttaantgagaatcaggctgtagcatatatttatctctatcganaagatcgaagatggagagagcggcggcgtgcttgggcggcggctagatantgagcataaagactgcgtggccggacgtggtggggtgggatggcatgtctgcggtgatgaagatccaccgcgaccgggctgacgtgcgggtggaggtgcacaccgttagcgagagcgtccgccggagttcgacagcgagcgcgttctcttctcctcaacgacgacaacgctcgcaccgtcgcccagacgccagtcgtcggctagctagccccccatcggactactggatcggatcagactctctagctatatacttcgtcccttacaggttacaagacgtcagtcagagtcaaactgttttatatttatctaaatttataa

SEQ ID NO: 30991 - DNA, 467 bp, Oryza sativa
  unsure (1)..(467): unsure at all n locations
ctcagctttaattcattttgctttntttatgccattgtggctctctctaattgtatgccactcaaaccgatgcatgcgccctcctctttctgctcacctctctttctaccgcgcttntctccgcatatgcaaactccccccgaacaatccctgatcgatgctgcaatcgcaccatcatcgctcctctggccatgatccgtgcatgcagcacagctgcatttcgtcagtttctcgagctttccggtgatcttgatggcgtcttgatctcaatagnncgcgccagcgncgccgncgttgtgggaggaagaggaggagattaagcatgaggcagacgcggcactgcggagctctacaccgatggttcactgaagctgcgagccatcctcttccgtccatatggagcctcgccgcgagatgcttctgcatgagcttggtgtacgcaaagccaacgccgtgacgtcagcaat

SEQ ID NO: 30992 - DNA, 363 bp, Oryza sativa
  unsure (1)..(363): unsure at all n locations
agcttatgttcataatatgaatatttgataaatttattctaattntggaaatttttgttctaagggtattttggtcatttgtacaagaatgtacagtgctaacggaggttaaccgaacgacgatggtaaattgtagaagttaagcaaaggtcgatggcatattgtagaatatgataaaatcagtggtaaatcgtagacgtgtgacaaagttagtggcatataatagattctctcaaatttatgactgtcgtcttcaatttctagcatgcaaaatgaaaagactccttactctcttcacacttttgtaatcggacccaaaccaaagctgatatattgctttgtaaaagcaagtcacaatcatta

SEQ ID NO: 30993 - DNA, 388 bp, Oryza sativa
  unsure (1)..(388): unsure at all n locations
gctatcacaagatcactatgataattgacgaaccgaaagctatatatagagaacacaatacatcatgatcgattcgtccgggccagcatatatgtcggaattacggtgcagcagatgaccagggaggaggatgcaaatcgaaggttctgaagatttatgtcgaccaccgtcagggcgttataatcaagcattggcctcacatttggggaacacagatgaaaggaatccaatgcatgagcttctgatgtagtaccaactactactagctatatcatggtttaagcacaaattntacctgacagtactttatctgagatagatgacagccagtacataccaattctaattgatgtcaatgatgaatggctgatcattatttgagttatct

SEQ ID NO: 30994 - DNA, 390 bp, Oryza sativa
ccgatttatagcttgataattgcgttgaggaagccagtataatagtcgctgacactttgacaacttcaattcaactcgagatgttttctattttctgagttttcaacgacaacgactccccctactttgcaatgatatatagcgtaagtgattgaggagagttaaggtagactattccgcattgacttgtgcttgatcggtagctagaatagtaatgggattatatatcggcgctttcacttatatgtatgtgcagatatttgatcaaaccaaccccattgacaatgcatacgcgaaatgcagcgtgctccaaaacttgcatgtccacgccggcgactaagctagaagaaacttttatcaacgtatataaatgtgcatgactgcacacat

SEQ ID NO: 30995 - DNA, 389 bp, Oryza sativa
  unsure (1)..(389): unsure at all n locations
nttcgataacctcgcattggcagtacccgctccatgaacttttatcctcatgcactctaagcgtacatgtttctagcagtgagaggagttctggcgctcccgggaaagagaagtctcacacacatattaaattatggttcaaggtaagatctctctctcacacactcatagcagtcctaccaatggcgacaccgatgtaaggcacgcctctcggccctacctcaacggctgtcccaccgtagcgcacctgcctcactcangggtgaaccatctatgcagggatactggctccgttcggtatctaatccgctaggtctatacacattccagaagtacggttgtccggggtcgttcatgcttacttatggctcggccttaatgaccgggac

SEQ ID NO: 30996 - DNA, 314 bp, Oryza sativa
actatctccactatataaagaagaataagaaaggatcaaattttctagtatttactagaaaagggggctttctacatagggatcgtcaaaacaacgattttgccctatcaactgtaggaagaaaggacacttcacgagaatcaaaataggaagaaagaaagtatggcctatactactctatggatagagttctcaaattgatagagaaagcaccgtaaagatcaattagtgaccgactgggtcgatacaactaaaaaaaactgcttacttatcccatgatatggggcaaaatttatgaatccgcttatgtaata

SEQ ID NO: 30997 - DNA, 392 bp, Oryza sativa
  unsure (1)..(392): unsure at all n locations
agcttggcagttggtcagttgggaccgtttttttcttttgatatggcaatgaacggtccaaacagatactacagtagttttaaactgtaaatgctacatgaacacgctttgtttatgctgtgtttaattccttccaaagttgaaagtttgggttgaaattggtatgatgtgactgaaaagttatgtgtgtatgacatgttgatgtgatgtaaaaagttgaaagtctggatctaaacatagccttaggtaaaatctaaggacatcaatttttgatccaatgatggctatatgactgtntaagttacagtagctataactatgtatgtgatcccaatccgaacataccgtactccgacaaatacagacacgagtcaaaggtcaaaacctaccga

SEQ ID NO: 30998 - DNA, 501 bp, Oryza sativa
  unsure (1)..(501): unsure at all n locations
actcagctttgagtatactcggggctaagctgtccattcttaacgctctcttcaatatcaacagaagcaactctgagtgcttcatttctgagaaagataataataaaacaaatcttatacgcactgtagtactatgaaacacgcacaaaataaaaggagagcaaagagctccccagattctacaaagtggaggaaagtttcatttagcatgaaagcaagtaaagagtgcaaatatgtctaacatataaagtgaagagtacctttgcattagtagagctatgtctgcagcttctggtttcctctctgccttctgtaccccatatanttggcaagtaaccacatatgtaaatttcaaatcacgctgagcacgtgcctcaggagacagctcaaaatgtatatcagccagaccaagaccagttgtagcaactgcagatcaatatctacanaggaaacaacacagcaggttattattacctcataaacaacatttatgtttcttac

SEQ ID NO: 30999 - DNA, 289 bp, Oryza sativa
  unsure (1)..(289): unsure at all n locations
cttacacagtctatttatgtcagagctctcaaattgcagcagatttcatgccctttgaaaaattttggtacatcaaaactcccctgaagattatggtggtcctctggttatttctcaaaaacaaaatcctgactaaagataatctttacaaacgtggttggcgaaaaggagacaaaatatgtcagttttgctgtanggaagagtccatacagcatttgttttttgaatgccccttaacaaaattgatctggaatgtggtcatttgtgccctcaatctataaccattttc

SEQ ID NO: 31000 - DNA, 373 bp, Oryza sativa
  unsure (1)..(373): unsure at all n locations
agcttctgtcatggcggcagcggntgccggcgtatttggccgcgatctggcgagacgtctctcttcgcgtccccgcgtgatctaaggtatcgaaataatatgttgattcatctactcgaacgcgccgagccaagcacgcccctttccacggagtcgaacgagccgagccgccgaacgtccactctgggcatattcatggcaagtgttcgattagacttctgtccacgcggcatctatccaggttggggctgcagcgcgttggtttgcagccggtctgcaccaaattttttttcctaataggatgcaccaaataactacgcttgcagcgaaacgaggcggcgaggggcaatcgcatccatacatgaccccgcgg

SEQ ID NO: 31001 - DNA, 235 bp, Oryza sativa
atacttcaccaagggctgaaccgtgccctcaaaatatgactatatgaaggtaatgacttatttgaagctattatcatagattcgtatttgcaacattactacgatcaggggctttttatgttaaaaagtgagaagttgccgatctatgggtaaattttgagtcttctcttactacactagctatggcaaccgagcgagtatagacatgtgaactgtaagaaaagatcagacacct

SEQ ID NO: 31002 - DNA, 401 bp, Oryza sativa
gggaacacataaagcccgatatgaacgctatcctcatcttcttcaaagccggtgcgcttgtatgtaagaaattgatcagtccaacttcatggtttcgcatgtaagagcaggtgatctttatctcctgaagatgctctaacgagatgatatggtaatccttctgattttgattgctgacctctgtaggtccttcacaatgtgcctgtggagcataatcatatataatatttaacggaacttttattaaaagaatagatggtgggttattaataagctactccttccgtttatattataagtactttgaattcttttctagtcattttatttaggttgacatataatatgaaattagcacatcacacactttagaacataactacgacgttacataaactaca

SEQ ID NO: 31003 - DNA, 420 bp, Oryza sativa
agcttggaagtgtgtgtgtgtaaagtgagggagtgatgtctttatataagggtaggtatgatcgttggcgaaagggaaatgttcaaaatgccccgcaaccgccatcaggagatgatcaagaccgttcacgccaaaccccaacctggatggctgagattgtggttcggctgaaccacatggttcggccgaacctgagctgggcccatctggcctggctcttggccatcttctccatggacctcctcttccatttctcggattttgggttatttactggtatttgatgaagtcacaacccctccttgatggaagatgattctctcattgagtctgatttcctccaacatcggggttattgtctgctacaatatatacaaccttgtggatatggagataacaccatcttatgtgatgtttata

SEQ ID NO: 31004 - DNA, 391 bp, Oryza sativa
  unsure (1)..(391): unsure at all n locations
ctcaccanacggtagccgtgggaaatcgtcggggtaatactgcactgactccttcataatcctttggtcgtgactcgatcctggtcatctagcaacgcagaaaataattctcccgtcatgatcacatatgactagaaccattntcatcgttatgtggtgctgattcttgtgttgcataaacctggctgaataagtcacaactgaaacatgcatgccgtcaataacacccactgactgtgaaaatggtttgaaccaacgttcgntaagaatcaaagggtgatattcactgaagtggtgatccattggtttcaaaattttcctatccaggtcgttcatagacaccaaaacttggcgtaagtaaatagacatcgttgagttggagcggatccac

SEQ ID NO: 31005 - DNA, 431 bp, Oryza sativa
  unsure (1)..(431): unsure at all n locations
atttaattntctactgtttatctagaaaccgtagaggtaaacagatagtctattagaccgagtgcacttgaattaatattgttgccgtctgactctattagtaaagtactattagcagccacaataaagaatggagcttggccgaccgtagcataatccaaccccattgctttgtctttggtctctctagattattctcccgaataaaatttaaggcgcgttttngtttattagtataagattttaaccaactgttactntactatattaatatattggtttttactncaaaaatataatcattttaatacaaatataattatatcaattttatgtaaaataatgtattctaacagagagtaatttgtcaagatttattcanacanaacaacatacanctttattttatatngaatggactaatacgggta

SEQ ID NO: 31006 - DNA, 386 bp, Oryza sativa
  unsure (1)..(386): unsure at all n locations
atacactactcaagcttnctggcaagtatggtggnnatgcttntcacaggcaaacgatctatctcttggtgtgcatagacgagtggtgatttctacagctatcagagagtggagcatgagatcggagccgagcacatgataggaatgcgtacgaggaggangantangatcgtttgcctgattacggcgagggaggaggagactcgcgggtgacccggcgggagacgagatggcgcgggcgacgagagcgagatgcagcgttgcatgcagccaaaggaggaatccccgcattcgcgtgggaagctacgtggaaatgggctaaacaggggcactttcaaccgttaatcatccagatattattttaacgggtactggtcacttgcatt

SEQ ID NO: 31007 - DNA, 395 bp, Oryza sativa
agcttataacggtgttctctgctcccaattatttctattggtttgcgacaatagaactatagttggttgcacaaactaataattgcaccataaggatatggaagttgtttcctggtcaattttatgctcccgatattcttcttaaatatctaatcatgccttttacatcttgtgaattgcgattttgatacaaatgggtaacaagggtgcatacattctgttcacagcttcagaactaaaaccaaatattttctctttctcagcggtggtgagtacattacactattactctatttcttgcaacaagattagtatcccaagaaatagaagactgtatgtggcagtaatatgtttttgtaagaagctggtcgagtgcatgttacactctgtactcg

SEQ ID NO: 31008 - DNA, 344 bp, Oryza sativa
  unsure (1)..(344): unsure at all n locations
aactaagctttatacggagtacattnggtctatgaagttcttagtactcttatattctgatctaccaagaacatctcatcctctcattaccgagtattactctttgctcctttcccatgtgctgtgtcgttcttctccctcttcccacaatcccaatggcttatccatagagcttgcattgagatgaatggccagcttcatggaaagccgtgggtggacatagacacagggtgtggaaagttgctggcagtgtcctangttacaacattataggacggagggagtagctactaccccagcgtgcgtgacgttcaagggggccattcacgcatgcaactatagta

SEQ ID NO: 31009 - DNA, 449 bp, Oryza sativa
agcttaccgagggagtgggtgtcttccaacgattttcgatcacggaagagaatttcctcctcctttttggaacgtagccgccactcgttgtggcagcagcggcagcaacatcggacgccttcttggcgatgtcctcctttaacgatgccgccacctgatgatccacgagcggcccgatgatgtcagtcagaaggagagcctacgctttatgaagtcacaatgcgatctttgaataaaagtgcagaaaggcttgcgagtacacttacattgatggcagcttcgcgttcggctgcccccttctcgctaaagggaacaaagacgtggctttgccgtgtccggccgctgataatcaactaacccacacggcgcttaacggcttcgctggtagacctgtgaatcgaaaccaaaattcgataagtcaggaagaacatgcacataagcaagtcagt

SEQ ID NO: 31010 - DNA, 481 bp, Oryza sativa
  unsure (1)..(481): unsure at all n locations
tagagcaagtntaatagtatagtcacctgctagctccaaattatttataatcaatataatagncaatntatacaataattatctataaaaatatactgcgctaataatacctggtcccacatgtcatacacacgttacgccttagagtccgtgctgcagctgtctatagactgctattgtacctgctcttatttgaaattcctgacttcacacgagaatctgacttcccactatgatcgccactttcaccttgtggcactagccgcactactactgtgtataacacatttgtactagaatgtgtcttcacatctagtattgngttgttttttacaggacgagaattgatctaataatactattaactagtaacgtattacaaacttannaaataatnntatctgaacatttangatagtcttatacacaaggtccgcacaaaaaacacaccattatctttttgaaatatctctactggaaa

SEQ ID NO: 31011 - DNA, 467 bp, Oryza sativa
  unsure (1)..(467): unsure at all n locations
agcttcttctgcctaatagacactgtgtagagttagtatttttataaacaattgataccatgggaatatgtaggtctaaaagaaatctgtgccaacctgacatgtatcaagataatgcttttatgtaaaatcatccttcttaccaccatgatcattctcaacttattttgccaggaaagcgaactatcatttctttttttaccaaatgttaccaaggactgaagatccagtcatgaaaacatctgctcattaccatgatcagttatcccagcaaaatgtgtgctaaataatgtaagtttaatagacaagttgatccacttgtaataaatctaacagaatatactcgacaacccacacctttgcagcaaccaagttataatgggctaaatatatctttcaagtctttaataagcatgcaagttgcatacttaanacatncagtgccacacttttgtgtgtcccatcaa

SEQ ID NO: 31012 - DNA, 447 bp, Oryza sativa
  unsure (1)..(447): unsure at all n locations
accttgatactcaagcttcgagcagcctggtttcattctgtanaaagaacaaagtgttgttttcagtagtggaatttgtttagtactgtatgctactggttgtgatatagaatgtgcatctcacaaagtgcatattatgcttttactagttttagaagctaagagggtgcatgaactggtgttagtgcagaactgcatatactacattngctagtgaaaataataggaattgcagaaactgaaatattgcatgttatagcgaaagaaatttgccattgaaatttctacagaaaaatggaaacagtaatataaaccttatttcaacttaccatgttctgccatttgtgataaatgccagtaatgtccttcttcttccattcttccaaatcaaacatattcattccatacgcncagccacaagcattaggatcgaagttctgagcaata

SEQ ID NO: 31013 - DNA, 435 bp, Oryza sativa
  unsure (1)..(435): unsure at all n locations
agcttaacatanaaccatgccacattatcacccactatttataattatatatttaatctcatgtatgcctgcaatatcatctacaatatatntaattatataaattaacatgcaagcatatccaatcatcatgacatcacccataatatttccatagatctatctttttgtaatatatttaaaaataaataaaaaaatgtttcacattaaagtgtgggtatcatttttttttactcctaactcgattatctaaaanatatattaaaatttactcccttcattttacgttataaaacattttgaagtcaactgcttaggtttcaccaagttttaaaaaaaaagtaacatttcacccaagacattttttataaaatgtttcaatttgattgatgaactagttatatataaaatactatattattataattagcaact

SEQ ID NO: 31014 - DNA, 314 bp, Oryza sativa
tagcatatgtgtgcatatgtgggtgtatgatcttgatcatatatcttgttatgtatctacacaagtcacaaggattcgacaataattaatggaattacaagtaaccaaaatgtatatggcttaatcaatatgaatatttcggctctggtaggaattcatatcacatgaggaactttcaaaattatcattttgaataataatacatccggaattcaagtcaaacttataacatgattatttatagcaactcttatttactatctcatatctcgcaacaacctagactcagatcagccaagtgcagctcacttacc

SEQ ID NO: 31015 - DNA, 377 bp, Oryza sativa
agcttcactaaagataacccatgcctctatgttttctcttggaaatgaaagaatgagttgcacctcaatcaaacaatattactgtcagtgtcgagctgacatgaaatgtgcccaatataacctctggagttgactgcgcctcctgtacatatgcatgattgacacgggcctgaacaaacttgagtccggcacgttttggcttcaggcacgtacataccatgtgttcggacttgttacaattgaagcacaattcgggcatttctccaaacttcttggtctgttctggctaagctggcacagctgactgaactgactgagctacaatcattagtgtacttggagtatagttgaagctaggctgctcactgctactgtga

SEQ ID NO: 31016 - DNA, 423 bp, Oryza sativa
ctacaatattgccacactttggtacatattgtctaatcgctctttcggtagaactcgattctaacatatattgaggaagaagacatagaatagacttggagcatgggaagaagcactaattgggaggatattgcgtaagttattcttcatcgatgcctcttccgctctcacacttgcgtttatatactcacacaagtgtacaggctcaggcccattccggcccagacacttgcacattcggcatgcgctctctatcatggcggagtctagacttaacaagactgagcgccattgtcggtccgctacagtagggaacattcctccttcttagacgcggcttgtcccagccggtcatctggaatcgttgcgaagtgcagtcctcttccatgttacctaaacaagctgactgacaacgtatctgag

SEQ ID NO: 31017 - DNA, 420 bp, Oryza sativa
  unsure (1)..(420): unsure at all n locations
agcttccttgatctggaggagttagaacactgtttgcatgtaattaaatatccgtaagtagacttgtcttatgattaattgatttttttgcagcagtatcaattatttatatgtaagttttctatcgtacaaaccacaattttcatattctatccaaaattcaaatcaatgcatgatgcatcgtttgaaatgattggatgcaaccatacactgcatattntagttgaacctactatgataaacactatgcatgtgtgctctgcagctaaacaagattttatttagcaacgtgcacaataaaaatgaaatgaanaaattctgccaaatttctcaaaagaatgcatactatcagcagatatgatgattagaantcanatggtttaatcagagaagcagacagatgggacataacagaacagt

SEQ ID NO: 31018 - DNA, 356 bp, Oryza sativa
  unsure (1)..(356): unsure at all n locations
cttcgcaagaatcatcatgcacagcataaatacaccagtattgtacaaattgagccttcatgtattacattcaaactaagtcagaatcagtcctttcatcatcagagtcttcattactcggctggaggtcgttgttgcgaaattgttctacaacatcactcgcaattttgtcagctgcattntgcgcactgctgataagatcaagagcagcttcttcacttgtcccgtctgcaaatccatcaatggtgtcgacttcaattctcgggtacaaggaatttgtcatcgccaaggccatgccagctcccatactttcagctttcttgatattcttgaaatatacatccggagcaacactc

SEQ ID NO: 31019 - DNA, 466 bp, Oryza sativa
  unsure (1)..(466): unsure at all n locations
agcttatgctntcttgtgactntcaacctgcttgatctatactagaacaacactactttatctttgttctgtaaaatactctgtaatagtgtcatcacttaggcatgacaatataacacttcacattccagaacttacctcgattcctgtattgacaatttgaatctgaataaaaccagtattttgatttttcttttggagcactattgnatgtgttagcttcatttctaagaaccactttcccacttaagtcacttatgagtactgctctcaacagatacattgttggtatagctggaccacctggcgcgggaaagtctacagttgcttccgaagttgttcaacgtgttaataaacgctggtcccagaagcacgagaatggtagttcacttatttcaaccgaagaaatagccacgatgcttcccatggatgggttccacctttatcagtcccaactagatgcaat

SEQ ID NO: 31020 - DNA, 420 bp, Oryza sativa
caaaaactcagctggcactgaaacgtctgaggagaaaatattgttctccaaataatgagggctagaagacactacgggctctccacaatttgcgatgaaatggatcttttattttaggatctcatctgctagcctgccgaaagaacagacacttttgtcggatcttgtcagaatttttttatgaatatgctcagaacatacgttaaaagacaaaaccggatcattttgatctactaaagcatattaaagctatacatgtgtggctaatattcgaggaagtggattcaacctgatggtgaaattattctaggaacaggttcatcaatttatttttatagactgctctattaaatatattctgtaacaacataagaaacatagtctcaattgtaagagggatctgatttatagttaagggaa

SEQ ID NO: 31021 - DNA, 390 bp, Oryza sativa
  unsure (1)..(390): unsure at all n locations
ctctcgatggagtatttggcaagcgctcaagcacatacggccaagcaaacgcatgcttcttttcgattggtttgttcgtctgtttgataaatgaagaagataaacaaagggtgagacgaagaatgaacgacgactacttatcggccggtctatgcatgctccacaaatatttgtagtactgtcatgtcatatttggaagtacgggcttggatactgacaggaaattgtgaatatcgaccggccgccatgcaagcgagaaatcgtaatgatgaattggtgattgactttagtattagtgtggattatcgctcagnagtatgttgttagcggcagatattcaccggtatcttaggatcgaggcggtctctttttaagatcctttatatttat

SEQ ID NO: 31022 - DNA, 365 bp, Oryza sativa
  unsure (1)..(365): unsure at all n locations
gtcacctgcggccatgcaagctttgtaagataaacttaattactctatattatttttatgtaccaaaaacctactacctccgttccaaaatataagcatttttagctatgaatctgaacaactgtgtgttcagattcatagctaaaagttgttatattttgggacggaaggagtatgtttgaaaaataattatgatcaaaattaactgcaacacatgtaattatatttctacttgaagctacacatgattcanattttctttttgaacgaatcgatcggcaaactgccaatttcattgaataaagaaagaataaactctacaagttaaaaaaaacaggctcatgaccttcggcccactgagctaa

SEQ ID NO: 31023 - DNA, 260 bp, Oryza sativa
gcatgcagcacgcggactgtaccaagggcaaccttgtcacgtacaaagtggagatcaatctcgatgtgcttggatcactgatgttgtacaggattggtggagaggtacaccgcactaacattgtcacaataaaccaaagtggcccgtgtctgatgagtgtgtaactcgtggaggagctgttgcaaccagcatgtctcggcaactgcgttatcaacagcgcgatattcatcttcagcactggagcgtgaaactgtattctg

SEQ ID NO: 31024 - DNA, 433 bp, Oryza sativa
  unsure (1)..(433): unsure at all n locations
agcttcatcatcattgagttggtactgtaacaaaataagattactaaataagctaacaatacattctcagagaanagtttgagcagttcatttcaacgaccatagcaagtcatgatcccatataattagcaaatttgtggccccatggaacagaattactaagcacactattatgtttttgaattttaaacagaggactgnaccttttcagtaattgaaggtaattctctgtgacattatgctccctccatttctccaaatcaatcacattcaccccagacatccaagcacacgactgcggatcatatgttgctttacccagaaagtttcttagttgtccattctcagacacanaacttgaagcaccangaccttatctccatataatatccacaaaaagagagatacgtgaacaacacatatcatcaacaca

SEQ ID NO: 31025 - DNA, 328 bp, Oryza sativa
  unsure (1)..(328): unsure at all n locations
cgagcttggtacgtacgttgggatttggattgaggatcgagagaatttggattttgggtatgcaagagtatgtagttgattgtagaggactggaaggggaatatagtatcaaattatcttatgtgctactagtaagttctgttattagtggtggtgatggatgagaagctcctggatgagatccanagcatggaggatgaggtcgaaagcatggacgtgggcatctatgacggtctcgtcggagtagccttgtcttgtgttagatctctctgctcacgggctccatggccacacttgaggtagcgatgattgtatgtccttgcgtgct

SEQ ID NO: 31026 - DNA, 437 bp, Oryza sativa
  unsure (1)..(437): unsure at all n locations
agcttacttgtctctgctgatactggttcaaggaaaacttcttcttttcttggtcccataattgcacattgttcacacgtgcgatcagagagatgcacagacaagcaagggccattagctatagtccttgctccaactaaagagctatgtctgcaggtggaagaacaagcaaaagtgcttggaaagggtttaccttttaagactgctctagttgttggtggagatcccttggctcagcaaatctacaggattgaaaatggcatcgagttgattgttggcacccctgggaggctaattgatctactcatgaagcacaatgttgatcttaacaaagttgatgtattcgttttggatgaggtggactgcttgctagagaggggattcagagatcaggtcatgcanatctttcaagcactttcgcatccccaggttatgat

SEQ ID NO: 31027 - DNA, 435 bp, Oryza sativa
  unsure (1)..(435): unsure at all n locations
agcttanggggcaaagaatttgacctcatccttatcttttattccaactccaagaaagcaagaaagagaggctggattggatgaacaaagttacaaaacaaacaaaatcggaggaggccgagtattaatgcggagtgggagcccagcggtcgctttcccggcgctgtgtttggagggagaagaagaggaggaggagagagaatcagaatatgcggctctccctccttcggattatgctatgccaatgccaaagcctcaagatggtgggaccctaaaaagacatcaactttcgctgtctcgtcactcctgaatccatgatttgttcaacaagatctcgcaagaaaccgtgcatttctcatataaacaattaaacaaacgagcaccactctgtctttgaatattctgaagaaattactgtctactcttgcactgaat

SEQ ID NO: 31028 - DNA, 467 bp, Oryza sativa
  unsure (1)..(467): unsure at all n locations
agcttccacgaattaatgtctctcaggcaacttttatttggtgtactctcatatcatattgacttggtgacttgtactattacactaagtgcaggtgacaattaatccattctgattattatgcaacaacatactgaagatgcacacacatggatggcatcggtcccattgactgatgctgatattgctgctgcctgctaaatcccttctagaattattcattatcaaagcatcgatcagctatgaacaggaagaccatatataccatccattattggatcttatatttgatctcgtcacttgttcaaatccaatggagacagggcacgtcatttcagacctgaacaagatagagaagaatgaagcttcctaagaaatgggccttgtgatacttgtgttatgtgtgcttaattcgatcgggttgagtttgttacaaatctatcacccgtgtcaacanacaacaactg

SEQ ID NO: 31029 - DNA, 474 bp, Oryza sativa
  unsure (1)..(474): unsure at all n locations
agcttgacatttgngacatcatcctgcaagaatagtgccacaacatattactttattatcagtatttatgataaaagaaagcatccacaaccaaacttctaatcatgctagaattgaagaatgtaacgtggttgtgattctcgtacaaggatgtggtactaattggacaggactctaacgattctttatgtgagcacgattcctgaagaattttgagagtgaaactttcatgctcattagtggagttttcatccgccagagttgatgtctcaaacttgtccatggcttgcatgttctccttctcaagagatgcatcgtgcaagaacaaggttgtttcttgacaaatgtcaagaacaatatctctatggccagagggacaagggtcaagctcgatacgagggtgcgatggcggttctttggagtgcaatctagagttcttgcagaatctttttaatgatacaacatcatatgctt

SEQ ID NO: 31030 - DNA, 431 bp, Oryza sativa
agcttgctggcgacccgtctcgcccggaacttaatatatctctccaaccccgctcatggcctcgaagctaccagccagctagagcacaaacttcctatctctcccacaagagtatatgctgccaatttgtttgtgaaagctctcttcccacaagtgcactccgtctctttgctttagggaagaccctaccacagtccaccatgagcaaagttattccatgcgacggcatgctccacctacatgtcgcttgcatgagcaaagttattctatttgcccaccaaatagattttaaaatttttagtgcgttttccttaatagaaattggtcgaccgaacctttcagccgacccggcaaaaaattttttagtgcgcacactttgcattgacacctgatgtgctgagtaagcaagttcagtgcttgctatatcgtct

SEQ ID NO: 31031 - DNA, 406 bp, Oryza sativa
  unsure (1)..(406): unsure at all n locations
tagaagcattaagcaagaagcataaattattttgtataccacatttagaagaacaaattagaagtagcatactgaacgagtagaatccaaataaaagtatcaaatacaatatcgtttttttaaaggaagtttaacactatttntcatacaaccaattagagagcatcaaatcaaaggttagaattcaaacagaattgtcaaccaagagaccaagaaacgttttttcaataaaaaggaacaccagttttggagagcaaatcagaacacttaattagtgtcacacactagactgaattggtttggttagaataaaaaaggagcatcataattcataataccaattatatgtatcaaacatatgtttcagattccaaatgacagggttatgcatgagaccaagagatat

SEQ ID NO: 31032 - DNA, 311 bp, Oryza sativa
  unsure (1)..(311): unsure at all n locations
agctagangttgaagttcagatatatgtgaagagtgtactnggggacatgtatgcaaaatgtggttgtattgctgacgcaaaagaaaggtttgatcagttgtacgaggttgacattgtcctttggacagcgatggtttctgggcatgtgcacaatggggagcacgaggaagccctgacattgtatgccaggatggacaaagaaggtatcatccccagtaaatcgactatagctagtggtctgagagcatgtgctggcattgcagcactggaaccagggaaacaattgcacacgcaaatcgtgaaatatggg

SEQ ID NO: 31033 - DNA, 366 bp, Oryza sativa
  unsure (1)..(366): unsure at all n locations
tgtcagcgccggccctctggtggaggggcaggccttcctctcgtgataagccgtggtgccgaaacccggcgacaactggacggtggtttttgccgtattttttgaggcgggccttctgttttcatgcaacgattngttgctggagatccttcgcctcttccaggtggagcttccctagctgagcctgtcggcacttgtccgagtcgccatcttcgactgggcgtgccggaccgccgggttcgaaccgagcactgagcttttcgacgtcgtgttctatgccaccgtgaactcgaagacggttgtcaccctcgccaggacgaagaatcggcgttcggaagcgtgaactctaatgttcgctctgagcgc

SEQ ID NO: 31034 - DNA, 435 bp, Oryza sativa
  unsure (1)..(435): unsure at all n locations
agcttagtgcttgctgcacatacaaattgaattatngttgccgcaatgagcggacaggtatatcaaggtagtatcaaatgtgctaattagagagcatgccaagattaattgaaattaaagatggtaacagagtagaaaggagggttccaccagtttatagctggaatatatatgttaagagtttgttattgctacttcctgtaattaggttcggattccttctgtactcccgaatctaattntataagttggtagagatatagaangcctaacctatatatgtactcccgctatctggcaatagattatagtgttgagtatattccgtcttacagaatattaacatggcgtgcgtgtaagaaagagacctttggaatangggtgccatccacattgnngtacattcccaacgatgttgcattagcaaagatcatc

SEQ ID NO: 31035 - DNA, 294 bp, Oryza sativa
  unsure (1)..(294): unsure at all n locations
ccgtgcttctatggcggtgcccttctctcatactgaagctagctcaagctcaacacctcctcctcctcctgggtattatccaaatgctgttatccttccactttatctttttaccgggagtaaaaagataccatccgggactaaagatcataaaatgctatgtgcttttcaaccggggctaaatatgatttttagtcccggttcttttaatgaacccgaactatngtgaatttctggcgaccagacaaagatgtgttctccagtagtgatagacagattgcgtatggagacagt

SEQ ID NO: 31036 - DNA, 387 bp, Oryza sativa
  unsure (1)..(387): unsure at all n locations
gatctctgagtcacctgcagctgcaactgtaaagtgaaataacccttaattagtaccatattnnggctcattcattcatatatttacttctttnttttttttaattcagctaccttcctacaaaagggaattggaggaaattgacacttgaaaagaagcttaggggcactctcatgcagatcatacaatcccgattatcatcaaaaggaagtggatacggaagcgatctccttggtttgatgcttgaagctcgcattgcaacagatcacggaagggagcaacatcagctcaccttaagcatcgatgaaattatacatgagtgcaaaacattcttctttgctggtcatgaaaccacgtcacttcttcttacctggacagtgtttttgc

SEQ ID NO: 31037 - DNA, 445 bp, Oryza sativa
  unsure (1)..(445): unsure at all n locations
agcttgctactatgtatctttggatggtctattataagtatnttttagcacttgtgttgtgcacaagattgagatttaaaaatttagctatgcacaagcagtggtactgtagtagtacctttactatcatatgttctctattactgtaatttcatcatgatgttactgcaaaacgtgcagtaacgacctataaatttcatagtaacgacttatacatttcgcagtaacgtaccatgttaagcacttctgcgataatgctagttccaaattaaagtaagaagcttcgatttctatagtaaatataactgattcgaacaaacatataaagcaaacaaacgataacctgtaatcacttagtgtcataagggtgaatgtgtaggggagttttccgtgaaccatgagatcatggnttcaaagtttaaattctcttaattaattttctttt

SEQ ID NO: 31038 - DNA, 468 bp, Oryza sativa
  unsure (1)..(468): unsure at all n locations
acataaaactcagctttgatggtcggctntcttggcactacaataagtactatattatatatgaaacgaaacatgtaacaatatcatggcatcgaaaatagtatatcagtgagcaccatgtgtagctaaaccaacaaaaatacctacatgaaaatcaaacaaattgaaataagttntaggagcacatataaggcaaaaatattcctttccatttcctctttagaatcaatcttcatagtcagcagaactgcatccctttgatcatcgtctatcacctgagacagttntaaagtaagaattntatataaattacaacacatttagctaaatgagttgcctgtgactacnggaagtaccacagtagataaatcactganatgagtctctggagattcaaatgaattcttactttgactttagatttttcagcatgtgcttggataaggacaatctgcaataacaacacat

SEQ ID NO: 31039 - DNA, 395 bp, Oryza sativa
agcttcattaagttgtactgaggagcattctattattatcatcttattaaatttgttctgagctgtcatacacgaagctggcactgagggtggaaaagcacaagttcactttgaggaggttcttaagagcaatatttcactatatgtggtatgcaatgtgccctctgagatagaaataatggaatataatttctgcgtgggcacatttcattggttttactgtgttaaggggtacctgtttgcatctgtttaagggctatttggttgcatcctaacttgccagggcaccaaaccgtgatgtgttgtgtgaccacttgccgtttgcctacgctatttatttaatacgacctctgatttacatttgattctagaattttacatgtccagagaaatag

SEQ ID NO: 31040 - DNA, 154 bp, Oryza sativa
ctagcagaatcaaagcccccaagcaacatgcagtaacagctcatgtataccttccgctcaccctcactattggcgctactacgaggtctcctagccaacaaaactagaggaatggaatcgtgagagcattctcttcaatttatcttttgacctc

SEQ ID NO: 31041 - DNA, 412 bp, Oryza sativa
  unsure (1)..(412): unsure at all n locations
agctcgatctatgcttgcatcacccanaactatattattgaacttgtgcaccctaccccaatgatagagctccatttcctacaaccgtgccatgctgcccaagctcgaggtccatcttggcctatgtcctcatggcccgcggattttacctctacatctgagtgccgatttgagtagtgggaacttaaggatatagtatatcgattcatgtctaactctacattgtttttttaaaaaagaaagagttttgcttgccagtatgttttaacaatatgcacaataaaatagaataactcagattgttatgtaccaatttatgtgagcgtgcatttcagaaacttagcaagctctcgctttcgcacaacagtctaacaaatgaaagcgttgctgctctagtattaacctaactaca

SEQ ID NO: 31042 - DNA, 435 bp, Oryza sativa
  unsure (1)..(435): unsure at all n locations
ctgacaccacctcttgctggacaccaacgttagtgacagtgctcactcgcagtttcngatgtcctaaggttgggaatggcgatcgatggcacgttcaagtcaatcacggatccttttgtcgtcgtgcagttgtcttgtgagcctagtcctcccatgcaattgaagaacttgagataatccaatgggttgatgtcatagatgaggcctggatcagccgccatgatcggattaacaaagcctgcttcataatcaaacggatcggcaatctttggaactcttncattagctngcataggcatcccattgttgcaaaggtatttgctgcatgcaagatatatattgattgaaatgttattacttctatacatcaaatgatgtctagatgtcatgttngacatacaatattagcacaaaaatttatgtcagacatgttct

SEQ ID NO: 31043 - DNA, 375 bp, Oryza sativa
  unsure (1)..(375): unsure at all n locations
agcttatgtatccatcgaattaatgctaactggctttagatgcaggaatcttgtgggtggttttatgtttagttgatcagctttntctatatgctattatgtcaattaacaaagaaatcccattctgtgctttatttgggtgatgcaaaagttctgcactacctatgtgaaagcttggcttatcatgatggatgataaaatgattgaatttgaccttcattggtagcttcaagaaatttaatactcaatgtaagatttttgtttcacctgtattaattagtttggtaaaattctaatggaatgccaactaaagtactttttcctgacttctaatggttcacattctanagtaagttgcttttcttaatttgcatt

SEQ ID NO: 31044 - DNA, 306 bp, Oryza sativa
  unsure (1)..(306): unsure at all n locations
actttcagacaataggtgcaaggaaataaatcctagctagataaaaggcctttggattttagaacttgtgtactaagtacaaaatatgaattactatcgtctgagctatgaaagatggtggagataatgtagacatttgaaatatatagccatagatgaacatagaatggatatttcaagatagtgaattgtgctttggcgcataaacttgagagcggagtactttggctaataagagtatttntgcactgattangatgctagataacagagtggcaaaacatgagccaccctgtgagggatgaa

SEQ ID NO: 31045 - DNA, 327 bp, Oryza sativa
agcttgatggagaaaagatctgtttattatttatctgtcacttgtgaaacgatgtcggttacacctatgcctaagaccggaattgttagtaatcctctccctattagtcctattgatgttgacaaaaagaaaaggaaaagtgttattattggggatcctcggcccaagaatatgatcaaaaatgccaaggccgaagatcgtaaggttacaaaagatgagtcatctattttccaaaagactaataagccgaagctcacttttgagatgcttatggctaaatacaacaaaggattagctcgtcaatgatttgataccaaactagtgatt

SEQ ID NO: 31046 - DNA, 402 bp, Oryza sativa
accacttttgaaatcactaagtgatttatttctttctaagtgtgggccgaaaagagacttgcgtcttcgatcgactctaaaagatgcttttcaacaactcaaatggtaatgtaccgaccacccgggtcagatcattacttctcggctcccagagccatttcacttgattaagcgtctcccagagcctttttcctttttctcggactcccaaagtcctgctgcccgcagcacaacaatccgcttctactcgggaagcctagtctatgatgcccgcagacatcccgaatacacagattcgttctaaccactcaagtatccatcggcacatggctgttctggtatgaatccacccatataactttacaagccaggctacaatctagcacggaaccactacatcgc

SEQ ID NO: 31047 - DNA, 407 bp, Oryza sativa
  unsure (1)..(407): unsure at all n locations
actaagctgcatacttaatatacttaatgctcccatggatggtgatttctttttatgattaaantcaaaacatgtgacatgcaatgttaatgtaatagcttnccttgacacatgcagtacacccttttgcataacgttagctttcaataacttcgacattgcactattggtgttagcattatccaaagtgatgaaaacaatntatcttcacaatacaatcttatatggtctctaagattgtattgaatataacaacatccatgtgcaatgattttaagtgtgagaaccttcaaaatcgttcttttacctgtcaatcagcatcaataaagtgccacgttatacatatatatcctctactctggttcgaggaccacatagccattgttagagaaacattatgaagtaca

SEQ ID NO: 31048 - DNA, 454 bp, Oryza sativa
agcttaaagctgtgttaaggaagcacctgacactgtttattagcacgcgattatagtttagattaattaagtattagctaaaaaacttgaaatggattaatatggtttttttaaaacaactttcatataaaaaacttttgtaaaaaatgcactgtttatcaatttgaaaaacgtgcgtgcggaaaacgagagaagtgagttggaaaatgggagaaaaaaacgcaacctaaggaaatcttattacactttttttaatccatggtgtgtggaacctagtttattagaagagaatcttgttaaaattgtggctacagctaaacagctgccagtataattgaagttgacaaaccttatgcatgtcaaactgcgataaagccgagtagttgataaccaaacattagtacatatcactagttcactacaagcaattcccagtacgtgactgtagtaatat

SEQ ID NO: 31049 - DNA, 404 bp, Oryza sativa
  unsure (1)..(404): unsure at all n locations
gcttggacgcttcattcatgctaatctgagtgcttagagatggttttcttttatctatagncgcgcttggttgcggatgttcctcgatgacattgagaccctgaaatacctcactgtttggtctaatagcctgtggtgatataggagcttcttccacaaaacctaaccaaaagggttaaatgtaatgaccagtttttgaaatactgttgcttgagggaaggtagaaatcaactaatcctttgctgtangaatcttggaatttgtattggaaggatctttgattgccgcttcatgtgttaccatatcacaagtctgttcagcctccttagcataatcttcagcttcatcaacagcttcagaactagaattaacttgtgaaacatggtcatctctaaaattaactg

SEQ ID NO: 31050 - DNA, 433 bp, Oryza sativa
  unsure (1)..(433): unsure at all n locations
agcttaaactacattattntaagaccgaggaatagtatatatctaactntatctcccgtttgttacaacgttgttggacggaaagaacgcatggccaagccctaattaagctagacccggccgatttgagactatatacatagaatagtaaaacttccggtcccggtgatgattattttaaaacaatttcagaaacgaaaagggtcatacaacttgcaccggtcctttgctttccgtgcaaagcaatcactttgataaagctagcagtaaaaatatagtaaatcggttggcttaacagcagttnttttttttgaaaagtcggtaaaatttaaacaaacgcgtatgtatccctatagtttctgcgccatttcgcaatgcacatctttcacacggcgtgcatgcatgcatatagccctatacgggccctataatg

SEQ ID NO: 31051 - DNA, 346 bp, Oryza sativa
tattcttcagaagattatatgggtcagataactacatccctgttcctgttaaactcgtaattgttgttgatattctaagaaaatgtggaggagttcctgtggctatagatgtcatagctagtcttttggctagtcaaagagaagtttacaaactggataatctggtgaagataaaaaactctatggggtttgaactggaaacaaatcctaactctaaatggatgaagcatatacttaaacttagctataatatattatcttgggatctgaagacgtgcctcctatatcttcatatgtatcctgaaaacattaacatcatgaagaaagacttggtaagacaatggat

SEQ ID NO: 31052 - DNA, 408 bp, Oryza sativa
  unsure (1)..(408): unsure at all n locations
agnctatacatataataatatagctctatttattcttgattcataaaaacaactctatttaacctgtgaaaaatgttaaattaatgagctaacttggattaacgaaactcaagttggctcattaaactcggtacaacacagtatatataatttaaaaatgagtgaattacactttggactattttaattacctaagttgcatactggactatgaacataaaggttttggtaccaaactatgcaatttggattagttgacccacatgtcagccttagccattcatctacctattttattagtccctatcctgatcgggcagagctcatcatttctcagggatgcagcataacagcctatctgacgaacattagtggccgccgcatgtcctcggaactctggccgcatcc

SEQ ID NO: 31053 - DNA, 327 bp, Oryza sativa
  unsure (1)..(327): unsure at all n locations
gaacatattactaagggtcgttctggtgggaaattttgacctctcggcatggatcgcgcacgggtattcccattcgttgcatgcactatcaacgtgattaattcacctagcggtaatttctgtaattacacattatgncgtatttttttagaattcatcctgtagattgacgaagtcaccacatgcgcctcgctattgacggatgtacgtcgccttccattgaaagatcctggcaaattcgctccacgtggaatcaaacccaggacctgctactcaagctcttgtaaccattaggctacatgtgatcgatagcatanaaaaatttaa

SEQ ID NO: 31054 - DNA, 461 bp, Oryza sativa
  unsure (1)..(461): unsure at all n locations
agctnttttctgaaatattgtaacaggtaccttatatattagaagggagaacacctaatattctccctcatcttgtcgtattaagatgaacatgttgatatgcattgaaataatgaagtatcaaagtatgttagcattaaaggtctccaaatttttgcaagtataagttgcttccttctctacttatttttaacaaaaaaacaagaaaagcgcagaacagttttattgtgcataataatgcaatgcaatggttaaattgtggttggtccacactgcacatcgacaagcaacagcacccactcaatcccttgcaggctccatcactgccaatccagcacgtaaacgaacagtacaagcagatgatcaggcccctagaaaagctcanattacaaataaacccacatattatggctaatgcagaagctaaaaagttgtgtactagcacataaatntttcacatg

SEQ ID NO: 31055 - DNA, 364 bp, Oryza sativa
actcagcttgtctgaatcggtgcaaaagacgaattgcacttctttgtatcgaacccgggtctgtaccgtggcatggtactattctaccactagaccactggtgctttgtatttgagagaattagtattaattacttgtttaattttactgttaacgaaaacgtgcgtaatcatcaacccgaaacaagcataaacaacaagagttttctagtctttgcttgttgcttacgagaattcaacaggcaaagaattttaatataaacataaaaataagaaaaggagctactggagcaagacatgttgaaacgcatgtggagaatatagcgaatagtgatgagtgagcgagctggggccagatacttact

SEQ ID NO: 31056 - DNA, 424 bp, Oryza sativa
  unsure (1)..(424): unsure at all n locations
agcttccaaatagcacgttcaaatcacatccttgtctgtttcatgagcacaagcaattaatatggcgcatccacggcttgaatacattatacatgttccattatatatactttatccgcgtaataaaagtacaaaaatatgctcgtgcaaagcgatgagatcatgttatgatgacaccgaatccggtcaaattagaaatttttttataagagcccagcttttgattgaaagcgtagagatagaaaattagaaaatgtccgtggtccacaatagattttgtgctggtgccgtgcagatcgttgcatgctntatcttactagatctgtcgattcccgtcatggaattccaatgctngatagaaatctttacagaaagaaaaaatattttcaagaaaaaaccgagagagaaagagaaagccgatcta

SEQ ID NO: 31057 - DNA, 409 bp, Oryza sativa
ttttgacaatgtgacgctacagttaacttctgataactatagagtaattacgcttaaccgattcttctcacggattagctctcatttataaaattagcatttttattaagctatatttaatactcttaattagcgtccaaacatcctatgtgacatgggctaaaaagtgttagttccatctaaacaccccctagccatttgtcttatttcgtcggcactgcgcgattggcctcgctctgaagtggttatgagaggagcgctggcgatgcacggacgatacagtcctgttcaatcaaatggaggccgccttgcctctgttgatcttgcacaaaggaagaatctctctcttctctggttataactatacggaccacctttaaatagtcaacattggattgagaatattcta

SEQ ID NO: 31058 - DNA, 431 bp, Oryza sativa
agcttatataagttaacgtggtttacgagaatttaactagcatgatgatccaaatataaaaaataagatggtgtgtctttatgagagagaaaaagattccgaccatagattaattatttaaaggccaaaaataattaaggtgatatggcttgatgagataagaaagaaataacattaattaagtgatgatgaactatataggtatgatattgtaaaaaaaatgatgaagatatatattgaaatcactactacataaacacaaatagatgctggttggaaaccccacataggtgtcggttggagaaggcgacactgctgagagaaatcaaaggggccagttctagaaccggcacctttgaggtctcaagaatccaaaaagaaagtggctcgtgcatcaactcgaatcgagctgatgcatcgagcatcttccc

SEQ ID NO: 31059 - DNA, 443 bp, Oryza sativa
  unsure (1)..(443): unsure at all n locations
ggtcccgtacgcggcggattccggcgtactgatcctggtgatctgctccgcctccttanggtggttcagaaggggcgtgtcctttttcttcccctccttttcagcattgaattttgttaacctatgatgagattattaggggtattgtaattatgttctcaagaggtgattaagtgaaaagggcgtctcgtttgctattaatttcacctttntagtcgagggttggaacacggaacaatggcttcattagaaattaaagtgccatttgatggngattagttgcaagcctcaagtcacattgcttgtgtatggttgcactgtgcgtgtgtactatgcagcatgtgtgtaagtgtgttacagtatgtgttgctgaccaattggtaagctgctgctttctgcttatgatgatgggaaacagccgtcaggtgtctcaattgcattac

SEQ ID NO: 31060 - DNA, 375 bp, Oryza sativa
  unsure (1)..(375): unsure at all n locations
gcttatggtgacctgcaactaaaaatagtatgagtaccactctcttcgtccctatatatgtgcatctatatgagaggacatgacatattcagatacgctagataatcttggcgctgaatctgactatgatacgcttttgcagggcactatgttccacagctcgcagagctaatctacgacgggaacaaaggagccagcagagacagagtcatcaacatcaaaggtttcatggtaagcactctcccgaaggaatccgggaataaaaagaaagaagaaaagagccggaccctcttatgcgtgcaatcatgctgttaagattgctactaagtgccatgcagacagcttttacgacgcanatcatgcttgaatgcttaa

SEQ ID NO: 31061 - DNA, 362 bp, Oryza sativa
  unsure (1)..(362): unsure at all n locations
tctacgacagcttctagaccttcaccggtgaccaagagctgctggtctcaatgtctgagcaggtggactatgttgaggggttcatggtgctgaacgagcagtcgctgcatagctccttcgttgccttccctgctcagctcaacttcagcccggacttctgctccaagggcaggaagaaaggctactactgcatcgagtttccagtgcacgatttccagcaagacagcttcagggcagaccatgtcagtctgctaatcctaatcacanncttttttcttgagagatcagtgcacctaatcaatttagcacagcaattatattatcatatcctaacagaaaacgactaatgggattcttgtgct

SEQ ID NO: 31062 - DNA, 295 bp, Oryza sativa
  unsure (1)..(295): unsure at all n locations
agctntaacctatctctttgagaggttttagatcttgttcttggttgagntgcgtaatcctctaagtgagctttgcatagagtctaaaatcatcaaaaacggactcccgagcaaaaagttatggtcattttactctgtgctttccggaagttccgaaaaattattggaagttccgaaaattccagtctttgcctccaacagctagttttttaagggctcgggtatataaactcctccaatccctctttgagaggctgctgttcttgtacagtattagacacattcaaagccaaat

SEQ ID NO: 31063 - DNA, 466 bp, Oryza sativa
agcttgtacgccagctgaaagagctcaaagtctttctttctatacaaaggacttccgtgaaatgcttggcttaccggctggtagcagtgtagagggggcacaaactggacatacaaaaacagtggtcgttactgcagcgacatcaaccccaccaccaaaggtgtttggtcgcgacgcggaccgcgatcgcattgttgatcttcttacccaacacaagacttgtgctgaggctagccgtttcgttgtctccattgttggacctggaggcatggggaaatccaccttggcttagtatgtttacaatgacaagacgatacaagaacattttgacgtcacgatgtgggtttgcatctcacgcaaacttgatgtccatcgtcatacaaaggagatcatcgagtctgcaacaaaagagaagtgtcaaaaggtggtaatatggacgttcttcagtacaaactaaaagaaatac

SEQ ID NO: 31064 - DNA, 440 bp, Oryza sativa
  unsure (1)..(440): unsure at all n locations
ctgcgcccaagaagcgaaggggtcctgtttcgtccgattctgtctccgtcgacgaggacgatgtcnaagagcgtgacggcgaggaggaaggggaggaataataggaggtcgaggtcgtggtctataaagccgctgacgaggcagtcgaataccgcgtcgacacccctggctatactcctaccccaagcccgggtcataatgagaccggcgtggagttgaacagctccncccttcatcgaaaggagttggatggggcgaaagtgctaattacgttttcggcaggcaaggcggcgaatggaggtccggtcaaaaagatttcccagaagaaaggactcgtcgacgtcgctcgcgttttcagcgacgacgagtcttctgacgagactccgacttcgcccgctggccgagtctggacttttgaccgccccgtctttacttgggct

SEQ ID NO: 31065 - DNA, 468 bp, Oryza sativa
  unsure (1)..(468): unsure at all n locations
agcttaattgaattgatgctccaagaccaactataccttatttacttccnccatttcctttntagaagtttcctctgtctcacattttcctcatgtgggattatcttcggcttctgatagagccagttcatcctctttctcacatgaagacacctttacaatggtttctattggtggtaaaagtaatcttggattgttcacccttttttacatattgatcatgcatatcttcttatattaccacctcaaccaatagcactagaatattttcactgttagtagaactcataaatcaacagttaagaattgctaaaaataaatggtagtagaatagtaccaacagagaccaccctanagatactcaaccattatattatcaagtgcatgtgccaactanataaaaaaaacttagacccgagtataatcagcttaacgggttagctactttctcgntttagcgagatatat

SEQ ID NO: 31066 - DNA, 229 bp, Oryza sativa
  unsure (1)..(229): unsure at all n locations
ttagagtacataactcaaggatgttatacgttgctactttgcttgtcagaatgctcataacatcagagaaacaagcatttgctgaagcctggctcagaactagtgcattgtcgccagcaacatatgaacgctggaagatattcatcangctattaactcgggggctgcatatcacatcagcgacttactggcgctaaaagaatggaacaatcagatgctgtattatcca

SEQ ID NO: 31067 - DNA, 135 bp, Oryza sativa
agcttatcaccgtccctccatgaatggattattcacaacatgttcgcctgctggccttctccgccggcggctggtatcatcatctacgcaggtggatggtcacaccaccaatgttgggagtttacctattcatca

SEQ ID NO: 31068 - DNA, 403 bp, Oryza sativa
agcctcgcgcgtaagaaattatgtttttttctttttggcaccgcccgaccatatatatgcatataatatatatgttcatcatgtcatagcgggatttatgctaactgtgtgaatacccatctatgttgcaggtgatggttgatcctgatgcacctaaccctagcaatacaactctgagggaatacctccactggtgagcactatataataactatagctagctacatccatctcagttaattatcaatcaatataattagcgtcaatttttttacattccatataataaattaaaccgatcattatgcacgcacgtgcatacgcatgcgcgagataagtggctaacccgctaaacccacttataagctaaaataagccgataatttaacctattaatgggtta

SEQ ID NO: 31069 - DNA, 165 bp, Oryza sativa
acttagtttacctcccccccagaggttgtctctgcacgacaaaaccactaaacgtcgcatgaggaagtttttacaaacacataagaccgtcaaagacaaaaaacccctttaaagagaccaactggcccaaaaaattcgtaacgcccagacataattggaaaacaa

SEQ ID NO: 31070 - DNA, 459 bp, Oryza sativa
atgcaagcttgatagcaagcacactggaagcttatattttgttgttgctaccgtccagaataattagccctaatttctcagagggtttcaagacaatcgatgattttatttgttaatcttgtgctgctgggacagcgactgggccacaggaagtaacgactttcttctttaagataatggattaaataaaacctgccttatacatcccgaaagatgtacgcacccgcagtattacatcaccacacacttatgctgacaaacaagtttcaaagcaaacgccgccatagaaggcacatatatgacaaaaacattcataacaagtctcacaacaaaaaaaattcagctacaattcaatcttccctacacatccgtcgagactttgagtagaattcataacgatactttcgattttggcacccattttcacagttcttgtgaccttttaagaacaaggacact

SEQ ID NO: 31071 - DNA, 232 bp, Oryza sativa
  unsure (1)..(232): unsure at all n locations
atgagcaaattagtgtagaaaagagaacaactattcttggaggaggatgagagaacaatgatgataaagacatatgagattgttactgagaagaggggaaggatgagaactataaagacaaatgagaagcctacggagaatgatagcttgatgaggagatgaatgacaatgaaaaatgangagaatagaggaatgatgagcctctccactataagcatgagcacaataatga

SEQ ID NO: 31072 - DNA, 368 bp, Oryza sativa
  unsure (1)..(368): unsure at all n locations
tatactcctatatttcaggggttacagaacactatgccctatgaacacacatattcctggctatgtaggctgctaactgcatagtaatatcaaatgctaaaaagcaatcgaacgagattaaattgtgtgttgggcttgggatgcatcacgagtgttaaaagctcaagaaactggccccacaagtaagtcactgtcattctttcctaagattcctccttttaactttcgtgctagtgatttacatgcttcattttatatgaaatatattttcctttgtatatatatccngcaaactgatgggattctcttttctctcagtaactgngatagctatcgcattctttgtccgagctgggaagcaacactat

SEQ ID NO: 31073 - DNA, 415 bp, Oryza sativa
  unsure (1)..(415): unsure at all n locations
gcttatgatacaacacttaagatttctccatcatcttcacacttttgtagntgagcccacagccgaagccaatatgttactctgaaaattacctgcatataggaaacatatggtgatttatcaaaaaccctatcatttctacacaatgacagagcccaacataaggcccgggcaccaacaagtatcaatttactcttttcctttgccaccccctgaagccaaccatcaaaaatatcagatatgcttatatgaaggtataatccaaaagaaaattgaactgctcttcanatcaactttacataatgacaatccataaacaaatgtngaatagtctcattttcaataaaaaacatttaaacacccatccaatnncatttgtagatatcctggttacacactccttagtagtacacat

SEQ ID NO: 31074 - DNA, 357 bp, Oryza sativa
  unsure (1)..(357): unsure at all n locations
gcttacaaggctgccgaggagagaaacttggcccactagaacttcacattcttatctttgtgaaatgaatggggtgttgacgaatggtggaatacgatatttcatgacattgattgatgatgctactagatcttgctatgtgtacttgttgaaaacgaaagacgaggctctagactattttaaaatttataatttataaggcagaagttgaaaatcaacttgacagaaagataaataggcttatgtctgatcgtggtggagagtctttctcaaacgtgtntgacttattctgtgaggaacatggcatcatacatgagaggacgcctccctattctcccgagtctaatgggattgctg

SEQ ID NO: 31075 - DNA, 332 bp, Oryza sativa
  unsure (1)..(332): unsure at all n locations
agctntgctacttcaccatccacgacatctactttgatttctacatcttggcatgcatcaccaaatatgatgccgtgttattttattacaacaagaggagttttaatcttcaatatttctactcggacatcttcaacatgcatcttcactcaagcaatgactactcgacgacaagaagctacagttctcgactctatgttcagatgtttcccaactaatcaaagagtctggggctacacaaatacaagactttaaaattcgacaaattttatgtcaagacaaaacaatcgactaatcagccaacgagttctatgcaatccacttcgggaatc

SEQ ID NO: 31076 - DNA, 445 bp, Oryza sativa
acctcatagatatctgttccaagaccagcaccaatataatgaatgaagctagctaatgatggtacttgtatgtgcctcttatatatagtaatcaatatgtgcgtggttttcctagtacatatatgccggtttgttataacaaccggcacctattactccttaaaactattaattggtgccgctctgtattttaaaccatcataaatggtgacggattttaatttgaaccagtcaatgaggcttagatggatgagaaatcggtcatatttgtgctggtttaagcgaacatgcatgtataaggacgttacatatgtgacgcagtgtattagtgaattattaaataaattagatgataactagaaaccaattagatctcttcttggaagtagactctttgattagtagtatatggacacttcagccaatcatttattaattcaacaca

SEQ ID NO: 31077 - DNA, 402 bp, Oryza sativa
  unsure (1)..(402): unsure at all n locations
catatcttaaaaagaaattattaacatgtttaaaattaaatatcagacatctgagttggaatcatatacctttaacactgtactattaagtgctaacatcgcgtgttaacatgggtgatagtttttccttagcatgaagggtctcagtggatcgcacgagagttttctgattctcccaggaatatattgatcaagatcgttcttctataacattagcgatgtttttccctttaaaaatataatcatgccttgggctataattaatccttcaatctcatactcaaaggcatgcagatccagctaattaagccatcaagctccataagaatcaactgtgactactgtcttatgtgaattntgtggaatcaacttccgttaactatgtaactactggagtattat

SEQ ID NO: 31078 - DNA, 438 bp, Oryza sativa
  unsure (1)..(438): unsure at all n locations
tcttaaactggtacatttgtatntcttattcaattattcattctatgttatctcagaattgnaaattgatctggattagtttgccacctattgcaaacagtatttaaggttcctcttatcagttgagctacagtgcctcaatttagctggcctccttatgtgttgatgggctgttatctttctataggtgacctttcatctttcatcgatctcaagtctgtatgtccaagacagtgctgttggttcctctgtggagtgtgatgcaaaggtccgtgttattagcgataacccctctgctgttctgttgctctccaatatcctttggaaaacaccagatcgttctatttcccatgacacatgcccattgactatatatgttgccagctcgataaggtaatcttttctttgcatcaacacaagccaccacacctttatctg

SEQ ID NO: 31079 - DNA, 302 bp, Oryza sativa
agcttcctatgtggagctatgtgattggtggaaaatttatacttctggtgaatagaggtccctttggtgagattaattctttatgtgagaagtgaggcttctttgtgttaattagccggatgacgaacccgacttaagtgaggggtgccacacggtattagccgatctaggtatctcggtgaacgagtgaatatacaccactttgtgtatgggtctgacggcaacatttatttacatattaccttttgtgtataaaggagtcaagctatgtatgttctgtgcaaccgtatattaaatatatg

SEQ ID NO: 31080 - DNA, 414 bp, Oryza sativa
  unsure (1)..(414): unsure at all n locations
agcttgaattattcctagtttcttgtttttgtatatttccaattgctttctggaagattggaaagtaaccctgctcactaacatgtaaatattaatgacatggtatcgatataatgccataagaatggtcggcatgcctgcagtatgcaagtatataaaacggatgtttgcatggacgctaataatcatttataaatcatctagaanaactatttctagattctcaactgcgcccatagagttcatttctttttcaaaagagggccagaacagtggaacttaaaaaattttcactgaactatcatgttccagaatacagactctaangaattagatgtatctgatatattacaggtaagcaggaatagataagctttgtgatatttttcanaacaaaagcgtgtgcgctctatg

SEQ ID NO: 31081 - DNA, 356 bp, Oryza sativa
accaaaaactcagctggcgattatgcttcgtcatgcaaacaagccacttttttatgtgatgaaaaactgcaccggctcattccaagtacataaggttttcttttattttatataacctgcagaacatcttgctgcttatactctattttaccgccccactccccagcaagtacattcatgtgatacccatcaggccatcatactcttaaatggcctataattaaacccaaaaataagctgacaaaccagaagcattctaagtaacgtgaattcatctgctaaatccaagaaaaacacagacaaacaattccttctccagaatggcaccaggaggcgagaagaaagatagaaagaaa

SEQ ID NO: 31082 - DNA, 434 bp, Oryza sativa
  unsure (1)..(434): unsure at all n locations
agctntgctgaagaaaggaccattagtttatatctcatattaaaaagtacttgtagtcctgataattggtgtgcggaaggagagagatcatactagactattgaagtaaaatcccactgttgtgaaataacaagagagcatcctgaaaaaatcaaagcgtcgccctagccgatggatatcacggctaagagtttgttcactattcccatttgcaactttagcttcaaattttgatatctgattaagaccaacatcacgccctttgccaacttgaatgtactcattataagttatatgtccacggcgcaatatggaattataccctgcagaataaatgttaaagctgcaactgcatatcaatttaatagaaagaatttgtttcaacagaagaaaaggttcaacttaccagcanacacgttctcacttaagttaat

SEQ ID NO: 31083 - DNA, 409 bp, Oryza sativa
  unsure (1)..(409): unsure at all n locations
ataanactcagctgcgggataggaccgcttgagattgcttttctttttaggcctgaagagagaatccctgcggagagggacccaacgaaattccgtgtctcaccaataactggngagctcattccaattagtgagatggaggagcacatgcgcatctcgcttattgatccaaaatataacgagcagaaagagcggatgttggcaaatattaaggagacaacacttgctcctgatgatgaagatctcaggaacattgtgggtcttgcccgtaccaggccagacatctttggaacaacagaagaagaggtctctattgctgtctaggcagaaattgagaagaaataggatgaacagccatagcacggtatttgtgatggccattctggtagcatatgtcgtactgtcacac

SEQ ID NO: 31084 - DNA, 391 bp, Oryza sativa
agcttgggagaaacacaagagaatacttagatggtgagaagaccaacaacaataagcccaacaacaacaagtcaaagggttcatcccaagggaggaagctggacaatctcaagaaggcttttcaacaagtttgtgccgccttcgagccactaagtgatgtagatggtgaaagcggagatgatgatatgggaaagaacatctccgatgtttgcttcatggcgtgtggtgaatctgacacagagtatgaagataatgaggtgagtgcttatgaagaagctattaatattttgagtgcaaaaaataagaagtgtgagaagatgtatagaaaacaagaaattatcattgaatctcttaaaatctgaaatgatagataaaatctcttattcctatg

SEQ ID NO: 31085 - DNA, 300 bp, Oryza sativa
ctcatccggagcatcagggcgcgagtcattgcttcgcatattactctaccgacagagaaaccagtttgtccaacgccatcatccttcaagactatggctgacaagacccttcgcgagttcgctgctccctctgctgagaatgtggcccattggccacagatcaacatgggagacgtggatttcgacttgaagtccagcctcgttacgttggcacaagctagcccgttctgtggcaagcctaacgaggatgccaacgctcatctacagccagtccttgagatcttgtacacgtgcaccatg

SEQ ID NO: 31086 - DNA, 304 bp, Oryza sativa
attataacttaagccaaaagtgtggctaagaaataaataggcacaattgtgatatgggtggctctaaatctaaaagacatgtggtttctaaggctaaaaaaagtggcatgactcaattgtgataagaagcaaacacatatctaaacataactcaagtgtggcgtgataaagtgagacaactaaccaaacagagtcccttaaaatattatgataggtttattgacccctcttaagtaaacaacatactctagtgccctaattatttaagtgagacatgcatattgctcgagtgctcctatcatat

SEQ ID NO: 31087 - DNA, 386 bp, Oryza sativa
cggaccttaagtcacctgcggcatgcagcttgtaagtcaccttatataacaaatcagttgtgtatggatcagacagatatccttcttggacttcagttaaccagtcaggtatacatactgacaaagcacatgcttgaatgtgatcatcagttgagcaacgagacaaagcatctgcagctctattatctaacccacgcttgtagactaaccgataattcagtcccaataatttcgtcattgccttctgctgccaaggcgtagccaacttttgatcaccgagatgaatcagactacgctgatcagtacggatgacaaactccccaaactgaagataagagcgccagcgatccactgccaaaagaatagctagacactccttttcatat

SEQ ID NO: 31088 - DNA, 460 bp, Oryza sativa
  unsure (1)..(460): unsure at all n locations
ttcgtgtattttcttccacatgatctctatttataaccaagtctaaatcgntcatggccatgcacaagctgaattnttgtatcaataagtacatggcctacacttgcctangaaatcaaaccttactacccggcttcactgaggttgcatggatgaaaatagatcagatagtttctgattcgatccacttaagaatcgaactaaagtgaggatatataagtatttcctataatcagatagaattggattaaggcattgtattcctaaaatccaatggatgtggattatcccatttttttaatacggattatatatgataaaagggctatccgataatacgccattttaggctactccatccgtcttaaaatataacaacctatgtntagatgggacacctagtagaacgtatctggagagaaccttattcagatacaggatacgtctcatccaattctaa

SEQ ID NO: 31089 - DNA, 463 bp, Oryza sativa
  unsure (1)..(463): unsure at all n locations
agctntctactctgcagagcctggagtacagatggaatgattattccaagctggataagaccaaagcctccataaacaagctggaatccgtgatcatcgtgacttcacaaggcgcaactaccacattctctaccattggcagggagcgtgacaatgagcttgcaccacagcttgtcgagctttggttcgcgtaagacttgttccctgttctgacatctatgataccagattntgcgacattgtgtgcaaatatttaaattgtatctgaatattgatatgcacgctgttgagcatgtggagatcaatgaaccatttccatgagatccagaatgaaattgttcagcaagtccgtggtcttgtagacaattccatggctgagtcacatctgatcttaccggcttgcacccgtgatcttgaagctgtgtctcacatggactcaacttcaccgtttataagtataacg

SEQ ID NO: 31090 - DNA, 427 bp, Oryza sativa
  unsure (1)..(427): unsure at all n locations
gacaataattcccagcagcgaattttattgaagacatgagacaaaatgaaagattccaaagcctacaaaatcttggtgagctctctgttaaacttgtcgagacaaacaatgtcctctatgatttggcctatttgctccttaaattggtattgatcctaccggtggcaacaacaagtgttgagagaatgttttctgcattatgtctagtgaagaataagccgagaaattgtacgtgtgacaaattgttgaatgattggttaatactttcattgaaagagatgacataattaacacttccatgggtacgagagctcatagagtagaanagaagtagtactggaatcctctacttatgtaantattnttatattcggactattactggtatattntngcaatttttntgactcanatgccctatttatcg

SEQ ID NO: 31091 - DNA, 396 bp, Oryza sativa
  unsure (1)..(396): unsure at all n locations
atgaattttctcccacatgtgcaactgttttatttatttatataatttcttanaattggatagtttggccaaactacatcaacagcagagcactctagagtccagtggatgtaccagaatatatttcaggtggatgcttactttgcatttctagtacttttgtagagtttgccagaatcaacattttactgtagtaatgtgatttgtatatgcacttatgtgttataataaatgtaggacgatcaagtgccttatggcagacggacatgacagcaatcaaatactggggtcagatggtgccatntcaggtttctttctcantttagttactggtaccattttagggtctgacttctgagctctaactccgaagcagtcccaccatcagctcatcag

SEQ ID NO: 31092 - DNA, 350 bp, Oryza sativa
  unsure (1)..(350): unsure at all n locations
ccaccatccattgtgatctcaaagataatatccctcattgagtcgtatagttttatgaagacgtccacattcccgcctcttaagaagtggctccatcagcataaaaatcatcatgccatatctcatcccacacaagcttaagaatttaaagtctagcccagtataatacatgtcccggtgctcaataaccgcgagcacgggtattcgaatagaattggcctactcaccctgcagnggatgtacactgtacccgcactccgcgactgcccaacacatgagcctcgtcccacacatgagacgcgtcacggcaaagcttttcgataacctcgcactgtcagtacccgctccat

SEQ ID NO: 31093 - DNA, 289 bp, Oryza sativa
tgtggaagctagctgatggcaacggtggcattctattattttttgtagtaggtggaggctctcacctttgaggaggaggcactcgctccatgtcctcgtttgtggtggtggagattattgcgtattctcgccaaggatctggtcccatgcagagcctattgagccgcgtggtgaagtcaataaagtgaaatggcccctcttgtatggagcaccatggtgttgagaagtgatcatggaacatggtataagagacacaacgtcagcgatggggacaaaggaagatgtgtgg

SEQ ID NO: 31094 - DNA, 394 bp, Oryza sativa
agcttcatcgatccaagcaagctaagccatggttctcctacacagtgatcgcatggacagcctcttctccccacagacgagctgggtgagcggcccgatcatcgtgggcgccgggccgtcagggctcgccgtggcggcgagcctgcgggagcaaggcgtgccgttcaccatgctggagcgcgccgactgcatcgcgtcgctgtggcagaagcgcacctacgaccgccttaagctccacctccccaagcagttctgcgagctcccgcgcatggcgttcccggcgcactacccggagtacccgacgcgccgccagttcatcgactacctcgaggactacgccgccgcgttcgacatcaacccgctcttcggccacaccgtgctctccgcgcgctac

SEQ ID NO: 31095 - DNA, 433 bp, Oryza sativa
  unsure (1)..(433): unsure at all n locations
agcttgactaccgaagctgattttttagtaaaataatatatatttcaaggataatctttaaaaaataattaatttctagctcatcatattaatagaagaggaaaaaaagaataaaataaatatataatgccaatacaagccatacaaataacatatttaatctcctaatttattaaataacaacaaaaaccatttattactatgctcgttagaagctcgagctcggctcgacgaagctcgcgagctntgggagaggctcgggctcggctcgtctggagctcgagccgagcttgaatcgagcctangacgagtgtggcagtagttgtgggagtggcagtagattcaccactcactatcaccagtactcttctttattggaccccacagtactctccatttataggagtatagatggggcaccgtagatctatac

SEQ ID NO: 31096 - DNA, 459 bp, Oryza sativa
  unsure (1)..(459): unsure at all n locations
agcttcctttccggccactgcgatgggatcctatgtggtggatccgacctcgttcttgctggatccgtgcggtgcgacaagggcggggagcagatcatcagacgactacctctacgacggcgacgggttgtagtagtcgtgatggagtgtaacaacgacctcggcagcgacaggttgcggatacagcgggtcatgcagcggcggggtgtagtggccacgaccgagtgaagtcacaacctcagcgtgggcacgtattggttctctcttggacaacataaacccatcttctctctcctaaagccaccataaatcatagttacctctgcaagcttctctgctaccctacgagaccacttcaaaccttcagcgtggtatccgaacctagctggaacttgagaccacagttataaggtaccacgttctacatggcctaacaactntattcgtatagcaatctag

SEQ ID NO: 31097 - DNA, 403 bp, Oryza sativa
  unsure (1)..(403): unsure at all n locations
actgtcgacagccacgactttgtcttacccacatcgcataggtggaggaggaagagccggctctgctcttggcacacgcaagcatcgagctacctccggcggcaccggccgcaacggctttcctccaccttgattagctgaaggtactcgtctccctctgcaacggctccagcaacgacaaggctgatgggtggtacctcagacaccggcgcctcccatcacatgaccggccgacgggagttcttcatcgagtttgactccagcgtccgaggctccgttcaagttggggacgcctccggcgtggagatcaagagcggtggctncgtcaccttcaccgncaagtccggtgagcacaggctgctcaccggagttcactacatccccgcgttgaggaactctatca

SEQ ID NO: 31098 - DNA, 375 bp, Oryza sativa
  unsure (1)..(375): unsure at all n locations
agcttatctcttacgctccgggaatggatcagtcagaacatcaccaccggcttgctgtcgccgccaccgactagagtcctcgcctatacgggtgggtggtcacaccgctgttattgggcgtcgttgtcttcaccgaccggccgcctcgttcgccgccgattggtgtcttcgcctacatggttggttggtcacgccaccgtntgtgggcgtctacactttcactggtggcttgccttcgtcgccgccgactagtgtttccgcctgcacggctggcctattatgccgncgttgatagacgtctacgtcttcactgaccaattgccttcgcacctcgtatgatgccaactggagctatcgtcttcacagctggccacg

SEQ ID NO: 31099 - DNA, 414 bp, Oryza sativa
attcgggtacacctatgcctaagaccagaattgttacgaatcctcttcatattagtcctattgatcttgacaacaagaaagtagtgattcagtctagacaaaccgaatctacgaaagggaaaagtgttattattggggattttcggcccgagacaatgaaaatcaataatgtgaaagctgaagatcgtagggtacaaaagatgagtcatctatgttcaaccagaccacaaagccgatgctcactcttgagatgtttatggctaagtacacaaaatgattagctggcaacgaattgaatatcaactattgattcgaaagaccagatcatctcgaggaagagattggtcaacacctagcatcggaccatcactattacacttttcaaacctttatttacaccgggtatcatatcat

SEQ ID NO: 31100 - DNA, 318 bp, Oryza sativa
  unsure (1)..(318): unsure at all n locations
tgggccaatattggcattaattgataaaaattcgctgcgccactcaccgaatgaattttcgacacagactcacccaacagactccaatatgtccaaaaatcatgttttggtgattcttgaggtttttcattccggtgaaaaacatcgcacctacgtgcgccaacatatgccaatattggaattaattgacaaaagtttgctactcaagtcacggagtaattttttgacaccgacgcacccaatacactccagtatgtccaaaaatcatgtgttggtgctttttgaaatctttcattccggngaaaaacatctcaccca

SEQ ID NO: 31101 - DNA, 339 bp, Oryza sativa
  unsure (1)..(339): unsure at all n locations
atcatgatggtactgcatcatgntgttgatgatggcgaactgagcattaacagattggtgccattcttgtgtttgagctatgtgttccgtgaggttgtactggatctcccctgtctgcacatcaagggtgtccattgtcctagtgaatttcacccagtcccaacgagaggaacttgagcaccattcacttggagatggaggcacaccacttgatctagagggttggttgtccccccagtggatgtcatgatgcgcatgccaccggtcctcactggcgcttgaccaaggtgagactccgatgctatggcgtggagcttggatccatccaagtgcatccct

SEQ ID NO: 31102 - DNA, 239 bp, Oryza sativa
  unsure (1)..(239): unsure at all n locations
gtcatccacgatgacaccgacgtcttctacattttccctcagcacaacaatgtcttcctcctcaacgcctnctgccaaatttgcaataccgccagcatactcttcttcctccaatctcatacggngttcgctgacctcccaccactattgttgcctcctacagacggtctcgctgaccgccacccctctccttgtcggcgaactcttggggaagagagtgggaggtggatacattggga

SEQ ID NO: 31103 - DNA, 327 bp, Oryza sativa
tccgttgaaatcagtgctgtctccggaggccgaatttgattgtaaaactcattggactttaatatcttgtagatcctccattcatccaatgtattctttggcaatgttttatatttctcatgcttggttgtatgcatatacttgatggtcacatcaccgttggtgccgaccgcaccaactcttgagctccatcaacctcggcgtcttccccaagctctcctccaagaccaagctccttctcggcaataaggccatggctacctctcacgtgtcgagacaatactggctctcatggtcggtggtccctccctagtggccggtgacgtg

SEQ ID NO: 31104 - DNA, 366 bp, Oryza sativa
tataacttctatatttaatgttttcgtactaaacatatcatctagtttgaataacatgctaacaaaactgaaaaacgtgctaacaaaactgaggtaaaatctacttcatatgtttacgagaatagaacaagcctgagtctgtgatggttctgttggagatagaaaaacttcgagttcacaaagttaaaatacacgtttgtctccctgcgcaatagaggaagcataaaggaaaagacacgtttgtttcttactccctgcgcaagagagaaggagtcgagagttaactcgaccacctccaccgagtcccaacgttcaggacttcggagcgtgtcgtcccgtgttcagatttccctcattacgtcaatc

SEQ ID NO: 31105 - DNA, 359 bp, Oryza sativa
  unsure (1)..(359): unsure at all n locations
tgcgatggtggcacactttacgagaggagaatgatattgaagctggtgtaagaacgtaagctacttgattccgtggcaattagctactggtatgtgatataaattcaattcaatatcataaactaccacactagctaactatatgccacgttatgcatgtcacaacattntngttcataagccttctcttactggctaggtgtggtagatagtctgaccgcgtgcaaggagatgcatcttctcaattacaagattagagtttaagactcttttcatttaatgggttgggtttggttgaaggtcgtcctaattctgagttaaatgtgtattgaacttggtttgttgtcggtatgcatcat

SEQ ID NO: 31106 - DNA, 403 bp, Oryza sativa
  unsure (1)..(403): unsure at all n locations
ttgacactcaagaatagcttcgttctgaatattctgtagcgtgtcctcctcagacattgccttctcttggatctcagcttcacgttgcatatatgccaccattgctcccacattctttgtaacatccctcatatcaacttgaacattggcaaagacatccataaaagggtcacttgacaagagatttntcaacctgttgctcgctttcttcctcttactaaagcttgaagcagtcgaatcgatgctctgtcgaagtgtggctgaatcgatgctccgtcgagctgcatctgaatcgatgctccgccgaggcatttctctagacactctctcttcatcctcctcatactgttcatcttgaatatactgaacaattactttctccatattatgaacagcctcacca

SEQ ID NO: 31107 - DNA, 374 bp, Oryza sativa
  unsure (1)..(374): unsure at all n locations
gctgcccgcaggtacaccaaacacacacttatcggtgttcagttntatgcgggcggagcggaggctctcaaaagtttccgctagatctgaaagtaacgtttcctggttgcgcgtctttacaactaagtcatcgacataagcctcaacattacgtcctaattggctacccaaagaaattcgagtagtacgttgaaaagtaggacctgcattctttaacccgaagggcattgtcgtataacaataagttcctatgggggtaatgaacgcagttttttcctcatcctccctagccatgcgaatctgatggtaaccagagtatgcatctagaaaacacaaaaggtcggaccccgctgtggagtcgacaatctgatcta

SEQ ID NO: 31108 - DNA, 472 bp, Oryza sativa
  unsure (1)..(472): unsure at all n locations
ctcagcttgctagcaggtcaggcccctcggtgagaaccctngaacctctagctctcacatgcatgcacgcatttagcgagtacatggccgtagacacacatgcaccgtcacccaaagataccttccgctcggactcgccgctagcgcaactccggtcaccaacgaccgagaaaagtagaggaatggaatcgcagtaacattctcttcattttgtcttttgggcgcacccccaaccaagtcaccgtttgtcgccggcgccggcgagcagaggtgccgctcatggcggctctactgctggatcgatagagaaggaatcangacttcactttgaaaatttaacaaattatanggtctgttatgcaaagatacaatacacacaacactgtagcaggagctactcgaattatataagaatatgaagtactcttaacgaanactgaagtaaacatgtgctgaatnggtgaaactacta

SEQ ID NO: 31109 - DNA, 322 bp, Oryza sativa
ggattcttaagcaccgcggctgcagcttaaacggcgccatctgtagactggcttggtagctgttggtgttcgagaattccgcatatggcaagcttttgtcccaagctccaccaaaatcaagagcgcaagctctcaacatatcttccaagatttgattgactcgctcggtctgaccatcagtttgcgggtgataggccgtgctgaaatttaaacgggtgcccatttcttccttgcacttctgccagaattttgaggtgaactgactccctcggtcagatacaatctttttgggtactccatgtaggcacatgattcttgaaag

SEQ ID NO: 31110 - DNA, 470 bp, Oryza sativa
  unsure (1)..(470): unsure at all n locations
tcttagcnaagtatccttctgcaaagccccttgtagngctttcgaaaggggatttatgtacttggaagagggagtttcagcggtggcaagtggaggacataccactatatgatttctattctgttaaggctgacaaaagagtagagcaactggaagtcctcaaatcttgggaagcccagatgagcatactatntcttggatacaagcagttctcacgaatcatctgtggtgatggagatggaaacattgcagctgcgtgtcgggacaagctgcttatggtacccaacctacttatactagacgagggtcatacaccaagaaatcgggagacagatgtactggcatcactaaaaagagtccaaacaccacgcaaagtggtcctgtctggtacacttttccagaaccacgtttcggaaagtgttaacatcttggaccttgtgcgccctaagtttctcaagaatgaatcatcc

SEQ ID NO: 31111 - DNA, 420 bp, Oryza sativa
gcttgcgacgtcaccgccaccgcttctatttttcttcccgaaatgcaagtatgcatcgtttccttgccgaagtgccattcctccgtgcagggcgacgccggctaatatccctgtgtactctccatcccccatgccgccgtctctccacctccgcacggcggcatgggcgactaaatcgactgtgttagtggcgggcagcgacggcagagtcacataagtatgcagagaggtggaaacgtagctcgcatggaagtagatgaaggatgaagatgcggcgatgcaaagatatatgaatgccacggcattggttggtctttgccttctccactcatccgtccatacaaaatcaaaccgagaaaaaaaattttgcaatgtgaaaggacaatcttacccttccactctatttatgacactaccacc

SEQ ID NO: 31112 - DNA, 412 bp, Oryza sativa
cgccatcctcatatagccatactcgatcatctctgtattgtccggcaacaccgccttgacagcgtgcagcgcgacaaaccgctccattcacgccgccaggagagggctcctattggcgtctaagagcttccttccgaacaggacctcgccggtgcgcgcccagccgaccacggcgccgagcgtgacgtcgaggtacccggcggtgtcgccgccgaagaaaggcttccccttggacaactccttgaacgccgtctccaggttctcgatcgcggcgagcatctgcttcaccggcttcgccttctcctccttcgtgaggcccaacgacgccttctgccacgcccgcatgaactgcgacgactatgcatacacacacacacccctcatcatcagctattctctcctgatttctctg

SEQ ID NO: 31113 - DNA, 452 bp, Oryza sativa
agcttggaagaattggaagtcgaatctcttcaccgagtttgtcaacccgcccggcaatcatacgccgttcgatgaataccctcaaataaccgaagcggtgtgggaggaattctgctctctcaagaccacccaagagtttagggaatcaagcgaggcacatcgcgtactgcaacagcggaatgagcacccgcatcggctgggcaccgcagggtacatcggcaaggaggcaatatgggcccaagaagatgcagccgctgcagcagcgaatgtccctgccccgttttcagacatccctgaacaaagagctcgcaactgggcgcgggcaaggggtaaggtcaacccggacggctctgtcacatttaagaacaaaagtgatgccgtcgtctatcaggaactggtgagttcactactcaacctaactaatttccgttcgtataaagtacaagttcgta

SEQ ID NO: 31114 - DNA, 380 bp, Oryza sativa
tataagaaaatatagcaacatttccacacaataaatatactacttatatatatttaatggtgaatttaatgaaactaatttggtgctctatatgttagtacacttacctataaacttggtcaaacttgaagaggtttgacttgacaaaaccgaagtgacatataatatgaaaccgagggagtatttatgatttatgcgtttttcatatgggcgattatcttaattgctcctttcagtttctgaattctttgattccctccaggcacaacctaggagatctacgggtccatcttctgttcagcctgcttgttttctggcatttcgatctgaaacagccgtactgctcttaaggaaagcacacagagacagagcccttggaa

SEQ ID NO: 31115 - DNA, 354 bp, Oryza sativa
taagcgactcagcatgcacttataatctaccagattttttttgttgctaaactcttctttgaaagtaaatgattccggacagaattattcggggggcgcctaaataacacttgaattgagagtgatcaacttactaaaggtgctttcagacaaggcaagctcgtggaatttttgcacataacggcacatggcctgataaacacaccaatcttaatttcaccaataccaccttcaccatctaccacatcactatcaatattggagaccatctccctttctaatgacagaacaatcaccggggctccttgtaacaataatatcggctctgctaactacaataacctaaaacagcaa

SEQ ID NO: 31116 - DNA, 451 bp, Oryza sativa
  unsure (1)..(451): unsure at all n locations
acacatgaaactcaagcttacaaagagaagagaanagctactagagccatacctcaactttttctatagcttcggactcctgaattatactctattcctattccaccagctagatactactaaactaaacttgagagaaatgagagagctattgcttgaagtgtgtgtgtgaagtgaaaagaggagctccttttataggcaggtaatgatatgtgtgacggttggaatggtccgtaataccctccaaccgtcattggtgatcaatcccagccgtccatccaaaccctgcatccatcggcgccacgggaagttcggtcgaaccatggactggtccaacccagcctatcttcggctggcgggctactttgttggccttctctgtagacttgtgaaatttggctcaatgtgtcgtgttattctgagtcttatcccatcatacataagcttgttc

SEQ ID NO: 31117 - DNA, 364 bp, Oryza sativa
  unsure (1)..(364): unsure at all n locations
agcttgtttacagtttgggccgtttcggacctacaggtggtctttntggtcagcaacatagaataacttttttaagtaaactggtaacatgattgtactttgttatagtccggtgtcgatagggaaatgccccggatcggtcgctcgggagagggagaaatatcgagcgctctcttcccccacgcgctgcctgtccttggctccaccacgtctctgctctcatctgccatttatctccatcatatactccattgcaacaaattacctatgtattntaaaaaaaatctctattaaggaaatttggtttattttttattccaataaaaatatttcatttagtgcacttacaatgtttcattatgta

SEQ ID NO: 31118 - DNA, 401 bp, Oryza sativa
  unsure (1)..(401): unsure at all n locations
ctcagctctcggntcttggtctctgtccgaggcattgatgttcaccttcttaagatacgagctatatagcggatgcgcccccccagcaagcttaaggatgtgcaatgcgtcacaagctgcatggccgccctaagtccgttcatatcgaggctgggagagaaggcactacccctatttaagctactcatacgcttcgggccgtttacctggacggaagaggctgaacgggccctcactcagttgaaggcatacctcaattctcccccggtcctggtcgccccggagccagatgagccgttgctactctacctggcggcgaccccgcatgtggtcagcgcggcgttggtcgtggagcgcgactaggacaacccttactctgcgcattcccaccctgcgtcgac

SEQ ID NO: 31119 - DNA, 386 bp, Oryza sativa
atgagagagagagagagagcggaagaggcgagctctaaaaccctagttagagccgccgccttcgcccgtgttccccttatcccgcgcgccttccccactcggggcctcgccgcgcggggcgcgccgtctaccgccccaccggagctccgccgtggtacgtgtcctccggtgcgccttcctgttaatttcaggactcgttgttcgattcgcgagctactaggatcgtcgatgcgccctcccgtgctttggctagactttggttgcgaacgtattgcacgaagcagcagttgccgatgaactcgcgccgcgctgccgcctggagctcgcagcttgccacgcattgccgtctctcgccgatgcgtagtagcttcagcgttcagtatctt

SEQ ID NO: 31120 - DNA, 443 bp, Oryza sativa
  unsure (1)..(443): unsure at all n locations
agctntgaagaagaagtcttatgtggagtcttgtgttacaccccagttgagcgcctgtgaagatggagccgtaggcccgctagtctgctgctgtttatttttgattgtcaggccttaagtgcctttgtaataatgtaaatattatcgatataataaagatgtgtcttttatatcatgtttgtatggtgtaccctggctttttctaggacggggattaatacactagcgttcgggaaaatgcaattttctcggtcgcgacaagatggtatcagagccatctcgactgtaggataagccaagtggataaaacctaaggacatattttataaataaaactatntgcgaaagttcctttttttctccttcccctaatgctattngcaaaatgtttactcccttcttccttcttcggatttcaattagtactaattggtcagctttgt

SEQ ID NO: 31121 - DNA, 413 bp, Oryza sativa
  unsure (1)..(413): unsure at all n locations
tcattttctcaagatccaatatgagacattctctatgttgtctcatgaaagngtgaatgatatgtatgggaggctcaatatcattataaatgatctcatagggcttggggcaacctacactgatcttgaggttgcccaaaagatacttatggctctaccagacaagcatgagaccctattcaccatacttatcaactccgacatgtctagaatgacccccacaagcctcttgtggaagatcaacactaatgatatgtacaagttgaagaagaaggagatggaggaagcatctccatccaagaagtgcgttgctctccaagccgaagtggaagataagagcaagagcaaggtgaatgaagcanatgataacttggaagaagagatgcccttcttgatagaagttcaatgatcta

SEQ ID NO: 31122 - DNA, 206 bp, Oryza sativa
gaatgcttctcctgatgctttggcttaactcgcagcagcgcttgtgctcccggaagggaagcccgctcaaatcatagttgaagagaaatggttacttcctgccgtcttggagctgatcccggaggaatatgaggttaatcatgtcatgaccgttgatgacaaggaggatgattggaggaaacctttcctcaattattttaaacatg

SEQ ID NO: 31123 - DNA, 475 bp, Oryza sativa
  unsure (1)..(475): unsure at all n locations
gagtagtaatggaaggagctctanaagtcttattagctgttttaagtatgatgaactatnatggacaagtttcacctgcagggcattggtaaagttccattatattatatcgtgcaatcgacaacataaaggattatatgcgctcaaaaatataaattaaagaacagaaaaaacgacagatgggcattgattcattcaattttacttttcagagtaaccggctacatctatcttacaaatatttgatgcactatcacataatagctcacaactgtacttaaataactgtaaacaacttttcttcttggtgttntctttattatgtttggcaaactgaagacaacttctcatagtgcctttagcaagaataatngattaaaaacttgctgattaattcagctttgtctcaagccacaccaaatcatctcatatcctgggttacttatatgagcaaactatagtactattcttctct

SEQ ID NO: 31124 - DNA, 399 bp, Oryza sativa
  unsure (1)..(399): unsure at all n locations
ctgcagcttattaaaataaaaattataaaaatttttactatatctaccttggngcccccattaacgatagtactagagattgccaccactaagctaattccggtctatgagtctatccaagtgcttttacataaaagagcattgtgagctctgctgataatgacatagatttcggcaaaatatggtaccaaatgctaatgcctttcctgcaaagattctgattctaggagttgatagatacctacantaattttaggcttaactttttttcaaaattactcttcaaattgttgaaatgaantttgtgctctacgctcctaaaatatattttctcaaaaaatattctattgtattgacactcgtttaagtcattattaaatgttaatttatacttacatc

SEQ ID NO: 31125 - DNA, 426 bp, Oryza sativa
tcacattaacctgtcatacacacgcatttttttttttttgattgtcaatgtcaaccaatatccagactttacgctgaactaaacacagcctactagttggctcaatctaccgaacaaagcgtcacatgcaattttaaacacatgtatgtagacattaagataaatgaaaacacaaacttattgcacagtttgcgaggaaattatgagacgaatcttttgagcctaattagtcaataatctaccatatgagctacaataatccacatgtgcttgtaacggcttaattagactcaaaaattcgtctcgcggttctcagacaagctatacaattagttgtttcattcatgtcagaagacctctccgacatcggtcaaatatgtaatgtgacacccagatatattcttctcgcgatataaacagaacctg

SEQ ID NO: 31126 - DNA, 352 bp, Oryza sativa
  unsure (1)..(352): unsure at all n locations
tcttgcttgnnctatacactgaatattntatattttgaggggtgagagggtgggtttgtatgcactgatttactttactatttttcaccttgataaggtgactcatgtagaacctgcccattttactgtatccaaatgaatgcttaagatctgtgaaattaaagttaaaagtttaccctataaatgttaaaaagtatgcaactagaaaaaagatagttaagagtaataaatcagaaggaaaaggataatattttctctcttatatttatattcttataaatttagctcattgatctggatcatctgcctacaataatttaagtaaaatctgccaaaatgtcttgagtgactt

SEQ ID NO: 31127 - DNA, 455 bp, Oryza sativa
  unsure (1)..(455): unsure at all n locations
tatacttaaatgcaataagatcttgacataaatggcggatttaacatgtcactgaagcatatagagcgaatatggttaaatcagataagatcggctgaaactccgatactaccctaatcggcaaccagaatgcaggctagagattgatattctaagcacgacttaatagatcaaactcaactgatgcagcatttagtatgaaaggaagaacaatatctagacaatcaagccgctggaagtttcatagagtggtggatatcttatataatctaaatcaacatcaaaatctaacctaatcggctgccctctactaacatatgttagccgattgtaggttagatagtgatattgccagagattatgtacgatatatgataactcgacgaattacgtaaacaagattagagtatcataaagatgggagcactaatcccngatgcacaagccatcataac

SEQ ID NO: 31128 - DNA, 457 bp, Oryza sativa
  unsure (1)..(457): unsure at all n locations
agcttctgatngcanggagttgcgtggactgtcttgccttcagctatgtttctcgggtttgggcacttgtcggcgaaatgacccattccttgacaattgaagcaacagatgtcttcccggactcggcattttcttttctcatttcgattcctctgtcctggcactggagttaggctgaaacggtgatcttggcggggatttgtgttgccttgatgctcctctccgttggaactggcgggttggttggccatcttctttgttagcagaaaactgaattgacaatcttttggtacatgaccagttccttcacaaaagaaacaagtgatcctgctcgttggacacctgtcgggtggatggtctttctcacaatgaacgcatatagtggcacacgagctggcgacatgaccgaattctccacaacgagagcatgccttacgttccatttcatcttcatcat

SEQ ID NO: 31129 - DNA, 425 bp, Oryza sativa
  unsure (1)..(425): unsure at all n locations
ctttcaaagatgttgtcaactttatgttgtacgcatcatatantgccaagcagtcggtatatcacttggatcatattattcggggattcacaccgcatatgctatatattggtatcaagtcacttggttgactataattattaaaaaccactcggttaattggataatttattccttgactatatgtttaagttgttcagctaatcacatatgtgggggctacacctattatgtgcatctattcgatgcacctgactttatttttcagccctccacagtcttcagatttggtaaaagtactcgcgagaccatggcgaagatgattgaagcactcggctttggagtatctagttcgagagaggttatctttccgactgtgaaggctcacgggctactgtggagaatatgggtaccccatacccaca

SEQ ID NO: 31130 - DNA, 440 bp, Oryza sativa
  unsure (1)..(440): unsure at all n locations
agcttggctctgcaagtcgcaagattaccaatgttntttcttattttatattaanataacaaaaaggagttcatagtagggtcatagaaagtgaagtttcagtggaaacaaaagaccttaaaggctgaaaagaatcagccttaactgacagccagcatgaatatggggaaatacctgcaaaacttggtttttaccgccatgaactggtaagatgaggcctggagtgttaataatggtgagattaaggcaatgcttggattctatccttattataatttctttttctgaaaaattggaaggatcattctccaacctcatgatttcgggctttatgtatgccttgaaagtaatattccttataaatgtcgatcacctaatgcaagaacagtccaataacctgatcttttctgaattctaaacttgtaagtgataattatgaa

SEQ ID NO: 31131 - DNA, 408 bp, Oryza sativa
  unsure (1)..(408): unsure at all n locations
ctcagcttgcagtataaagtgaaagctgaaataaccctactncatttcgatttgttcatatatgaaattgtctaggctaaataataaatagcaaagaattttaaaggctgaaaatagcttaatcaaagtactagtgctggcgacctggcgtaatatacaaagctaccagagtagtaaactgtaaagtcccccctgtgcctgcgcgaacacgttccccgcgcccgttaaccttgccgccgtcctccttcccctacgtcacactgcacacggcgtatccagcgcgccgccgctttaaaatatattgcgcgcagccagcttcgtctgcacgccaactaacgcccctcgcgtataaacgccaccgtcaccgcgctcttctctctctctctgttcttcgatcgatccaagaat

SEQ ID NO: 31132 - DNA, 485 bp, Oryza sativa
  unsure (1)..(485): unsure at all n locations
tatgaatactcagctggggggccgaaaagcacttcgccctcgcgtgtcgaattgtatctggcgaagcacgccttctctgggctggatgccggggcgaaccggtcctggcgaagtcgtccttcttcggcatggcgaagtcgtccttcttcggcgtgcactcgtgcgacccttcgcctcgcatcatccttggctcgtggtcttcgccatgggtttcggcagattcggtcgaagggactcatgccatccgccaacaaactgtttgagagaggttaccgttaaatgtcttagcctactattcaatacactgatttgtttcgttccctacctgtttgtacctgtggcagcttgggagtataccangaaggaggatgagaccgtatagtggagggacgtgatcgagccatccgtcatggcgaggttcacaatgaaagatggcaccttcgcctatcctgagtactacgggtgacctccgcgttcagatgaac

SEQ ID NO: 31133 - DNA, 436 bp, Oryza sativa
agcttgtcaccttttatatgccttattctttctccagcccaagccattgctgtcaagaggaggaggaagagaggtcataccaaaattttttgctaaagtattttggtgatattacacaaataaaaaatatccaaaaggttagcaacttcatcctctatttcagtcaaaaaaaaaacttcatcctctattgatgtatggttaacatattacatttctagctatgttttcatacgtcattctctcaaaaacgtttacagaaaaagaggagacaataaatttgacgagaaaataagagcaataattttagagacattggatgaaaatgtaaaacaagaatatcaaaggataggaaatgaagggaaaaaagaaaactaagtcatttaaaacactaaatagtagaaataagagaatacttaaagtttgttatatttttaaa

SEQ ID NO: 31134 - DNA, 439 bp, Oryza sativa
  unsure (1)..(439): unsure at all n locations
tcattctcattntatacaaaagagntaataataaatactccttctttggagtatatggacatgtggaaccaatccacaacacacaccatatataccaattatatgggtgtgaggtactacaaaccatgtacgactgcaaataacgaacccacggaatgatcaatgatgaacgtggaatatgacaatcgaccacttttacgagaggagaatatgaggctagcttaattggtgacgcactgtagatcgagctggaaattaaacagtgacctactacctaacttggaacaagtaccttccgattattatgccccacacacatcacaatctatagtcatgctaactaaggaattcgtacgtgtctagaattaaccattcgaattttgtgattgtgattgatcaacacacttgacacatccaattagttatgtactgcatgtga

SEQ ID NO: 31135 - DNA, 405 bp, Oryza sativa
  unsure (1)..(405): unsure at all n locations
agcttcaactctgctgaattagtttgcactttcttctttacccatatgaaattatgtgctgactacatgtaggcttttgcctgcatttgcattatacttagtattaacatgaaatgctcagttgttatttatttatattccattgtagaacacaacacagtgttgtaattacacatgactgtctggttgagtttttctctacataattgcttacaagtcttacaaatatttcaatagtcatcttgattcccatgtgtcttgttggacaactgagattaaccataaacttaattaactatagcatcctaagtgagtccagctacgattagtagaatctatggaagagaaggaaatatgtaaagaaacaatagctcaattttgtagtgttnttagctatgtttaatg

SEQ ID NO: 31136 - DNA, 445 bp, Oryza sativa
  unsure (1)..(445): unsure at all n locations
actcagcttatgaaaagatacaggcaatgtctctatgccatgctcttgttatttcatatcaatattgtcctttgcctgcattcgtgtgatctatctgataatagatccagacttctactgagtgtatacaactagccattggggcgtnttaatgccactcttggattctgatacttgcttttaatggtattcagaatttctgtggaaggtggtctttcaaatgtgcaactagatgcccttgaaaacatgcattacagtcacatggtcagatttgataacattgaagaagcgaagtaagccactgagcacatactctgcacatagaaagtacttaatataacctgttctaaaatatattctataacttcaggagactgcagcacgaaatagacagcctgaagagaatgtctgatcaacatgaagcatgggatacagttagtgacta

SEQ ID NO: 31137 - DNA, 427 bp, Oryza sativa
tgaagcatgcagcttgcgctctgcccctctcgttattcgtttggcctgtttgcccctctctttctgccttgggtcacctcgccgtgcgacacaccgtctgtcatcgtcagacatcattcgcaggcattcccgtatggcgcggcgagccttgtctagccccatcagagaaaacccccaaaaaggttagttctttttattctgaaccctaagtctgtacaccctattcgccacccccatttttggttgttgatttggatttcctttgcggttctaagaacaatctgtttgcaggtcgacatggatccgaatcctcccactggctttcccaacatgttcaatgacccaaatctggtcaccaatcttggcaaatcttcgagccaacctgcctttgtccatccccagttcatgttcccctatgctcatttac

SEQ ID NO: 31138 - DNA, 399 bp, Oryza sativa
actaagcttcatgcggagaatgtatgctaaacaaccatgtcggttttgtttattaccaaccccaacgggatctggcctgtgagcgtattgaaagacagatcaagaattgtgagttcagacatctccccaattcatgtgggtagatggccagacatgttcaccgccgacagctgcatcacctgcagcttcccgaacacgcagcgcggcagccaccgaatgacctccccctgtcgcattgacgctgtacaccggcagtcgacgacctgctgccaccaaccgctgcaagttgcaggacatgccaccatgcatttcctgaggttagccacgagattgcatattccgacgcgcagaatacccggacagggttcccgcatgcgaggtcgtagcgtcgcgcgtcca

SEQ ID NO: 31139 - DNA, 448 bp, Oryza sativa
  unsure (1)..(448): unsure at all n locations
agcttaggcctgacggnactattgttaagttcttgctcggcttggggctaagggctatactcagaaagaaggcgaagatttctttgacacttactcacctgttgctagattgaccacaattcgtgtgctactttccctagcagcctcacatggtcttctcgttcatcaaatggacgttaagacagcttttcttaatggagagctggatgaggagatctatatggatcaacctgatgggtttgtagttgaaggtcaagaaggcaaagtgtgcaaattgttgaagtctttgtatggtctgaaacaagctcctaagcaatggcatgagataattgacaaacattgacatctgcaggcttttgcagcaatgaggcagataaatgtgtgtactatcgccatggtggaggtgagggagttattctgggcttgtatgttgacgacatactgattt

SEQ ID NO: 31140 - DNA, 456 bp, Oryza sativa
cttcctgcgagacaaatttgttgtttcttaccggaacgttcaggtgattgagtagagatattgggcctgtagcacacaaattatgagacacaccaaccttcacggtacatggtgttgatgattacacaagagcgaatctccgcaacatatgttacgtccacgcaagttcatgcactaccttcatatagaacttcatttcggatgcaatatttgttcacatctctataaagaattgaactccacataggctgagtttggaagaagaacacttgagaatttaccataggatctaacatgtgggaagcatctattaccgtgacaatcaaactgtgaacctgtttacatccaaccattgaagagaatatcaaccagcttgactgatctcacagacttatgagagagaggtgtgttacatgcacaaagagtatataagcaccaacattcataattctaagc

SEQ ID NO: 31141 - DNA, 347 bp, Oryza sativa
  unsure (1)..(347): unsure at all n locations
agcttaacacgntcgaatctagggttcacactgctattgnatactccctcggtccctccgtccctaaatatagcaacttttagctatgaatctggatacacagttgtccagattcattgctaanaatgcttatattttaggacggaggtagtactaattagctttctgttgtcccatcccaacgcttctacaagaactattgctgtgttcggacatcanggttggtaacacatgtgctgcgcacggaaaacggagcggtctattaatgcgtgattatataagtattacatnaattttttttcaaaaatgaattaatatatatttttaaagcaactttcgtatatata

SEQ ID NO: 31142 - DNA, 398 bp, Oryza sativa
  unsure (1)..(398): unsure at all n locations
tagatatcacagaggggagcttctatggcattgctttatttatantattttgaaggcctagaacacattatgtatattgcttttattgctcaaaatacctgcgacgattacattctgatgcgatgtacagtgttaaactttctccaactcctgtgcatgcaggacatctcgtgtcatatacattccctgatgtctatgcgggatgctgctcgtgttgcctgtgtgtctcgggcgtttgcacgttcctggagatgccttcccaacctcgacttcagtgaggaatcattatgaataaatagaagtacatgcaaaaaagatgagatactgggagatatgaccagcataattgattggattctgaaaaatcactcacgcattggcataaagagactcatcat

SEQ ID NO: 31143 - DNA, 420 bp, Oryza sativa
  unsure (1)..(420): unsure at all n locations
tgaggcatgcaagcttngacccaagcctttctggatgtgatttatcgttccctcggactgtgaatcgaaggtagggttgtctatgatcacattgaggaagacccaataattgcgcttcacatcatctacattgaaggtaccctcctcatagtgctcattcaaaacgttcatcagatgggtggtaatcagctccgtgacgtaatcaacatgggttccaccttttagtgtctcaaatccatttacaaagctgacctgcaaaaccataaaaaacaggagttaaatgcagcaacaaccatggcatttaactaagaagctaccctgatatatacataaccaaaacatttacctgctgaaagtgtgcatcatcactcaggctcaaacagaccttacaccaatcatttaacttctcgtaaactctga

SEQ ID NO: 31144 - DNA, 415 bp, Oryza sativa
  unsure (1)..(415): unsure at all n locations
gctttacacagctcggagaagaaaggccggatctagccgtacaagcaaatggattacatccttgttcagattctcaggatagacccaaatccagaatccaccattgctgcactgttcttgctgcacacacatttggcacgagctgattatcccagtagcacaagatagagacgtccattttgcaaggatatatatgcattctttgagctggctctactctacacctctccatatatcctttttcttttttgctactaattgattggttggtcgtgtgccatttttactaagattgcagcaatcattatctacatctcgatgctaatctttcatagatcatattgatgatgagataacagacgatgcatatgtatatcttgcatgcatcagaatcatggattncgcatgccttttt

SEQ ID NO: 31145 - DNA, 383 bp, Oryza sativa
cggcattgatgaagacacagtgaagcacatctgctcacagaccgttacggggaattgtgggagacactgtcgaaccaccgttggctgtcccgtacgcacggacaagcccagccaagcgtgctcccagcgcatggacgggcttctattttcccagcccaccacacgctcgtagaatggaccatgtccacaaagccaatggcaatcttcactcgagcagaaggaaatctctcactgcagcaacacatcagtcctagggaagcgtaatgtgcccatggtggtctctctccacggtagaccagcaggagaagaaacaggcaactacctggtccaccatgaacgctgcacatggatcaaaaaaaattaactacttcgatgtggaccga

SEQ ID NO: 31146 - DNA, 400 bp, Oryza sativa
  unsure (1)..(400): unsure at all n locations
agcttatattattataaaactaattaactattttttatntttttttaaaaagaggattaatatgattttgtaaaataactgtaatatatatctttttaagattaaattgcactttggtccctcttttatttcccaagtttcaatttggaccacccttaaagctatctttttaatatagactgggtaaatctaccactgttacggtttgtactatcataaacaacttttctcatcatgtataacttccctttcggcaaacatatgaaccatatatagaggagttcggccgcatactagagttgattgtgttaagctcgttggttgtactgaaaaaaaatcgttcgtggtaatccaaaatacaacaataagaaatttattccgtccaaagtaaaaatatatg

SEQ ID NO: 31147 - DNA, 454 bp, Oryza sativa
  unsure (1)..(454): unsure at all n locations
catgcaagcttagatgcatgtcagtgtaagagatgcattctgaatgtcttattgttganggcacgangtanaagtacgagagttntggcttcttacacaatgtgagtaagatttcattgccaattcctacacatccatagttgcagaatttctaactccctgactcagattcaacatatacgacacagcaacaaatattgcaattatacagattaaacacagaatatcaaatccataacaatttatgctatcgaaaaagataaacgcttaaatgctcaaacagttaaccaaatagaaatgaaggagagttcccaaaaacatcagacccattatttctatcacattccacagtagctaccgaagcttttatatgagcgtgccaaatatgctgctacaagagaatcttccagtagaacctgagtacacctcanacaaccatgctggacagagaata

SEQ ID NO: 31148 - DNA, 455 bp, Oryza sativa
ggatgctggcaatgactcttattccttatctcctgtgaagacacaagagtccactcgtccccgaccgggaatcatcacatgtaaacacgctatctgaaatcatttcaatccaacagactgtatttgattgcttcatctttattcatgggtacactatggcccatgattggcgatgaagaagagatcctccggatacgagcagctgaggattcgcgccctcccattctggtcaagtgtggggatgacaacatgcaacctcaagggatcgtaataaataagcaaaaagaggacgaagagttatgcctactgaaaaaggcacttggtcatgcaacccgcattgtatatgtaagctcttttgcgcctgatctcaaccatactcgttgccatttagttcaagcgctaattaaactgtcttgcagaggattcatcttacgaatgaagctataacgacaacc

SEQ ID NO: 31149 - DNA, 332 bp, Oryza sativa
gaccttgaactcacttttaaaactcctcaaagggtgaccccttatctcaaaactgcgaccatagactaacttacatgagggtgtctgacaacacctccacctataatacattctgccggaaaagtctatattatggacgtgactctcgacagatattaccaggtataacaaaaggctcagcgagcctacatatgtgaggcatccattacgaatgcttctctgtggcgacatggtgatcttcttatgctgacaatccatatgagacttcgtgaccgtgaccttggagaacaaagtcgcgcacaacctacggacataggtgactggcttctaga

SEQ ID NO: 31150 - DNA, 336 bp, Oryza sativa
  unsure (1)..(336): unsure at all n locations
gtggttgacaacatccatgtttttttttttatatgcactggaacatatctatctcaccatagatcttttctgcataataagctactagggttgtcttgaaccttggatcaagaaagcaatctacagaaataaccatattgcacttctcccaatatttatcatacttggctttcattntagagcccatagcagctacaattggatcaaaattgatgcaccaatcagctattgcaagcttaatttgacagaaattagtaaaaaacagattttctgttggatatgtagtgccagagaagagcaaagtagcatcataaaatctttttagacatgtacaca

SEQ ID NO: 31151 - DNA, 419 bp, Oryza sativa
ctaagcttaaaaggttatatataagctaattttttacatagtattgttttccctagccaactatacatttaactacttttgattgttgattttggttaagaactttcctatatggtctattagtttagataagcttttaaaaatgtttgatataataagttttttttttacaaaatacaagccaactacaaatttaaaagtaagttgtactatatgtttataagactaaaagcctcatgtctcttctctattagaccgctctcttttttatcatgtggttataaggaggtacacaagcctccggaaatttccatatgtgtagaccatttgtggatattttaatacatgtaccttttttgatcaatggtcattgtttatccaaaccctttatctaacggctaataaatctatgatgatat

SEQ ID NO: 31152 - DNA, 264 bp, Oryza sativa
ctcggcgccgctccgatgaacttcaattcagagaatcctgaggtgaacaactaattaacatcactattgactctgatactctgtaactgatgtgctctactaatcttgatttcctttttttttttttttttttgcgatgttgatggtggtggcagaaaaatctgtgtgaagccgccgtcaatggaacgctcaacgcgatgagatcgtgcgcgaaagtatggacggtgaagcgcgtgatcataacatcgtcggacgcagcgatct

SEQ ID NO: 31153 - DNA, 445 bp, Oryza sativa
  unsure (1)..(445): unsure at all n locations
cagcttgacgcctccttttggggtntatgactntctatcccattgcaaaaagggtcttacattgactaaaatatatttatgatgactaacattagattttgtacatactgatcttgttgaaagatgctacaagaaaatatgtgcttgattggccaacaaggttcaaaataatcaaagggatagcaaaagggcttctttatcttcaccaagattcaagactgacaataattcatagagatctcaaagcaagcaacatcttgttggacacagaaatgaaccccanaatatcagactttggtattgcaaggatttttcatggtaatcagcagcaagcaaacaccactcgagttgttggaacatagtaagtaataactagtaattagcccactagatagttntcaacactctangttntattgactagttaaattcaaactgtgaataa

SEQ ID NO: 31154 - DNA, 380 bp, Oryza sativa
  unsure (1)..(380): unsure at all n locations
agcttgcccgcggcacaccgaactcgcacttttctgtgttcagntntatgcgggcggagcggagactttcgaaagtttccgctagatccgagagtaaggtctcttggttgcgcgtcttcacaaccaagtcatcaacataggcctcaacattacgtcctatttggctacccaaagaaattcgagtagtacgctgaaaagtaggacctgcattctttaacccgaaaggcattgtcggataacaataagttcctatgggggtaatgaaagtagttttttcctcatcctccctagccatgcgaatctgatgataaccagagtatgcatctagaaaacacaaaaggtcgcaccccgcggtggagtcgacaatctgatctatgcgt

SEQ ID NO: 31155 - DNA, 429 bp, Oryza sativa
  unsure (1)..(429): unsure at all n locations
ctcagcttatccttttttggttaaaagcctctattccctgtcgactgttgcgttgatcagcttggtgaaatcatcaaggtaaattatatcttgcttccatcgaaatcactcccttnttgttggttacctcctacttaactgactattctctcaggttctgggtacccctacacgagaggagattaagtgcatgaacccaaattacaccccgagttaaaattttcgcaaatcaaagctcacccatggcacaaggtagaagaaaataatcttatgttggactgtttattttttattttaaggttgaaacctaatgtagctttcctttntttttaccaccagatcttccatataagaatgcctgctgaagcagtcgatctcgtctccaggcttttgcagtattcaccatacctncggtccactgctgtgagt

SEQ ID NO: 31156 - DNA, 448 bp, Oryza sativa
agcttatgacaatgcgaacgaagatatcaattaacttcactcaaagcaacgatttggaccacctcttttcctgttcctggcattattcatagctcgagcaattcggttagcaaccaaagccaaatcctcatcctcgatttgttcgagttgatcatcagatgtggcattaaaagcagcaagaaaagagggcatagatgaagaagcatcaacaaccaaagaggaagaagaagaaaccaaagcactcgatttagaatcaactttgcgagagagaacattcatctcatgagttttcaatttagtataaagtgaatccaaagtcaaagtagacatattaacagactcctgaatagatgtaactttcatctcccaaatagacatgtcgagaccattcaaaaagtgacgagaaatctcagattgtggataattagcatcataagaagaatcaaca

SEQ ID NO: 31157 - DNA, 480 bp, Oryza sativa
  unsure (1)..(480): unsure at all n locations
tcgcattgcattgatatcaagactaattacgtgttatataatatatagcagcatgatttgattacgtgctctgattataccttcgattggatcagttgttgccgcttgctgggcatgaacagcggcgatcagccatgatgagcacatcacgagcaacacccacaccagcttaccactaacaccacccatctctctctctctttctgctgccgaaacaacacggaagcttgttaaatatatagatggtgtgtttgtacgatgcaactatatgcaaagggaggctctgtattntanggcgctcatacgtactctctacgtctcataaaacaccaatctaaaataggacgagacatatattagtacaacgaatttggatactctctctgtctgagaataattacagccctatagttcaacacttatttttgaacgtagtgagtaaaaatatgtccaaattcgttgaatagaatatgtatcatc

SEQ ID NO: 31158 - DNA, 412 bp, Oryza sativa
agcttaatatcccgcggaaaaatctctatgtttgaagagcgaagccgccatagaagaaatgcgagaagactacgatctcatgtgtatcaagggtcggaaaagcctcaccgcacgctggccgccatccgatgatctccttggctgggagaacgccgtgcgccaccatctccttcagggtctctttcgttacgtcggacggcgcccattggccttcgaagctttccttctcttccgccatcgattctatccgaatgcgctgatttgattcgagggatggctagggagaaatgagggattaaggcggtggatcacgggaaggattttgatgcatttttccaaggtggatttgagtggagtggtgaaccctatttcgccggcgcagttctgcactgtatcaatgagtggggaaaat

SEQ ID NO: 31159 - DNA, 436 bp, Oryza sativa
  unsure (1)..(436): unsure at all n locations
ntctctctcttccgcctgaatgtgagctgaatggtctaatttggtccgagatgtggctggagagggatggcgaatctgtgcggtggacgcgcggtgaaatttcttggagtttctgaggatggattggagtggattgatgaaccctatcttcttcggcgcgggtttgtactgtagcgaggaatggggaaatggcgagagtctccgcgaggaatacaaagcgtcgcttggacttcggagttttgttatggtatcgggagtgctaatgggcctgggcctgtacagtacttcatcccaatattattaccagcgtggcccgttatgatccctatggacttatgcgctttttgtttggcaattngtcacacaatgatgtgacccgatgttgttaaatcctttttacgcggntagataacttcttggaatactacgacgcaaa

SEQ ID NO: 31160 - DNA, 405 bp, Oryza sativa
  unsure (1)..(405): unsure at all n locations
agcttgttactctgtaccaaccaactacttttataattttaaactctcctaaacaacgcatatatatggggaataagttcactttgactcttttaactagtggtcgaatctgatccgtatccctgaaccataccggatatctcgacccccccccccacacacacccctttaaaacgagtgcaatttgactccctcggcgattttggagagcggtttcgctgacgtggtgactacttggtgttgcatggcattnagaattaaaaaatattgagataatccaaaaaggtgccattgacaaacgttcaaatccaagaaatgccattgacaagtgtgaattccaagatatgccatcataaaatcgatnttgtctcacaaatgccatcaccgttaggattccggtatccc

SEQ ID NO: 31161 - DNA, 501 bp, Oryza sativa
  unsure (1)..(501): unsure at all n locations
actcagctgagcactattgaggcccatcagtctaaattgatcgtctctangctcacaagattgaacacttagcacaacttgaagaatgcaacgctgagctggacatggaacacaaaatactagccgatctcccaaagtctattgaaaaacagaaagcaagactcaaatcggctatcaagcatgttgctgatctgaccaagtctctgatagttatccctggaaccgacgctcaggatgcccaagccatagaagaagtagagcagattaggcagaaggctatatcggccatccagcgatacttatctcaataattnttgtgtaataaaacttagaattnttgtaatcggctaatactttactgtcttaacaatcctttgtgcccattaatatgactttgaaattnttgcactgcattttgatatatatgtgcncnccagttntacaatgtcaagagcattngatataatatataacaactaagggcgatataaacatatcggc

SEQ ID NO: 31162 - DNA, 367 bp, Oryza sativa
  unsure (1)..(367): unsure at all n locations
tcgacccggatcttaagtcactgagctgcagctgactcctgccgattgtgttacccccgttacatgcaattaagcctattgggaaaaagatgatagagtcgagacactcaatgcagaagggagagatgagacatccttccacgatcaccaccctattgcacacaggaccatgatagagctcactcggaacttattatangtaagcattcctactatatacaagtcttctcaaatggggctctaaatggtgtggatcactngtgttggaatatgggagaaccaatacaacgcctacagcgctgattgagaagcaatgctttactcgaggtaacggcaatgatcttgtggaaatctgcgctctttacta

SEQ ID NO: 31163 - DNA, 380 bp, Oryza sativa
  unsure (1)..(380): unsure at all n locations
tctgtgagacaagctgcatgcacatggtaagcctttcatcttgcacaagcacgcatgcactaaatattctaccgtaactaacaaagcaaagtggacagtcattcttcaatttccatgcctttatattcatcttctgatatgggcatcacagattcatgggtcggatcaatatgcatgatcggcaaacggattgtagcagttcccgtcgtnttctgaaagaatggaaatagccatcatgcgattcatgaccaaagtttgctccatgccagttctccatttggtcactgccacctgaatccaaccgtaagttcatgttaccactttcgtcatcccctcattgcccatgatcatgctntagccatgtcagcataccaacatgc

SEQ ID NO: 31164 - DNA, 392 bp, Oryza sativa
agctctaaatctaccggtttacctccctcatcaaagtcgagatgcccgttggttgccataggtgtcttaatgggcttcgcatcctccaagccaaacctcttgagtagatccttgatgtacttggtttggctcacgaacgtcccattcttgagttgcttgatttgaagtccaaagaagaagctcaactctccaatcatggacatttcaaattccctagacatcatatcaccaaattccttgcaaaatacctcattagtagaaccgaatatgatgtcatcaacataaatttgatacacaaagaaatcatcaccaatgatttttgtgaaaagagtgatgtcaacttttccaattttgaaatcctttgacaaaagaaaatctctcaatctttcata

SEQ ID NO: 31165 - DNA, 414 bp, Oryza sativa
  unsure (1)..(414): unsure at all n locations
ttacggacacttagatactcaagctctgattgcnggagttgcgtggactgacgtgctgtgcactatgttctcggtttgggcacttgtcggcgaaatgacccattccttgacaattgaagcaacagatgtcttcccggactcggcgattttcttttctcatttcgattcctctgtcctggcactggagttaggctgaaactgtaatcttggcgaggattggggttgccttgatgcttctcttccgtggaactggcgggttggttagccatcttcttcgtcagcagaaaactgaattgacaatcttttggtacatgatcagatccttcacaaaagaaacaagtgatcctgctcgttggacacctgtccggtggatggtcttcctcacaatgaacgcatatagtggcacaccagctg

SEQ ID NO: 31166 - DNA, 384 bp, Oryza sativa
ctagaacaatatatatagatttatcttttaaagcactataataaaagtaaacatgtatttatttattatatatattataatagaaaaataaggtcaaagatatatcttgtagaccgtgtcattgtccaaaatgtcaattaaaataaaaccggagggagtaccacacaccaactaattaattcaagtttaattcgaactcaatatttttttattcgcggtgacgacaaactcgatactctctcggtcgtctcaatatgtagtactccctatgttttggacaaggttgaggtcaaagttttataactttgaccatcactaactctaaaaatatttagtttaaagaaactagaacaacatatataaatttgtctttcaaaacactat

SEQ ID NO: 31167 - DNA, 445 bp, Oryza sativa
  unsure (1)..(445): unsure at all n locations
cctcttncgcagctctatcatcatgtactccacatggatttgtttacagtcctagaaacaatccagcagctcttggaactcagggggtacctgcttcaaaatcgattcagactatgagcggaagccatacattgagccattccattaatgatgcaaataagtaccaccttagcttaccaggaaaccagataggagaacttgtgacaaaggttntggcatacatcgcttggtgcagacccataatgcaacatgaagtggatccatgaagaaaccgatgatctgtccaccatcctttctgggaatggcctatctaatggtatgtctggcacactccaaagtgtcacaagcagtcctttgctgcctcaagaactagccgagtgcacacaagccaaaattgtcagtcagccatcaattcgaacttcctctgtaaagtcagaacatattg

SEQ ID NO: 31168 - DNA, 375 bp, Oryza sativa
  unsure (1)..(375): unsure at all n locations
agcttatggagacaatcacggaattctggagtacacacttttcttgttctgcatacaattcagactggttctgtgtgacaggtgctggctgctgcggaactacattttgngaagtcataaacatcgtgtcttgttcatcacacatcaatgctagtgttcctggagacattggcctattggatttctgatcatcattgcaatcatgtttagactcttctagagaagctntgcctgcacgagttcctccagttgatgggtcatcagctgatgccttttgattatttggatcattattgttttcttctctgtcatgggttgtcgatgctagggaacctccaatctcaccttccctctttcctcccatctcatctttct

SEQ ID NO: 31169 - DNA, 398 bp, Oryza sativa
  unsure (1)..(398): unsure at all n locations
gcataatatttacttactagcactactagtatcttcatgttatcataccacatcaacccatcgaacatataaagctcaacatttaaacatatagtaattatgcctataaattattttattctaaaactaaacaaacacatgctaaatcatcattatcaaatcattgttataatatttcaatctaaatcatgttatcatttctccaatatgtaacatatatccgtaacanaagcacgggacatcatctagttattatttgcatgtgtgtgagggtttgaattgctcctataaaaaaagtgttgaattgtagtggctaatgtttgagaagtacaagtatgcaggaatactagccaatagccagttagtcgcgtgactttggacgcctacaaaatagtggg

SEQ ID NO: 31170 - DNA, 433 bp, Oryza sativa
  unsure (1)..(433): unsure at all n locations
agcttggacagcctttgcaggtgaatgcattgttatatatttctttaccaaaacaggatatggacacatgcacattagtttagttacatccccccatctataatattgtattgcatgagtatgttataaatntaaacaatttggtaaaagaaaatatgcccagaatcattatcaagaaaatagaagttgcagtgttaatttaaggaaatgaaagaaaaatactcttcattgtgtagtctaaccaggttataattgcacaagactccaaatgaaaattagttataaataaccgatattcaaatagaaatattttaaaagtaagagcacgcatatgcgatctagacatagctaaactcagaataaaaatagaacaaagtaaaagcattgcagtcgagttgcattatagtgctaagaaaagagttgacctcattta

SEQ ID NO: 31171 - DNA, 411 bp, Oryza sativa
  unsure (1)..(411): unsure at all n locations
ctaccaggtgtgccgacacctgcctatctctcttcgtggcgagacgtaagaactccgataggatcagtctcggccatgtaatcgatacaaaactcaatggcttcctcggtcgggaaccttcaatgatgctcccctctggttttgctctgttccgaacgtaggacttcagaattcccatgtacctctcgatggccacaatttctctcataaaagctggcccacatanttattggttgcttcactaggtgaacagtgagatgaaccatgatatcgaagaaagctagtggaaaatacatctccaagtgacacagggtactgacaatattagcctgcaacccatctaggtcttctggatctataatcttctgaccgaatgcattgaagaaagcacacagccgttggatcgtgtga

SEQ ID NO: 31172 - DNA, 437 bp, Oryza sativa
agcttgcaagataagttgaaacagttggaaactatgtctctcattttgaacttttgaataacaggtttcaaaagagataaaagaaagttataaaatcaacatgctaaatttattttattgcagcaagattaaataaaacaatattgtaaaacttttgctgataaatgagccattagtacagtaatagatgtacagtactaataacactggaataaattttgaatgagaaccattaaaagagattatgaagtgcatgtgccattagtttggtttaattaaaagagaaagggaggagaacagttctacttttccaatatttttagaggacttctatggataaccatttggcataacctatggtcaaggggctctgataccaacttgtcacgcccggaatttctatccaaaattccaaacgcttacatgtgtgtgaaccc

SEQ ID NO: 31173 - DNA, 402 bp, Oryza sativa
  unsure (1)..(402): unsure at all n locations
tctcttactgaagaggggagggatcgagcaagaatgactactttcacttttctcttcaagccacaccggcggatgcataattaatgcaagggacgtacaatggaataatcatagggagtaatgtttgccagtaaacagcatttagaaagcacttatctgcccaaccttttttaagacgatcctatagctacacagtattattaaacaatggcgtgaaccctcacgaacctgccttaacccaaggcctacgatgattcggaccgaactggcaacccgacctgtgtttcagctcgtnccaagccaacccatgccaaccattccatattttagttggtgaggcaaatttaagaattaaaacactgactcgtgtacattgctcggcttgcccatatccgaaggctc

SEQ ID NO: 31174 - DNA, 290 bp, Oryza sativa
ctcgcagcgaagccattagcaaagatcggccgctgttatctctgtattatccatttgctccgtgacgacatgacgttgatgactgtcgctcttgcagacacagatcatatatatcggcagcaaaaaagtacgtagcataacgctcgacgtctgtgttaaatcaccccctgtaattgacgattcatgagtcgacaagaggctcgagatagcgaaacggtgggcgatcaattaagctatgaggatagcctatgcctaagcggccaaaatccaccgcgcaattcacgatatat

SEQ ID NO: 31175 - DNA, 395 bp, Oryza sativa
  unsure (1)..(395): unsure at all n locations
agcttagatatcacagtgttagctttctatgttattgttttatnnatnnattnntgaaggcataaaaaacattatgtatattggctttatggctcaaaatacctgcaacgattacattctgatgcgatgtacagtgttaaactttctccaactcctgtgcatgcaagacatctcgtgtcatatacattccctgatgtctatgcgggatgctgctcgtgttgcctgtgtgtctcgggcgtttgcacgttcctggagatgccttcccaacctcgacttcagtgaggaatcattatgaataaatagaagtacatgcaaaaaagatgagaaactgtgagatttgaccagcanaattgattggattctgaaaaatcactcaagcattggcataaaaaaac

SEQ ID NO: 31176 - DNA, 409 bp, Oryza sativa
gtattcttctcctagtctattattgttgtcttagcaatgctgtaccatcaacagttctctattaaatcctgataacagagagcaatctcatcatatgtccgtttcacaaagactgttgttctagcattcaatttttttatcaaaatgtttgtcattctcatgttcccatgcatttttatcaaaatgtttgcattgtggatgccaacagtcaagagcataaggggttcaagctctgaaccacacaatttatgatagctttgggacacgtttgggatgaactaaatgagggtaaccatgtcattttccacaacttctttgtctgatatttgctagatcaagaatctttgtgcaacggaggaagtattattagctaatgaaagaattttagcatggaactggcataatacat

SEQ ID NO: 31177 - DNA, 441 bp, Oryza sativa
  unsure (1)..(441): unsure at all n locations
agcttatcgccgacatcaatggcgccgagcttattcgatcgctctaacccaataaataggaccccaagctcacttacatctatcatcggtcctcatagaccacaacccaacaactctgaagccctgttacagccatgcaccattcccgcatccactaatcgccgatcgagcaccttgtgcgcgatcattctcacacctatccatccatctatagccctaaccaatcacccaaacaccttctagaagtcatgttctagcatcctgaagctgagccggagccttgcatcatcgttcgcctcgccgcgctcggncgagctccgccgtncctgctctgccctgtttttgccgccgagaagttttcccggccgcaactcgtcgtctcggctctactcggtacgcccttttcgttatagcatctacataccactaacaagccatttt

SEQ ID NO: 31178 - DNA, 458 bp, Oryza sativa
  unsure (1)..(458): unsure at all n locations
tacatcaatcagtatctagtcttctactgcattatgtatcttatattcacagacatcaggcttagttaactntaattntaaaatttttaaaaactaacaaagacaaagacagtattttgtctttgtctttgtcaacttttataattttcctacatattaatcaagttaatgcgctatcttcataatagcaactatgaaatcatattatttaggtcatagccctatgttctgctggttttgtattttgtcggtgtttgtcttatttgtctttgttagattttaaaatcttgctacatattaattaagctggtgtgctatctaaatgttagcaactataaaatcatattttgtttntgtttttgtcccgttttaaaaattagctacatatttctattngtgttccatactttactaaagttaacataaatttttttagtaatttctgagttgcccaattt

SEQ ID NO: 31179 - DNA, 433 bp, Oryza sativa
  unsure (1)..(433): unsure at all n locations
agcttcactgcggaannnttntattattacatttagacacgcgaacaccatactcacaaaccagcaaatacacctcttaacacacgtccaaatagacagaatcacaacatatttttaagtcttacttattttttattaaaatcacacatacatgtacgtaatatttatggatatcaggagttaaattctattggatgaaatcagatattcatgacttaaccaccacactcctacttgtacttcactccagtgaaagttaagtctttggtaattgcatcagctagtacctagaaattcaggtgcgaaattcacccccaagacctcttggcacgacaacaatgagctgctgaattggaatcacctatttggtagcctttgattttgcaaggcaggactgacgggtcgtgcaatctgaatagtactcagctggagt

SEQ ID NO: 31180 - DNA, 422 bp, Oryza sativa
ctcagctgtacgtaatctatgcatgcatgctcaacccgatctcatgttatctgacctaaagggactatctcacatcttgccagcggtaagccctgataatcttggtgtatagcattattagaggtgtttagcatgctgtatcatttgtacatatggtatctgttagttattgtcaaaatttatcttttcttttttttctcttttgaaaaggtgacatctatttactacttcctccgtttcatattataagactttctagttaatgaatcatctatataaatatgggcaatgctagaaagtcttataacctgaaacggagatagtactaaactatataagtataactacagtttgtccaacctatgttatcatgctacatgacattgttgattccactacaggtgttggaaagaataatggat

SEQ ID NO: 31181 - DNA, 439 bp, Oryza sativa
  unsure (1)..(439): unsure at all n locations
agcttgtgctcgactgcaatgccgatggcgctctcttcttcgaggccttnctgcccaccctcaccgccgccgactttctccgtgccggtgccaccgccaagccgcacaagtcctggaggaagctgctctacagagtccacgccgccaccttcgtcgccgtcccgccgctcgtcgtccaggtacttatttcattcatttcgtatttattatctcgatctggacgacgtcgctagctctacttattaattatatatcattcattcattcattaacgacgaactcactgatgcactatctagatactacatgattgatgctatatactattaattagttgagtttttgctttaagattatctatatggctgctgcagacagtacagtacatcgatcgaactagtgcgtgctggttgaactagctagcattgatattcatcat

SEQ ID NO: 31182 - DNA, 340 bp, Oryza sativa
  unsure (1)..(340): unsure at all n locations
actcagcttattcttttatcaatgattcagccaaacccatttgtgtgtggtcatatggaacaaagtgttgaacctgaattcccaatgccntacaataatcatcgaaagcatgggatgtaaattcngcagcattgtccatacggattgattgaatcctatgttcagggtaatttgccttcagccttataatttgagacattaatttggcaaaagcatggtttcgtgtcgatagaagacacacatgagaccatctagtagatgcatcaatcagaaccataaagtacctaaacggtccagatcttggcacaatagggccatagatatctccttgaatgcgttc

SEQ ID NO: 31183 - DNA, 220 bp, Oryza sativa
  unsure (1)..(220): unsure at all n locations
agcttgataaggncaagctgatcaaacagcatttttacttgtcccaacacaccatctctgttcaacgaatctaattcggagaaacttggcctaaccacacaccatctctgcgggtacgtacctacccgcttgggattcctgctagcgctcgacgaatatactatctgccatcacactactaatggttgggtaccagactaaatgttctgaattccaacaa

SEQ ID NO: 31184 - DNA, 355 bp, Oryza sativa
agcttaagcctgggggagatattcatatacctatctaagttacctaatatcaaaataacacaattctggttaaatgatgaagatacagtattcagagaatgcaccacactcaaatagtaggcaatattagtcagagtgcttgatatgtactaatttacaaacaaccatttcataatgaacttattaagcatggctagtattcaagtgttctttctgaagagcacacctttcattactgattgccacaaagcaccttgatcagcctgagacatattcatcacattcttactgttgccagtgatgatgaaggcagcctgcacaagaaaaaagattactctcgtgatcacactccact

SEQ ID NO: 31185 - DNA, 345 bp, Oryza sativa
tggagagagtatgccatctaccagtgtggaaataccaacagatgggacggatgtttgggagatagatctcaagcttctcaagattggaaccaaggttgcttctggatcaaatggcgatctgtaagttccattatctttgtcgggaagtgaaaacaatatagatttacacaactggtgattgagggccatatgatgctttgctttctcaagttccgtggatcatactgcagacaggatgtagctaataaagtagtgagacctgaacgcattattgcagatatgtaccgtgattatgcacaggaagtctacattatgaggttaacttaatatatttttattgcttct

SEQ ID NO: 31186 - DNA, 443 bp, Oryza sativa
  unsure (1)..(443): unsure at all n locations
agctngccgtgatgatatgggcagtgtcatgtttcctctcatcaacctcagcaaaagcagcaggacaagggcatgaggcgtgtggtaaccacactcccctctctccctctatctacctcagctactggcttagctcagccatggcatccaggccccaccaacccttaccaaccccaaaaaaaaccaataatgcagcatgtaacctatcaggattggtttgattaatttgaattgatctctttttcttgccttttgtttttcatcttcttcctgtgggctatgattttgatctttggtgttggtggtagtgccttcttggtccatggaaccatcatccatctaggttgattttaagcaaggcaggaggcattgtgatcagtattaattntataagcatgtgtgcatataatagctactagcaataatcatatcatgagtcatga

SEQ ID NO: 31187 - DNA, 402 bp, Oryza sativa
  unsure (1)..(402): unsure at all n locations
nnctgtgatatgcgctatggtattaaatgctgcacgtgtggtgttcgagcatatgagatgtacttataatatatactagtagctcccagtccaagctcgatcgagattatctcgccgttcaaacgcgatcaagagaaaaaataaggtgaagtntcctatctgcacgattgatcgacagcggttctgactgatcaaactggaagaattggtatgcatggttgctgatgaagaagtactactccctccatttaataatgtgacactttctagcatttntcatatttatataaatgttaatgaatctagacatatatatatatatatatatactcacagattttctactgtgtttggagtgcgtcaaatctgatcatggcttccaatctaacgatccacatacat

SEQ ID NO: 31188 - DNA, 412 bp, Oryza sativa
tctgaatcatattaataagtatatgtttaatattataaaagaatgatagataaagttattaaaatattatgcaaatgacgcgaggggtgatgattagatatgctttcatgttgatttatagaattaaataaattatagatgatgttgtatacttgcatgaggttaaatatgtaattattgctagtgggtaatgatgtagtatggatgcatgttgagttttaaatttaatggactataactatatagaaagtatagattggtgtaaagttatatagtgactatcttagatgatgaaatttattccggtatttgattggaagaagctacatcgaattgttacaaagtttgcagttcataacgactaccaatcaaataatacagtttgatggaaaacaaagaactaactgaaaca

SEQ ID NO: 31189 - DNA, 479 bp, Oryza sativa
  unsure (1)..(479): unsure at all n locations
ngatactcaattgaacctagtaccgcactccatccacagccttatggacttacagagcggattaatcagtaccttgaaatatacctacaaagcacactccatgaaacgccaaggaagtggccctcttggtttcccattgctgaattctggtacaatacaagtttccacactaccttgtgtagctcccctcacaaggcattgtttggcactgaacctaattgcttcagctgataatgaagccactgatatgctgacaacaagggctgcttattctgaatttttgaagaatcagttggctagagaacatctgagaatgaagaatattgctgataaaagcagatatctgctggagtttcctgtgggtgacaaagaatatctgaagctgcaaccttatactgaatcgccagtgtatatctgaggctggcaagctgcaaccttatactcaatcttcagttgcaatatgtcatatcttaagtggg

SEQ ID NO: 31190 - DNA, 345 bp, Oryza sativa
gagaagaagaggggaaaaaattataaattattaagttactcctactggtcagaggtaggactgtgcatgttgccctttgcttgttatgctgcccgaccgtgacctgcatcgaccgcgacgtcccggcgaaggtcgctgcgtgtgctcctcgcggcattgatggggggtctctggccgccggcctcttgatggcagacgggtattgccagtgggtgtcatcattcttaagcggcttgccttcaatggagtatgttttggatggactggaatacacgatggtgatggcatgaggctaccgctttgtttgagtaacttgaactacatgttctcctatcgagtatacta

SEQ ID NO: 31191 - DNA, 438 bp, Oryza sativa
  unsure (1)..(438): unsure at all n locations
tatgacattgtgacgaattcatataactcccaagattatcatcataccgcatctcataaatgcctctgttgttgaagaacccaacaagccagccaggtctagcatcaatcactagtacaacgtattctgcttcatacctaaggacataatagaatgtcccgtggactggtgttgtatatagcatcattcggctatatgttaccctgaaagcagaattccacangagccagaatctgtagtgcccctggcaatgtatgaagttctcaacaaattcatgttctgttccatcaaaatataaagttactgtgttctgccaaaggaggatgaagggtaaatataaagatcagttcaattgcattcacaggttgaaaatgggtagatcaattcgttagcagaccgtaaattacaggagatagaanaaaagtgatcgacgatcat

SEQ ID NO: 31192 - DNA, 218 bp, Oryza sativa
  unsure (1)..(218): unsure at all n locations
agcttagctagatcgcatactgcttggagctgcagattcttctgctgcctttnttgggatcatgctgccttgctgtcgaattccaatgcacgcacgtgtcagctacctagctgtttgatcgcttttctgcgtgcgtgcaatggactcaaagatgtccacagaaactttgatgctgctgatactgcggatatgtgtacgtagctaggctcccatgcaca

SEQ ID NO: 31193 - DNA, 404 bp, Oryza sativa
  unsure (1)..(404): unsure at all n locations
ctaagcttggaaacttgagcaggaagcacccttgatcaatgccctttattgaaaancattattaatttgcttacaactggcattattagactcacacacttaacttgcttggcctcggtttgcgtgccaaaccgacggacctacccagtagtcgcactaatatccgtaagtcgtactaccctgattccttgtcgctccacccttgtggtacctcggtattcgtgctctctgagcgcgtataccaaatatcccacatacaccgttgcttgtcaaaacttgggaaatggagttgtgaagccttcaaaacccgacatgtggtgtcggtgtgtttgaatataaaatgaattgtgaaaactcgcgatgcggtggttgtgcctatgtggcattgtcccgtattcgcatat

SEQ ID NO: 31194 - DNA, 447 bp, Oryza sativa
  unsure (1)..(447): unsure at all n locations
cattagaatattgtatatatatttttatgtangncatctcaccttacctatattgcctttttttacatgcagtaattctttaaccttttgtggaataaaattatgaattgtatgtctaacattgaatgtaaatatttgtcttgcctattatttgaagtattttttgcgaatgtattcttattatccactaagcctcaatcaaccatgtangttgatagttctaagtgcattgacaaaggcatacatgtaaagttgtttacttatgcacatgaacaattagaatatttatgtttaagcattgaagcttaaatatatccacctgcaaccacattatttctttttagaaaagttataccatggagtacaacaaatatgtgggtttcacgacaactattttgtaaagtttcttatgattggcgtgaaaagggggaggaatatgtgtatttt

SEQ ID NO: 31195 - DNA, 475 bp, Oryza sativa
  unsure (1)..(475): unsure at all n locations
ctggttatggacatgatactggtttactatgggatgttcttatctgctccagaagaacagagttgcanaatgatttgacggncgaagagtactataatcttatggccgatgaacgggaggacttggttcattcgcgatcacgagcactcgcaaaagttactatggataaggaacgcgttgctcggcattataataaacaggtggtgcctacaaactctttcgaaggcgagcttgtgtggaaattgattttgccgattgggaacccggatagcaaattctgcaagtggtcaccaaattgtgaagggccgtttcaagtccataagttgtgtctaaaggggcttacatgttgcaaggactcgatggagaagtttatgggcgagcgcttaatggcaagtatttgaagaaatattacccaagtgttnggngtaacgcatgatcggctagtgtngctgatacatgatagcccgtacatttg

SEQ ID NO: 31196 - DNA, 426 bp, Oryza sativa
agcttctaagtacccctgaagagcgtgttcgtatgctgaatgaagaacctgaagttcatgctgaccataccatggatccagattatgaatctccagaggaacaagagcaggatactggaagaagtacttgattttattttgcttccgccccataatattcattttcgatccatgcgtgctcatctgacatcactcccttttttctattgtacaggcagcttcaataagtcaagaggatctttctctaagaaagataataatcctgtatctccaggtaaaggagagggtaggagtcctgcacaaagagatttaaaaaccaactgggagtctaatcgaaacacatggggcgaatccagtacacatatcgagtcaccccttggacgcagacctgcattttcgtctcacggtgaaagtgctggttacaca

SEQ ID NO: 31197 - DNA, 441 bp, Oryza sativa
  unsure (1)..(441): unsure at all n locations
ngagaacaacatcttcagcattttccaagcctatgttatgatcatactcctgagacttcaaaaccatcttaagatcttccaaagcaaaaagtagcagttccagcatcgtgtctgagtaacctgcaaaggataaaaaggctaatgttaaagccaactgccagtgtgattacttgcgattcttgcactacataatacagattacagtataatttcgcacgatgttacttgtatatgaatgttaacaccagattctaatacccatttccacagcataacttgataaaacacacctcgatctcatcccttccaattaaaaccttcatgatctgacacataccacataagtaaaggtgcatgtctcctcaagaagatgggactgaaaggcagttgttctttccatttaactagcgtctatttaaggcaaaccatatgtttcacttt

SEQ ID NO: 31198 - DNA, 414 bp, Oryza sativa
  unsure (1)..(414): unsure at all n locations
agcttccacggttntcagcagcattttcattgtttacactctacaccagtgagttttcaaggttttcgtcctccggaaaattgggtgtactcacctaatcaaattactgggtctgcttcttcccacggatcaaaatcagcctctcagtgccctgcaagatatgaagagaacaatgtggttgatatcgaagagtcaagtgacaacagtcaagaggcagggaggagaggaacacgagtcaactggactgaagaggaaaacataagactccttagctcttggctgaataattcagtggatcctataaatggtaatgataagaaggcagaatactattggaaggctgtaactgtagagtttaatagcaatacatctagaagtaaccgcaaaatgacaagtgtgcaatgcaagacacat

SEQ ID NO: 31199 - DNA, 455 bp, Oryza sativa
  unsure (1)..(455): unsure at all n locations
ggcgcatccgctctatagctcgtaccttctctgtgttggcctcaatgcctcgagcagagaccaagaacccgagaagcttgcccgcaggcacgccgaacacgcacttgtcggggttcagctttatgcgggcggtgcggagactttcgaaagtttccgctagatccgagagtaaggtctcttggttgcgtgttttcacaaccaagtcatcaacataggcctcaacgttacgtcctatttggctacccaaagaaattcgagtagtacgttgaaaagtatgacctgcattctttaacccgaaaggcattgtcatataacaataagttcctatggnggtaatgaatgcagttttttcctcatcctccctagccatgcgaatctgatgataaccagagtatgcatctagaanacacaataggtcgcaccctgctgtggagtcgacaatctgatctatgcgt

SEQ ID NO: 31200 - DNA, 268 bp, Oryza sativa
agcttattgataacacacaagacgctatggcttatacctatgcatcttggcgaccgcatcgaggtataccgctttaagcatataaagcggtggaaacgaatcagtccaccataatttaactgaaggtacaatatgcgaaacattatattttttttgtatttgtgaaacgggcaaagaatattgtacttatgtaattattctaattatgtatgaacactgcctttatatgctggaaccaactgcacacttatatgtctgttggaccttg

SEQ ID NO: 31201 - DNA, 86 bp, Oryza sativa
acgggtaatgctagacggagccgcagctgccattgttcggatgaaccctaagtgcgatcgaacctgggccaatctagctgccccta

SEQ ID NO: 31202 - DNA, 427 bp, Oryza sativa
  unsure (1)..(427): unsure at all n locations
agctntatcagattcntatttccgaagntgcacctacaactattcattgaaaagaatcctactcttatgggtaaatgctcaatatccaagtgggcttacaaatttgatcatgatcaattgctttgtggattgtctcgcgtctcttgattagttggtatttatcccccccaatattgcaagtttcttacgtccaaacaaagtatttacttgttactaataaaaaatcaaaaagtttagcctacgttcttccttagatcccttcttttactccgatagtattgcagatcgcaatcgatgcaaagaaaatgaatgcatttccatactataataaaaagtaagtgtaataaatagagaattggatcatgtcacatgacttattccatttctactctatgggatcttacggagcctcttcatggatgacatg

SEQ ID NO: 31203 - DNA, 450 bp, Oryza sativa
  unsure (1)..(450): unsure at all n locations
agcnnttgataaatactttcacttgtatgtcttactgcatctactttgatttttatatttgggtggtctgaatctcattacagtgtatatcatgtccaagcatgttggaaatcacaggcttttagtttgaataatcatactggcctgtgaacctatctctaatatgttgtgaatacattgctgtagacgaatagtgggttggacagatagaaatatgtgaaaaaaatagtagcctatactgcattcttaggtgcaagacattatgtattccttttttctgtatgagccctgaccctttctccagttcagtaacagtgtaactatattataacaaagtaatttgcaattaaatcatgtccatcatttccttgcttcatctctataacgaatcaatgaacgggtgancagtaacatgagcacaatanagctactttgcacatatacttatgc

SEQ ID NO: 31204 - DNA, 370 bp, Oryza sativa
  unsure (1)..(370): unsure at all n locations
atatacggccgggtgcgagcatacagggttaatataactatttgccgcttttagatttgagaattatcaaatacctcttttatgtccctttaaatcgcaagattaagtccaattatcaaatatctcttttatgtccctttaaatcgcaggattgagaaaaagtagtaataggataaacgtattttgataggagtacaagtgttaaacagatgattgcaaaacgtatgaaaaacacacgaataatagtttgattgaatcgtangaaaaacataggaattggatgagagagatagattcaatgaacaattaccaagaggttgaagctcttgctaaatcttctacacaatctctataagattattcatttcat

SEQ ID NO: 31205 - DNA, 423 bp, Oryza sativa
tctttcgggagctagctatgtttgctttctctcttcctctctgggtcggatgtcaacccaatctctgattcaagtccataagttccttttttatagctcctggtgctcttctctggctaggatctcacttatatggcccttttttttcttttatatattatatagaaagcctcaataaataacgtaataagggctggctctatttactttctttcttacgcctaggtgctaccttttttccagttccgtaagtcccatagagttattttttatctttgattcccaaacgctgcgcgcaaagtaagcttacaaaattcctgcgcgggcgccttctttcttatgccagccaagtagcattcaaaaaaccattcaatctttccttcacctacgacaattcacttgaactaccaacatcatgagtga

SEQ ID NO: 31206 - DNA, 457 bp, Oryza sativa
ggctgatatccgacggtggctgaatatatgatgtcatctactaagaaaagaagtgccacaaaatatttatagactaggttggattacaaacactgtcagttctgatttgaacaattcgatttgattgtaccaaagtaccaaaggaaagaattagatcaaatactaaatgtatctgatgtacctagacaggctaggctagatttcatagaagatcatcagtttagcaacaaccaaatagaaatattcagaaatgctggttcagaacttgaatcaacaccatactttgcatactgcaagtaaaccttgtacacaagatgaaaactgtgaaatgtgcttcttctaatcatctaatgtactggatatagagaaaggaacattatttcaattattggacacacaatgcgtagcatacagcaacacatgggaatattggtcagtatacaggtctaagcacaac

SEQ ID NO: 31207 - DNA, 406 bp, Oryza sativa
  unsure (1)..(406): unsure at all n locations
tgaaatccgatctgcagatcaagcaacccaaggttnggtccttttttggttttcaatctttccgagtacacatgagtggctcgggattgtgctgggcactggacatgtagcaaatgtgcatgaaccgcccgaagcggcggagccctggccgctagctgctctgctgctgncgcgctggctggctgcggggagcggaatgcggtggcggtgctgccttgctcggcggctgcccctgtgcttgccgccgccgccggcggtgcgacgtgagggagagggaccgatgggtgaggcaatgcggcagtcttggtgtttgtttgcttgcatgttggacttaaatcttaaattcatgaacttatgttatgcatgatcacctaattttctcttatgcagaatttggtggtatact

SEQ ID NO: 31208 - DNA, 447 bp, Oryza sativa
  unsure (1)..(447): unsure at all n locations
ctctgaaactcagcttaacattgcggccgatctgagttgagaaacatctctgaatcttgcgttgataggttgctcctgcgnncctcaatccaaagggcatggtgatatagcagtaggccccaaagggcgtaataaacgaggtcttcaagcagtcggattcttttagtcggatctgatgatatcccgagtagcagtccaagaaactgagtaactctcagcccgcccgtgagtcaaccacctgttcaatgccaggtaacccgaaaggatctttagggcaagatttgttgaggtcggtgtaaacgacacacatgcgccactgtccggtcttcttccgaactatgactggggttgccagccagtcgggataaaagacttcttttatgaagcccgctgctaacagctttgttaattcctacttgatcgcatcctttctgtcctgtgcaaaac

SEQ ID NO: 31209 - DNA, 460 bp, Oryza sativa
  unsure (1)..(460): unsure at all n locations
agcttgcaaggtgcctctgctcatctcatcatagtctattanggcgaanagcaaatgagagttcgtccactgccacgccgtgggcaagtaaagtccaggattgcacgcattgtgatgagcgccatcacttcggcacttgtcagggctttgtcacagctccccgttcttgatcacaagtcgatgccacccaatgtgtaaattaagttcttgttgtagattgcttgctcgctgtgtaaatttntttaatcagcaaattgcaatcttgaaatgttgctcctctttcggtacattgtggtgtgaccttcatggatgatggcatggtctattctcactttcctgctngctcttgtgtagcatcctttatttcttcaatttgatcaccgctaggctggtggcaatctgattccctctcatcttcagaattttcatcatctgaactatctgaactatccgaacacat

SEQ ID NO: 31210 - DNA, 466 bp, Oryza sativa
  unsure (1)..(466): unsure at all n locations
ctgcatatcgatntattgatgactaanaagagtatatgtagattatctgttcgttattgaactgagaatgatagtgatgtctaattaaaggcctcatgtgacgctccgcaataattagaggaaaaagagcaaagcagcccagcagcaggacttgggcctttggcccaagcatgcaaagcaacagcgcaacatgcatagcagagcagcagcgctacagtacatcacggcgctgtagcagttcagtcccacctcgctttcctagccgcagcttcacctgtttctcgcccgttcactgtaaacaacgaatatggtttttttttcatcgaaagcgaggacgagaaatgcagtgtgataccgtgcttggtgtgtntattagcgattaacaaataatttatatgtgaaatctttatatatgtgtgctntagaaagctacaagtcatgctagaaagaaactatgtttaaaaca

SEQ ID NO: 31211 - DNA, 380 bp, Oryza sativa
ctctctgcagcaaaatatccggcgcactacgagatcattgtattgtaatctccttggccccatgcctttctcaaactcactgtcaatggactcatcacagtctaggtgctctttttccttctctcttgacgccagatagccttctaatccttctgaaacatataaagatgcaaaccaagccaatggagcagaccacaacactaccgctcgtagacaacttatgaccaatataccttctgtttctcaggcttcatcaagtgcacatctgcagaatcaaattcccagtacagaatctggtgcagctctacaaatttacctgtggaagcagagaatccgatggacactctgtcagggagatatttgctgagatcaaccgaata

SEQ ID NO: 31212 - DNA, 286 bp, Oryza sativa
  unsure (1)..(286): unsure at all n locations
ataatatcatcataccattttgcgaacatgatgtttatcgatgtactaaattaagttgtaaataaacatatacttatcttgccatgtaaattcctgctcagctagttctgcttaggcttgatcatatcgtattacaggcaggggcggatccaggaacaaaagattgggggagttcaattacacagtttcttcaaccttgagccatttagggactttttagtttatcatttatggtgaaaaaatcgaacggngtactccggagggtatccatgggttttgtgggtgt

SEQ ID NO: 31213 - DNA, 382 bp, Oryza sativa
  unsure (1)..(382): unsure at all n locations
atctatgagaccctgaagcttcattccgtggtgccattgcttcttctcaggagtgacgtcaaacatgcacagttatggcgtaccatgtgcctcaaggcaccaccgtgttcgttaacgtatgggcgaataacaaagaccctatgcacctgagatgagcgctgaggagttcaagccggaacgggntcacagtgcacagacccactctaaaagtgctaatttcgaagatataccagcttggtgcgggtatgaggatttgccctggcatgacattcggacatgctacccgggagctcaagcttgcaatgcttctgtaccacttcgactgggagctccctatacgagttgcaccgaacgaactatacatgacagaggagatgggcat

SEQ ID NO: 31214 - DNA, 451 bp, Oryza sativa
  unsure (1)..(451): unsure at all n locations
cggaccttaagcacgcggctgcagcttcttacagttagtgtagtatagttgctttggagtagaattggaatagctctgctagtcctcggagccttcagaaggagttcggtaaagtctcttgtatcttttcctcttcttttgtaagacttctactttcaatagaataatcttctttatataattcaggtgctttattccaatcttagaatatgcgtaccgactntatagtattcatgaatagtataatctgtgtagctaaatcttctgggaattgcattggtgcgggtataatgtctgattattcggttgctcaacataaattgctaactgaatatntggttgctctatagatatagatgagggagagagagacagaggaagacatggagaaagagagagtggctgtcaagaaaatgagagctggcacctggtcaggctggtagtgtgcaac

SEQ ID NO: 31215 - DNA, 458 bp, Oryza sativa
  unsure (1)..(458): unsure at all n locations
agcttcgctatgttcgttaaggaaaaaaaaattatcttcactacaactccggcccgttgcgtgtgctgtgtactagagcgtttcgaggtccgcatcgtgcacagtaacgcgtcgccttcctgccttacactgtcgatttttattctctcattgttacactccatggacctgcccgctcgaaagcgaacgtcgcaattgttcatcatggatttgataagttctcggaattgacggcgggctgagttgtgcctcaaggaagtggggaaagccggaaacaccggacaagaattgagttcagtcgcctgtcaacaaacctcagcaattgcaattccgttcggaatttcggtcccaatcgacgatcgtaatcttccttttatttttcccctctgaatgaactgtactcgactcgatccaatctaggcttatttcacgagactacgtggntntttttttaactg

SEQ ID NO: 31216 - DNA, 392 bp, Oryza sativa
  unsure (1)..(392): unsure at all n locations
tgcaattntggcatccagcagaaacatgcaagaaattaatctctgctacttatgccatctcatcatactcatctcttcttatctcatccaactaagaggccatagaaaatcagtgtcattctactggcaaatcacaattaggcaaaaaaaatgcaagaagttaatctagtacaactaccgcagctcgcaaaagggcaccggcgaggagctcgccggagcgccactgccgccgctntgcctcagggcccttatcaagggcttggtcgccgaccacggcgaggccgcgccggccgtgcacgcacacgcggtcaagctcggcctcgaccaccgcctcgtcgtccgcgatgggctcgtcgagctctacctcgcgcgcgtcgagctcgcctccgcgt

SEQ ID NO: 31217 - DNA, 429 bp, Oryza sativa
agcttcgacgagataaaggaaacatgccccgttggttttgaggtatcgaaagcccgttgtagaatatgtatgcaaattttatctgctcgttcttctggtggtacaggtcacctcaagcgccatgcggagtcgtgtgccaagaagcaaggaatacaactccggcagcagcaacttatggtaaacccagacggtacggtacacagttgggagtacgatcccatggttgctcgggaatctcttgtccggttaatcgccaggcaagatttacccctgaactttggggagtcccctgcttttgaacattacattcaacaatctcataaccctaagtttaaagctgtgagtaggcaaacatcaactagagatttagagaatgtttatcacaaggaagcaactgcacttaaagaactgtttagtacatgtactttc

SEQ ID NO: 31218 - DNA, 406 bp, Oryza sativa
  unsure (1)..(406): unsure at all n locations
agcaaggggagaacctgggagtgtgtagatgcaacataattcataagctnngatgggagtcttcgctacttggtaaataccaaaccagatttgtgctattcagttggatacgtcagccgttttatggagaatcccacttctaaacactgggctgcgatgaagcatgtactgcagtatgtggctggtacacagaattttggaattcaatttaacaggaagaaacaagaaattcctcagcttattggctatagtgatagtgatatggctggggatatcaatgataggaagagtacatcgggtgtgctgttcaaattgggtgaaagtttactcagctggcagtcacagaagcaaaatattgtagccctgtcttcatgtgaagcagaagatgtggcagccacaactggag

SEQ ID NO: 31219 - DNA, 366 bp, Oryza sativa
  unsure (1)..(366): unsure at all n locations
agctnttaatctgaatccaacttgatcttgaacactgcttgtattggctttcctacccctatcggctaactgaatctgattccgtatcaactgatacagcctccagacgatacgctattctgtttggaaacaatcttatctccttcaaatccgcttcgatctggacttcaacttcgagtatctttaccaaatttgatgttaacggctcgatagcctccacctcgatatccgtcctcaacaccaccacttcctcactatggagaacctacgaccgtcgattctgtcctcctgggctgccgccactccggatatggaggtgaatgccgttgggaacggctcggtggggttgggctcaacngtgatggc

SEQ ID NO: 31220 - DNA, 416 bp, Oryza sativa
  unsure (1)..(416): unsure at all n locations
tcatttcgagtttggctgcaaaaatagtaaaccatttggaatactaactntgtacttttgcagccaaatttataaacttgccttttcttttccacatcaaatcctcaccttttggatttttcagcaagtaataaattatttgcgaaaatagtgtgccgagtctgttcatttggctgcaaaacaaatcttgatgcaccatgaagcccatcagtgctacataccaagtanggccaaaggccagtagggttagatctaccacaattcctaagctactacatctgccttctgccatctgaatgtgcatatcatcctccaatccactttctttccattcaccattccaaccaatcgacacaacaacagcagtagcaaaggtatgagaattgagagactctatacacagctcccattcacat

SEQ ID NO: 31221 - DNA, 453 bp, Oryza sativa
  unsure (1)..(453): unsure at all n locations
agctngagtacgtgcccgagctcaagctctgttttggtctctctgctgagcccagccgccgcctgctggctgctgctgatctgatctcctctgactcccagccacaacttataggcgactggaatgaatttgccccacctgagggatggctggaatatcaagaaccgcagcttgtcaacctcggctccgccaggttctgcatttcaaggttcttccatattangtccatggataatgataatgaagtaattgacagtgttgtagtcttcactggtgtggaggtgatgccagttgggcacaatggcgatggtaatgggaaggttaaacttcgaatggaaaagcacaagtcaagatgttgcgtgtctggtagcaccatgatctgttctatcttctgaataatcctgnggctttcgctttcaagactcttgtacccataatgcatgtgatagacaa

SEQ ID NO: 31222 - DNA, 313 bp, Oryza sativa
cgacatcagaagagtgtcgaaccaacgcggtgagagagaaatccgcaaggtgaacatctgatacagaccatacagtcgttcgccaggcaagcaacacccccccactccgaccgaccgcatgcgagaaggaataatcaaagtcgaggcctagccttttcacaatagtacgagaggggattacatccataatagtctcctgaagacagagaatagagacatgctcatcacggactacatcacgcacagcatcccaacgggcgcgcgagttcagacctcgcacgtttcacaccataacgttctcgttgcatgatcc

SEQ ID NO: 31223 - DNA, 263 bp, Oryza sativa
  unsure (1)..(263): unsure at all n locations
tcaagccgctatctaatctgaatctgaaatatatatactcaacagacgcctcctcgacaagatcattgacttctccgtcatcggcggcggcgccagcggagccggatcatccgtgatcacgccgtcgtgccccaaggccgtgtagcctgctctgcaagtgaacaagatgctcgcggagacgactgngaacacccggaagctgcttccgcgggaggtcagtcaaatcgtggtcaccgtgagcaacattcttcgcgccgtgcttc

SEQ ID NO: 31224 - DNA, 407 bp, Oryza sativa
  unsure (1)..(407): unsure at all n locations
tgtagccctttctccncacaacacaatatttggtgtctcacctctatgntntgcgngnatataaaanaaatcacagagggagtgtggtgtantgagtggttagtctataacacaaaaaaaagctggcgtactggaattaagggagctagcatagtaaaatgatatgttagtattaaggtaaatattttggtggctgttggctgacatggatgatataagatgtcagagttattagagagcggcagaaaattagctaggaataatatacacaatacaaatttatggaagagatctaactcagcattgcggatgtagacgttccttttcaagctatcaccgtctttaatgcgtgtctgaacggttgtaacagattatatttcagtgatgattccaataacatctatgat

SEQ ID NO: 31225 - DNA, 409 bp, Oryza sativa
  unsure (1)..(409): unsure at all n locations
agctntatgcttgggttatggactccagtatgtttcatattaatttctaaaatttatagaaaactatgagtccataagccagggcctagatgtggctcctggagcctctgcttatgactgataagccaatcaggagatgattagattgatgagactagctcacttctaaatacgtggtcgtgatatattacggcttagagcgttacatgtattttttcgatagagttgatggtaaaacgtagttttgtcaccgaacaaagaagaaagcaatcgctatctgattacttgtacagacagaactcacgctgcaaattcgtgtcgatcttgtacggatagacagtggctaattttgttcaccttgacaattccgtgaaaaaataatgatactttacttgttggctaacatgga

SEQ ID NO: 31226 - DNA, 369 bp, Oryza sativa
  unsure (1)..(369): unsure at all n locations
ctcagctagtatattatgcctggccatcacgctgatgcgtgtaganatatacaagggtcatatgaaagcaatgatctcttccatatgttagctatgcagagacaaccttcattgtctaacaattcatatttcatccgtatcagcagatgacttcatccaggaaccatggtgccctcctccattgagtcttcaagaacttgtcatcaatcaggcgccaatgtctatggttccaagatggattggctcacttgtcaacctccaacgattagggttatatctgaaggaactctcgcaagaagatgtcagtacactgggaggactgccagccctgctctctctcattctctatgtggaagaaagtattacaga

SEQ ID NO: 31227 - DNA, 436 bp, Oryza sativa
  unsure (1)..(436): unsure at all n locations
agcttctcgtccttgccttaacaggaacccggttttgtcctatccctttccggcgttcccaactattggcatgcgaggtttccctgaaccgactagttacttaaccagggtgtcccattccaccttgtggttgcactttgattatgttcgatgagtttcccacaggaatcggtccttatatgcgaatacgggacagtgccacataggcacaacccccgcatcgcgagttttcacaattcattttattttcaaacacaccgacaccacatgtcgggttttgaaggcttcacaaacccattttccaagttttcaacaaacaacggtgtatgtgagatatttggtatacgcgctcaaagagcacgaataccgaggtaccacaagggtggagcgacaaggaatcatggtattacgacctacngaaattagtgcgactact

SEQ ID NO: 31228 - DNA, 377 bp, Oryza sativa
  unsure (1)..(377): unsure at all n locations
gcagcatgcagctccagaacctcatgatggggcagttcctcattattctctncgccaagaccttggatgatatgcagattcctcgctccgagctaaaaccaagcaatgcgccttttcacggagtaattccaggattatccgcaactccactcggtcagatcaccctcccagtcacttttggcactcgggaaaatttccgcacagaaaatatcaactttgaagacgccgatttcgagacagcataccatgccatactcggacgcccggcgttagccaagttcatggccgctccgcactacacttacatgatgatgaagatgcctggaccccgtggagacctatccctacggagcgacatcaagcaagccgtcacatgc

SEQ ID NO: 31229 - DNA, 458 bp, Oryza sativa
  unsure (1)..(458): unsure at all n locations
acacctaganactcaagctntctntgtcgccctaatccctctcacatatctagaacagagcttatgatttatcttcttttctcctcgcccttctggtgtctgctcaagatgctatgtatctctttatgtctttgagtctttatctggatcgactccacacttccctcgcagaatccatctgcttggcctccttcctctttaaccatcccttcaacatcatcactaatctcaacaaactcagatgctcattgcacttactctgtgccgcatcaaacaacataactttgcttcttctttaacacaaacgactgtcaaatttgtctcaatctcacactcatttctctccaacacaatattacttatattgacaatatcaactaaaacatctctattaactgaatagaaaatggccaaagagttagacatacctgngttcaaattgacttcagagtttctca

SEQ ID NO: 31230 - DNA, 390 bp, Oryza sativa
  unsure (1)..(390): unsure at all n locations
caagcttcttcgctgcacctcgttggccgcgatttcttttttgttttttgaagggagacaaccactagcctgctcctcccgggacncctccacattctcttgcacgtgcccctgctgggtcctctccgcatacctctccacgttccctttctcgttcaagtactgggttggaacctcagtcccctcttcttcaatccagtacaggctggttcccttcgcgattggttctgacaatatttgatccctatcgcgagcaaacatatgttgatacaagaaacaattgctaagtcacgagacatttatggtttaacaatctaacgcatatatggctaaggtaaatgtcctacattagaaccctacacaaccttacgtgctaagactcattacaaa

SEQ ID NO: 31231 - DNA, 390 bp, Oryza sativa
  unsure (1)..(390): unsure at all n locations
actagacgagcgtggcggagcactactgtcgactatactgtgacctcggcntcagggcgctcaacttcgttagcaacatgcgggcgtacggcccgttctgccatgaggacggcgtctcgttcgacctcccagccggcggcgggggcagcggcaatatcctcggcttccacgcgcgctccattcagcgtctcgactctgttggcacctacgtcaagatctgatagatgacgaccaccctggcgtcacagctgagcacatctatctaagttctcccctctataacaattcttagtgtttaaaatttagttgaaaatataattaacttattcactaacgatctctttctaatccactgggactctacaccattcattgttacgggctatctac

SEQ ID NO: 31232 - DNA, 442 bp, Oryza sativa
  unsure (1)..(442): unsure at all n locations
agctntntatcattctggcatcgagcctatttgccgcatgacctcccctacagtatcgtcaccgcagtagagtttaaccaccaaattcgggatggattggtgtggttcctctacgcctaggacaccagaatatcgaaccatgaacgaggaaaggcatgagagaaatattggctagtaattgtgaagccccaattcttgactggaagggacaccaaaggcctctgccctccctctctatctatccaagagatggaagggcagagcttttttttggttttttcatcttttcatcaaagagttgaacaatgaagatagatggcaagtgcctgatcgatttgatcaggtcgtgtaggaacaaggttcaaatcgttcgttcgttaggatgcctcagctgcatacatcactgcactttcacttgacacctatttaaacggctcgtctc

SEQ ID NO: 31233 - DNA, 400 bp, Oryza sativa
agctttgttgagcctaacacccaaagaagctattaaaatctttctgtcctcgcagactaagtagaaaaaatcaaacaaggcaatgatataccaagtaagcaaattaaattgataaaaaatcacactccattattatgatgatagcccccgactgacaacggcaaaaagaaaacttgatgttgacagtcaagatatggaagtacaatgataaacttaagcgtacaaacgacgaacatgttcaatgttccaagagttgtcgacaagagtaccgtcttcgcgcttgagtcgataaaaacctggccgggtgacttcagagataataaatggcccttcccatagaggagataacttgtgccgatctcgtgtagtttgaattttcctcataaccaggtcaccgact

SEQ ID NO: 31234 - DNA, 482 bp, Oryza sativa
  unsure (1)..(482): unsure at all n locations
ctaagcttatgtgctgcaactgacgagtgtggccctacagctgactcctttctattcttctctaatcgcgaactggatatatacacccctcgctggtgcgtgcagtanaagtagatggttataaactccatcagtggtatatatgttacgtggcatgtagctcttatgctgacaacccttggttgagcaaagaggagatattatgggctgggttgtgttgtggcctgaattggctttgccaatatttaacaatttcaatagagtttagtgtctatttagcttgaagccaaatattgacatgtctaaagaaatacgctatcttaatagtgaaattgggttgttttggctctaatccgaacacaactttaccttgtcaagattaccataccaaaactatcaaaatttgatatgacacaaatggtagttcatttaagtacaaacaaccagcttatgtataatacactcaatcaatacacgcgtca

SEQ ID NO: 31235 - DNA, 433 bp, Oryza sativa
  unsure (1)..(433): unsure at all n locations
agctttgaactganttggttggtgtaccctttattttctgcacaacaacttcagtgacttattatatgttagagaaataaattagtgcaaagctttgtattattcacacttctgaatagaagtactaagaagtttttgtggatatcatggtacgggcagcaattccaaataatgcatcagtaattgatgtctgaaccatgctatagcaaaaaaaaaaagatttcatttatatatcatatactccctccattccaaattgatctacatatagttntttttaggttattcctaaatgatctacatatttgtgttcatttattagagtctattcgttatttgtgcagtggagtaaatggacattgatacatgcatctatgcacacaagtatttataacccacatgcaatatcttgatttgctattggctagaaaat

SEQ ID NO: 31236 - DNA, 416 bp, Oryza sativa
taccaagcctacctgcctcctaaatcgtcttgcagcattatttcttcctgggcaagtgtaacagtgggcttggtgtgattaaatatggtgtaccttgacttcttcgtgactaactgtccatcactattttcttcatatgaatcatcatcatcactactactgatctcatatgggctaacaatatcctcaccatcaatctgaaccaaagccctttcatttgccttgcttgccgaccccatatagatgacattatccaaatttcctagctcaccatccttcaacttcttcttaaactcattgcaatccttcctgaatagcttgacctcttcatcttcttctgaagaacacgagtctgcaccaatgtaatcactatcagattcagacgaatcagctatcttcagattatctttagctac

SEQ ID NO: 31237 - DNA, 361 bp, Oryza sativa
agcttaaccaactggataccttgactatcaattcatgtatactagcgacccatctctgaatgccgagcttgggtgacacatgcatatgtaaaatgcagtcttcgcacgccttcacatcatttagaaggctatgactaaggaagtgctgctcaagggaaaactgtgcactggtgttgcacaccatgctctatcctgagatgacgtcccttagtcataaaatgagttagccgaatgaatgcttacctctgatgacgcgaacattgttaccacatattcatattttgcttcgacacatccctcatcattgtaccacaagagcagttgtcgacatccgtttgtccatgcgtctgaggatgacatg

SEQ ID NO: 31238 - DNA, 360 bp, Oryza sativa
  unsure (1)..(360): unsure at all n locations
aattcacccctcaacagcacgcaagatgcggacacataaggccccgcaacacctgatgacggctggatcaaattcgggagctcgggatgctgaaatattagcaaaggaaatcaaggctaaaccagacacgccagtgaaaatntgtaaaagcagaccgtgctggccaaggtgaacgactaagacgcacctaaaccaacgatccacaagaaaccttgaacactatgccacttgattatgagtcagctaacaaacagatgtactggcatatacaattctcatctttgtaactctataccctgcaacttgggcgcttttacttatttgacttccgcttcatacttttccgatttatacaaacga

SEQ ID NO: 31239 - DNA, 340 bp, Oryza sativa
  unsure (1)..(340): unsure at all n locations
caacnttatgccggcggagcggagactatcgaaaggttccgctagatccgagagtaaggtctcttggttgcgcgtcttcacaaccaaatcatcaacatatgcctcaacattgcgtcctatctggctacccaaagaaattccagtagtacgttgaaaagnangacctgccttttttaacccgagaggcatagtcggataacaataagttcctatgggggtaatgaatgcagttnttcctcatccttcctagccatgcgaatctgatgataaccagagtatgcatctagaaaatacataaggtcgcacccccgcggtggagacgacaatctgatctatgcgt

SEQ ID NO: 31240 - DNA, 457 bp, Oryza sativa
  unsure (1)..(457): unsure at all n locations
actacagcgctgtcaactcatcttctgtgtcttgtgctgtattnacctccgcgatattgtacggagaatatctaatatggttcctaataattcgctccttgacattttactctctaatctttcatactgcctaaacaaattctttaattctgtcactgcggttgacatagtccttgatcttaccataatcgccacataaatatgccatgtcacatttccatgcaaaatctatatgatttgtccaatctaccgctacatatatcatatataaataatatacaaaaagttatatgtaagagcaaaaatatacctcataaaggtgaatataaggataaatattctgtgccatggttatggctaactcacacttatatgtatttttctatgatacacatatacgtaaattggaccattcattatagtatttgcatcaatgatgacatgcatacttatatat

SEQ ID NO: 31241 - DNA, 366 bp, Oryza sativa
agcttgattaaatttgtaaaaaaaatagtattatctccaacaccaaattaattgtgttgaaagtaatattcaataccaagttttatggaaaagatactaccattgaatatctaccatactaaattaggtttaataaatgtaacattgaatatatgttgatattatgtttgatttgtggtgaaaatgttaatatattttttataagtttgatcacacttaaaaatgtttgactatcgaaaaaacaaaacaacttgtaatatgaaacagagggaatatattttaataataatgttattttggtatatttatctataaacttgataagtttgataaaaaaagataaaaatgacttatataatatgaaac

SEQ ID NO: 31242 - DNA, 395 bp, Oryza sativa
ctaagaaactctacttgccattgcacaagcactcttgtatcgctccaagatatgatttatattggtccgtacgatgatgcatatgcatgatcgccgtgtgcacgtgagaagccttaccaaatattatcccctgcaagcactctcgaattctctatcatttctgcatgagatatatacaactctcttctgctgtatacatagcttaaaccatacttcactgtcataagcatgcacaggtgagcaatctactattatcctgtttgtgttgtaaatgtatacagtgcgcgcctagctatacttgtatgtatgtatatctatacaatgatggagcagatatttttaaaccctacatacaagcgaagatacctagcatctggtactccctccgttttaag

SEQ ID NO: 31243 - DNA, 424 bp, Oryza sativa
  unsure (1)..(424): unsure at all n locations
agcttggtcaagggtttacatcggtcgatcctttggaagaagttgacataggagatggaactaaaccaaggccgacttttgtaaataaatatatgagagccgattataaggttaaagtaatcgagctacttaaggagtatgtggattgcttcgcatgggagtatcatgagatgccgtgtcttagtcgtgatcttgttgagcatcggcttctaattaaaccgggttttaggccttataaacaaccacctcatcgttttaatcctttactatatgaccgagtcaaagaggagattgatcggttgttgaaggcggngtttattatgccatgtaattatgcggagtgggtttctagcatagtcccggtggagaagaagggagtggtagaatagagtgtcacacactttanagattaaataaactactc

SEQ ID NO: 31244 - DNA, 328 bp, Oryza sativa
  unsure (1)..(328): unsure at all n locations
tagctaagcatgatacactcttcacagcataaatatactggtgttgtacaaattgtgcctccatcatccatcatcaaacacactntacatattaatcagtgtcagtcttttcgtcgtcagagctaccactaccagtcggccgaagatcagtatcttggaaccgttctactacatcgctcgcaattttgtcggctgctttctgcgcgtncctgatgagatcaagggcagcctcttcgcttgtcccgtccgcaaaaccgtcgatggcatcaatgtcaattttanggtacaagggattggtcaatcgcagggccaaactcgctcccatact

SEQ ID NO: 31245 - DNA, 391 bp, Oryza sativa
agcttgcgtatgcaacatgcttgttacctatctgctcgcccacccgggctagcataaggccgatcttctccttatgacattctgagcgcacactcgctcacacaaaattcgtaataaaggcattgctcgatggtaatgaagagaatacatcgctcaccgaaatgtatggagatgtatgctcactacactatgaacttctattggctgtcttgtatacacagccttgaggaaagcacttacgataggcttctacagactggtcattataatcgggtgaacagcagaataccacatatcggcggaatttactcatcctattgtcaattattttatttcgtgtcagtggaactcgttcctgtgcagtgcaagcacaccttatataatgcattag

SEQ ID NO: 31246 - DNA, 368 bp, Oryza sativa
cacatactacctattccggctgtgaactgtaagccaatctatttagcctaattaatcccgcgttttgccaatgttagtgtttcgccctattattctatcatggcataactagactaatagatttggctccggatttacatgccaactatgcaattgactgtttttttcgccacatttaatgctccatgcatgtgtacaaacacatgatgtgataaaaaagttgctcaaacatttgacgtgatgtgaatattgaacgtatgaacgataaatgttgaatctaaacgagccttattatgaatgacattgcttatgctcatgtttacataacagagatatgaaataggttggtttacacatcttctgacaca

SEQ ID NO: 31247 - DNA, 364 bp, Oryza sativa
  unsure (1)..(364): unsure at all n locations
tcctaattttacttatncttttatgatatgccttgcacatgcattaccaaattattgtcgatagcagctagttcgggcatattacgagcctatagttcaacaaatgggttaactcatcactcattggttcattcctcatgcaacggtctatattaactctatgaaatccaacgctccagattcaccccacttccctctatgcctataccccgacccacgcctcccgcatctaacctaatctctcttctctcccttccacgtgccaccaccgatcccttcgtcatcgttgcatccgtccttggccaaatcggcgccaccgccatcgccgtcgctgctgcccttgaccaccaccaattcgccgtcg

SEQ ID NO: 31248 - DNA, 175 bp, Oryza sativa
tagaacaatctggaccagtctgtagccagaaggaatttggttaactgtccgcctaagcataggaaaaattcactcttacttatagagaatattatgaaggttacacatattcaaattccctggaggaaaattttaaaaccactatttacaatgattatacttttagcacaaactt

SEQ ID NO: 31249 - DNA, 394 bp, Oryza sativa
attatacccaaaaccctgcagaaacacgccgggttttacctacgagacgaaagggtatatatgtcaacttggctcctcgctgttcctttctctccgcttatctcttatcttccatgtcagcaaaaataagtacccacaaacaccattttaatcggtgtcgcgcgtgctcaaatctgctagtgtaaacaaaggccacatatatacgatagatttgcattccaggtagcatatgagcatatgtatctatgcatcgcttttagcacgtttagcggggattgatattaaggtaaaatattttaatgcctctaagatcctacttgactgaagaaagatcatatctagccatgcaacaaacattacagagaaccatatgaagtagttggattgagaaaaa

SEQ ID NO: 31250 - DNA, 390 bp, Oryza sativa
  unsure (1)..(390): unsure at all n locations
tgagcatngcggnggatgagttgctcttactccgaagtgagttccatgtcatcatggggtacatcaacacctgtacaatcaacttttcaaatactcggatgcaaagagattagatgcaacttcatcttgtgcctccaagcggcgtaatgtgtcccatcagattgaggagcacgcccggaatgcacggagacgatattatgtgggggaatggtaaggtgcttgaatcaaaaggatagtagctcccttgagtggtggagatcccttgctgctcgctccatattcatttccattttgcccggtctttcccactaagaccgaccgcttggatcgctcatagcggtgaagctagaatcaagagcacaaaggcttgatactaattgaacgcgttga

SEQ ID NO: 31251 - DNA, 432 bp, Oryza sativa
  unsure (1)..(432): unsure at all n locations
atgaatgccaaacaatgattaggatatattttgnggtntcatacttgcttgcagtgttgagagcaatattttaaagaacccaatggagaaacaggttatgcttgtgcctccgattactgatattttgtagggagttcagaacattcaccatgaagagaagagcaatatgctcgagatgtcatctccatcactcacgaaggaagaagagaagactgatgcacctatattatctaaagagggcataaaaggtaaattaaatggtgctgatattactcaaggtgagtgtgcttctgatgagtcacatttgtccactatccatgctaatatagagcaaatttgggtggaaactacttctgatttgcatttgcacaagttgatttacttgctgttccttgtgataaagaagagttgtgtgataatgcttcacttata

SEQ ID NO: 31252 - DNA, 459 bp, Oryza sativa
  unsure (1)..(459): unsure at all n locations
ntgaagcgagtccagttagggcagcgttggtccaccaaggtttatagttagatgaaggtgcaaaatagtaaggcgaacaaacacactgcaaggtgtttcgataagcagaaaaagacatacgatgtcacagagaggggtagtataacgcgtggtggtgttagattcggcgcaagagccttcaaagttgaaagtgaggggaactcatgttcttgccaaaggccattgctctaccatatgccttgctcacatcttatacacgtttatctgattcatgcaatngatgagaaatctcccaaccgaatgccgtatcaattctcttcaagagccgttgtgaacacatgggcaagtcgctttgagccatacctcgaccccacacagtggccaccgtacgatggtgatagaattgttgctgaccgaatgttgaagattatacatgagggaagaggagatcgaaacgat

SEQ ID NO: 31253 - DNA, 417 bp, Oryza sativa
  unsure (1)..(417): unsure at all n locations
tgcaagctttgatggaatcccgaagccgctttttgtggttattcttggaccgatctacagagttttcaaggcaagttaagcatcggaacttcgcggcaaaaacgaatggatttaattgttcaaagaatacataataatcgtggctgagttcattatttatactcataataattttacacgagatgataatgtatgacttggttataaaagcatctaatagttctctatttagcccaaggagcataacgactgacatttgatattgtatccaaattcgacaaagttttaataggtctctttttagcccaaaaagcatagagattgacatttggtatttgatcccaaattgatatangtttttctgcactaatcaggtcaatcagaatcattaagaaagcgcaaatattcagaacctgt

SEQ ID NO: 31254 - DNA, 470 bp, Oryza sativa
  unsure (1)..(470): unsure at all n locations
actgctccccagcgacagagctcacagctgctgtcccttcccacctctcaagctcaagctgccgactttgtgtttcaataacccaatcaccgagcttgcgcccagtacattgctctgctttgctcagaatgggaaaggggaagaaagaagaggaatgtaaggatgacagggctgggttctgtgatgcttggtgcctcaaaagtcaaaacatgaggtttagtgaagcaaacatcataatctggngggtttgaatcttaaaaatatggcatgatattgcacctgttacaatgaaatctagaaaaactccctatggtaacatataaatctttctcacaaatgagactccaaaccaagtagcatggattaactaanagccgcttgctaccttacccacatcaaaatntcaccaatgctctcactaaaggaagtcacagttcaacatttagctggcatccatcttaacncacaat

SEQ ID NO: 31255 - DNA, 488 bp, Oryza sativa
  unsure (1)..(488): unsure at all n locations
ctcaagctagcctattctacaatgtctcaattgggttatatgatgntattctctatgtatatgttcttatcaagctgctttattccatttgatcactcatgcttattcgaaagctttattattcttgggatccggatctgttattcattcaatggaacctcttgttggatattcaccagataaaagtcagaatatggttcttatgggtggtttaagaaaatacattccaattacaagaacttgttttttatggggtaccctttctctttgtggtattccacctcttgcttgcttctggtccaaaaatgaaatccttagtaatagttggttatattcacccttttttggaataatagcttcttttactgcaggattaactgcgttttatatgnttcggatatatttacttacttttgatgggtatttgcgtgttcattntcaaaattacagtagtactaaagaggattcgttgtattcaatatcgttat

SEQ ID NO: 31256 - DNA, 293 bp, Oryza sativa
  unsure (1)..(293): unsure at all n locations
agcttgctcacttacctatcaatgtgggtggtgttgatttgngaatgcctaaaatggcctatgtttatgtgagaaattgatccttctatgtggcatgaggtaaccctgggtcggcttatgaaaggctttgtcgcgaacctcttacaccggccagtgtctggagtaagttcgcgtcttgtgggtaaagtgtacccctctgcagaggtttactaactggtcgaacagccgtgcccaccgtcatgggcggatgtgaagtggtttccgttgcgtagatttgttggcctgtgcttgtg

SEQ ID NO: 31257 - DNA, 363 bp, Oryza sativa
  unsure (1)..(363): unsure at all n locations
gctttcatcccccgctggagctagngagtagtctctgactactgctccaatattactcaaagcaagacaccctacctcaacgcccataatattgggagcgggtactcacaaaggcagcaagttgcctaaaagcgacgacaatgcgccaacaaccatcactctgcaggcaaggcggacaccaaacaaggaagccacacctacgcgatcaggagtggtcaagaagagagtagcataaatagatgaagccaagcgggtgttaatgtatgcagcccccggcgcttacactttcgttctaccccgctagaggatgggcaatccagatcatctgttgtcacctcgaccatttctacaggtccacaaatt

SEQ ID NO: 31258 - DNA, 445 bp, Oryza sativa
  unsure (1)..(445): unsure at all n locations
agcttgcaggtatgtgtacatgcatatcggattttgttcgtagctttgatcttgtagctagcatcgatccaaatgcagctatagctcgatggccatggcgttgagttttcctttnttttacatgttgcanggctgaacaggtgtggcaagagctgcaagctaagatggacgaactacctgaggccagacatcaagagaggaaagttcacctctgccgagaaggataccatcctccagcttcacgccgttcttggcaacaagtacgtactgcagtgcactgcacctcctcatcaaatccatagcataaatatgcttttcttgcatccatcaactggttcatatttgcatctaatcctcaggaatcgaccatgcttggcaatnggcatgcagttcagtgatacgctagctgatactgactgctgctagctagatagctagctcaatc

SEQ ID NO: 31259 - DNA, 454 bp, Oryza sativa
  unsure (1)..(454): unsure at all n locations
agcttcttcttaaacacccacttgcaccccacttgtttacacccatagggtcgctctgtcacctcccaagtcccgttagcgataatggaatccatttcactacggacagccttcttccagtagtctgcatcaggagatgcatatgcttctgaaattgacttaggagtgtcatccacgaggtacacagtgaaatcatcaccaaaagacttagccgtcctttgtctcttactccttcgaggagcttcactgacatcctcctcagagacaagttcatgtgtatgttcagtttgttctggtggtgtgattgaactgggaattatttcagagggttggttcgaaccactatgtgtatccttcattggaaaaaagctctcaaagaaggtagcatcacgagactccataattgtaccaacatgcatgtccggtacctcgnngattaactattaaaatctat

SEQ ID NO: 31260 - DNA, 331 bp, Oryza sativa
  unsure (1)..(331): unsure at all n locations
attttacttccgcacctgaatatgtatatgatgaaaatggcattgatcaaatggtgtggtttgtgctaaacaactgtgcccaagttgagtattacgtcaagtatgttctatatacttacttttagacttcttctatatgctacctttgtgttgcacactaatttattattttttctgcagtttgttcatataagagttagagacacaangggtgcctaacattgaaagaatgctttgacaaggatttcaaaactggtttaagaaccatgttagntgtcattgtcaaagtatatattgcataatgtaacttctatttttctaatatatgtgt

SEQ ID NO: 31261 - DNA, 468 bp, Oryza sativa
  unsure (1)..(468): unsure at all n locations
tanaaatgggctcgagctcggctcgctcgagcctctatctttctcgagcctaactcgtgtgcgctcaaataaccaatacagatgagaggaggctgcatgcgtgcttgtcgagtactactagtactagtagctttttcaaacatgatataacaactagtagtattattaaatagagctgcatgcatgctaatagtactaataggctaatgctgcagaggaaagtatgactagtaagctagtgcctgcacggtgcagccctacacgctctgtgtttctatacagctgttcattgggagtaggagtagaactagctgttgcattgaaaatttaagaactcgtcagagggaaatctgggctcgacgagctattctagcttggctcggcaagctcgcaagcttggagctaggctcgagttctgctcgaattgttgacgaatcgagctcgagccgagtctacagcgagccgagc

SEQ ID NO: 31262 - DNA, 357 bp, Oryza sativa
  unsure (1)..(357): unsure at all n locations
agcttcaaacagtgccatctgtagactggccttgtatctgttgttgtacgagaattccgcatatggcaagcttttgtcccaagctccaccaaaatcaagagcacaagctctcaacatatcttccaagatatgattgactcgctcggtctgaccatcaatttgcgggtgataggccgtgctgaaatttaaacgggtccccagttcttcctgtaacttctgccagaattntgaagtgaactgactccctcggtcagatacaatctttttgggtactccatgtangcacatgattctcgaaaggtaaagctccgccaaccttttgcccgtatatgtggtatgtactggtatgaagtgagc

SEQ ID NO: 31263 - DNA, 413 bp, Oryza sativa
  unsure (1)..(413): unsure at all n locations
tanagccatgaatccctattatgcatatctggatctggtttctgcanaacaaacatatanaatgagtagtatctgatgtaaatacagcacttgagaaaaatttaagtattttaaaatggttataaatatgtatatctcctcttgtcaatattgagttccccgagcggatgacttcctatgattaaacactctgcccgactagtcatagctcccgcacaccgggaggcagcctatgcacttcctaaacatgcatacgagtgacatgagttcatcattaatggaacaaagtttcacggatcagagtttactactcgggtacttttgcacatgttaagagcaaaaaataaattatcttatctctatgcttttgatttcttccaggtaatacttagcaccttgcattactcggtcca

SEQ ID NO: 31264 - DNA, 440 bp, Oryza sativa
  unsure (1)..(440): unsure at all n locations
agcttgcgcgaagccattactatggcgtaagttagcttttccatttcaatgtaccttgtcttcgctccttgcagtgcttcggagacgaagtagaccagtttttgtccgaactttgtttcttggacgagggcagcactcactgctaccggcgaagctgctaagtataatagcagttcgcttcctgggggtgggcttatcagagctggcaagctntgcaagtattgctttagctcgtcgaatgctgcttggaactctggtgtccaattaaactttcctgtgccccggagggtcttgaagaagggcaaacctctttcggctgcctttgagaggaatcgactgagtgccgcaattcggcttgcaatcttttgtacttcatgtacgcttgacggaggcttcatttgctggatggcatcgattttctcgggattcgcctcgatgcc

SEQ ID NO: 31265 - DNA, 454 bp, Oryza sativa
  unsure (1)..(454): unsure at all n locations
tgcttaatacatanaaggagctctctatacgacattccatattttcgcttcctttcatgacagaacctttcgggtgcgccatgtatactttttcctccacatctccatttataaaagcgcggcttacatccatctgatggaattcccaatcataatgtgccactagtgccattataatcctgaaagaatctttacaagagactggagaaaatgtgtgattggtatcaatcccttctctttgcgtgaagccttttgcccaagtcgcgctctaaacttttctatattccctctggagtcatatttggttgtgtagacccatttacagcctactggtttggctcctttaggaatttcctctaaatcccaaacatccgttagtttcattgatttcatttcatctttcattgattccaaccattcagatgagcgagcgcttntcatgggctcttcatat

SEQ ID NO: 31266 - DNA, 465 bp, Oryza sativa
  unsure (1)..(465): unsure at all n locations
actctgaccggatcttaagcactgagctgcagctgcaatgtggggggccactaaacttattataaaaagagaaacacccaaaggagattttttttttcagattatcatccaaagaatagcaaagcagtgcatgcgcaaatgcaactatcagagaatggagattggcattccttttggtgttttgggttcctttctaaattctgatgatggtgtatggatgtcatgttaagatataaaactttacttttgtggcatgaaagaaacataagcctaaatgtgcactcaactatatttgcttctcttggactaaggacccccatcgtttcgtttatcctctgcttattcataccgcttattagaaaaaagaaggtataagtaaaacttttatatacttatccttagtgatacaaaagtaaatgttgtaaaataaaccacaattaanaaaaatacaaaatcaacttcaaa

SEQ ID NO: 31267 - DNA, 398 bp, Oryza sativa
cgtcggagatcgaaccctatgcagcccaactttaaagcaagaactcgccgaaacaatgaaagtagaaataaagtggcgatgtgccgaaagtattattgaactgtccttctttttacatcgtctcggatcatatgtatacccaaaatacataaaatgtctttgtcggacacgactctacctctattacaacttataaatatgaacaaatcctttatgtggactcttaccgaatatatctataaagaaactactaaaaacatcctaattaatagatacagttgccttctttggactctttccatacatggcattaattcttgtgcggcgtctcaatcgatcccaacaatgattctagaaccaccttcctagaattgtcgtagttagtatcaactgatgct

SEQ ID NO: 31268 - DNA, 305 bp, Oryza sativa
agctataatgtacgtattgtaaagtccgaaccgaaatgaagaatttgtgtgaagttggtatttaattcacagcaatggtctattttcttttttcatttttaattccatatagtggacttggaggctggttatcgcctgatggcttgagccatggtttcttttgctcacccctacaaaatctgcaggacatcacgaatgatcaggcaatgtatgtgtttcctttctggcctttcactgtaccgaatttaaatcacatctttggttgggtgtacatgtgttcagatcagcgatgttcttcaaccctg

SEQ ID NO: 31269 - DNA, 321 bp, Oryza sativa
ctcagctgagactgtcccgcgggtcgctcctttcggcgaaatgttaatgcgcaacaacaagaaacacagtcgggagtatatgtctacctctgctccatactaagtgtagtcatgatattgccgcgcaactatgatcgagcttactttgatcatccgctttattggaaactatcttattattaacatttttgttggcatgaaatgataaaatatgaatagtacttacctgtgattatgttttattttcttaaaaaattttaaatgagaccaacgcgctaagttggacgcggaaaaccatggctgcacttattttgggactga

SEQ ID NO: 31270 - DNA, 366 bp, Oryza sativa
  unsure (1)..(366): unsure at all n locations
agcttgngctcgtctaaatgccctttccacctcttgttgttgtgaagaacgagagattacagcgtgaagaactgggagcccttcccctacaccagaggacccttncctgaagtcttatcttgatacgccctgctgatttttcccaccacaatgcatcaaaataaatgccgtggatgactcaagatactgtctctcattttgaagttcccatttcatatatattccggtgtgatgcattgcgtcgcactgattacctcccatccttttcaaatatgttaatttaacagcaacacattttctcttacatcattgccgtaaattctctatgtattgtgcttcacatgagaagaatgtctgctgaatgct

SEQ ID NO: 31271 - DNA, 475 bp, Oryza sativa
  unsure (1)..(475): unsure at all n locations
acagcaggcatgcaagcttatagctgaagacccaccctacaaggctttagttgatgttgcacgtacggctctgtaagttttccttcttttttcccagccgtaacacgccgcacacatttcttttacttcatttataaaaagcctggataagatggttcgtnccacacacacacacacacacacacacacacacacaacaaataataattccacaccagcagatactgggtcttctcgtggacaggcaaacagcaactacagctagcagtacatcttggactgtgttgaacacaatgtatgccctgcgacggtttacaatattgccataacgtaatcaccccgctctaaaaaaataataatcacgtaatcacttggtacttcgaatattaactaanacacatgcgcttgaaatatgtatacttattatcatgaaaaaggatttaagtctcccattccagtaatttctgttcatacg

SEQ ID NO: 31272 - DNA, 352 bp, Oryza sativa
  unsure (1)..(352): unsure at all n locations
caatctggctttctttttttttaattagccagcagaatggtgccaatccttctactttntttcagctgaagggtcaatctgaataagaatggtagattaattaagtgatgatgctagcatatgtcctcacttttaatggacatacctgcttgtaacctggtaaacttatgtctttgcggtatgaatatatttgacgagtttacaccatcttgatcctgtcagctgtttgttgggtggccttacaatatcggtttattagcttcttttgttttgcatttttactttcaatgtttatttaacctgtcatattgttgattgaccttttttttcccgtatactatggaaaaaacat

SEQ ID NO: 31273 - DNA, 138 bp, Oryza sativa
tttaaacaaacatcttagaggagcacagtctgatactatttttccactggagggacgaatctggttataatgagtatattagaaatggattactcctccagtatgtctgactttccacggacatacatgtctgtaacc

SEQ ID NO: 31274 - DNA, 456 bp, Oryza sativa
  unsure (1)..(456): unsure at all n locations
agctnnttaattgtcctccatgaccttatttcatatagaaacacacgtacgaaggtcaatatatatataagcagcacacaaacaccacacgttgtactagctagagtagtcttatttacacggcattaatatgtagctcaaaccacttgtatcgatctgtccaattgatacgatacgatcataatcattattgagataattttatctataagatataatatatcttgattaaatgcgtgcagggcatcgatcatgcatggatcgatcacttccatggatcaatttggctgcttgacgttgatgtggacgcataatcggcggctgccacctcttgctgcttgtcactgacctgaagaatgtctccttcatcagtataatgatccgcaggcttgtttgtagcatcattgctaagctgagaggcaacaaacttgtcaagaactctncagtcagtggtag

SEQ ID NO: 31275 - DNA, 331 bp, Oryza sativa
  unsure (1)..(331): unsure at all n locations
tgtacagaaatcagagtgccatacaaaagggacatctgcacagataggaaattaagagtgagcatacgcaaacaaatttgttgtcatacctcaacatatggtggcaaatcagttccaccttttgacaatgcactgccaaagaattgttccaagattgagattgaatggtccttcctaacagaaccaatatttttagactttccttcgttctcaatagaatacttatccattgcatcacctttccagtctccacttcttttagaatgctcgancaaattcagctgatatgtacacctccagatgaagtgtgtgtgttactacactacaatgt

SEQ ID NO: 31276 - DNA, 343 bp, Oryza sativa
aagcttgaatcctagatttaataaaacgtaacacgtcggcttagctgtccatgaatcacacttgagcacacaagagaaacaaatcgcaagatgcttcaacctaccaccagcaaccgagggtgtttgcagaaatactgatgatgcatcatcgatctcctcgagctgcttgccagggagagtggtcacgtacggtccggagagaagcgccggccgcggagagggtcctcgacaagtgcgtggctgctgcctgccggaatctcactcacgcgcgctgcctggaaaaagagcgacgcgacggccgacggagatggtgggggacgaggtggaggcggagagctacata

SEQ ID NO: 31277 - DNA, 461 bp, Oryza sativa
  unsure (1)..(461): unsure at all n locations
tatcaggtgaaagtccatgatctccgagatggtctccaagaatgtctcctcactagatcctggaaggatggcatcctctgcttcctctatgatggcctcgatttcagattctttnttgactgtntgcctgcataagatgctgccgatgtcataaggcgttaggcctctctctgcccccttcttcaaaagcattgtgctgatgcgcagaactcgggcacactgnggagatagcgcccacccgtggaacttgagaagcgcaatgtctntgtcagcatctagtgatccaatgtatgctcgcggttctggaccgaanggttcgcgggcttggggccagtagagccactcanaggtacaatcttcatactgcanaggggaaaaggtaaagactcgtaaactggtacagaaaaattngatgaactaagcangatagcatacanggaattaacttgtacaaaaataat

SEQ ID NO: 31278 - DNA, 374 bp, Oryza sativa
agcttattaagagatccgcgtgcgattattgatttgcgttagtggatctgtactaaacaccatccaaatatattttttacaaatggatgttctttacgctcatccgtgatcgaattgggggtgtctgtaaaatttgttttattatagtggtttatggtgcagagaatactattattaacattgtatatagtgttttttatagcttgtacagcgtagtacattgtgtttttctgacatctaaaccaattttccatttcaaaatcagtcaaccattggtgatgagcaaaaaaggagacggtcgtctagactcatgtgcgtattctgtttaccaaaagttcagtggtttacaaccttaagtctacaaacagacatgc

SEQ ID NO: 31279 - DNA, 396 bp, Oryza sativa
  unsure (1)..(396): unsure at all n locations
acccgggagatacctatagtacgttccattcaagcatatcacacatcctattttacctttaatttgacctgaaactgaaaacattgctggataatcgttaatggtcacgaagatgatggccttcactgtgaagtattcccttaagtactcgtcccacactttcaatccctctttccataaatcagccatatcttccaacaatggttcaagaattatgtcaatatcaataccaggctaacggngtccctgtatgaggatacatagtagtacgtattttcgcttttgacaaagccaggtaggaagattatacatggtgaaaagcactggccaagtactatgtgagctgctcatgtctcananaggattaactncatcagtactcanggcaaatctaat

SEQ ID NO: 31280 - DNA, 382 bp, Oryza sativa
agctttggatatagaagcatcacgcataagtctatcgttctgcatatgcgcataacctattagaactatacttccaatagaacagtcgaatctaacctctgaacagccaaagcatcagcagcctgggcttcatcaccttcttcaacagcttcatctccatcatccgcatcaagaaaaaatttctgtatgcaacatgctgaaaaaaggtataagtaagattgtacgcaaaaatgctacatagacatcacaagcacaatccactagtaaggtgaaggcctgaagggccatgctattctaaatgaatataccacagaacatactggcattgtatatggaatccaactcccaaaatactcaactcataatacacaacgaagttcac

SEQ ID NO: 31281 - DNA, 216 bp, Oryza sativa
  unsure (1)..(216): unsure at all n locations
ttaaagaaatatatcgntaacatgttattaccatctcttaattgcgggtcatatttggtacttgcatatggacctttttagcttcacactggtttattctttccacaaaaaagtaattccgtggtggaattgtttggcatgtgggccctctaacctcacatgtcatttctctttcttaataaaaagttgggatttgttagcggtgggtggtgaacc

SEQ ID NO: 31282 - DNA, 426 bp, Oryza sativa
  unsure (1)..(426): unsure at all n locations
agcttacctattcattgaatatagatggtatatttagagctaacgaaaaaatatttacagcatcacggttggggtctacggtaacatctctgctaggcgtttggctcccgccatagcccaagattttgcctcttccttaatcttcgagattagggccaccatggttagttccttgtttcggaaaattcgttggtttcgctcctttcaaatttcccaagagattagaaggattaggaatcgagtcccatgcttgggtgcaccttgacgtgttgcaagcgattcccaccagtagtgtaccgtggttgattgcgcccagtttatcggcttgatgggttcacaggcaacccaggtagcaattgcatcctagattttccttgaatatatnggtataatttgtatgcactaagcttatttaaatttccttat

SEQ ID NO: 31283 - DNA, 434 bp, Oryza sativa
cgatgagtcatcataattttgctctatctcaagagcaatatgttgtattactcacgtatgtcggtaagacacttgcatgctaatgattaattatattatagcgagatatttgtgctattatgagagtgtatggatcgctcaactaaatacatgttactgatattttatttttcagggtacaaaatacatgaacatccatgtaaagatcatattcagtgggttacaagcccaagtgcccaactagaatatgagactccctccttttttacttatgcgttaggacatgtacagtgtccaatgcacatgtttcatctgtgcttactacgagtatatatccacaacaataatttaaagcataacaacatgatagtattttttcaagagaatacacttatcgcatttacacatgtcaaatctttttttctgcatataat

SEQ ID NO: 31284 - DNA, 395 bp, Oryza sativa
gagcttactggttacttataaattataatggatttaagtcgtaaacttctttaccaatgttctcctgatctggaagtattgtatcattgaggggttcaagctgttgtaaaccttggtcatcgttgttctcatgagcaatcagcaccggatcattgaaatttgctttgccaactgtatgtacgtaacaacatcgaatatataagatctatgcaattgacaagaaagatatgttgggctgtgaaaaatgcaactgttttttatgaaaatgccggtcattagatgtgattctgatatgaacatatctcagtacaggaaatgtatacattgtcaatatcatattcagatgtagataagcacatgatcgtaaatgaacaacactccatgtcaacatattt

SEQ ID NO: 31285 - DNA, 464 bp, Oryza sativa
  unsure (1)..(464): unsure at all n locations
cttctgactgagagatcaatttggagcatgaatacactggtatcagcacatagaagcatcaccttaacatcctcagcataacccaatctcactaaatgacttgtcttgaccccagagcccagttcaagaaccttgtatagctcagctgtcctctgcagcacccatctggtaacaccttcagaacagaccttcctctcccatanttgaaggctgtcgtacgacagagtgacaacgccaagataaccaccttctgccagaaagatctgagacatgtagtggctataacaatntggattggaaggccactcaatcacagcaagggtttgcctatccaaatcaaactgaagaatggcactgccaagaccagtggggaaccaatacagggaatggccaacgagtatgccaggatcaacaaaagcatagaccaagaatggagcangagtgaagatgagaaatgctcatct

SEQ ID NO: 31286 - DNA, 393 bp, Oryza sativa
agctatggtcgtccaatgtagtgcattttaattatgaatattcacatttcaatccagtttggattctggattctcaatatgttgactacggcattgaccaaactaatcgaggtgccaaatgaactttaaaagttataaaattttcgggagggtcattgctgtatctatggggaattgaatcttcatctgttttcaatcattaccagaaattttagtttaatttaatctataaataagtacattggagaattttttatacctagttgcaacatattaccaaaacatccatataatttatttaaattggtcgaaacatcataaactatcaaacaatacatatttaaggcagtgtatgaaaaattgtagattctataccaaatttatcacacaact

SEQ ID NO: 31287 - DNA, 418 bp, Oryza sativa
  unsure (1)..(418): unsure at all n locations
tatcttnctcatcttgaatgcaaanaaaaagctgtatgcatctgaaccccataaggcaaacacaacaactcatcttccagcgatcaagatactaagaccaccattctacaacaatgtacttgacgtcatgagtggggatgctatgatcataccatatagggcattgctgatatgagtggcgattaagacttcttgtctattggtattcatataagcgatctggggtttgcggtcacgagaatgggtgagcaacgacaattaggggatctcataccaaggtaaattatgagggggntttttgaacaaatcatttataggtggaatctcaactttgggtggtatttgaatttttcctttttttcatgaggaggtggcgccgaggtggattcgcgcaagagaagatgtcgggtcgatttgt

SEQ ID NO: 31288 - DNA, 405 bp, Oryza sativa
agcttctagttggaactatgaaaaaaacaaaatttatgcacaacataaacaaaaactgctggctgtagtcaacagtttcatgcccatacaagggggaaatttagggccgttagtttgttactgaaataaactttatcaaatttaggtaaggtaacaaattttggtagggtaacgaacctaacaaactcttaccatcacaaccttacattgcctaactctaccaaaatttggtgattctggaatcttccattcagaaaactaagccaaaatttgataaggtcacaaaccaaacaattctaccattttaaccttaccaaattttggtaacaccaaaatttggcattgtcaaaatttgtaaggttgattcagccaacaaaccaaacatgcgctcaatcatttccctat

SEQ ID NO: 31289 - DNA, 472 bp, Oryza sativa
  unsure (1)..(472): unsure at all n locations
tctttagtagatcaatttccttaaccgaatatagcaagaatctggcttctgacgacttgacaactctcatcggctaatctcaggacttcgaagccgatgctgactataagccgatgactacttcgggcttaccaaatttcactggtaacacatgccccccagtnttggagtatgagaattcatgcttcaaaatttctttgcttgataactccaaaaccgatcttccttngcttcttgcaatcggctttcatgagccgatactgatgtgctccaccatgctaaaactgatgcgctccaccatgctaaaactgatgcgctngccccccgagccaatattgttgttcctccattaaattctccaccgtaaccatgatcttggcattgacttcttcatcagacatgtggatataaaattcgtggtcccaccagggcgtgccaattgattgacgaaaaatcgaacacaccggcctgg

SEQ ID NO: 31290 - DNA, 458 bp, Oryza sativa
  unsure (1)..(458): unsure at all n locations
agcttgcgggcattgtgggctacgatgagtntatgctgtgcgtccgcaccggcctccatgggcggctcacccctctgctcatcaacctgcctcgcagtcaggagaccctacatatcgtccttattaggaccaacaccacaggtaataatcagactaatttgatatgcatgttgctgctgaatactctgaatattgtttctaaatgtcctgcgtaacttgagattattgataatgccgtagatgttctgaattctgaatttctgataggggatgacagtgactgaatttcctgaagcatttagggtgtctctgtctttttattgnggaattttgacgctgcccagcttgtagatgtggaatctagttagttagaggtatnttacttgttcggatgaccaattgttacaccagttagaacacaagtgagttctttgaaatttaaactacatcaatgagtc

SEQ ID NO: 31291 - DNA, 330 bp, Oryza sativa
  unsure (1)..(330): unsure at all n locations
ctaacatgcaagcatatcacatcatcactcattagcaattattattcatttctatttaagatcccatgtaagcatgccacattctcactcactagcacttactattctaacttatattaaatcccatgcaaatatgacacatattcactaactagcaattactatcccatgcaagcatgatacatcacctacaaaacatcttccttattattttattaacatttcaactatcatcgttncaacaatattcaagatatactcatccatgaaccccagcgaagcgcggggtatcactttactcgaaaagtagcacgttatctgcgtgcatct

SEQ ID NO: 31292 - DNA, 519 bp, Oryza sativa
  unsure (1)..(519): unsure at all n locations
ctcaagcttagagtanataggaagaacagagaagaccgtgatgtcgtaattgtcttatattgaataactcgcaatgtatggaggatgtcatttcttctatccatttagtatatctgatcaatcagaaattcacaaggaagctcatgcatatatgacctgcagatactccattntctgtccttgatcaatccactcgtattcgcatgaagtgatntctgcacatccatctttgtcatgtaatcttctatatgtgacgaatagcacggatcataccctgagtacatcctcgtgcctttaagcctcttctgaaatttgcattcaattatcttcagctcattctgatttcatatttgctacagtacaaatactagttgttaagcattacagttaccttagcattcatatcagctgtactgtacgatgtggaaaagagggatgagtcatcagtgttgcactatgtgatacacattgagatatcgacatatcgactgatatatatgattccctacatggtacact

SEQ ID NO: 31293 - DNA, 425 bp, Oryza sativa
  unsure (1)..(425): unsure at all n locations
gctttataaaatggaaggctgacttcaaggaagagtttactctacatgtgcatacagtaaaagaagttgataatacaatttggcaatcatggatacaacagctattttgatcccctctgtaaatctcctgtaaattctgcccctctctcttttgtattcttcttctgtagntattttctcaataaagcgcagtaggagcttctgctgctgttatttcccgtcaaaaaaaagttaatagcattgttgccagagaaaatattgatggtttatagttctaatatgcctaattacagtacaaaactataaatgctacgagccaattatatgggtatgggtactcattgggtacccgttacccgcatgggtgttggtatgaggacgaatttgtacccgcgatagatgtgggtatttaagtgggaatattt

SEQ ID NO: 31294 - DNA, 416 bp, Oryza sativa
  unsure (1)..(416): unsure at all n locations
ctggaggtagtctatctggagaaaagaaagaaaagacaacacagggcaactataaccgattcccagatcatcatgtaaactatctactacaggccgaagctgaaagatatctcttccatcaacttctgcaaaatgtgcaacaaatggagcacactccatagctgcatcaaagagagtgatctgtgaacaacctgcanaactgactttaaaagtttgtntacatctaactatacctaccttccaatttctcttaataattgcaatcaaagcacattgcattctattctcccctaccagaacaatgcgatcttaattngaaatataataagtagacagcccatcaacccatgtgaaaagtanatctcacagagcaacctgagtaagccaagtaatcaacacaacggtgaccatctgat

SEQ ID NO: 31295 - DNA, 409 bp, Oryza sativa
  unsure (1)..(409): unsure at all n locations
agcttganagcgcgcacacaaacacacagcatattgtatttctggcctataagcagttagatacaacaaagatccaatcatacttctatattctttttgatcaacggcttcaccatcttcatcaagatccaacacagctgttgaatcaattggtgttgaaatcggcttgcaattctccatcttgaaccgtctcaaaagatccttcgtatacttcgnttgatgcacaaaagtaccttgaggtgtttgcttaatttgcaatcccaaaaagtacgataactcacccatcatgctcatctcanattccctgcgcatagtctcagcaaaatctacaaccaaagcatgagtcgaacaaccaaagatgatatcatccacataaatctaaacgaaaagttgattatcaccatgctta

SEQ ID NO: 31296 - DNA, 438 bp, Oryza sativa
ttaagcacctgagctgcagcttattcccgataggttagttttatcggtctgaaatgcgcgactcttgtgacctatcgaccactacccggatagaatcatgtgcagccgacgtgctgggtataccggttataaaatccattcctatatcttcccacttccactctggaatctttaacggatgtaacagatcggctggcttctgatgttctgccttgacccgctgacatacatcacatagagccacatattctgctatctcacgacgcatactggcccaccagaattgttgcgttaaatcttgatacatcttagtgcttgcagcgtgaatggaatacaaagtttcatgagcttctttcatgatggtagccttcaactccttattatctgggacgcagattctttgtcatactacacagtaccttgttcatcttctacaaa

SEQ ID NO: 31297 - DNA, 437 bp, Oryza sativa
agcttggaaagtggatgggtttggagactatatgattttatacaggttcaggccttcttattcaagaagtaataccctactcctgtccggggatgattccgccgagtgtgttattgattgtataaactggaaaaaagaatcgccccaagaggaacccggacccctccttatatatgggaagggatccgtattacaaagtacagtccatatcctaacggaatatgggattacagataaaatacaatcgtaaccgactaggatcccgggtattttcttgacatacaagtttagaatctaacccgagtcctcataaagatattctatctatatttggtaccgtatatccagctggaatataacacgcatgtagatatggggtaaccataatctccacaggcggtttgttaagcacaccttaattttcgtacacaactata

SEQ ID NO: 31298 - DNA, 417 bp, Oryza sativa
  unsure (1)..(417): unsure at all n locations
gagggctaacccattattcagtngatcagatgaaaagtccaactccccgtctagaaccataaacttgaggcgacgcaagaacaaggtggtgaatacacttgatgtaatattgttaccttgtaagtttagagtcttaaggctctcaagctttcttagagcacttaacagagctttgacattaccatttgagattttccaaataactaagccctcaagatggatcatctctccaagtgtattatccaagccttgctcanaatcttcaagttctatggaatcaagtgtatgtagctgcttcaaattgacagtttgcttgggtaaattgaggataaaaccaaacacatgccttagtgtcttgatcatccaaaatgcctttgggagcttnctgactttagtttccctttacatccaatgttg

SEQ ID NO: 31299 - DNA, 319 bp, Oryza sativa
ttttatacacgctcacgcctctttattcattaagcaataccctactccttgcccggcgatgatatccgccgcaccgtgtctatagattgtatacactggtagaaagaagtcgcccccgatgaacccggacccgtccttatataggggaagggatccgtactacaacgatcagtccatctcctaacggaatatcggattacagatcatatacaatcgcaaccgactaggatcccgggtctattctagacatactagggtacaatctaacccgagtcctcatcgagatattctatctatattaggtaccgtatatgcagct

SEQ ID NO: 31300 - DNA, 387 bp, Oryza sativa
  unsure (1)..(387): unsure at all n locations
ctataaaactcagcttgctgcttgttatacacatctgagttacttttgtttcctttaatgtaagcatagtcagattagggagggctaacccattattcagntgatcaaaagaaaagtccaactccccgtctagaaccataaacttgaggcgacgcatgaacaaggtggtgaatacacttgatgtaatattggtaccttgtaagtttagagtcttaaggctctcaagctttcttagagcacttaacagagctttgacattaccatttgagattntccaaataactaagccctctagatggatcatctctccaagtgtattatccaagccttgctcaaaatcttcaagttctatggaatcangtgtatgtagctgcttcacattgacag

SEQ ID NO: 31301 - DNA, 384 bp, Oryza sativa
  unsure (1)..(384): unsure at all n locations
agcttatactatataaattataaattaacttcattctagccatgtacaaaagttagagattntattgaagagtcattcaatctataagctgtgggtcaagtatagacatgtcctataatatcgacatatttagaatacggtaattaccatattataagaaacggtaatttccgcaagaatacggtaaatacggaaacgatcggtataacagcaaaaccatttccgttttcatttccatattttttaccatttccatttttgttttggtcgattaccatttccatatggctcggccggtagaaagtcgaaaacgaacgccggtcggccggtaattaccgttaccgttttcacccctactaacaaccttatctaataaagcctaac

SEQ ID NO: 31302 - DNA, 458 bp, Oryza sativa
  unsure (1)..(458): unsure at all n locations
agcttcacaattatgttagagaacaatggccaaatctcttctttaaaaagaggtattgcagcccctctcctccctttcatatctccgcgtcagcaaaatggatgttagagccacctcatttattcattngntatatgctcttatgattattgaattgtgtggatagaaaatatgtagtttaaaaacaataatgcacttagaatataaagtacattcttaattaaaaaacataaataggatctcacaattgtacgacacgttgtacttatcttctgtggcttgcacatattggcatgttccaacaaagttcattggattctttctcaacatgccaaatctatttttctgttcaacctactttctataattgggttggtaagctttcttttgttatggatgtgatgatactnttaataattagcgtacttatacgtatgtaaaaaaaatcaaagagtgtt

SEQ ID NO: 31303 - DNA, 246 bp, Oryza sativa
  unsure (1)..(246): unsure at all n locations
aacaaactgatgaacatcctctcccttttatggcctagaacattcggttgatgcacatgtctctttgtagtgcagccaggtgatgatcaggaaaagtcactgaacaaagccatggcagagatggttgttntaatgaacaggattgacaagaacagagatggtgtttatgtgtaagcctcttctctcgggtcattggaagctctcatagagtttctaaagagcccagctgtcaatatccctatttat

SEQ ID NO: 31304 - DNA, 392 bp, Oryza sativa
  unsure (1)..(392): unsure at all n locations
caagcttgtctggactggatgtatcgtctctgtcgctgcangagagctcaggtccatgtctatgtagtcctcttcttggagtggttggtcatggctttgagggccatgtctcgccattgttgttgctaccttgtcttgcgtgtttggtgcgtgtttctggtttggttttggcagagatagtggttgtgttttacgaaggaagtggaaggagtttcggcatgctctaaagcaggatgcctgtagctaaagagtcttattaattggcttatactactactacttatgagggacctacccttaaaccctatgatctgccttttgttagcatcctaatcctctttctgtcacggcaatatgcaatgcagtactactatggtaccagtatggtgcat

SEQ ID NO: 31305 - DNA, 412 bp, Oryza sativa
tgatatgctaacatagcaagtacgtgctatgcttgttcatcattacatatgcgagagaaagggcgaaattggagattacttcaatgagtgaaatcacaatatgcatgaagaagtggcagcaaccaatcccagttaagaggcggcaaaacatttttggctgattggagccatgcataatgcaatgatgtaaccacccctactatgtacgatgttcagaaaaaggagcacacgatactgaatgaagaagcctcacctcaactagaacccacaatgggctgggagatgcctttcttctctcctcttctctgctagaattggctttctatcaatataccatgccttgagaagccattgccccaaggtgaagcagagctttgttctacgcaagtaggatgtcctgctctttataaat

SEQ ID NO: 31306 - DNA, 180 bp, Oryza sativa
  unsure (1)..(180): unsure at all n locations
agcttcatctttcctgtgttaattctagcattcatagtgcggaaacttgcacatcttgtgtcaactgaagcctgaaggtacggcggctcccctgaccattctttgtgtctggttcctggattattcacattttggtctttttgaaaaacttatatccgagantaacccctgaaaaaactt

SEQ ID NO: 31307 - DNA, 422 bp, Oryza sativa
  unsure (1)..(422): unsure at all n locations
agctngacgctacccctacctggcgcgccaactgtcgaaactagatttcggcaataataaaagggggtggctatcaagctaggaaagtgtatgggtttggagacaaaggatttatacaggttcaggccttcttataaaagaagtaataccctactcctgtccggggatgaatccgccgagtgtgttattgattgtatgatttggagaaaatccaacatctgcccctagaggcacccggaccccccttatatatggggaggagtccgtgttacaaaagatatctatatccctaacggaatatgcagatacagattaaatacagtcgtgaccgactaagtctcaaggtgtttccttgatgtacaagttgagaaacaaacccgagatacaagtaagatattctatctatattcggtatcctatat

SEQ ID NO: 31308 - DNA, 464 bp, Oryza sativa
  unsure (1)..(464): unsure at all n locations
ntgnntgagcctaaacccaaagaagctattaagaactntcagttctctcagactatgtaganaaaatcaaacaaggcaatgatagaccaagtaagcaaattaaattgataaaaaatcacactccattattatgatgatagcccccgactgacaacggcaagaagaaaacttggtgttgacagtcaaaatagggaaatacaatgataagcttaagcatagaaacggcgaagatgttcaatattccaagagttgtcgacgagagtaccgtcttcgcgcttgagtcgataggaacctggccgggtaacttcagagatgataaacggcccctcccataaaggagataacttgtgccgatctcgtgtagtttgaattttccgcanaaccaggtcgccgactaanaaggcacgggatcgaacattgcgatatgataacgccgcaacccttgtagtatcgagccgaccgaa

SEQ ID NO: 31309 - DNA, 423 bp, Oryza sativa
  unsure (1)..(423): unsure at all n locations
agcttgtataattaatgctccacttattatatactaattgttggtctcgtgtcacgtgcctccaaaatccacactcaattgctgaatcgaacacacccctagtccgggagggttgttgggctatgatttttaagtgccatgcgaaactaacaaactatttatacatgattaattgagtattaattattacatacataaaaattatttattttatttattttaaaaaacttatatattgatttttatggaaaatattgtgtgccttgtatgatttctttgtgatgtttcactcattgngacttaatgttctatacagtggttgttggtactgcagttagtattttctgaatgttgtatttctctacaacattntataaaatgaaatgaaacgttttagtatgtaatgaaacatttgttttactc

SEQ ID NO: 31310 - DNA, 499 bp, Oryza sativa
  unsure (1)..(499): unsure at all n locations
tcgagccgncgccattatnggcccgggaacgacaagaggcattgagcttngcctattaacaaggggatcaaggggtggagcatctgtggcctcctgcacaagaagagcagcaccaccaacagtgtgggtgccactgccagtgcgttcgccggcgaggcacgggcggcgccaccggagctccgggcaaggggttacgacggccagatgctccggtgcaacagcagcgtcagcgcaagaagctcattcagtggaattggaagctcattcaatggcggcaggttggggatgaggagggcagatgaagttttgcttgagagggaattcatcgccaggtactcttcgtcttcctcctgcaggtatcagcttcacaaggatgattactccaactccattgccaacaattctggagctggagctggaagcaggcctcctcgttccttcaccttgccgaggagctcacttggactctactactactgaactcaatttattattatta

SEQ ID NO: 31311 - DNA, 407 bp, Oryza sativa
  unsure (1)..(407): unsure at all n locations
atgctttgtttgaaatcatttttgaaatcactaagtgatttatttctttttaactttgggtcgaaagaagacttgcgtctcgattcgacttaagagatgcttttcaacaactcaaatggtaatgtaccgacctcctgngtcagatcattacttatcggctcccagagccatttcacttgattaggcggctcccagagcctttttcattnttgcggactcccaaagtccagctgcccagcagcaaagcaatccgcttccactcgggaagcctagtctatgatgcccacagacatcccgaatcacacagattcgtttctgaccacctaggtcatccatctgccacataggctgatntctggtacgaattccaattcacaacaacttttcgcacagcacatgcaatcaaa

SEQ ID NO: 31312 - DNA, 476 bp, Oryza sativa
ggatcttaagtcacctgggctgcaagctgttagctggcctgcaagctgccttttcgcatggtattaactccgtccaggtggaaactgattcatccatcctagagagagccttccactctcatgattatgctctgtctccatgcagttctatcgtaagggagatcaaggacctcgtccatttaaatttctctagtggtgtgtttaattatgctccgcgatcatgtaatgtggctgcgcataagctatctcaaatgggtgtgtgctgggaaccgggtcaagcaagtgtgtggactgaccctgtccctgacattgttcaaactattgtggatcgtgatttcactgatcctagtatgtaataaagcgcgccggttgaactaaaaaaaaaatacaagggttacccaattgggaccccaaatagaccaagcatggtcatgcatattacaaaatgtcaaataaagtaaatgaaatggcggaag

SEQ ID NO: 31313 - DNA, 459 bp, Oryza sativa
  unsure (1)..(459): unsure at all n locations
aagtcacctgaggctgcagctttaagacttgttcttgcgactgatgggattttcttaatttactatgaagtttaaagggaccttgttgacaacgattgggattgatcatggataaaagcttgtgccccttgcatttgcattggtagaaaaggagaacaaggtaaagtcatacgtgtactgaggcttcgtcctgcaaattaagctttgccacacgttggcaagttgagatggcctccacgctaccgggggcatgacattcangcattcaacgctctttaacttggcaccaacacgtgaactcagtgtgatctcccagtttagttttgacacaggtattggtcatggtaaaattttgaaataagttctcctaaagggctaagttataccagtgtacgtaggtaagacacagtatcatcactagagtaatgttgtacttattggatggtgattataactgat

SEQ ID NO: 31314 - DNA, 404 bp, Oryza sativa
  unsure (1)..(404): unsure at all n locations
tatttgtcanacgagagctggccaaagcatcaatcggacgagcgtctacaggatttgaatcttgcaaaattcctccataactccaaatgagctgcccaacttttcttgtcctcatgaatcacatgctcttaagatggttgagttccaaatagttaagttcaagagcatacatccatagacatgtacaatattaccaatgattctaatgcaaaagtctttttttgctacttagacttgtcttatagatagatcaagcatccaccctatgaaagcatcatgctgtcttgctatattatttcttcacgatggcgtgtgtaccatccatgagtctcgatgattctacagactagtgggagccacgaatttcaaatataattgacggccgtttgcgtaaaccacacaac

SEQ ID NO: 31315 - DNA, 403 bp, Oryza sativa
  unsure (1)..(403): unsure at all n locations
agcttcaccgccgcctcctttgggttcggtgttcgcctccgctttgctgacctctaggcgaagagcctaaatcttcggctcgatgagattgtagtaatcggttagagcggtagaatgtgcttgctcctttttgagctcagccttgaggcgctctatctcagccttcgcctcgctccccttctccaattcagcttggagccgcttattctcagccttcgcctccttgagggtattggcgaggccctccatctccaagctcttgcggcccagttcgtcgtccttggctcgaagacggttcttgaacccgtcaaggcaagcccgcatagtccgttcggttgaacaatgggccgcgagaatctagatcaaaagaanaagagagggcgaagaggacaagcgttaacat

SEQ ID NO: 31316 - DNA, 427 bp, Oryza sativa
  unsure (1)..(427): unsure at all n locations
ggcacnctgatgtaccggttgatagaacagatcgtgcatctgtggatctcttgaaagaaatgcatcanaggggaatcgaacccaatgttacaagctactctgtcatcctgcatgtttacagtcgtgcgcataaacctgaactatgtctctgtatgttccgctcaatgaaagagagaggcatttgtcccacggtggcaacctacacttctgtgatcaagtgccttgcttcctgtgggagattggatgatgctgagagcttgcttgatgagatggcaagtgagggagtatgctcctcgccggccacatacaattggttcttcaaagagtatcgagggagaaaagatgtgaatggtgccctacagctgtacaataagatgaaggcccctgggtcaccagccacacctgatattcacacttactacatact

SEQ ID NO: 31317 - DNA, 264 bp, Oryza sativa
  unsure (1)..(264): unsure at all n locations
ctcgaccccggacctctgagtcacctgcngcatgcaagcttaccagattctatcgattcgatctatcttcaataggtcgatgggagcatctattgattttttcgacagacgaccattctgcaagggactagctagggagttgtcgacacgttttgaggtccaaaactttcaaaattcttgacttcaggatatgtcatccatggttataggggaacaatccacactattacaaaccatgaatcttagtgtccaagctgattgaac

SEQ ID NO: 31318 - DNA, 488 bp, Oryza sativa
  unsure (1)..(488): unsure at all n locations
tgcatctntgaaataatcatgaaactcatgctccattcgtgatctatgtataaacgaactangagcaacgtaactatacatgtagatgcacaagttgacaaggaaaggggaaacaacttcaacttaagcaaatcattactaccggctttaccacattgctcaataaattggccgatatgttccattgttgttatagcatcctcacctgtgaatttcgtgaagatgggcacttcaaatccttgcgggtatggaaccgaatctacatgttcacgatacggcctttaatatatatgcatggctactttggattctatntcactactatcccgcaagacattgtcatcatcttttccaacattcacatgaccgatttgtgactcgggcttaagtgacaatgctatttcacttntgcttgtgatacaatccgaactgtcatatagttcggctatatcttcaatggcattattctctaagctagtaacacaatc

SEQ ID NO: 31319 - DNA, 290 bp, Oryza sativa
  unsure (1)..(290): unsure at all n locations
agcttncttccatgctcggactccacgagcagccttaccttcgccttcaccgcctcggcggtcagccacccttgcagacatcgctccatcttcacgccgacgcccatgtcgttcaccatgagcaccttgttgatactctgctccgcgtacattgggcagcacagaatctgcacgcccgcggcgatcccctccagcaccgagttccacccgcagagcgtcactaacgcctcggtggcgcggaggctgaagacactcggctggggcacccacgtgttgacgacgaggccgcc

SEQ ID NO: 31320 - DNA, 146 bp, Oryza sativa
  unsure (1)..(146): unsure at all n locations
agcttgtacgggcagctggaggaggaataagacctatatataggggtgggactttagtcccggcagtcttcngcgccatcacaaagtattaatcggtttcagccgttcaacgggcttgctcctttttgagctcaacctttaggcgc

SEQ ID NO: 31321 - DNA, 475 bp, Oryza sativa
  unsure (1)..(475): unsure at all n locations
ngtggagaagtttgaattgaccctaaaaatgctttttcattttgggactgggttggtggtcgctatagtggtgagatttttttttcaatttanaaatatcagctaccttatcattatgtctggttggaactgtagtccaatgttgcagtttgcagtgctgttggtgtcctgcccttatctcttcaatatggttttccgattgttcagaagtatgcatctgaacctatattgcattctcaaatgtctacttttttttattacaaataagtaaatacaagatctgtangagtttgaactttgtaacacaggatcaatttcattactataaaatgagtccgtgttcctttagtcttcttgtgttcagaatacacatattatgccagatnnttgaaaaccatggcactatggtagtaaacaatgatactagaaaataaagagcttatagcacgataatgacagtgcagactaatcttat

SEQ ID NO: 31322 - DNA, 415 bp, Oryza sativa
  unsure (1)..(415): unsure at all n locations
agcttatactatataaattataaattaacttcattttagccatgtacaaaagttagagattttattgaagagtcattcaatctataagctgtgggtcaagtatagacatgtcctataatatcgacatatttagaatacggtaattaccatattataagaaacggtaatttccgcaagaatacggtaaatacggaaacgatcggtataacagcaaaaccatttccgttttcatttccatattttttaccatttccatttttgttttggtcgattaccatttccatatggctcggccggtagaaagtcgaaaacgaacgccggtcggccggtaattaccgntaccgttttcacccctactaacaaccttatctaataaagcctaacaaacctctaaaaccttatctataaagctaac

SEQ ID NO: 31323 - DNA, 501 bp, Oryza sativa
  unsure (1)..(501): unsure at all n locations
tagctcacaattgaacatgcatatactgatctataatacctattctgttacgatctttactcgtccatatcgggtgcaggggagacagcaatctgagttcacaaacactgttggaagcaccccaagtcgctntcagccagcatcgctctcctgcaaaacaaaaggggttaactacatgaaaaagtgctggggtgcgtaaatcggctggcgctgaacagtttatgtngaaaatagctagtgaatcatgaatctgatcctacaatcggtccattttgcctgtacaaattcacaaactctcgctattaaaaaggaaatggaaatgacagccatgcagtggccaactgatgattcattcaagaatgcacaaactgagatgatccatgcctcctctcagaccnggcaactcaacctctctactatatcacatccgacatccaccagtgacagaactgagatcgcattggcccgcagctcccagatcatacatacccgatccatcca

SEQ ID NO: 31324 - DNA, 150 bp, Oryza sativa
agagactgagagatgggtattacagtaccataggaaacgtcaaacatgtaccgtgcagaaaatccacattgtctgaaagttgtataacaaacaaaccacacctgataatggatggactacgctgaaactagaagtttgttattaaaggga

SEQ ID NO: 31325 - DNA, 343 bp, Oryza sativa
  unsure (1)..(343): unsure at all n locations
aaactacagnggacaccgatgcggcataggacgctgctaggttccttggtgcctatggtcaacattggcattgacctccaagaggggaccaactcccctctatcttctccatctagggatggcaacggggccgcccccgcccccgaatgaagatgcggngccaaaccatcccncgcccgcttgggggacctacaacccgaccggggccccgcaatgtgtagccactccatccaatcagcaaaaaaaaagatacaagataatcgctattcagcgagaacaaatcatgtacatacttcacacatcatcaaanaagcacgaatacttggataggaccatcaaaatt

SEQ ID NO: 31326 - DNA, 464 bp, Oryza sativa
  unsure (1)..(464): unsure at all n locations
agcttaccctcntctgaatctcattntgtactgaatcacccacatacgaatcaatttagagatttacccacattgttacatccatgaactgatgagttaggagatttactgaatctgatttctgcctgtttactaaataaggctccaagagagacatatgttggctattactcggtgctgtgaatacaatgttacttacttcttgctttgtttggttgttttttttttctgaacggaaaaatagcattagtgtgccttttcattgaatatagcacgagaaaatacaacccctaggggtaaagaaaaaatgttttttgaaagaacccaccggagctggttttatattatagagaggttagaanaacactgtacagggggtgcggtgtagtacttgaaaaacacttccccgctacattaanggtgataaagaactactctcgcgatattacattctgcacttcctt

SEQ ID NO: 31327 - DNA, 460 bp, Oryza sativa
gcttatcgtgggtgagccatcttttactcctatccgcttgatttctttttctctcacacgatcgaacccaattggagctgaaaagcactccttggtccttgcacaacttcccaacgcattcaattcctaatgcattacaaaatcagatcatggctatgcgacccactttagccgcctagcaacggctgatccatcgtcgtacgtgttgggcaccccctgattcgttcttgcgattcttgaaaatatttcaagaggcttttttcacactggcacatgatgattgaagaagaggcaagcagctatttatcttgagaatttggggcattagtactctgcacgagcctaggacaccaccccactaggatgaaacggatcgaatatggcggaactaacttatatattcgtctcatattttcttaaatcaaatcgatataaaaccgatctaaacggaatcaatata

SEQ ID NO: 31328 - DNA, 418 bp, Oryza sativa
  unsure (1)..(418): unsure at all n locations
agctngaaagcgtgcacacaaacacacaacaaattgtatgtctggcctataagcagttagatacaacaaagatccaatcatacttctatattccttttgatcaacagcttcaccatcttcatcaggatccaatacagctgtagaaccaattggtgttgaaattggcttgcaattctccatcttgaaccgcctcaaaagatccttcgtatacttcgtttgatgcacaaatgtaccttgagatgtttgcttaatttgcaatcccaaaaagtacgataactcactcatcatgctcatctcaaattccctgcgcatagtctcagcaaactctacaaccaaagcgtgagttgaacaaccaaagataatatcatccacataaatctgaacaaaaagttgattatcaccatgcttaagaacaaaa

SEQ ID NO: 31329 - DNA, 274 bp, Oryza sativa
  unsure (1)..(274): unsure at all n locations
ctataatagaataggaaagaccaagaactttatctatctaggaaatatcgatttaatgcanagctccaaactaagcaaaagataaactgcttggcaacattatagccgaccaatgtccttctatgacatgctctaaactagccatacaacttccgttgtcaaagcaacttattagacagacactactaaccattggtcatcaaccacaggtcgccatttagcactggatccatccgatgagacgaggacctagaccgggtcaacaccctagtca

SEQ ID NO: 31330 - DNA, 454 bp, Oryza sativa
  unsure (1)..(454): unsure at all n locations
agcttgctcgaatgtaaatatgtatatcttactttcttcggntataaatattngacgtttataataagattcgggtaattgactataaattttatattataatgagaggtaagttaattttactccattaaactatttaattaaatcacttaactcccaaaactatttgtggatcattttacaccttgaactatggaaaaagattcactctactttctaacaacattcctcttctttttttttctctttatataaactacatttaagttgcagttttgtagagcaacagatggcatttttatcatagtttgacaatatcttcaaaaaaaaatcatggctatttgcttgcaatttaaagtctcgatgattaaattagtctaggtgcttccaacctaaacaatgataaaaaaatctaacnaaaatggagatctgagntgtatatatctatatcatc

SEQ ID NO: 31331 - DNA, 488 bp, Oryza sativa
  unsure (1)..(488): unsure at all n locations
aactcagcttcttacaaaccaacacttcttctcnccatttcctctatgttgtgtcttggtcatattagctctgctatgatttcccccaatatggatcagaggtctgtttttgttccaattcagagcaaccttcctagcattagcagccttttcatagtttttagcataccaataagattctagcagcccctgnggtttgtaaccacacacatcatgttttatatccccccttaattctcctatgaaacagctgttcaggtatagttcttgcanacaaggatgatcccttctcactatgtccacatattcttcanacttgtcaatgtactgctcaaccgattggtatatagtttcacattctggaagagctctactgcctcatgtacatcagcagctganaacctggtgcaccatagcgcaccattggtgccaagaaatcatctgccagggaattcctatanccctgtacaacttaagaagctctccct

SEQ ID NO: 31332 - DNA, 443 bp, Oryza sativa
  unsure (1)..(443): unsure at all n locations
agcttgggtttctctcaaggtagcactatgatatgtcactntgagcaccgagacatacacaaacacctcgacgttgcatccctcttaatagtacggcattcctaaactcaaatgtaaataagaagagaactataccattaggaatgcctttttttttatctttctttcattgtcttgagggacgccaatgccgataccgtttcaccatatattcttcaaatgattgatgcggttacttgtagctttaaatggtctcgcacggtccatcatgacaaagccgtcactcgcccttcaccaccggatttggttcttcggcgccaagccccttgcttgcccttcaccgccgcatggtccatcgcgaccgagcatcgcttgcccttcaccgtcttgccataatagccactttgtatcacacatcttcaatatcttcactttgtcattct

SEQ ID NO: 31333 - DNA, 462 bp, Oryza sativa
  unsure (1)..(462): unsure at all n locations
tgagctgaatataagaggctctatntcactatattgtatactataataggaagagagtagagtagaagaagtcggaagaattccgaagctgtcggtaatcttctcctatttcttttattctgtttattactctgaattcaatataatattcttcctgagtaatttagatttatcttgtgagaattatctcttggttagttcctaaatagcatatgagattattgttcactataatcaactaaaatatagtgattgctctggtgagttataaacactaaagtagatattaattacttagacgtggtgtttaggtaattgttatccagtaattgttgcgtatcccacagtactgttgaggtaggtgtagaggtggtgacagccctcgagatcacttaagtcctccctgtccgggtacgaagtagagcgacatccaggaacagcgcggtgccagtgtctgaagta

SEQ ID NO: 31334 - DNA, 400 bp, Oryza sativa
  unsure (1)..(400): unsure at all n locations
agctnttggaattatgggtgatgccttttattgtttatgccataagctatggcgtttgtagatgcaagcagctgtgactgctggtgctatgatcatatcactaataactcattcttaaaatatgtataggagtagcaatcttatattgaataggatatatcttactattgcgaatctgtaaagcacgtgttatatttcctccgtctcatattaagcttttcttagttcattttatttgtcctaaaataattntatttttagagtaattattgcattggagtttataaaaagcagtgaataattgtattggagtagataaaaaaatgaatagttgtattacgatttaatagagtatggatattcctattgttttcttttgtattggcatgcgtgggatgcg

SEQ ID NO: 31335 - DNA, 455 bp, Oryza sativa
  unsure (1)..(455): unsure at all n locations
tagcaaccaccttagcatcttcagcacccacctcattatcattttgagagtccagaatatctgacaagcgggtgtctcttatgaacgacacaaagtatgatgccaggcttgtcctttctgatgtttcggaggagaaaaccggtgatacccttgtcaatagttcagctaggatgacaccgaaactataaatatcgctnttctcagtcagtcgactagagtaataatattcaggatctagataaccataagtgccctggatgatggtgagtattcctgtctcgtcaattgaaattgaccttgaagctccacagtccgatactttagccgtcatagtatcagtgagtagtatatttgtagatntgatatctctatgtaacactgatatagaagctcgcgagtgaagatatgcaatagcccttgcagtntctagtgcgattctcaatctatctttccac

SEQ ID NO: 31336 - DNA, 387 bp, Oryza sativa
agcttctcttactgaaggggggagaaagatatatcaataatgagtacaaccacagtactcagcaagccacaccggcagatgcatgattaatgtaaggggggtacaaggggataataatataggggttaagatttgcagtaaacagcatttaaaagtcacttagttgcccaaagctattttgtaaacaccatcctagagctatacaatattattaatcaaggtcgtgaacccgcacgaacctgccttaacccaaggcctacgatgattcagaccgaactggcaacccgaccctgggtcccaacttgttccaagccaacccacgccaaccattccacattttatttgttgagcaaactttaagaattaaaacactaacttgggacattg

SEQ ID NO: 31337 - DNA, 430 bp, Oryza sativa
  unsure (1)..(430): unsure at all n locations
gatcaggagatgctactatgctgcgtatctcanaaatacaggtgcaaggtatatgtactctctctcagattaaataatctttggcacgatggcttacccttacccctgattcccacgagacactgcttctccttgccttgagcggttgaaagacagaacaacaattagagcaccaatcacccgaactttattcaactcttattccggaagttttcaaatgatttcggaaaagagaaccaagttcctcacatgaatcactcagtctctctaagtgtatcattctgaattcctcaccaaaagatgccttttttattcctactctatggntctgatatgtggagcttggcanggatcaaacatggcatactttgcatcacatttgttactaagtcagaaacttagactagagcagattactaaacatactcaa

SEQ ID NO: 31338 - DNA, 420 bp, Oryza sativa
  unsure (1)..(420): unsure at all n locations
agcttggcgccaatgacggatgctcatatatcatggtaggctttctgatgctacatggaccgcaagaccttgtgctgctgtgaggcacctaccatcctctgtgttcttgaacttgatgggatctcttggagaagataaaaccactctcctacacacgcaaaacagaacaatgaactaatgcttgattagttaaccactctctttatctcaaaatgatcatcatatatatttatacactaagaccaagaaaatcacattaatcaagacaccatgcacacatcctcccacaatacatgtatcgattaatacatcatgtcaattacaccgtagcgtgcacacactnctgccatattgtattaattgtattccgatgaaatccatgttaatgcggtatatgatgttcaatttgagaaggtttga

SEQ ID NO: 31339 - DNA, 467 bp, Oryza sativa
  unsure (1)..(467): unsure at all n locations
tatccagattctcggtgtaaccaatcattttgatcacatatggtctcactggattaccttctgcaagcctgcacgcaaacaaggactttgaggtattaaacctctcagctcttgcttggtcctcaaacatgttacgtagtcccgtgattatcgtatgagcatccaatgcctcatattgcctttgaagatcaggggacatagtatcaagcatgagacagcttatatcaagataatcatcgcatcgctattcatgctcccttctgtgagcagcagaagcattgttgggcaagttagctggagaaggctctctaagcacagactctntgtgctcttgactgagaacaattctaaggttgcgataccaatccatgaagtttgtttcagtcaacttctatttctcacgaatagatcgcacgttaaaaatggatggtgcaggagctgctatgatctacaatagaaatatatga

SEQ ID NO: 31340 - DNA, 332 bp, Oryza sativa
agctctggattgatatcaagaactggaagcaatttgtctacccaagactggtattcattatcactgcgttgtgcattctgctaattagctccaggaaccagtttttgagtattgttatgatatccatgaatatcaattttgaaggccaaggacctgatatgatgaagtatgaggagcaaataaagaggttgaaactgaggcgtggtgccttccggactatgtggcttgcatcagaggactaccctcttttgcttggtaaactagttgattgccaaaagaattacatgttgtagcataaatgctgattctttgaataattacaggatcggctg

SEQ ID NO: 31341 - DNA, 336 bp, Oryza sativa
  unsure (1)..(336): unsure at all n locations
ctatggattaatcttacctagatccctgaattggttctgagtctacagtactcgccggaacgtaggtctccaatggcttcagcttctatctaagcattacaaatataagaagcaacaaggctttcagtggaaatcataagctgtaacctgcggaaatgcaatgtactactacgagtactaaatttatgaagggagagcacggtacggataagtacttcttgacgtatttgtcnaaccggctcgcgtctgcccctgctacatcaaaagttgggaagcagatcagaaacatatttactcgcacacccgatacactgagctccgatcccgacacgaaca

SEQ ID NO: 31342 - DNA, 395 bp, Oryza sativa
  unsure (1)..(395): unsure at all n locations
acgtcccgcaatcgatgatggtcgtgcataagataagagattccgtcctanaatatagcaatttttagctataaatttgaattgctatattttgaaacggaggaagtacatgatggggccgcgcctcccnctctcccttgtagacatcatctcantcaaggagacacctaatctatgacaacatccattgttcccatcacactcaattgaaccctacagatctatacacctttgtctacacgagcccccaataaacatagaattacgctgcccgctgcatttgtctaccctctaatgtaagatccttgtcaccatctacatttctgacacctcaccatcctccactgcttgcatgcctttgtgttatcaaccccgagacacactaagacccccct

SEQ ID NO: 31343 - DNA, 373 bp, Oryza sativa
atggttaagtgaatatgtttcttatccatcttgtgtaggctcccacagcgtcaagatcagactgcataggagaaacatatttgtaaagaaaaaaaatattgtagcggcgatgttccctcctaagagagcacaatctagagagcaagattactcacaaaatgaaagaggtaaatgcattctctgatggaaacagatacatacatcttcagttattccaagatgatcaaggtaaatccttataccaccaccctttgaagcattaagttggacaatctcaatcatacttgaatgcgctttgataacacgtgctcttccttgtgtgtgatctgaccaatgcatgttcagtacatatgaatcaccattctcttttgtc

SEQ ID NO: 31344 - DNA, 454 bp, Oryza sativa
  unsure (1)..(454): unsure at all n locations
agcttgtagtagcagatacatcataagatttcccaacttcatttagcatctaagctccagaatttgagatctaaaggcccatatgttgcacgtgggcacacagatttttttactccgcgtggtcaaagtacaaattaaaacatgccatattgaattatgcatacaaaaaagacatgatattggctntcatgaagttccaaatgatctaacaggaagattccaattctcttaatgattagtgttcagaattgagatttgaagttaatcataagcatcataatgaatagttctccacatatttcagtcaaaatggcattcagttgcaagtgaagtcagatgagttgaagacttccattatgaagtctccaagtttacaagatttgccacacaatctgttggataagaacaattattactgacttanaaaatgaaaagaagttgccacaagtttaca

SEQ ID NO: 31345 - DNA, 448 bp, Oryza sativa
  unsure (1)..(448): unsure at all n locations
tgttctggctgctgagagttctttgcattcttcttcctgggatatgttggtactgctcttaaagntattgctggcaccttatgttgtcttcagcaaacaagatcacatcagaacatgattactcaggaaggttcatcattgacttacaatgggtgtcaagggattaccagcaacttcctgtcaactcatgtagaaaatgatgaggacaaattcgtgcataagattgtaacatcaatggtgaatcataatatatctctggtcaatcaaataataagcactggaaacaaggaagcaacaaggagacatacttatatgtcctctgaattcaagatgtacagatctatgttaagcagtatgctaaaacttcttgtgtgctacccacttctgctgctgctgtgctcttgatanactaagaggcctgataaaagaactagcccgactagatgac

SEQ ID NO: 31346 - DNA, 392 bp, Oryza sativa
aacgcttgcttgattcagatctgctgcatgttaatttctctttgtcctcggtcatcctccgttggtgagctctggcttgatctagcaagacagaagttctatcgccaccatcctaggcctctcttgaatcttgaataaggttggctggattttggggagcactctctcattggtgtgtgtgtatctttgttaggttcattattcaggttgagcacaaactccattcgaaactttggtttgtagaattgcaagtagtgctcctcgaattccacggcgaactccgatccatgaaattcattgttgagtccgacaaagctcacatcaaatctacagcttaacaacaaatctctaacttgggtcattctcgcggagctagctgaaagggattatcg

SEQ ID NO: 31347 - DNA, 436 bp, Oryza sativa
agtcacctgcggcatgcaagctttgatcctgctgaagccatccaatatcatctgctgttcttcgaacagatttccgagcacgttctacaagactgacaaaaagatattaaggatatcaaagactagtcctcccaacaccagaacatcttataaaagaacacctcatccacgaaagctaaattttatattccaatttactcttaatggacatcaaatgacacgtgttttcatgcacacctattgacttgattatttggtacagtgcataaaatagaagtgtgtgcactaaaaaaagagtcagttccaatagatgtcaattgcataacaacttaacaagtgcacttaacacttcataaagttcaagcatgcatagtttattcatgatatagtgatgatatgggatttgcagctggtgtcacactatcacctatttgtt

SEQ ID NO: 31348 - DNA, 376 bp, Oryza sativa
tctagctagctagtggactgctgtaatatatctcttttaattagtaactaataggagtggatttctaaatcagtagtgctatctacggataatatttctgattagtacctgatatgtgtgtaccccatctaacgcaaatcgaattgggtctgaaactaatatcattttgctatatatgaaacagaatgggttcgcctaaacttgatttcatttcatatgaaacaatatgcttcgtttgatatgcaatttatcatccatatttccagtggactgtaagggactagtgagtatgattgaaaaattggaactctaatatagtgcatgggctgtagaagctactttgtaattgatgaacagatcactcttgttgttgatc

SEQ ID NO: 31349 - DNA, 383 bp, Oryza sativa
  unsure (1)..(383): unsure at all n locations
agctnggacaatgagaaggcatggcccaaatgtttctttctcgttcatgtaagggtatggaaaattgccaaagaatttttccccacggcctggtggcttactcccaggttcaacctcaaaaaccttgccctcctcccataacttgtgaacatctgattggatattgagtaattgatctctccgagcaaaacttctgcctccatcaggatttgacgacattntcctgaanaaacaacacaaataaaaggtttatttaaatcctttgggttaaaaccactgctttcgattaaacaataaaaactaacaacctcattacacatacactgatcgcttattttgaacgaacagtaatggtgcaatcaactctgaaccagctgagctta

SEQ ID NO: 31350 - DNA, 387 bp, Oryza sativa
  unsure (1)..(387): unsure at all n locations
ctcagcttctaaagctggtgtcatcagagaggtactctatccagagaggctagtttaaccagtcatggtgcggaaggccaatgggaaatggagaatgtgtgtcgatttcaccgacctcaacaaggcgtgtcccaaggatcactttcctctttctcgaatagaccaactggtggactcaacagccggttgtgagtcgttgagcttcctcgatgcttactcccggtaccaccaaatcancatggcgaaagaggacaaggagaagaccagattcatcacgccgctcggggtattctgctacgttaagatgccgttcggactaataaccgcaggaaacacttttcagcgcacgggtcatggcgcacttatcgaccaactctgaaacaacgt

SEQ ID NO: 31351 - DNA, 350 bp, Oryza sativa
tatgagtcgaacggctgtgacagtgagatcacaacactccggtcagtttctgaacttatgaggttacaggcgagacatggatggtctgataccagttacgacagtctgttagaacttctgcataaaatgcacccgaggcctaactctctaacattcagcacatatcaagcacagaaactcatatgctccctttcacttggtgtggaaaagattcatgcgcgcgtaaatcactgcatactgtacaggacagattactcttctttagatgaatgtccaacatgcggtgcaagccggtacaagtcgaatagctttactgggctataaccctctgaagcaactgatggacgaca

SEQ ID NO: 31352 - DNA, 459 bp, Oryza sativa
tctctagatattcttcacagtcatgtagactattcagtttttttttgtgtttatgcctggagtagaaggtgcactatgtctggcaattggagcaagttataccaaatccagatccagtgcatgtagtagattcatttgaacatctgcacgcacaataccatttggctgtctgtggcagatcaagcagaatataagtaacactcacaattgtcatggaatggttctcttgtctaataataccaagaacatatgagagaaaccatgtatcttaggtttgtaattagtagaacccacaggaaagtgtggactcgaacagatgatcttactatcacaacgataactctacagctagtccacattgtcgtcccctggttttctccttctgcaaatctgggccattatttaacaacattgcgatagcattatatcattggacagacctaacgcttctctatatat

SEQ ID NO: 31353 - DNA, 426 bp, Oryza sativa
agcttgtgtattgaatgtgctacctgtattatacaatttgatcaaatattgcaactgagagtaccctgcatgggttgtacatatactagtattaaccataattagagatcccttttcagtattttctacttaatacatcaactatttgtaagtaatattttggaagcagagatcatgaaatatgaaagggtaaacaccatgtggctcttaaatttaatcagcctctggagcttcatttggttgattttctctttggcacttccagttcttgtctgaatagatgaatggatgatagaattatctgattttgtgataatatttgaggttacaaatgaaacctgtgaagtgcgcccatgataatgttaaaaaggaacagggcgtaaactaatttgcactgaaattcaatcacacaatctacacatcatt

SEQ ID NO: 31354 - DNA, 433 bp, Oryza sativa
aaaactcagctttgtagggaataatccatagatagcattctttgcatcttattctcttataatcttctccaattctcctctctagataattcaagttggcgagctgatttaacttgccagctgccaacatgatgaaccctgagttcctctcgacactcaaggctgttgttggcccgatctttcggtgagttgtgataactacgatttgggagaaacgttgacgatccgactacaaccgtacgagacgttgtgttgcgccttagcgatcgatacacctctccgtgggttgttgatcttgccggtgcagatcaaccttattcctgcaagcaaatcgaagaaacaagcaagaacaagataaaagcaatctgaactgcatataggaatgaatacacactgataagttgggtttcgaatacaagcagactgacggtct

SEQ ID NO: 31355 - DNA, 349 bp, Oryza sativa
  unsure (1)..(349): unsure at all n locations
agcttagatgctgcatgtcggtgatatatgccttgtggtatgcgaagtgtggggaagtcttcttcccgtccagccatgcggccatacaacctggccctcccnccacatctcggacgacgcagaggcgcccggggggcctcggggtgccacatcacgcccctcgggccctcgggctacctcgccccatggcccacgcccgaccgccacgtggcgggaggagtgagtggggcggtggtcgaagctgaaccgccatcaatgcgcagcaccccaaccgtccctcaccgcatttaatgtggtgagggcggacgtgcggcgctgccccgatgacctgcgtcaatcgggcatgacc

SEQ ID NO: 31356 - DNA, 384 bp, Oryza sativa
  unsure (1)..(384): unsure at all n locations
tttgaaatcactaagcgatatatttctttctaangttgggccgaatagagacttgcgtctcgattcgactttaagagatgtttttcaacagctcatttggtaatgtaccgacctcccaggtcagatcattacttctcggctcccagagcctttttcattttctcggactcccagagtctagctacccagcagcacaacaatccgctttcactcgggaagcctagtctatgatgcccgcagacatcccgaatcacacagattcgtttcttgaccactcaggtcatccatctgccacataggctgattctggttacgattcccacaccacaacaagctttcacaaagcacaggcaaacaaatctacgcaacgggaaccacctcaca

SEQ ID NO: 31357 - DNA, 383 bp, Oryza sativa
agcttggacttctcttcatgcacaagttgccgatttttctggatggtagcttcaatctctttgcgctctcggcgttcggccagtctttgcttggctttctccagtttgaattaatgttgctcaagataagcagctggagtaagaacatcggctaattcttcaggaatcagagattgaacttcgtgcaaacgagtcctgattgatccacagtctactaccaaactatctactgatgatgcctctagccgatgagaaatatcttcaagagttttctttacatcatcggataagagggctaaagctttgcttgtggtgtcctcttctgtctcatcaaagtagtacttgatgtcaaaagagaatagatcagctaagacctaccagaa

SEQ ID NO: 31358 - DNA, 145 bp, Oryza sativa
gaacacaattgccccgagataaaatgaaagaagttcataattggcttagtttacttacgcacggatgttgatcgtgctaaaaccatatttgcagccataaacaacaataataaatgtactttgatacttagaatatctacatatg

SEQ ID NO: 31359 - DNA, 484 bp, Oryza sativa
  unsure (1)..(484): unsure at all n locations
atctcgtaccgcgatccttnagtcacctgcggcatgccagcttcgatcatggcacaaggagcctcattgattgtcttatttagaaaatattgtatttttaaattcaatttgaaggtgtttttaatatttcttcaacggtgtttgttaaatctatatctaataaaagaaatacataaagcttccggcttattttttttgttccatcccgttttttatctgcgccggttttttggatgtgacttccgctcgggcgtccgatgggaggaggctaaaatcgggcgttaacgtcagcgtccgatttacgtgcaaaactactttaaactgatttttcttctaattatttatccaaatcatgatccgattaccacattaaattcatcgtaataaatctttcgaacaagaccacacatatatatattccgacgaaataattatcttattatttgagtatgtttaatattgcacgatattccacaggtatatc

SEQ ID NO: 31360 - DNA, 338 bp, Oryza sativa
  unsure (1)..(338): unsure at all n locations
tcatcaccttccttgctcacacgttcttgctgctgccggtgattgtggcatatctnccaatgagtacgtctcagattatttcaggagagaagcaatctttcatacatggagtgaggagatatatgggttcgggatctcatgatcttacacaacgctgagtgcccaaggtttttatattccagatccatcaaagttaagggtgaaaaagggtcgacgcccaactagacgcatcagaaatgatatggatgagtcataagcaggtgggaggactntacgctgcagcaagtgtgatctgcgccgcatacttacaagaaatgcccgaagaatgcagaagttcc

SEQ ID NO: 31361 - DNA, 329 bp, Oryza sativa
  unsure (1)..(329): unsure at all n locations
agcttccttctgattgctatttgtttcatagaacggncttctgcttggaatcgccctcctgagattgattgccctctgctcagcctggagtatgtctgggagagacacaacttcttccatcgacaacaattctctgctgaggctgtctgagcagagaatggctggtgctgaaggtattattggtatgatttattgcagagtcacgtggagcacgaggagcattggtgttgtggatgatattgtcgatgttgctattggagctgactatctgatgagacaaccgaaaggttgatcgctggatttctgcgggcttggtcaacaacacactg

SEQ ID NO: 31362 - DNA, 432 bp, Oryza sativa
  unsure (1)..(432): unsure at all n locations
tccactataatcaacaataggtacaaatgtagtcttctctataatatctaaagacacatcacaacagctacaacatcaagttacatggcattatcaacatctcaaccatcaaagctaacaagaggtatatcaactaacaagtagagaaatagcagattctgtccttttcggttctcagctgagatctccaaaccacagttgcacgaaacttggcagaaatgatggtctatgattcccttccaagctgtcaaataacagcctaatcggacaccgtttgaccccttataccgacactttattaactattgcacaatctgtaatttagtgactcgagctgacaaaccaccactcatatccgacgctctactcaactaatcctcatccanactgaccagatngaagtgctcaaagtgagaaacaaactcaccaagt

SEQ ID NO: 31363 - DNA, 343 bp, Oryza sativa
ttagatgatgagaaagcaaaaatgatgatggaatctgtggatcttaagagtacgctacaggaaatccagggttacatggatatgagtaagagtgaaaatgataagcttcggtcagaagctttggttgcagagcagatactaaacatatgtgaagcacagattgagaggcttaagatggaattgggtgcattgacagaagcgaacgaatcagctgcgaaagcatctgacactcaaaatgaagaaatcacgaaggagctagaggatcttaagacaaagctggaggaaatcaaaacaaataacgatctagcggaaagtgaaaatggtaagcttcagtcggagcttt

SEQ ID NO: 31364 - DNA, 445 bp, Oryza sativa
  unsure (1)..(445): unsure at all n locations
gatcttaagcacctgggctgcagctaattgaaaatcnttggttcatgggtatttttattgcatgcttgntatgttntagatgggttcatcttctttntattacaacacatgacttgatatgctatatgtatgctaagctcttgaacattaatgaacataattcttggagaagcaaatgagttgagaagagcatgttgtttttggtccgattgggaatttctttcttttcaaaagtaagagaagttttcttttgtattttcgagcacgatgtgtactttttgtatgaagtgtgctttttaccacatttgttttatttttccaaacaccaaaacatttttgatgggtttgccaatgtgttcatcaagggggagattgtaaaatcaaagatgtttttgattgttattctgtgatgaacaattggcattggagattattaagtttgata

SEQ ID NO: 31365 - DNA, 377 bp, Oryza sativa
  unsure (1)..(377): unsure at all n locations
tatccaactcagctcgtnttagaattcaaccaaatatattttaaccaatgtagttcttctagttaggaatttcttaaatccacattaactatttctcaacacgacttgtgtgtttagttaggttggagaatgcagttgttcaattttggcatgacgggcatcatgaaagntcatgccagcaagatacagaatgattggagttgaactggctagtggaccatgagcttctccgngccatgctactgtccgatgatgcacgctactacgtgctacgtttcgtgttgcaggtgatnggaacaacggttattcanggaaggtagctagaccagctgtaatgtagtggagccttattagcgacaagttgcgcactctcgatc

SEQ ID NO: 31366 - DNA, 442 bp, Oryza sativa
  unsure (1)..(442): unsure at all n locations
agcttaagctatgctgatgtcctgaaatacatgttgtatnggtttgccattggaatttcttcttcatcagggacatatcactttgattttagagcatgcctggcagaatccgttaggtaaggtattttcatcccatttgtaccaacaaaaccttgtgaggacctctaatttatttccgttttcaccatggcattgtcctgcagcatatttcgtcaaacaatggtgccatcgtctgatatatacatcaaaaatcgacttctagcaatccttttagcgtatgggcctctctggcagtgcataatggctccagttaaattgcctcgtgttgcatacgagtttgcaatttacggaacaggaccagccatgtccattctgacttggattgcangtacttcacgatcctattatattcaaaggttaaaccaatcctaaacaaccctac

SEQ ID NO: 31367 - DNA, 386 bp, Oryza sativa
atcttaagcaccgcggctgcagcttgaatagaaatagtagtctgtcacttctgtcttctgagaaacattgttggtttattagcttatcagccacaccaaatttcaaacgcgatacttctcatccacggaagaaatgatgctgggcagatttatgtaattaagtggccataatagtttggttagtagtagcgttcatcgattatttcaccatcgattgaaccgatgatcgtatcaatagaacagatcgatttacagatcatttcgaggccacaacaagattactttcacatgcttggagagcacactagaaacaagaatggatcatgtcacagctgaatcaaattgaaaccactcaagttacaacatccatttttgggcagcaaaaa

SEQ ID NO: 31368 - DNA, 432 bp, Oryza sativa
  unsure (1)..(432): unsure at all n locations
gaaagacagcccaattgggcactaaaggcgctggtgcttgatactgaccattttgaggtatattcttgatttattaggcgtctctattnttaagtgaaaaaaacattggtttagatactatatttgtggtgttcctatgaacaacaaatattttattcattactctcaatggttgctttgtgattgtttgtgctatcgtttatgcagcaattcctgaaagagattctgaatgatctgtgtttttacaactaacgaagaccataccatggaacgcatgagctcaagcctgagtacaagaaatctacaggggacactgatgcttcttgaatatgctagttcatttaactgctttcggataaccaacatactcaacctgttgactctgaagtcacgaacattgagttgtgcagacatctcatatttcaataacat

SEQ ID NO: 31369 - DNA, 370 bp, Oryza sativa
  unsure (1)..(370): unsure at all n locations
agctngatcatgatccttttctggtgaacacaattaatttcaatgataagaaggtgttgattcggccggagtaagccgaatctactaagggaaaaggagtggtcattggcgaaccaaggcctaagacgatagtgccaaacaagccggaggttggcattcggaaggagaataaaagtggagcttcaacttctaaagcccctatgaaaaccaaaatgacttttgatatgcttttggagaagtatgagaagcaaggtggtgagagggttcacaacaaaggaaaaagaccaagatcacctcctatggaacaatttggtcattcaccaagacggtcgcattcacctccatatcatcatccacaagacatgtcatg

SEQ ID NO: 31370 - DNA, 298 bp, Oryza sativa
  unsure (1)..(298): unsure at all n locations
agctngtacagttngngaaggggttttttgagagaaaagaataatctacttcaaccgatatgcccttatgcacggccatacataacatataaatcacacgtggaaggggtgggcaattagctatagcagcaggtgctgtagcgaaactgattgcaaaagaaggtaaatcggccactttaagattaccatctggggaggtccgtttggtatcccaaaactgcttatcaacagtcggacaagtgggtaattgttggggtgaaccaaaaaaagttgggtagagcccggtcttagtgttggc

SEQ ID NO: 31371 - DNA, 426 bp, Oryza sativa
  unsure (1)..(426): unsure at all n locations
tctttcanagcatacggctntctagatgtatatgacgatctctatacttatggatcttatatgaatcgnatgacgaagtaccacatgagtggatatatatgaaaggaatccaaatctgcccgatcgctcatgttatgatcttctacatcctaggtctccgcgttccgtcttctggcttatgttcttcatgtagcattcagatcgaatgactctatngaaatacgtcgaaacttctacatattatgggtaacgtaggagacatccctattttcccncgcgggtcttaaataccactgctgagctttcaattcgcctctgaccatcanattaaatgtgaataacccgtcctcctctctttgaacaggngcgcttcgggtctgtgcggctcaacaatttgcttctctatacctatcttaagcaaaattt

SEQ ID NO: 31372 - DNA, 309 bp, Oryza sativa
agtactgtagttcaagccacagcctgtaccaatacatctcctcccctgattttctcgggtacttctagcatttgggatgtgtttacctatgtacacaattagagtcaccattcaccaacacataccgtctcgagacaaaatttgcgcgaaccctatgttccgtgctagaactgaacggagatggctacaggcatgccgcggctcccctaccacaacaattcggccgaaccatgagagcatcgaagccgccgcgcgcgtcgccgatcccagcaaaatcacgctactccgatccgactctcccaagtcctt

SEQ ID NO: 31373 - DNA, 424 bp, Oryza sativa
  unsure (1)..(424): unsure at all n locations
agctngctactccctcttggttcatattatatgcgcctcgatttttccctaaattatcaaatcagctccaataaatctagcattgaatatattttgatttatgtttattttgtgttaaaaatactactatattttctataaatttgatcaaacttaaaaaaatgactagtaaaattcgtttgacaataatatatatcccgtgttaacatagctctacccgcacaaaaagtaatgttaatacatggcgctttcccttaaaattagctaatgctccctccatccgagtttgataatcacctaaacaaagaacacatgaggtcaaggataaataacacattcattattctgaaattaatcctcatcggtcaatgtgatctattgcttcatgtccttgtaattgcgtcacatataagcgtacaccaat

SEQ ID NO: 31374 - DNA, 505 bp, Oryza sativa
  unsure (1)..(505): unsure at all n locations
taaggtggaagggcgaatcatgtgtgtatatctggtcatccttttgcaggagctggttagcgtcaaaagtctatctgcgcgtcaatagcaagcagagaaggaatattgtagtctgatttgtatgccctttttntatgttatccttttcagattgtaatcgaatatccactgaatttatcagtagctnttcatggattcgcgtatatttgtaaaaaaaaaaagtaatcgatcgagttgtccttctcttatccgagccctgcataactaatatctatatgatcgagatccctgatgacgcangcattncgtgagagatgatctgacttaactgcttgacgattaataaattttaacatccttatcaaccaattaattctgccatccttttcgtcatttctaatgccctgtttagcccccacacgcaaatnttacacactgtcacatcatatatttgacacctgcatgaagtattanatatagactaacaataattaattgatagatt

SEQ ID NO: 31375 - DNA, 374 bp, Oryza sativa
  unsure (1)..(374): unsure at all n locations
cagcctagtgcgcatagtatatagcttcttggagagaattcattgaataccgggaaatgctctcctcctagcctttcgcaccacgtggggtcacgtactaagcaagccataggcaagaagagtaagaatcagaagagaaaagcacctatgcgaactgaagaagaagtacgtaagatgactattaccaacaccgaatggccttcagcanggataactattcctagacgttaaagaggaaataccttccgaggtgcacgacagttgacccagcacctcttataccatggcggcagagtatctgatagtgaacggtcagatccagtcttcttggattatgaagatgagtctccccgacatgtcggcagggatgagat

SEQ ID NO: 31376 - DNA, 408 bp, Oryza sativa
  unsure (1)..(408): unsure at all n locations
tcaagctctcatatttcagactctcatatggatgggttgtatatatattcaactcttgaatctgatactagaaaccaccaggcagtattttacacgcttattcccgggtcgaggacattggctttatttagaggaaccgatcacctgaatgtgaaaacatgaaggggggttctctcttgttcgttatctcgccgtgaaaatgtggccgcgatgataatgatgatcatgaacttcatactcattggtgagtcaacggatctgcatatacttatttatgtagtagatccaatttctatgtagaacttagctctggaaaacatgaggcatctcttcgtagattatgcatgctctactgaaggntgactctcttaacatacttacaaatcaatgtcccaaacattgataatg

SEQ ID NO: 31377 - DNA, 398 bp, Oryza sativa
  unsure (1)..(398): unsure at all n locations
gcttgaggagattattctttcttctcatgtctttgcgtcgataatgcattntgccaatcgcgagggaggggatgaaagggaaaggagtggcgtatggaaagtagaatttattacgcaggccacattaaaggcttaagcttttggaaagggaataattaataaagtaactaacataaattattatttagtggcaaagaaacatcatcctataaggctaccattattatcattctataaaaaataaacgcgaatattacggaatgatataatatcaaataaatagaaggagtgagactttgaacacaagccggcgagctcaccaccttgtggagttagtccgaagaaccctgaatatttatcaaaagacctaatatcattatatgcctatganattattt

SEQ ID NO: 31378 - DNA, 437 bp, Oryza sativa
  unsure (1)..(437): unsure at all n locations
ccaggaacaacatangtggtgtgttatggtattataaggatactccaatggttcctctatcatcaaaatggatacagaacaaccatcttttgttcacgcagcataatattgcctgatattgggacgttatgatctgctcaacatattattgtctactttgtggaaatctcgcatagtggcaccagaatatgctaactattcaagctgntcacgtcaatggagtaccgaagatgaaggcctcttcctctaacacgaatggatcgacgaatgaaccatgtgatgttcatagaatctttgctgtccatttaatcaatgtgtctgagtcttccagtggatacaaagctacccttgctatagctcgtnggacattgcaatattgtcaggaatgcattataggctcagagctgccttggtaccttgcagcgtgcatggactat

SEQ ID NO: 31379 - DNA, 448 bp, Oryza sativa
  unsure (1)..(448): unsure at all n locations
agcttataactactcaacaactcattgcatttcttgtttaagtatgcctcagacctttcttcgtaaacacaactcttaaaatcagcaagaaattgaggatggtcagcaattacatgactaagatgtttagcagcattctgataaatgtgccatatacaaagacggtgccttgtgtttcgaaatactatccttactgctgctgtcatggcagcacattgatctgtgaacattgngctaggatgcttgcctgacattgctgttagaaatgtgttgaaaagccaaacaaatgattcaatcatttcactatacaacagtgcagccccaaaaataattgtctgcttatgatggttggttcccacgaggggagccaaaggcatttcaaactttntagtctgaaatgtggtgtcaaatgacatagcatcaccaaagcctgcataatccatgatag

SEQ ID NO: 31380 - DNA, 436 bp, Oryza sativa
  unsure (1)..(436): unsure at all n locations
tatcagaatcaggggtgcaagttcgatacttatgcgaattcgtatttgttctgtataagaagataganactgagttcgtattcgactcaaatcctgtctaagtaaattgaaacgataagagttttgatatttgacttaagaataatatccttattctttataattgagcatcctaatcaaattcgaaaaggcaattcaatctatatgccccgttgatatttgggttaatttgatctgtgccattgatcaaatatacccttgattgtagacatgggtctctatctgccacntacctctttcggggtctctctcgattctaagtgagtgtccattttctcctacttctccggcgtgcgtgattcagttttgttgcttgttgagctgctgggaggctatcgtgaagttgcagaagctttatttgcgccggcgcgcagaa

SEQ ID NO: 31381 - DNA, 401 bp, Oryza sativa
agcttcgaaagccaatgggcgccgtccgacgtgacggaagaaaacctgaaggagatggtagcgcacggcgttctccctgccaaggagatcatcgggtggcggccagcatgcggtgaagcctttccaacccccgatacacacgaggacgtggtcttctctcatttcttttatggcggatttgctcttccaacctcaaagttcttccgtgggatactgaatttctatggaatcagcttacatcactcgaatccgaactccatagtccatattgcaaatttcgtccatgtctgcgaagcctttttgggcattagacctcattttgctatgttccgcgaatatttttccttaagcctccacccgaccaaaataaaccatgcgtagttggtggcgctggatttaac

SEQ ID NO: 31382 - DNA, 341 bp, Oryza sativa
  unsure (1)..(341): unsure at all n locations
gtgggccttcgccggcgctccgacccctttaaaggacccacggtgtctcctctacccgtcgcagccctcgccttcgcctctcgacgccggagtagctctagcgccgtgtgccctagcttcgccgtcgccgccgccgcttcagccgtgctccgcctgcgctccagctgtcgccgccgctcgggaagaccgccgncgtcatcgtcaagtcgccgccgtcctcgtacgccccttcgcagccgtcagaacccgccggagcatcgtcgcctgcgtcaacccgaaggtagccgtcgcttccttctcgtcgccgtcgccgaccggtccttttccgcgcccgtttggca

SEQ ID NO: 31383 - DNA, 338 bp, Oryza sativa
  unsure (1)..(338): unsure at all n locations
agnctggtagttttctacctatattcaactcttgaagcagngaattctcaatttcttcgtggtgaaatttagttctgaacgtgacgatatgtttctccaacatttttgctatattttttagaggatgatggatcaactgtgccgtccagtgtatatttttagtttgagtaaaatacatggccggtccttaaacttgagcgcgggtgttacttacgtccacaatctttgaaattgcagagtcaaattcaccatcttagtttaatgatacatggcaggttcaaacaccacttctggctcagactgtcgacgttgcatgccacccaagcacccgttttgca

SEQ ID NO: 31384 - DNA, 430 bp, Oryza sativa
  unsure (1)..(430): unsure at all n locations
tcataaaaagagtgatnntctcttanaggatgatatcttctcttcctgtggcatcttagtataagcatgacatacatatttttcttgaaagtttcacctttactatgcaaaatggaactgtaatgttggctaatatttacagattgtgtcgaactcatctgaagtgctgacaagntattgcttaccatcgtctcattgtcaataccaaatccgaggtaaccaggattttcaacttacttcactgtaatatattttgtgcagtaagtgatagaacaataacaaccttcacatgaaccttttcattctaaatgttgattatattgnnacataattctttttgtgctatcctttgtgacgtgattaatcaagtagatgatgttattcatggtgtgataaataagagtgacatatatcgcacgttaaatatatt

SEQ ID NO: 31385 - DNA, 378 bp, Oryza sativa
  unsure (1)..(378): unsure at all n locations
actgatcacgtctctagctaccagccgccggccgtccggcaaagctgtaaaatcaaagtgtttattgattccttattttgagatgaacaattagcatatgagattattagttttgatatttgaagattattggcgaaatggttttgaagatgattgaaattcttaggtgatgaacagggactgttgattgtcgggtccggtcagactgggcaggtgctgccgatcagactggcactatgcgagcggtcagaccaactagcctgtggtctgactagccagctctttgtcggtttcggtttcnggttggattgttggatatccgtggatgtctcatgtttatggcttncagatggatactatacgtatgtaatactgttg

SEQ ID NO: 31386 - DNA, 438 bp, Oryza sativa
  unsure (1)..(438): unsure at all n locations
taactaagacaccgttcttttttgtacatggccgtggngcagtggggcccatggctgctgcactgcccggcagccatgattcgatacacatattctacggaaatcctactggtggagcgatcgcctggggcgatcaggcgcgatccaccctcctccacattggattcggntctggcaccgtattatntttctattttagtaaatttatgtatctaatagttatacacctaaagttacacatctaaaggttatacagtttagagacccaaagttcataagtttatatactcaatctaaagttgaatttgaattatatccgattcacacttgaactngacattaactatttttatatatagtacttctatacatctaacagttatacacctacatgttatagacccagagtttataagtcacaagtattacataccgcga

SEQ ID NO: 31387 - DNA, 402 bp, Oryza sativa
  unsure (1)..(402): unsure at all n locations
aaatgcatttattctcgtgtgtagtacaagtattaaaccttgagcctgcattatattgcttgtagatcctatcagacggacatcactaaactggaaaacacgaagaaaaatagttgaaggaatagcccaggggcttctataccttcacaagcattcacggctaagaatcatccatatggacttgaaagcaagcaacattctgttggactctgagttaaaccctaaaatttctgattttgggatggcaaggatattcccatcggatgcctctcgagcaaaagcaagcagacttgtgggaacattgtaagagcaagaaactagaaatgctagtagttacttaaagttctacctacacattngctttctaactctactgcatgccatcttgtcaagtgctacatg

SEQ ID NO: 31388 - DNA, 507 bp, Oryza sativa
  unsure (1)..(507): unsure at all n locations
tgtgcgctggcatgccgaagaacggaaagtcgatactatgctgttgttttctcagattcagtacagtggaggacaatcgataggatttaccaggaattctcanatgacccaagaaacatgcgtttcgcaatgtgtacggacggcattaatccttttggtgaattgagcagtcgtcacagtacatggccagttctgcttgttaactataaccttcctccctggntgtgtttcaaaagaaagtacattatgcttgccatgctcattcaaggaccgagacaacactgcaacgatatcgatgtgttccttgaaccgataatcgatgacttcgaaaggctatggaatgagggcacacgaacatgggacgcatatgcacaagagtatttcaacctccatgcgatgctgttntgtaccatcaacgattatccggcccttgcaacctttctgccaaactgtanagggaaatggcgtgtcggagtgatggaggaacaagaagcaatggtgaacatc

SEQ ID NO: 31389 - DNA, 172 bp, Oryza sativa
  unsure (1)..(172): unsure at all n locations
cctctaacccagcttctacctgctganggcagtaataatcacatttgttctcttctaatgcaaagctgatatgccgctgccagttaattgctaaatggatatctctcgaaataatttataccgatcgatggtatgtaacagcttttaagcttgagaattcttcactatatat

SEQ ID NO: 31390 - DNA, 382 bp, Oryza sativa
  unsure (1)..(382): unsure at all n locations
agcttagctgtggcagtgctaattgccttgctatgtgttttggcgttcgctgtattctgttctacatgagggtggtagtaatggcctacagcttgtcgcatggtattaggcacaaagatgagctgcttgtacaaatttggcaactattgctttctggaacaatgacattctgggcctcacgagaggaggaaagagtcctctcttctataaacactcttatcatgaatcgatcaatatgcatgggtggattaaggattggaattttcttcatctcccttttggtccctattgtgcaatatgatcctgatgcgctntgtttgttaccatgtcgttttcttcttctcctacatgccaacccaactagtacttataagaagaaaag

SEQ ID NO: 31391 - DNA, 375 bp, Oryza sativa
  unsure (1)..(375): unsure at all n locations
agctntctactttntcctatacaaggtaataagctactcttatatgcggcaatggtctgagaggactacttcaagccgaactgaaaggaatacttcacaatcaattgcttccgagtcctgaaaagcatcgaacatctgatcaaaattcgggggaaatcctcaaaagaggagatccggagccgtgaggattcacctactttagaaacttgctgtgagtagagcagaaaccagcgcctcccacaaaagtcctaccaattcaccgcgcttggggagctaaaatggcagtaaaattatgctttatcaggtcagtcagacgattctcaaacagtcgggctaaaaaaaaaatcagaacggacgaagcgctcgaagcatgcc

SEQ ID NO: 31392 - DNA, 193 bp, Oryza sativa
tagagactccgtaagggtttccgtagtactacaattatatatcgcccgatctttcagacttcagatcaaggagcaaaacaaggaaaccagtacgttttactcagatatttctctctgtcatgaacggaaaaccttttgtagaaactgcatgaactcgaaacctttctttcatgaacttgctgtagctctgatt

SEQ ID NO: 31393 - DNA, 356 bp, Oryza sativa
  unsure (1)..(356): unsure at all n locations
agctccattttattgagtgcattgtatattttcatatcagatgangaacaaactacagagcgtggtgatactttgtcgctcccttgcttgattgtgagagagagcgatttgctatgccactggggacctggttgcatgagcacacatttttctcatccttaaaacgtgtgcttgtgttgtggacttgtggtaccatgagccttagtttctcattcacagacctctcctatgagcaatgcaaggcagagacatgaacatccctgctgcacctgcaacagttaacatattgcagatgcacgcacttgctctcagtggatgtattcgtgcaaatgttgaccatattaacatgatacatg

SEQ ID NO: 31394 - DNA, 456 bp, Oryza sativa
  unsure (1)..(456): unsure at all n locations
ctcagcttcgtcaatccgctatcctgcccataatttgctactctatttcttgatgaanaagaccattctgntcatcaaaatatattcctgcaaagtgtgcgataaaaatatttcgcttaccctgcaggtaggaagcgcctgtgcttaccatcatgtgggttcattctttggtaaacggtattttgttctctcggttgcatcagtccttgtgatcacttggctcaatctaagggagggcacactaacaaggataaacaaaagctaacatgggaatcactattgatccatctgctacgtttatcatgctcacttgttcctgagagtttgatttcattgcagcaatgatgtttacgattcagatactgcggcttgtaagaacaagaaggaatctgttgttaacatcgttggcaggtactgctaataccaagcaataatgcaactactatgcacagcttt

SEQ ID NO: 31395 - DNA, 452 bp, Oryza sativa
  unsure (1)..(452): unsure at all n locations
agctcttgtcctgcctttaggcagagtctatcataagaatctatcctctcctttgctttacattgcctttntttttccttttcttcaagctattctttttttttcttctattcaagtagaacgatatacctcgtggtgatcatgtcagagaccgaaaatgtaaagcatttccgttatctgcgaagagaatgaatgaattttctgcactaacaggattgaattctaaataaaggaataaataaaagataggtcaaattgtttcaagaatcgctggatcacactttgaattgtttggatgaaatttaccaaaaagcaagttgctcttcagagggcatgcattcatgcccttcaatagggcgtagcaaggaattagaggtcctggtgcgaaaggtataatgggacctcaacatatgaatacatctagttctaatcgattagctttagatattaag

SEQ ID NO: 31396 - DNA, 446 bp, Oryza sativa
  unsure (1)..(446): unsure at all n locations
tgctggagcgcgtctacgtgctgaaatttcccttctttctgctgatcttacatcgcatgcatctgatcaagggggagtagcacatagcaatgatcatatgcataatatcttacctgttggtgctgattcctcttttgagaatgatgctgcagatgacactgaggcagatgctagcgacagcaatgcagagattaacgcagaacaacctgatggaactcatcctggtgcatcaaccggggtacacacagcagaaacagaagtggcggaagaatcgtcgtctcgtcctgatcagtggcgcgccgtgcangcccccgagcaacctgcgaccgccaccgaaccagcagcccgcacgtcgtcggctgtacagagctcccgcgcgagttctcgcttcatcgcaagccaccaccagcccggatgtgacacgtctgcagggcctcgtcatgatg

SEQ ID NO: 31397 - DNA, 361 bp, Oryza sativa
  unsure (1)..(361): unsure at all n locations
gcttctggttccagccattntcttcactaagtgcatcttctacctctgtcttaagattattattgtctgagctgtctccctcgtcgtctgaatcagatgaatccgaatcactggaactgtgcccaacattttctagtttaccaattagctgttggtagtgcttgtgaaggtactcatactcttcatggaagcccttcacaagggaggacagttttgatttcttgaaggcatttccagaatcatctgagggttcagtcttggccgattcattctcctcgcctatcatccgtagaatgttttccacattatcatcaacacctgtgggaaaaccaanacataaactcatttcagacaacaaatg

SEQ ID NO: 31398 - DNA, 137 bp, Oryza sativa
  unsure (1)..(137): unsure at all n locations
tggcggatgaaccgcaccatctgctggatctgcttggcgacatcggcgtcgntcatcttggcggcggcggngatcccgacggcggccctcgcggnctcttgctgctgctgctgctgcgctccggcgaaccaccaccg

SEQ ID NO: 31399 - DNA, 358 bp, Oryza sativa
agcttctgattgcatggagctgcgtggactgacttgctggcaactatgtttctcggtgttgggcacttgtcggcgaaatgacccattccttgacaattgaagcaacagatatcttcccggactcggcattttcttttctcattttgattcctctgtcctggcactggagtgaggctgaaactgtaatcttggcggagatttgtgttgccttgatgcttctctccgttggaactggcgggttggttggccatcttcttcgtcagagaaaactgaattgacaatcttttggtacatgatcagcttcttcacaaaagaaacaagtgatcctgctcatggggcattcaccgggtggatggtc

SEQ ID NO: 31400 - DNA, 333 bp, Oryza sativa
agctagtctagctagcagtgcttgattgaagcacttcatatccctaaaaccaagaccaccatgagatttgggatataagatcttttcccatgctatccagaggacctttctttccccattatcatgtccccaccagaagttgcgaaccatcctggcataatcatcgcagaatttatctgtcatcttgaagacccccataatataagtaggcaacgcttgtgccacacttttgatcagtacttctttttgccctgacgacatatatttttcattccaatccgacatccttttagattacttatcatttatcggatggaactggtctgctttcat

SEQ ID NO: 31401 - DNA, 394 bp, Oryza sativa
  unsure (1)..(394): unsure at all n locations
agcttgctgcctcccttagtcttaactattggatatgaaaacagagtcaagaaatgcctgatccacgtttgccataagcagcaatataaatatgttgtgtatacccatagaaacatgctgggttatcaactcactagtttttttataaaaaaaaggaaactcagatacattatacacgaagactatttgaactgatgaaagcattgcgtatgcgaaaagaagtaacaagaggcttaccaagaaatttgctgtcaactaataaaggaagtagtattatctctccactttgaagacagatntttttccagataagacgatgagctaccaactctattgaattcggactgcatatcagacctcgtttgcagggtgtacaccctattgaaaaagcttg

SEQ ID NO: 31402 - DNA, 408 bp, Oryza sativa
agctggttaagaaagattggcacgcgatgaactcggaagacctgagactatctctagctcaacaacctaatgcaagaagtgtgctggagaccatttggggatgcccagagaatatacagatgagagctgtcgtttgtatgtggcactggtggacagcacaggaatgaagtgatggaaggaggaaaagccagagacccaagctgaatctgaaagaggggaagctgaaggagaggagtatggctaaatggagaaaacccatctttgatgtcctgaacattagttctgatggtgccttccgcagcagcaccaaacaaggcggatggggatatgttgttcgtgaccaatatggatgtgtggcctaggctggagctggcggactgatcacctgatggatgcattccactcttg

SEQ ID NO: 31403 - DNA, 379 bp, Oryza sativa
  unsure (1)..(379): unsure at all n locations
agcaacgatgcccgcattgagttccgtcttattttatttttatcacgctagcgtgggtgttgttggtggagcttcgtggtaatcatggatttcactcagtattccctaattaactgcgcattgtgagggtgggtctcgtttctccttcaaatgggacatcttcttttatataatacgtctgcaacggctaaaccgttcgacaagaaaatttcaatcaaaaattaattttggcaattttggacgcctatgaggctatgctccctctcctgtgcaagacactatttcgccnaaaattatcaatttntttcaatattttgtgagtttagacaaactttatttcgatctgttcacatattatgtaaaaaatactcttagatat

SEQ ID NO: 31404 - DNA, 423 bp, Oryza sativa
  unsure (1)..(423): unsure at all n locations
gctaataacacttagcttactcaacatactcagtatntaacagaatttatttttatagacgtagtgccaataatacacaaaaataatctgataaattaattagccaaaaaaaagggttgaatatcaagctaactatatgcttaagcttaaacttgattagtagaaaagattagacctaagcgtaaaattcagcttattatttatccaaaccattaacgatactcaaactcaactagcttattctactgtacttgtacaaatgagggttgaacacttgaactcgagtactccctccgttccaaaaaaaaatgaatctagcactggatgtgacatattttagtataatgaatctggacaaaagtatgtccagattcataatattagaatgtgtcacatttagtactatgttggtctttatgggat

SEQ ID NO: 31405 - DNA, 514 bp, Oryza sativa
  unsure (1)..(514): unsure at all n locations
ggtctcacactgtcattgaaacctgtgggagaggcatgcatgtatattgacataacaaggggaaaaaaagaataagaagatgtggacatgttcatcagctaattaagctgcctgcagccagctcaatggaaaggcactcggagtgctacacccgtcatctctctacgtgacaggcagtagtcaagacaagaatctgagataacgacaggtaattaattatgctaagcataaacgtatatataagtactactcgtatatctatcntaatcgttaatgtctcgtttgatcttaaagaaaaagggttaggttggtgacatagattgattaattggagcttgaaagtgaagagcacgaccgaatgagagccttctcggtcttcttctgatcttgggttnttctccatggatggatcgngacacagaatggtnnntttttctctctctctctctcttatcagatggggaccacattntgaagttaatttagagatnttcttttatgatggatactacca

SEQ ID NO: 31406 - DNA, 340 bp, Oryza sativa
  unsure (1)..(340): unsure at all n locations
agcagcattgcggagcttatccatggacagaaatgcagaggtgcgaattctgaaagaaattaattatctcttcttgggtgcaagcctggatttgatcttctccacctccttggtgccaacctggaaggccttggtgagcacgccgtcgggcacctccggcgacgccgcgaagagcgtcatggcgagggactgcgtgccgggcagctggctgttgaaggcggagatgacagcggcggnggtgtcgccgttgttcttctggaagtggagcacgccgcgcgggaagacgaagacgtctccggcagagatggtcttggtgtacagcttgttggcggtggtgatg

SEQ ID NO: 31407 - DNA, 490 bp, Oryza sativa
  unsure (1)..(490): unsure at all n locations
gagtactatagtgaactataggtcttggtgtcttagtgatgttaaatgccttggggagctatcttatttagtaaactcatcagttagtctcaaaatcaaggggagaatattggttggttntatcggctaatgttggttagttaggataagattaaatcccaatagtttcttatcctaacaagaaagaaacaaaataagagataatttgtctttgtgtgattggtagaaaaatgaatttngtttataatctagagattcacccccgagccccaccagcatcacatataaaatatagaggagaggcagatgggacgctagaaagtcttgactcanaaccctaaatcaatcgcctgggtcgatttgacactggaaggggttcgtgtggtttctatgtgcgtgtgctttccttagcagagaagaagaacagaggacgaaggacaggaagaacaacantaaagaaattgaccagcgaattcaatggcttcacatc

SEQ ID NO: 31408 - DNA, 455 bp, Oryza sativa
  unsure (1)..(455): unsure at all n locations
agcctgagacaatagttatgcaacgtttgtccattatagttggagatccacaaacagagctcaataatgcgttcttcctatattagcttacgtacttattttgttcattgcgcgttctcaataattcgccgaactacactcttgtttgagcgctattctcgaataattggctgtagctctcttgagtaaatgccggaatgttatattccattatcttacaaaaaggtatcacgcctattatatatttgaaaatgactctagatactcgcgctatattttgccctctctttattttatatccctcggtttttcttatttctaaacaacatccttttataccttatgtctgaatgaacatgtaatgcctaacgcagcacgatcaaccctgatgtcctatnttgttctcggtcacacatactatgcaagttatacacccaaatgactgtctgcatatc

SEQ ID NO: 31409 - DNA, 488 bp, Oryza sativa
  unsure (1)..(488): unsure at all n locations
taatatacataatatgccaaatttgctagagggatgagtatttttatataattcaatagaatctgcatttgcttcaaagaagctacaagaacttattatagagttgttcgttcaatcaagtgcaacataacataacaaaaagtagcaacgaggaactatctagngnggcatggagcaactatatctatcggacgtaaagcggggatggctgccggctggatgggcaagggtgtgactcgtgtgaagtgtgacgtgtgaagcaccacggccatatatactgctctctctctctctctctcctnaaatataaatatttattttactcttgacacggtcaacgagatgctactttaaccaacaatatctgtaagagatgcatattatgataggttgcttaatgagtaatctactaacatacattctacatgagtgatcattcntaatttggattaatagtcacagctcaaaatatttgacttatcattatg

SEQ ID NO: 31410 - DNA, 408 bp, Oryza sativa
cagctcattgagagcttgctcagctttcttcgttcatacaaacggcccagagcgcttgaggagcttgaataggtgcagcgcccactcacccagccttgatatgaatcgactcagggcggccatgcatccagtgacgcactacacatcactaagcttgctggggggcgcatcctctctatcgcgcgcattttctcgggatttgcttctacgcctcgggaagagactagaaaaccgagaagtttgcccgccggcacaccgaacacacacttatcggggttcagccttacgcgtgtggacctgagactattgaaagtttccgccaggtcctgcagcaacgtgtcctggtggcgcatctttaccaccaggtcatcaacatacgcctctacattgcgccctatctgattactc

SEQ ID NO: 31411 - DNA, 169 bp, Oryza sativa
agcttatcctttttggggggaagaacagtattattcacttgctgaatatcagacccatcaagtttcaaactagcaactcgctctttatcagctcctaccactccagcagggggggaagggagaaaagcaattttctttttattatgcacaaaagcgagaggattactcc

SEQ ID NO: 31412 - DNA, 421 bp, Oryza sativa
  unsure (1)..(421): unsure at all n locations
ntgctagttctccattatttccagaagtattgatggtagacattggtctataatgaacgtcaacaaaccccacaagcataaacctttgctcgtcccgagtaaaggacttgcataaactaaacttagttgttgatcaggagttgctactatgttgtccatctcaaaggtactaagtgcatagttgttgatggctcttaagtaccaaattcatgccatcagtacctgcataaaatggagagcatanaacatccaacatagtggtagggtatattngtaacaatttccacgagtgttggtgtatatttggatgtatatgacaaactaccaaagttgagagataatatacatgaagaacaaggagagtcatactcatatccaaacttacgacagtttggaccgaaaagcccaattaaactaccat

SEQ ID NO: 31413 - DNA, 458 bp, Oryza sativa
  unsure (1)..(458): unsure at all n locations
ctcagcttagagttaggggtatactttatagagaaatgattgttttatgaccggcaaggaacgagagggatgtgcgaanaccanaatcatntattcatttacatggtctcacttatcttatattacaaccaggaaggaataggagggatgtgtggaacagagaaaccgagattagtatttttatggaaaatgctacacacacgacccacacattcgactctgtcagacgactacaacgtcgatgtacgcgccgtcagcagcatgcagcacgaatcctcacaccgtctcgcaatgtgttgctacaccgtttgggtcgtaagctggttggatggatgggtcgtacgtatagcatgattctanttttattactctcgngggtttctcgtaagcagtaattttggtactctcgctgttacgagccagacctactctatttattttgatcggacggagtgaga

SEQ ID NO: 31414 - DNA, 379 bp, Oryza sativa
agctcgggcctcgtcatcttgagtggactgagcgatgatgtccatcttgtgggcctgctgcgcatctgggccgagatggcccatcttctcctggcccaactcagctgtcgacgccaccttatcctctcccagtatcggttcttccccacccgtcctcttcgtctcgttctccgcctcccgtgaagacttgggagcgatctctgtcaggagcggcagcatcgggtcatggtccccctgttcgtctgagaaggggaagagaggtgatgagcatacgatctggatcagagggtcggggagactcacgagagcgttgactggctgctggtcagcatctagctgcgcactgacagcgagcaccttagtcgtcgcgccgcctgca

SEQ ID NO: 31415 - DNA, 323 bp, Oryza sativa
  unsure (1)..(323): unsure at all n locations
tgagacatcgattctatcggatgagagaagacattccgcatatagcatgagaagtcntatttcaaaattccacagtattcatgctcgcataaggaatccccagagtcttgtccgactagtatcgcttacttgtgcgaggaccacgaccaccttatggacctcatttctaagatgtttagaagtgtggatgaggatgcttatatctatcataaatacaagaaatctcgtatttgtttgtggcacaaatcttgcagcatgatatccctatggtcgagcttgtgaccattaacacagtactaccgngagatagccctgaatatcat

SEQ ID NO: 31416 - DNA, 372 bp, Oryza sativa
gtcacctgcagctgcaagcttggaaagatgcttaggtgttttttttctataccgcactgagcgcctgtgaagatggagccataggcccgctaattcgctgatgtttatttttgattggcaggcctgaagcgcctttgtaataatgtaaatattatcgaaataataaagatggggctcttatatcatgattgcgcggtgtaccccggcttttcctgtgacggcgattaatacactcgcgttccggaaaaggcaattttcgcggtcgcgaccactttcatatgaattctgctacaattatgaacaggcactagagaatatactacttgcgacaggagatgcattatcaagaacatgatgatggttttgaacctc

SEQ ID NO: 31417 - DNA, 374 bp, Oryza sativa
atatatggccagagtagtatgtttgcatggtgtttctaataagatagtgtcagatagaggtagccagtttacttcgaagctttggcagaaaatacagccagaattgggtactcctttgaatatcagtactgcttatcaccctccaacagatgggcagacggaaagagtaaaccaaattttagaagatatgttgagagcctgtgttctaaattttggtggaagttgggataagaaattgccgtattgcggaatttcctataacaatagttatcaagctagtttgaaatgtctccgaatgaacattatatggtcgaagtgccgtacgccgctcctttgggatcacaccggtgaacagtcaagtattgggacagaca

SEQ ID NO: 31418 - DNA, 333 bp, Oryza sativa
  unsure (1)..(333): unsure at all n locations
agcttaatgaagaaattcacagcactattctttctcattttggcgcgcactaagaatcaaagaaagcaccgnggtacttactcaatatgagccctgaatggtgcataccatatcaacgatacttttgatcaaatgctactaacaatgtgcttttaatatatgtatggaaactgacctattctttccacgtagcatacattggccatcttgaaaatcatatcacaatctcataccatctgtaactgttatcgcacctctaatgaggaactctcaagtgcttatcatatcttattgagcttttataatggaaatgaaattgacatgcaacattat

SEQ ID NO: 31419 - DNA, 221 bp, Oryza sativa
tggagggtagagatacacacagtggaacagagtgtggtgtgtgtgttatatataaagacgacgacgacgacttggcttgaaagcaatgcaagctcctggcccggccgcctgtgtggtgtcgtggtgagctcgcgcgcgcggtgtccgcggaagccaccgcgcgaggggtcaaataaaagaggaagaagacgctcgcgcgggcgccctcgtctcatcaacat

SEQ ID NO: 31420 - DNA, 285 bp, Oryza sativa
  unsure (1)..(285): unsure at all n locations
agcttacaaactagagaagctagggcaagatatatatctaagagatcatgacatccggagattgacaactccactctaacacagttcgacacagcttcttgttactcatgcncgggccctcttgttggtgcagtccgggcacttgtactgcttgatatgctcggcacgagcgggtgtgatcttgacgcacttcccatgataccacttctcgcagttatcgcaacagatccagaactcgtccttgccatcgttggttccacaggtcccacacaaagtgttgtcatg

SEQ ID NO: 31421 - DNA, 320 bp, Oryza sativa
  unsure (1)..(320): unsure at all n locations
agcttcactagtccttgtacaaccctatctagttctcgtatattgttagnttaaatagaaatagaaattcagtttatcctattttaaactcagtccttgaatttcgcagactaaaatgttaggttgtttattatcacccatcagatcgttaatggcgaatggaatgtcgcgggcattgcccacagaacctatgatcttgagggcaaaactgtgggcactgttggtgctggtcgcatcggcaggctcctgcttcagcgtctcaagcccttcaactgcaacctgatgtaccatgacagggtgaagatttgacccgagcttga

SEQ ID NO: 31422 - DNA, 359 bp, Oryza sativa
aaagcttgaaatcaaatggtgtggtgtgtttgtatgcatgcatgcatgtatccagaaaaaaaagagaggaactgatctgaacatctgatctaatcatgggtgatgggtgtgcatgccaagaacaactgtttggatggagaggaattaaagaagataagagggctagatgcctggattggatgatggatgattggatgaagcagatcatcagccaaagtttgaacatgattccttgaataattctttgttcttgaaaaaagtcgaaatgtcttgaattgtgaaacggaggaaggacaaaagattccagtcaagatattaattatagaaggagagaaagagggaccattcaataacttata

SEQ ID NO: 31423 - DNA, 322 bp, Oryza sativa
tgcaagcttctgataaactgagattattgctaacccatcactaactcttcgatatatattttgctgaaagtatccctgatcccactgataacgagtaggcccaaacaattcaattggggtagttgctgacccataccacatagtttcggcaactacgaaagctgcaaaaaaaacagcagcgatactactggaaagtacagtttcaatattgcccatacgtaatcctttgtatagacgttgaggtggacggacactaagatggaatacgcccgcttatatgcccaatgtacccgcagcaatatgatgagaagctatttccccc

SEQ ID NO: 31424 - DNA, 470 bp, Oryza sativa
  unsure (1)..(470): unsure at all n locations
tcttccaaagcatacggctntctagatgtatatgactatctctatacagatggatcttatatgaatcgtatgatgaagtaccacatgagtggatatataggaaaggaatcccaatctgccgaatcgctcatgttatgatcttctacatcctaggtctccgcgttccgtcatctggcttatgttcttcatgtagcattcagatcgaatgactctatgaaattacgtcgatacttctacatattatgggtaacgtaggagacatccctattttcccccggcggtcttaattaccactgcttagctttcaattcgcctctgaccatcaaattaaatgtgaataacccgtccttctctctttgaaacaaggggcgcttncggttctgtgcgtgcttcanacacatttgtcttctccatattaccatatctctagaggcaataaatttctatgaggaactacttgactcaatcac

SEQ ID NO: 31425 - DNA, 276 bp, Oryza sativa
agcttgcactcacgcaggtgcgtgtgctcctctgtttactgtatgtaaggactactgcatacacggtagagactactgtgcttagaaggagactcttaagcagtatctgtctttatgcgactcatgactatctatatatcaggtttcattgtgcaactactaaccctataggaccactctccccttaccggcgatactctaggtgatatctgcgagaaatatggtagaggtgcacacaacagtatggataagggagttctgcgatttgaccatgtg

SEQ ID NO: 31426 - DNA, 299 bp, Oryza sativa
  unsure (1)..(299): unsure at all n locations
agcttagatagtgtagtggtgtataccaagatgttatttgtctctgacagggagaattatctttggtgtgttcatggtgagggatggattcaagctataacaagtaatttgactcacagaggagttcgttgacttgtgatccaaattcctttgctcttaataaatgccaccttctggcggantggatcagaggcttaagcctagccattgtggcttgcacctggggactcccgtgggtgctaggactgagcccccgcgaaacggatcgtcatacgtcttaagagcgcaccatatatata

SEQ ID NO: 31427 - DNA, 197 bp, Oryza sativa
cttagatgcgccgatactatttatgaggctgattatgcacaatctgacgatttatgcctttttgaacggtgttcacatgtctatctgggagatgacagtgacaacaatacacagattatgggagcacgactcctctgactttagattcagtctacacactacttcacacgtcagagatgaatattttatctaataaa

SEQ ID NO: 31428 - DNA, 297 bp, Oryza sativa
gctagatctgagagtaaagtctcttggttgcgcgtctttaccaccaagtcatcgacataagcctcaacattacgccctatttggctacccagagaaatgcgagtagtacgttgaatagcatgacctgcattctgtaacccgaatggcattgatgtataacaataggcttctacagtggtaatgaacgcagttgattcctcatactacctagccatgcgaatctgatggtgaccacagtatgcgtctataatacacataaggacgcacaccgcggtggagtcgactatctgatctatg

SEQ ID NO: 31429 - DNA, 363 bp, Oryza sativa
  unsure (1)..(363): unsure at all n locations
aactaagctaggcgatactagtgagaaatgaacaatcgcgatggttatttgttatcttttacagcntaattaacaagaagcgactcgaaacgaactgatggcctggtcattacagtaaatacgagtgcgtgcactgacatttcagtaaatggagatgcgctatgatgcttcaacgttgtcagaaagaagtgcaacgctatgcacactcaaaacagtaattcaactttcaaacagcttctaatatacaaactcaaattaacctcatgtgctcttcagataggctatactagaacacgaacaagtcaatcatacatgtaaccacacaacgtacaaaatcgatcattttcatgctactggatgttc

SEQ ID NO: 31430 - DNA, 435 bp, Oryza sativa
  unsure (1)..(435): unsure at all n locations
ttagagtcacctgcagctgcagcttttgtgcaatcggctaaatcctacttgtatgttatccttgaaagccgatgcaatgtctagataacttatcggctagcaccccgataaaacactccctaatgatggctaaagggctcttcggacaaagtcttataaatatacctcacttcactcacttgaacgcacacttntcagctcgagctgaattataagagactctattgttctatattgtatactacaataggaagagagttgagtataagaagatagaagaattccggagttgtgcggaaacttctctcattcttttaattctgcgtattactctgagttcaacataatattctccctgagtaatttataattatcttgggagaaatatctcttgtttagttcctacatagcatacacgattatcgttcactataa

SEQ ID NO: 31431 - DNA, 374 bp, Oryza sativa
  unsure (1)..(374): unsure at all n locations
tcggatgtgcatcgactacaccgacctcaacaacgcttgttctattgatccttacccaccgcctcgcatagatcagatcgtagacttcactgcggggtgcgaccttctgttgtttctagatgcatactctggctaccatcatattcgcatggctatggaggatgaggaaaaaactgcgttcattacccgcgtatgaacctattgttatacatcaatgccctatcggttaaagaatgcatgtcctacttttcaacgtactactctaatatctttgggtagccaaataagacgtaatgttgaagcttatgtctatgactaggttgtaaaacgcgcaaccaagaaactttnactttatatctagcggaaacttttga

SEQ ID NO: 31432 - DNA, 344 bp, Oryza sativa
  unsure (1)..(344): unsure at all n locations
ttactagnctggctgtgtgctagtgactggaactgtgtccggtgcaagaaccccacttcatctctgcatgaatgctcatcagagagttaaacacagccgagttacgcaggaaaatgtatatcataataaaaattgtgttgcagaatgcatgaagtgacgacataaaaatgcgtgcatggagaaatatgaatggagaaaccaaatgtgactacatgacggaatcttgatggacgatttgctcatagtggtggaggataccctccccgagctgcgccacttcctcttgcttggctgccaaagctgtgctgttcatgttcattgctctctcactctctctgtcttgg

SEQ ID NO: 31433 - DNA, 160 bp, Oryza sativa
catcgctctatgttatatgcgttacatcggcaggccaagcgcgaaaaatcccccctggatatcgggcgggcaacatagatctcactggggccccgccgggggaccggcccgggtgggcctggcccgagttattgcctggaacgggcaagtgcgggccccg

SEQ ID NO: 31434 - DNA, 255 bp, Oryza sativa
agcttatatcgagagcatgcacagattagggatgtgaatatcttattcctggactatgtattgccgatcgtccttatatctcagaagagatgcctggaacacttgatacatgctgtcgtcgcgcgaaatgtccctgaacaatccattacacttacgaagcttttcttgtgatggggcaagcgacctctgcacaaccactgatggactctgtgccccaaacaccattgcgtcttgtgtgcctctctctactaggaa

SEQ ID NO: 31435 - DNA, 372 bp, Oryza sativa
  unsure (1)..(372): unsure at all n locations
agcttatctaacccataagcatgacttattgtatcttaatgtggctaccagccagacaactcctaaatataaatatttctagtttgggtagccaagaataatgataaggagaaccacccacctcattaatattagtccctgctaacacttgattggctgaaaataattcgatttcatgcaatgtacttatatagtgngtatataatttaaataatagaaacgcttgtatttgggagtggagggaggtacatatgtggaaatattttgatgatatgcaatgtgcagcaagtgcagtacaaacatcacatgcaatggcgttactcgtcactggagagtattctaaatttcagagggggaaagaattgacagcac

SEQ ID NO: 31436 - DNA, 325 bp, Oryza sativa
  unsure (1)..(325): unsure at all n locations
tatgctacaggaaatcaaaagggtgttaactcgtcaagataaaaaaatcgtgaagcacgtgtttcatatcgntgaaataatgtatatatacataatgctatctaatacaccaatttttttctgctnttttgtgttctgcagccagcagagggacgcaactgtattgctgatgagcattatttgccaaccctcttcaatgtcagtaaataatattttgaattgatatttagctntcttcttggtcccttgcttttctttcatatgctctcactntcatcttcagatggtagatcctggtggaatctctaattgggcagtgacacat

SEQ ID NO: 31437 - DNA, 311 bp, Oryza sativa
catatgcttggtgctggtgcgtattattgttccaactgaagggcactgcacattgcttggcgcggcgtcgaatccaggtccttgtttccccacttcctctgtttgacacttactgatgagaaaaaagtcgcgcgtccctagtagctatttctttggaagaacggctcaatggtttccgtgatgaactcttccatcacccggtatggtaccactactactgatggcctcttataagacactgccttatgaagtgaatgatctacttctgcagcatcatcctagctcgacatgaagatatccacatcatacat

SEQ ID NO: 31438 - DNA, 350 bp, Oryza sativa
  unsure (1)..(350): unsure at all n locations
ccaagccctaagagtgcttgcagaaacgccgcatgaccatatttgcagagtaataaattntatttttatactatagaaaattctattataaaaagaccctctattgtttcctactgtagtacatatatatnattttaggtcttatagctattactttttactcgtgcatccggaagtggttttttaagggaacagtatctaaaggtttattatgcttatagatcttttttatcgtagtgcatactctgatatatactttgtgggctgtatagctttattatcgaatctatctatgtggatttggatctttttcaatcacatatcgggtaaaatagttctcttgtatacac

SEQ ID NO: 31439 - DNA, 473 bp, Oryza sativa
  unsure (1)..(473): unsure at all n locations
actcagcttaccatttatgtgctttcgaacattccattctctggcctttattanacgcaccagagntcctcttgcgtattcttgatggacatgctgtgaacatttagcatagtactagttaagcattagtcacccctagaattattattttcaaacaagcagctgatgaaaaactatataactagtgatggaatatttgtaaggaaaaaaaggaaatgcaactcatgcatccaaaaaaacaaaacggaagaagaagataacaaatgtagacagaggtcaagacaaagcatctagcaacacaacagggagagaaaagcanatggtgttctttggtggtgacattgtgactgctgtgggaaagagatatattnttntgaaacagagatgttgtttcttagtggacatattgggattgcagcgcgctngcgcaaccaaacacantcttctgagatcactaatggcatcatacttat

SEQ ID NO: 31440 - DNA, 471 bp, Oryza sativa
  unsure (1)..(471): unsure at all n locations
agcttctatgaatctcacaaaatatcatccatgttattctcgtactngcgngaacgtggacattagggatttattaccttggtcaatgtatttatgagataaaataaagatgagagtaatagataagtgctgctccttccgttttataatgtaaaactttctaatatgtgtctaaatttattaacatttatatgaatataagcaatactgcacaggcttacattattaaacggaggaaataataaatggtgccatcataatcgcaactttgttagcgaacggaccgtaacttatctaggtaggttttctgcgataaaacttgatcactcaagttcaagtcatagatgtgacactgctgctcgttcttaccggaattattttttcagtgtaggagacatattcgttgcaacgagatacttgtggtgaccttatcaatatcataatatgcacattcgatctatcgatatctac

SEQ ID NO: 31441 - DNA, 440 bp, Oryza sativa
  unsure (1)..(440): unsure at all n locations
tcttgatgacaatagtcatgtgacagtggatagatgttctatttcatttctacactatcatcgagctagctggatgagtgaaaaggacctggattttaaaactgctcattgaattaccaccgtattaattttttagtcacaagtgtcatactttggacaaagatgtttaccaatgctaaacttctacagcttgatgcatgccgcctggatggattctacacaattgcaaccagcaattgttagcaagattttgtatgcttcaacatgtttctacaaagttgccttcacacctgtcagggtttaagcgatgttccgatgctctatacttgtattaatatattatccggattattacagggaaaatagtaaattattaatacaatgattagaacgtactgtatcattcatggtctntntctgactaaatcaatatatgatca

SEQ ID NO: 31442 - DNA, 382 bp, Oryza sativa
  unsure (1)..(382): unsure at all n locations
aagcttggtcgcgctacatagctcgagtcggacgaaagtctcttatatcttccgaagctgtctagctcgttatcgaaacgagccaagaccgagctaactcaccagccattagcgagctcgtttggctcangatattagggtcatatacgaagatattgcaagttttctaactatttatttatggacaaaacaatcgagattatcatatgatctatttatgtgttgtgatgagctattaaagaataatattactctattacacattctatgcacaagattggtgatcgatttctcttacacctacttgagatttacttgataccaggctcgcgagccagctcgagcccattaacgagccgagcctagctgcatctttagctca

SEQ ID NO: 31443 - DNA, 272 bp, Oryza sativa
ttcagcttggagctcccgtgctcctatgacgctaccctcttctcaccctggaggtagctgaagctcagcacctcctcctactgatggttacgatccaaatgccttctttcattcacaggatgcttactttggaatgcaagccaatgaatacttctacccgtgtcttggggctattaataccctaagtgaaagcattcaacgcttgtgtaccgggcatgaagcattgcatgaggatgttcgtggcttgcgcaccacatgtggagacttgaatg

SEQ ID NO: 31444 - DNA, 410 bp, Oryza sativa
  unsure (1)..(410): unsure at all n locations
agcttggtaatgtgtgtgagtgaacgagtgaatctccttatatatatgtacgtatgacggntatccttatgtgaaatgtctgaattgccccgcaatcgccatcagggagtaatctgggacgtccatgccaaaccccagcttgaacggctgagacccctggctcgggttcggacgaacctgtgctgggcccacctggcctggccttcgaaccatctcttcccctggtcctcctctatccatttctgggagtgttggactgattctttggtattttgatgaagttcacaaaccatccttgtatggatacatatttctcccacactntagtctgattntcctgctaacacttgngaaatatgtgagaaataacacctatcactatgttggatgtttattatctggactttatg

SEQ ID NO: 31445 - DNA, 248 bp, Oryza sativa
gatggaagagctcaccatcgccattggagtcagaaaatgcaggggaaataaagagaagggatgagaaacatcagacatgcgtgtcgctgaaatatggggctacccacttctatatttaactctttcgataatgggctgccacgtcaacacacttagaccaagtcaacttgctatgtcaccaaaaccgctttcgaaaccacttaaggagtcaatttggaccggtttctaaattagtggaggtgttatac

SEQ ID NO: 31446 - DNA, 380 bp, Oryza sativa
  unsure (1)..(380): unsure at all n locations
atcaccgagtgatgcgccttaagcttcacgctggacgcgacaacgcgggagtagagcangcccagctccaacctcaggttccgtggatccgccgacagccacgggcgcagcgccgtcttcgcgagcaccattngtggcggggctagggggctcgtgctcctctctttagtgcccatggactcaagcggcggggaggaaaaccgacgcaggcgggaggagtctgggacgctacagcgcatcagcgccatgaagaggagagtgggaggctaccactccacggtggggccctctcaccatgcctgatcgagcgtctctacacgctcaccgcgcatactctacacactgaactcatgagtgagatccggcagcccgccaagaga

SEQ ID NO: 31447 - DNA, 353 bp, Oryza sativa
ctgcagctaccgcgttacgtgcgtgttgcgacgatttggttgtgtcgtgttcgaccttatgcatgcccactggccgatgcaactgagaagtgattcttgatacttattatgtgatgaataattgcgactttctccgctttaaaatatttgacaccgataactttgtaggacgtgttcgactatttatcttatttagcaatcttaagtaattatttattcctttcatatcatgagattcattgctaaatatactgtcatgtacacatatacttttacatatttcacaaatttttgtgaataagacgaacggtgaaacatgtgcgaagaagtcaacggtgtcaaatatgttgaaa

SEQ ID NO: 31448 - DNA, 213 bp, Oryza sativa
ggacactatttggtattcggctgcatgatagtatgatggcgcttcaacactgattataaaatgcggctttgcgcgtgagtttttatgtttgacgcatgtctaaacaatcactcctgcaagtatcattgctttgcttgggatgattggaagatatatgtgcccctggtgcgtctactatgttcttgatcttgcagttggttacaacatcccatc

SEQ ID NO: 31449 - DNA, 235 bp, Oryza sativa
ctcttacattcaggacccactcttcgatactttgatacttcttgtaactgctttactgtacaatgttaccccttcgacatgcttatgtacttctgccagctgtgactagactcatctgcctactctatgaactcactgtcgtcccgagaaacatgcattccgctttgctaattataacatgcactttttaactctttgtaatgtctgcataagatccatctacctaacgctatat

SEQ ID NO: 31450 - DNA, 257 bp, Oryza sativa
tggggacgctgatgatgccaatgggataatcccacggaataatactggcagcgacattcttaatcaaatggcatcagtactcgagagaattcatgcatctatggaatcaaattcttgcataagaacaactttacttcatggtgaagagaatattggccaattcctctaccttgagggcattgagtattatatgtggaacacatatgatgatcatttctatgcatcattctctctgatcatgctggtttcaaaacttc

SEQ ID NO: 31451 - DNA, 393 bp, Oryza sativa
  unsure (1)..(393): unsure at all n locations
ccttactttccttttgactccctttactatcatgtgtgaaagtttggagagattgtcaaatctttctcaagttagaactttgtatgtatctgaatgtcctgctttacggtgggcccagaagctggattgtgttcaacaattgtggttatcaaaggatttgcagatggaaattccccttttgttatctttacttaaacaacggtatcaacaacttcatggagaggaattagatctctacacatggtgataacaaatgatcagttagagcaaacttattaataatcttctggtggggatggtctttttcttcttcctgggtttntttttacccttctcgccttctttctgttgctttagttgctacctatgtattgacatgactgatatactaaa

SEQ ID NO: 31452 - DNA, 319 bp, Oryza sativa
  unsure (1)..(319): unsure at all n locations
ctgttacgaccccatctggcgcctgtaatcacatatgtcgcccgactttcataactgtaccgatcaagaagcacgtatattatatatcaaacggaactggtgaaaatcaagagagggacatatatcttagagtccacttgggcggatggcatatggccggtcagagctatacgcttcattttattttatttactgaggaccacgggcatgtcaagtcaatacatgtgganagaagatactatctgttctgcttgtcatacatcctatgtagcataattcaactctatgaaactaaatctcgtcattacactctctaaat

SEQ ID NO: 31453 - DNA, 379 bp, Oryza sativa
  unsure (1)..(379): unsure at all n locations
tcgcagagagaggtgttctcgttaaggcattgatgtattctttttgtcactctactggcctcaaagtgaattaccataagtcctgtctttacccaattaatttatctcatgagaatgcagtgctttttgctggtctgcttgggtgcaccataggcacaatgccttttacttatctgggtttgcccataggaacaactagaccaagggtagtggacattgcacccttggtagacagggtagaaagaagattaacagcaagctcataatttctgccactggtgaaagactcacattgataaactcagtgctttcctcaatcccaacatactacatgtgttctttgcagctgactgtntcagtggtaaaagctatagacact

SEQ ID NO: 31454 - DNA, 464 bp, Oryza sativa
  unsure (1)..(464): unsure at all n locations
tctatgcaatagaagtaatcttgatccatcgtattgtgcgagtctttatactgaattgnntttttctatctcaggagctgaagtagcattgtattgcgcacaacaatttcacattgagctatgcaatcatgaagactatcacaacgatctgattaatgcactggacaatgtgtttttaaggttattttggcctactttacataattttgtttatagctgcacttggaaatgtgggatatcattgttcgtgtgattgctgcagcatggatgagaacctgcaacagtccgatgcttggagagagttagttattcctcatgataatggatgtatgtattttctcaaggctggtgtctgtgcttaagcctttccacaggtagtaatctnttaacccctagcatcctcaaatattcatatcgtgaagaagtactcannaatgtatttgtgacagtgtgcatatgatcta

SEQ ID NO: 31455 - DNA, 314 bp, Oryza sativa
ggctaccttggtaggcgtaccggcgtcgcatatagtatgcacggttactgacactctaacatagtcttttaacaaatcatattgattaacgaatatatcatactctatgtgaaacctaactcttcttgactctgtcatgagacaatgcatctcacttgcagcgggcgagagaatatctgtatacttaacacgcgcttccgagtgacaaccaattatgacaatgataatgatagatcggttaacaaccgtgaattacaaaatcataatttgattaacaacaagataattaattagacaccagctaaagacagata

SEQ ID NO: 31456 - DNA, 335 bp, Oryza sativa
  unsure (1)..(335): unsure at all n locations
gcaagcttggaggggcttaaactnttatggaaatttccattcctgactagatgtctttctttgttctcggtcctattgttactgtaggctggnttttttaagaactcgaattcatcagaaacgtgagctgtgtcttctcctccatcctttttagaaaagaatacaaagagaagcttattctgcccatctatggagagaatgaaactaaacgctctaccaacctgcctaanagatctggagaatgaagaactgcatagacaatatgcttactaaccactaccacttcaattgaatgacagacttcatctcttcttatagtcagatcacttaatgac

SEQ ID NO: 31457 - DNA, 360 bp, Oryza sativa
  unsure (1)..(360): unsure at all n locations
cgtcgaggacctctcctcccttctgtattctttctctctctctctctctctctctcatgcatcatgtctccattgtttccatctaaaagctctaatgcttcttctgcttctagttctacaaaacccagaagtctctatcgttgtggtgaaaaaaaagtttttaagtttgatgttctcctccctttgcttangatgttaattgttccattaggtgcacagaccagtagattactagcagtaattttctgaatcagtcgattcttttccagaaccccattgttcttctccctccctggtgcatgcatgcatagcaataggcaatgacagaattcctaccagaatctcttttcctttctcaat

SEQ ID NO: 31458 - DNA, 258 bp, Oryza sativa
  unsure (1)..(258): unsure at all n locations
tcactgacatctatgatgatgtcttgaangaacttgccgatgaatatcacaacggcacctttcatatgaatgtcaatcctgactgaccctacttgtacctactaatattaccatgagctacgacttacaactgctactgatagctcttaattgagactagtaccttcttacgaggaggtgatggtctgatataaaatgcactgctaccatcaggtatcaggcacctcaaccttcaaattcaactaagtgcacttctcc

SEQ ID NO: 31459 - DNA, 145 bp, Oryza sativa
  unsure (1)..(145): unsure at all n locations
ctaagctttaacttgagctcggntcggntacgctcctgtgtcgagccatctctaactggattggaagacttcctgttcaaacacattctcatatatactgtcgaagtgttaaacacggcatgaaccaaatattcacatgtctaat

SEQ ID NO: 31460 - DNA, 419 bp, Oryza sativa
  unsure (1)..(419): unsure at all n locations
cgcacgcgttcccagctgcacctcattatcctangtcgttcaccgacagcgcccacgtggctggaggatggnccgccgccgccagggaacacgaagcgtgcccggcgccgcttgtcgttggagccccgtcgcatgatgccgacgcgcagccggaggaggagataccgtactccgtctacttcagcgtgccggcgtcgccgtcggggatgcacctcggcgcgttcgtcgtccgcgtgcacgccgcgcctgcttccgtgggcgaggccaggatcgacatgatccaccccgccgagccaccgccgcagatgctgtggcagcaggcgagggtccactcgcagcccaccctgacggtgatcaacggcgaggcggcggcgccggtgccccggagcgacatgacgcgggaccggaggctcgaccag

SEQ ID NO: 31461 - DNA, 267 bp, Oryza sativa
acagaggtgcttaagtgactagaaacacatggatgaccacacctgtgaatatatggcgtatgaggtgcaataatccgcgtcaacaaactgatagaggatataccaaccgcctagagaatgagcacaagatataatcagcctaagccataagattggtcaataataatgcacacttacgaggcgaacagcaatgataatgtatccaatcaattgcttataatcccaaacagcagcttgacttatatatcaagaagtcagcgggacagc

SEQ ID NO: 31462 - DNA, 362 bp, Oryza sativa
  unsure (1)..(362): unsure at all n locations
tctcttctggntcagaacactgtaaattccaccaagagcattctcaggggcctgaatctccaccaagtaaacaggctcaagcagtcttggcttggcagtgagctgagcagcatanatgaccctcctggcttgtggaatgatctggccaccacctctatgaatagcatcagaatggaggataacatcacanacctcanagcanatgccacggccacgcatgttctcttcagccagtgcaccttcttttgatgcccactgaaagccagccacaacggaatcctnntatttcgtaagatactgggcactccttgacatatccacaacaatggtagggcctgtggtctctggccanaacaccatat

SEQ ID NO: 31463 - DNA, 240 bp, Oryza sativa
cgaagagagtagagtacatgacgtgcgggcgaatgccagagttgtcagcaaactcctatcactcttctattctgtttatgactccgatttcaatataatattctttccgaggaatttagatttatcttgtgagaagtatctctctgctagttgctcaatagcttacgggattattgctcactataatcaactataatatagtgatcgatttggagagttgtgaacgctacagtagagatt

SEQ ID NO: 31464 - DNA, 326 bp, Oryza sativa
  unsure (1)..(326): unsure at all n locations
ccttgaactcagctgggattggagccaccctttggtactttttttctttntatttgngtacgaatcctaccggctgctgtgatggatggcgcgtctattggataatgaagctaggttaatttggttataattgggcattgcgaatacctattgttccaggttcccgatgcctattctttacatggctttgctgatcttcacgaacgaaactggcattaggcttttgcatctgcgcttttagctgtggcattaggtctctcatttggcctttgctacttttgtgcggctggagtggaattctgagttaccggtgaatttcacatgct

SEQ ID NO: 31465 - DNA, 382 bp, Oryza sativa
  unsure (1)..(382): unsure at all n locations
gatccttgagtcacctgcggcatgcaagctnggccaaaggcggcaaggggtgcatacgcatggttattgtcgagtttgatgagcaatcatccccaacgagaggttgtaccatgaaaagggcttcattcagtttctctggtgaagaaatttcagttacttctgagaaatcattgcacaggcctactgcatttgctgaactacctaacacaagggaatcatctgcggaagaaggaaagcaagaagtctgttgcgtggttcaaaaggctcggagcaaggtggaagatgtttcagcaaagatcaagctgatgggcctatccttgcctgaagcacttataactaatcgtgtccatagcctgctcagcaatagtcaatcactggtgac

SEQ ID NO: 31466 - DNA, 371 bp, Oryza sativa
  unsure (1)..(371): unsure at all n locations
tactgtgagactccacttcaatggatagtatctgacgatggttctatgttgcattgagaaagacccggaggtcttcaactgtcatatntttaaccggaaggatattctaaaaagttgtattatcccatttcaggcgacttgtttaccctgcaaattgtttccgtcattttctagtctaaaaaatttgctgggcgatctgccatgatctgtatcgatagtgatcgtcttatatcatttcaatggaaaggttgcacatgctgggattgtatttcatggacagtaaagcatctactctggctgcagcagacgcagcctgccctccatttgtttgccacttgccaagaatctaagatgacatgcattatacttat

SEQ ID NO: 31467 - DNA, 58 bp, Oryza sativa
gacttaagcacgagctgcactgaagtctggagttcatcttttttttctcgacggctgt

SEQ ID NO: 31468 - DNA, 476 bp, Oryza sativa
  unsure (1)..(476): unsure at all n locations
gctgagctgctcttatccttgtaacactntattatattctgataagtntgaagattcaacgaattgtattggctaattaagccctagtttttattggttgagctctagtcttaatttgtaaattcttggcaacgcaacgcaagctggcctaccaatgaaatataaaagatcacaagcagtttgtcccataacaattgtacttttatgatttgaatttgtaaagatgcacttgatagtgcactggctatggatgcatggtttcaatcccaaggtcctatgttcaatccccaacacgctcacaatttcttcttactcacaatagagtattaatggtcgcattaatcacttttcattcanatttctttctattntaccatcaactactctttcactcttacctatacatcatctaatcaggggcatgatgagtnttcttctcaaaccttaattacacaataattttctattataacata

SEQ ID NO: 31469 - DNA, 282 bp, Oryza sativa
actggatatgatttcacccagaaattcttaccgaaagagaaggagtatctcgacaacactctcattatggtttcacacccaaagacatagtcattactggtctagtgaaacattgggctcttatcagagaccttctacaatccggttgctgtggtctatcgcttaccaactccaaatacttccattatctggtaagacatggtctcgatcgcatggggcctatcgtttgcctatagctatacattttgctacaattaatggaatactgatagagatgtgtgc

SEQ ID NO: 31470 - DNA, 308 bp, Oryza sativa
ggacgaagaagttctagccggctcaacaagtatgtggagctatcccctttcgactagtcatttgttgcccgcactactggcaaatctcaagtgctagctgacttcttggacgaatggacaccggtaatacgcctagaacccgagcccgtcgaacaaccctcggtggtgtactccgacgactcgtggtcgcacaaggtggcgggcagtgtggcggtactcacttcgccaggaagcgtgccgaatccgtatgcctcaacgatgcagttcgacacaaccaacaacgcagcagaatacaaagctattcttct

SEQ ID NO: 31471 - DNA, 204 bp, Oryza sativa
catcacaccaatcttatccggcaacgtgagatactatggggatgaacacgattctcttttagactactgctgataacaccatgacgacgaaacatcacgcagattcagactctttacctaccattattataccgcgtagtcctgagcacttagctaagagcagggcaacgataatctaactgaggaacaacaacagtttcactg

SEQ ID NO: 31472 - DNA, 89 bp, Oryza sativa
  unsure (1)..(89): unsure at all n locations
atctctctctctctctctctctctttcaagttctctatctcattttntctctctcaaattctctatggttcttggggtagatattcctt

SEQ ID NO: 31473 - DNA, 344 bp, Oryza sativa
  unsure (1)..(344): unsure at all n locations
caccggccaaacgaaagcttgcttataagaccacggaacacgccgggtttatggagggtcatgttattgtgctgctatggaaccnaagaagttctgcactgggatataaacaccgtaaaaaaaatcaagccaagaaactgggagttgttcttcccaattaatgctaagtaggcgattgattcaaacctgattcttgttacttatgacatatgatctgtctgaaaaactaacttctgcatttattctgttaatacctttgtaggttaagtatttagctgtttatgattaaacccatatggattgtgtagagacactattgcttatgtcataactaataatatctg

SEQ ID NO: 31474 - DNA, 374 bp, Oryza sativa
  unsure (1)..(374): unsure at all n locations
cacatgtaacaacataatattaagaagagtacaataagcaacatactgtgtaggtagcaccgaagagttgatatggtccatcaactggcggtggaggttcacgtgcagatgaaggatccttttcgtaatccttgtatagtcggtaatatggaggaggtggaggatatgctgatgatgtggccatgccaggtacggaaccaactcaacttccaagctgtcacatcacagaatctgagaatcacaacttttgatgtggcctatgtttccttaangctcaataaactgaatctaattgaaactattgtttacatgtaaaatggaaaccatatcatcttcacgctagaaaaccagtcccctttcattcagaattatac

SEQ ID NO: 31475 - DNA, 440 bp, Oryza sativa
  unsure (1)..(440): unsure at all n locations
acaccgttctacaattntctgtatatttatacttcaagctaggaattaggggtggtagctaataagcatatgtagcatgaagatcgaacgcgagttccacatggccaaagggtatggagattccagctacggcaagaattataggattcaagttagttgcaactctttctttttggactgctttttttaactaacttccttcagatcanatctaacctatagcanataaataacctggaacagcttttgagaggataatataggaatataccacatctttatngtagtttggtgattccggacatttccgattaaggaccggaggtgcaaaattaaacttacttgcttatagctaaatgtttggattatcctcagcaaatatgctatgaattgactatcaattgaaaagtttattagggtaactgacacgactatatatg

SEQ ID NO: 31476 - DNA, 197 bp, Oryza sativa
  unsure (1)..(197): unsure at all n locations
agcttgcanngaaattacactagcttgtcattctttataacttaccaggaggaccattgagtggccaataatgtaaccgacgcangattgtctggccttaaatcgtatgcgacaaacaacatgttcacgccctggagtgttcaccccatacaaactttaggtacattatgtgatttcacttgactgtctagtccatg

SEQ ID NO: 31477 - DNA, 446 bp, Oryza sativa
  unsure (1)..(446): unsure at all n locations
tcaacggactattggtcaacacataacacaaacaatatgttttcttattggaaatgcaatgaagccatatttgtgcaatcatatgtagttacaaaaagaattattaggccctcacggacggagccaagactttgagtcactggagtcatggctttcacttgcaatagtgtcgtttttgaggggactccaactttaagtatctttagctcaaaagtcttttgtaactagaactgtgagcaagatggaattatttcattntactaaaaataaatacataaactctatattatacaagaatctatggattattaaaaggctaaacattaaaagtagaaccatataatcagcctaacacaatgtttctttcgacataacgcactatggatgactactgccgctcatctaaatgcctttttatatagatggtgaatgaaagtttggaagag

SEQ ID NO: 31478 - DNA, 120 bp, Oryza sativa
  unsure (1)..(120): unsure at all n locations
agctnttacaagaaccaggagggactctataaccttgtcgatcttagttacgccatactaagacatactctatttgtgaactaataacgaagggtggcgtgaccacctatcaaactgatc

SEQ ID NO: 31479 - DNA, 302 bp, Oryza sativa
gaaagacaattgaacattacgtttcaatgcacatataagaatcaatgacagggaagcatttcttaccatctttgtgcttcttacacgtgaaaaagttggagtagtatgcaggtctgaaaaatataacatgcatctttgccaactattcaccaaggacaactgcagttgtaaaattttcagcccacttccagctgtcaagtattggagaaggctctactcgatgcttagatataagcattatggtaccatgctgtggtggaaagaggttggagtgaaaatccaaaaaatgaacctcttagtac

SEQ ID NO: 31480 - DNA, 278 bp, Oryza sativa
  unsure (1)..(278): unsure at all n locations
catgatattgagaagattgacagaacaggaccgatcgttcaccacttctggngaagcttaatcttgtgaatggtttttacatgatattgaagagttgaagacagaaatgaggactgaccgttcacttacacgctggatatgctaccccatgcacactatagtagtacaaataatgaaaagtggccatggaaatcaacaaatcactagtattcttcttgctcatattagggaacaatggaattntggaagtaactagtgaatatactaatgccaatata

SEQ ID NO: 31481 - DNA, 406 bp, Oryza sativa
  unsure (1)..(406): unsure at all n locations
tgcagcttgactgaattatacaggctctattggtctatattgtattctaaaataggaagagagtagagtacaaggagttggaagaattccggagttgtcgggaatcttctcctatttcttttattctgtgtattaccctgaattcaatataatattcttcttgagtaatttagatttatcttgtgagaattacctcttggttagttcctaattagcatacgggattattgttcgctataatcaacttaaatatagtgatcgctttggtgagttataaatactaaagtagatattaattgcatagacgtgatcgttatgtaattattattcagtaattgctgcgtacccacaatacgttgatgtgggtgtagaggtggtgacagctctcnagagcacttaagtcctc

SEQ ID NO: 31482 - DNA, 433 bp, Oryza sativa
  unsure (1)..(433): unsure at all n locations
tatctagaagagagcaagatcaagaaggaatcgagaagagcacatcattgcatctcaatttatctattaattagacagggtatagtgaatttcttttttattgctaagccaagtagtttagtatccgatcaggattctgttcttttctcccatggttcgtatccataaagcagacagtatggatggcaatnttccttgcggngacccgacccaacgggggcggnggcgtgggccatttctgacccgcggatgagtcangggatgggccccgcatttgggcggagaggggacggcggagacattgaacccgcgtggccccaggggatatattaccccttcanatgtagcccatagaagacctaacaagcccaacttaataaaatattgagatatataagcaaaaactgaacagtctaaccctaccttatnctct

SEQ ID NO: 31483 - DNA, 446 bp, Oryza sativa
  unsure (1)..(446): unsure at all n locations
ctaagcttgaggggtattnggntagcttgtcaacatacttgcacgatttatcttattttacacccgaaaacgggagcttcactttagttgttctttttaaatatgatatggaaaggtataatgtagaaaaacacacttttaaaaacacaattccaattgaaaagggccgatgtacttcaattaagaaaaaaaaaacttcgcaaaccttgggtgaggaagaccacgagctggtcccatacatggagaaccgactctttggattaagtcttaacccatgatttgagaccctacccttacacgagagcacgttctttataggtcgattcttaatccatgtttctggaacccgtgagtngacttttttntacacacgaccaggatttgagccatagttagaaactttccactgcatggcatntatcatcatgctacaagcatggtcggac

SEQ ID NO: 31484 - DNA, 310 bp, Oryza sativa
  unsure (1)..(310): unsure at all n locations
gcttaagcatatactantatctacaaagcataattccctttctctctcgncttatagaactactagtaccatgagcaagaagaagaatccgagtagaatttggtcgtacgcacgcacgcggcgactccaattccccccataagcacaaggggatcatcggaacacgaaggggggcagaggagcgaataataacggacctgggggagcggtcgggccgagacaaggcgtcgactttggacgggacatgatgagaggcggcggcggccatgcagatgccgcggcggcggcggcggacgtctgtttctggcgg

SEQ ID NO: 31485 - DNA, 306 bp, Oryza sativa
  unsure (1)..(306): unsure at all n locations
gcttatcccgaagtgaccgagtttaaagaggatgcgacatggcagtttatctatttatttcgaatagcttgntaacttccttttatctttaagaaggtgtgnttaaagtcccataaagaccttatgttttccttttatctttagggtagtttctttcattgtccacgaggacttgtatcaacccatggatattaatatgtacacccaaggtctatgtaatctatctccacgaacaatacaattcggcgtatcgccaccttttacattntctactttattttatcgtcccgcgggacttggcacttg

SEQ ID NO: 31486 - DNA, 149 bp, Oryza sativa
gttaacactgtgtacatacgacactgaatagatcgtcgtctgcctgcatattgatgacttgcacaatgacaaactgtcgtctgccctcgaatgtttactatcttgtattcggatgccaagaactatcccatcctacatctcgatgtata

SEQ ID NO: 31487 - DNA, 406 bp, Oryza sativa
  unsure (1)..(406): unsure at all n locations
agcttgtccatggcttacactacctgttatggatatgtatttaaacatagntagnacctaagacctgattacctaatttacaatcttcaccatggccgtgatgattcaatcaatgcgtgcatgtgtgctcgtgatccacaaagaaagggaaaggcgatccataaatattgtgccgttcaattaggccccaattgattgctgtcgtggaatcttggagaaattttgttgcttctattctatcaacttagtagtataacagtactactaccggccaatattattgcagagccgtcacgagatcggtagtangaagtattttttttcgcttcacgaatctttaggaactactnatcactgatgcattgcctgacaccatctgagttcttgctttctgctgagctgatgc

SEQ ID NO: 31488 - DNA, 181 bp, Oryza sativa
  unsure (1)..(181): unsure at all n locations
gcatcattgtcacctcctccgacgccaagtggcgcacggtgtcgtccctccctccgcgtccctttgggccccatgatctcctccncaagcacgtgcctctcgtcctcaaaccacacgacagccctctcgtcggcaaccccgctaccgctgtcatcaccaatggcttcgccaacggtgacct

SEQ ID NO: 31489 - DNA, 457 bp, Oryza sativa
  unsure (1)..(457): unsure at all n locations
agctnttagcanacaagaaaaaaaatattacagtctgttgatccattcctcagtaccagtgtatttcattccaaaacagcaataagtaacaaattaaaaggacaagctaatccacacatgtagcatcgcagattaaggaatgcaaaacatcaaatgcagcaaataaaatgcatttgacattagacattctactgtgattactgctggttcagattactttacacaacacacgttntggtagttagaaatattgaagtaatcagacaatctctacttagaacatattttgagaaaatgttgcaaggatagtaacatcttttgagaaaatgttgcgatggtagttntcaaagtgtgtacagatcggtcaaaaataagatctgcanattaagtagttaaatacaccacatcacaacatgttanacaagaaacatatcgatttcatttacttcattacatg

SEQ ID NO: 31490 - DNA, 405 bp, Oryza sativa
  unsure (1)..(405): unsure at all n locations
gcatggctgcatgaacgacgtttgttcatgccatgaattcgagatgatatctctaggcagcagcatctacttctagccatgctgtgtcctttgctccaatgctactgttatgcttgtttctgaagtatccagtcgatgaggataaggacagctagcatttgttgcgatagtagtaataactgttgtgagttgtgacagtaatctgttcctaacttaccatctcctgatgaaagtcatgttgaattgaacctgctcaaccgctggaagtgcaattggattgcgagtttgtgacaggctgacagcgccaagaagatctcggttcagacagcattntggcttgttcagaagttcagagctctcgagtccgagtgagtgactcgttcanaactagtagaacacgaagtt

SEQ ID NO: 31491 - DNA, 343 bp, Oryza sativa
  unsure (1)..(343): unsure at all n locations
actcagctatagtgatttatagtactatatccttctctaaagtttcctgntcaccagccgtaacacggcagtctgcccacgattctttatagtggaaattggcgatttttaatggttactttgcactctaccattgtcatactttgagtagatccaataacaggctataagctagctataaatacatttcgaggaagataaaataggagagaacaacgcagcgggctatagaattatagtccaagatatatatgtgtatgataagtgagaccagctatgaatcgtgtagtatacatttataggtaactattatattaatcgcgtattataatgataataaatg

SEQ ID NO: 31492 - DNA, 376 bp, Oryza sativa
  unsure (1)..(376): unsure at all n locations
agctttcttggcgccggaccttactcgctctttttattggcgnggaatcaccttctctcacgcatcgctaatattatattatcttatgaccaaaatgagtttaaatggaatctaaccactgatggcagattctcggttaaatctccttatcttgcgttggtgcacaccgatgttcccaatattaacaaaagaatctggaagatcaatgcccccctaaagattaagatcatcttatggtacttacgtcgcggagtagtcttaacaaaagataatcttattaataggaattggaggtgaaacaagtcttgttctttcttgcacaaagatgaaactattaaatcatttgtctttgattggtggtttgcccacgtagttt

SEQ ID NO: 31493 - DNA, 193 bp, Oryza sativa
atatcggactacatatacagggagcggctttacaaccattaacaagacacgggtggagaactctgaacaaaatgagacgtgctattagacacttgagtacctcgtgttaaggcttaatctcattgttagttaaaagatcgattggttagagtgatatatactaaatctcatgtgcacgagtgctatgagcacg

SEQ ID NO: 31494 - DNA, 284 bp, Oryza sativa
  unsure (1)..(284): unsure at all n locations
tggtataccacatcgaacatgccgatgtcatttaaactcttttggtgaactggctagtactaaggttgttaaacaggtatcataggtatcacgtgccttaaacttctcagattttgaaaccacngtatacctcacggtaacccgcacgactaccacgattaccgcggtaaccgtcgaaccgtgtggtggcggaagtccaccccacacggtctggtaaacccttggcgatacgcgcacgacatctatacgaaactgatgtgtattcttggtgatgtgtcagacat

SEQ ID NO: 31495 - DNA, 365 bp, Oryza sativa
  unsure (1)..(365): unsure at all n locations
ctcatgacccttcacctaggcaataaccagcttcaaagtgagatcccagctgagataggttccagcttgaaaaatctcatcaatttatatcttaccagaaatcttntgtcgggagagatccctcaatctctggccgagttaccatcgctggaactggtatctntgtcgcacaataaattatctggagaggtaccatctgctttgagcaatctcacaaacctcttgaatattcggttctccaataacatgctttcaggagtcatcccttcatctttaggcatgttgcccaatttatatgagctcagcttaggttntaacaatntatctggaccaatcccaacttctatttggaacatttcatcttt

SEQ ID NO: 31496 - DNA, 398 bp, Oryza sativa
  unsure (1)..(398): unsure at all n locations
cggagattctcaaaagattgcgctagatctaaaagtaaaagatcttggttgcgccgttttacaaccaagtcatcgacataagcctcaacattacgtcctatttggctacccaaagaaattcgagtagtacgttgaaaagtaggacctgcattctttaacccgaagggcattgatgtataacaataggttcctacgggggtaatgaagcgcagtttttcctcattcttcctagccatgcgaatctgatggaaccagagatgcatctaaaaacaaaacgtcgaccccgcagggagcgaaatctgatctatgcatgaggggtatgatcntangaatgcttgtgagtcgtgtagcatgacatcgaactgccgtcgcttggaacacaccggtcgcagcactcg

SEQ ID NO: 31497 - DNA, 228 bp, Oryza sativa
caagctggctgtccttactagtgccaataccagacttaattgttcttacgggggcagactccgcgatcttatcctcagaacagaaagggcaggaatgttgctgagtgctcgtatttgtaccacagaagctcactattgactgcaagcaaaggcgatgtgttagggagaagatgcctttactgcgaatggctggtcactggcagaaagcgctagcggaatcgcgaaaac

SEQ ID NO: 31498 - DNA, 411 bp, Oryza sativa
  unsure (1)..(411): unsure at all n locations
atgtaactgccatgtaccacgtgagctcctgctgtgtaagctcgcttttgacttgcaaagctgtagcttaactgaagtttccaaagctttcctgtgtctgcaacaacgctctgtcaattcagctttcaagctgttcaatgttctctcatgggctgatggcctcgtgggagctcanaaactattttggtcctcctgatccgtgttaatccaacaagcacggataataatactaaaaactttcttggtgctcctgatcggtgtcaacccaacgctcacggataatactgacaatactcatggtaacattgataattagcctgacagaatgtgctacaccgagtggtgacagatagcattctggtgagtggaacagaatgtctacgccgacatggcaggctangacaccgctct

SEQ ID NO: 31499 - DNA, 406 bp, Oryza sativa
  unsure (1)..(406): unsure at all n locations
aactcagcttncaagtggggttctggtggtcgaagtaaattcttggtatttttatatctgctaaagagtcgctgggaccacgaaacagtgaccgccgtcaccgattggaagccacccaagacagtcactcagattcgcagtttcttgggtttggcacgatactaccggaggttcatcgagaacttctccaaaatcgctcgacccatgacacacctgttgaacaaagaatagaagtttgtgtggagcccgcaatgcgagaaggcgttccaaactctcaaagaaaggctggtttactcgcccgtgttaatcttgccggatactcgcaaggatttcatggtgtatagtgatgcttcncgccacagattggcgtgcgtgctcatgcaagacggtcatgttgtaacctatg

SEQ ID NO: 31500 - DNA, 361 bp, Oryza sativa
  unsure (1)..(361): unsure at all n locations
agctntgcgttatgtgcaacgcacacttggtctctttctaacttacagaagatccgattccctagagatagaagggtattcagatacagatcttgcgagagatgtagatgatagaaagtccacatcaggctacatattcactctcgcaaaaggggctatttcgtggaaaagctcctagcaaaccggcatatcatatcatccatgatgtatgccgagattgtagctagttatgaggccacatggcaagcaaaatggttaaagaagttgtacctcggttgaaagtagtctacaacattcagaggccactcaatatgtactgcgacaatgagccaacaatgttttattgctccaacaataagtc

SEQ ID NO: 31501 - DNA, 318 bp, Oryza sativa
  unsure (1)..(318): unsure at all n locations
gcggactactgtcgacctccataccgtcgtcggcaaaagtagtatcatactgcaaccggagatcttcatctctttgtccacatcaagacggagagatactacagtttgatggggacacgtttgcggcggacgagaactaggcgctggccttggagttatattgatctcaatgctgcgcctgggccattgaatataggtcccacgtgcagccgcatagatcataatctcgtcattaagtgggtgtgggatagtgtagccaacccaatcnggcttcactaagtccacctggactatggcattgccggctgcactcgcgtc

SEQ ID NO: 31502 - DNA, 346 bp, Oryza sativa
ctgctgcagatatacaaaagctaactggtattaatctgaagatatggtggatgcaacaattctagtatctatcatggcaatacaaggtcactaatgaacaaagcacacaaagaacagcagccatttggatgattctggtgaaaccaccagggaccctcagaattgtatgccccttcttagtttgaatgtacaaccgcaaaaatggcaatactcaattactcctaagttatccaattgtgacaggtcataccatggaaagaggaatgcagtgctctctgtctgaaacatgatgactaactcaattatcataacaccttttgtcacatgccttgcatataaatacacg

SEQ ID NO: 31503 - DNA, 460 bp, Oryza sativa
  unsure (1)..(460): unsure at all n locations
agcttctaaaaacactagtttgttttgtcttattaaataaatctgccagaatctcactagtcttggtgagagtcaccttgatttcttctgtcttttgcaattcatgcatataaaagaatttaggcgatatatgttttgtgagactcatcttcacataaaccatttgtattagtgcaacacaagctgaattatcttcataaataatgattggagatggtgtgatatttagcccacatgtattctgtacatgttgtatcaccctcctcaaccacatgcattccttgctcgctatanataatgctataatctccgagtggattgttgatgtcgcgaccatcggctgcttcgttgacttcatgatatggcttgaccaccacagagaaaacatacctatgctgtgacatgctttatggggtctgacaaatatccacatagcatatcccgcatggttaatcttgat

SEQ ID NO: 31504 - DNA, 360 bp, Oryza sativa
  unsure (1)..(360): unsure at all n locations
taggaagagagtagagtagaaggagtcggatgaattcccgagctgtcggtaatcttctactatttcttttattctgtctattactctgaatttaatataatattgttcttgagtaatttaaatgtatcttgtgagaattatctctttgttagttcctaaatggcatacgggattattggtcactataatcaactaaaatatagntattgctttggtgagctatcaacactaaagtagatattaattgcttagacatggtgtttatgtaattattatccagtaattgctgcgtatcccacattacgtntgaggtgggtgtagaggtggtgacagccctcgagatcacttaagtcctccctg

SEQ ID NO: 31505 - DNA, 302 bp, Oryza sativa
cttaagtcacctgcggcatgcagctttctctgacatgtccttttatttatatttcatcagcctattggaggatggactatgcaccatcaatgagatgatgcaccagtccaacaagctgtgctgcattatttgctctctggatcataaccgctagcatggccgctataatattgaataaaatgggagatagcggatcacctttgcgaatgcctttctttgtttgatagaacccgccaatggcatcattaaccttgattgctacacttccctcccgaaaggaagactcaatccaagaaatccat

SEQ ID NO: 31506 - DNA, 354 bp, Oryza sativa
  unsure (1)..(354): unsure at all n locations
tatgaatatatatatatatatactagcagctatgcacacaagcatgtgttagcacaatatgagtattgtaacactcttttactctgttattagtttggttgactagaacataattatactaatcaagagattatcatcaaaatatatattatactacttatgaccgagctcggtagttgagctcaatctcatacgagctcgaaccgagcttgtctaanagctcgaaggtgtaataagtgttggaaatatggtcataaatcggcatatgttaatccaaaatatcgagacaataatcatggcatatacaatgtagagtgatctagtgacaacatggtacataaaccagagcatact

SEQ ID NO: 31507 - DNA, 477 bp, Oryza sativa
  unsure (1)..(477): unsure at all n locations
agcttcacgagctaacgaattattacaaatntattatcgcctgatgcaangattngcaaggaaaatcaaggagcagcagacggtgcggcgaagaacgcgggccgactagccaagtgagatgattagcagtaaaccaccgggatcacgaccaatcattcatgtgatccagcctgattccttacacataaccacacaccctgctcatctgctgggctagctggccatcagcaagccatatactcctgcctgtgatctaatctaaccagatgatcagaatgcgaccggataacaattcagaaaaaacttatccataatataaatttcaaaacttaattgtcgagttgagtctcacattgttatatcatagattctcttttaatattagctcttcaatcgctaagaacgcatgaanagtctaattatataaagtattattatctgatgctaatagatagtatgatttataatcagctatga

SEQ ID NO: 31508 - DNA, 403 bp, Oryza sativa
  unsure (1)..(403): unsure at all n locations
ctcatagagcttggctagacgtgtatacacatgtaagttttttagtgcgtactactccttgtnttttagacgtaacaggagtnagtggtaaactggtatgggatggtacaatattttatgagtgacacgggacggtaaataacttttttntaccatacagagtgagaaaagggggaaagacaggaaaacgtggaccggaggtggngactgggaacactatgtgaggcactgttttatggcgcttntaactatatgccacttttagatttgacgaataattatttaccacccctatctcaatgacacgtgggttcacatgtgtctataacatgtgggtccagtggcanacaattaattaccacatctaaatgtggcaaaatggtaaatatctctgttttataac

SEQ ID NO: 31509 - DNA, 294 bp, Oryza sativa
  unsure (1)..(294): unsure at all n locations
gttagcttattgcagacatccacggcagcaaaaggtgctttggctaccaacaagaacccccacaagcaaagagggcttggggctcatgggcattcatctaaagtatgtagggctcattctaaacacaggaattaaaaaatcgatggatagaagaaaatgccgaaataagatatgaatgcaattatgcaaatggtaaatagcatatcggaaaaatatatngaatttatgtgcatatgtttgacgaaatgagaaatacacggaatttatatggatggagtaagggaaaacatataa

SEQ ID NO: 31510 - DNA, 419 bp, Oryza sativa
  unsure (1)..(419): unsure at all n locations
ctaagcttactggaataccctanattgaggaaaatgcctttattattttattttttctgtgacccaaaagaacaaaagaatgcacaggttacagngccataatgccttaaataaaaggtagaaagccttctaatattatatttgggaacaggatcagggtccataggttcaatggtagtcaatgcacacattacagtgcaataatgcattaaataaaaggtagaaagcttcctaatactttcttcattccaaagtgatcatattacatgggtgcattangaccaagaanatataataactatctcatactacatttactctgacaacaaactcgatgcatgcacattctccactattttttagccaatagcanatcagaacactttgtgcatggatgcatgcatcaatgttcatttact

SEQ ID NO: 31511 - DNA, 468 bp, Oryza sativa
  unsure (1)..(468): unsure at all n locations
tgcactgcatattacgcgtatgtcagtgacgccttcttagtttattatgtgatacccacagcttaactatccaatcttagtgttacatatttactattaaccccatcttgatagatgatcaaattatgtcgctggatcaagagattggtttccttgggcttagaaaacagcaaggagtaatgatagttaccaaagattaatgaccacctggtctctagtacagaagttgaccatcaatgatatacgagtatgttagtaaagaattatacagatgtattgttatgaaaaatattcgtgacgaatataatggcaccatttgcatgtgaataacctgattgtgttatatattattctgagctacagaagtttgnatatgaacgcgtcattctaaaatnacatattttgaacacaagagacatttctctganagaagaagtatatgtgtctcaagacagtgtgcatgtcatg

SEQ ID NO: 31512 - DNA, 401 bp, Oryza sativa
  unsure (1)..(401): unsure at all n locations
agcttaancacacaatcacctgaggcaactgatttctttcacttcattctgntaaaaagcagagcagcaagtgccctaacttctggaattatcaagtgcacacgaatatctgagcacgtttggagatcagacaagtgctcagttaataatattacattgagtgccaatctttctttgaaaaggtgcatgaaacgcacgctaccagttcaaatcattcttacattatctaaaagatatgaacattaatctgaacggaacaactatacagagcaacagtggcatgtatagagcaaatatcaacatggtcctttttatggaaggacactgcagggaatcgctatatattgtgtacataatgaaaatatctgtcactagcatactactagntatgcataccttga

SEQ ID NO: 31513 - DNA, 294 bp, Oryza sativa
  unsure (1)..(294): unsure at all n locations
caatttctgctggactgcaaatgtggtggtgagtcatagaacggaacaaaaatctctattggcattcttctgctgattagcacattccttaacagagaatataacacaaatgaagttcgcaatcctaaaagaactattacagaatatgttctcaattacaaaggggtatgcttatatagcctgatcaatcgtatggtacatgcaaaaaatacaaactaaaggacatgatcattctaaaatcttgaaagagcagaatataatngcctgtgcgtgtagttacctgcataatatatc

SEQ ID NO: 31514 - DNA, 310 bp, Oryza sativa
  unsure (1)..(310): unsure at all n locations
tctaagngngngcattccgcgaccagagcgagacaagtctcatctcggccgcgggtgaggagtgaacaatattattntatcaagatttgcacaactcccagagttggcctcaaagctggtttcccaaaccagaccaattgttccagactttcagagttttgggtggctncaaacaaccagtcacttttagggactccctgttccgctgtctccctgacagccacttgccttccanatatcgggtttcccaaacctcatcactttttctaaaacagggaaaaatgaaactacctatggatcactcacatcg

SEQ ID NO: 31515 - DNA, 496 bp, Oryza sativa
  unsure (1)..(496): unsure at all n locations
tcacanagcgagggtgagtccgcgccgaagaggcgcgtatattatattctacaaaggcgctcggaaccaaagaacatactggccgaactcggggaattggtagcgatgtgccctggaagcatggactccctcagtacagatcccaatacaggaaaccggaagtctccaatgaagagagggacgctcgtttgaagggcgaacttaanggtgagggcattcaagaactanaagctagcatggatgcaagggtggaagaaagggttaacaaggtcctcgccgacatgaatataccccgagtcacaacacctgctgtgcaaccaactcctcgtgtcaacacgacgcgagtccgcacagcataggagtagttgtgcatccacagaggtgccggaccctggtctccctatcgcaccactagctgcagtggaccacatcgaggtaattggtgtatccgatccatatgtaataacagacatgtacacattccaatattaaattc

SEQ ID NO: 31516 - DNA, 272 bp, Oryza sativa
  unsure (1)..(272): unsure at all n locations
agagagacggttagtttttatatctgatgcagcaagtctagtctagttggccagatttaacacgaaatcaagaatntgaccaataggcgttctgaattgctctatattttaatctcttaacatatggggcttttactactcccttcgtgtcacaatgtaaaaccttctatcattacacaccgaaattttttgaaattatacccgttatcgatttgatgtgcaaaatataccggatagcgaacgattgccgaaataaaccatcgtattgtttt

SEQ ID NO: 31517 - DNA, 311 bp, Oryza sativa
ctatatatgggacgggtggagtacctagtacacgcggtccatcttgcgacttgagattggaactcctgtgagtggtcgaatcaatgcgtggctggcataaacacactattaattgctccatacattggggacgtatactggagtacatactaccaccaccaccgtctttgtagctacacacttagaccttggttaattgcggaaaatttttggcgttgaatggcatatcggatatactaacacacattcggagtaataaacgtaggctgatagcaaacaaatactgatgcgcagaaaccatgcacaaatta

SEQ ID NO: 31518 - DNA, 478 bp, Oryza sativa
tctatgctcggctctgtgcaccacgacgttgatgagctgatcgagtgttgttattgatgccactactacccaaccgccgtgtatctactactgatgaaagtagcatagccaccacctacaacatggatctggctaagctcagtgagatgagaggatagcgataacatgggattcgacgagactgatatagcgatgtggagattgagatggctatggaggcatgtgatttgatatcatcactatcttatgggccatctcgaatcttaagttataatacctaataggccttattccgctcatacgcgacatatatgatgattgtctcattatgatggagcgtggaattcgcagtacatttgattaacacatattctaccagctcatcttgagtactatagtgagcatctgtccaaacaaatcatttatttgtaattaattactgtgtcccctctcccgataggaggtgatatacatcact

SEQ ID NO: 31519 - DNA, 444 bp, Oryza sativa
gcttgggcttcgcataactatggtactggaacgaggattggttttctttacaagtagaaccaaactggagcatgtccctagttcagttaattcttcagtacgtgaatcagggatagattatcgcagatttcttacgaccatttttttcgccgtgctggcatatgttctgtagccatcttacccagcctgattaggaagcccctttgttttcctgaacaatgaaatttttcagaaccttgccaggatgtatttgtctctgaagactgaatataaagtaaaagcttttgtttactgttgcatcgaattgaattagtgatatcagtttgaaggttatttccttttgtgtgtctgtgaatgaaaatagtgataccaagtaggtacttggttaagggcacagttcacaagaaccaaaatggcttatctgtatctggagaggtggacagc

SEQ ID NO: 31520 - DNA, 474 bp, Oryza sativa
  unsure (1)..(474): unsure at all n locations
cagattgtctggagatatcccatccactcttagtcaatgcgtgggtctagagtatcttgagatgcaaagcaacttctttgtaggaagcattccgcanacatttgtgaacatgttaggcatcaaggtgatggatatatctcataacaacttatcgggagaaattccacagtttctaacagttgtgcgttctttgcaagttctcaacttatcattcaataatttcatggagtggtgccancagtggatttttgcaatgctagtgtggtgcaattgaaggaaatgaccatctgtgcacagaaactccaacgacaggtatgcctctttgttcaaaatggtgacaaaaaaggaaccatagtaggtcattggtctagtctaacgatagtatacccaatggtgtatcacttcacttatatgcctgcaaaatatttgatgaaagatgcagcagagccatgtcacagctgatgaccagacata

SEQ ID NO: 31521 - DNA, 453 bp, Oryza sativa
  unsure (1)..(453): unsure at all n locations
agctnggccggcgcccagggacgtacgcgacaatcacacataagctagctactgtgtacattaaattgtctgtccatgcatgaacgatcgagacagattgatctgtccatcttcctgctatttgaaatttgtgtttagccaccgtagttttttaagcttcagatttttttttctttgctcccttcccctcgcatatataagttggttcggccgagtatgttacgtgacaaaaactcttttcttctaattaatatattgacgtgtaattttttttgcgcgatcgatctgcccatgggtggtcaccggtggtgaactgtttgttatattactacacatcttacacagttacacttgcaaaattggaatgcttatataacagtcggtcgatcgatgagcgccaacaccggccggcttgcttcatcttcactagatagctcactgatcgatacacac

SEQ ID NO: 31522 - DNA, 415 bp, Oryza sativa
  unsure (1)..(415): unsure at all n locations
tcacctagaggtgggtngaanaaaaccaaacanaaaaactgagaccgaaaaaataggcgctagttcaatctcaagtacgttgaaagaccaaattttgttcggacaaatcgaattttggtccaataggtctattaggtccaccaacccaattaaaccgaaatttggctaaattttaacctccaacatgctctgatatgtgacctatgatagtgaagagagtcaatntgtgattntctaatacgttttttatgtgtataattttttatctagaacttattaggggtgtacttggttcgatgaatntctcggttttcattatttttcaagaccaatcgatctccagttctagatggttcgaaattctaaaatatcaaagatcgagactgaatttttcggtgtgagtgaacgcccaccc

SEQ ID NO: 31523 - DNA, 354 bp, Oryza sativa
  unsure (1)..(354): unsure at all n locations
gcttggtgagatcaaatcctctggtgcaactttctgtagttctttgggtatgtacatactgagcaattaagcttagtgctataaataaacatgatccactggaaaagaacgatgaaagatatagattgatcccacttttagcagagagtagagaccaatgttaaaagttatgttacctaaaaaaaatgtcaaaagtgacatgttgttcaagaggcatgaataagaaattgcttagggatataatgtaatcctacagcttctttgtaacgcaagatcctaaaaatatagaaatggaaaagaaaaggcagaatatgatgtcacactcccttgtgacggttggngagtggagagtga

SEQ ID NO: 31524 - DNA, 83 bp, Oryza sativa
ccttaactagcttgtgctttgtacctccacacgttgcgtttgttattactgaccgactcacgatagcttttgatctaaataac

SEQ ID NO: 31525 - DNA, 271 bp, Oryza sativa
  unsure (1)..(271): unsure at all n locations
agcttcgctaacatatccggtgggtattttagttcangcaggctgatcttaccacccctacagcagagattatagacaatccttctctgagaaacagcactatctctctttaccctctcctggtaccaaaaaacggcaccacaataaggacactcatgcgaagggccaccatagtatgatcgctctgggcacaaagctgcattggttgtaagcattaacaactgcattgattgacagaaaggaagctatgtaagacagtagacaccgagca

SEQ ID NO: 31526 - DNA, 249 bp, Oryza sativa
atgaatctgctgatctaagccacagttatcttctaatcaacaagctctcaaccacgtgcattatctttcaccaatgcattattgtccgcttatagatcatggatgggcttacggcctgtgtcctaagatgctagaattaccattgtgtacaacacttctgcattagtatctcttacgaatctgtctcaacaaactgttcacttttcatatttaggtatttcatttgcgctctcgaatattatcataacc

SEQ ID NO: 31527 - DNA, 372 bp, Oryza sativa
agcttgtgaccttagccttgccggcatacaccatgaagtgtgcttcaagcgccgacgggcgtgggcattaaaaggtttaaggcgtcagtgggtacagcgacacacctctgcagagtgtatgaattgtgatatgtcactccctgtttcgggtagaaactgcgaacgcggcaggaaagggatcaatcggagattctatcctgtggtacttgatatgcaagagtgttttataattaaaatttgaattttgcaacaaatatttgcaaaaacattatgaattctttgaagaatctttgattctagagatagttgcattcacacattttcttgctattgatgggctttgtgagtaccatttgactcatccctatgtaa

SEQ ID NO: 31528 - DNA, 361 bp, Oryza sativa
  unsure (1)..(361): unsure at all n locations
tgaagtctcttacacatgtatgtatgaccgctggtgaanggaaatgttcgaagtgccctccaaccgtcatcatggatgcatctgggacgtctacgccaatccccacatccaacggtggaagtggtggttcggcccatctggcctggccttctgtcggtggactccctggatctttctccatctatttctcggagatttggggtgagttactgatgttccaatgaagttcacaacccctctctgtgtggatacatgattatcttcactttagtctgatttgcctcccaacttcacggtttatcatctgcatacaactatacaccaacacttgtggaatatgtgagagtaagcacctatcact

SEQ ID NO: 31529 - DNA, 420 bp, Oryza sativa
  unsure (1)..(420): unsure at all n locations
agctttggagaagaagtcttaagtgtagtcttttcttataccccagctgagcgcctgtgaagatggagccctatgcccgctattacgctgctgtttagttttgattgtcacgccttaagtgcctttgtaataatgtaaatattatcgatataataaagatgtgtcttttatatcatgtccgtatggtgtaccccggctcttcctgggacggggattaatacactaacgttcggaaaaaggcaatatttccggttgcgacaagctggtgtcagagccatcccgactgtaggttaagccaaatggataaaacctaacgacatattntataaataaaactatttgcgaaattcctttttctccttcccctatgctatttgaaaaggattactccgttttcttcttcggactttaactaatact

SEQ ID NO: 31530 - DNA, 373 bp, Oryza sativa
agctggtctgagaataggcgtattgtgtgttgtctacattccgtgaggccataccatacttccgtggctcataaacatacatgcttgactatgaggatctatgcatgagcgctgcgatattgtctacccacgtgccggggacgcttcctaaagactagacttatccgcctagcacggacatcttccgatgttagccatctgctatgtgcacatggctagaatacttatcgttatatactagtatcagcgtcttgccctcctacccgtgatctcatgcgagcgctatctatgctgaggttctacattggctgcgtgaaccagtgggttcttgtattgtgcgacctgatattattgtgaactctacgccctggtg

SEQ ID NO: 31531 - DNA, 277 bp, Oryza sativa
  unsure (1)..(277): unsure at all n locations
agcttgatatatcatcataccattttgcgaacatgatgtgaatcgatgtactagattaagttgtaaataaacatatacttatcttgccatgtaaattcctgctcagctagttctgcttaggcttgatcatatcgtattacaggcaggggcggatccaggaacaaaagattgtgggagttcaattacacagtttcttcaaccttgagccatttatggactntntagtttatcatttatggtgaaaaaatcgaacggggtactccggagggtatccatg

SEQ ID NO: 31532 - DNA, 442 bp, Oryza sativa
  unsure (1)..(442): unsure at all n locations
agcttcagcagataccatctccctgctcatcctacagacatcagggccaatctggtgaagctgtatagaacaatcagcaggggggcatcaatctcatcatcttaagcaatacgatcattaagttccaaaggcaaagggttgagagagagcaagataccactttcttgagccagcattntaagcttcttggagctctttgccctagcctttccccttggctttcccacacccaaatttgggtcaggggacataaatccatcagaaagcttgttaattctttcacttctccgtatttctgaatccaacaaaatcaacttcccagtcctccttttgggccttgnnggtagagcangagagacatcttngtggaatgggttcaggagaagaatcaacactgaaactgtgtgtngaggatggatagcttgaatcggttgactgaaat

SEQ ID NO: 31533 - DNA, 317 bp, Oryza sativa
caccggcgaagcgccgttcaagtgcgactcctgcaaagagcccggagacgggccgaggtaccactgcctcacctgcgaggacctcaacatgcacaagttctgtgcccatgcgccgagcacgctctaccaccatctcttcggccgcacgttcgagcttctcgccaagccaccgcaaggacgaccggagaaaccgcaccccgccgccaccggtggtggcaaatgcgaaagcggcggcaggtggtgcgacacctgcggcgaccatgtgttcggtctcgtctaccactgctcaggcgccaacctcgacctccacccatgct

SEQ ID NO: 31534 - DNA, 314 bp, Oryza sativa
  unsure (1)..(314): unsure at all n locations
gcagcttgcaagataagtntgaacaggtggaaacatgatcactatatttgcacttttgaacaacaggttccagatgaaataatagaaagttcttaaatcaacatgcgaaatttattttatcgcagcaaaataaaacaatgttattaaacatttgctgataaacgagccattagtatattaatagatgtacaggactaacaatactggaataacatttgaatgagaaccgctaaaagagattatgaagtgcatgtgcgcattagttggcttatttaaagagaaaggaggagaatagttctactttccattatttt

SEQ ID NO: 31535 - DNA, 475 bp, Oryza sativa
  unsure (1)..(475): unsure at all n locations
gatngagaagaaagatgaggaagagctatatggatgttgtgcgctcaccggcggcgaggatgcggcggaagaagcagctggactgcggcggcgctgagcacgcgaggaggtgacgcacgagagagagagagagagagagagagagagaggccttctgctgatcacgggccaaatagcccaatcggctatcagtcaaaactttcacatgttctctaaaatatttntattagctacttcttcacttgttcccttatttatatctcatcaaatcatagccatctcctatntaattacactcttcatcgntattctccatcgaaatataaagtgaaaggtaaccaacacaattcaaagtctatagataaaacaattccaaagtctattgatatatatttgacaggacatcgtgactttgtggtttagcttaagataccgatgaatcacttggtaacacactccgacatatgggtattgc

SEQ ID NO: 31536 - DNA, 274 bp, Oryza sativa
  unsure (1)..(274): unsure at all n locations
atttagatccttcgactgtaactttgtttatattttttgaggtatataaaattacactgctcggcaaagcgacggcgctcttcggcttgacgacggcgacgatgctccggcggtcttctacggcaacgaaggagcggacaaagacggcgacgacttggcgatcacgacggcggtcttcccgagcgactgcgacggctgaaacgacngntgcgcacggctggagcggcggcggctactgccaagctagggcacaccgcgctagagcgattccgac

SEQ ID NO: 31537 - DNA, 475 bp, Oryza sativa
  unsure (1)..(475): unsure at all n locations
tgcccgacatggtgcgtgcggcagcatggtttccgcatatcccagaatgtatgtctttcagcaattgtctcccttcccctaaagatacgcagcattgcagaatccctgaagggcttttcttgtacaactcagcttcatgcataacgtaaagtttgctccgccttgaaatccgctcggcttcatctttgtcttgggggagttcttgagaagtcaaaaatcgtatgaggggctctcgccaatcgacttcaaccatagctacatcatgagtgcccgcaacttgagtagtatctntgtgaggtactgtcggcgtataaaggtgttcgacgaanacatcggagggcgccacctcgcgcttggatcccaaagtggcaagtctgtcngcggcttcattggtgtgtcgaagaacgtgacngagctcgagtccatcgaacttgtcttccaatntgcgtacctcttgtcgatatgccatcatatt

SEQ ID NO: 31538 - DNA, 423 bp, Oryza sativa
  unsure (1)..(423): unsure at all n locations
agcttcccttcagtatgggcatcttcattgggctagtcatcttcttcaagtgtactagcttctactctggcaagaacatgtagttcgtattttcactgtctttcaccaatattatctcgctntggaagctcatcatcaccagggacaaacttgaaaacatagcaggttaaaaaaaagaaagaggtaagcagctggtgcaagtctacaactgtcataagtcgtaaccacaattaacgtaggcatttgacatccagaactccaaagtgcatgtgctaaataggtactcctatgcaagagaatagtagtggcctggtgtgaatcagacacaaagacctgatacttttcttaacaccaccataaaattcaaaactgcaacttttgccaaaaagctataagatacttaatatattcagacatacctct

SEQ ID NO: 31539 - DNA, 368 bp, Oryza sativa
  unsure (1)..(368): unsure at all n locations
tacccttcgtcgaactcattcagctcggtgaatatgctcatagtgccgacaggagagacaaggttgcttaccccctcaacaaagggaataagttccgcccgggtctcgaaatcgccaggggcgaagtggggcgccgcgagagaatattcangggcagatgtttcgacggccgcccccttccccttcggcttcactagcagcgaaacaatcggctgacgcaaagggctttcaaaaaccctagctgcagccttcacgacacgatcagtggaggctgaggccctggcggcggcacttgcacccgctccgctagcgtcgatcggaagaacggnggcggtcgaaagatctaagctacgaccggtgggtgaagt

SEQ ID NO: 31540 - DNA, 424 bp, Oryza sativa
  unsure (1)..(424): unsure at all n locations
agcttacaaggtgagttctttcaagactgctctatataaatctttcttgaaggcttactatcaatgtagccaaagtgattcaagatcttctccacataatgggactgcaagagtgtaatcccattctcacctctaattagcttaatgtttaagataacatcagctactcccaaatccttcatatcaaaattttgagacaagaatgatttaacctcatttatcacttcaatatttgtcccaaatatcaatatgtcgtccacatacaagcacagaataactccctcacccccaccatggcgatagtacacacatttatctgcctcattgactgcaaagcctacagatatcaatgttntgtcaaatttctcatgccattgctttggagcttgtttcagaccatacaaagacttcaacaatttgcaca

SEQ ID NO: 31541 - DNA, 426 bp, Oryza sativa
  unsure (1)..(426): unsure at all n locations
tataaaactcagcttaatgcttaaataagcactgaatgtagataggagtataagtggctaataattatagaggctgaatntagatgaatcatatctccgtagtgcaaataactgtcagattccatatgaaccacaaaggtaaccaatacaaaagccaactggaaaatataacaaaacataaaattggggctaaagtgttgcactgtcggtgtctatttctgtgatcatcatggatctcctgagtgtcaacaggggaaaaaaatcaatatcaacatttgctatagaagtgtgtgatgctattggcactgtgatcatcatgatttcctgatggtnttagaanaacaaacacaataaactgatccagatttacctacgaaatatcaacatgtgtagaanaataaatgtatccttggatcatggcatcct

SEQ ID NO: 31542 - DNA, 282 bp, Oryza sativa
  unsure (1)..(282): unsure at all n locations
gcttgcatcagacacctaaattctcgtgacgtgctgagtacganagtactcacccttgctctatataaatatatataagtcctccgccctgaagttgaagatgaagtaaagtgaagattatggtttcgtcctggttcccagccgtcgcctgtggtgttgggtgttagttcgctgggtccgccactgctgctgatgttggtgttttctctgtcgcggtcgcaggtgcattcttcggctgttctgagctgcaacctaagttaaggtaattaagtcctctattta

SEQ ID NO: 31543 - DNA, 343 bp, Oryza sativa
ctaagctagctagctactttggagaattgagatatatggaatatttggcattgtagcccgtatatactttctgtgaactggacagctggctcatctgagatccaacacgtcatcagctgcacggcaagatgtatggcgttggatagatgcaagaaaaagtattccatacctagctgtattacacagttcctcaataaatatcaaaaagtactccctccgtccattataaaacaataagttgtcgtgttcaacgtttaaccgtatgtctcatttgaacaatctgtaagaaaatttataagctaagtcatgtataaagtactattcatatcttatcatctaataa

SEQ ID NO: 31544 - DNA, 377 bp, Oryza sativa
  unsure (1)..(377): unsure at all n locations
agcttatttggagtgagatctataagacaatgtgtgagccaaagaggggctgcatctatgctccttatatcatgaagatgattgacgccaagactgggatttgttatttcaaggacaatcaacacaagcttttccgtcctcatgctcccactacttcagctactcctaccaccagagtgactcgtgctttcacctcagctgctccttctttctcttgctgcacctcagcgtctgagtcttcttctcccatanagaaggctcttagggctatctcttgcatgtgtgccaagacagctaagaaggtaaagaagatagagaggcgtcaaaaggaagattggattgcagcangcaacgatgtctctgacatttctgatgat

SEQ ID NO: 31545 - DNA, 501 bp, Oryza sativa
  unsure (1)..(501): unsure at all n locations
tccgatgggatctgcagcacagccgctgaagctgatctccatcgcacaacagagaagttcggccatgcgccaagaggcagcccangcttcgccgatgcctgtgctaccctgctgcccccgaggacgctgcagcccccatcgccatctcccccacgcacaacggatctgatgaaggaagcctgtatatcacctcagcctgcgtcacatgcacaagtgtcacgaactcgcaatccggcaccggcgtctcgcctagtacgtggttgcaagcttctgagtntgagagaatttggggatttgagaggaagaacagaggaggaagacaaggtaggtaggattagttntatatntcttctcatcaatgccttgactcaatnggtcaggtctgtatttatacaccgacacatgggctctcacgggttcagcccaacatgatgaagtggccanagactcaatacacccaagagtactggaacacacccacgacacataagaacatgacat

SEQ ID NO: 31546 - DNA, 372 bp, Oryza sativa
gcttgacccttgagaggggtggtgttttctgctatttatgattgcgcatcactttgcatgactgagatttacagtaccacgtgtcctgtgcattttgctcaatattggcataagaaaaaaaccttttgtgccatgtgccagcatcgaatgctgaaccgtgccccttactgcaacaattaaaactcctttgttacaaagagtacaggaaaatatgctcgcctcctgaatattcagaaataaaatgtctccgcaaataatagactatgtacgaaggaactatcttactaaagcacatgtgactttgcatatgccgcacactgacattgatgaatctcccgtgagacggttctgtgacccctcacttttatgtgg

SEQ ID NO: 31547 - DNA, 461 bp, Oryza sativa
  unsure (1)..(461): unsure at all n locations
cctgaggcatgcaagcttgggagtgaagggagaagggtggtcaactttctcacttgtcacccatggaagagaaaaaatgaacaagagatggaagatgagagtgaaagagaggagaaagaaatttattggaaagtgaaggttggtgccttactctcttcatgccaagaaagtggctttcaggacaaagtangggtcctgctagggttnttaggggttaaggctgttgatagtactccatcactagcttagatctgtgtgtgatcaacaaacactgaagaaatgtgatgtccatttggctgactgcatgatcttgacaaactgcttttgctctggatntgaaaggctatgnttgtaatgtagtagcaaggtgcaggagtgcatgcttngcctttctttnttttctcttattntcatgccactcactcagccagccagtagtcccttctttttggtaccctcta

SEQ ID NO: 31548 - DNA, 494 bp, Oryza sativa
  unsure (1)..(494): unsure at all n locations
atctgatattcttgggctcagatccttgtctataataatgttgcttgccttgatatcacggtggacgatgaccggccggacttcttcatgaagatacttgagcccactcgcgacgccgatgcatattttcactcttgttttccagtctaattggatactactatgggaattgcctgaaggacatgatcatgatgcttcagagattcagagttctgagaacaaaacgtatcacaaattcaccatgaattgagaatctagtggaaactgatttttttntttgttctttaccaaagagggactgtgcaagactngtgttctccaggtaattgtagaccagcattttctgatctccgtcgacgcagcagccatgcaatttcacaagattggtgatggttatgttggatatgacactcagctcanttaagaactcccttnngtcttgccttgactcggaggagagcaccttgatgggcactttctgaccattcctgagc

SEQ ID NO: 31549 - DNA, 359 bp, Oryza sativa
agctggctcagggaggtggatagatttctactgtggatgggaaggtggtgaatggtggcgcggcgcggatttcatggtcgacggtaataggccacatgtggggaggaggtcgcccacaccttcggcttccgctactgggtcggtgccggcctcccctcctacgttggcagacaccatcgccgccgcctctccgccaccgtgcttgcccgccgacgccgtctcaccctgccgccgccctacccttctcccgtgtttccgccgccgcgtcacctccgccgcatcgtcggtcggccatcggacctactcgtgctggcaacgttctccacaccgagagaatagtgagagagagagaaaggagg

SEQ ID NO: 31550 - DNA, 504 bp, Oryza sativa
  unsure (1)..(504): unsure at all n locations
cgcaagataagtnganacagttggatacaaggtcacaatatttgtacttttgaacaacaggttccaaaagaaataaaagaaagttataaaatcaacatgctaaatttattntattgcagcaagattaaataaaacaatattgtaaaacttttgctggtaaatgagccattagtacagtaatagatgtacagtactaataacactggaataaattttgaatgagaaccaataaaagagattatgaagtgcatgtgccattagtttggtttaattaaaagagaaggggaggagaacagttctactttttccaatattttagagggcttctatgggtaaccatttggcataacctaaggtcaaggaggctctgataccaacttgtcacgcncggaatntctatccaaaattccaaacgcttacatgtgtgtgaaccctcgtncaggaatcagccgaggcacacaataacanattgataatanagtacaattattactctaattaata

SEQ ID NO: 31551 - DNA, 217 bp, Oryza sativa
agcttgcatcgactggtgaaagttgtcaagaatgtctccatctgtgggaactgctcgagtgttcgatatgtgatccacgggtgggtgttaagcctggacctccagttatatgtgcatcattctgtgacatggttttcaaagcttgctcagaggcgtacttcgctatcaatgtgaaaacacaggtaaagggcatctctttaaactgtgtctaaataaa

SEQ ID NO: 31552 - DNA, 346 bp, Oryza sativa
  unsure (1)..(346): unsure at all n locations
gccgccgcagcagctatgtatagtgtccactatgaattaatatagtgagaacaacattagtgtacgtaggcaggattgttttaataataagtactctcttccgttcagattataagacgaagtcaaactggttttagtttgactattgttgtagaccaatatattaatatttttatatactaaatagtttcatcaaatcaataattgaatatnatttcataataaaattgtcttgactnattttttcaagtcaaaacgtcttataacctgaaacggagagagtaataattgctacagacaaatagtacatcgcctgtagttggggggcttctattccttgtctata

SEQ ID NO: 31553 - DNA, 444 bp, Oryza sativa
  unsure (1)..(444): unsure at all n locations
agctngctngagaggggtatcgaaccggccaccgctaaatggcctgatcgatcgaagntctggtactatgctcacggtggaacgctcaacccagttgatggctccttggtcttcagcgatcagatacgcgaggctgcgaatcgactaacggacacagtggaagcctcttctgagggcacgttccgacccgatggagagaaggacgagctgtcactcgccctacagactcccgagcatccaggacgaacatgagggaaaggcgtgattccctggaagatgggattcaaggaggacatccacacgtacagcagtctgatgaggagcaagagagataccgaggcgaagaatgcagatcttgagtacagggtatcgagctacgagctcagcatgcaagagtaggtggcccggaaggtggatgaacgcatggcagcacatcggtcacac

SEQ ID NO: 31554 - DNA, 486 bp, Oryza sativa
  unsure (1)..(486): unsure at all n locations
gcttaccctnctttctgtgcataatctactgagcacatggagagaaccatgtgggatcggagcatctgaccggagacaccaagaagttctgacgtgaaaagaggatgcttattcacgtgctgacgaagccaacaccgatcaatcaaccatcattaattatggtagtcctttacatagatttttntatatggagcatccacacgatttttaaaccatctattattnttaagattcatatanaccattgtattttaagtattaaacatattaaacatctatttgattctgaaagattattaaacttcctataaacatcctanaatcaccatgtgacctcctacaaatgtttctaagccatcatgtggcactataataaattagagagataatntataacaattccaagatnaacattcattccacannatttatttaaattagtaaaccccattatttaaaacattaaatggatcaattaaaataaat

SEQ ID NO: 31555 - DNA, 466 bp, Oryza sativa
  unsure (1)..(466): unsure at all n locations
agcttcacanagcgaggttgagtccgcgccgtttatgcgctaatatgacatcctcacaaaggcgctcggaaccaaagaacatcctggccggactatgggaattggtagcgatgtgccctggaagcatggactcccgaagtacagctcccaatacaggaaacggaaagtctccaaggaagagagggacgctcgtttgaaggccgaacttaaggttgagatcattcaagaactagaagctagcatgaacgctagggtggaagaaagggttaacaaggtcctcgccgacatgaatataccccaaggcacaactcctgctgtgcatccaactcctcgtgcacaacacgacgcgagtccgtcacagcataggagtagttgtgcatccacaaaggtgccggcccctggtctctcggtcgcacccttagctgcagtggaccacatagaggtaattcatgttatccaatccata

SEQ ID NO: 31556 - DNA, 458 bp, Oryza sativa
  unsure (1)..(458): unsure at all n locations
gcttgcctgacgtgtctcatgtgttgagacagagctcatgtgttgggcagtcacggagtatgggtaaagtgtacatccactgcagtgtgagtaaaccaaatctattcgaatagccgtgctcgcggttattgagcaccgggacatgtattacacttggctagactctaaattcttaacttgtgtgggatgggttattgcatgatngaattttattgctgtggagccacttnctgagaaggggaaagggtggcgttctcagaaaaccataacgactcaatggcgggaagctatccttgggatcacaatggatggtggacagaaccgtcgttgttaaatacaaacactgngtactaaaattgatcagtcaatgctatgtcttaggcttgtgaaaagaatacaaaattngctttgcgcaaagaaccataccatctttgaataccctatctatgcattgtgat

SEQ ID NO: 31557 - DNA, 499 bp, Oryza sativa
  unsure (1)..(499): unsure at all n locations
agcttataataggcttatagntcactggtatactttctcttaacgngatcactccagnttcattcaacaagcgaggtctatgcgtattgtctgcatcaaaattacatgacaatgtgcaggtaggcgcatgcggccagcattntatgttgtactagacaggaacattagtttcctcttactgtatcccatcaatcagtgtgttcaaatgatcagttgtgaaatgaattagtagctgcctccggtaatcccagttcccaaacaaaacactttctgccaccccaaaaccatatattacaccaaggcagacaagcagggccccaatctaacaaaacaatggaactcatcagagacaagagacacacaagacaacacaggcatagggcatagctaaaattgaatataatcatacatccactaacacctacaagctctaagtaggaaaaagaannagaaaaaacatttcttcttctttatcttcctttctctctggatctacatg

SEQ ID NO: 31558 - DNA, 346 bp, Oryza sativa
  unsure (1)..(346): unsure at all n locations
tcgccgatgtcgctcgcccctcctccgcaacttctcgctttccgccgcgatggcgacgcccncctcttcttcgccgccggcgagtcctctcgcgctacatctcgatctcgatgcgggaggaatctagtctccgtctcctacggtggcttcgcccgcgcgtgctgcctcttctncgccgccggcagccgcagccgcagcaagcaggttcgtgcacaacatctccaatctcccccccccccctctgattgattgactgattaccttgccagtngaacctattagctactatcttgcttgcgccgaaatcatacgatggtgttgaagaaggagaatcatagaactgact

SEQ ID NO: 31559 - DNA, 463 bp, Oryza sativa
  unsure (1)..(463): unsure at all n locations
agcttatgacaatgcgagcgaagatgatcaagttctccatactcaaagcaacgattaggacctcctcttttcctgttgctgacattattcatagctcgagaaactttgttagataacaaaaccaaggcctcctcctcgaactgttcgagttgatcatcggacatggcattaaataaaacaagaacagaagacttcgatgaagaagcaccaacatccaaagaagttgaagatgaaaccaaagcactagacttagaatcacttttacgagaaagaatattcatctcatgagttttcagttttgtgtaaagcgaatccaaagtcaaagtagacatgttaacagactcctgaatagatgtaactntcatcacccaaatagacatgtcaagaccattcaaaaagtgacgagaaatctcagattgtggataattagcatcatgagaagaatcacagatctaagatcact

SEQ ID NO: 31560 - DNA, 404 bp, Oryza sativa
  unsure (1)..(404): unsure at all n locations
cagcttntattctgtattttgagggttataaacgccatggtacgtagaanaacgactacataaaanaacctgctaaaatcaacacagaaatgatgtttctaagtttattttttttgctacggatgacaagctaacaaatacagtacttggtctatattttctaggcttacatgttcttcttaaggcactagaagcagtccatctattcgtccgaaacaatcaagtattacatgtgtatctcggcattcgagcttctgaatatatgatgagacatatattgcatttttctgggtttggatatgtatcacggcatgctggcttgaggaggctgtcgtgtgattctccagagaaactagcattgacatgctccctgattccactcattcctagcaagttaacaattc

SEQ ID NO: 31561 - DNA, 346 bp, Oryza sativa
ctgcagctatgccaagccccaatatgattatcgtccccccccaaaggcaggaactaaactgccgccctctaggaaacgccttaagacccagcaaaatgaatcctcgttcgcatacaacatgaacggaatctctcagcacgaggtcccataagaggcgaattctgtctatcttctaatctcgatctcgatacccttggggaatatggttcaagatctgcgtctaatgatcctggctaatcgctggacacagtctttccgcataatagtcctcctttatgatcagcatcattgggcgtaatgttctcgcgactactccgtgacctcttgcaactctaccgaatccttt

SEQ ID NO: 31562 - DNA, 115 bp, Oryza sativa
ctcacctcttgcgtagctgaaccggttcatgagctcactacctcgatgcattggcttgccaggatttggggatgggtattggggaattaagtagttgggctggggggctatttgt

SEQ ID NO: 31563 - DNA, 423 bp, Oryza sativa
  unsure (1)..(423): unsure at all n locations
agctngccaccctgatcgatgaagttcatgtttatttcagcaacattcctaaggaggtgggcttcctcacggatgagctcaggaccatgagagctttcctggagatacttgcggacaaagacaacctcgatccactcacaaaagagtggatgaactaagtaagagagatggcttatgagattgaggactggattgatgaggccatgcatcatctcactaaggacgacagcaattctgggttcatttcgaagatcattgttcgtctcaacaggatgagaacacaaaatcgcatggccaatcaaataaatgaggtgaaaacacgtgtggtggagatgagccatcggcacaaaaggtataagcttgatgcatgtatctctacatgtgactatacagncattgattctcgcctctgtgcgctatatg

SEQ ID NO: 31564 - DNA, 372 bp, Oryza sativa
  unsure (1)..(372): unsure at all n locations
cctagaacagttgatgctgctctttctctggctcaaacacangaggaattgcttgaagaagctggtnagaacagctactctatggggcaggttcagagactcttttaagcctgcaatgaaatcaactcatatgggcaacggtatattgggtactaatctagaagatgggaagccaactgacgagaaatctaaatgggaagatagatctgaattcctctaggcagctagaaaggctaaaggtgaatgtttcaaatgtggtgagaaagtggggaccaaaacataagtgtccaaaggcagtacaattgcatgtagtagaagaattacttgaggtgtatcacgtgcacgaagaagagtcatactctaatcatgatg

SEQ ID NO: 31565 - DNA, 481 bp, Oryza sativa
  unsure (1)..(481): unsure at all n locations
ttctggcatcgagctatcttgccgcaggacctcctctacagtatcgtcaccgcagtagagtttaaccaccaaattcgggatggattggtgtggttcctctacgcctatgacaccagaatatcgaaccatgaacgaggaaaggcatgagagaaatattggctagtaattgtgaagccccaattcttgactggaagggacaccaaaggcctctgccctccctctctatctatccaagagatggaagggcagagctntnntttggttntttcatcttttcatcaaagagttgaacaatgaagatagaatggcaagtgcctgatcgattgatcaggtcgtgtangaacaaggttcanatcgttcgttcgttaggatgcctcagctgcatacatcanctgcacttcacttgacacctatttaaacgggctcgtctcgngctacctttatctatntccatgcttctgtcgctccatccccgtatggg

SEQ ID NO: 31566 - DNA, 433 bp, Oryza sativa
  unsure (1)..(433): unsure at all n locations
agctntcctcattggagaggtcccttgtggctgttaacacttctcttgcaggtatcttgaatacgttggagagaatgggccaagatggtcatgatggatcggctaggcgcaaccacaatggccatgatgctaatagcagcatcgcagcaagggaagaactggagtacgctgctgacactgagcatgatgaggaggtacttggtcgtccacaaagacaacagcgccggcagcgccatggcatgggcgctccaccacggcgggaggtacgtgataatgatgattctttaggcaagatcaagtttaccattccttgctttgatggaaaatatgaccctgatgcatatcttacttgggagttagccattgatcagaagattgcttgccatgaatttcctgagaataaacgtgttanggctgctactagtgagttcac

SEQ ID NO: 31567 - DNA, 429 bp, Oryza sativa
  unsure (1)..(429): unsure at all n locations
gcatttagttgcatacacaaaagttgcttggtggagctaaccggcgggtgaaactcttgttaatctaacgcctgccgggttagtccattcttgttcctttgtgcaaaatgaggaggcgactatttgtctgttcaagaagggacccggctctccatcaagtcgtcatgacgagtctagcgcttgtttatccgccgacgtctcgatggaggatgctgatgttccgcaacgtctcttgagcgacgccaacctcgaacttgtcagtgattntgaaagacaagcctacttaatgccgaaagaccggattatgctcacacgcangtatataatcggagctactgaaaaataggatggaactgacntcgtgctttggnagctgtggatggcgagattgctgtggagatgacctgctctcattgctactttgcaatt

SEQ ID NO: 31568 - DNA, 418 bp, Oryza sativa
  unsure (1)..(418): unsure at all n locations
tcagccanatgctggagcgcgtctacgtgctgaaatcttccttcttcctgctgagcttacatcgcatgcatctgatcaacgtggagtagcacatatcaatgatcatatgcataatatcttactctgttgtgctgatacctcttttgagaatgatgctgcagatgacactgatgcacatgctatcgacagcaatgcgtagattaacgcataacaacctgatggaacttattctggtgcatcaaccggtgtacacacaccagatacagaagcggcggaagaatcgtcggctcgtactgatcattggcgcgccgtgcaagcccccgagcaacctgcgaccgccaccgaaccagcagccgacacgtcatcggctgtacagagctcccgcgcgagtactccttcatcgcaagccaccacagcc

SEQ ID NO: 31569 - DNA, 302 bp, Oryza sativa
agcttaagtcctgattatctgtttttcttcttttccctccgccgcgttccctccagatggtctacaccacgaatggtagccgcgcaacatgcgagggcagcaatggcgaagagcgcactgatggtgtgcatacccacagcgattcccgcaatggtccgccaccactttcctagaatcccacgctagcccaagtgatgcgacatcagactcagatgatggcagacatgatgcaccatatgcagcagcagcatcagcagatgcaccaacggatgctgtatcacgccggacagcaacattaacag

SEQ ID NO: 31570 - DNA, 526 bp, Oryza sativa
  unsure (1)..(526): unsure at all n locations
gtacctccgggagcttcttggtgccgccctgccttgatctataccaccataacctgcttcgggtgacctacctccacctagacatgagccagataaggaggatgcgagagacgagaggcgagaagtggagctggcggagggagatggaggtcccctgcgcctggtcgcctcgatctgatcgtctctccacctaaaataggagctgaagctgggtggagcgctatcacaaaatgaactatgagattgaagttgggttntagctttccacaactccactccanatccaactcctaaagcntaaatttggggttggagttgtgccanacaggccatgaatntaggctactccacaactccactctagatttaacttctggagataaatttaagagttgcagctctaccaaataggcactctanaaatatacatatcatctaanaatgtatcattatatccacattaatagtctggtcattatatagttacatataaatatatactttatcattaanatctagtcacaca

SEQ ID NO: 31571 - DNA, 359 bp, Oryza sativa
  unsure (1)..(359): unsure at all n locations
gagtactcttctatatacattnatggtatggaaatactttccaagtatatgaatatctactttacattatgttcttgttatacagaatatacggctagcttatctgggagatgctttggtgcgggtataatgttcgcttaatcaattactctatgtcatgacgatgatattagagtagtatctggtagtttaaacgtggtgtctagattacgggatatcattatttagggttatatgttgcgaatgagaggtgggccgctgatggtgacagcttagtacgggtattcctccgcgcctgtatataatcctaactttattccttggggagggtattcctccgtattgagccccggttatat

SEQ ID NO: 31572 - DNA, 382 bp, Oryza sativa
ctattcgaatagtgttactctgatcagaagtgtacaactgtacccacataacacatccccacgacacgtgcccgtgcgccgacatgccaccacgacataccggaaagaggccgtgacaggaccctttccataaccccctctaaccgatcgcaccacaccttatgggtctgcctcgtccccagcaggccacgtgcagcccccctttcgtgccgcgataatccggaagccgataaccggacaccccggtcgagccaactccatacgcccaccctttgctgtgtacgtcggctatagagaagctcactacaagcgcagcgttgctccactggcttgggtaagacgatagtcttcagggcatccctaaccggtcttatcgcttggc

SEQ ID NO: 31573 - DNA, 391 bp, Oryza sativa
  unsure (1)..(391): unsure at all n locations
gcttgaagagaaaagcatacttaagaggagctgttttgttatgaaagtcaaccaaatgaaggattggtattgaagtaatctactagaaaaaactaactcaaggggggtagaggaagtacaaccaaacaatgtcagaatgcgcaacaacagcacggatgaagaggaaagaatacatgcaactcaagcggggcatgaagcgtgcaagaactgatggaaatgaagaanaaggaagagctgatccaacttacatcagcaatatggagttgaaaaatacccttagctggaacatgacctggccaaaatgcatgtgccgactttgccaaggacccaacggaatttacaaaaacatcaagaatgtagtggaaccaaaatactgcaatattcaactaat

SEQ ID NO: 31574 - DNA, 446 bp, Oryza sativa
  unsure (1)..(446): unsure at all n locations
ttctattgatcctttaccaccttctattttcccaagaacactgatgtcatgaanacgttagttataacccaccatgaagaaatgaacaaggaaaaacttcacataaatcacgaaaagcaactcacagtggcaagaactgcatgtagtacccaaacatgttgtacagaatattctggatttcttcaacgagttactgtcaagaaacataaagtcagaaaatgatgcccattntcanaacaaagcacacccagttttcagaacagtgaanaattataatgggcaattcanaatgagattaacaatcatgctgtactaaacanagtggaacaagactcttgatctcaccttgaataagcaccaacaccagcaccatcagaaagtcaccatgganggcagtngagatgcaacttctcttgattcacaatgcngatgttgacaactctcac

SEQ ID NO: 31575 - DNA, 441 bp, Oryza sativa
agcttctcgaatcagtctagtacattcccatcttatgaattgttacgccaatcgctctattgactgtttatatcgtttaaggcagcaacagctttgacagggccatctagtagcaaggtatttggtacttcctccatcctagaaaaatatagcaatctatagtatttgattagacagctagtattagtacttgttgtatctaattcagaatgggacactttcctattacaatgaatctggacatgttggttatttctgtgacggagggagtactttggaatggaggatgatttacatcacatcagaataatatattcctccgactgagatgtggtccaaatagggcttttgaggcccctttcttttgtttgctagtcggagtgatcatgcctatgttccatatctgtttgccctcgcgacatatatgtgatgatctgaaat

SEQ ID NO: 31576 - DNA, 341 bp, Oryza sativa
gaagctattaaaaactttcagttctcgcagactaagtaggaaaaccaaacaaggcaatgatagaccaagttagcaaattaaattgataaaaaatcacactccattattatgatgatagcccccgactgacaacgtcaagaagaaaacttgatgttgacagtcaagatatggaagtacaatgataagcttaagcgtagaaacgacgaagatgttcatgttccaagagttgtcaacgagtgtaccgtcttcgcgcttgagtcgataggaacctggtcgggtgacttcagagatgataaatggcccttcccatagaggagaataattgtgccgatctcgtgtag

SEQ ID NO: 31577 - DNA, 435 bp, Oryza sativa
  unsure (1)..(435): unsure at all n locations
agctngaattagaaatttgctggcttgccatatatgaactatgtgcaactaaggcaataaggacttgtgtccaggcttgtgcagtgtaggctcttatgcaagcttggacagtgctcactgctcaaaagtgaaatattctcacctccttcacccctattagaacataagacctctactagaatatggaggtgactacatactaccaaacacaatcttaccaaatgcaacctgcttacagtatgcaatgttagattgatttctggccaccgagccagaaaggagagcgttgggctcagcccaccaaagcccacgcgatccctaacgttgaggagcgagtctcacgcattctctcgcacgtctctctctctagcgctatgtatcggaagcgccgtttcctcgagaaggaatcgcccccgatcccctcaatacgcatat

SEQ ID NO: 31578 - DNA, 529 bp, Oryza sativa
  unsure (1)..(529): unsure at all n locations
cagctgtcaatctgttcgttattaggaactatcctgttncttaactcataagttcattattcttttccttcttcatattgtaggattcaagaataaatttgtcgatgacatagaggttgtgaaagacaaaaaggactggggtcttttcattgattcatgtttcactcactgtcaaacgccattcgacatctcatggaactcacnaggcctcccagntctcggtaacaaggtgaagttaaaatcactcaactgtcctaaagttcagaacagaanatcactgaactgtacgactgtaaaagagtagctaaagttggtttatctctgataatggtagtgttctagatggatngatatttttctatttgcacttgtgtggagcagaatgtcgcggaggctatttggggatggtatttcagaaaagctatgaagtgaaagaaatcgactgcgagtatccgtgtaccccacatgtagcaccagctgcctaatgatntacattgncttgaccagactaccaccttcctgatattat

SEQ ID NO: 31579 - DNA, 505 bp, Oryza sativa
  unsure (1)..(505): unsure at all n locations
gcttagctatgaatgaaagcagaagggcgccactgggttgggcttaccctngggcctacctgtggtaaaatgggctgttgccaagatgggccggtgaggcccatattgtggaatcaaccggcacgttttctttgggcctggtttggtatgggccanggattgtgggctgcaaattcaagcctgtttacctttttgccattcgacttttcaatggaataagttcatctgaggtcccttaccttctcaacaaatctgattntcgtccttcaaccggaaaaccagataaaacgggttcctcaactatcanaaccaatgcaaaataaatcccaagacggttcaactatcatttcagctgaagtggcacttacgtggctaatttgactcggtctatatctancagacacatgaagcannaattaataatttataaaataaaacaaaatatgtgggtccacatatcagtcaaaatagaagataaaaaatagtaggacccacatgttagtgg

SEQ ID NO: 31580 - DNA, 366 bp, Oryza sativa
  unsure (1)..(366): unsure at all n locations
tactctggagaggaggatatcgatttcgagctgttcatttgacgagttcaatggaagagagtcaattgatagctattcttcattcatgacagaacctggtaattctggcaatcaacagcatgataatcacggctcccgttggcattctatggacagccaaagtgctcgacatctcagcaaggaaatcgcagatgcaagaaacctccatcttgnggtcaagagtgtgtcttttgnggaggggagagntgagtaatttgggcatagttctcaccttggcaatggtgaagccacggttcctgaagatgccaagaagattcacaaatttgcagaggcactgaagacatctagaccaggttctatgtcatc

SEQ ID NO: 31581 - DNA, 420 bp, Oryza sativa
ggagctcaagcgactgagctgcagctggcgcacacgaagagtgcttttctcatatatcactcgcagagccacctacctggcgcgccagatgacggagcgtggagctcctcaccgggagaccgcgctggccctcctttgccggttcggacggggaccctgggtgagactctaagctcccaatctgtggaaggttcgcgagacaggaaccatacaagacgccggcgatgaatacaggttcgggccgctgagaagcgtaataccctactcctgtgttttggtggattcgcgtatgaaggaactactaagtatgagccagcctctccctcgttctgggttcccaatctggagaaggaccgtcccctctcaaagtgggcaaggtcgctctcttatatcttaaggggataccacatgccccatctc

SEQ ID NO: 31582 - DNA, 485 bp, Oryza sativa
  unsure (1)..(485): unsure at all n locations
tctaccagtcacaggctgtgttaccgcaggagcacccgcagattcttactgagggaaccttgaacagctctcagaccactccatctcagccatcgcaccagatctggcaacacatctactgagtcctgccctcgtgggagaagcccctctacactgccaggtgatctggtgacctggcatgcgccatgaaatgagcagactagctgagctgccgtcttgcgcgcggagaagagtggacantgctntctacagtttcgaagtatgtggctggtntttcttcttttcttcttcacttggtgcgtgtgtccggggactaatttcagctgttacgagtttanctcgatagtgagttgctatgtgtaacgggtagtcctaatttcatctaacaagagctgcttcttataccctgtgtgattcaacctttatgttcttgatgccccactaattntacatgctggtcgctgacatctcnagtatactcccat

SEQ ID NO: 31583 - DNA, 394 bp, Oryza sativa
  unsure (1)..(394): unsure at all n locations
agcttaatagtagataattactaattactactatcccctctagttctcagcccagggttccagtgctccaaacaactccacccaaatcactccaaaggacgacgcgccgccctcgctctcgtgtttcatagcctccgcactccttgtcgcacatccccgcgggcatgcccgttgctgcgggcgcagctcaanttaagggtattcaggtgaatatctaagatttttgaaaaaaaaatatatttggatgagatatatgtctcatatgaatatgaaaaatatagaaaagaggcctattaatcgaaagaaaagcccaataagaaagcctggcctcctctcctcattatgcaggcccagtagccaagaaggccccanaattaagtcaccctagaccacc

SEQ ID NO: 31584 - DNA, 483 bp, Oryza sativa
  unsure (1)..(483): unsure at all n locations
tcatgaaactcacgctccatttgtgaccatgtagaaattgtattgggagcaagtaaactataccatgtagatgcaaagtttgacaaagaaagaggaaacaactttaacttaagaaaatcatcattactggccttaccacattgatcaataaattggccgatatgctccattgttgttctatcaccctcaccttgtgaatttgtgaagtgggcacctcannatcttgcggtatgggaccgaatctatgtgttcaggatacggtctttgatatgtatgtacagttactttggattctgtctcactactatcccgcaagacattgtcactatcttttccaacatccacatgaaccgattgaattcggtcttagggacaatgctatttacttgagcttgnatacaatccgaaccgtcattttagtcggctatatcttcgatggcattattctctaagctagcaacacaatccgaaccattacttggt

SEQ ID NO: 31585 - DNA, 412 bp, Oryza sativa
  unsure (1)..(412): unsure at all n locations
agctngcccgcaggtacaccaaactcacacttttctgtgttcagctntatgcgggcggagcggaggttctcaaaagtttccgctagatctgaaagtaaagtttcttggttgcgcgtttttacaaccaagtcatcgacataagcctcaacattacgtcctatttggctacccaaagaaattcgagtagttcgttgaaaagtaggacctgcattctttaacccgaagggcattgatgtataacaataggttcctacgggggtaatgaacagcagtttctcctcatcctccctagccatgcgaatctgatggtaaccagagtatgcatctagaaaacacaaaaggtcgcaccccgcagtggagtcgacggtctgatctatgcgaggcagggggtaaggatccttatgacatgcct

SEQ ID NO: 31586 - DNA, 181 bp, Oryza sativa
tgggaattcactgattgcaaggatgctaccaacatttatcacatcgatcttgtacttgttgatgagaaggtaagatttggtaacagccctgcagacctatatattgtcatggatataattatgtagacttgcttatttccatgctctgtactgtgcagggtggcagcattcatgcacagat

SEQ ID NO: 31587 - DNA, 412 bp, Oryza sativa
  unsure (1)..(412): unsure at all n locations
agcttagccacaagtcaaacaataagtttgtatgggttggtggctagntacatgattcagccaacaagtcaaaagtgagagcacttaaatgctttcttgggaagggctgattcacttcaaaaagttgcaaaaggattggctgttggtggaggcagcaataaatgcatttgggggtggctgatatggtgatgagggtgctgctggttgtggtggacgaaatttggtggggttggaggtggatttcgtggtgaatatggtggtgatggtggcagcgggatgaagataaatgaagtgatggtggaagtgtttgcggtgacgatatcgtgagcagaactcgaaactctaaaggactaaactactataaccagcaactcaaccaatcgatgcaatcgaaaactcagcaagcaaagac

SEQ ID NO: 31588 - DNA, 486 bp, Oryza sativa
  unsure (1)..(486): unsure at all n locations
agaatactcttctttatacatntatggtattgttatactttccaagtatacgaatgccaactgtacattatgttcatgttatactgattatactgctatcttatctgggagatgctttggtgcgggtataatgtttgcttatgcaattactctatgtcgtgacgatgatattagagtagtatatggtagtttagacgtggtgtctagattacaggatatcattatttggnggtatatgctgcgaatgagaggtgggccgctaatggtgacagctcagtacggatattcctccgcgcgtgtatataatcctaagttaatttcctggggagggtactcctccgtattttagccncggttgtatggcatgacgggctatcataaggaactnggcagtcaggggtggcttctcgaagtaccaggaaggcatcggatagagggtatagctagtatatcaggtaactaggatgtatgtatactatgcatact

SEQ ID NO: 31589 - DNA, 435 bp, Oryza sativa
  unsure (1)..(435): unsure at all n locations
agcttctacactggaagatagcatcaatatcattcaccatatccatgttatcattatccacaaataagctctccatccatgcttcctttccaaagaagaatcctttgcgaaaataaaagataaaaaaaagagggaaaggtatggctatgagaaaaataataaattcttgctctcctaaaattggagcatgaaagaaaaaaaagagaaaaaaagaaaaggtagctataccctctctatgaaaattaaaggatattttggaggaaagacataagcacaaaggagaagcattttttttatccacattttattttccatcatatttttccaccatattattcanacacactttgcacgatcttgatcttgagtatgattagtcatttatnnttagttcaagttttgacttagtaataaatgtgaatacaagtatgccat

SEQ ID NO: 31590 - DNA, 435 bp, Oryza sativa
  unsure (1)..(435): unsure at all n locations
ctcttcagtaattctttgcagnagtcatcctatactgaacttttaagttttaaaagtagagttccttggtgggtttacctgcttgttcagatgaaatggatcccattcgagttaggctccctttctgcaaatgagtgaaatgaaccgtataacatctgccatgagaaggaaaataagtgatcagaaatatcagttagaacatacctttctgcatccttcaaatttcttttatattctctctctgaaatctgacaccatgaacaaatcacacaatgtttaactagagtagagtcaaacaatttatacagcatagtgtgctcatgagatttatatgcctcggttaaattatcctaaggtctanttttttttaatgatacctttgctttgacacagcagtgcccattgcattgcagattgtttatacttacaacagca

SEQ ID NO: 31591 - DNA, 425 bp, Oryza sativa
  unsure (1)..(425): unsure at all n locations
ttggggccaactgcanagtgtacagcttgtattcaatcactgctatgagctgaccattgaattccacaatctgatcgacccgattaacaggaagcttgagctcagaccaggagtcacttccaaccggccaatcgaacagagatgaccggttgctgataaggagatgtgagttgggtgacgtgatangagccgtcagagtgccacanaagtagatctcctcatggtccttgctgaatggaagacgtggtggtgaaacctcagcaccggtgaacacatcaacaacgagacagtaaccactgcggcagcatatgagttgaccatgagaagagcctgcanaaagcatcttcttgcagagttctcgaggaatctggcagcggagcggggtgtttcggtggctagatcaatgacctgacatgagcgtagta

SEQ ID NO: 31592 - DNA, 232 bp, Oryza sativa
gaagacgctgaaaaagcggtgtgacctatgagacccacgtgactgctgtgcttgtgaacaccgaaaaaagtgtgtgactgatgaagcactgcgcattgagctggggcaactgaatgaatatgtggtcctgctaaactgctgtgctgggtagcataaatggccatgctggattgcatatgtagtgatacaagctgggtactgatggaacgagttggtgtaaatttgtagtgct

SEQ ID NO: 31593 - DNA, 526 bp, Oryza sativa
  unsure (1)..(526): unsure at all n locations
tcntacgtgcgactaatctgagttgaacagcatctctggattattctttgatatgtcgctcctacgttcttcaatccaaaagacatggtgatatagcagtaggccccgaatggcgtgatgaatgaagtctttaagcagtcggaatccttcagtcggatctgatgatatcctgagtagcaatccaaaaaactgagtagttcgcagccggcgggtgagtcgactacctggtcaatgctaggcaacccgaattgatctttgnggcaagatttgttgaggtcggtgtaatcgacacacatgtgccattgtcccgttttcttccgaaccaggaccgggtttgccagccagtcgggatgtatgacttctttgatgaagcctgctgctaatagcttggntaattccctcctgattgcatccttncctgtctgtgcgaagcggcagagtcgtngcttgatagggttagcgtcttccttaaacatgtaagagtgctcaatcacctatctangaataccgggcatatcagatgggt

SEQ ID NO: 31594 - DNA, 451 bp, Oryza sativa
  unsure (1)..(451): unsure at all n locations
gcttgagtgggtgtgagacttgagctgccagtacctaatatttgatatgagcgngtatattcctggctatggttcttgggtgctgctaaccctggcaggattgcgcaaggggaaacaagatggtcatgctcaacgtccacatctacaccttcgacaagatatgacgacatcttcacgtgatgcatatgaggtacatgactataatttngcacaagttgcatgtaagctacccgtctatgatcggaagtatgattccgctgcctacattaattgggagctagcagtagaaaaacaatttgatgagtatgatttttctaatgctcaaatgattaaggctgctagtaataagtgtaccggttctgcatctttttggtggcatactgtggggaataagcttgaaactttgatgaatgcatatactgatgagataaagattgtgcttttatactat

SEQ ID NO: 31595 - DNA, 310 bp, Oryza sativa
  unsure (1)..(310): unsure at all n locations
ctctctggtgggccaattcagtctaacatagattggctggatgcctcgcaaaatgatctcatagcgcaacttctagagtgcaacgccgagctggatttggaaaaacaaaaattagcctatctgccaaatgctgtcgaagaacagaagtctagactgaaatcggctatcaagaatgtggctgatattgaccagttcatcaaggtcattcctggaaccgatgctcaagacatccaagctattgaagatgtagatcanattagagaatgggctgtgtcggctatctagcgttacttatccgaatgattatatt

SEQ ID NO: 31596 - DNA, 459 bp, Oryza sativa
  unsure (1)..(459): unsure at all n locations
acctgcggctgcagcttcaactttcgcacatattccatttcacctttttttcagnttttacgtgaactaaacacactctntgntactctctcaatatcaaaatatagcaaatagtataagaataaacattgtactactaggttactatatttaaatataacggagataagatattttaggacagagggagtaatttcagttcggcgagaggcgacgaccatggctatatacggtccatacggagaatgcagcacgcgatggagatcccctcttgctcgtcacanatctgaatatacggtccatacggagaatgcagcacgcgatggagatcccctcttgcttgcacaaatctgaatgcacgagggagagagtgagtgtcaacctcaaccggattgatctaggtgaagtccaataaagcttttgaacagttcgcattataaatccccgatacgcaactac

SEQ ID NO: 31597 - DNA, 361 bp, Oryza sativa
  unsure (1)..(361): unsure at all n locations
tatatttatgtgaggatttgatccttctatgtggcatgaggtaaccctgggccggcttatgaaaggccttgttgcgaacctccgacaccgacgggtgttccgaataaggtcgtatcttgtgggtaaagtgtacccctctgcggaggtaactaactgttcgacagccgtgccccggtcatggcggatgtangtgtttccgtgcgtaaattgttgctgtgcttgtaaaagtgtgggatgaatcgaaccaaatcagctatgtgcaatgatacctgatggcagaacaattggtgatcggatgttangcatataactngcttccgatggacggaagtgtctgtggcactgacttggagtcaaaatg

SEQ ID NO: 31598 - DNA, 453 bp, Oryza sativa
  unsure (1)..(453): unsure at all n locations
cctgangcatgcaagcttcgtgcaaggagcgagaagatcagntcattattctttttctgcgaagatcaagnggagntttcccgaagttgacctaaacccaatctttcccagaagagtagtttcgttagctttctaaatcgtgtgttgtttgcttgtgtgtaaggggatggtttgcatcattggtggggatgcgaccatactanggtgtttgcttaagcaacttgaacaataaaagtctactcacaacataacagtaggcaagtgggttagtaccttatctttagcaacccctctcttccacctctcttncgtcctggcagcggatggtcagtgtcagagataagatcaattaaagtcaccaatcaatggttcagttgaaagctacaaggtatcccagtgccagaagaaccctgctcgtgatcaacattggtgccaagatagatgatggatgta

SEQ ID NO: 31599 - DNA, 444 bp, Oryza sativa
  unsure (1)..(444): unsure at all n locations
ggctagcctcctcctcctccgcgccatgatggggagcanggtggcggttgctcttgctccgccgnggagggaccaggcgtcctcgctcatggccgctcgcctcccgaggggagcccccgctccgtctccggctgctcctatggttggatccggctccgtctgcngctgcggcggcggcggcggtttactaactggatcgaggtcgacgggatccgtcttctccgcatcgcgcctcgccttcgttcacgccttccgttcaatcggctccaaggtgcgttcgttggtgtggctttccccccattctgcatcccttggttggtcgtgaactcgtgatgataccctcactctggagggtagtggattgtggatttgtggtcaaccatctgtgagtgtgacacaatgacgcgatcnngttttgagcggaatggactgagaacatgctgt

SEQ ID NO: 31600 - DNA, 324 bp, Oryza sativa
  unsure (1)..(324): unsure at all n locations
gcttactaccgagagcatctcacagnnncgtgttcagtttttctctatatagcagtctgtatgctcaacacatgctctctgctgaaggtttcgttgttccaaagtttctttcttttgaaagctgcaaggagccatccgtttcattcgaagaatctgcaaacttcacatccgtcaagtgcctgaggttatgtaatggtgaaatgaggtcaccaccaggaaatatgaagtgcctatccagtctaacgaaactcgatatctatgattgccccaccatatcatcattaccaagattgcgcgcctccctccagcatatatgtatatggg

SEQ ID NO: 31601 - DNA, 325 bp, Oryza sativa
  unsure (1)..(325): unsure at all n locations
tcaggagcctactcctncaaatcagcatactacgtgcccgttgtggtgagaatttgcaaacctgttggaagactctagcccctccgaagtgtcgttatttcatttggctggtcgcgatgaatagatgntggacgacagaccgtctgtgatctcgagggttgccgcatccctatcggtgtgtgctctgtgatcaacacgacgaaagcatcgatcacattctggtcgcttgccccgaatcttgcaactatggtggggtcgtctctccagaaatgggtgcgtatgcctgcccggacgagagcctttaatcttggttgtactctcgttg

SEQ ID NO: 31602 - DNA, 56 bp, Oryza sativa
ccttgaccgcctggaagaccgcccttgcgatcgtttgcccgtactcatcaggaacg

SEQ ID NO: 31603 - DNA, 361 bp, Oryza sativa
  unsure (1)..(361): unsure at all n locations
agcttgcaccttcgtggggattactatttatttgtttaccgaagncgcacataagcactaaagagaacatggtccacaagaagcaacatattgtataccgccgcaaccactaatgctntgcttctatgccgaaatttaatggttcgcaatttctttcgacaaaaaatattcacttttccccaagattggcagcatacatacagattgaacagatgtaaggaccaaaattttcatataagattgtgatggaatgaatgtcatatgaagtataatatgcctcgctcactcatctcacctcacctcatctcgttcaaatcccttgttcataagagaagaaataaaatagccggaaacataaaaa

SEQ ID NO: 31604 - DNA, 374 bp, Oryza sativa
acgtatcaacttaaactcgatgttagattgtgtattttagccagaggcacattcctccatttcgttctagctccacccctgatgcccaccaccagatcgagttgacaggattcatggcagcccaccaagatgtgatctatactctcatcctgttaatcgcatagaacacatcggacggagtggtgcagcccacgacgacgaagacgatcagcagtctaacacctattcattgtgaccaaccaaaagaaagtgagaaagcgaggaggggtcagagactttcaagttggcgcctcttggatacggttccttcctatgaagatggcatggtacgccgaaccggaagaatacgttcctgtcggactccatttccatga

SEQ ID NO: 31605 - DNA, 420 bp, Oryza sativa
  unsure (1)..(420): unsure at all n locations
agcttgcaagatcgaactcctagcataacttctataatgcaatgctgaactggatctagagaacaagaagttagccgatctcccacagtctatcgaagaacaaaaagcaaggttaaaatcggctatcaagaatgttgctgatatgaccaaatatttgaaggtcattcctggaaccgacgctcaagatgcccatgccatagaggaagtagaacagattaggcaaagagctatatcggctatccagcgatacttatctcaataatctttgtgtaatatgacttggaacattccgattaatatgacgtataagctttgctcacaaaattacttggaattntaatttttatatatatatgcccccctagttttacaatgtcaagagcattngataaaatatgaaaccactaagggcgatataac

SEQ ID NO: 31606 - DNA, 290 bp, Oryza sativa
  unsure (1)..(290): unsure at all n locations
gcaccggatcacgccaatggagcgccggagcgctagatctgccgagggccgccgcctgctgtcccacgtaccatcgtcctctcttgccaccggctttcctctacttctgtcaccgccatcatctgtccacacctncaccgccgctagccaccccgctagcaccttcacggacgcttgccagtctctccctgtccggatccagccatgcaggctcggatcaatacggcgtggcgactctccacctncaaagcgcgtcttggtccctagccgtgcagcggcaccgagggggg

SEQ ID NO: 31607 - DNA, 283 bp, Oryza sativa
aagctgaatgtgcattaaatccctgtccaggaccatccagcgaacacaaacgacaaatgtggacatacagatccacgtcttacttcgacgtaatagatagaaatgctgcggaaaagataaaagcgagctaaaccgggaagcttgacttcagcagcgagcgactccactccacatgcgatccttgacgggatggactaatccaactttgacaaaacagcttctactaagaagatcttatctctggagtggggaaagagacaagactgaaactacccactgactc

SEQ ID NO: 31608 - DNA, 313 bp, Oryza sativa
ttcttggtgagcaacttgaaacagcagatggattcgatttatgctatgtgctctccataaataaatttctttcctactgatatatgtgttgtcacttgtgttctggttggctcacatatgtatgctgcgttgggcccacatagtataaacattttgtgtggtcggaatactcttacatggagtgctcagatagggttgggccagcttttaaagctgtatgtctccaaggtccactcctttagataaagttgggtaaacacaagtgctatgagacctaactcttggtttaatcaattcaatgcagagttactga

SEQ ID NO: 31609 - DNA, 164 bp, Oryza sativa
ctgcagcttttagtgattttaatttatcctttctacaaatgactattgggtgtcctacttttgtttgcgagatcaaggcggcgttccctcgcgttccgaacaaaaattcttggagattcgattcgagcggctacgcgcatgcaaatgtgcatgcgtgctgagta

SEQ ID NO: 31610 - DNA, 404 bp, Oryza sativa
  unsure (1)..(404): unsure at all n locations
tcaccggcttgagcgatccacgatgntggacttanggggaaaggactgtgaaattggaaatgaagatggagcgagcagcaagggaactccatctcccaagggagccactataccttttgattacaggaaacttaccattccctctcacaactttgtctccgtaccttccgggcgtgctcctcaatttgatgggacacattacgccgcttggaagcacaagatgaagttgcatctaatctctttgcatccaagtatttggaaagttgtgtgtacaggtattgacgtacctcatgaggacatggagctcacttctgagaaagaacaactcatccaccgcaatgctcaagcttcaatgcaattctctccgccttgagtccggangaattncgacagggtgatggact

SEQ ID NO: 31611 - DNA, 401 bp, Oryza sativa
  unsure (1)..(401): unsure at all n locations
tgcaagctttgcacttgcgattacagtgtgcatcatttttgcggactccctccgcttgatatctttttcaaactgtttttaggtttggactaaatttatagaagaaaaatatcaatatctacaacaccaaattaatttcattaaatataacactgaatatatttataataatatgtttattttgtggtgaaaatgttgctatantttttntatagatctaatcaaactttaaaaagtttaactagaaaatcaaagcgacttgtaatacagatggagtatctttcatttaattgacaaaatatagtttgcaaggaagatatttctaaatagggtacaatatagaagtacataactaacacagcatatnttgaggatagagaaatacttgaaaagaaaaaaaa

SEQ ID NO: 31612 - DNA, 491 bp, Oryza sativa
  unsure (1)..(491): unsure at all n locations
atcatcttccactaataagatgcctcatcatcatccactaattaacaagatgccacatcatcatccactaacaatcatcacatttaaacatcatgcatacatgctatatttttataggttttataatttaagagtttttcaaatacaaacatgttaaattatcatccaacataattaacataatgtttcaatgtataattttattatgntntatgatagcctatatacttatatagtttatcctcacttagttagtgcttaaatgattaatatatggtccaaattatctttctttttttcctctaattaagtcatatcacatcacattattttagcctttagatgagtaatctacggcccaaactatctccctactnttcttctttcataaaatcataccaccttactttttacgtntgaatcaccattctacatactattntaaaattaaatatcatagaccacactaanttacttaatctgatgtatct

SEQ ID NO: 31613 - DNA, 354 bp, Oryza sativa
  unsure (1)..(354): unsure at all n locations
gatagactagtttctttggatacaaaaagatgtcaagaaggataatcgcattagcagcagcactcgcaccctgattcacatgaatataataaggtatgttttgggtgtaacaagtaataacttaatactactacaggtagagatggcaacgggtaatccccgctggagaatacaacccatccctatccctgcgggccacagattatcccaccctcgtaaactgcaatcangaacaattttctcatccaccccacgcgtgaattaatcttatggatggccccgttaaacaacatatcatctcacatcgaatgtattaacaaatatatccacacttataaaatatactacctatat

SEQ ID NO: 31614 - DNA, 400 bp, Oryza sativa
  unsure (1)..(400): unsure at all n locations
tcatctacttcaagctgggggcgctcaggttcctcgtcttcatatgcgcagcatcgtagcagatgagctgaaagcgacatccacgagtcgagaagctaacatgcatctgattcggaataatcaatcagaataaccagcgggcgctacaagtttactctcccggtttttgatgacgacgacgaggcggcgtcggctggcacgatacatggagcgtgaattgtactcgcacgatagcacagtagaaaattggaagtagggtgtgcaaaagattggaattgctggtcaaacatgcgattccacttggtgttgtgtaatgtntttctagaatgaacttggttcccttgtagtacataattggatcgagagcaacagnggctcgagttattcagaatcggtatac

SEQ ID NO: 31615 - DNA, 376 bp, Oryza sativa
atgacagttgtagagcatgcaaaatgtctgaactaccccacaaccgccatcaggagatgatctgggatgtccatgccaaaccctatcctgaacggctgagattgtggttcagtcgaaccatgggttctgccagaccctgttctgtcccaacaggcccagaacttggcctatgtctctccctcagcccgccttatccatttacaggagagatgggcccattttctgatgggtcgatgaagtttaaagcccactcttggatggataaaagtatttcttcacttaagtctagattgcaccccaactttggcggtttattacctgcatgcaaatatacaccaacactcgtggaatatatagaagtaaacctaccactatg

SEQ ID NO: 31616 - DNA, 399 bp, Oryza sativa
  unsure (1)..(399): unsure at all n locations
tcaagttccacagctcctaagaagactgaggtgactntcgatatgctnttgaataagtatgaaaagcaaggtggtgagaaaattcacaataaaggaaaacaaccaagatgtcacaccctgaatttcttctcccaagcctaaattgaatttataaatagtctcgagaaaataccagtgtaaaagcaagagtgaaaccctaattaaattaatgcaaataataatcggaattggcatgttggaattttcttgagttctacatgtcgaaatatgctaacaagatatttagtggaattttcagagctctaganataattntaaccaattaaaaatgagcacaagcaactattaaatccctggaaatcttttcccttttaatttacttttcctctttttcctaat

SEQ ID NO: 31617 - DNA, 448 bp, Oryza sativa
  unsure (1)..(448): unsure at all n locations
gcttgggagaggcaaaagagaagacaaagattgtgataagcccaacacttcaagtcgaagggttcttaccaagggaggaagatggagaatcttangaaggcttttcaacaagtttacgccgccttcgagccactaagtgatgtatatggtgaaagtggagatgatgataaaggaaagaacgtctccgatgtttgcttcatggcgtgtggtgaatctgacacagagtatgaagataatgaggtgagtgcttttgaggaagctattaatattttgagtgctaaaaataaaaagtgtgagaagatatataaaaaacaggaatttatcattgaatctcttanatctgaaatcgatagggtaaaatctcttattcctaatgatgatgattgtgaaaattgtgagggtttaatgaatgagatctcanacattagagatgttaatggtgcacatg

SEQ ID NO: 31618 - DNA, 459 bp, Oryza sativa
  unsure (1)..(459): unsure at all n locations
ctaagctnttctgaaacccattacatcctacaggcttgcacccatatggatactcttcgacttcccaagtatcattagacataatcgagtccatctcactgcgtactgcttccttccagtagtcagcgtcaggagataaatatgcctcttctatggttcttggggtgttatccacgaggtatacaatatagtcatctccaaaggattttgcaaccctttgtctcttactcttaagagtatctacaattgtgtcctcaagatttccctcaggcgttngatcattgtgttctatcggtgcaaagtgctcatggngtatgacagtttcttgactagaagtgctangtgtatgtttcatgggaaattcattatcacagaatatagcatctctcgactcaataattgaccaacacgcatgtcacgtactccagaagttactattaagaatctataacncacact

SEQ ID NO: 31619 - DNA, 399 bp, Oryza sativa
  unsure (1)..(399): unsure at all n locations
agcttgcataggaaccacatcgcaatcaacagttattttatattagccaangganaacgaaaccctacaaacctgtgttacctttgctcctccggaatcgttaaccactgaatatggtaagggtgtggatgtgtacgtgtagtcaaaccaagcttcttgaccaaatcagaactcaccaaggtgttgcagctaccttcatcaatgatcacacgtgcacgacagttgttgatgacgaaaaaaatctgaaacaaattatggcgttgcaacctgtcatgctgctgtacctgcgtgctgagcacccgctgcacaatgatggtcctgtagtccgttgtgtcatcacgaccaaagacttcgccatcctcatcctcaacttcttcttcctcctcttcctctttcacg

SEQ ID NO: 31620 - DNA, 392 bp, Oryza sativa
  unsure (1)..(392): unsure at all n locations
tctccaccatctcgctgctagccaagtaggtgcagctacctccatcatttatcatgcggcaacaacgctctttgacgacacactntgtttggaacaacgtgtgtcgctgattntgctccgccttctccatttgtgcgctaaggacacgctgcacaatgaagctctcatagtgatccgcatatgcagccccaatgtgctcttccggtggctcattatctgcatggttcagccgcagcaaagcaagtgtatcatcatcgaaatcactagcagaggagtactcaccatcgtttntgactaccaaaactcgcttgctatggcagtcacgctgcacatgcccaaagcccttgcaacggtggcactgaacatctctcattcngcctgtggatgccatt

SEQ ID NO: 31621 - DNA, 262 bp, Oryza sativa
ggctgggcgcccctaattatggcgcgggtcaaggcccccttgagccggtgggctcaaggggacggagatctatctaacagtggcagctgtactatggttgggcggcgggagaatgagagcacggcaccgcgtccatgtggcatggttggctaggcaacggtgcaagccgtgggctgcggcgtgcgaaccacggcaacggtggtggcggcttatccatgttcagatgaaggagaagggacgtaatatatacttattcctgact

SEQ ID NO: 31622 - DNA, 350 bp, Oryza sativa
  unsure (1)..(350): unsure at all n locations
agcttggctaagtcaacatggttagttgggccattctcagtactgacctccaatgcaatggtagttggactagtgttggcgctcaactctgccacatctctagtggaatccttgntctcggataaatccaccttggtgtcgtgaaatgccttcaaaatccgatcgatcctggtgcacaggtcttgaatggccttgcctgcgttctccaccaccttgtccatgctagcctcagcctccatggcctcggtgagtgaaacccgacgttgtgtgactgctgatttggccgcagatagactcatggtggccggaaacacgtgttccagagtagtaggagtgctctcggtatctga

SEQ ID NO: 31623 - DNA, 477 bp, Oryza sativa
  unsure (1)..(477): unsure at all n locations
cgacgttcgtactccatccaagcatgaatgaactgtatggtcggttcaggttgcgttatcggcccgccacttgaagtaactctgactgtgtcaatccattgtacgaattgacatttccttacatcctcctatgtacatccattttgggatagttaagttaatgatagtactgaggagtgatgaaaagaatagttgtaattaccacgaaatcatcgtcgacaatgtttggacacacganacacctttgtnctcgagttcggtgccttacggaccttatgacctgacaacggtcaccacaacgacactccggacgctcacgccacgtggggagtcctaggggaattacgtgccattctaaagcctcagcagcaattcgacgttcatgcttatccttccgncttangtagtccgatcttggttcactacgtgggtaangcacgtgttccgtcgtttgtggggtctcatgtctacccactc

SEQ ID NO: 31624 - DNA, 180 bp, Oryza sativa
cgagccagctttacgaggggaagaatctaatttcacccagccgcagccccgaagccataagcaagagcagggaaaacagggtaattgcaaacacttaaaccttttgccaacctttgtaggcacctaacaccagtattaaaaggcggacctccaaccgctacccatctcagacagaccgac

SEQ ID NO: 31625 - DNA, 412 bp, Oryza sativa
cgccagcggcaaacggggggctcgttgagggtgcgaccaaaagacatattgaagatcatgctattccgattccattcctctacttttctcggtcagtggacatcggagtgacgccggttgttagtccgagcggcggctgtgcttatgctgctactgcatgttgagttggtgctcgattctaagtgaatgaaatgcatgaatgcaatcctatgggctcaagggtgctcaccgaaccttgaacgaggcgcgggaaagtctggacagcggcagcggtgaagaagatggtccggcgatggtgtagagctccgggaagacggcaacggctcgatccacttcatcgaattgacatgcatgtgtttcatggggttagtgaggtcccagggatggtgtatccgcgaagaatcggacaatg

SEQ ID NO: 31626 - DNA, 327 bp, Oryza sativa
agaactatagggtttgcatcggtgtaccactgtcagagacagatacccttttataaatgaactgatcggcggtttccatttcacaatgagagatcgccggattaatatattctgagctatcttatcctgtctgaaatctgagcacctttatgattactatactatacacgctcaatgcatgggatgcatacttagggccaccatttgaactacagtactgtgaggatgctggcagatccccatggctaaatgtaaaccaccagggggagctcacacttatcagagcttgaccggtgtggacttattgaaccgctacactggatgact

SEQ ID NO: 31627 - DNA, 356 bp, Oryza sativa
gctggcaagcctttccccggaacagcacgccagtacgtatcatatataacaccttggctctcactggcgcaaggggatgctgtttcaccagcttacccctctcgtaccccttccggagcaccaccgtcgtcgtcttgcacttcaacgacaggtagaaaaccccagggtaccgcgtgaacaatctcgtgaacttgtgcggcaggcccaattcctcccggagcagcccgaacgcgttcctccgaaccatcttgtgcaccatcagaccgagcagctcgtgcagcaatccaatgttcctcttctcgtagatgtcgctgtcgggatcgatccctgacgcgtcgtcgtacggggagatgtac

SEQ ID NO: 31628 - DNA, 140 bp, Oryza sativa
acaaacaccagcgacgccggacagcacagacaaagaaaaacggcaaaacgacaggaggaaacagaaccagaacgccccgggacaaaaccaccccaagcacacgcaaagacagaggcaacaacccgccaccgcagaagcca

SEQ ID NO: 31629 - DNA, 154 bp, Oryza sativa
taatgtgatccccagcagaaagtgggtttattgcatattgacgttaaccgtgtgcctcaaagaaaggctgagagaggatctgatgatactatatctggaccaatcctataaatgagctggccctcggtcgttccttccgacataaatgagacct

SEQ ID NO: 31630 - DNA, 468 bp, Oryza sativa
  unsure (1)..(468): unsure at all n locations
agcttataattgtaatattgtgctttattgattatattatgngngancataacttccaggcatatgcctgcgcatgcacaggttcagaatgaatataagggcaaatacttactgtttcgtgaactgaaacccagactgccttggtgacagagacgacatcagttctatttgtaaaatgactaagtccaagcagccccttcagctgctgtaatccaatcacaatagcagcttctcccatgaacccgacgatagcagcatgtgatagaaaatccacaagaaatcccagtctacaagaatcaatgcaaaagtcagttatggaatgtaagtaagcgcattntgatcaaaagacggcagagacactacctgaacagaccaaatgctaactgaaagacaccagtaaggaatgtcacgggtaagaaccattttcggtagaacgctggatcaacagatggggcactattctctgaa

SEQ ID NO: 31631 - DNA, 508 bp, Oryza sativa
  unsure (1)..(508): unsure at all n locations
ctaagcttcacactcacatncaccaccncgcgtctncctgccgtctgtcttccgccagtgatcacccttctacccgtcgcccaccttccgctctgaaggaagaagagtaagccgttgatacatgggatccacatatggccaactcaccacgtcagctaaaaccgtgcaatatatgttttgggaccttggatacattggttctacaagttgaaggacgcgttatatttgctattgtggttcaatggcgtgactcanagtaaaacgtcacgaggagggacctanaataaacttattcctttgagttaatacctgcagaaatgagccgagtgccccagatcaagtaanaagcggcccanaattgtgagagccctcggnccanaatctgccacgccttttgctttctgtgatccccctcggttcccncactagctgcagctggcgatctgcgccgtcgtggcctgaacattntactcccttngcagacgtattactagcaagcttgcacatc

SEQ ID NO: 31632 - DNA, 379 bp, Oryza sativa
  unsure (1)..(379): unsure at all n locations
agcttaaactaacaccgttatatggttggttttcatgataattangacaagaatgcccttcctcaataaaacaccatttatgcaacaagctagaacataatcaacaagcatcattttccttgtacagaatctagagtgagcgcagccaatttacaaatggtgttgatctgaggatgatattaatgaagacgaacttctcctgtataaaatctatagtgagcagccaattcacaaatgaaaagaaaaaaaaaggatgaacaagtacctttgctagctataggtcctccctgacatgtctttgcaaagtggccaccatagccaccatgccgcttgaagcagtcgacgctgacagccgtcgcagcggtgtgccgcggtctga

SEQ ID NO: 31633 - DNA, 154 bp, Oryza sativa
aaccatccatctggtctggcatataattctaactacctagtacacatggtgtacaacggatggaaataagccatattaaacttaacggagtagcacaataaaatatatcgggcaacattggccttagttctgatttccttacgagcctcataca

SEQ ID NO: 31634 - DNA, 416 bp, Oryza sativa
aactatagctacataactagtagtatggtttcattggacattctatgcaacttgcaccattaattttattactggcaatgcacataacttggattataacgtcgtccaaggacaaccaaaaagctagggaagttaattagtgatccagctttagtttgttaatgcacagatcattgaaattaaggtctcatacaaagcatagcatgagagcaagtatcaaagatctacttagctagcacgtgagattataattgtgaataaaatttaattagcatgaagcatttgatcaacatagtaaatcgagattaactgtgggtaattagtccatttttttgccaagctaagggttcagagttcaccaaatacaccacaataactatgtccccttcactcattaaaaatcatggaacaattca

SEQ ID NO: 31635 - DNA, 473 bp, Oryza sativa
  unsure (1)..(473): unsure at all n locations
tctgatgccgggcggacgganaagccaccaattaacgcctttatcttatcggcagcacgtgacacgcacgcagggctcacctggaccggacagggtctcttttgctccctgtttccagcttccacttgtgaaatccgtacttagattagattagattagattcaaagcactttaattagctttcataagtgcctctaattagctttgcttatgcttgatcactcaaagctaanaagaggccacaccctggtcttctttaccccttctaccaattatggtgtttcatgaagcagaattacagatttatatagtgtgaagatgctgttcgggttctctttgcannatatcgagaaaaaagaaatcaccanattaggctgtccatgaagaggcanagtcanagtaaacaagaatctaaccgtacctaacactctcanggtggtgtaatatatgcgacatnaataacaatgaataac

SEQ ID NO: 31636 - DNA, 314 bp, Oryza sativa
tgagctagacatctcatcatatgtgaattgatgctccgggttagcctttttcctttagtacctcttcaacatgttgatcaatcctcacttattactccctttgctggggcaacctcgacgtgaccagctgagagtaccacctgctgctgctcgatcgatcacgaacgccctcacaaatctatcctaatctactattggtcatgggccgcgatgtcatcacggtcgcgctcgtgcaatcgtgtgctacgttgacgcgtactactactagctattgcctattagtactaggagcacatacgtaagccggtgagcgg

SEQ ID NO: 31637 - DNA, 247 bp, Oryza sativa
ccgaaccaaggggcgggagattgtcggcaacaacaaaaaacaaaacctcaaaatcaaaaccgtgatatgccaacaaaacatcgtatccaacgccacattagccatatgcgggcgctctctctcgtgcctttcttggactaggccgagtcagataactagtacgggctggtctaaatactctactgcttgcccttcttgaaattgccctgggctagctggcttggccttatagcagacagagctgtat

SEQ ID NO: 31638 - DNA, 435 bp, Oryza sativa
agtgcttgtcaagccggcaagcaagttgcatgttctcatcctactaaaagtatcatgtccacatctataccattggagctcttgcatatggatttgtttggcccaacaacctataagagcattggtggtaatagtcattgtcttgtgattgttgatgattattctcgctatacttgggtgttctttttgcatgataagtctattggtgctgagcttttcaaaaagtttgcaaaaagggcccaaaatgaatttagttgcactcttgtgaaaattagaagtgacaatggttccgagtttaagaataccaatatcgaggactattgtgatgatcttggtattaaacacgaactttccgctacctactcaactcaacaaaatggtgtagtgtagaggaaaaatcgtacattgattgatatggcaaggactttgcttgat

SEQ ID NO: 31639 - DNA, 415 bp, Oryza sativa
  unsure (1)..(415): unsure at all n locations
acacaccaccacagaaacttacttgatgtctagagcacattatcggatgaaaacgcacgttacagagcatgcaggcgctggcagcgctgtcaggtaaccatattgttcggtcagtctctaggagctcattcgcaatgccagcattggcatctgcaagcgtttgggccatatccttccaagcttcttggaagaaaaaactggacaacatagacataccacgtcttccaagatcatacgatgccactgatattaccttatcctttgccgcaacaaccatctcagaanatacatcccacatcgtcatctccttgttctcttcatctatcttccagttaaaatcagcttctggagagtagtcaccattatgaccaaagcccctatgccactcctcgtgatcgcgtttggcattggcggg

SEQ ID NO: 31640 - DNA, 442 bp, Oryza sativa
  unsure (1)..(442): unsure at all n locations
ggatcttaagcacctgcggctgcagcttctcggttttggctctgccgagctttaggcctaccccgagaagatacgagctatagagcggatgcgcccccctagcaagcttagggatgtgcaatgcgtcaccggttgcatggccgccctaagtcggttcatatcgaggctgggagagaaggcgctacccttatttaagctcctcaaacgctccgggccgtttacttggacggaggaagctgaacgtgccctcactcagttgaaggcgtatctcagctctcccccagttctggtcgccccggagccaaatgaacccttgctactctacttagcggcgaaccccgcaagtggtagtgcggcgttggttgtggagcgcgatgaggacaatcctcattccgcgcacccccaccctgtgctggcttggcccgggagagagcanggagga

SEQ ID NO: 31641 - DNA, 465 bp, Oryza sativa
  unsure (1)..(465): unsure at all n locations
ctaagctagctggtccttggtcgcaacattctcttcatgcgctccgcagttgggagataccacaccacctttgctgggcctcccctctttgacttacttccttcaccttcactctttgctcgtttgtatcttgatcccccacagatagggcagacatccaaagcagcgtattcctttgaatacaaaatgcagtcggtcggacatgcatgaattcttctgaccttcaggcctaacggacataatacttgcttcgcttcatatgtcgtctgaggtaaattgttccnctctggcaacagatcctttaacagctcaaggagttctgtaaaactcttgtncgaccagccattactagccttaagcttcatcagttccaacacgcatgacaacttgctgtgcttcgacttgcatccatcatacaacggcatctggcaatcttncaccaacttactaaacttctcataatct

SEQ ID NO: 31642 - DNA, 298 bp, Oryza sativa
  unsure (1)..(298): unsure at all n locations
agcttagactaacaccgttatatggctggtttttatttttattangacaagaatgcccttcctcaataaaacaccatttaaggcaacaagcaagaacatagtcaacaagcatcattttccttgtacagaatctagagtgagcgcagccaatttacaaatggtgttgatctgaggatgatattaatgaagacgaacttttcctgtataaaatctagagtgagcagccaattcacaaatgaaaagaaaaaaaaaggatgacaagtaccttttgctagctataggtcctccctgacatgtc

SEQ ID NO: 31643 - DNA, 195 bp, Oryza sativa
  unsure (1)..(195): unsure at all n locations
tacctcacttncncctatcttggtggccccggggccagaagaactcttattttctacttggccgcgaccccctatgtggtgagtgccgccctattagttgagcgcgaggaaagcgaacgagaggcccctttggctcgcgatgggccctcgtcccccgaaggcctagtgcccaaagcacccagcccccgggaggac

SEQ ID NO: 31644 - DNA, 459 bp, Oryza sativa
  unsure (1)..(459): unsure at all n locations
gcttcagaaaagaccctatgccgtggcgaggtgtttttgcttatctntgggataatctaatttttagggttttattaaatctgaaagtgatgtcactttatagatgactagagtttttacggtcatgcctttgtgccccatttggttgagctcgacagtacgggttggagcaaaagaaaaagaaaggaatgccgtttggtacaaatcctagtgtcatggacaagaacaggctagcttgtgtgaaaagaataactagtattgctctatgctagtatcataatccaagatcttgtaaaaaaatatgtctttcatcctaaaatatacttcagtaactactactactactgtatgataccattaactttgtcttattcaaaaatattatggtaatataattaaattttgagttgttntatcatttanaactntaagcatgaattatatcttatacattatata

SEQ ID NO: 31645 - DNA, 386 bp, Oryza sativa
  unsure (1)..(386): unsure at all n locations
tgacttcagcagcgggcgactccactccacaggcaatccttgtactgttctactaaaccaactntgacaaaacagctccaactaggaagatcttcagctctggtgtggggaaaaagagagcaagactgagtactacccactgtactcagcaagtcataccggaagaggaggtatgatgcacgatataaccaaaggaggctagaggttcttttgcataaagctagcattaaaaacagtaattgaagggcagaaaacacgtgtagtaattaatcaatattaaccaaacactgtccaacgctaccccacgttgcaacaggcccaaccaaccacctgaactacaccagttcattaagctanactatggatgagactaatcaccgtgaatc

SEQ ID NO: 31646 - DNA, 119 bp, Oryza sativa
agagcaccgaggctgcagctggaaagccttcctaagcagaatttttttttatgacgctccaggggggaggcctttatcattggccctctccgctcgcacggggggccccatgcacctac

SEQ ID NO: 31647 - DNA, 411 bp, Oryza sativa
  unsure (1)..(411): unsure at all n locations
gcgantcacttctacttaataaacagtttttatcaacggatcaatgtccgggtaatcaaatcaaatgcgactcaacaatgatctgtagtatgtgtacctgtatcacaagcagagagttaggacaaggatgagcgcgacggccgggaagtcgagcgcgttgtagcccttggcgatgccgtcgacctgtgatcctcacgcgtccggctccgtgatcccgcacgtcgaggccaggtagtccgtgaagctcctcgtcaccgccgcgttcgacagcacgtactccatcaggatgttggctcccccgaagaaccccaccagctcacctgatgagagcaacagatggagtcaattaaccgcgctcgattgaattgatccatcgatcgttgaagagtgcgttggattaattcaacaatg

SEQ ID NO: 31648 - DNA, 354 bp, Oryza sativa
  unsure (1)..(354): unsure at all n locations
gagcgcaagctctctatatatcttccaagattcggttgactcgctcggtctgaccatcaatatgcgggtgataggccgatctgaaattaaacgggtccccaattcttcctgcagcttctgccagaattntgaggtgaactgactccctcgatcagatacaatcttttngggtactccatgtagacacatgattctcgagaggtagagcttcgccaaccttttgcccgtatacgtggtatgtactggtatgaagtgagcaaccttaatgagtcgatccacgactacccagattgaatcgtgactcgatgatgtccggngcagtcctgttataaagtccattccaatctcctccca

SEQ ID NO: 31649 - DNA, 478 bp, Oryza sativa
agcttaagggtagaccataagaatttttaatatatatcatagctttgcaacatgcatgtacacttttaatcttgagtaaatatgtgattttttccttagtgagtcccaccttaagatcaaaaagagaccatatacttcctccgtctcataaaagaaacagtacatgatgacatttcatctgtcatcccgggtactaggttggttttttatgggacgaaggtattacattgtattatgtaggatggacaaacacaaggacgtcccgtcttatgactacattgattttaaacattgaggatgctctaatgcctctgtttgatttatattatttggcagagtataatcatggatcatctacttagttatagggataaattaaatatttcagaagtatacttaacaatagaagattaaaaattgatcaaacaatacactaaaagtaattctttttttgcaaaaatatattcttcagagcatg

SEQ ID NO: 31650 - DNA, 508 bp, Oryza sativa
  unsure (1)..(508): unsure at all n locations
tatagccatgaatcccttttatgcatatctggatctggatcctgcagaacaaacatatatgatgagtagtatctgatataaatataatactcgagaaaaattaattcaagcagtttataaatacgtatttcttctcttggtaattttgatttccccgagcagatgactcattacgtttaaacactctgcccgactagtcatagccaccaagcactgggagtcggcctaagcacttnctagacatgcatatgagtgacatgagttcgtcattaatggaacaaagtttcacggatcggagtttactactcgggtacttntgcaattattaagagcagaanataaatttatctcatctctatngctttngattattccgaataatacttagcaccttgcgttactcggtccatccaacgagcccncgggtgctatgaatcggcccanaggcaaccatccatttgcanaccannacggaagcataggaagatagaactccataactcgatag

SEQ ID NO: 31651 - DNA, 377 bp, Oryza sativa
atgacaaagaggcaagctgttgaggccctcgatatgagcattagagatataatgggttgtccacgttctccgcttggagggaagacgattgtgtttggaggggattacaggcaggtgctcccggtcattaagaagggcactaggtctcagataacaaatgccactctacgcacgtcctatctttgtgattgtaaggttcaattgaagcttgttcgcaatatgagggcgcagagcgatgcatggtttgcggactacctccttcgagttgggaatggaaccgaggaggtgaacaaggaaggactcataggccttccttcggatatttgcgtgtcgtgcatagggaatgaaacggacctataaaggctcatcgataccgt

SEQ ID NO: 31652 - DNA, 494 bp, Oryza sativa
  unsure (1)..(494): unsure at all n locations
gcttaacgttgcggccgatctgagtcnaaaacatctctggatcttgctgttggtaagtgctcctgcattcttcaatccgaaaggcatagtgatatagcagtaggccccaaagggcgtgatgaatgaagtcttcaagcagtcggattccttcagtcggatctgatgatatcccgagtagcaatccaaaaaactgagtagctcgcagcccgcggtcgagtcgaccacctggtcaatgcgagggaacccgaagggatctntgggacaagactntgtgagggtggtgtaatcgacacacatgcgccattgcccggtcttcttccgaaccaggactggngtagccagccatcgggatgaaggacttctttaatgaagcccgctgctaacagcttggtcaattccttcttgatcgcgtncttcctgtcttgtgcgaagcggcgaagtcgtngtttgatgggttagcgtcttccttacatgcaagagtgctaatcaccttc

SEQ ID NO: 31653 - DNA, 331 bp, Oryza sativa
ggaaggtgacctttactgatgaattcggcctccataagatgtgccacctactcgcggatgaaggcttgacgtttcggggcctgtcggcgcactttctgccggaccggccttgcgcccgggcgcactgagagacggggcttaatcaccttcctgtggaccccgggcatgtccggcggtctccaggcgaagacatccgcgtttgtccccatgaaggagactagcgcgtcttactatatgtcgtccagaagaccacctgattcggtggccttggacgggccatctgccagtgctaccttcttgatcgggacctcttctcacgtgaccattcgct

SEQ ID NO: 31654 - DNA, 381 bp, Oryza sativa
  unsure (1)..(381): unsure at all n locations
cagcttatgcccccncccccttcccgcctcttgcttgtcctctttgcatgcggcacgggtacctcggcgaccacggtgcgtgcgggagcgggtctttcgtttggtgatcttttgattttgtggngggatatgtttttgttttgtatcttggctggatggatggcttgctcaccacctgtttgatggaatgcagaggagcgcggctggaacatcggcttcaggtgcgttctcttgggggggttcctaaggttattcatgggctcgttggagcttttcctttctgtctcttggattccggcggacctgaggggctcaatgtgttccttttcttgctctgtattaccgtgtgctgtactttcctcatcgttgtttctgaatata

SEQ ID NO: 31655 - DNA, 470 bp, Oryza sativa
gctctattagtgtgataataatcatgacattttcgtgctaattgagcccaggttaaaattgatattgccggcttagatagtaaccatgtataagcagctccagacaaagataaaggaaacaagcgcaatttacatgtatccatattactagtctcaccacattgcgctaagaattgatctacatgctcccatgtgtgcctactatcctcaccactaaacttggtaaattcaggaattctataaccacgaggatgtgggatcatatcatagaattcaggatacggcttttggtactccctagcacgatcctccgcttcaatctcaaatgtattcctaataataatactaattaactccttcatatctttagacctatgtggatctggtggtgtatttggtggcctaagaggtggttgttgggcgcaatataatatattgccatacctagatcgggaggatatcctattata

SEQ ID NO: 31656 - DNA, 199 bp, Oryza sativa
  unsure (1)..(199): unsure at all n locations
ggcagcagctgctgcactctctctagccggngcatctctcattggccaccatctngctntatccctctgcatgataatatgcagttcacatgtaacggttgcagcacttatattacagantaccaacagaacaacagagtttcatccaaagtcgcatggcatatacataggaagtgttaaaatatgtctatcattttgg

SEQ ID NO: 31657 - DNA, 382 bp, Oryza sativa
tgtatgacaaattacacatcggtaaaatcattatgaacactagatgaccaatggttcaagtcaaactacctacatacgcgattgagaatgtgctagtttgtaaactaggtgtacaatgtcttcacaaaataatctctataaccagcgctaaacagatgtcagtttttcacagaattaacgctataacagtactttagaataactcgcaccgctcttaacttcaaatcaagctttgaaatgtgttctacccactgaaatagactatataagaaagacttatccatacaagtctttatatggggataaaattgtgaactaacttgacaggatctgtacaatttatgtttctgcatacagtatccaagtttcacacttggaagaa

SEQ ID NO: 31658 - DNA, 503 bp, Oryza sativa
  unsure (1)..(503): unsure at all n locations
ctctagaagattcacccaagatcttcatagactgcgaccaacagtcaagctcacaaaggtgagttctttcaagaatgctctgcaagacaacatctttgctaattaaagccaacagaactcattaaggcatagccaacctgccttgcagctcacgagagtatatgcatcttcacttggagagggtatatatattggtactctcctctagtttattaatgggttgcntcttccaggatctaattcacgggatctccgatcacatagactgggttaccaccatagtataactcacatgggtctcanacccatctccttcgatgcattgtctatcacatttcgngatagtcccttcgtgaagggatctgccaggtttctcgctggttggatgtaatccaacgctataactccggagtgtctaatttctgcagacttaatcgctttcacatgctagagattcatatatcctagaactatcacttgcaataccgttgatgcacagtcat

SEQ ID NO: 31659 - DNA, 312 bp, Oryza sativa
  unsure (1)..(312): unsure at all n locations
cagctaaactaaatatggactaatggagctaggatacgttggccattaagntgctaaatcaagcggcacacccctatcttcagaatccagtgaagatgagcatggtgctttattcatatcaatgaccgcaacaatgaatacaaagggaaatttaatcctaggttatttatgaactagcaaacttcatcctttgaacacgttttgttcgtgtggatgaaccaaactccttttcatttaaccaacttaagatacaacaccaaatgacagatgctaccatgcaagatcaccacatntctatgttacaggaagcag

SEQ ID NO: 31660 - DNA, 356 bp, Oryza sativa
gctaagatgccgcttaatatatgtgggactttgttaatagggtggcgtttaagaaagataattagcacgagaaaactagaatggcagcttaagatgttgcttctatatgaaaaatgaaacaattaaccatctgtttatcgattgccattacgcaaaattcatatggagagcagttcagatttcttttgggctatacgcttctactaacaattcttatatttttgatgggtggctgttatgggtggacaagaagaaaagtacacttatattgctgggagctttctgcaatatgtagggctctgtggttgtgcacgaatgatattggttgtgataaatcgccatctatttcatatatg

SEQ ID NO: 31661 - DNA, 505 bp, Oryza sativa
  unsure (1)..(505): unsure at all n locations
acactataaatactaagcttnctcttgttcccgagcgatatcacggttggtaacgagcgatttatggtgctagcggncaccgngatgacccaccgcacggagttcgacacagactgtggacggngccctcgttcccgccggcgaacaccaacggtgatcccccctcgccacgggtgtgcaagcgtgccggcgaccttaccgtacccttccagcgacagcgacagcacgtccacgccgtcgtttatggcagtctttatggccgcgaggacggacgcgtcccacacgtggagttgctgtcacccagcaagctttgagaccgcagcctcgccgcggcgcactccgcggccatgcccgcggncagccgatctgcggtggctacgtccacacctgccgccacatcgtcatgcaatggcgtgccggtcgctagatccatgtgactgactcacttcatatacagaacatcttctccgcggcgattcacatgtcccgagcataaactgggtaa

SEQ ID NO: 31662 - DNA, 461 bp, Oryza sativa
agcgtcaggctatgggatagtttagttggtcttttactctatgcaagtgtcaagcatgtatgaagataagtatcatagatggattatattctatctatcactttgtgcctgaacataaccataatcttgccactagaagtcatgctcatcagtttagatcacaaaggaagataaatgaagctcaaattgcaagcgttgaagtcgctaaatccgtagggatttctactaaagcagctattgattcgatggcaaaacaagcttgtggatttgagaatctcgggtatactcgtgttgacatgaagaataaattatactctcagaggtcactactaaccaaacaaggtgatactggaggagtgttagaatatatggagaagaaagcatcacaagatgtcaaagttttttattctatataagttgatgaggatgtcttaattacagaccatttctgcgctgactct

SEQ ID NO: 31663 - DNA, 376 bp, Oryza sativa
ctgcgtggcataagcagcgacacgcgttcttatcggttacttctgcccatgtgggctccttgcaacggacaaccatcttccataccgcgaacagagactactcgggccaccgaacctggacgaatgcgaattccggcctaatcaagccgagcagagcacccggtatactgggaaaccaacgcgcggcgccatctgttttgcccaaccccgtacttctctctacacaggctactgccctacttctctatataacccgcccctctccttccttctcatccttaacacagcatacaatagttcactgtcaaccaaaagaagaaatcacaaaccatccggtccaagtctcagcaagaaaaagagatcgatccaatggcgg

SEQ ID NO: 31664 - DNA, 354 bp, Oryza sativa
  unsure (1)..(354): unsure at all n locations
tcatcaccttccttgctcacacgttcttgctgctgccggtgattgtggcatatctcccaatgtgtacgtctcanattatttcaggaaagaagcaatctttcatacatggagtgaggagatatatgggttcgggatctcacgatcttacacaacgctgagtgcccaagttttttatattccagatccatctaagttaagggtgaaaaagggtcgacgccaaactagacgcatcagatatgatatggatgagtcagaagcaggtgggaggactttacgctgcagcaagtgtgatctgcgcggccatacttacaagaaatgcccgaagaatgcagaagttccaagcggcgctgatgc

SEQ ID NO: 31665 - DNA, 362 bp, Oryza sativa
agcttcacattctctataatatttgaagcaattattaattatcttcggccaatagaactccgctcttctaagcaatcaattcatcttgtgggccgattgatgagttccacaaattccttcatgtacctctcccatagccactttagattgatcttcatctaagcacttcaacaagacaccatctatatttcggcggtataaatcctcatcaagcaatgtgtatttgaacgcttgccgcagaattttccgatcaaccttaagtgtgggatttttcaaatatcgaatcaaaagaattctccaatctccttctgcttcctgggcacaaatgtccgaattcacagttaattcggccactatattga

SEQ ID NO: 31666 - DNA, 484 bp, Oryza sativa
  unsure (1)..(484): unsure at all n locations
actaagcttcagatgagtgctttattaactccatcctctgtctgtntatttgctgtcttatcatcacgctggggagcagaagatgataacccaaacctttgaaaggctgaagtcgagtacagcctctgctgattcaccagaggcaaggcctgagcgtataataaagggaacaattattcaacagtccggaagatgaaaaacaagaccaaacaagaataccctgagcaatgctacaaatacaatggatggtgcagcttattatgcctgaaacacctaatgagccgatgaatcaacataacaggctgcttccagcgttagatnttaatagctaagctatgccaaaggctatcagacatcgttatgtcatcagcaacacgttactaatgagaattgagcattaatcggtacttcgcaaatntcgtactgttattaagtatccccagttgaacaccgcagtattccaccacgtatgacacgagtactg

SEQ ID NO: 31667 - DNA, 342 bp, Oryza sativa
  unsure (1)..(342): unsure at all n locations
ttggagaagatgtcttaggtggagtcctggcttatactcccattgagcgcctgtggagatggagccgtangcccgctagtccgctgctgtttatttttgattggccggccttatagtgtccttgtaataatgtaaatattatcgatataataaagatgtgcctcttgtattatgtttgtttggtgtaccccggcatttcctgggatggggattaatacactagcgttcgggaaaaggcaattttctctgtcgcgacacaaagggccggtgtcctgctgctangngctcaatcctgcctacctgtcccggnggttccggccgtaggtggggttgggtcggtac

SEQ ID NO: 31668 - DNA, 509 bp, Oryza sativa
  unsure (1)..(509): unsure at all n locations
ggatcttaagcactgagctgcagcttatgtgtttctttcttataacaggaatcaaagncagagcttcttcgcaatcagatgcttgtaaggattatttttttatgcatattacttcatctttcactgcagaatcacatgttagatcattctatttcttatgccatgtctgttattactcaattataatggaaagttagggtcaaaattatgctgagcattttcatggatccatatgcttttgtatttgctttgagctagactctattcttgatgcctagcctaagaccccatgagtccatggcatgtgagcacaaccagagttntgctttgtcaacgacattcattcatgaatttatatcacacatgttcaggatgagtagagctagganatacaaaagcannaatgagaacacataagatgcacattgtatgctctgacacgaagagaagcctctanactggatagttgctgaatctgctgacaattcagctctatgatggaagtagta

SEQ ID NO: 31669 - DNA, 132 bp, Oryza sativa
  unsure (1)..(132): unsure at all n locations
tcctctcttcttcctccctttctgctccttgccatctaacgtcgncgacgctcgccggcggcgaggtgtgatctgtgaccgatcatcgatggggcctcagcaagaccggtcggcggccaagccgtacgcgaa

SEQ ID NO: 31670 - DNA, 319 bp, Oryza sativa
agcttatgtcgctacctgttaaatgtatgcggtcttatgtcctaatacaactcgagtccacgggactctaccaaacatgatagcgctggtgttgtaacctaacttgagccttgtgccatgttatagactatgcacatctctgtagtgtctcactccacctacacgaatatgcagttaacactagctatattatcctctattaatagctttgaacgttctactaaaccactgggccttgtataggagaatttagccaagtgccattcaacttgtctctagtcctcgctcgaatagatggcgactattgattcagagcccc

SEQ ID NO: 31671 - DNA, 376 bp, Oryza sativa
  unsure (1)..(376): unsure at all n locations
agctttagacaagcgagaaacatgattgggaaattcatagttttcaaaaccgggtgggtgctttacataaacttcctcctgtgtataaccattaagaaaagcacttttcacatccattagatacaatttaaaaccttttgaagctgtaaaagtcaacaaaagtctaattgcctcaattctagcaacaggagcaaaagtttcatcataatccaacccctacatttgtgtaaaaccctgagcaacaagcctagccttgtttctcacaattaaaccatcctcattntaaaatccatttagttccaatgatattatgaccaacaggaggttcaactaaagaccaaactttatttctttcaaaattctcaagttcttcatg

SEQ ID NO: 31672 - DNA, 418 bp, Oryza sativa
  unsure (1)..(418): unsure at all n locations
tctaggcctcaccctccatatctctcttacatgtgggaccaaattcttatgggacccatgtgtcatccaatcacagccaacataccatctactcatctctcttttaatctttcttttatttctcanaaggtgagataagggttaaaatacaattctcaccatataatttacattactactcacacatgcctagagtacatcttcaagggccctttagtaattcacatgcaaccaatcaacattagttaatcaccccttgaatctatctttnttttttacaaatggaggaaagaaagagagaagggttaaagtcaactttcaccanaattcatactatctctatagtccttctaggaagcatctatatgggcccattntctatccattcatcatccatactaccttggtgaatcacctc

SEQ ID NO: 31673 - DNA, 428 bp, Oryza sativa
agcttgagacactggagctcgatctatctcgttgtgccacgacttgctacgcgtatatatgtacgcagggaggcgatggagtccttgaacatatctgatggtgcaatctgaaacctcgatgaagcgtgtattctcgagagccacagcctgcagttctttctttcacactactaactttgattatacctccgatgcttaacagcagcagagccgtgaaatgcgaaatgttggcggcacatattgctacttgctatacactgaaagtgattgggcatttaagtgtaacgggcaacacccaataccattgaagcaccgggatattggccggagaaaagtcaacttagcctcaatgtcccaagctaaatcctcctaacaaaacagaatgagcgcctcagtctaaacaggcctctaaacatgcaaaaagccaa

SEQ ID NO: 31674 - DNA, 310 bp, Oryza sativa
  unsure (1)..(310): unsure at all n locations
tagatactcagcttcagctacatgcagcatcgtcgagctcgcaactcatcttgtgtggnttggacagctgcttcacttattcactgaaggagctgtcatactggatgaagtataaagcctgatatatataaaatcatacttgcgtcaggacagcgtagaacaagattaagtctttccttttaacacaaagcctgatgngtgacctttccatatctcttagaagccctggcgtactttgtcatcctaaaccaagcatgtccttcattctttcttttttgcagcgcttgaatcttctcgagaatcttcttca

SEQ ID NO: 31675 - DNA, 421 bp, Oryza sativa
  unsure (1)..(421): unsure at all n locations
agcttaggccaagtntaccgtgctacacttatataaactggcgaggatgttgctattaaggttcatgtttgcttcattctcttgtatttgtttactactttagtactttatttcttttgtgattngagatgatcgataagttctatgacttgatgcttcatttttaccatgtgcctctatctctatcatggcccatggatgagtacaagcgtcgttctcaccctaatgaaattcgtgaccattttacaccttatgagttgtgaaaaagaatttagttaaatgtttatacatgcttcagtagaatgtccagtcgccgactctatcagtagtgtcttggactagtagtttgtgacattttaatggttggtcttggactcatgcataatataatggttattgttgggcttatttattgattact

SEQ ID NO: 31676 - DNA, 392 bp, Oryza sativa
  unsure (1)..(392): unsure at all n locations
tattaggacactatgatactcagctaacgtgtaacatgtcatctcatcgtccattactaataattgcgtactaagctccaacaaacattgcagcatcatctacaattcattaaattatgcagataanagtgctagtatattcaaccatcaccattcacattatgttcataatattntcaacatacatatccaacatttttataatacttaacatatatattcatccatgtaatagaagcgtgggatatcataattcatccagaatctgctacagaggctataaagttaattctctcttacatagttancaaacctgtttatctgttgtaatatcaatattttttttacactactcgatattgaagaacatattaaaataccccttagtattt

SEQ ID NO: 31677 - DNA, 286 bp, Oryza sativa
  unsure (1)..(286): unsure at all n locations
tttttactcacaccacatggattgtgttaattaatcgatggcatagaaataactcccgtttacgcagtggcgagttacgatttaccgaaccatcttatccggtgtgagatagactcatcgggtgaaaactccttcagctattntataactcatcacaagattaactcttttatccgctggcattttttttagtttttcttcgctgacagatacagtgcgtatagcagcgaatcttcaggcggtagtcattccaaaacatctcatttaccgtcttctccgctcatta

SEQ ID NO: 31678 - DNA, 386 bp, Oryza sativa
  unsure (1)..(386): unsure at all n locations
agctttgtccatcgatatttcttggaatactttttgaaaacaaaatatcgaatttctaatgtctaattgatttgtatatgccctcaaataattcttcatattagagccggttatattttaggatatataaatgctataaagctattataatatataaaccatctcatttatatctataacgcgcgttggagctgtatataattgttcatttcacagggagagatctactattccatcacannaactctttttctaactgtttagtaaatatttctcatgcatggtatggattttctggcaatcttatgaccaaaatgtattggtcacctacctatgcgtctctaatcacatttaacaagaaaatgactttttgtcataaatgctta

SEQ ID NO: 31679 - DNA, 373 bp, Oryza sativa
tgttgcaacatgggggaatggccaagcagctatatgttccttaccatgaaaccaaagatttgtcatattaagggccatccttcctaatataaatacggtaagatgtgaccgaaaaaggagtttaatattgtttggggaccaagagctttcgtcagaccatcagaatcccaggttataacttcaccatacatgaagcatattagtataaacgagatggaaatacacatggatgttcatgtaatatacgcctccactgacaaaacctgatgtattagctctcgtcatgagcattaagattactggttctaaagtgcaaatgatgatattgttaaactaagcaaatcaagggccaagcatcttaagctcaccagaa

SEQ ID NO: 31680 - DNA, 67 bp, Oryza sativa
agagggccggacgtggccggaagacgctgtaatctttcggccgacctgtggagtggggaggagagag

SEQ ID NO: 31681 - DNA, 452 bp, Oryza sativa
  unsure (1)..(452): unsure at all n locations
catgcaagcttaagctatatgtacagatgaaactgaatcttcttattgttctntgagaatagcccgtactatcccttgagtttcactccggggttagtttaatctctgatgtttcattttatccaaacaaaccgttgaaatctagcatttggcttaacgcggtcgtttaaccgaacaaaaaaacaccacgtggcattgccatgtcatcctcgcatgcaaggacaacaatcaaactaccattccatccttatatatacaccatattgcagaaaaaggaaaataagtaacaagccagaaactcatgacataaattatatcgggtgggctttctatgattttaccttttcacgtcatttttttcttgacaattatactcctcaacgtgtttactattatcaaacgaggtggtactataaatagatctaaacccttacactaaattaggtctacaa

SEQ ID NO: 31682 - DNA, 394 bp, Oryza sativa
  unsure (1)..(394): unsure at all n locations
cctcaatatggtcaactttctaatagtttaatgaaggtgcttaaactcatgttgagtttaatcctttttgacctacaggatatatatttttagattctactgttatgctaatgaaagtaatctcatatattgcctattgagctgttatttctcaaatattgcacattggnttcttttattctatattttcattactgcattctatggctcgatatttcacacatagttatatttattttgctgctgcttagacctcatagtttgacttttctctattgttgtaaattagcatataaagaacatggtgctgcttgaatatcttgtcagcacccttgaggctgattttgtacctcgtcagagtgcatataaagggtaggtatactcatgagtcatg

SEQ ID NO: 31683 - DNA, 404 bp, Oryza sativa
ctcacacaaagagatcgttctcgccttcgttggctcacacatgaagccgatgagcatcatgttggcattattcagatcgccacaactttgcaccctaacttcttgaataacgggtgcggatataataattactaccacaccttcaaacaccaacattttatacatcattctccaatcaaagtgccctttgacatgaatggcctcatatgatggttagactcattacacttctcgaagaccacatcttgagaaatttcatgctcatccatgacacacaattccatccgcaatgcgcacgccatgttgacatccatgttctgacttggcagcgaagcattgctaataaccagtgacccacctgcattattgtcctcaccataggatagagctatcaatcggttctc

SEQ ID NO: 31684 - DNA, 349 bp, Oryza sativa
gctttgcaactataaaacatgtgtaagctctattctgttatagacaagatagctgcgctgctgacatgcggaccccacatgtcaacctaagggaccacggtggaccgggtacacaaagacagtccacgggtcgacgaaagcggacctcgtgtgtttaccgaggcaagtggccgacaaacggactctactagacaccacgtgggctgcacacgtggaaaccacgcggctaccgagcgggcacactaacacggtcaccacacgcacacacgaacgactaccgacaccggtacacgggtactggggtcgacaaccacacaacgggcacggggcaacacctataggactaaga

SEQ ID NO: 31685 - DNA, 354 bp, Oryza sativa
  unsure (1)..(354): unsure at all n locations
gtcaagcttatgttgcaacctagagccactgtatgatgaaaagaacaagaggagagggaaagtgactgaattgtccctccacctgccttacttgatagaatggaacatgggaagttgtattatgtcctttttttgcataaagacatctccaaggagagttctttgatcccagctttgataacatgtacaaaccatttgtcaagaacagctgcatctatgttcggacaggcaaacagttgaagtttaaacactttgaccccaatgccagagtggttattaataatatggtcaattntactgatggcatagctttccatgtcatccactttaagcgctggctcatacaatggcaca

SEQ ID NO: 31686 - DNA, 345 bp, Oryza sativa
tattaaatggataaagggcttaacactcctcttacacttgtctttaaatgccgcgctacaaacctcaatacttgtttggtgtagagaggtttgtccaagagttgcgtacgaagtccttcgtcattggatttggactgcccccttctatgcccacaatcctcatgatcgtcatgaaaaagaggtggcgaatcaaagtcaccttgaacagcaatattgacgatatcccctcaatgatgatcgaaacttggagaagaaactactatcatgcctgtcaagagaggcaaggatccgcataagagggctccggaatcctacactgacagtggccgaccatgatattgtacc

SEQ ID NO: 31687 - DNA, 361 bp, Oryza sativa
gagcacaaactaaacatatgtgaagcatagattgagaggcttaagatggaattgggtgcattgacagaagcgaacgaagcagcttgcgaagcatttgacactcaaaatgaagaaatcacgaaggagctagaggatcttaagacaaagttggaggaaatcaaaacaaataaggatctagcggaaagtgaaaatggtaagcttcggtcggagcttttgtcagcagaggagaaatacagccagtctgaagcagaggttaagtatcttaagcaagtaatgggagcagtggtggaggcgaatgatgcagctgcaaaggcatttgctgccgagaaggaagacattatgaaagaatcagacaatctta

SEQ ID NO: 31688 - DNA, 290 bp, Oryza sativa
cgacattacacttagactgatcacctaatcctctaacattccaagatatgatagaaaggctgcgagaattagatgacattatgaaccgtattggcaccaggacaacttaaatatatggaggcggaacagctaatggggaaagggaaggacagcaaaataacccaaccccagacacgtctcagtctaggccactccattggagacctcagcgagcaccatgttgagctgaaggacgtcatggtcatccaaaccacaggtgacagcaagatctttgagtgcttcccgtgtgg

SEQ ID NO: 31689 - DNA, 367 bp, Oryza sativa
  unsure (1)..(367): unsure at all n locations
ctgacttggtgtgaggaggctggtttagcgatgtctgccctgttcaaccaaaggaaggagcttctntggtatatacccatggacaattcagggcataatgtccttgctctatacaattctgacaaaaggggacatcctcttctggcataggaagcttattgacctgggatgctaatgctcgatcaaacacatactgattatggtcttgacttccaaccaatggtagctgtgaaccaaacaacatgctcggaatggaccacaggtgtgcccatgttcactctcttgacgccagtggtggattgagatgataacatgatttacttgatgcatacctgctgacaatctctcctttttgtatgtaaacatc

SEQ ID NO: 31690 - DNA, 337 bp, Oryza sativa
agctttacatgcactttctttaggagctgtgttgcttgtgaagccggcgttgtcatcgagttgtttacgccgccgccgtcgcgtgcttcaattgtcatgaccttggcggagcttctcctgcgaacttctcttcgcgggaggtgccgtgcgccaccgtcgctatggtccactgcgctgccgccatggatcgccgccttgtcacctgcgggaatttcatttcatctctctttttctttgacagagagaattgggtatattttgcactgagggcgaaatggtcattattaaaaagtaatggttgccaccgtgtggagttgatggtgatgggcatttttgg

SEQ ID NO: 31691 - DNA, 482 bp, Oryza sativa
  unsure (1)..(482): unsure at all n locations
ttgagccctcttcttaagtnttttagcttagcattcaagatgattgcatgggtatttcctctaacaggaatggaccaacaatgctgcacaacatctgaaaagcctgngacatttattcaaaagttctcaaacctgaagatataaaattttggcactgaagtctcaattgaaatttgacagggcacatgatctgagatgtactttgagggtgctgtgaccatggtgtgagggaacttaagagtccaagctattgaggtaaaaacccaatccagttattgcagaagaggctgctcttgcatattgctccangtgaagtttcttcctttgagagggatttctactaagcctgcattgctgattatttcattaaagatgagaatgtcattcatgtctcctcctaggatgtttctgttctcaacagaccttataaaattgaaatcccccattataatcccacactgatctggctctatgtctagctc

SEQ ID NO: 31692 - DNA, 425 bp, Oryza sativa
agcttgctggtcacaagatacgagcagacttcttcttctcaactgttctgaaacctttgatggaaagatcccacccagtagctggtacagggtcatgccgaaagtgccacacttacgtggcatgaaggatcactgctaatttcagagacagccgccatcatgaagaaatctgtttgttaaataatctcacattagttgtgtaatggcgaagaatctaatcctatcttactatagagttataacccactaaatcctaaagctcaacatgcaaagataccaaatcatcatgcattaacaagatgccacatcatcatccactaacaattactacatttaaacatcatgcaagcattgtatattatcttaaaattataacttattaaattttagagtttaaaatggtagcttgttaataatcattccca

SEQ ID NO: 31693 - DNA, 365 bp, Oryza sativa
  unsure (1)..(365): unsure at all n locations
caaaatgtcatggaacaaacccagatgctctgatgattgtggaatgcatgcggaaaccctctctatggaatatatacaatctggtagntccattttccggcactcccataacatctgggtggaaggagaaggcattctccatgctgtatacttctgcaaaagtaataacagcacatggtcaatctcgtacaataaccgctacgtgcaatctgaaacatttaggattgagaangaacgtcngaaaccatgctttctccctatgaccgatgggaacccctccgccatgctcattcgctctggtctttacacagtattgtngcctgctgctattacctacatcgcattcttttgtaatttttttggga

SEQ ID NO: 31694 - DNA, 454 bp, Oryza sativa
  unsure (1)..(454): unsure at all n locations
gaccttaagncaccgcggctgcagctgctgcttgctcgaataaatgatctcttcttctctctccggcctgtaagagacaaatcttaaatgagatgtgacacattctaatactacgaatctggatattaaaatatagatattatttttttagacgaagagagcagccattaacattgtacgacatggatgcagctatgaggttcatcttacccagtggagcttcggaggagggacgggatgactacgaaccaaaccatggtgaacaccaacctccatccaccgaccaccgacctgggtaactttgtcactagcttcgccgggaaaaggctcagccccaccgacctcggtgtactcactgtgaattaaagctcccatttctggttaataattacatactcgtttccctgagtacgatattctaaactacattttgtaagattatatatcatatttt

SEQ ID NO: 31695 - DNA, 327 bp, Oryza sativa
  unsure (1)..(327): unsure at all n locations
ccccttctcttcatatgagagaggatttggcatttttttaagtcaagattatcgaacaatatactatatattttccatgcgaaaccggtttgttatcgaaacatattcgatttaaaattaataacactagtttggtattataaatgggtgtaattntattctataataaacttagttaaacggcctagattcatcatcatttcgcagacaaaagctcggaaagaactctagcttggaatctaccgttgctgccgcgcgcaggctggcttaccccgcggtggccgcaagtcgacgggaccgggagacacgatcaccgcgagatcagct

SEQ ID NO: 31696 - DNA, 476 bp, Oryza sativa
  unsure (1)..(476): unsure at all n locations
tattacgagctntgctcgcacatagattactccatcccgcttacagcatgacgggtttcggtgccttcctccatctttaaataactgataactttagctctactatttgaatattgactagtaattactctgaaatggttagagtaattgaataaaagtttcatgttttatgtttagaatataatacaattcaataacatattattccttttagtccttgtaaatatttagtaaaacgacgagtggctaaattcaaaagggaatagtgtccactatcagtcatttaaaaacatagggagtattttgtcttttgttttacatcattggcaagtatgaggaagctatcactgaattgaattgtcaaccagtagtaacaattctcaacttatgaaggggaaaaggatgttnngttttttatccttcggagttccaacaatcacggcccagctaaagaggggggagcagcgagcggaaat

SEQ ID NO: 31697 - DNA, 320 bp, Oryza sativa
  unsure (1)..(320): unsure at all n locations
tatatatctcaggctgtcagcccatccgacgagcgagcgccttatactgttacccttcaacacttgtgccacgcctagtcggacccaacacgccaacaaaaacgaattctctcctgaccacattataattttctcgnctcttcctgcctctaaccagntnttaccgcttcaccgaagcgccagcgtcttccactgaccgcgccgtcattccggacgtacgcgcgcacacgccacgtaaatcgtactgcctaaaccaggcctaattgccatgccttcaaactactccggggcncanttcaagtcgtcgcgactcgcgaccc

SEQ ID NO: 31698 - DNA, 371 bp, Oryza sativa
agccttaatagttcaatagaacatacagaagatattttatatgtatgttgtcgctctggtatatacttctgccaaagctctgtcacgatttctagagctctgtgcctcccgaggtgagtaatatggccctgaacctatccctccaacaaatgagaatcactaatattccataatagaataattaaaacttatcacctacagctacattttttccaatatattggcaccttatgcttcactaaaaaataaaatcaaaattacacctacttgctcacaactagattaactgtaattgaaacacactttccttcccaaggtccccttcaaattaattgcctcatcccatgagcacactttcctaccgaagcact

SEQ ID NO: 31699 - DNA, 265 bp, Oryza sativa
aaaaaggaagtaccgtgattatcggatctaattacgtagaagtgcagctgatcacaatattctcccgattatcggatctaatcacggcttcgcgacggggaaaaaagaaaatgaagactattgccacgctaaaaacgaaaaaaccaatcggatgggctgctagtgagtacctggaccgcatacagagccttggggaaaaaaaatgcacgcgacttaagctaatggcgcgtaatcgccaactagcaattctatactcgttttctct

SEQ ID NO: 31700 - DNA, 418 bp, Oryza sativa
  unsure (1)..(418): unsure at all n locations
agcttgngacgagaatctaccactataacacgtgttctttctctcaagttcatgagcatgatccagaatcatntcaacaactgacgatgacccatatgtcagcaagacatcattggctctgacttttgtgatagcatgactgacaataaccttatctgccacaactattttttcattaatgaatcgatcaatatcagattgaagactggctttggcttctgattctgacaatgtgagtggtagcttggcaatcctgttctttaaaaacctaatagcattgcccatgctaattgacagaggcctgcactcaataagaaacgacacataactgctgaatatcgctggaagatctctactcagagattttttgggaggtgtagagaaatcttttattgccacttggaatgcaagaagcatt

SEQ ID NO: 31701 - DNA, 489 bp, Oryza sativa
tttctctaagggtgtagtatgatacgtcactttgagcaccgatacatacacaaacgcatcgacgttgcatccctctaaatagtacatcattcctatactcaaatataaataggaagagaattataccaataggaatgccttgtttccatttccttcctttatcttaagggacgccaacgccaaaaccgtttcaccatataattttcaaatgattgatgcggttatttgtagcttcaaatggtctcacacggtccatcatgacaaagccgtcactcgcccttcaccactggatttggttcttcggcgccaagccccttgcttgcccttcacctacgcatggtccatcgcgaccgagcatcgctttgccttcaccgtcttgccatagtagccacttcgtatcccacatattcaatatcttcgctttggtattcttgggatattaggtgaatcatatcacttgagcgtcaacaccttttcaatccttggaac

SEQ ID NO: 31702 - DNA, 440 bp, Oryza sativa
  unsure (1)..(440): unsure at all n locations
agcttctccgcacgatcttttnttcccatttggtcgtcgtttgcgagcccgggatgagtgaatcccacgatgacgacgacgatcccagacctgcatgacgggcaccgtagttcgtgatgacatattgaaaaatactaatattatcgttgtgagggctcatcatcttgtgaccggaattctaggatctcggagtacagaacgcattgaaccacggagcaagtagataaattatctaatctgacacatatataggggttgaaaattagtagaggggaattcaaatcttgttggctgaacctaactactacacgtcgcttgtggttgacgatttgcttttcctcttgtgcaattcagcttgagagttcctctaccccgtgttctaactgtggagaaatcacacttaccaaacatgaccaaaagaaatggtggtttgcaattga

SEQ ID NO: 31703 - DNA, 155 bp, Oryza sativa
tctcagctcatgctacggctggtgatctttctctagagtaatgccgggtcgcctttcttcaatctgtgcccggcttcatcaatggtaccaattcggcatagcctatcttgccatcccgccgtgaaaataaaacatatgttatttagaataaaaaa

SEQ ID NO: 31704 - DNA, 377 bp, Oryza sativa
  unsure (1)..(377): unsure at all n locations
agcttcgcgtacaagccgccgacgcatgcacatgctctattgcagattgcaaccagccgatgaaccaagaaagcacatgcgtatgggtgtgtgatccactctacgttcaatgcatgcacggatcagcatgcaagatgcacgtagtgacgtaccaatcgatcttcaccaatccatcgtattcttcaacaaccggacgtcatcacgccgatccgcggggatacgctatgcattggcatccgcggatcggcgaactttacgtcggttaaacgaaataagttatcgatttaatcaattctaaaaattagcagcagcgagaataatatgctagatcatgcctctagtcgntntattttctcgcatgaatagatgtatttggc

SEQ ID NO: 31705 - DNA, 306 bp, Oryza sativa
cagctttgacaatgcgaatgaagatgatcaattgaaccacattcaaagcaacgatttggaccacctcttttcctgttcctggcattattcatagctcgagcaattctgttagcaaccaaacccaaattcttcttctcgatttgttcaagttgatcatcggatgtggcattaaaaacagcaagaaaagatgacttatatgaagaagcatcaacatctgttaacaaccagatttggtaacatcagcatcaggaaagaagattagatcgaagcaaagttggaggcggagatcgagttcggaaatagagc

SEQ ID NO: 31706 - DNA, 421 bp, Oryza sativa
  unsure (1)..(421): unsure at all n locations
atccttaagtcacctgcggcatgcaagcttncttctgattgctggttgaagcggatgattgtcttctgcttggtatcgccctccggagggtgattgcccttggctaggcctggagtaagtcggagagagacacaacttctttcatttacaacaattctttgctgaggctgtcgatgcacagaatggttgctaagatttattgcccagtcacgtgcagcacgaggagcattggtgcattgtttctgctatgggttctgattaacacgaggccttactggtacggcgtttgctccagtgaccacaatacgaatggaatgtctgcttcgtgtaaaatggcggcaatgtggaggtcgactttgccttggttggggacaaggttttggagtaatgcccttcttcactgcagttggaacaaacaata

SEQ ID NO: 31707 - DNA, 295 bp, Oryza sativa
gtactgatgcaagatgggaaggtggttgcctattcatctcgtcagttacgtccgcatgagaagaactaccctactcatgatcttgagttagctgcagtggttcatgcgttgaagatttggcgtcattatcttttcggtactcgtacagaggtgtacaccgatcacaagagtttaaagtatatctttactcaaccagatctgaacatgagacaacggagatggttggaattaattaaggattatgatatgagaattcattatcaccccggaaaggctaatgtcgtagcagatgccc

SEQ ID NO: 31708 - DNA, 400 bp, Oryza sativa
  unsure (1)..(400): unsure at all n locations
tggattatcatgagtacttatcttgcatacctttagcttaccttgcgcgactacatcgcgaacataatggtacttgatatcaatgtgctttgtcctctcatgaaacatctgatctttggtgaggcatatagcactttgactgtcacaaaacaagttaatgcaagaatcaactccacaaagctcagaaaacaatcctttcagccaaactgattctttacatgcttcagcaatagccatgtattctgcttcagtggtagactgggcaacaacaggctgcaatgttgccttccaactcacagcacaactaccaatggtaaacacataacctgtgagtgaccttctcttatccaaatctgcagcanaatcagaatccacatatccaacaagccccttatcagtc

SEQ ID NO: 31709 - DNA, 258 bp, Oryza sativa
ttgacatcgcattactttcctattttagtaaatttatacacctcatggttcgcccgggatttctattccaaattcccaacgcttacatgtgtggtaaacccttttccaggaaataaccgaggcacacaatgacaatttggtaatagagtacagatgaataactatcgaataatcgcaaataataaatattacagaggtagatagttcctctcacagaataacattctacgcagcggagaaatataactataacaaact

SEQ ID NO: 31710 - DNA, 331 bp, Oryza sativa
tcatattttttggagaatttaccttctataaatgtgcctgggtattaactcatgtgctttttaagtaggggaattggtcatgcattacatctaacacactaatctttgcttcatcctttcagactatactgcatgatacctttttctaggtcgaggaactcacagaattttttatggattcgttcaatatattatcaatattgaatatcatttattggtcaatattttgttttgctctctaactaattgtttttcctctctaattagatgccagacttctagatgctgtttcgtgtaacgatcctgatattgtcaaatatctcacggtgat

SEQ ID NO: 31711 - DNA, 326 bp, Oryza sativa
tggctattggacgtgctttctgactttaagaggtgccacatatatagacccttggttgtacaagcttttggtggacgcaacttttttaaaaatctatagctctcccaagttgtctagattctcaactagattatgagaaattgtacttataccatctaaaaataaactagaagaagaagaagaagatggagaacacatcgttttcatatttagactagctgtctaaaactaaactagaagaagaagaagaaggaaaacacatcgtttcatatttagactagctggctatccaccagccgcttattaaaatcttaagctcttctata

SEQ ID NO: 31712 - DNA, 102 bp, Oryza sativa
agcttgtacacattgagcacatacggcactgtttcatttttcagctggcatgggtgtacccgacacggccaaccggcctgtggactcatattaatctctaca

SEQ ID NO: 31713 - DNA, 247 bp, Oryza sativa
ctcccatctcacctttgtgatttctcctccctgtggttcttactctttgtctttctgatcatctgtatgcgttttctattcttcggctgcgcgggggtctttctgtgcatttttgtataattgccctcgcgttttatactgcttggactgcatgcttgcttgcggtccccccccatcggcatcaccttgttgtggttcaactttgtctctcccaccttgtctttgtcttctgtcaggagcttggttt

SEQ ID NO: 31714 - DNA, 355 bp, Oryza sativa
  unsure (1)..(355): unsure at all n locations
tctggtcagcttgaatcatagctgcgccgcgcgagtttttatgtctttcanatctaccgctgaaaacaggcggctagtaatccgcatactgacaaattggtcagttcttcctattattttatgaggaaattttcctagctaagataatgtgcgacttaatttgttgtaaataaatttgcatgctaatgaaattcagagtgtattaagatcttacaggctcccattatttttaaccctgatataatagaactttacacatgaatgttaaggtgccctttgttcggtatatatcttgtatttctctgcaaagagtggtctagcactgaatatgcttgctgaattccatcatttggca

SEQ ID NO: 31715 - DNA, 426 bp, Oryza sativa
  unsure (1)..(426): unsure at all n locations
tgtcaaaaagttgggtggtgcattctattctttcaacgaagagtcatatcgtggtaaagatgcccttaaatcttacctcaacgaanatgaaagtatcgcaaaagaactggagacgaatttaaggaaattgatggaaactcaagcacctaaaaagcaggaggatgaaggtgatttcctgagtgatctgcctgaagagagtctcgccactgaaacatcctccgaggaggaactggcagctgtaatagaagcttaatcagtgatgcttaatcagtgatgatagatcaacaagaaggaatatgcgctgagcagttattccactgaaccatacatattttggttcttggagatgtcattttggctgcaccgggcatatagaatgtgtggaattcgtatatgaacatccttcagttgtcaaatgcctggagc

SEQ ID NO: 31716 - DNA, 408 bp, Oryza sativa
ctcgaccggatcttaagcactgggctgcaagcttgtttgttccccagagtattattctttcctccaactttttttggctaagagatgcttactgggggaacttttgaatgtctgtttgcatgatcataatccatgtgttctttctgtatataatatataataacacttctaagatgtacagttatttgccataaaactgaaatgacctcttggctctgtatataaatagcatgtaaaaagagcaatagttttttattttttcaaaacttaaaactgctttgcctacttattatggactggccaaattctgaagtgagcattattttgagctatggtgtttggtgtatggaagctgacatgtaccaaaatagcaagtatattatcttaccatttacaataaattggtga

SEQ ID NO: 31717 - DNA, 382 bp, Oryza sativa
  unsure (1)..(382): unsure at all n locations
ctacggaaagccatagttttaaagcgaaagctcaaaggagaaaaataaaaactcctatcanggaagagaccgccggagagggatgtgacacgaagtatttcctggtgtgattaaatttcacctccatttggtagaacaactggtttgatgtagtacaacaaggttacttccaagttcatcaatcgtangttttggatataaaaaacgagccatgacattcagagatcgatcgctttacttgctttgacaattacaccatccaatggacttcccacacctgatgaaaacttcactgaaaacgatcatttgctagacaaaagggtatccagcactgtaccatgttttgcaacaggtaatctgacttggttcatctgtataaaat

SEQ ID NO: 31718 - DNA, 377 bp, Oryza sativa
aagctctcccgctcagccgaatgggcgaacggtctttttgcacaacctctctccgagcgctagcggtgacgaacagcagcagaacccgcgtcgtcgagctcgtactccgccgcccccctcttctcgaagtcttaagctggaggatgcgctcgagggggcgaaagatccgcgacttcgccgcccaccagcgatggagaaggacggcgagacggggagcgtcgtctcctcagctacggtgatgggagcacgccccatggcgcgctccaagctgcgggcgcgctcctgcgttacccacccgtcgttcctgatccagagactccaactcgacgttggttatatgacgccggcaacttggtcatgacggcgcaacagcgcct

SEQ ID NO: 31719 - DNA, 385 bp, Oryza sativa
  unsure (1)..(385): unsure at all n locations
ctaagagactgcagcatgcaagcttgtcgtagagccgacatatgatcccttcttatatgactttcaccgtaccacttctgatggccgatggcgaatgccatgtcagtggtaaaagggacgttccacctagtggagggttgctgttgggttcatttaaaaatgcagaagacctcgagggaaaacgtcatactaatccggatgccgtggttcattttaagggagaaaggaaggaaacgaaagtattttattcttggaattagttttgccacacttactttatgttgtagtccacgttataccccaactaagagcgcttaagaacatagtagtactacctaatacttntatgtgaacctacaatggttaacttggcatttcagataat

SEQ ID NO: 31720 - DNA, 245 bp, Oryza sativa
ctcttctacatgttatttcaagacaactctgtgacaatgctggatttgatgccactgatgtactcaataagcttcgaccgaaatatttatattggttagtacccggatcttaaggtcaataattagtttctggtggaaaggttcaattcattcaagccaatggggaactgttacattatatgaactcatatggtgaacttctcttattctcggttcactggtaacaggtgaaggtgctaattttg

SEQ ID NO: 31721 - DNA, 352 bp, Oryza sativa
gcttgagtagcagtaaagatttgggcaaacatgttatcatgttaattttgattgggaggagagtataccaagggtcgattgtagacttgtagtttctataagcgcgagatctaattagcgccgcttctgcccgggcgtctggcgtgcgcccgcgacgcgacacggctgcgcctgacgcgcaataaattattccgaggttttttttgaattcttaaattccaggaaacttttgatccccgcaaaaaaaagaaaatttcgtgagagaatttcttaacgtaaaagtgtcatttccaaactgagaattttgagtataatatctaaacaaatgagaactcttaactcaattttgaac

SEQ ID NO: 31722 - DNA, 469 bp, Oryza sativa
  unsure (1)..(469): unsure at all n locations
tattttatatgagtgttttgatcaagtgttcaaatattaatgtatatatattcccatgaaatactcatttgtaaataagaacattatagtggtgatcatatatattatgtggatttataatacttcatgtgagattggatccaaatacattagatttaatcttactatcccattagttagttaaacctgacatcggcctatcaaaatggttcgaatatttaatatttgatttgtgatttataatagaaattaacatttgacttgtactttatttggctggctttcttgtgcactaatatttgtagggttaaacgtaaataatatattctcgtaaaatacatctatcgattaaatgtagatcatttctttactttncttgtgattacctaccggttggcaagcaacacgcatcataacaaccagcatgatgcaaaagttttagaaagttcgaaatttagtgaatttattg

SEQ ID NO: 31723 - DNA, 360 bp, Oryza sativa
  unsure (1)..(360): unsure at all n locations
agcttatagtagncttatagctcactattatacttgctctaattctcaagccaggtggcagcgaggtgtctccccttcttcaaatgtcttttcacaccattggttccactaccttctattcactgcaaaattaacgctgccgcggctgaccccatctaccacctttcttccaacaccttggctgttacagatagcccgcatttgtcggcgaccacctccccgtgcgcccttccgtctaagcagtcctcaccggnccctatcccgctccaccttctgacccccgaaattcttattttagattattttgatgttgctagacaccgatgttgggaaagatgaaggatcgttgaagaacttgat

SEQ ID NO: 31724 - DNA, 363 bp, Oryza sativa
tgtcacatcgaatggtttaacacctacataaagtattaaatataggctctaattaactatatgcacagtttgcgcagtatttgcgagataaatcttttaagcataattactccatgaattgacaatgtggtgctacacataacatttgttatttacagattaattacgcttaataaatattgctggcggattaccgacggattctgtaaataggtattttattagtggctgaacaccccatgcgacactctatataacacgcgcaaactttaagcccctggatctaaacaccctcttagtgaatattgctgaaattcttttagtcgccggcacatgagaccttgactataaacatgcctgatc

SEQ ID NO: 31725 - DNA, 314 bp, Oryza sativa
gcatacacatctactactcccgccgtggcacaatgctacttacgagtaatggttacttggcatcccctcttactctttgttcgcaaaccaacatctttgagagatttcatacagacgctaaccagctccaagtgcaccatatgtgagaacacaatgtgcacgccggtgtcccccttaccaacttcggccgggaacattcccagagcaaagggtgccagctctccgcgacaaaaagctgcccctggccggcgttgagctgccaaaacccacggcgaccaatcgcccgcgggagcttgcgcggaccgaggtaaaca

SEQ ID NO: 31726 - DNA, 402 bp, Oryza sativa
tcagcttaatgagcaactattctgtaattgaatacttttttcatataagaaatgcccgtgcgttgcagaaatttattaccaatattaaaatattatatgaataacgtttaagttatatgatatgagctctttaagaaaaaaattcaccatatttatgtggttaatgcaatgacattttatttgttttttttcagaatcaggtgtgataagacaaaagcaatattcatttctctatatcaaaatgaatgaaacaaacaaagttcaacttgagggacctaatgtgaacttagaaatgtttttccgtttttaaacgaatcggatctagctatatgttttcaccacttttgtttttggttatcttttgccttctataggaatcggattttttctgttcggatctat

SEQ ID NO: 31727 - DNA, 443 bp, Oryza sativa
tcagaagtcatatatttatgcacattggttgtttctttgagcagttactaaccacagctacaattatggcacaggaacactttacaaatcctgaacaaccatccaatggaacttcactagttacacaccttgctctctagcctcctaaccttgattacttgatacttgtaagtggtaatagaaaatccaaccggaggaaacatggatgcaaaaattattgtctactaacctccaagtggcctcactcatgctctaactaactgatctctttctcttcccctccaaaataaaaaataaaaaataaaataaaactcatatttcttctctctctctaccaccctacctagcttagaatatttaccatgcattctctctcctctcctcttctcttccctctctctatatatatactcatcttcaagctgttcttggctcctctctct

SEQ ID NO: 31728 - DNA, 367 bp, Oryza sativa
atgatgatgatgaggaggatgacgattatggaattggatgtgacgagttgagagctagtgatattgtcatgaaggagatgggccttcaatggatgctcaagtcggcaagcagtggtcgggcggagagcagccaagctggcggggctgacaaagatgaggaggaggttgcacccgacgaggtaatgattaccacatctcatgtgagatatgcttatggttcaatgcttgtgtcctagtagctaccctttgccatataattgcaattcaaggtagcttattgtagttctttgtggagctgatgccatgtttgtgatgggtatatatccctaagctaggtactgcattaatattgtatatgactcaccac

SEQ ID NO: 31729 - DNA, 336 bp, Oryza sativa
agcttatatagcagtcgggcggatacacattatattttcgtacatgcatatgagcaagagacacgtaccgctgagaattaagagacaatccagctggcaagtcgggcctgatatatattcaacgaatcaacgatatgatcttcattccaaccaatgggccagctcgcgccgatatatatatactggggaagaggcgggcggtccggtttcattatttacagcgagaacatatatagattttttgttgagataatgaaaaacactatcgatcgatcataatggataattaatgcatagaaagatacatatttatatatatatatatatatatatata

SEQ ID NO: 31730 - DNA, 439 bp, Oryza sativa
accatggtgcaacaaaaatagactgctatttgctactgaacatgattagctacactgatctggagataaaccggtggagagagaccggcgtgtgctaataagtgaataaagaacggcgtgtgcctgtatctatcatctgtgtatgtgcgtctgaagtacaagcatcgacacttacatttggcaatgaaagagaatccatgagttgggaccagctgaaaacagaatgaacaaaacagagaaaaggaaacggatcagtgcagaaaagcattgtggatgcaactagtataggtattctggttcatattctctgagaacttatgattaacacatcatatatgtataaacaacaggcgtcgtctaaaagtatcagcgaagatataagaacatctggcactacaaagtgggagtccatcagatcagactacagagagaaccatta

SEQ ID NO: 31731 - DNA, 373 bp, Oryza sativa
tcaagctgccgttcgccttgggacgacgactctgtttgtcatccactccggatggaagacctcgcggatgaatccggcctccagaagtctcgccacctcctctcggatgaaagcttgtcgttccggggcctgccgccgcactttctgccggaccggacttgcgcccggccgcacggcgagacggagctcaaacacctcccttgggaccccgggcatgttcgccggtcttcaagcgaagacgtgtgcgtttgccacaggaaagagacgagcgcgtcttcctatttgtcgttcagaagaccactgattcgtgtggtcttggacgggccgtcgcctaaagcaaccttctttgaccggacctcatcgcatgtgatca

SEQ ID NO: 31732 - DNA, 297 bp, Oryza sativa
tgcgtcaccggatgcatggccgtcctatatttgttcatatcgaggctgggagagaaggcgctacccttatttaagctcctcaaacgcttcgggcccgttaattggatggaggaagctgaacgtgccctcactcagttgaaggcgtatctcagctctcccccaaatctggtcgccccggaaccaaatgaacccttgctactctacttagcggcgaccccgcaagtgggtaatgccgcgttggttgtggagcgcgataaggacaatcctcattacgcgcacccccaccctgtgctggct

SEQ ID NO: 31733 - DNA, 292 bp, Oryza sativa
  unsure (1)..(292): unsure at all n locations
tgtaaattaccgntggatcaaaaatagatgttcgagattcgtcaatgtcacggttaaaatnttactcatagcaacaattttactcgtgatgacatagacaaatatcagacgtctatttttcgatccaacggtagttttcacgtttccactacatatgtactttgcaccatatatttttccgggttagacacagatggattgggttagtgatcatattagtataggatgctgctagccaacagatggggaattgaggtttaacgaattactaagctaccattattaatattat

SEQ ID NO: 31734 - DNA, 367 bp, Oryza sativa
  unsure (1)..(367): unsure at all n locations
agctttagctcatgttgcagaagataatttatctcattaagattcattcccatgtgcctcctacaaagcctacagtggcctggaaaaactttgggacagtttatccatatatgtggggaggagcttttcacgggggcgaaaggccgaccactgcttaaagattcttcacttngttgcttactcaagagaccacaatttcatgccgtacatatggtgaattattgggatatgcacggcaacatcagcttcaattaaaacacaaaggaaaaaaatggcatgcagtacaatctgccagtgtcactacgccaaattcaacaacataacttcgggcacataatgttcgagaagttcacagagatttaacaac

SEQ ID NO: 31735 - DNA, 413 bp, Oryza sativa
  unsure (1)..(413): unsure at all n locations
gctccaccggtccaccctccactcagaagtcacaagtctgagcttattccatactttctcaatgttgtatcacggcgaattacccgattaaaagaatcatcaataaattgttactcaatactcctgccaaacgctatcacaacttccgaagtttctatgtacatttcgtcatttccgctgtttcaaagatatatcaaataacataatttacatccaaccggcatgaaaaaaaatcagtacgctgtccggtacaaaacaagcgaatctcgatcgacagagaggttactggctagtgttcggcgtcgtgctcatgctgtaccatggcgcctgcacngtgttgggcgagcactgcgagcccctcttgccgcctttctccgccgccctgcactcgtcctggattcccccgaggacgt

SEQ ID NO: 31736 - DNA, 51 bp, Oryza sativa
tatctaagcttactttctatatactgtgtaactataacacaccacaatttc

SEQ ID NO: 31737 - DNA, 386 bp, Oryza sativa
ctttttctgccagttgtcttgcacctgccaaccttccttcatggcgagacgtaagaactccgataggatcaatctcgggcacgtaatcgatacaaaactcaatggcttcctcggtcgtgtcaccttcaatgatgctcccctctggttttgctttgttccgaacgtaggacttcagaattcccatgtacctctcgaatggccacatttctctcataaaagctggcccacatatttttgttgcttcactaggtgaacagtgagatgaaccatgatatcgaagaaagctagtggaaaatacatctccaagtgacacagggtactgacaatatcggtctgcaacccatctaggtcttctggatctataatcttctgaccgattgcattga

SEQ ID NO: 31738 - DNA, 416 bp, Oryza sativa
  unsure (1)..(416): unsure at all n locations
taaatctattatcaacatatattcgttggtaaattggngttttatatattggtcaatttttctattaacttaatccaacaaaaaaagttgacttagaaaaaagtcaaagggacttattatatgaaatggagggagtattaggtgtcccatttctctacttagagagcatttaagttacttgtttggccaagatactttactgacattgaaaaatggtagagcatatgtgactgacattgacgttcacccagaatttccttgtctatcttggtagtaatgggttgtcttggacatcaacttatcttgtatccactagnagccttatttgcgcccaacaaacgcttaatgctcacacctaatactccgcttatggngagcacaaaataaactgagacannacattgatatatcacttg

SEQ ID NO: 31739 - DNA, 287 bp, Oryza sativa
attttcacatgatgaaaggggacgatgagttcagttatgctgagaattcaaggatgccagcttgtaccaactctctacttttctttcattcaaattcttgaaattattgcttcattacaaaataaacatgctgccctgagaaaaatgttaattggaaattctatctcatgcagtactgtagatttcatgcatctactcgggagtatatatagagcatagagaaattaaccactaacattacttgttcatgtgcaaatactaacaggactttaaattaatttaagtca

SEQ ID NO: 31740 - DNA, 257 bp, Oryza sativa
ccggccccccccccccccgggggcccaaatttaaagcccggcccccccccccgcgggcgggggcggccccgggcccccccccggctcccctggggccccggcggggcccggccgacccgcgggcgggggcgcggacggccgcccggcggcgggagtcacggcccgccgccgcggggcccgccccccgggccccgcccgcgccgaggggggggccgccggcggcccggccgggccccgcccgagggccccgcgggggg

SEQ ID NO: 31741 - DNA, 391 bp, Oryza sativa
catgcaagcttggctcggctcgttattgttaacgagcttatttactagtctcgctcggctcacgagctagctcggtaagcttggtaggctccgtaacactttaatatcctattaataaatttcaatgttattacggattaacataataataaacacctactcatataatactcactaaatatgaataggtttgatgtaactaaaagactaagcactagtcaagaaatagtaagctcgaacatgaagatatggtgatattttatactaacgagcttaacgagcagctcatgagctaaaagtctagctcaactctacttgactcaataagaataccgagtccaatcgatctgagtcgagcctggctacaagcgatccgagccacgagtttcga

SEQ ID NO: 31742 - DNA, 321 bp, Oryza sativa
atatccatctatcttatttaaaattacatatgctgactatgattaacaactagctaatgtagtactacctcacctcagattataagtccgtttgacttttggtcaaagtcaacatactccaaggtttttcccgcaaaagaaaaaaacatacttcaaatttaactaagtttgtagaaaaatatattaatatctataacaccatttcatctaatcaataatttaatataatttttagtatatttggcttgtgttaaatatggtacttttttttataaacatgagccgtttgacttttatataagtcaagtaatttataatctg

SEQ ID NO: 31743 - DNA, 318 bp, Oryza sativa
cgtcagaaaaccaacctctctccataactcctgtactatcgaagcttcataaaatcgaaccggtcgtccatggcctccaccatcacttgttgcttgcctgtgaccaccattgtctctaccactctagctagattccatgacagcctcatcggcaatctcatgcgaggtattaacaccatcttcgtcgtccccattccgattctcctgcgaaagacactcataacgagagccacgttccacggatgaagaaactggagcccatgtgagactcccgcggcgatcactgtcgatcctcatctcaccgtatcttctttggag

SEQ ID NO: 31744 - DNA, 252 bp, Oryza sativa
  unsure (1)..(252): unsure at all n locations
acacattggtctaactggaaactggccattctgacgattattccatctaaaacaatctaaagaatcattctactggatatgagccatataagcacacaaatcataccagagagttatattctggccaactaaagctctcctaaacgaaacatctagcggaaccgagggccaagtcattggtngatctaattgattaagaatacattataggttttcattactgcacccatgtaccaattactctgtatgcga

SEQ ID NO: 31745 - DNA, 322 bp, Oryza sativa
  unsure (1)..(322): unsure at all n locations
ctttgcaagaaaagagtggactgtgctatttcatgtcggaccagtcaaagaaggatgctgaatattgcctggacagcgcctttaagacaaaactgggattcatctctatgtccacttctaggttctcagactaaatgaaaatgggtctctttctaaattggaacctaacaagctagctccatccaaactaaattgggttctgtgtactggcccatatgtcatacacaaagagaaaaggagttcctatttagatttgtatgaagcaggttctcatggctattaaatacagntgcatctgattttcacgactattgatattaac

SEQ ID NO: 31746 - DNA, 395 bp, Oryza sativa
  unsure (1)..(395): unsure at all n locations
cacatttgacacatttatgcttaaattatagagtagcacatccagagaacttgtagcttcattagtttagattgatgaaattagttggagcatttctactactgcctaanaccaaatgaaatgtcaccaaatcaatgactgttgggatataaaattgcattcttacatttgaagacaattgcttgtggtagctgtagatgaaatcaacctatatggtgggtagaataactgcattgttatagattaaagcagtaacacaacactttgtagttggtacttttggacaacaatggaaattaagttgtggttataaagttttccttatgtcgacacttgattgagtagtctaattgtcagcttttatccttggcatattgattactgcgctgactatt

SEQ ID NO: 31747 - DNA, 391 bp, Oryza sativa
cattacttactggattgggcggagcgaactagctagctgatcatattgtcgatcgattaaattgggcccagctatctaaccacgccaaccgcgagggaatgaacggaatgattctaatcccacgaattaattcgatgaaccatgggtggggggaagctagcaactaacctttcatatatatatctctctctctttcctcaggtgacgcctgaatctcatggatcgatcggttcgtccagcactagcaactaatagtattacttgcttaattagctttcagctggaatattactcccataacgtacaaaataatctcattttaattctgattggaaatatcatctcattaaatgtctgattccaactaactactgaagagaattacccaagc

SEQ ID NO: 31748 - DNA, 475 bp, Oryza sativa
  unsure (1)..(475): unsure at all n locations
tcacatcttccttaatataagctcgacagaagggcatgatatatggtaagaagaacaggacagacagaaagaaaagcttgagctcggcatgaagccatggggatggagatcaatatattactagagcaccttgcagcttttatggtgctcttgctagctgaataacggccggtggaaggtgagctacaggaagattcgtccttatagcaataaacaatgtcagcatcggtgcacagaacctaactgttcgctgttaaacgcaaagcagctcttcagttcagntcagttcggttcagctcttcagttcagttcagttcggttaggttcagttgacagcaacaggagcatcacttactaaaccaacacaaaagtagataggacactacctctatccagattcgttgtaacatgtagtatctcatttactcatagggttagtttttcttatgggatggagggaatactcccgtccttt

SEQ ID NO: 31749 - DNA, 358 bp, Oryza sativa
  unsure (1)..(358): unsure at all n locations
accttaagcacctgagctgcagcttgggacctatnactactagtttgttgttttgtgagctgctgatttctgcatcaatataatattgcgaaacaggattaagcaaatataacaagtgaataggttaatgcaaaatgaaggaagcgaaagatgaaaaaaaaggcttacattgcgggtgcggcgactacccttcttattcttcatgatgctgatgatggtgggtggttaattccaaccaagtacggggtgagtatttaacttggctgatggaatggacttccttggtggtttattattgctatatgaaaggcaaccgcggctcttcctgtcttgatatacaagatgaagaggcgtgggc

SEQ ID NO: 31750 - DNA, 138 bp, Oryza sativa
ctccctgtggctctgggacggccttccgggtgtgcctgtgcagttcccacgcccggctctggactgctttttgtgtgggtcccggggtgcggctgttcttgtgctaggggctctcggcctgtctgttccctgcctcgg

SEQ ID NO: 31751 - DNA, 422 bp, Oryza sativa
agcttaagtgcctatagcagtgtgcttgcttctatcgccgttctctacgatccttataatatcatacactttgtgcacaatcctatattttcaaaacttgtgtagaattatgacccatcaagattggggtggctccagatatccattccactcgaacggtcacacagggatcgctggaaaaaatggcacgatgttgagaacacctaatctatgtggtatggtaggaaaatgatgttctgagaagatgatgaaacagaagatgactgaccatagcgaaacacatcaatcgatcggcactcatcatctggaagacgcggcgccgcgacaaccagaatcgtagcattgatcatgctcagaccattaaacgattatacaccgccggggtcaccatacagctatgcaagagatgatcaattggattt

SEQ ID NO: 31752 - DNA, 458 bp, Oryza sativa
  unsure (1)..(458): unsure at all n locations
ctttatatgagtgggaccgaaggaatggagtatatttggctgcgaaatcaatcatgttgatacactggagatctagaatagattataggaagaagatgctgacacggaggagctttattaaaaaattaccatgaaactgatccttgccgatctggctatccctacgcaggctgaacatgtcatcgacattaaccgcctcgcagtcggcgtggactcgcggcagccgcaactgtcatcgtccaatggtcacagggacagcacggtccctccatggcgcccgcagtcccctacggcggtccaagcctgcagtacaggctggtcgcccttcccggcggaggacgctggatgaccctgctgatgatggccagtcaaagcatgtggccccagtggaggttgagccgcagcatgaccgtcctacccccgatgagaaaaagcaacgtgcttangaataaaataac

SEQ ID NO: 31753 - DNA, 90 bp, Oryza sativa
  unsure (1)..(90): unsure at all n locations
tatcaaactcattcattatctcatgtttctctgttattacatgattgacggngaacaactatataacaaaagtatttgaacactgatata

SEQ ID NO: 31754 - DNA, 452 bp, Oryza sativa
  unsure (1)..(452): unsure at all n locations
tctaagncgactgcagctgcaactttgcggacgcgttcatgtgtttgatatgctcatgagttgggcagtcgcggagtgcgggttaagagtacattcactgcagtgtgagtaaaccaaatctattcgaatagccgtgctcgcgggtattgagcaccgggacgtgtattacacttggctagactctaaattcttaacctgtgtgggatgggttattgcatgatgattatatgctggtggagccacttcctgagaggcgggaaggtggacgtcctcataaaaccatgacgactcaatggcgggaagctattcctaggatcacaatggaaggtggaccaaaaccggcgttgttaatgtgaacactggtacctaatatatgattaacctatgctatcgattaagcgttggaaaaccattacaaaactggttttgcgcaaaaaaccataaccattcct

SEQ ID NO: 31755 - DNA, 395 bp, Oryza sativa
  unsure (1)..(395): unsure at all n locations
cattttgcactaatcttcaacttcaagtcttcaatcttcttttaagataatgtttaacttctagctgtgtcaatgcactaaaaaccatttctgcatggcagcgtacaaaaatggtggattactatgtttctcttttcttcacaaaaggtacttctttaagcccaaaagaattatgtgaatcagtaagtctttgtcacaaagtgacattcattcgtctcccaagacatgaagattcttgcgacctttgccatgaggtgcgtgatgagatccttactgatcttgaacatcctgatgaggaggtatttcttcatttaatcaatctattatttttattcaggctattattcgcctataatctggnaccactgggtaaatcgatgtgttttaaaactacc

SEQ ID NO: 31756 - DNA, 455 bp, Oryza sativa
ctactccaaatgtaacagtgcggtgcaacataattcacctgagctttgttttccaaccatgcacggcctgcagcctgagttttgttttcaactcatacagcacaaataaggtatatataaatttccccagatatcacagcaaattacctgtatgcttaagatgtttggagatcccagtggaaaggaagcaacgcataaaaccaaggtgactcatgctatgaagtttcttcagttcttccagaacacgtgccctcatgttaagagtgaataccatcttggctgctccccttgtggtggggagtggtataccttattcttccaaactcgatgcaataattgtgaaataatctgaaaaaaaattgcaatgtaagtatatgatcctactttccaccaaattcatgttcaattcgatctcacatcgagaacacatagacaattagattaacagactctct

SEQ ID NO: 31757 - DNA, 457 bp, Oryza sativa
  unsure (1)..(457): unsure at all n locations
atccttaagncacctgcggcatgcaagcttctggttgctgggagtcgcgaggactgatttgttttcagcntatgaacccgggcncgggcacttgtcagcgaaatgacccattccttgacaatttgaagcaacagatgttcttccggactcggcattttcttttctcattttggttcctctgtcctggcactggagttaggctgaaactgtaatcttggcgaggattagtgtatccttgatgcttttctccgttggaacgggcgtgttggttggccatcttcttcgtcagcagagaactgaatcgacaatcttttggtacatgatcagttccttcacataagaaacaagtgatcctgctccgtggacacctattgagtggatggtcttcctcacaatgaacgcatgttgaggcacacgagctggcaacatgaccgaantcttcaccacgagagcatgc

SEQ ID NO: 31758 - DNA, 383 bp, Oryza sativa
  unsure (1)..(383): unsure at all n locations
atatatatttgcgtcatatctgaacttatcactgcaacagtgccgcactgaccttgttatggtgatattgatctgcttggacatctggaatggcaccggcaggcgagtacccttgtcccaacactaatttntactattatataataaaagttttattaaactcaaccaattacctcaaggtaggtcaatgtattaagaactctaatttttacttgtatgtgtgtggagtaatatatcacatgttaatacatcttcttaatttttttcatcataactatnttgagcgacatacacacaatgagatgacacacccttgccatatcatggacatattcattctggacaatgcaccctgcgtaaataagaacattagaaaaaataag

SEQ ID NO: 31759 - DNA, 378 bp, Oryza sativa
  unsure (1)..(378): unsure at all n locations
tgcccgagctcaagctctggtgtggcctctctgctgagcccagccgccgcctgctggctgctgctgatctgatctcctctgactcccagccacaacttatgggcgactgtttatttttttgctccccctcggggatggctggaatatcaagaaccgcagcttgtcaacctcggctccgccaggttctgcatttcaagggtcttccatattaaggtcatggataatgataatgaagtaattgacagtgtgtagtcttcactggtgtggaggtgatgccagttgggcacaatggcgatggtaatgggaaggttaaacttcgaatggaanagcacaagtcaagatgttgcgtgtctggtagcaccatgatctggtctatct

SEQ ID NO: 31760 - DNA, 327 bp, Oryza sativa
ctgtatgtattctaatcttttcatgtgagttatattttgctttcaagggagataatgcatgacacttaaattctatacttgaattaaacaaatatgcaatgttgatgctagcatatggtttgatttataaatgctttatatatatgctctaatgacttggtattcctcaaatagctttaattgctcattgtgaaaaacagaattaaaatatgagaaaaaaataaataccgaattcttgaaacagtcttgacgacaaagacgtattcgatgtgagcaatataatgggtgccgaattcctataaacagtcttgatgacagggacgtacc

SEQ ID NO: 31761 - DNA, 339 bp, Oryza sativa
tcgtctaagcgtggagctcgtgcagaataaagtgttttctgcctctgatcagtaagatattttcacagtttctttcagaaggtgtttattttcttccagctgtgatttatcagctattagaatgccgatggataatggatggcatatgtgatctttacttgctgtaaactttattaatctctatggatttgagaaaatatacactaatttttctggatactctattccgttcacaagtagatgtgcttgcttatattattgataatcatccgtatcgctataaaaatacagattagcgagcatctgagcacaagatgttacccatatactcacagaatg

SEQ ID NO: 31762 - DNA, 224 bp, Oryza sativa
caaccacacaaggcgctcggaccaaagaacatcccggcccgaccacgggaataggaaacgaagtgccctggaagcatggactccccgaagaacagctcccaaaacaggaaacggaaaggctccaacggagaaagggacgctcgcctgaaagccgaactcaacgtggagaacactcaagaaccagaagctagcacgaaccctaaggtggaagaaagaggaaacaa

SEQ ID NO: 31763 - DNA, 336 bp, Oryza sativa
  unsure (1)..(336): unsure at all n locations
tcacacagactctcaagcgtgagcgtcttgaggtccagagtgaaatgctcgtanctgaataccaagtatataccaggagttggtacctacaatcccatgtaggagtaagtacccctcaaccatttttgcgaccctacatttgttaccaacgagccaatgggatagtactgtcgtgccgccacggatcgtcggcaccgtctctaattgccttggagaggatcttcaccttgtggacaccaacaataacaatggtgttgaacaccggaagcctgtctactttctctgtctacccaatgacacacttgttggtctgaatgtaacaaagaagaaatcatg

SEQ ID NO: 31764 - DNA, 276 bp, Oryza sativa
  unsure (1)..(276): unsure at all n locations
cttatctncgggggttatgaggacttcgagaagcttgtggacaaggttattcgccaggaagagcaacgcaacaaaatggaccgaataagaaaggcagctcagatcagctnttctcaggggaacaatcagaagcctcgcttcatgacgggacagctaggtgggccttccaccctgatcgtctgtcagcaccgtccctatcacccgagtaacttcgacaacgactacaacggttgcagtcacaacaacagtaagcagcacaaccacaactcgacttca

SEQ ID NO: 31765 - DNA, 439 bp, Oryza sativa
  unsure (1)..(439): unsure at all n locations
agctntccatgaagtgcttgcatgcccttacttatttctcatgaagtacgggcgggcgtcacaagttactgttgttcagcaatccaaatccagcctgcgcaaatccactntccttttgatcctcttatctatctaataaaacaagagtgcacgcgtctctagggtataaataggatgaacatgaacgcacaaaagaactcacttgatagttgagttaacgtgcacgagagctggtaataggactatgaagttggaattgtgttggcgtggatgtatcagcggtattgatgtcctcatcagctcttcttttcctaccttaataaacttacactgcattctcattggcccagcaaaaaagttctggtgaggctctttacaccaaggcaactattgcacttgatctacttctcttaatgcttatggcccattcttggtggga

SEQ ID NO: 31766 - DNA, 153 bp, Oryza sativa
gaagctatatgagcaaactcaaagcccctcatgcgcaaaatccaaatccacaccctccacaatcagcggcataatattcttcctttgatacatctccttatgcagcacataatcatcaatatatgatgcgtgatatgagcatcaaaacaaaag

SEQ ID NO: 31767 - DNA, 322 bp, Oryza sativa
  unsure (1)..(322): unsure at all n locations
agctctggtaaacccgacgcctgnggcggtgctttgtgatagaaaatgagatttaaacntagaactcgcgacacaaggccattcctgtgcggaatactcgtgcgggcgcatcataagaccgactcctttggaattacatccgagcatacaatagtgcgaccacacgggtggaatgggacgcccctggccgagtaaatgctcaaccggggagccctgatgcccagagacatgtggattctccggggtggtgtcggggaggacccctgtgcttcctggcacacgatggtctgggacctaacctcgttgtggccgggacccctct

SEQ ID NO: 31768 - DNA, 486 bp, Oryza sativa
  unsure (1)..(486): unsure at all n locations
tctaacttagactacatcgatttaattgggggctctgcagtgtaacgtaattaggctcgctgtcacttcatgaatatagatgtacatgtgagtgtgcccgatgataattcactatattaaaagaagaactctggaagaagccttttctggagaagtagatcagaatcatgttcatcttgactctgaatttggttgcttacccctaaagcatgccatacatctttcatagctgcaaccaggcccatgctctacattntcgacgaaaaccgcaaaatttttaaggtttcgatatgggacgaaagtagattccgattacaaaattccaattgattttcaaaagaattaaatttaaaagggtacaatttcaccgaaatatgtcnaaattgactaanaggggtataacgcggngtttagaatctgaaccctgaccgtgccaatngatactactttcatgggacagtggacaccaattaagaactactaata

SEQ ID NO: 31769 - DNA, 122 bp, Oryza sativa
  unsure (1)..(122): unsure at all n locations
ctaataaatgtgaagccaccaatcttgacaggaagggacaccaaaagcctccgncctccctccctatctatccagaaaaggaagggcagaacacttttttgggttatcatcttttcagaaag

SEQ ID NO: 31770 - DNA, 345 bp, Oryza sativa
gatgggaatttcttttacctatttacctgggcaatctcttattaacaacctacttccaacttggttcactatataataagaatatacaataacagttagaatatttttaacacaaaagtcctctcatacaagagaaagaaacatacctttttcatagatatttcgaatatgttccctatggtaactgggatcatgaagtatggtcaacaaacaatacgcgcaacaaggtacattggtcaaagcttcataattaccttattccacacagatcgtttacctataacgattcactacccctatgaaaaatcaattacatcggagcgtgttcggggcgaatccactttg

SEQ ID NO: 31771 - DNA, 327 bp, Oryza sativa
  unsure (1)..(327): unsure at all n locations
agcttaaagacaacccacaaaaataatctcacttcactgtgtggggaatnggggctacccacatgctaagccttctctcctcgtaaaaataattaaaggcagctttccggctaagggtaacaccaatgtatataacaaaagtaatccatattgatgggacccacatatatagactataactaatgttatcttcacaatgtatatggatagcaacctagtattatgaggagagagaaaatagagaccaatcatatattttattctatatgggcagcccatatgcttatgggtggcttatgctattatcttgctatggactaattacac

SEQ ID NO: 31772 - DNA, 199 bp, Oryza sativa
cttcttctccatctttttcctccgagccagtcgttctctacggcgacccccagctcgtctgccaaccgaggacaccatctatttccatgtgaactggccgctcttatttacccgactttggaaatgatcacatgaatatattttgagataatctattctattttggcaagttcaacgattttacatcgacattgtctct

SEQ ID NO: 31773 - DNA, 401 bp, Oryza sativa
agcttcgcgatccttgatcaaccataggcggcatgtcttgacattatattcctgggccaagagtacatattttggcttgatatctctgcgcaggatatatggcttgcagtcgtgatgtaagtaggatagagctgagccaatacccttggctatattggacctgatcgatcggatattaccaattactccctccgtgttgataatacttgtggttttggataatggcacgatctccaaaacacaactttgaccattattgttcttataatatatatataagtattaaacaaatatatgattttataaaggggctcttaagactaatctatatatgtagtcactatatttgaaagacaaaggttaaaaatgattatcattcaagatttaaagttgactcctct

SEQ ID NO: 31774 - DNA, 140 bp, Oryza sativa
ctttgtcacgcccagaaatttagcccaaatattcagactattttgtgtattaaatccctgtacattaccagccagggtacacaaaacgacaagtaatatacagtttcaaacgttaataaagcgtaaaatacttacaaaag

SEQ ID NO: 31775 - DNA, 358 bp, Oryza sativa
  unsure (1)..(358): unsure at all n locations
attctttgtccacgagtacaattnttggctcgatatctctgtgcaggatataaggcttgcagtcgcgatgtaggtaggataaaactgagccaataccctcggctatattgtacctgatcgaaccgaataaccaattactccctccggggtgataatacttgtgggtttggataatggcacgaactccaaaacacaactttgaccattatttttcttataatatatatataagtattaaacaaatatatgattttattaaagtgctctttaagactaatctatatatgtagtcactatatttgaaaaacaacaagttaaaaatgattcatcatcaaagattttaagtctgacctcactc

SEQ ID NO: 31776 - DNA, 327 bp, Oryza sativa
agaatccagctatcgagcggatgcgccctcccagcaaacttaaggatgtgcaatgcgtcaccggctgcctgggcgccctaaagtcgttcatatcaaggctgggagaaaaggcgctacccttggttaagctccttaagcgctccgggccgtttacttggacggaggaagctgaaaatgccctcgcccaagtgaaggcgaatctcaactctcctcccggtctaattgcccccgatccaaatgaatccctgctactatacttagcagcgaccccccaagtatttaatgcaacgttggttgtggagcgcgaaaaagacaatactcattctg

SEQ ID NO: 31777 - DNA, 374 bp, Oryza sativa
  unsure (1)..(374): unsure at all n locations
tgcgaacgaagatgatcaattttatcttattcaaagccacgatttggaccacctctttttctgttcctggcattattcatagctcgagtaattcgattagcaaccaaagccaaatcctccttctcgatttggtcgagttgatcatcggatgtggcatttaaagcagccagaaaagaaggcatatatgaagaagcatcaaccacccaagaagaagaagaagaaaccaaagcactcgatttagaatcaactttgcgagaaagaatattcatctcatgtgttttcaatttagtataaagtgaatccaaagtcaaagtagacatgttaacagactcctgaatagatgtgactttcatcttccanatagacatgtcgag

SEQ ID NO: 31778 - DNA, 434 bp, Oryza sativa
  unsure (1)..(434): unsure at all n locations
tgcagctgacgaattgagccaacatggatgatatctctgtgaccttttgatcaagacatgcggcgacaaaataagggctatagtagatgagatctttccacactttgcaaattgctatacagatcattcttaccttgcatggcgggcaatnggttgcccgaataactcaacaattgatgaaataaatgattgtattgttgacatgatacccaacgacgcaaaggagtatttaatatgtgatacaatttcaaaatcagagatcatttacctgactntgacatcctttaccccctgaatttttgaattcaattaatgtcaacaacttctcatcgcacaagcttgtgctcaaaaaaggtgtgacgattatgctactacgaaaccctaatcaatctatgggtctatgctatgggacaaggttattggtcacttctctt

SEQ ID NO: 31779 - DNA, 242 bp, Oryza sativa
gtgttctgtgtcggatattattggaaaaagtctgtcccctaactgtaactaaacggcagatgctgtgggcctggtttaactgcctgctcatatttctatgtttcaagaggcatctatgttctactttattccattaatggttccacttgcaaactgtgctacgaaatgctgaccgagtgcaatcttgtcataccaagcgcgcactgtctccgtagtaagatattttactgtagaaatttatg

SEQ ID NO: 31780 - DNA, 325 bp, Oryza sativa
cagctaacataacaaaaatatactcaatttctacttcctcccggtcataatataagaccttctaacttggccattcctataatgttatgaatctagtcacaccaatatatatctagattcacttaacatatataatgaatcgtgggcaactacctagacaagttctaataaccctgtaaacacgaggcaggtatctctcttgtccgatcaagcaatgcattgcactgccaacaagcgagtttggtccttctcatctatatgaactaaaacacatagtataaaccacacgaaaatatgtggctcctttgaaggtggagttgagaaa

SEQ ID NO: 31781 - DNA, 276 bp, Oryza sativa
ccacgccgtcgagctcgtacttcaccggccccttcacactaaaatcctatgcgggaagaagcgctctagaaggtccaaagatccccgactttcacatccactggtgatggggaatggccgccagatggggagccgtccctcctcgtctacggcgacggcagcacgccccagggcgcgctccatgctgcgggcgcgctcctacgtcacccgcccattggtcctgacccggagtctccagcccaacgtttgctggacgacgtggtcaacttggtcatg

SEQ ID NO: 31782 - DNA, 342 bp, Oryza sativa
  unsure (1)..(342): unsure at all n locations
cttcaccgctcaaaccacgaattctctaaaccactacgtcaaaggatgggccacgtgggaatctgtcccgaagtatctattggaggcaaaaacccaacttaccacaacctaatggttatatcgccaaggggaggtcggtcagactagcctctattggaccaccggtgtgactgccataaccgtccgattaggctgtcggcggctccaataagaccaaactgccaccggttagactagtctcggctttagcaattttggatcgccaagagagggccaccctaccggctccatgggcgctcantctgaccgagttcgacccgatcaaattggcatgcacacccg

SEQ ID NO: 31783 - DNA, 273 bp, Oryza sativa
  unsure (1)..(273): unsure at all n locations
atgtggggcttgtaaggaaagtagcacacgaattgtggtcaatctagcaacaggtgagtaaatgtcanagaaatcttcgccttctttctgagtgtagcccttacaacaagccgagccttgtacttttcaatagtaccgtcaggcctgagctttttcttgaacacccacttgcaccccacaagtttacacccatagagtcgctctgtcacctnccangtcccgttagcgataatgaaatccatttcactacggacagcctnctttcagtagtct

SEQ ID NO: 31784 - DNA, 322 bp, Oryza sativa
agcttcaacgttgtgaccaatatgagtttatttcttctctggatcatgtgttgattaagtgctcctgcattctttaatccaaaaagcatggtgatgtatcattaggcccccaaaggtgtgatgaacgaattcttttagcagtcggactcctttagtcggatctaatgatatcctgagtagcaatccacaaaactgagtaactttcaaccgggcggtgagtcaactacctggtcaatgcgagggaacccgaaaggatccttgggacaagatttggtgaggttggtgcaatcaacacacatacaccatttgcccgtcttttttc

SEQ ID NO: 31785 - DNA, 342 bp, Oryza sativa
  unsure (1)..(342): unsure at all n locations
cacacagagagacctctggttcttactacacatcagnagntagctactggctggtttgttttgtctcctcttcttgcctcccccttataaatttattttagcattgcatcttgctccttagtactcctcctcctgcatcattatcccaatccttaattcagaattcagaactgccctttgctaccttacataccatacctagctgaattgctgtcagttaatctcttgatcagatcgatcaccctgcagcttcttgttgtttctagcatttctggtgaagaaaccaaatcttcagcagcttaaggtatgagatcatcaatggtgaggcagccgtgctgcgac

SEQ ID NO: 31786 - DNA, 295 bp, Oryza sativa
  unsure (1)..(295): unsure at all n locations
gcttaacagagacaagaagaacatgaacctattatgtagntcacctttctgccatctaccagatggagagaaccgggaagccataaattctattcagaaccctttttctaatccgaattcccaaatgctaattgagacaaacaagcaagcgcagaacagacggctacagagattaagggcgtacctttgccaatctgcaaaacgcggatgcgcagaatgcggaagccccccgcgacgacatcaaaaggttgtgtcgatgacgccggagtataaccaagaaggacggcgactggga

SEQ ID NO: 31787 - DNA, 404 bp, Oryza sativa
  unsure (1)..(404): unsure at all n locations
tgtgttagatggttgcaaanatctcgagaagcttcctctactgtggcttctgccagctctacaagttctttgccttgaaggactggatagtttaaattgcttggtcaacagtgatatatacacacccttcgcattttgcaaactgaaggagctaaccttgtcttttttttttgccgggtcggccgaaaggttcggtcgaccaaatttcattaaggaaaaggggaacaaattacaaatgggctttatatcgaccatatgatgtcgagattaagctggggacaggtcccccccattctaagccatacacaaaagcccgaaggctacaaagaaagtatgatgtctctattacataatctgaaaatagcctccagacttccacatccaaacttcttctttgatgtctt

SEQ ID NO: 31788 - DNA, 411 bp, Oryza sativa
  unsure (1)..(411): unsure at all n locations
agcctgcgaacgacttcatgcatgtgtacctcttgatgcatatgattcatcttctgatgcacctccacgccgcgatactcaattgatgtcccttcctgcggaccaaaaaagaaaaggaaaaacagcagcaccaatgcaggcttggatggactgaagcaaaatgtacaacatctgtctgtagcatgagggtttgcaatttcgtaaaaaccaaaattccaggaacttcgttgtttttctgcataaattatttggaattttaccaaattttgattgcttttgaaagaaattaaatgaaaanttccgatgagacatttgcttgccccgggggagatggggggatattccgaaatttctgtacccctcangatagcatcatagcatggatttagcttaataccctgtgcctttgct

SEQ ID NO: 31789 - DNA, 375 bp, Oryza sativa
ttgatgtgagcgtgtgcataaagaatacttatgcatttcttcttgatttacgaagatgactgttgaacttagtgttacagctgttgtagatgcttcacttttattaaagtagatgttgttgtccaactcgtctaaaccgagctgattggttgataactccaaactcccgaacatgtagattaaatcttgaacttgatactcgagaattttggagtagattatggcagcgctgagaagccaaaattgtctgtgaaataattgaagttgctgaagtagaacatctgctccgaagcaaagatgaagataatgactcctggagttgactcattggctgattaattgattttgagccttatatttgtgtagcccccgact

SEQ ID NO: 31790 - DNA, 454 bp, Oryza sativa
tcgccggagatcaaaacatggcgatgggtctgtcttcacagtgtctgcgaattccggcggcgttcggcgcaaaagaacgggtggtcggtgtagctctcacccttgctaattctatggaagtggcggcgcaagtcggcgacgaccatagaagcggaagacggcggctggaattggtggcggcggtggagagagaaggtaagcgtggcggcggctctagggctatggaaaaaaatcgggaaaaaggaggaaacggaagaggaggccgaggggctgctatttatagccaaaggaggaggagatcggctcggatacaggaagaatcggcgacggattagttagggttcgccggataaatggagctcgaaaccgcgtcgaattcacgcgatatacaacggtattcataggggcttcttagggataaggtagaggagatcgaggggactccgttttacaa

SEQ ID NO: 31791 - DNA, 383 bp, Oryza sativa
  unsure (1)..(383): unsure at all n locations
agcttatgtcgncgactaggaaattctctgatgtacacctggncttttatcacttgaagtacacacttgcatgattacaataaaaatggttaatctgtttgttttatacatatctgaggagataagatgatgaatttttctacataactcttatttcatttcactttattttgtccaggtcaaccagtgtggcctgtaatcctgttctgtttggtgccaggtttatgaaagcgggccactttttgattttgatggggactttcttggcatgaacctttccctcactactgagggaaacctatttgtgccaggggatagaagtcttgatcagctcgtgaattggatactccatcatgaggttaatttggtgcacggtagcggct

SEQ ID NO: 31792 - DNA, 478 bp, Oryza sativa
  unsure (1)..(478): unsure at all n locations
tcttgctgatatcatagtcttgtaggatgtcaatgattccaaataacaggataacgtcctggaattcccctgtaggttcgccaatgagctgggattcactttcaggattatttacaacattctccacccttgagggcatgctgatccctagcttgactggtgcttttctgcaaaattataagtagtgtgttacttctttggaatcaatatttctctgtactaactgtcaaagtgcatataatatagaggaggccgctaatgcagtagaacagagaaactgctttgtgaaagcttctttagtggtgtcctgaaagatagaagcttcttcagatgaaagcagtggcacttcttttcaattaaaaatttattgaagaatagtatctaatatattagatgaaaaagttcaccatgtntctaaatcgtcacgaaagcaatttgtttacctttntgaaatacgtatgactgtatttaactgaaa

SEQ ID NO: 31793 - DNA, 239 bp, Oryza sativa
ttgcctaaatgagcctcgttcattctacagaatatgaataccagggtgactgaaaaagcctgtaaccaaaggggaaatagtgggagcactaaatggatatatgctataatcgccattccatgtcgcatttaataagacaataagcatttggtgactccaatatgcagtaacaaaatatatacaccctccgtttcacaaagtaaggccttctagcattgcccacattcatatagatggta

SEQ ID NO: 31794 - DNA, 62 bp, Oryza sativa
ggcgcccacgacaaacgtgatggggctaaaagacgccgttgctggaatcaaaggactaaggc

SEQ ID NO: 31795 - DNA, 433 bp, Oryza sativa
  unsure (1)..(433): unsure at all n locations
gctgcagctcactattatagctcaaatctgtcttattaaagccacccacactatggttccgaattacgaaatttaaggctccgttggttttccaatgtataccacattatttgtatcggatcacaaagaaaatttcatttccacaaataatcattgtccgactccaattaacaccgatgcctgaatatcccagacaattagtgtatgaactctgaaattgggtatgagttctgaggtgtatatcttcctctgaatattttcctccacttggaatttatagattatacttctaacagtgatcaggagcactgcaaaattcttactttggattactagccatggatntgaattagatgctcgtactatatgcggcacaacaggtagtcactattaataatagaaatcaacctgtaccaaggacctgatctgacta

SEQ ID NO: 31796 - DNA, 155 bp, Oryza sativa
gtgaccattagatatattaatctgcgataaatcatggattaaattttaacaaccatgaagaggggtgcgcacgccggaagatagaaagaggatgggtgcgtacgtttctgccgatagaccggattggataaatctaaacccttaagataatggat

SEQ ID NO: 31797 - DNA, 364 bp, Oryza sativa
gcttccaccacagcagcactacgactatattttttctttattccatatgacacaaaatacttcctccgtttcacaatgtaaggcattttagcatatcccacattcatattgatgcgtatgaatctagataaatatatatgtctagaatcattaacattaatataaatgtggaaaaagcttgaatgacctacattgtgaaacagatggagttattatcttctaatgtgtgttaagggtgtattttggggatgcaattgtgagttttccgcctatcttcaaaagaaaatgcagcccatgaagcgtgttctatgtttcctttttgcatgaactgtaatgaactgttcaaggttgtccctcctatttt

SEQ ID NO: 31798 - DNA, 389 bp, Oryza sativa
  unsure (1)..(389): unsure at all n locations
gtcctcagatgagaatttctccctgattggagcaattatgccctgaatagccaaatcggctaactgagcattagtaaaacttaagttgtagcacttattcatgcacaggctcattatgtctttgcttgattgctgtcaaatcagacaacttcatttcatgcaccccactatagaaatagctgtgaaaatgcttctccaaatcggcccaactgttaatcgacccataccataaagaagaaaaccaagtgaaagccgatccagacaaagacaaccggaacaacctaacccttaaggcatccacagccgatgcttcaccacactgagctaaaaatcggctaacatgctcantaagtgatgtgctatcttggtctaagaactttgaaaaatct

SEQ ID NO: 31799 - DNA, 284 bp, Oryza sativa
ccggaattccattctgcaccgagtgctcgccatcgtgtgaggaaaggtgaccttcgcgccgctgtaggcgaactccatacccgctgtgggaggaggaacggccgccatgggcgaccacaccacagacccccgcgccgccgagggaggaataatggtgacctcagcgttgtcaagcccacgctgccgctggagaaaggctgaccttgtgctgtaacgctcgcgccgttgaggaagtccgaagaacggggttgaagcaagtttcagacccaatggccagccatgct

SEQ ID NO: 31800 - DNA, 379 bp, Oryza sativa
agcctgcatatttgaaataaccatgaaacttattgctcatttgtgaccatgtagaaatggaattaggagccagtaaactataccatgtggatgcaaagtttgaccaagatagaggaaacaactttaacttaagcaaatcattactaccgaccttaccacattgatcaacaaattggccgatatgctccattgttgctctagcatcctcacctgtgaaatttgtgaagttgggcacctcaaatacttgcgggtatgggactgaatctacgtggtcaagatacagcctttggtatgtatgcatagctactttcgaatctatttcactactatcccgaagacattgtaataatttttccaaacatcacatgaacgatttggg

SEQ ID NO: 31801 - DNA, 276 bp, Oryza sativa
tatttttagccaggaggaggaccgtgccatggactatttgtggacagaagagatattgtattagtccatcgtgctcaactaagagatttcggatgaaaccccacatgcatatgaacaaataacaatccattgctttctccattttaattcgcagctataccaatatatctacacaaatctatcgagaaaatagtatgggatacttacatcatatttgacaatggcaacctaattttggcattcaatgcttgagctagctttccttgccagtacata

SEQ ID NO: 31802 - DNA, 355 bp, Oryza sativa
ctcaacgcctaaaccgctcaactgtctaccggacagttcctttgcatctactcgatctggacaaccgggaaagcgaccacactcccgggaatatataatgaaatactccgcccagtgaggctacatctgatttccgtgcctgcggatttatttgaaggttaacaaataccaatacgagtgagactagtgccgaacaagatggtgcgagaacatcatcgatgctccgtgcaaatcggaacgttctcctcaacatctggaacgggcgcctcaatcacggtgttgggcacgacattggaagtattaggacgtcctccttgctagacgtcctcgatatcgcgacatctacaaagcacat

SEQ ID NO: 31803 - DNA, 381 bp, Oryza sativa
agcttgaacctttgctcgtccctagtgaatgtcaaggaaataaaaacttggttggtgatcacgagttgctaacatgatgtatatctcaaaggtataagtgcaaggtatatgtactctctcttaaattaaataatctttcgcacgatggcttacccttacccctgattctcacgagacactgcttctccttgccttggacggttgaaagacagaacaacaattagtgtaccaatcacccaatctttattcaacttttattacggcaagtttcaaatgatttttgcaaaagaaaaccaagttcctcatatgattcactcagtctctctctaagtgtatcaatatgaaattctcaccatttttgccttcttgattcctactcta

SEQ ID NO: 31804 - DNA, 483 bp, Oryza sativa
  unsure (1)..(483): unsure at all n locations
tgccaagtcatcgncactatggagtntntgacgagggatancttcaactacttggatctgggaagtctaatctggccagagtatgcgccccgcaaggtcggaaccatcgtcatcaacaattcgatctcttgagatcgaccaagcctcaagataagcggcgtatcgaaagatgtcagaccgtatgatgtcgaacgagtacgcaacaaggtaattggtagattggttttntaaattaatctactaatttcgtaaatacatccggcatgtatctacaaaggtacgcaatattttatatgcaatttatcgtacctattcagatcatacaacattgtcagatctataatttattatgtttacctagagcatgttttntatacaatatctattgtgcgagtgcttccgatgttaggccaactacggtctaatgctggngactcgctctgttctcttctgtatgaatcatgctngtctacgatatacata

SEQ ID NO: 31805 - DNA, 396 bp, Oryza sativa
agcttgtctgcgacatgaccagattatatgttatgtaatcaatcggcgatattggctagatgttttctctgtaaaagctgagttaattcaccttctgttttttttttcttggacttctgccattatcatgaccacatactaactaaatcctctttgctatatggtttgggtggtctcgtaagtataggcaagttcacaaaacttcacttttctctttcttacctcatcattcctgggttcctacaatgtggtatcttcagtatatcttcatgaagcgatatcacattgtcagatgccacaaggcccacattgttctgaacataaccatcctggacaaaacaaaaacattgttacacccaaaactagttgttgagaacaatgacggatccaagaatt

SEQ ID NO: 31806 - DNA, 486 bp, Oryza sativa
  unsure (1)..(486): unsure at all n locations
ttacggacctataaaactcagcttctnttagctgntntgctatgtgaattntcaataatgtagtcgactntaagttgcacgcatcatattttacaaagcagtcggtatatcacttggatcatattattcaaggattcacacatcatatgctattatcgaaaccactcggttggttagaatatttattccttgactatgtgtttggtttgttcaattaaccacatagtcgggggctacacctattaggtgcatctagtcgatgcacctgactttatttttcagccctccacagtctttagatttggtaaaagtactcgggaagtcatggcaaagatgattgaagcactcggctttggagtaatctagttcgagagaatattatcttttcgactgtgaaggtctcangggctactgtggagaatatgggtaccccatacccacacggcatggttatccgactagttatatgggataacttatatctat

SEQ ID NO: 31807 - DNA, 396 bp, Oryza sativa
gagcttcatagttatattgcagatctctttatatatcattgccgttcagccactctaatgtaagagagacttacattgatataaagtggatatgctatgcgcatgtccagatatgctagaagcatcttactggatcacaacatggggacaagctgactataactaacgttatagcttatctgaatattgaaattgccacctatattcatatatatttggtaatatgaagctcgctactgtgtgccgtcagaaagcgggacatctttttatcacgctagatttcctcagatgatagaatcctgttccgtttgaactagggggaggctgaccttaaggcgacaaaggattaatatctgaattgttgggtcccttgaaattaatggctgaaatcggaaa

SEQ ID NO: 31808 - DNA, 403 bp, Oryza sativa
  unsure (1)..(403): unsure at all n locations
ntctgcatcaactttagcgggcgcctctctctatttgtcttcttcagatgatgccttttttgccttggcgttggactacaacgttttgtccttcctaccgctaagaatatatataagtaagtaatatgagctaagtaagacaaaagactataacagcagaagaggagagagaggtgacataatttaacagccaagatacaagaattacctctctaatcggctttctatattcttccttgaatcgactgggatagcagacaacgagaggtaatcctgtcgtttcagcggtggttctaaggtattgcaactgcgcgtcttaactttcttggatgtttcaggagctgacccaaataattgaacagttaagctgccacctgacgagaagggtgataagaatgaacct

SEQ ID NO: 31809 - DNA, 366 bp, Oryza sativa
atcgtctgcttgggttattgttcgtcgttctacctgcgtcgaagaagaagccccttgatgtggctccctatgacgcacgtctcccagaacccatttattgatgcttcgctaggagcctcctcttcaccaacacaattgagccacttgctctaatgagagccgttagtttccctaaatgtcacatactgcccatcacaaccatacccgaggtggtgctgaaaacgccgcaagcgcaatcctttgacccatgcccaatccagaacccctcatcaactttaagagccaactttgaggatctcacgcttttattaagaatgtgcccctactaccttaaaccgaaagctaagacattatgttgtaccggga

SEQ ID NO: 31810 - DNA, 436 bp, Oryza sativa
agcttaacatgacagcatacctgataacaatctctttctacgtggggttgtgccgaggcccaataacttaatgttgcctggaccccaacagttcatatgcacacccactcatggaaaagcccaatctccctaaaagactatgccaataggggaaaggtggctctcccttttaaggaggctttctcctcccaagctaagcaaggtgggattattcaaaagctctcacggtcgtcgcccgactttggcgtctttgccagcggataatagtggaggatgtcctcatcaataccggatcatttactccctttataccattctatgtgcaaccatatgttttttgtcacaaacttgaacgttcgtctattttgaaaaaaaatggagagaactattcatattgtatcatctcatcacaattaaaataataattttataaaaa

SEQ ID NO: 31811 - DNA, 387 bp, Oryza sativa
caaagtgtgttgcactggtatgatttatattgataccacacccaagatcacgtatatttctgcccagaacactgaatcttttcgcaggttggggggtggattatataatgcgttgatggcacttgaaagcaacaggccaaacactggaagtatagcttcattggcggaggcggccatgcattctaacagaaggattgcagtttcacgcttatgaaggtgtagtaagcgcctaagtacattcttgccagacttcgtgtcatcacacccttcgatttcatcttcagtccatgcatatgtctgtgaattccttcttgtttcacccagtgacgaatgtctgctcatagatctctcaaggatagcttttaatgctatgtcgattaaaaattt

SEQ ID NO: 31812 - DNA, 360 bp, Oryza sativa
agccttacctcttgttgaagatcgttatctattcttttcaacctcgaaagcaaaaacttatcgaaacaatgaaagtagataaaggagggcgatgagcccaaagtgttattgaactgtgtatggaattacacgggaccagtcatattatacccgagatacataactggtccttgccggacatgacttttatctctgacaaactctaagataccaacaagtctttacagcagactctcgccgaaaatatctctaagaaaccattttaatatctaaataattatacaattgctatccatgagctaacttcatcgtgtaaatcatgagaacatggtggcaatcccgagaagtttcataccattc

SEQ ID NO: 31813 - DNA, 339 bp, Oryza sativa
caaacagcatttaaaagtcacttatttgccgcaagctctattataaagacgatcctagagctacatagtattattaatcaaggctggtgcccacactaacctgtcttaacccaaggcctacgatgattcagaccgaactggctacccaacctgggtctcagctcgttccaagccaacccatgccaacctcttcacaatttagttgctagccaattttaagaataaaccactaacttgggtacattgctaggcttggccatatccgagggcacggctatttgaatagagttactctgatcagatgtgacgatcttacccaccagacacatctttacttcg

SEQ ID NO: 31814 - DNA, 452 bp, Oryza sativa
  unsure (1)..(452): unsure at all n locations
cagcttatgctctacccattccanaccactcataggtgggctatgatctctataatcagagcgggtgcagtacttgtcaatgtgagtagcgataaaatacgcaccgtacaggaacgttgtgttcgcagaatcgtccatgaagtattccaccagaattatttcaaatctttgtcggaaacttcttcgcttgtatccgcaggatcaggccgcacgtccttctgtaaaaatttacaacaacaacgggaactttcatacatagtcataagtaagaaatggaattggaacgacagacatactacaactttacattaattgccaacattacgcatgacatagttcgaaacacaacagtagcccacattacttgaaggacaatgctaacggacatagcaccactaacacagaaagcacctcacagcccaaaagacgacactaaggctgatacattaaca

SEQ ID NO: 31815 - DNA, 415 bp, Oryza sativa
ctgcagctgccagctattatttcactcttcatgaaatgatcttctgtgatttcctttcacttcccattaaggtcgtcagactccatgatattgcatgtgtcctttacctccaataacacgtctaatttcatcctgagcctctcaaaccctggttcacacgagctatgtgatgcgctgctgtcaagaccttcaactgaatattatcattttcaccctatatcaaaaccatgggagtcggtatttcctccacatccatcttatggtctatcaattctttcatagtttctgccttctcaacatcaaatgcatttgcagctgtctctttcctatgggccactgccatcgaatccatcttgagcctctaaccctccaacaaagcttataaatttctaatcttaatcttaaaacaagcagc

SEQ ID NO: 31816 - DNA, 455 bp, Oryza sativa
  unsure (1)..(455): unsure at all n locations
tcgtatcaaggggagttctcaatttattatgactttatcttgatggcttcaattaattcacctatgggcagcatcaacccactataactactttatttttaatagtaatttatttaggaaagcaaccgacttatggcgaagaaagaatacttcagtttggataagcacgtaatgaccaaatccaacatctatttaagtagagactaggcaccatagacgaattgagagcatgaattagcaagctagcaaagcttatcaggagcacactagattccataaatgaagaaatcggaggtggtagacatganaagaaatctgtttcctgctcctgtactctttgtctgaattcaggttcaattaattgacacacttaatttggtgtgaggtaatagttcttcttcgtcaggaaatcgttacaaacaatgctgctgaaacataatggaaggcataacaac

SEQ ID NO: 31817 - DNA, 399 bp, Oryza sativa
  unsure (1)..(399): unsure at all n locations
aagcttatcggggctttatttattttcactaagaggctctactctgcatgctacatgctccgctatgctatgccaggatattatgacatgccctaactagagtttctagcangagacaaacatcatatagtgatgctggggacacagttgaacagaccattggatctataagaacagtgagtttcacatatttatatgaattggttaatgctataacacacttctctttttggagtagcagacagtaagtttgataaatatcctgtgttaacaggttgtgtccttcaatggtgagaagaaagcgatagcaatgtaccgtaattttatatagaagtcatacaaggctactattgaggaacgcattatcactggttttggcatggctctgcatgtgcgtcg

SEQ ID NO: 31818 - DNA, 413 bp, Oryza sativa
agcatttcaatatccaattgcttatgcagtgtgttgatattcttcttgaaggttcaaaagacactctatcatttacatccacatcatctatcacaatagacaagtgaccgattaatggtgtgacgtgaatagaactcacattagaactacttatagcacgacattcatatgatgaaaccttcaatgctaactcatgcaggaaaatacgcataacgtagtaaggagacccatcaatttggtcatctttgttgaaaaatccataactaaccaagtcattctaataggtcaatcctcatggctcggttcttgtattttgatcatgtgaatgcaaaatgtctagtcctatccataatgaatcaattgctcactgtcaagatgaatcttcaggaacaaagcacaatttgtaaaacatt

SEQ ID NO: 31819 - DNA, 325 bp, Oryza sativa
tatgcactctatgcgtccatgttgctagcagtgagaggagttctgacgctcccgggaaagagaatttatttttatattaaatgctgggtcaagatgagaactctctcacacactcatggcggtcctaccaatggtgacaccgatatagggcacgcctttcggccctaccttaacggtggtcccatacgagcgcacctggctcacttacgggtgaaccatctatgcatggatactgactccgctcgtgtatctaatccgctaggtctatacccaatctagaaagtcccgttgaacggcggtctgttcatgcttaacttcatggctc

SEQ ID NO: 31820 - DNA, 392 bp, Oryza sativa
  unsure (1)..(392): unsure at all n locations
agcttgatactaccacccgaggtattatggatgtatactcgatgtatcaggcttgatacctcgcttcttctctcttcttcctccttaagcaatcttgctaatgtagttgctttcctttttctgacctcaccaatttcggcgggcccatgatctcatcgggctccacaggctaactgatgccctccgatctggtgtgagaaggggaaagacaatggaaaacacccgtagcattggggacgacgtcnattggttcttcggcgacctgagatgaaatcatatgaagggaaggagggggaggatgacgactgtggcgtataggagtccaggaaaggaggggggaggaccgctctctcgggcggantcattttagacggagggaggatgaaactggt

SEQ ID NO: 31821 - DNA, 465 bp, Oryza sativa
  unsure (1)..(465): unsure at all n locations
tctattaatctcagacaactacatcagagtgatacaaccatacttagaatacttctggccgctgcataactacgatgcacacagccaaaacacatacccgtgcacaaaagagtttgtaacaaagtgaagaaagctataaaagaacgctcccggtctctgcataactaggatgcacatagccaaaacacacacgcgcacacaaaagagtttgtaacaaagtgaagaaagctataaaatctagcggatcgattattctgtttcttaaaaaagatttcaagttgaacaaatatagataattctacatcgtaatataattttatttcaatgctagccgtgtaattgcacgggccaccctgcaaaagctgtaaaatctagcgggtcgattattctggttcttaaaaaatatttcacgttgaacaaatgtagataattctacatcgtaatataactntagttcagtgctag

SEQ ID NO: 31822 - DNA, 446 bp, Oryza sativa
  unsure (1)..(446): unsure at all n locations
tagcgccgccgcgcgctccgtctacacgggccttntccaccgtctacagcccgtacagatgctttcttggcaccggtgttgaaagaggagcgctagttcggctgtttatagtatatcctaaagnttggattttggttgaaattagagataatgtgactgaaaagttatatgtgtatgacaggttgatgtgatggaaaaggactaaagtttggatccaaactttggatctaaacacaactttcgtgtgagtttcaatttaaatcctaagtataacattcattcctggctgcaagtattcctgcattttatactccctacgttgaaaaaataaaaaactgttcaaatctgttgtactaggaggttagttctttttacggacgagtatgttcctgatttattnnttcattttttaaanaaaaagaatatgtaagtattagtaaaggacg

SEQ ID NO: 31823 - DNA, 365 bp, Oryza sativa
agcctacattactaacatttcaagtgatcgcttctctctggatactttctgaaattggaagcctctgtgatttcctgaccctcgtttacgttgtgaatgattctttcaactccttaaactctcttgacttaattctttaaacttccaatgtagtttactaaacaaaaggtttttttttccaaacaactgtcttgatgctccatacactgccgatcttgtttcacaagtattaggacaaggttgatcattttgctgggaaagcgcatgtggaactcaccaggcagtactcttgttttcacgcacagggttttaccaagatacctacgggtccacccaaagattagaagcctaactagaaatgaaac

SEQ ID NO: 31824 - DNA, 391 bp, Oryza sativa
gacctataaaactcagcttcattttttttggttattcccatatacttaattggatatgttgttctttcttcattactgttctcaacttaattccatacatttatgtttacctcatactccctcattaatataaaggaggtcgttctgctcacaagcaaatgtcccatatttgttgacgctgcactttcccaacagcacacagttacagactcctagaatagcatccataaagaaagtgaaaagttttgaattgattggactggttgcattagtttaatccataaagtagcatatgtggcagtgtactagaactactcaagccatgagatagcagatgtggcagtgtactagtactactcaagcatccacatgattagctctaatctcataa

SEQ ID NO: 31825 - DNA, 323 bp, Oryza sativa
tgagaaaccagaagggacaaagaatcggcatcttaaaccattgtatataaacggctatgtcaatgagaagccgatgtccaagatgatggttgatggtggggcttgctgtgaattgatgccatatgctacatttaggaagctgggcagaaatactgaagatctcatcaagacaagtatggttctcaaggactttggtggcaatccgtcagagacaaaaggagttttgaatttggagctgacagtcggcagcaaaaccatccctacaacattttttgtcatcgatgggaagggttcctacagcttgttgcttggaagggattgga

SEQ ID NO: 31826 - DNA, 141 bp, Oryza sativa
tcgtgccgccaatgcggtggaaggtgcagcctcctcagaagtgccttaccacctcacgcagggggctaggcacctcgtattttcaccgggtaagactgattgtcaggtctttattgcagacttcggtatgtccgtctaccc

SEQ ID NO: 31827 - DNA, 334 bp, Oryza sativa
gcttaaatgaagctagactctagtctagaatgaattttatgtcacatgagtacttgttggaaagtgtatggatgcaactctcatatggttgtggtctcacatcaaaattcctccttatcgttaggaatctgcgagaacaggtaccatagctcacattatctgattctgaattgagccttgggccttgtattgtatcgtgcgctaagaccaaggaggtggtgccgggtaaccctacgatgtgcctaatcatatttattcagtagccgccatagtttagactcgagttttgcttacattatttttgccattacagctgcatcactggttgggttgt

SEQ ID NO: 31828 - DNA, 406 bp, Oryza sativa
ttgaccaattcgctagtgtctatgtccaatctggcggcttatatttccttctgtttgcatcaaatggctggagattatctgcttacgtggcttactgagagtcacgagagcattgagctttcactgatgtagattctgttagctgggctttttaaattggtagtagctctccctataaaatattaatttatatgtatgctataatttccttataataattagatttatctgaactctggtgttgtattacatttgtgatcttccttttcttacagagcttagatttgtcgttcatagagtcaaaatatggcgccaagattacaccactctgtatcacaattgatcctcaacgtgattcacctgctcaggttaaggcatatcttagtgggcaggtgctctctatatt

SEQ ID NO: 31829 - DNA, 402 bp, Oryza sativa
  unsure (1)..(402): unsure at all n locations
agcttctctctttagtcggataccgntattcccctttctctctcctgctctcgctttcttgtgcacggatgggcaacgaaattgctgcgaggttctcgtgaccaaagttggtcatgccaacccacggaaagaacggtccccattccactctcttctccatgcaagcaatttgcctatgtgaaccaacattgccatatatcacgtgtgtgcactgtgaatagtcttatagaacattgctctagccatacatacaacttacaaaagcagaaatcatcaactcatggccgtcagcatgtagccaatcttcgcatatgcctgtaaatacatctgaactctggaaatgatggctgtagcttcgacgaaacaaaacaactgcatttctggactgataaccggcatgta

SEQ ID NO: 31830 - DNA, 474 bp, Oryza sativa
  unsure (1)..(474): unsure at all n locations
cgggagtatgttctttactactaataaggaaccatattactttntctgtagaaaattatcactttgtgttattatcaccttgatggttgggcccatcatgcctttgtaaagatcgtcatctggagtacaggccgtcatacttcagcaacaccaccgtggtctccgccgcggggcgccacgacgagctccgcccgcactacgagaaagaattntaaaaaatattctaaaaatgtctcaaaagtttctctagagtaaaagtgttctaggcatttttaaaatgtctctaaaatgtgtctctacttttcaaaattcttgattttagagggacctctacaaaagtgcctctacatgagtttcttttggaagtgataagcttgggagtatgttctttactactaataaggaaccatattagcttttctgtagaaaagtatcacttttgcgttatatcaccttgatgggtgggccatcatg

SEQ ID NO: 31831 - DNA, 446 bp, Oryza sativa
  unsure (1)..(446): unsure at all n locations
agcttttctctgattttctgatattccatattgatgttgtgtttgaactttgaaatgggaatatgagatcagttgatcaccagtgaggtcttatttttagctgctagtgatgaactatttattttgttcatgtgatgacctatttatcctatgatttttgcaaaacagctaaatggcttagctgcggctatagcccgctatagctgatcttagctatttaaagccctagcagctaaaggccttagccggctatttaaatccttgaaaaaaacaaacctggtgcggtaaagctgaagcgctacaatttagtttctgcgagagcacgatctcgattcaccgactctgcttcttcgccccctaccaacctcgtgaggcgtgatcngaccggcgacacggacgagtagctgtgtctaatcatatgctcccttttcgagaccggcaacagc

SEQ ID NO: 31832 - DNA, 488 bp, Oryza sativa
  unsure (1)..(488): unsure at all n locations
ntgtctgacagtcgtagtgcatcagagttccaactgctgtatgcctgtaagctgcttaggtcacatcgttatttgaggttatgcacttgttgagctctctcgggtataggcgcgtagttagttgttgaggccaggaataaagggaaaaggatgtgtttcgttacagttttcttttgtatcagtgactcgtgaatgttttgccaacctgtgcatttcacctaggtcccaataaacaacatgattatataatgagcgactaaagccttttatgaatttcatatgttctggattagatggatgagcattagtgttattttggaagtatcaagcgacagcacaatacttgtcggttcgcaccaattaatagactaaaaacctagtaaaaccagtaagatagtgantttttaataagttggtgatacatctctattacattgtttgcctctataaccaccactttaatagccagatataacgataaacatgct

SEQ ID NO: 31833 - DNA, 328 bp, Oryza sativa
agcttgcctccgctaccgcagcctcctttccgtggttgactcctttctctcgtagatcagcgagcgaactcgagctcaacggagctcgttggtcatcgcagccgccggtctgcctcttctcaattgaggtggtcgccgtgcacaggctatcagcctccatggacggcttccaccatgtcatcaccatccgcaaaggcggagatgaatgacgacgtcgtgcagataatgccaacgccgggaagccgctctagctcgagctatgacagtttgtcctcgtctcggtgcttctcctccgatcctcaccttgcgggctgaacctaagagatga

SEQ ID NO: 31834 - DNA, 306 bp, Oryza sativa
  unsure (1)..(306): unsure at all n locations
tcacgaatctttgagagaacccgcgatcgacgaatattcggtaaccacgaccatacgcaaacaatcaaaaacctaaacaaggaccaaaagagaaatcctatttaggctaattaatagtgccattaaatagatctcaactttagagaattactggaagtggaacggagtcaatcggagttacggatcgggagatatngaatttggaagtttaagtggaatttctgggcgaaggaagatanttgtggaacaagggggaaatagatttattaaatcccttggaaaagaaaaggaaggagggatgtgatt

SEQ ID NO: 31835 - DNA, 345 bp, Oryza sativa
  unsure (1)..(345): unsure at all n locations
agcttatatactnttctccaaccaaacctgacatggtgtcgatcgatcccctcttctatctcgattagtgtctacaccatgcggcgccgcagcggcatacgcagcttctgccacggcgtcgactccacgtcgaccacgatgcagcgccggctggtcggcgccgacgcggcgtcgtcgtctttcctcaccgtgccgacgtcgacggcgtcgtccgtgggccgtcctgaaagcgaggcggcggcggcggtgactctggagcagatgatcctgcagcttgacctcgaggaggcggcggcgaggaaggcccancancagcagcagccgcggcgcgcgtcgtgcgtgaac

SEQ ID NO: 31836 - DNA, 377 bp, Oryza sativa
  unsure (1)..(377): unsure at all n locations
nntgcgtattttntattaggtatatataaaaaccaagtaattagctgtttaattaaattaaatgtaaatgccttacagcttatggctggtgaaaatttcgaaatcgaaggacacgcataaggaatcatctatactaatataaaaaggaggagttgcaccctccaatcctacgtctccaatcctacgtgtgaaatcatccggatcaatcctaccgtccatccgcacacacgatttcactaccgcccgatttactgtcgcgaagactactctccatccacgcgcgattgcgcgaagacatcgctcctcctctctcgctcactcctcgctcctctgtactgtatccgaggtccccttccgccgccgccggatcctaccat

SEQ ID NO: 31837 - DNA, 449 bp, Oryza sativa
  unsure (1)..(449): unsure at all n locations
agctnggcatatagtgcacactntctgaaaatgatggccataattggagttaccctaattctgctttntcaagtgcaggtctgcagatcagatagcgatatattctaaagagagattatactctggaattgaccatcagacaaatgttagtgagcagaacggagaaattctgcccaaaagactaaagcttacagaactaatgcctacaagttatttggtgtagaaatgcagaattttgcgattttctgatggctggaagttgctcctttccattgcttgtaagttgtaattacctctcaaagattttttttttcctttcatgcttgaatacaacataaacttcatggtctgatcctgagtttctgaaatatgatcttacaaacaaggaaatacctgttattgcatcttgatatgatnttttcctagcaatggtcgtttcagcgttataa

SEQ ID NO: 31838 - DNA, 502 bp, Oryza sativa
  unsure (1)..(502): unsure at all n locations
tattaggacctataaaactcagcttggtaacttccctagcacagctgataaacctccaagaattcatgctgatatgtctagcattagagatgtctcagtcccccctgacaccactgagacagagcaccccactagatccatgctaagttcatccaaggaagtaggaacctatattgaacctaccccacaaaagcctccagcatcgctggataatttctctgaatctgatgggcctatcagtggtgctagtcattctcaaatcagtccaagaacagccaaagaagattctgaccgactccatgcatctgatttgtatagaagtgacagaaaatctactggtcacagttatgaagctacttatggcaaatctcccacccggtgagctacagacagttctcccaacaagctccactctactgaagcacaccaaatgctgcangctgagaagtggcacgctgttcaagctggattgcgcaatctacagggagatattgataattca

SEQ ID NO: 31839 - DNA, 430 bp, Oryza sativa
  unsure (1)..(430): unsure at all n locations
ttgagctgcctcttctatttgctaatacgaacgcgcatattgatgtgcatgttacattggttctactaacaatggcccggatatgtcaaatcattggggataactgagctcaacatcgacatcttcgttgagacacgaggagggatcaacatgaccattataagggaagtgatgatgttctacgcaagatcaaatctgcactgncttatttcgagggaaactatgatcctcgtgcttacattaattgggagctagcggttgatagtgaatttcaaaagcatgtcttgtccgagaaacacaaggttatgtgtgcctctagtgttttaattaaacatgcttctaatgatcggaaacatctttgtaggcataacaaaataccacaatcttggaaagacctgtaacgatatttcagagatatttatgttcccat

SEQ ID NO: 31840 - DNA, 494 bp, Oryza sativa
  unsure (1)..(494): unsure at all n locations
gacctatgaaactcagcttttcttgggcagggaccttactggctctaagttagtagcgtggaattaccttctctcacgcatcgctaatattatattatctcacgacccacatgagtttaaatggaatctaaccactgatggtagattctcggttaaatctctttatcttgcgttggtgcagaccgatgttcccaatataaacaaaagaatctggaagatcaaagtcctacctagagattaagatcttcttatggtacttatgtcacatcctgattttcgtttcaggatttataaattatttaataaattaataatagaatttatattaagtgttctttaattntacaagtgaagttaaatgtgggaaataaaatctcttaaatctaaagcatggatggatttaatttttattaaattctccatgattaagtcaactctaatgaaatttctcggagttttacagagctcaatttctaaatgatacaaagaacagt

SEQ ID NO: 31841 - DNA, 442 bp, Oryza sativa
  unsure (1)..(442): unsure at all n locations
agctntcattgctgccacctatcttataaatcttacaccaagtaaagtcattcaatatgaaacgcctctagagcatttatttcatcaaaaacccagctatacatcccttcgggtcttcggttgtgcatgttggcccaatcttcgtccatataatgcaagaaagcttcaattccgttccaaacagtgtgtgttcttgggttatagtaatttacacaaggggttcaagtgtctagatgtagcagctggtagagtgtatatttcaagggatgttgtctttgatgagaatgtttttccttttgcatccctccactctaatgccggtgcaagactacggtctgagattntattgctgccacctacacttctgaacccggatgatagtactggtaggggtacaacaataggagatgaccatatgcttgataatcctgaacatactaat

SEQ ID NO: 31842 - DNA, 446 bp, Oryza sativa
tcatttcacgcttgacaagtgataatactgtacgactaattaatgatagtggttcatcatgatgacaatgctaggcatcctttaagctcttagtacttgtgtttgtgtgcacctaataatgtctgcttgttcacacacacaagccaacagaaataccatactcccctataaccgctatgtattttcattaaagcaatgaacatgatattattattactatctatcaattattggtcccaggaaaaatatcagaacaggatcactcatgaaaaaacagaaagctcttattaatagtcgcccataatattatacgagacaaagacaataaattgtgatgaattgtttgatgaaactaaatcaagattacttcgttggtgtttattggctgattggagtatgtagtaagcatgcaatctgttcaaaaaaaaaagcttaatttgcacact

SEQ ID NO: 31843 - DNA, 443 bp, Oryza sativa
  unsure (1)..(443): unsure at all n locations
agctngctctcctatagctgaaatgtggctntaattntgttggccacatgatagacatgttagctaaatgaagtatagcaacctttggcaacataggtatgctaaccaaataaccccgaagtgtggaagtgaccgtccatgaagcctggcatcggtttaggagagcgcacggctgtcgtcgcccaactatatgcgggtcgatgtagcaaacatcttaacaacagaatgctggctcgtgctcatcacttagaatcccttctttctataaaattaagacccaaagctgcctcctcaatttgccacttcatcaatattatattagctgttcgatcaatatgtatatcagacatatgccattggatccctcgtnctcttgcccagcatgcatggtaatcaattgccctatcccatttcccttccttaatctcatatattaatttaca

SEQ ID NO: 31844 - DNA, 306 bp, Oryza sativa
atgggaccgagtctgtagttcttcagtggattgaggcggcagatgtggacggagaccgagcgccacccttccgtagtcgataggcctccgcgagcgtatgcattgtgggaccgtctcaacgccgagatggcgaatgctctgtcagcgctgccccttcgcttgcgccgcggatcgacgcggtcgctgcttacttgatctcacgctatatggcgaacgccgcgtgacccctgctgagggcggtggagttggcgccagcgccggccgagggcctaggaggacaccgttgatgccatgctcgtgacgatg

SEQ ID NO: 31845 - DNA, 294 bp, Oryza sativa
  unsure (1)..(294): unsure at all n locations
agcttncttgccctcatcgnanggagttagatcttcgcggatgggctccggtttatcgagtattctccactcgctgttgcctgggttgaagactgaaaggttgcccctctgcccaaggaagtagaacttccctcggaaatagactggattattgcgtgccactgggaacatgacttcgtcggtctcaaaatcaaactcactccaataatcctcctcggtctcactctcctcatactcagccttttcattgtagnttatctcattcttctcagcctctctcttctcattctgatc

SEQ ID NO: 31846 - DNA, 477 bp, Oryza sativa
  unsure (1)..(477): unsure at all n locations
tagtaaaatatttcagcaacgaataatatttgtcctcaagctttgtgtttcctgctcgtgtacaatacataaaagagggaatctcaataattgtggatgtctttttcaccatgaaaaatggagacatggttgcacaaaaagcatcgtgcgtacgcttttccctttcaaaatggagttattttgtttgttactacatatttccaacttatctctaagatctttttttttcaaaaataaaaaaaaaactatctctacgtatgtgagagatggagacaatattatatatatatttttcactttagagcaatatatgacaaatgtaaagatacgaaatgtcgttttctagggggaaactcacaaggagggcatccttgctgttgctgcccatgcaaagcaatatcttgaattggcattcagagatatatatggaanagctctcangatatgttccgaaacgggcagaacaagtttcttatg

SEQ ID NO: 31847 - DNA, 452 bp, Oryza sativa
  unsure (1)..(452): unsure at all n locations
agctntgcaggaggngacttgtagttttggctatagacattgttcttggggaggttggcaaggtgtgcactactccaaccttgatggtgtgcatgctgtacgatttagcggtaaccatattgacgttcttttgaaacaaggactcctgaaaacggcattgaatcgaactcaccacacctacactaccatgttgaggttttgccttgctcangcctgaaaacggtattcgcccaaatcattcacatgttgagcttctttgtgacgcctagggtctgaaaatagtgtggacccaacttattcatacgttgaggttctttgtgacggccaggacccgaaaacgttattggacctacttcatttagtngaatcatacttacactggactttcattctcgcttacagaaaaaagtttgaaccggcattatagatcaactgatagcttttctatttag

SEQ ID NO: 31848 - DNA, 376 bp, Oryza sativa
  unsure (1)..(376): unsure at all n locations
gggctcctcagagtgngaaatggctcttctcttgtcacattctaaagttaactgactttcatctgtctgctgtccaccatcgcaaacctgttcttttgcctgtnttgctagctgatcatcctcacatccagcttcagttatttcttcttcatcatcagaaagagcattgtttggaacaacaccatcatagaaaaaggattgcaatattgcgagtgccttttctctgattcaatccacacttcttcactgtaatctgcacttcgaggaagaattaatacattccgcatctcacgcacctgtgagtgagcacgtaaagtataatcaatgacattgatcattctttagattaaatcatcatgctgaacgacagaataca

SEQ ID NO: 31849 - DNA, 375 bp, Oryza sativa
  unsure (1)..(375): unsure at all n locations
agcttaagtgatcagtgatgcagtacagcacatgttctacttcctctatcaaanaaaaaactaatcctagatttgaatctagaaagacggagggagtagctgagaaatgatgggcttgtggagtctcctctgtgaattgggtgcctaaacaaagatcaagctgacttatgcccattattttttttaagagaacttatgtgaaaacaaaagaggatcaagttgacttatagtataatcgcacctgtcttttaactgtcgagtgacgtctgaccagcgtaattctttcataaatttggtggccatgactttaattccgttattaaccagccacccaagattaccatttctctgcgtgccatgccatatttattctca

SEQ ID NO: 31850 - DNA, 402 bp, Oryza sativa
  unsure (1)..(402): unsure at all n locations
cttgcaccgtcgcatgcgcgctctgtttaagaagctgaagcggcgagtcgtgaaagagctccagtgggagcagcgtctcttgttgaagaagcaagctcacgcggcgcanggtgcacccataacacgcgccctattcgcgtatatgtcttcatgtgtagttcaactgttttactatctgagaagacatatgctttttattgtcacgcccagaaatatacgaataaaaattcacgtaaaatgtgcattaaaataccggtacaagaccgggcggggtacacaaacgacaaatttgacatacagatacatgtcttacaaacattggtaaagtcttacataaatgcagcggaaaataaagagattactggagcttagccttgacttggaccgcagcgggaacaccac

SEQ ID NO: 31851 - DNA, 65 bp, Oryza sativa
aattatgctccgggagcaatgtattaacgctgtgtcagtgacttggtctattatggcacgaaggg

SEQ ID NO: 31852 - DNA, 374 bp, Oryza sativa
  unsure (1)..(374): unsure at all n locations
ctcagcttagttactcanaatatgtgagctccctcacggaaagtacaacctagctttctcaattacaggcatacatcacgggattacagacttgacctcaacgctcctgattatcattaactctttattcaatgacgaaggacatatctaaccgtctaccgacgagagtgtgcatggtgactacgacaatcataacatatatcgctctatcttctcgaaaacaccgataccgatcagtcgaaatatatgtgcataatagcgctcaatctatgagcggatgcctcctctgatatgattacggatccagcaatatatcactagctctatccattaatacaagagctatactactccatgagagcgaccggatatat

SEQ ID NO: 31853 - DNA, 152 bp, Oryza sativa
cgggatccttaagcacctgcggctgcactattgttcttgtgacaatccagaataattggattgaatcagaagggaggagtgcatgccctgccgaaaacaaaaattaaagaatttcaagaacctgctgtgataccaacatggagtttcaggtc

SEQ ID NO: 31854 - DNA, 477 bp, Oryza sativa
  unsure (1)..(477): unsure at all n locations
tctgagagaagggagcgcgttctgcttcggcacctctacatcgtgctcgcttcgcctgtggcttgccgtgacggtcgcgtcgatgttttgtcaatcgtgtgttcttttatagataatgaaagagcaaaatgtatatatatagctcctgtcgtaacaatcaattctgcttattaatctactgctccctccgtccagaataaatttatttttatnctctttgtttgtccctgaataattatattggtgagtaatcattgtatcggagtttataaatatataggataaatacattgaaaatagataaagtgagaaagaattgcatcggagtttgataaaataagaatattttatttttttagctttggattggtatgtgtgaagtagataaaaattaaaatattttgagatggagagaatgctgtaggattcacatttacgtgttgtgcgtatgcgagatgcccagtagctttccgtata

SEQ ID NO: 31855 - DNA, 437 bp, Oryza sativa
ttgcatttataaaacatgtgtaagcgctagcctggaaaagacatgaatgctgctccgttgacatgcggaccccacatgtcaacctaaaggaccgcggtagaccggatacacatagacggtccacgggtcgacggaagcggaccccgtgtgtcaaccgaggcgagtggccaacaaacggactccactatacaccacacggcctgcacacgtggaaaccacgcggctaccgagcgggcacactaacacggtcaccacgcgcacaagcgaacgtctgccgacgcctatacactggtaccggggccgacaaccgcacaacggcacgggcgacaccgaaaggacgaggacagggcagcgagggagagggaaccttaccaccacgcgacgaggcgtgggagcgacaactactaacgggcgctgcggagacagactggcacaac

SEQ ID NO: 31856 - DNA, 413 bp, Oryza sativa
  unsure (1)..(413): unsure at all n locations
agcttcatatcatagctagcagttagcttgtactactatgcacaaagccaccataggaagttaaaaaccctcactagagtaggttactcaaataatgtcctcatatgtgtcaatgacaatgtaagaacatcacaacaggtgttcactttcttcctcatgcttcctcttcctaaaactccttcatattctttcttcacctcccttcctttatgctgtatgtatcacctcttagttgctatgacttcttacaatgattcattgtggtggagtaaacagttgcatatatanctcaggaagtatagaagagttacaaaagtgtcatactttattgtcgcactttacgtgaacaggtggttggtggatgcatatttcttctaatgtattaaccttgaggtactttagttaatgcattt

SEQ ID NO: 31857 - DNA, 406 bp, Oryza sativa
gctaacggctatactcagaaagaaggcgaagatttctttgacacttactcacctggtgctagaatgaccacaattcgtgtgctactttccctagcagcctcacatggtcttctcgttcatcaaatggacgttaagacagcttttcttaatggagagctggatgaggagatctatatggatcaacctgatgggtttgtatttgaaggtcaagaaggcaaagtgtgcaaattgttgaagtctttgtatggtctgaaacaagctcctaagcaatggcatgagaaatatgacaaaacattgacatctgcaggctttgcagtcaatgaggcagataaatgtgtgtactatcgccatggtgggggtgagggagatattatgtgctcgatgttgagacatactgatatttggg

SEQ ID NO: 31858 - DNA, 407 bp, Oryza sativa
  unsure (1)..(407): unsure at all n locations
agcttagtaaattatttatggtttagccttactttctagtaggccggngtgtatgagttcgtataattcagagaagcttcctatttaccccgaagtggtagtttaggtgactaagcgtgtccaatacaacggtattgggccacgtggtgggttcccgttgtgtccgccaccacggggttaagtttaaggcgtgagcccgccacttaacggttctaggtcatataacatgtatggcttaggatggagtaacacgtatcatgctggtgtaaggctaaatcatgaattttggaaaagctttgttgcggataataaatcaggtacttatgtatcgcatgccatgctcttgcatgattattatttcgcatcatgtgggtaaagtgtacaaactctacagagtaaaaactaat

SEQ ID NO: 31859 - DNA, 379 bp, Oryza sativa
  unsure (1)..(379): unsure at all n locations
tcttgaggctggttngcttgttcacccacttgttccattgaacaaatcagatgtttctgcacaacgactgcggcaaattatacgtggagcatacgatagaccacttgaaactgggaaaaactctgagtcaatgcaggtcctacgtagtgctgtcatgtcccttgctggtaggtctgatgatgggacttctgacggatgccactgggctgatggtttccccttgaatctccatctataccagatgttggtagaagcttgctttgataatgatgatggcactgttgttgatgagattgatgaggtgatggagctcttaaagaagacctggggtattctgggaattaaccagatgcttcacaacctttgctttgcttgggca

SEQ ID NO: 31860 - DNA, 398 bp, Oryza sativa
  unsure (1)..(398): unsure at all n locations
agcttcggcgagtttcagcgaaaacaactaattctaactggcagataagctcaacggagcgcgtcgtgagctcaatgcactagtggaaatcaacttttctttttctttcttttatatttttgatatttttttatttttctaggacacgaaaataggcacacctccaagttacagctcaatcggagttgatatgtggcctatggaattttctgaaaccactataaacaaggtgcaggaacatgtgagctcgaacagacaattttgcaagacaaatttcggaatattggattcgccaaacccaccagagggggggggggagaaacggatgntaaaaattttctcttatccaaaaagttaaattttgcctgattccgagtccgtatgcaaaagttatggct

SEQ ID NO: 31861 - DNA, 175 bp, Oryza sativa
  unsure (1)..(175): unsure at all n locations
nggaagtgtgtgagtgaagtgagggagcgatgtctttatatataggtaggtatgacgggtggctaaggggaaatgtccgaagtgccctccaacagtcatcagggatgcatctaggacgtccacgccaaaccccacatccaacggtggagatgatggttcggccgaacctggttcg

SEQ ID NO: 31862 - DNA, 452 bp, Oryza sativa
  unsure (1)..(452): unsure at all n locations
agcttctcttactgaagggggagaaagatatattctgtattgagtacaaccacaggacttagcgagccacaccggagatgcataattaatgcaagggagtacaaggggataataatataggggttaagttttgcagtaaacagcatttaaaagtcacttagttgcccagagccattttataaagacgatcctagagctacacagtattattaatcaaggtcgtgaaccctcacgaacctgccttaacccaaggcctacgatgattcagaccgaactggcaacccgaccctgtgtcccagctcgtcccaagccaacccaggccaaccattccacattntagttgttaagcaaattntaagaatttaaaacactgacttgggtacattgctcggcttgcccataaccgagggcgcggctattcgaatagattatactctgatcagaggtgtaca

SEQ ID NO: 31863 - DNA, 478 bp, Oryza sativa
  unsure (1)..(478): unsure at all n locations
ntntatcaatcccatctattaattatctctgcgggtgattcccgcaacaacagcgaatcattggatcctgcaacaatggcgatccacatcatctaatcgaattctgcaacaacagcaaccctcatcgctaggccacgctcacaggattcgcggaagtccttaagcccgttggataaagccattaagaaagaactactaagctagcatgtcccattccaagtcatatggtcgacacgatcgctacgacgcttgcataccttacagcagttgttaattaaccttatgatgttaagcatatacagctgactacacaataaccaagttcagactgccaattattaagatcaccaaagaactgatccacagatccacatgcacaatattaacattcaaaaataaatttctggttntctatgcaatggtgagagttatataggttgcannatatttgaataactaagcaatatgatcaagagat

SEQ ID NO: 31864 - DNA, 413 bp, Oryza sativa
  unsure (1)..(413): unsure at all n locations
atcttaagcaccgcggctgcagctgctcgtatgcgaagaaagatgtattttatctgaggtgagaacgcagataagccatctacgccagctactccccaccactgtgactcctcagaaagtgctggcgaagagagctacttgccacctgcgagggtcatgagtgctctatgcatatccaagggcagcagatttgtgagcccagatggcaatgagacaacatcacaggcagaattcaatcaaatatcatgcttagccgccctttcacaagatcattctcatttgaacctggccgtctttgttcgctcattgataatgatgggaaggaggttggcaggggatagatcttccaagttgaggggagactgcaagggaaggccctgacagatactcgcngttgatcgttgatgttattg

SEQ ID NO: 31865 - DNA, 405 bp, Oryza sativa
  unsure (1)..(405): unsure at all n locations
ntctttagtagatcgatatccttatccgaatatagcatgaattctactatcggcgacttgattactcccatcggctgattccgagatgctcganccgaaagtgactctataccgacgatgactttgggctaaccaaatttcactgtcaacaaatactactacaaaaaatgccatagagatcggcactataggtgtcgcaacagctgaaaccggcacctatagtgaatttaccttctacacgggctgaagacacataaaaccaacacctttaagcaactataggcgccggttgtaaagaacaaccgcacctatagtataggagccagttttctaaataaacactaacaccattaatatagtatatgtgtccgtttttaagagagccgcacctatcaaaacgagccg

SEQ ID NO: 31866 - DNA, 407 bp, Oryza sativa
  unsure (1)..(407): unsure at all n locations
agctntgcggtgatcctagagtcgccaatcatcttaatctagcaaaagctaaatcaagatgggttttgataagctaaaccggctagcggagccgatctaaatagaacgatagataactatccgtctcgtgggcaaaacggaaggttttcaggacaaacctacaaagaggtgttgcactctcacagtggcggcggacgatttacggcgcanatcgacaaagatagacaaactaaactagaactagaagcaaaagtaaaagaacgatacgattgattgatagttgattgattttacaatgaaccggccttaccccttatatagggattggtcttgccctctacaggccctcctccacgtccaactcgggatataatccaaagggaaacctgaacatgacttcctgagca

SEQ ID NO: 31867 - DNA, 312 bp, Oryza sativa
  unsure (1)..(312): unsure at all n locations
atcctgcattacggaccttcaaactcagcttgattatggctgaccggctaacgttacactagnaataccatccgtgcgttgctatggatctaacaagtaatttatttgggaacaaagagaacatatttttaaaaaaaacactatactagttggaactgattttcctaattagattccagatggctgtatattttctgtgaatacatatgcttctgcatacccaataagccattcttatatatctattttagtaagaagaagaacaatatgtctatatttatagcttataataaaaaaaatacataaagcttc

SEQ ID NO: 31868 - DNA, 281 bp, Oryza sativa
ataatttttattccctttggtctacccgagaaagaatagaatcaaaaaggatttcttttcattcgttgaccctccggaaattttcacatgatgaatggtagaaactggtccaacaaagggccaacgtgaggaaataacttggaaaggtacattaagaaatttacatggttttaccaatatcatgttggccacacccaaacagcagcttcgcacacactgcaaaattggataccagctactaagcaaccccaatggatctttacaaaaaagaaaaaaacttg

SEQ ID NO: 31869 - DNA, 468 bp, Oryza sativa
cgagatatctctttgtaaatgaagccactaaaacctgtgcaattccagcaaatatgcttccctctggttgtacatggacgtacaggttggtacccagaaataacatgataatggcgagaaacatgagtaatgtgggtatgccaaatcctattggccagctgacattgttctggatgtagatgatgacaatcatagataacacaagggcagcagtacttgttccatagtaccaattataatagctgtttagtccctttcgaccttcttcgtcggtcttatcaaactggtctactccaaagggcaagctacaaggccggatcgctcctccaccgataattataaagcctagagaaaggtatagcacacttagctggagtgttgatggactgttgcagcctccgcctagtctggttttttcatggcagatcggtggcttgagagctggaagtgatgcatccaaagtcattc

SEQ ID NO: 31870 - DNA, 322 bp, Oryza sativa
tggcgaagcgcttgaacagcacacttgctttcttttgttatgatcttctatcaattattgagccacgccaagtttttgagctggtaatgttggaaatcacatttaaatttttcgttcttgccctgattctttgttatttatgcatcgaattcttctgtttgttcgcaaagaaatcctgctttgcttcaacattcctgttccttttaagggtggccatttgacttcttggtattggttctgttaatatttgtacccctttttcctggtggttggttgggaattatttgagtcaatttgtatgagtcgccagtgaaaagctttg

SEQ ID NO: 31871 - DNA, 299 bp, Oryza sativa
  unsure (1)..(299): unsure at all n locations
ngtcgactctctagaactaaccacgtgccatctgctgacacgagcacctagccatgatagagaccccccatattgctgagcctgctgcgccatgcacaaaccacataacgatccactgttgatctgacttcagctatggaacggtcagtgcgtctgccctgtcgccaatataatctgcgtgcgcttcccattcctcgcactagagagcgtggtcaattgacttaaaggcagaggctctcagaatatgcgcctcactgatatcaatccgagaggccagatngatgcgggtcgatgagcga

SEQ ID NO: 31872 - DNA, 193 bp, Oryza sativa
atccttcaatgccttctattagtacaaacacttagcctttgatggggatgatccctacgaaatagcaggtgatatatagtacagagaaacagcctcaaggtactatatcgatcaatacgactcgcggattaactatattgcggtatataaaacctattcaaacactatgtatagatcttttaacggtcattca

SEQ ID NO: 31873 - DNA, 435 bp, Oryza sativa
  unsure (1)..(435): unsure at all n locations
ctcagcttctacccaccttacttgatggcccgttgaatggatgagcatattactagtcacaataaaattaatcactttaccgaacatctcaattatcttggttgtgaacacaaacaaatagggatagggattttattcgcaaacgcgcaaaagaattgcacatcaatatattaaaagaatagagttttgatacacgatgcactcagtcagaccggcctacgccaagaaaggaagaaaacaaagattaaaaaaacaaagaatggaaaggaaaaaaaactcgaaacgacggtaactcaactccaaacagcgggagggggtagagccactctacgctcccaacaattccccanaggaagcgacggttgctaacgaccacagccggcccttcgaaaggatggactctatgactactgcgaccgaagagagcacagagtc

SEQ ID NO: 31874 - DNA, 439 bp, Oryza sativa
  unsure (1)..(439): unsure at all n locations
agcttgcccgcaggtacaccaaacacgcacttatctgttgttatttttatgcgggcggagcgtaggttctcaaaagtttccgctagatctgagagtaaggtctcttggttgcgcgtttttacaaccaagtcatcgacatacgcctcaatattacgtcctatttggctacccaaagaaattcgagtagtacgctgaaaagtaggacctgcattctttaacccgaagggcattgatgtataacaataggttcctacggnggtaatgaacgcagttttttcctcatcctccctagccatgcgaatctgatggtaaccagagtatgcatctagaaaacacaaaaggtcgcaccccgcagtggagtcgacgatctgatctatgcgaggcagggggtaaggatccttangacatgccttgttaaggtcggtgtagtcgatgcaca

SEQ ID NO: 31875 - DNA, 469 bp, Oryza sativa
  unsure (1)..(469): unsure at all n locations
atattaggaataaattattatctagagcctgctgcaaaagaatatattcaaaaatgcaaaaaagctaaaggaaagaagacttcagaaatacccattaagatgactataaaagaagaagggttttttaaaaaacccacatacaaggaatgcttaacaaaaggagtggatccattagatggggaatatattgattggaagataatagaaaaattngaagaagcctccccacagttaaagaaggaattgaaggaagaaatacttaaagaattaaaacaagaaatggatcagaaatttgagcaaataaaaaaggcaatagatgagaaattagaagtttctttttctgaattggacacaatggatcttggtggccatgggcaaccagatgaataaattaatataagctaaatatggttttcaatatatattgataatagaatatcaataatttgggcgtggaagaagaataaac

SEQ ID NO: 31876 - DNA, 452 bp, Oryza sativa
  unsure (1)..(452): unsure at all n locations
agctntctcaaatgatattaagccacgtcatattatttatatgangccgtggatgcaacaaaaattcagcccctgccgctggatgcattgtgtaaaagagtctcagtaaaagagagccaacggtcaagaatattctggataggttacgaagaagggaacgagaaggaaagaaatccgctcctgtgccaccagccgtcgcctgcggccgtgccttgcctccgcgccacctgcacccagcccgccgtgcgcctgccccgtcagtcccatgcatcgtcaccgcctgcaccagcccgccgtgcaccgacgccggcagccctgtgcccctccgccacctgcgcccgtgctgtgcgcttccgccacctgcgcccggcccgccgtgcgccgccgctggtcgtgccgtgcgcacgatgttctgacggcgtgtgctacttgctgctacaaccgtggtacta

SEQ ID NO: 31877 - DNA, 478 bp, Oryza sativa
  unsure (1)..(478): unsure at all n locations
ctaagctgttccnacacaatcgctgctcaagaacacccaattcccttagaaaaactagctcagaaagccttattcactccacaagctgttcctgttgcacacaggtcaccaaagagttcgcaagaagcagcatgcttatagcttatgaaaacaacatgcttaggtaaatgaccaaaagaatctgatggcttctcatggacaagattaggctagtgagagctctccagcagggatattccttttcaccaatttctcccatgattcgttggtttcttctatgaccttcagagcatattcctaggagagagaattatacaatcagaatgcaaaaatatcctctatgtttaaatataactgaaggagtccaggcttaccttgcttgtgggtttgttgcccagaccaaatcttgttgcaggcttaccgtctggtatcttgtagtccctgaaccagtctctgatggagtcaatgttccctgaat

SEQ ID NO: 31878 - DNA, 93 bp, Oryza sativa
  unsure (1)..(93): unsure at all n locations
agcttgaaatacccctcaagaatntatatgggttaactatttttgaaaaccttcaaaaggtttcaaatatttgaaattttgtgtttattatgg

SEQ ID NO: 31879 - DNA, 463 bp, Oryza sativa
  unsure (1)..(463): unsure at all n locations
tcggatgtgcatcgactacaccgaccttaacaaggcatgtcctattgatccttacccnctgcctcgcatagatcagatcatcgactccactgcggggtgcgaccttttgtgttttctagatgcatactctggttaccatcagattcgcatggctagggaggatgaggaaaaaactgcgttcattacccccgtaggaacttattgttatatgtcaatgcccttcgggttaaagaatgcaggtcctacttttcaacgtactactcgaatttctttgggtagccaaataggacgtaatgttgaggcttatgtcgatgactctggtgtaaaaacgcgcaaccaagaaactttactttcagatctagcggaaacttttgagaacctccgctccgcccgcataaagctgaaccccgataagtgtngtgttggtgtacctgcgggcaagcttcttgggtttttggtctct

SEQ ID NO: 31880 - DNA, 361 bp, Oryza sativa
agcttgacaagagctcatcggggtttctgtttagcataattcttctactaacaaatagaaaagtacattatcgcagccgcctccgctcggccttcgccgcgacgctgccgttcgccgtccgcccccgtggcgccgcttacgccgcccgccgcccgctccttcgtgtctcccgttgccgccgtgtcttcccgaagcagtgaagagtgagatagagtgagagagagaagagaggaagagtgagagagagggaaagtgaagactatgacatgcgggtcccacaattttttaattagaaaacgctgactgggatgccacgtgtacgccacgtagaccaaaaccaccgcggattagatcgaggggg

SEQ ID NO: 31881 - DNA, 431 bp, Oryza sativa
  unsure (1)..(431): unsure at all n locations
cagctatacctacgcacgcgcacggggcctgtggccctggtggtatatatatacataatacaccgagaaatactacgaagagagaatagagaaagaaatactcctaaaagattacaattgatgaacgacacctgtcaaattatcttgccaaattccaaaacctactgctaaaccccaactaagcaacatccaatttctcacacagtcacaagcatgtctaaaaaaatagaggcacagggaatgctgttgaagtccaaagccaccagcatgaagccatcaagaagctgacttgatcttgttgttgtatggatcagagctcgccaacgccctttgtgggaaggaagccctataggagggagggccactgaacgttgctgctcgaggccacccgcattaagtttcctcaatcaggctatatcanattgcttgtt

SEQ ID NO: 31882 - DNA, 425 bp, Oryza sativa
  unsure (1)..(425): unsure at all n locations
gcttcaactatagcttaacatttcggttggactgataaaaatcccataaagggttnttaagcaaatttcatatgcatataccacatgcacgccctcacactcatatagatgtaccctaacaaatttatacaggattggagatcaaatctcacatagcatgtctatcccattacatagctaaataatattagttggggcctaaccttatgtaaactaggcatgcatattggtcatgaagaaaatggggataggcaggaaagtacttctcttcccgtctagccttaaggtgaagtgaaatcaagatgtgtcaataaaacacttgtcgtcattgtaccagtaaaaatgtattttagttcgctaggattgggtcagcttatatagccttangaggtacacatgaaagtacaataatgccctttcaaagc

SEQ ID NO: 31883 - DNA, 479 bp, Oryza sativa
  unsure (1)..(479): unsure at all n locations
ttggaccatatctaagagagtcactgccttttcctttcttgtgtgctttaaatatctttgntatctttgaagtttgacctgttagttttatttctgattatccaggagttggctgaactcgtgcacagggtccatttgctttgcctactagcaaggggtagggtaattgacaaggcttgcaatgatcctctgattcaggtgcgagcattacagtggtattcattatttcatttacaccagattctgtatttctcatgttccaaaatgatgaagtggcattatgatttatgaatcatagtggttaaaacagaggtgtgtttcaaacagaattgtgtcaatattctttgaaatgttctttccaggcttcaattctctctgttttaccacaacatgtactacggaattctgtagacactccaattctgaaagctaatgaactgcgtagtcttgtgagctgggtaagtccccttcatatatta

SEQ ID NO: 31884 - DNA, 370 bp, Oryza sativa
tcgacccggatcttaagcactgggctcagcttcttatagataatttctttccgtattagcacgaatccgactattgacgatgtgatgattctcttaggggcttaccaaatttcactgttaaaagatggcggacgcgggagttgaggaggagagaggaaactgtgtgggaagaagagagggcttatcctcgggctcaccggcggctgtaacacgggaaggaggcagtgatgacgatggcgtggctcctagtggcacgaagcaacggtggcagcggcggctgctaacggtggagatggcggctgcggcggcagcaacggaaaaaggaggggaaaaaggtggtgccagtggctatttatagagggagaggact

SEQ ID NO: 31885 - DNA, 430 bp, Oryza sativa
tgagctgaattataagagactctattgtactttattgtatactataattagggagagagtagagtagaaaaagtcggaggaattccaaagttgtcagtaatcctctcttatttcgaaactcgagttaaattttaactcatggtgatgtggacgaatctcggacgtccatttctcgatccaactgtagtttccaagtttcgactacatatgtagttggcactggatattttccctaattactctgctttaatagaattatcattctgagaaattaagatttgctcggtgagaattaactcttggttagttcctaattagcatgcggtatcattgatcactatagttcaataaaatatagtggctgctctagtggttagctagctctaaaatagatattaattgcgttgacgtggtgtccaggtaattaatt

SEQ ID NO: 31886 - DNA, 443 bp, Oryza sativa
  unsure (1)..(443): unsure at all n locations
agctntaactctgatttttatttacatatttttataatttattttattctttattctaaattttaattattctttagttgtgttctatatggagtcttattatcattcagaattgacttaatttcgggatttattgtattacttattttgaattttgattattacttatttaaatattccaaactgctgattattatttcaaaatttgcttagaaactacaattcaaggcccaacgcactgtggagcctggtagcacggcttcaagtgctaatatgccaaataggatctcaatatgttcattgcgaacaacacagttcttggaatatgtgcaatgaaaatcaattactccttgcattgtgagaattaatactacgtacattctctctatctcttattataagncatttctactttggtcttactaaaatttctttgattttga

SEQ ID NO: 31887 - DNA, 463 bp, Oryza sativa
cgaggatgtcatcatgccccaattaatgtctctcacaacaagatgtctgaagatgagctgtccctcactgaggagatatagacaagcaagagagcaagtatgaggcgttccgttacggaaatgctttctagcatacgtctgacacaacaaagaaaatttgaacaggcaaactactacttccgtatccactccacacatccatacatgttataataatgatcttcaaaataattgtccttttaatctacttatccaatctgtgatatgatcataccattatatttgttataattaaatctttataataagatatcacatcattacattccgatgaaagaaaaacatatgtttcaatcccgtaagtttaatgtttcagacacggtagcaatatggttcattgtgagttttcattatgtttcatagtaactgagtctttttttaccacgtataagtaatgcttcac

SEQ ID NO: 31888 - DNA, 305 bp, Oryza sativa
agcttctgacaggggatgaaccggttggtaacttctaccgggactaaagatcaattatttttttaaccgagactaaaaataatttgtagtctcggttctcatcagaaccgggacaattgtgggaatcgctcgacccttcaaagaccatttctccaggagtgattcacacccctcacgaatatataggatccatgactcaggcctcctaggtccgcaggacccctattcggatctctatccgaattaagctcatattggatttccatccaatccccttattccgacccattaagcgtgccaccctg

SEQ ID NO: 31889 - DNA, 179 bp, Oryza sativa
catggtgcatctgattgatcatcttgtggaacaagtaaagatcttatgtccaccatatctgcctagcatgtgggccttcgagagggttatgggcatcatcaagagatatgccacgaatagatcaagacccgaaagcagcatcgacgacggttattgtcacaccctgaaggccccctttt

SEQ ID NO: 31890 - DNA, 446 bp, Oryza sativa
  unsure (1)..(446): unsure at all n locations
agcttccagnctcttttgggttaagccctaattgttccctcatcacatcagcaatcacatgagcccatggtcgttgctgagctgctccttgtggctgttgttgcatgggctcgaactgaccatactgagatgcgaactggggctgagccaatccccctggctgatattaagcttgcggggaaggaggctgatattgatagctcaagttacccccttggtaattatggagattcggctggatgttgcgcaccaagtgctcaggaaccatctgaggcattactgtgctgtccggctgtgcatggtgaaccaaatgctctgggatgacctgatttacaaactgttgtacaggctgaccaccaggtactgcgaaccctgccgatgcatttactgaccccgggtgctgaaccggctgaacgatctgctgtctcaacggagtctgttggatt

SEQ ID NO: 31891 - DNA, 364 bp, Oryza sativa
  unsure (1)..(364): unsure at all n locations
tacgtcaccacccgttctcatcattagatggccgagtggctcatcctgcagagattcttcaacggattaaccccctcgtcctgagatcacctggatgctgctgctggagggacattcttctcaagaacagttatatgccaaccgattgagaagatgctctcaaataatgtgtggagcaaggaacgactccaaacccgtcaatgcgacatgtacaccgtcaagtggacgggaatgctatccgctcagttggatctccttatgaggagactggactacaatgaaaaagacgccgagcanggtaccgttaaggccatggactctcacaagacatgtgaggtcgatggcaatactggtcactctggca

SEQ ID NO: 31892 - DNA, 448 bp, Oryza sativa
  unsure (1)..(448): unsure at all n locations
agctttngcttgaaagagatttctaccctcgcatccagcgtgttgtcgcagacgatcttgccgtcctgcgatgcaatcaccacacctccagagctgcaaaattagggacacaaatcagcttccgatgaagtaagcgttagcacgagcatattactggtgtatcaggtactaggaagcaacaagattgtgtgtaccagaaggggccatgggcgtcacgggcggtcttgggcggcgggaggtagaccttgccgtcgatgaagatcttggggaggttcaccttagccttctcggcgtactccttcttcgccgcctccagcaccgactcgacgtgcccgcgatccgcctcccggcaccgnagcaccaccgacggctccctcagccggagcaggctctgaatntgatcaatgatctctgaatcttttctctgaaccaaaatgtgcatggatag

SEQ ID NO: 31893 - DNA, 399 bp, Oryza sativa
tattacggacctataaaactcagcttggaacgatgaccctcagtgaacgtcccggcaatgcggcgagggtttggaagtggagccttttgagagagcctcgggtgaaaaccttgcctagtgctatcctaggttgatgatatcgacgcttgcgggcgccgttttctccttggaggtattgtcatgctggctctctcttccttcaggtgaaaaccgggttcctttctgaacgggcgttgacagcatccttgatgttgctcccttgttgaaggcttcgctcagaaggtttatgctccactagaggatgtttggtggttctggagacctcgtttgcattatgttgttcaagctgcttgccttttggtaagcttggtaacgacgacttttgtgaggtctctttag

SEQ ID NO: 31894 - DNA, 375 bp, Oryza sativa
cttctttatccaagttaatactttattccaatcatagaatatgagtatcattcttaggttatttataatcagtataatcttagtagttaaaccttctaggatatgcattgatgctggtataatgtctaattaccgggtcataagtctgctctggctaggccaagagctatggcccggggactcagatgctctgcaccgattgcaagcctatagagtaataagtagtaacttaagcatgtggtttaggttatcacttatcattatttgggggtatattcgacgggagagtagcaggccgctgatggtgacagttcagtatgggcgtcttccccgcagtttatatttctacatacaatttcctggggttggatacac

SEQ ID NO: 31895 - DNA, 365 bp, Oryza sativa
  unsure (1)..(365): unsure at all n locations
tttctttntcatttgttcatgtcacaacttcaattngatgttaacgttttcctgttaggaattagtgttctatgtattaagtttcatttgaatattatttgttttttaggaatctacttgcattttttgacctttcaaaacattttgtttgtaaattaaattattttcaaaacacagataagttggcaatagtgcccacgtattcaacttgcttggaaacatgcaagtacattcaagcgcataataacacaatgataggtttggacgtttggtgagcagtgatctacgtggatgattggagatcatgacaaggattatgctacattccgttctttttacttgacattctacaccgtgacaaattt

SEQ ID NO: 31896 - DNA, 459 bp, Oryza sativa
  unsure (1)..(459): unsure at all n locations
gtcacctgangcatgcaagctcgccaagntctatcctaatgattgtgatgttgatgatatgaaccaactcacctttcaactgaaccgctatattagtgatgtgagtaaggatgagaatttcacaaatttgatgagtttggcagacctgtctatgatgcttgtgaaaacaaacaaggtttctcgctatgaccttgtttacaaacttctgaaatttgtgttagttctccctgttgcaactgctagtgttgagagggttttctcttcaatgaactatatcaaaaacaagttaagaagcaagatggggcaagaatatttgaatgattgcttggttatattcattgaaagatatttcttcttgcaagttaagaatgaagacatcatcaatcattttcaaaatatcaagaaacggaaagctcttctctatatgtagaagtctaatcatttgcattttgatggcta

SEQ ID NO: 31897 - DNA, 124 bp, Oryza sativa
gtgtggctcgctgaatactgaggttgttctcattcttgctcaatctctgcccccttcagtaatagaagctttggagaagaagtcgtaggaggagtcctggcttatagccgggttgagcgcctgt

SEQ ID NO: 31898 - DNA, 447 bp, Oryza sativa
agctgataatacatagtgcatgcttaagtttttttgtatatataatgcaaatccctcaagaacccctatatgccgagatagagtttgcgcggatgatttttttaaacacaaacctgataatatcaagaggggatatcatattgcggaagtccctgatagttattaaaaagaggatttctgcgtacaagaacacattagatcactcgtgcaatttgaacatcatctgagcacttacgtagttactttatatcacaataacatgagcaattgtatgttgattgttgcctttgtaatattacccttttacatttctcactttcctccagttataaataatattgactaaattatactatgcactaggtctagcgcatatttctactttacaccagagtgttccctcgaaagttaaaatatattcccacgatatatatgcttataggtccc

SEQ ID NO: 31899 - DNA, 485 bp, Oryza sativa
  unsure (1)..(485): unsure at all n locations
tgacatcatctatgatcaccgcaatctcaacatatgttatctcaataattggcttcaaaatgctattacaccaggaattgaagaaatcactctcttgctgccttcaaaatacactttcccatgctcacttttatctggtggcattggaaggtcccttcagtatcttaagcttgtcagatgcgccttccgtcccacagctagccttggtttcttgagtagtctgacaaagctgcatttatgtgaagtgcgtattaaggatgacgagttaacttgtcttatttccaagtctttggctctgaagcagttggaactcctaaactgcagacaaataatctgtctgaagataccgtgtttgctggagcaactcagctgcctgaatgtatccttgtgcgagaatctgcatatgatagagagcanagctncanacctctccactcttagctatataagtaacctagtagtagaactctcacttaaacaatcat

SEQ ID NO: 31900 - DNA, 467 bp, Oryza sativa
  unsure (1)..(467): unsure at all n locations
cgacccggatccttaagtcacctgcggcatgcaagcttcgatattgggatgtattgattacatgttatggtacgtggntaatgttcatttactatttcaagttgcaatgtgaattgtattatgtttatatatattttttggccttaagtcaatttttctgacggtgtgaacattttttccctgtcggttagcacgtcagaaatttatctcacaaacttgatgaccgtggatttttctatgttgcatccacaggaaaaagccgtcggagatgaattttctgtaggaaaacccataggaaaattgatttttccgtggaccgttttatctgttggcgattcctgtcgtccatccacaaaaaataatttctgatgttaaaacgaattttcctgtgggtttcgcgcccacaggatagctgccaagtctgctagtgatcgcattatctatcanaatcatctgctataattttc

SEQ ID NO: 31901 - DNA, 363 bp, Oryza sativa
tgtgaagaattagttgttgattgcctcgttcccatgcacaggataaataaaaagaggttggagtggattgtttgttttcctgtggaatggatggccaaggaaattttccttcgaatttcctctgattttcctacaggggattcctttgatccgaatgctgctacagtacccgaatccataggaatgcagatcctatgtttttcctgagtttaccctccgatccgaataagccctaaggctagtaggcgagcggaagcggcgtccgccttcaatgctccttcgtatcgccagcacaaaacacgccccgcttcgccgcgcccaaaataccaccgccgccgccttctcacccgctgcgcgctcgcc

SEQ ID NO: 31902 - DNA, 450 bp, Oryza sativa
  unsure (1)..(450): unsure at all n locations
agcttcaacaagggtggtgacggattgaagttgttctttgattgcatctttggagctgtgagcccggtgtggcatcgctgatggctagaatgttggccactggggtgatgtctgtgggcacccgaaaattataccgtccaatgcaatttgtgattaccacataattttggatgagtgagatccatacatacataaatagccagccatacctcaatgtgcccataatcacaaactgacaccattcgatataaaatccacaaagccgaataataagcaaatgagatattgtttagacttagcatgccagtcaactttagcctgacatgcctatcaaaccataggaaggtggcgaccaaatgtgttacacatctcaggaaactntggctcanatngctaaaactctacaacatctcaatttctcanaagtcatactcatgctcagctagtccc

SEQ ID NO: 31903 - DNA, 440 bp, Oryza sativa
tggccattgggccaaagactatcgacagccacgacgcggccatgcccacgtcgcacaggtggaagaggaagagccggctctgctcctggctcacgcaagcatcgagctacctccagcggcaccggccgcagcggctttcctccaccttgatgagccgaaggtactcgtctccctctgcaacggctccagcaacgacaaggctgatgagtggtacctcgacaccggcgccacccatcacatgaccagccgacgggagttcttcaccgagttcgactccggcgtccgaggctccgtcaagttcggggacgcctccggcgtggagatcaagggtgttggctccgtcaccttcaccgccaagtccggtgagcacaggctgctcaccggaatctactacatccccgcattgaggaattctatcatcagcgtgggacagctggatg

SEQ ID NO: 31904 - DNA, 446 bp, Oryza sativa
  unsure (1)..(446): unsure at all n locations
tganacttgngatgaatgcanaacaatgatgaggaaaacttttgtgttntcatactccttgagaaattagaacatctaatacaaggtgacaaaactgtgcgggagtactttcataactctaaaatttgtctcacttatagtggtttaaaagaaagcaatgagaacataatgactagattttttagagggcttaattccgatattcacgttgggcttattaacgtgacatataatcatataggccacttgttcatgcttgcttgcagtgttgagagcaatattttaaagaacccaacggagaaacaggttatgcttgtgcttcctattactgacattatgcagggagctcagaacattcaccatgaggagaagagcaatatgctcgagatgccatctccatcgctcacgaaggaagaagaaaagactgatgcacctatattatctga

SEQ ID NO: 31905 - DNA, 370 bp, Oryza sativa
agctgccgttcgccttgggaacgacgaccggtttcttcagccactccggatggatgacctctcacggatgaatccggcctccagaagtcgcgccacctcctcgcggatgaaggcttgacgttccggggcctgccgccgcactttctgccggaccggccttgcgcccggccgcacggcgagacggtgctcaatcacctccctggggaccccgggcatgtccgccggtctccaggcgaagacgtcggcgtttgcccgcaggaaggagacgagcgcgtcttcctatttgtcgtccagaagaccaccgattcgtgtggtcttggacgggccatcgcccagggcaacctccttgaccgggacctcgtcgcacgtg

SEQ ID NO: 31906 - DNA, 450 bp, Oryza sativa
  unsure (1)..(450): unsure at all n locations
ctatgnccccccncccccttcccgcctctagcttgtcccctttgcaggcggcacgggtacctcggcgaccacggtgcgtgcgggagcgggtctttcgtttggtgattttttgattttgtggggggatatgtttttgttttgtatcttggctggatggatggcttgctcaccacctgtttgatggaatgcaaaggagcgcggctggaacatcggcttcaggtgcgttctcttgggggggtttctagggttattcatgggctcgttggagcttatcctttctgtctcttggattccgggggacctgaggggctcaatgtgtcccttttcttgctctgttttaccgngtgctgtactatcctcatcgttcgtttctgaatatattataagaacaatagttgcagaaagatcttcaattgctcatcagtcaaagcttttcttgtttcattctga

SEQ ID NO: 31907 - DNA, 391 bp, Oryza sativa
  unsure (1)..(391): unsure at all n locations
agcttgtcaacagttcagcaatgttcaattggttcccgccgccatgttgaatcctataatcaaaccatggtcgttccaaggttgggctttggatttcattggtcaaatttatcattcgtcattaaaggggcataagttcgtgctaattgctacagattacttcaccaagtgggctgaagctgtgccgttgaagaatacgactcatacggagggtattgactntattttgaagcatgttatccatagattcggtattccacanacattaactacggatcaaggtgcttcttttatatctaangaagtgaagaattttgccgatcctatggtataaatngttgagttcttctcctttactacgctangctaatggacaagccgagtcgagtaa

SEQ ID NO: 31908 - DNA, 455 bp, Oryza sativa
  unsure (1)..(455): unsure at all n locations
gcttgccttccgtatgttagcgtgccagttgatttgatcctgtaatcattaagaaatacaagcaaagaaaccgggggtaaatctataaatgatagccgattggctagatgccgatgacatatcatttatctttgagccgatgttacctgtgtatcgatcggcggtcatgaataagtaaagaagaactaaatctactcgatcggctgtggacattaacgatatatactccttatatggatatatacttaaaccaagtgattgggatagatcggtcaccatgccgagacagtataaatcacttagattgaaatatatatcaataacaggactatatatgtttatagcatagccgatcagatagatctagcgtgtatcggctaatactccgatactactctatatcacgatattaaggtaagtataatatgtcanacaaaggcctaacatgcttagat

SEQ ID NO: 31909 - DNA, 438 bp, Oryza sativa
agcttgtctcaattaagtgcaaaagcatttcttgtagtttaaacttagaaacaaaaagcaaaggacgtttgctctgaagaaaaaatctgaagcaaaggatgttaagaaaaagaagaaaaggagagagctatcacgccgtgtgccgtcgtactatcagatccacttgcgtaataacctatgattaaccccaccattagcaccatttcgccgcatacaagcagctgctaaaagttgggttagccgcacgcactacaccacaccaccgctcatgcatgcatgcccctacttgcaccatatatataattaattatattgatggattatctcctctaatcatagtgaagaatatgtactccctctattttataaatgtacgataccattggcaatttaacagcgttcgatcattcatcttattcaaaatcttttacaaatata

SEQ ID NO: 31910 - DNA, 404 bp, Oryza sativa
  unsure (1)..(404): unsure at all n locations
tctcattcttcttttgcanagcactcaaggaaatatagttagtagcacaagcttcaatatcaatatcattgcatctcacacatggttcattgcttgggacaattntggaacaagatggctcgctagggagagagacactattctttaaggctacgaagctctcttcaagagtgaggtatgctctgtccaagccatgcactctctcttaaagttgagcgttcgccacctcaagattagcatgagactctgtgatttgcttgtaaagccgtaccaatgcctcatttctctctctctccttagcaagctcactcttgagttcatgagaccgctctttctcacgaatgagcaaagtctcttgcctctcaagagttgcatatnggtcctcaattctctcaagcaactca

SEQ ID NO: 31911 - DNA, 400 bp, Oryza sativa
tgcaatttccacccgacgttcgtactccatccaagcatgaatgaactgtatggtccgttcacgctgcgttatccgcccgccacttgaagtaactctgactgtgtcaatccattgtacgaaatgacatttccttacatcctcctatgtacatccattttgggatagttaacttaatgatagtactgaggagtgatgaaaagaatatttgtgattaccacgaaatcatcgtcgataatgtttggacacaccaaacacctctgttctcgagttccgtgccttatggaccttatgacctgacaacgtgcaccacaacgacactccggacgctcacgccacgtggggagacctacgggagttacgtgctcttctatagactcagcaacaaatcgacgttcatgct

SEQ ID NO: 31912 - DNA, 393 bp, Oryza sativa
  unsure (1)..(393): unsure at all n locations
gagttacgtcttgcattaatatctnttgtgatagtcaaagtgcaatatgccttacaaaggatcaaatgttccatgagagaacaaagcacattgatgtgagatatcactttattcgaagtgtgattactgaaggtgatgtcaaggtatgcaagataagtactcatgataacccagctgatatgatgacaaagccagttcctgctactaagtttgagctatgctcaagcttggttggtgttacagtatagtcctagagactatttggcgcgcggtgattntacctacatgaggtatttttttggtgattgatgttttcatgctacaagaggaaattcgtctcaaggtggagaatgttaaatatgtgatccgaattntgggcccacaatatattcg

SEQ ID NO: 31913 - DNA, 348 bp, Oryza sativa
agggagagtggcgtgtaccccggtggcgagctcgtcttcttgaattctccgcctgtgagcgagggaatggggctgcgaggccagtgcgggcggcggaggactagactagagggtttggttttcttttttttttccctttccgtgctgcgtgtgttcgctgcaagcctcttgggttcaagacggcacatggtgttttacattttaacatgacagggtgaagaaagaatctgccggtgacgttattggattataattgtatcaaagctagctcttataatgaattattacataatactcttggtcttattcttgtgagatttgaaatttcgtatactaatatgctattca

SEQ ID NO: 31914 - DNA, 449 bp, Oryza sativa
  unsure (1)..(449): unsure at all n locations
cacctgaggcatgcaagcttttcacagaaacatttccatcaacagcatatgatctaagagtcttacgaactganaatagattgggggtccatccaaccagacatcctcccatttagaatttggtaataccatgtccaattgagcaccttgcaatccctctgaaataatccatcaatttggaaacatctttacaccgaagagagcctttggaagtatcatcattgctacatttggaagggaaggggttgtgacttgtgactgtgagtcattgcttgatagttccagaatggtatgtgatggcaggatattcaatagtcttattactatcagctcttgttcttgctgtaagattgtcacattggacttcaaatgagaatatcaaatcttatttcaaggtatgcttgattttttttggtcacttatgggtgcaataaatccattcccttcac

SEQ ID NO: 31915 - DNA, 482 bp, Oryza sativa
tcgtcggcttggtagaggtgagggtatgcagcgacagtgaaggggcagcgcgatcctttcttgcgatgtcactatgatttttggtgagataagctgcgacagctcggtggaggtgatactctataatgacgatggcatggtggcgatggacacgttcatgcggatgaagcataaattgtctcgtccgcatgagggtggtgcttggtgacatgaaggcagttggccggactaattctgtccacttcctttgctcatggtggggcaagagagcttttacaattgctgcagcatcaacgacagggcgtggaggttcccaatgtttgatgtgatgacgacaaacttgaagctagtcttccaatcttttctttttgttgattggtctctattgggatgattgttcttgtgtgagatgtggagtgtatgtactcgtgcaacctttggttgtgcgtattcatttatttatatcgaagccggatctctat

SEQ ID NO: 31916 - DNA, 452 bp, Oryza sativa
  unsure (1)..(452): unsure at all n locations
agcttaacccanaacaagaattgaatgaaatgtattttgtgagaccctagaaaagggttggtggggggtttatatagatcccccaaaatgtgaccgttggaggggaatctttcagcccacgtcggatagtccgatacaagatcggatagtccaatattttaaacctccaaagcaatgagaaacagagaatgaagttccatgaaatttcggacttaccgagacatcggactatctgatgttaaattggagtatctgatattttagaagtaaaaacttcgtcctcaaacaaagactcaagttccatgaaatttcggagtctctgtatcatcggactatctgatctaacatcggatactccgacacctagaaaaactcactcgaaaggatttttcaaacaaagacagagagtgaagttctgtgaaaaatcggatagttcgatacatcggatagtc

SEQ ID NO: 31917 - DNA, 429 bp, Oryza sativa
  unsure (1)..(429): unsure at all n locations
ngcactnntttttaacatcaattgacattaattatgtaatacatgccttgattattacactactaatctctgttnttattttactttagagattaattaatactatgtaggtctttaaaagtaaatgcaacaatgtatatatagaagtaatttaaacaaatattagaagtaactatacaatgtttagatgtgatagctagataaacatttgcttcaagtaattacacatgtattattgtatactcagaaacatatataattatatttcatataggaaccatgttgagaagtttagagtgactcacaatattagtgttcttatgtaaaacaatacaagtgctttattagctattaagtcgccacgggatattattacgagtgaattgctcaatgggctaggcgcgctgtttacctaatttgataccacat

SEQ ID NO: 31918 - DNA, 454 bp, Oryza sativa
  unsure (1)..(454): unsure at all n locations
agcttacattcttttgcacttgcttattagcgttatttttttgctgctggtaatctggagtctggatacagtatatgcgcaatgctgaataatcccactcaaataaaataatgcactgttaatacaagaatacttccaagggcaaaataattttaaagaaggtcactgttntatatgggcaatagagtttaaactttaaactgtaataggttacaactaaaagtcaatcatcaactcaagaaccgccttaccagaactgtaaggcacagattgtaccgtcttttttagcacccagtagcatcacctccagcagcttaccttatagatctcaaactattgtacttctttctgtagagctgttntcttctatccatgtacaagtttactttgtagctacagttattggaccttcacaaccatattcagaacagttaactttctactaaagggtacc

SEQ ID NO: 31919 - DNA, 494 bp, Oryza sativa
  unsure (1)..(494): unsure at all n locations
ctcagcttaaaggaatgcctcaacttcatctgatatgagtagtctggcatcacaaggccctccaaataatccaggtcatattaaaatctcttgcacacaaaatttgtcctgaggcttctggtattttgcacctatatctgtttctcatgagtcatgttgtatttggttaaacactgcagcttctctcagacgtgctagcagctggactttngatgagaagatttggtgcaagcagtatacaaggtactgcattcagtatctaagaagaacccaattgttctctacataagagatgttgagaagtttcttcacaagtccaaaaaaatgtatgtcatgtttgaaaaactactgaataaacttgaagggccagtgctagtccttggctcaagaattgtggatatggactttgatgaagagttggatgaaagactaactgctttatttccatacaacatcgaaatcaagccaccagagaatgagaaccaccttgtgag

SEQ ID NO: 31920 - DNA, 454 bp, Oryza sativa
  unsure (1)..(454): unsure at all n locations
agcttcngcgatttcttcctacagctaggtgagctctttggacctcttaggaaacacatgcatggatgcatctagcaaaatcaaagcccctaggcaacatgcagtaacaactcatctataccctcaccataggtgctactccgatgtctcctagccaagaaaactagaggaatggaatcgtgagagcattctcttaattntattttttgacctcattcccagtcgagccaccaatcgtcgccgacgagctcgccaaagccatggccaagctcccagtccatcgggctgctggaggttgaagatgaggactntgtcctgtaaatgatcaaaaacatagggttcaaactataaaacttcagtcgtttacatgtggacccatggacctaaatgctgntcatataaagcccagagacctttntgtatattggttcagccaccgatcagtggacccatg

SEQ ID NO: 31921 - DNA, 382 bp, Oryza sativa
tctagtaccagggggtaccgccccgggtggaccactcggtcaggatgatccgagcggtcgaacttgattgcaatctctgaccatcgaagatactggggtgtgtcgggctgaacagcattgatctcccgttcagtcaacttctgcttccgtttagactcataagccacggggccgccgaagatatggttgagctccttacggtgatcttgaaaacctgccggggtgtcgccgtcgttcttcttcctcgacgtgctttgttcttcgtcagagttcttccgtgcagtcttggtgtactgctccgcgaactgcttgtagatgaagcactctttggccacgtggttggagtttggatgatgcgggcattgtgaattcatgatcttgt

SEQ ID NO: 31922 - DNA, 420 bp, Oryza sativa
  unsure (1)..(420): unsure at all n locations
agcttgttacaaactagaggtaacatattttttttattaaacaccgcataacttattacataactccaagtgcagaaacacagtacatggcccttcactgaaaacatagattnttgaacaaatggagaattggtaaatgatgtttgagaaaagcatctagtattgaacatcaaatcaatgagaatgctgccagggacctaaccaaaataaatacttaaatgcagtctgaatttgctgaacgtgtcgaggtgtaaaggtatatctaagtatctaaccactggatgactgaagaaccccacgcacatctgtttcattaaacgcatttgagaggccatttcatcaaattcatatggtgtcatagtatatgatacataagtagtcagctggcacaatatttttttttcactgaacaagacattt

SEQ ID NO: 31923 - DNA, 436 bp, Oryza sativa
  unsure (1)..(436): unsure at all n locations
gagctatatctgccaagtccatatcagctccaccgggagattgaggtactgacaatgccggtccacggtgagcctcaattgatagcttagacttgggaggtgtaagctccgtccgtcgacttggacgaggagtcatcttcacaactatgtcttctttgggccattgtatgaacgtcttgcgcgcatcgcccaaagtcatgatttcatcatttgggggcacgggcagcggatagcctgaccaggtgtcctttactgtatcgatggacaccttggcatacccagctagcaggtctgcgccgtggaccttgtctgtaaccgagggcttgaaagccatgccctcatcgacttcaggagcgaaagttggatggactctcgctagtaggacacactgtgctgcgccctgcataanggtgaaagttgaatttaatattggaat

SEQ ID NO: 31924 - DNA, 449 bp, Oryza sativa
agcttgtcctagccaccatctcgctacatacgttcacacgcatgtctatatatcatccttaatcttataaagtttgtatcgaatcatgataggtaatatatagacgcgtaactttactatcacaggaaaggtgacacgcaacgccgaatccgaattcggcagatgattgggtaaattttgtcaatttcctagtacccaaacttcagaaacttcagaaggagacaaccaaacccacatgtattatgctataacatagatcggcaaagatttcgaaaattatgctgagccgttctttccaatatcatgttccataaaattgaaaattcctaaagaggggtccaaagagaaagcaacataaatggtcgagatgagcttgctttgcctgactagtacctgcatttgtctgtcctactagtctgaccaccccgttccttcattggagagaaaat

SEQ ID NO: 31925 - DNA, 258 bp, Oryza sativa
tttttcgataacgctgactcctgagtggaaacctctgggagctggtgaggtgccagtttctgtgccccgttcgactggagcacggatcacgtctgggcttggggatggcccaccttaaatggcagagaacggacttggtggtagctcatacatgattcgttcttattatgaagcaccaaaaaacacctggaaatgctgacaaatggactgtcctcatgtttggaatagcaggttagcccagaccctgcgtggttctct

SEQ ID NO: 31926 - DNA, 396 bp, Oryza sativa
agcttacgggctaaaagcctagctcagtttgatttattataactgcgagttcaagccgatcaagtctgaattcaaataaatttggtaaaaacgagtgctaaattcaaaccaatctggccaaaaatgaattcacacaaagttggcaaaaatatcctcaagttcagaaaaaaaaaactttttaaatcccgaaatttccggttggagttttggtccctcattttctagagatacactcttaaccccaggattgatgcttgacgagaacaatagtacgcggtagagggaatccaaaagctagcacatgtaattcccccatcttgacaacgttggattctgaagcgaacaaaaggagagcactttggatgtgcgagctgaggaatctcgtctttaactttc

SEQ ID NO: 31927 - DNA, 303 bp, Oryza sativa
tactatattgtcggctagactggttccgcagtcactatccaggttcaaaatggcacctgccgacactatcgcgttccacgcacgcaaagcgcaagcccgcacccgtcggagattcgtcgcacgcgccacgcacgctttcttctacgtacacttgcaactccacacgggacgaccgctctctctctctctctctctcgtcttcgtactcctcgacacccgctaccccgtatagcatagcacacgcgtgtccacacgctcacaaggtacaactctgacgagagccaacccaacccgggtacgcga

SEQ ID NO: 31928 - DNA, 448 bp, Oryza sativa
  unsure (1)..(448): unsure at all n locations
agcttagtgtttgnttcatgccacaagtgagttatgccacaattttttagcaagctggtctactagccattgagtgatttttttgccataacttgccacaattgtggccaacaaattcttagctatatattgtatggcatgccacactttgctaattttttttgtagtaaattatggaagtcatccaaaccgccccttagacatgggagagaaaaagttatgatgaagactatgagagaaggaaaaaaagtagatggagttagctgggtgaataaaatatatgtgggtctctctgaggattcaccttgcagaaattcaatntcgtagaaatgtctttactgaacaaccactactacagatacgatttttctgtacgaagacccctatangttgcaagcggaccgtaaatgatgacgtctgcaagattcattttcacatgcagctcgtt

SEQ ID NO: 31929 - DNA, 319 bp, Oryza sativa
  unsure (1)..(319): unsure at all n locations
tctctggcatcggcaagacggattccctgcacgagcacaccgcatttgatgtcanagaagaccatgagttcaacatattacagctgataggactgaatcatctaaagggatcaataatgattttctagtctttacaattgcaggcgccatgaactatgcttatccacaacaatgcttctgtgacaaggataacctgacttgtagcacctgtcatggatgacttcatctatgaaccgcgtagcacggcgtactcttcctatcctggaggatcttaaaccacattcttgccttaaaaaattgcgagttgatggatacgggc

SEQ ID NO: 31930 - DNA, 238 bp, Oryza sativa
  unsure (1)..(238): unsure at all n locations
agcttacggcacanatccattagcttccagctgtatattgtgaacttttcaaatcgcttagattgaagactatcaactcatatctttgtccttccaagaccgagtttaaagcttccagatggattaatttaacttctacattgcnaatttcatgccatgcttgcattccattattattaatttatttttgggggtcttatgatagngggatgtatttttagatggattaactgagtca

SEQ ID NO: 31931 - DNA, 385 bp, Oryza sativa
tagtacttagtagctagcagctatgcctactcaattaagttcattatccaagaataagttcaccaagtactacatgaatgtcacatgttcccacttgaactctactgtttagtttagccaatgctgaagcatcttatttcatcctttccttcataattgctcgtttggcttctagctgtagtatccacaatctaatgatacgaatgttgtgattactgctgcccttcatttttttttaaatgaagttcatgttcatctatgaatcccacaaacttggattaattgtagatgggggataaaaatcctctctatatagctttatcacaacacctgcaaaaacaccatagttttccatgggtaggtatgaaactgatcactgatttat

SEQ ID NO: 31932 - DNA, 376 bp, Oryza sativa
ctcgacccggacctctgagtcacctgcggcatgcaagcttatatcgcgttgtagaaaaccttgtgtgtattttgttcgcagtaataaaataagatttaagtgtaaaataatgcagcactgcaactgaagattgatacttccatgttatatatctcaaaaatgcatttaagcatttaaaggccctgaatgaaagcaccaattacaccctgtgctttgagctagataagtagtgccatatcaagtttgatgattctacttcactttatttcatatgtaacctagctttcttgcatttaattgatctgtattattggttaagtgtctttccccgttttgtaaataatgtattttatatttggattcatggtaaaatttc

SEQ ID NO: 31933 - DNA, 431 bp, Oryza sativa
aatattgcgctgaagttggcaggtttctttcctgtaatacgggtggtagatataacaatagattgtagagctgtttgggggtgccatatgggacttagagatccagttagcgagttatttccaaggtttaggttaaccagagttgcttcttttgtaaaaagccaattcggcattcttcctgacaagttattgtttgacaagtcaagctcctgcaaatgatgttgtgtgcgtagaaagtgtggttctgcaattatgcctttgtcaagaccacaaccagagagagctaactgtttcagttggaatggaggtgcccatccaggaatattgacatcaactgctaaattaatattccctgacaagttgatttcttcaagtttagtgaggttcctcagccaaaaaaatgagagtttaccactcagattgttctggga

SEQ ID NO: 31934 - DNA, 436 bp, Oryza sativa
  unsure (1)..(436): unsure at all n locations
agcttgcccatcttatggaatgccttccgcttgatctctatcctttgctntagccggaaatgtgaaccatttctccattgccgtccaagctcgctctttctcggcttttgtgaccttgtcgatatctttatggaggatcccgaaattctcacgtgccgccagcccgcagcagttagaccatcttccaatgacagtcctcggcgccgtgggcctaccactagcgtcaacctctcttataacttgcaatgtggtcggccatatattttgtgaccggngatttctactcgacctacttgcacttgtcccgtccgacatcgacgtatgttattcctggggcgattctgcagcgcagacagaaggcaacatatgctaaggggtgctagctaaaaatttgtgtcatatggtgaaaaatatcctataattatcatgaattttg

SEQ ID NO: 31935 - DNA, 404 bp, Oryza sativa
tatctcttacgctccaggaatggatcagtcagaacatcaccaccgtgctcgtctcgaccgccgccgactggtgtttccgcctacacggctggcctattatgccgccgttgttgggcgcctacgtcttcaccgaccggcttgccttcgtcgccgccgaccgatgtcctcgcctgcacggctggcctttatgccgccgttgttgggcgtctacgtcttcaccgaccggcttgccttcgtcgccgccgaccgatgtcctcgcctgcacggctggcctttatgccgccgttgttgggcgtctacgtcttcaccgaccggcttgccttcgtcgccgccgactggtgtccccgcctgcacggctggcctattatgccgccgttgttgggcgtctacgtatttaccgaccg

SEQ ID NO: 31936 - DNA, 340 bp, Oryza sativa
  unsure (1)..(340): unsure at all n locations
gcttcttctatcaactgacccaggatgactatcttttaattctctgggttgacatcaccatgtacaaacctggcaatgataagatgcactggaaatgttaacaccaatgaaatagaaaacaaaagagaaattccatgcagctccatataattctcaggcacaagtgactntaaattttaccctttagagtgaagcttctcaagaattgatatcgcttccacagcaatgcaagcaaccatatgggcagacatcctgttgcaagttccaatgctgttattttcagtgaggagtaataaaatcaggtggtcaatgcaaaaaggtgatccgaaacttacgcctg

SEQ ID NO: 31937 - DNA, 434 bp, Oryza sativa
  unsure (1)..(434): unsure at all n locations
tgtcggcgcacagaaaattcctagggagattcaccccatgagggggtttgggtttctcccgccacccaattctctttcagtttaccctacacctatgtggatcgtttgttctggaatcaaacgtggatntgtgtggtgattaataccttactctaacacacttacaaatcttgaacactctcacactaanggcttacaagataccgcttaccaggacaatctctatgtatattgtacactagttttcaaaatccatttttcttgagaaatcaaaatccaaaggccttgtccgttttcttgtgtttcaattccctaggggaatctattcagtgagggagtgagtgaatgcctcccatatcacttcaatccattcgggtttgaataccttgcgtgattctaatcccttcctctaaacccatgttcgttctgactgg

SEQ ID NO: 31938 - DNA, 446 bp, Oryza sativa
  unsure (1)..(446): unsure at all n locations
agcttttatataaccgattctcgaggaatctgctgtgtaaatgccagtcgatccatccataatactatagatatgttggatagatgcaaaactagaagtagcattagatttttgataactggctatctgagagccaattttcttaatagactcattaaagaaagttttacaagcatcttctaacatatcataattttttcaatataagtgctaacagatgcatctatataacgataaatatgttttcgaatggcaagagatggatcgggcgaattggagattaccttaaatttgagaggaggaccagacttgagaaccacaccttgatgggtcctgatgcatgatttcatcaacctctcttgtgtaatcaccttgatccactccttcatgacttgacgttgctcctcatcaagatcctncctgatgaggacatnctccactattac

SEQ ID NO: 31939 - DNA, 455 bp, Oryza sativa
  unsure (1)..(455): unsure at all n locations
cttgccgtgacgtgtctcatgtattgggacgaggctcatgtgttggataatcgcggagtgcggggtaaagtgtacatccactgcagtgtgagtaaaccaaatctattcgaatagccgcgctcgcggttattgagcaccaggacatgtattagacttggctagactctaaattctttaacttgtgtgggatgggatattgcatgatgattnttatgctgatggagccacttcctgagaggcgggaatgtggacgtcctcagaaaaccataacgactcaatggcgggaagctatccttgggatcacaatggatggtggacagaaccgtcgctgttaaagtgaacactggtactaaaatttgatcagtctatgctaggttntacgcttgtgaanagaattgtaaaattagctttatgcaaaagaacatgaagacattccttgaataccctctatcata

SEQ ID NO: 31940 - DNA, 440 bp, Oryza sativa
  unsure (1)..(440): unsure at all n locations
ngaatattagtgacaagaatagcggaaggtaaaataatacctgattgatagttngaacaggtactggtgactaattggattttgggtatcttttcattccaacatggtttgtgtaataattaatcgatctagctagaatgactggaaaaaggaaattttcaaaagaatattgtgcaatggtgtagaccctgataacaaacaatctcagagcccaatctagtctgtttatatatagtgccaaattttaattcattctcttatcttcttttgaaaactgaatgactgactgctaaattgctacatatacctgattagtagttgaataatttttgggtcagtccatctgagctagctcttgtcaaaggtctcctctccaacacatggtttttacaataattaattgatctagaacattangggtgtgagtcatcagaatggat

SEQ ID NO: 31941 - DNA, 382 bp, Oryza sativa
cgcggcatcgagctatctccagcggcaccggccgcaacggctttcctccacctcgatgaaccgaaggtacacgccttcctcggaacagctccagcaacgacaaggctgatgggtggtacctcgacaccggcgccacccatcacatgactggccggcgggagttcttcaccgagcttgactctagcgtccgaggctccatcaagtgtggggatgcctccggcatggagatcaagggcgtcggctccgtcaccttcaccgcaaagtccggtgagcacaggctgctcaccggagtctactacatccccgtgttgaggaactctatcatcagcgtgggacagctggatgagaacggctcacgcgtgttggtcgagcacggagtcat

SEQ ID NO: 31942 - DNA, 478 bp, Oryza sativa
tctgtggtggttgctgtgacagcaaggaggtgtggaatgctttctatctccgcatctacttcaagtttgaaaaagattagagctagtcttctagcttttttttcttttcggatgttcttttccatgtttctcgattatgagttttagagtgtatgcactcgtgtaaacctttggctatatatattcactttgaatatagagaccggattttatccattatcaaaaaaatgtacgagcagtagtgcagtaccggctgaaccgttcattggtcggtatggggaatatatatatatagtatatggagtaggctttttgttcatgtgcagctcacatcacatgctttggatgaccaaataatgcttgcttatgataggaagaaggaccgatcaccaacatgactccttgaaatcctttggaaactgcacaacattattaccccaccatggcgcactctcagaatcaaggcaccacaatgcat

SEQ ID NO: 31943 - DNA, 276 bp, Oryza sativa
ttacagatgaagcaatacggactgcttctgtgctaatactatacctaccaataatgcctactggacctgatgatgaatgacacgattgtttatgttccattggccctgatcacacattaaaagatcaacttgctatatattaacaccaaaagaagattgccccatgaattaaaaaaaccttaaaaaccaaagaaaagcctgaagccccttcaaaatatagtactaacatcctcatgttgatccgaaaagattcccacctgtcagtgttgttggtct

SEQ ID NO: 31944 - DNA, 463 bp, Oryza sativa
taactacatcttctgcccatgttttcttttcgaacttcagctacacttttatgcgctgaaacaccgaatgaaatctatctagcatcaattcttatgctttttgttactattctcatctgcgtgccttacaaatatactactacataggaccattagccctgaactatgcatgtagctgatcagcgtccacttgtcaccactgttaccagatgcaagatatcaagaggaacagtcacccacactgtggtcggaatcattgcaaccacacacataagagcaggtacaatagcagactattagccagctataaatatattttaatgagataaacgatgagagagaagagcagcgggctacagatttgtagccagctgcagcacggactccaagacatactgtgtgtatgacaggtgagaccatatattaatagtgtagtaagcaactattggtatgaatggctatt

SEQ ID NO: 31945 - DNA, 323 bp, Oryza sativa
agcttaaggtcggagagatgctgatgattactatatagtttcaggacgcagcatcttttttcgtttccccatgtcgatcccgtttgttaattaaccagcaagaagggaatccgcgtccgatgattctgagctttgccatggcgctgtggaatggtctggggcaagcggcgactgtggcgcatatggtcggcgcatacgtcggtagtctcatctacatgatcgtgcaagcggcggtgacggctcagcacaacaagaaggagtgcgagcagatcgcccgccgagccttcatgatcgcggagctgctgccgcatctgcgggatccg

SEQ ID NO: 31946 - DNA, 365 bp, Oryza sativa
  unsure (1)..(365): unsure at all n locations
tgtccagatttattatactaggagaggtctcatcaaatactatattggttnttttctacggacgaaatatttaattattatagattaccatgttcaatcttttcatcaacaacaaaaatgtcaatggagtaatcgacggcaatccccggcagctataggccttgtttagttcccaaatgttttatccctaaaaacattataattaatctttggacacatgatagcattaaatatagataaaaaactaactgccaaagtttatatggaaatcgcgagacagaacttttgagcctaattagtccataattagccataagtgctatacattaaccccatatgtgctaatgatggaataattaggctta

SEQ ID NO: 31947 - DNA, 53 bp, Oryza sativa
tcttaagcacctcggctgcagcttgattttatagggacctatttttttgttgc

SEQ ID NO: 31948 - DNA, 172 bp, Oryza sativa
agcttgatctctacatggtggatggcagcgatggcccctgacatccttctggtcatcttggcaaggttctttgtgataccagctactccatttcatcaggtggcatgagagctcctgatgccttccaggccaacatccatggggcgtcatctgcttcatgaaatgttgctca

SEQ ID NO: 31949 - DNA, 440 bp, Oryza sativa
  unsure (1)..(440): unsure at all n locations
ntggaacaaagcaccaacccaggtcgccatgatgtggtcgctttcagttttcgacccatccatggcggctcagcaagcattaccaatcggagccgggcagccgaacaccatggcccaaactcatgcgcaagccgtaatttcgcccttcgccacgccgtacccgcagcaaggtgccgtgaacagggcgggaggcaaaaaggggctaccgctgagtgggggaatcaagacccgtccaatcccaccgtagttcaagttgccacccgtcctaagctactcaggtgaaactgacccgaaggaattcctatccatctacgagtctgcgatcgaagcgactcatggcgacgaanatatcaaggcaaagggaatacatcttgccctagatggcatcgcccattcttggtacttcaatttaccagccaacagcatttactcatgggagc

SEQ ID NO: 31950 - DNA, 447 bp, Oryza sativa
  unsure (1)..(447): unsure at all n locations
agctntgccgacaatggtgcgcgcagcatcgttgtttccgcatatcccagaatgtatgtctttcagcaattgtctcccttcctctaaagatacgcagcgttgcagaattcctgaagggcttttcttgtataactcagattcgtgcataacataaagtttgctccgccttgaaatccgctcggcttcatctttatcttgagggagctcttgagaagttaaaaatcgtatgaagggctctcgccagtcggcttcaaccatggctatgtcatgagtgtccgcatcttgagtagtatctttatgaggcacggtcggtgtataaaggtgttcgacgaaaacgtctgagggcgccgcctcacgtttggatccaaaattggcaagtctgtcggcggcttcatttgtgtgtcgaagaacatgactgagctcgagtccatcgaacttatcctccag

SEQ ID NO: 31951 - DNA, 409 bp, Oryza sativa
agctcgcattaaacacctaagttctcgtgacttgctgagtactattgtctcacccttgctctatatagatatatatatatatagttcctccgccctgaagagaacgcaaagtgaagtgaatattatggtttcgtcctggttcccagccgtctcctgtggtgttgggtgttagaccgttggttccgctgctgctgctgctggtggtgttatctcgtacgcgtcgacggatgtattctcgggctgtctgagctgcaacctaagttaacgtaaataagtcctctatttattttaacgattgctatgattcatatttgtcaccgtgggtaccaccactatgtcctgagactggtaccgagatctcgtgttcgtatgaagcggttcacgccgatttacctacaacacgctacta

SEQ ID NO: 31952 - DNA, 377 bp, Oryza sativa
tttactttaacactagattaattcctatttaattatttaatctaatattgatatcttagtataaagtggtatccgagtattaacccatatatgttaaatctactacatcggctatgctataagcacgtataatccttatattgaagtacttttagacataagtgatttatactgtctctgaaagctatacgatctataccaatcacttggttaaacatatttcgatctattgaatataaactgctaatatctacagccgatcgactagatttaccctctttcttgctttatttatcattgccaacttattcacgttacatcggctagctacaaatgaacgtattggcatgcggcgatcgcttcgttatgattaattt

SEQ ID NO: 31953 - DNA, 434 bp, Oryza sativa
  unsure (1)..(434): unsure at all n locations
tcggatgtgcatcgactacaccgaccttaacttgtatgtcctaaggatccttaccccctgcctcgcatagatcagatcgccgactccactgcggngtgcgaccttttgtgttttctagatgcatactctggttatcatcagattcgcatggctagggaggatgaagaaaaaactgcgttcattacccccgtaggaacctattgttatacatcaatacccttcgggttaaagaatgcaggtcctacntttcagcgtactactcgaatttctttgggtagccaaataggacgtaatgttgaggcgtatgtcgatgactcggtttgtaaaacgcgcaaccataaactttactttcagagtctagcgggaacttttgagaacctccgctccgcccgcataaagctgaaaccccgatagtgtgtgtttggtgtacctgc

SEQ ID NO: 31954 - DNA, 385 bp, Oryza sativa
tttcatgcccatactgatgccttgtactccaccggagttttgcacattctatatgacacaacgctccttcaagaaatatagagaatagcttatgcgctgatatgctttgaccacagtcagcttatatccagttatgcttctctcatttcttgaacaatatgagatatctagtgttaggtgataactgtgatgcatagctaacaattgcaacttttttatataaccgagaacagattgtcgacattcctatgtcatactcctgatctcttcgtgcatgccagatgggcgatatgcttattcctgatgtgatctcttcgttgaaccacacatgatgcattcctccattcttgcatacgctcatggcttgagatattagccattactc

SEQ ID NO: 31955 - DNA, 433 bp, Oryza sativa
  unsure (1)..(433): unsure at all n locations
cgcattaccagagtattttcttgaggcacattatgtncatatatcatatcaaaatatttaaaaagatcttggtgttcaaagttataataaagttatggctaacggcattttcactttcctaccattttcaaccttacaagttttggcgttagcatattttggtatagtcaaaaactaaacataacgttaccatttaccctaccaaatattggtaattctagaagtttcctctcactaaatctctctcaatggtaaggtttcatactaaacacaaccaacactatctaaatttggtaacttcaaaagtgctaaattatgacattaccaaattttggtaagggtgaatttggtaacaaagtaatgaacaagcagccctaagaaattttctgcatgatgttatgttgttgcgatcagaanggagtattaattactg

SEQ ID NO: 31956 - DNA, 438 bp, Oryza sativa
agcttctcgtccttgccttaccaggaacccggtttgtttaccccgccccggcgttcccaactattggcatgcgaggtttccctgaaccgactagttacttagccagggtgtcccattccaccttgtggttgcactttgattatgttcgatgagtttcccacaggaatcggtccttatatgcgaatacgggacagtgccacataggcacaacccccgcatcgcgagttttcacaattcattttattttcaaacacaccgacaccacatgtcgggttttgaaggcttcacaaacccattgtccaagttttcaacaaacaacggtgtatgtgagatatttggtatacgcgctcaaagagcacgaataccgaggtaccacaagggtggagcgacaaggaatcatggtattacgacctacggaaattagtgcgactactgggt

SEQ ID NO: 31957 - DNA, 407 bp, Oryza sativa
  unsure (1)..(407): unsure at all n locations
catgggtggtgccgatggtagcgggttgtcngcgtgtgtggcaccggcggtagcagctggccggcgtgggtggcaccgggtggttggtaaggacaatggcaaagaggccggtgaggctaactaacaagaagcgtcggtacagcggcgaccatgtgccgacagaggttggccggtggtggagcatnggagcgttaactgcgggttgtaatggtgcgggcaataggtgtaatacctagcttggccttgccgggctagcagcgacgttgtttcgggcgtcgttttccctcttggcgctgtcgagctgtccttctccctcaggtggggctgctgggtgaaaactctatcttggtactcctcaagacctcgatagacgacngcgccagtgttcattatcgcttttctttctg

SEQ ID NO: 31958 - DNA, 410 bp, Oryza sativa
  unsure (1)..(410): unsure at all n locations
acatacgccatgtgcacactgctttaacagatgtgcttaagtccctaaaagacacatggtttcaccacacccagaaatatacggcatacgtggtgtaaaatccgagtaaataaactcataaagaatttaccaaccgcctgataaatgaccaagatatataatcagcctaagccataatattggtcaataaaaatgcacagttacgtggcaaaaagcaatgatattgtatccaataaattgcttgataaacccaaacagtgccttgactatatataaaaaagtcagcggagcagctatataaagctntactgtttgacaccttntaagatgcattgtaccaacttcctaaaagttgagtaactgcggtataaaaggattttgaggtattgggcacttgatcacgcgcactt

SEQ ID NO: 31959 - DNA, 483 bp, Oryza sativa
  unsure (1)..(483): unsure at all n locations
tcctctatctgtccagtcaaaccgaaacaatacatgttacctctttgtaatctttntttatgggtntgtaacatttacataacacaaaacatgtcattgtgttttagtttgagaatgagtggcattggaaaagaagcacattgcgcattcacctgcacaagcacactaattatatcactacaagaaatgtaattattgtcaagagtatttccccttgcaatagtatagccttgcagaagatccttatctgctaccatcactctagttccttgctaataatgtttatttgcaagggtcatgaacgtacccttgtagaatatcgtcatccccaaggcataggcgatggtccttgngattgtatgaaataaagcatccctttgtaatataaattacataatataaattgtacagttagttaattgctagtattacgctagccatgcatggagtcttgtgagcttgttttattataatagataaaca

SEQ ID NO: 31960 - DNA, 449 bp, Oryza sativa
  unsure (1)..(449): unsure at all n locations
agcttgaaagtctctggccggggactatagtacatctcacgaacctaggtatgtgttccctacatgtaccctgatttattttcttgtagatgccatgctaccctgtgttttggacttttccccttcttttgctcctttttggtttgctatgaatttttactagtaatacactgctatcagctactccttctgtttcgtattataagtcgtttgactttttctatagtcaaactttgttaagtttgaccaaatttatagaaaaaattagtttcaaatatcaaattagtttcattaaatctaacattgaatatattttgataatatgtntgtttgtgttgaaaatactattatatttttctataaacttggtcaaacttaaagaagtttggactatgaaaaagttaaacgatttataatatgaaatagagtggtctttatcntaactcttt

SEQ ID NO: 31961 - DNA, 487 bp, Oryza sativa
  unsure (1)..(487): unsure at all n locations
tgtcaagcttatgttgcaaccaagagtcaccgtaggatgaaaagcacatgaggagaggaanagtgactgaattgtccatccctctgccttattggatagaacggaacatgggaagttgtattctgtccgttttttcaatgaaagacatctccaaggagagttcttcgatcccaggtttgataacggttacaaacctattgtcaagaacagctgcacttatattcggacaggcgaacagttgaagtttaagcactttcaccccaatgccagaatggctcttaataatatggtcaattttactgacagcatagctttccatgtcatccaaactgagttatctcttaatcaaacctatncgtttgttatttaatataaggagtggatagcgtctccagcaacgtataaaatcatgtgacacacaagcagtacgagcagcatcttttaatggcataagagaatatacatgatgcaagatgttcttggaaaa

SEQ ID NO: 31962 - DNA, 461 bp, Oryza sativa
  unsure (1)..(461): unsure at all n locations
tagcttgtatttcagtagttggtgaactccatcaaacaaacgcttgcttttctttggccacacttactcaataaatgcttggttaaatatgaatggagatgtcttggttgtaaatctggcttattccattgttgattttcgtaacaccagtttaaattgtctcgtgttctgtcaaaatgcagaacgcttgcagatccatcattcccacataagaatagctttgagttcatggctacctttttctcatctgtttggtgggagatgaacatacgtaaggagaggtatgcatattatctgcgatctccttttcaacagtttaatttttaccaactcttctaactctgagaaattangtttgagcaagaatgggatttggctgtcgtcaatgctctgactgcatcttgttgcaatgtgatggntcttgggctttggcaccatgccgctcatatgggagcacatcc

SEQ ID NO: 31963 - DNA, 451 bp, Oryza sativa
ttaagtcacctgaggcatgcagcttatggcagatgaagcaatcaatctatttcgagtcaactctaggagttattatcttcgtcttcgctttagactcaacatttaatttcagcgactctaattattacaccggcaattttggcttctccacgccgccacaatctactccaaaattctcaagtatcaagttcaagatttaatctacatgttcgggagtttggagttatcaaccaattaactcagattcaacgagttggacaacatcatttattttcctccaaatgaagcatctgcaacagctataataccaagttctactgccatcttcataaatcaaggagcgttgcatcaatcttctttatgcacacactcgcatcaaggaaactactcaagctttgatatcttctcaacagtttgatggattaattgcactgacatcatcaccaacacc

SEQ ID NO: 31964 - DNA, 476 bp, Oryza sativa
  unsure (1)..(476): unsure at all n locations
ntagctggtgcagataagaacaatgctgtatgaaatggttatgantttgcacgaagtgtgcatgctgttcttcttcgctggttaattccttaccgtcagcagagtttagttgttgaagttctttttacagcttctcaagattagagatgtggtttcttcgtcttgcacatctattggtttttttttgggagtagctatataaagacgctatatntttttcaccaaaagataatcagcatgtatttacattataagtctctaaattacatatataattagtatgtaatattagtatgtaattatagtgtaagtatgatgtaattatattctaactaacctgtatactaattactgatactcaaatttgtttatatgaattcctatatcttgttactattaattaaataagtgggtccggggtcctttataccgctcatcaccttggttatatgaattcctatatctctctaccatta

SEQ ID NO: 31965 - DNA, 395 bp, Oryza sativa
  unsure (1)..(395): unsure at all n locations
agcttgcaccgagnttgatatcttttatcaccatcataagttgccacaattcaaagaaaggacggatattttgagttacatttggctggtatcaaagtataggtatatttgttaacaaaaaacaatatatgcatccttgttatcaaattaagttgtgtcacagaattattgcatgataaatcgcttctatgaaaccgtactggcatgtagaccttggctgatatgaacatctaggtatggggcctgtcaatggctaccaaggactggngttttgtctttgtttttctaaaatgtgacttccaagaatttatatctatatacaggtgggggatctttgcacctttctaggagagattactaattgctgataccaagatgtaggtcaatggaaagta

SEQ ID NO: 31966 - DNA, 439 bp, Oryza sativa
  unsure (1)..(439): unsure at all n locations
tccctgatggaacctaacattaatagaataaacaagcttagtatgtttccaagttgatttgagttggtgatctgccacatcaatgtgggcccacaattaagccaaaaagatgctatttggttctcaccaaaagtttttccaataaagaaaacaacaagatgcctcgggtccaacgtagtattggtggatcaaatcataccacataactaaacacagaattaaatagtgatgggtaaacttagtggcagggagccacctaattggccacatgacatacaaaataacaaaaaaaaaactctgatgatattttatagcataatatttcatattgagttntttaactagtataatcttttgatgattcaagtgagaaagtatagcaagcaagcaagaaaggaaagggaaccattgcatgcaagaagtgatacttgatatgtat

SEQ ID NO: 31967 - DNA, 387 bp, Oryza sativa
agcttcaaatgagtctggctgtcgaatatatttacatgccctgaatgtggtgacaaaggccatcttgcaaagacatgtcagggaggacctatagctagcaaaaggtacttgacatctttatttcttcctttcatttgtaaattggctgctcactccagaatttatacacgaaaaggtcatcttcatcaacaccatcctcagatcaaggaagcaatactcctggtgcaacacctaggtcaagacaaaaaaatactactggatcatccatgtaattagtatttcttactagttaaatccatactcatttgcaatctatttgcatcttgtattcagattaaggactgacttatagaattgttgttgcagggcaatgcaaatgatgttgtc

SEQ ID NO: 31968 - DNA, 432 bp, Oryza sativa
  unsure (1)..(432): unsure at all n locations
cggaccataaaactcgctttagacgcgaagagagacatgtcgactttttttatcatatcatcctgcgggattataagtttacaacaatactaacttaaaatttccagtcaactgcgccccaacagaaatatagagcaccagatattttatagaagttgccgttaaaacccccattaattgatagtgctgtggcttatccatcataaaatctgcatatgatgagacatctaaacaacaacaatctgatctgccctagatgtgagaacaagaactccgctgtgaaccttntgaatgattgaatccatgagcaaatatccatgtctatttcatcctatgaaactaatgtcaccagcatacctgcaacaattagcagattggctgtccctatagaagagaagctagtgccatggcatcctgaggtatgctgtgatc

SEQ ID NO: 31969 - DNA, 447 bp, Oryza sativa
  unsure (1)..(447): unsure at all n locations
agcttgatttcctgatggaaaatctatccagctacacaccaatntttgttatcatggaaggaagtgagcctacatttttcacaaggttcttcacttgggactcagcaaagtcacttgtaagtagaatattcataagatgaacaactgtagtttgtgttccttttggcagaagcaccataatgctccttgttttcatcttcaatgtgttgtactcactcttgtttctcttgtagatgcatggcaattcataccagaggaagctttccattgtaaagggtggaggttctcctgctttggatgtaagatatgtacaaactttagttgtcttatgatagtctgccatgtcgaaataaccatatatggtattccttgttgcaactcgatttctgctagacaacagtgntctgattatcttttgtgtgtacaatcatggaaccacctatttat

SEQ ID NO: 31970 - DNA, 404 bp, Oryza sativa
actcagcttggcaaaaaacatctcttttgagacaaggacttcctagtatagatctagctaactcatagagtgtttgctaattgcagcgtaaccaagcttgcaggcatcaaagcgatctgtccatggatatgctccaagcatgcatcaatccatgccctttattcttagctcagaaccagctacatccctctgccctttgattttgaaatatattcttttcttttcatacatatgctctttcgatatgattattaattgttcctttttggccattggagacaagaatcgatggtttgctgcagtagaaaatatctctttatatatgcatgcaaggagaatgtacctgcatacacgcaaagatgcatagtccagtagtacttgcatgtacagtggaatatctctga

SEQ ID NO: 31971 - DNA, 246 bp, Oryza sativa
gattacgctgcgtatgccattccttaatacttgcttgaagccatgcttgaccgtgtgacacatggcgcggggctgggttacctgagatggggtgcgtgaaacataatttggtataatggctgcgagaagggggcacaaatcgtgaacaagaatccacgggccaaaaaaacgcgcggcaaacaaaaataaattcagcggcagccaggtagcaattcccctattgtttttactattactacaaaaatt

SEQ ID NO: 31972 - DNA, 430 bp, Oryza sativa
  unsure (1)..(430): unsure at all n locations
agcttaagaagtgacacaagtttcaccttcttgtttgttcatanatgacagcattgtacctgatttagcacaacactccacatttggacttttcaactaaacaacgataagcactgaactgatccccgaccaacttctttaaatggattagctattatgatgtttttcttctacatattgttttatgataatcaatctaggcatgttcggatttatgatactgatgtggaatatgaattgattattaagtgaactaacccttgatagtaaaagatggagggtgagtatcaagttactccatttcctactcctattccaccgtttttgccccaggtctaaatatcctgcagactcctgaaaatcacatgaagataaagattttgaaaattaatcatcaggcagntgatagctggtgactacattatattat

SEQ ID NO: 31973 - DNA, 469 bp, Oryza sativa
  unsure (1)..(469): unsure at all n locations
gtgactttgtanaanaggtgttatttggttctttctcatgttatatagatctgcacattgtatgtgcaatttgagcactctctttcatgacatctccaagctggcctgtcaccacaagtgcaccttttttttcgccgtcctcaacttttgctgtctcaatatacaaggtagaaccacccatagcattccaagctaaacccatgactaccccaacaggagtgtgatcgtatatacgctctggttggaatacagccttcccaacaaagttatccagatttgatgcatcaacaactactttctccacagtcttgtctacaagtgcatcatctacaagtgctttcattacttcctctgtgtgttcattggccttcagaaatagcaaacaacagtttattagaactaagccctacgaaacatagaaacataagtctatgaatntatgctaactaagatatattcattgtcacac

SEQ ID NO: 31974 - DNA, 344 bp, Oryza sativa
agcttatcgtctgcgcaaccaagctaactatttctctgcctttacttgctaaagatagagaagcgcagcactatgactttaggatatttttacagtccgatctatcgcgaacgaaagagatctgttccctctcatatgaaccgtactcatctgcagtaatgtagacgatccaaatgcctttgtagcacatcatagcctaattactaattggaaaatctaagaatgtccgaacgggtgttttgcctaacgcacgaccatgcaccccagtcgcgttcttgtaaaacacaaaggcaataataccatcgtttgggactttatattaaacaaaaggaattaccaaatgc

SEQ ID NO: 31975 - DNA, 404 bp, Oryza sativa
tctcagccattgtccattgataatcgaagggttgatgcaaattatttatgtcatgccgatccaaggcttcaaaggccattctgaccaataaagatgaatcgagcattaagtatgtcgaattccatctcgttgatacatcaagcgatggtcgtctgttagtttttattcccacttgagcaatcatctcttcaaacctttgaccacgtgattgcgaactccgaacatatttaacactttctcttatactgttaatggtgttgctcatgggttttagcccatcttggacaattagattgaatatatgggcagcacagcggaaatgcaacaacacttcatcacaagggcacattggcttaccaacaagaatggttttcagattagcaatatttgatcattcacacttg

SEQ ID NO: 31976 - DNA, 446 bp, Oryza sativa
  unsure (1)..(446): unsure at all n locations
agctngagttgtagtgcgctgccacctcaagatctgctaatcactcttggccaaaggattgcaagaatttgatatgcgcgtctgccttggagcctcccaagagtgtggatctgtggagttcttggttgatgcgtcattcttaaatctgagtgttttgggatgcctggtttggtcccttgtaccactagcagtagttgtacattgttgaacttgaactgaacaattacaggagttaacaagctactgctagaacagcanaaagggaatgtgtatttgcaaatagagccactgaatccttgatcaatctatcttgcattacacggagtgatgtgttgattttattgagacttttgtttccattaatctccggaatttatacacatacatcttgtttaaataagaaaaaaaacaagttattcgacatatatttcccaaacaattctatg

SEQ ID NO: 31977 - DNA, 451 bp, Oryza sativa
  unsure (1)..(451): unsure at all n locations
tatgggatacggagtaacacacaagtacagcaacaagntctgtgtattaatacaacataatttcacatctataaggtaagaccataagagtactagatgtttactacaagaattgtcaaactgtaacaagaattaatcaagtattaattaagtgtcaaacaatcaggtaggaaaccatacaagtgaggagtgccaagtgtgagcagtaaacttatgtctgaagcatcaaatacttccatgtacacacgcgccagccagcccccagctgaatgccctatcaatgatatgccttcatctgcaagttgcaaacagatttatgatgaatgttatcattttgaagatttatatctttattccattattttcaacatgatgagtcttcgagcaacatagccaaaggggatagtttcttcttcaagaaagcaaagggggcatatttgaaacaaaatat

SEQ ID NO: 31978 - DNA, 462 bp, Oryza sativa
  unsure (1)..(462): unsure at all n locations
tgctgggggggcgcatccgctctatagctcgtatcttctctttgtttgtctcgatgcctcgggcagagaccaagaacccgagaagcttgcccacaggcacgccgaacacgcacttatcggggttcagctttatgcgggcggagcggagactttcaaaagttttcgctagatctgagagtaaagtctcttggntgcgcgtcttcacaaccaagtcattaacataagccctaacattgcgttctatctggctacccacagaaattcgagtagtacgttgaaaagtaggacccgcattctttaacccgaaaggcattgtcgtataacaataagtttctatggtggtaatgaaagcagttttattctcatacttcctagccatgcgaatttgatgataaccagagtatgcatctacaatacacataaaggtgtaccccgcggtggagccacaatctgatctatgcg

SEQ ID NO: 31979 - DNA, 440 bp, Oryza sativa
  unsure (1)..(440): unsure at all n locations
agcttncatagcagncattccatatatctacatgtttgttgggcctatggatcaatgaccgaagacactttgactgggcagcggatccatgcagcaagttggagatctgcaaagttggaaaccgaaccaccagcattcttgggctgcgcaccaacgggtggaccagcttgcctaacccaggtcaagagatgggcaacgggtttgtttgagatactcataagccagaataacccactccttctgagcatattcaagcatctccaattccgacaatgccttgcgtacctgactctttatgtgtgcgctgtgaggcgatttgttgagctatgctatgaattgttggttccttaatgcctacttcacaaataaatccttcttgtcaaaaggacctctctccatacttatctttacattgcttatataattgtaaggattaatta

SEQ ID NO: 31980 - DNA, 438 bp, Oryza sativa
  unsure (1)..(438): unsure at all n locations
tggtcatgtagtcttgttgcaatgcacagatttagatatgaacggttcatatacttcatatcatagttgtacacagtggtttcttctaatcattcccatctgattcttgggagtagccaaattagtacatggtcagatattaggaaggaagagcagtataatatctatgtgcagtttagntctaatataccggctattctcacacgttggctttttttattgactgagatatcattttcactacagtccaaatgtgttggtcaattcataatcgatcagcaggcctggaatttgtctcaaggtatatacatnggaatagtgtccaatatgagtagtgactaaagcagattaatttgaattgtgaacagagactctgtcaaataatcaggtcagtactaaaaatctattgatcactactaaagtacaatctcatttgat

SEQ ID NO: 31981 - DNA, 400 bp, Oryza sativa
  unsure (1)..(400): unsure at all n locations
agcttccttgcttcgatcgatttatgatcaatttttgttgatacttccggccaccgctggtcgattccggcgaccccgtttccaggagatggggaacatgggcagcagcggcggccaccgtcgccggaacaacggccacggccggcatcaccaccatggttagtccaccgcgccgtcgtcgtcgtctgagtaataacaacaggaagtggcgccgaaccgctacgtgttcgcggcggcgagcccttacccgccgcagtacccgaatcccaacctgccgcagtactacccgcagtacgggaacttctacccgccgccgncgtcatcgatgccagggccgctcccggcgccgtacgaccaccaccaccgtgggggtgggccagcacagtcgtctgcaccaccg

SEQ ID NO: 31982 - DNA, 491 bp, Oryza sativa
  unsure (1)..(491): unsure at all n locations
ctaagcttactgttgaccctttaagagcattgaccaactcctataatgttaagtaactgcggtataaaaggattttaaggtattgggcacttgatcacgcgcactatggcctaagcaaaaagtgcctaagtccctaaaagaacgtgacaggccacacctgaaaatatgggctgcagacatattaggcctaggccaaaacatatgccttcgacaccctttataggatgacgcacataacatgctcccgagtaataaatcttccgggtaatatagaccaagtgtagctcatatgaatagcttctgatctgaatgattatcccttatgggatactccaaaataaatataataattgaatcccgactggcgcaagtattcggttgatagcctttacggggaataataattggtccagtctttgagcatagaagatagactcatgactatgaatncatgtggaatgtatncggaacaagtcctcattggagatata

SEQ ID NO: 31983 - DNA, 437 bp, Oryza sativa
  unsure (1)..(437): unsure at all n locations
agcttgttattaatatattaaaagaatatattttagcttgntattaatctggtaatttactttaacacttgattaattcctatttaattatttaatctatattgatatcttagtataaagtggtatcggagtattagccgatatatgttagatctacgacatcggctatgctataagcacgtataatctttatattgaagtacttttagacataagtgatttatactgtctcggaaagctatacgatctattccaatcacttggtttaaacatatttcgatctatagattataaactgctaatatctacagccgatcgactagatttaccctttttcttgctctatatatcattgccgatctaattcacgttacatcggctagcttacaaatgatacgtcatctgcatgcggccgatcggctatcggttatggaatt

SEQ ID NO: 31984 - DNA, 404 bp, Oryza sativa
  unsure (1)..(404): unsure at all n locations
tcggatgtgcatcgactacaccgaccttaacaaggcttgttctaaggatccttacccnctgcctcgcatagatcagatcgtcgactccactgcggngtgcgaccttttgtgttttctagatgcatactctggttatcatcagattcgcatggctagggaggatgaggaaaaaactgcgttcattacccccgtaggaacctattgttatacatcaatacccttcgggttaaagaatgcaggtcctacttttcagcgtactactcgaatttctttgggtagccaaataggacgtaatgttgaggcgtatgtcgatgacttggttgtaanaacgcgcaaccaagaaactttactttcagaatctagcggaaacttatgagaacctccgctctcgccgcataaagctg

SEQ ID NO: 31985 - DNA, 415 bp, Oryza sativa
  unsure (1)..(415): unsure at all n locations
agcttaggtcctacccttgccggagaactaccttagcatcacggtcgcttgccctgtcgtcgccggtgaagacacttctctcttgccgtgcacgaagaaaccgagaaaaaattgggaagataggaatntctctagttatacagcgtgtgtgtctagatgagaagaggacaagatgacaacgtgggcaccccacctatgttgggccaggctacacttccacaagccgcactctcatcttaactagggttgtcaaaatagacaggttgggtgtgggtccgagtaggacacacgaatcttaaaaagcaacatccaatggtcacaaattcagctgacaaaaccaaaaaaaaaaaattgcaggcagatgtatagccattaaaaaagagtgacactcttgtgcacattgctgtggagatca

SEQ ID NO: 31986 - DNA, 454 bp, Oryza sativa
  unsure (1)..(454): unsure at all n locations
tatcctgtgtcacatcccgaggagcaacaccacanagattatttgcacatttctgaagcagagcgacagggcaatcagcagtcttctcagtttcagttgaaacatcagcaaattcagtttcctggagagtgctcccaggaaaaagcaaaccgacctcattagcaacctgcttgagcttcttcacagatttccctctgggaaattaggaatggcttaccaccccatcgcattctaagataatgcataatttgaataaaacattagctttaaacggggtcaacatgctcaaagggttatattgggatctgtgtgacttgacttgagcttctttaaacgcttctgaaccttcctcaacgtatacgctcttctccggaacattgtaaactaatgcacatgtcttaattctttaaacagtgctaaatcgcccaatagtgcatgtggatttcttaacatg

SEQ ID NO: 31987 - DNA, 443 bp, Oryza sativa
ctcgacccggatccttaagcacctgggctgcaagctgctcgtcattttaagtcatggagtacagaattgggttgttaaaaatggaggaggaaattttgcaagatatccaagtgctcaggcaacaaacatcagatgcaagaatcagtcttcaggtacattaatcctttttcatgttgataaaaaagatcatcatgtttaatttttagaggacaccgtgtaagtaagaacacaaatatttttatgtacttattgagtttgatgacttgcaggagatatcttcaaggaaggctgtcattcagcaagatatagctacatttaagcagaaattgagctttattgacaaaaggggccctgaactagaggctgaaaagagagttgctgccgctgcaaggaatttcaaggaagctggaaggatagctgctgaggctaaagcgctttactct

SEQ ID NO: 31988 - DNA, 472 bp, Oryza sativa
taataaattcgtctcacagtttactgacggattctgtaattttgtttgttattagactatgtttaatacttcaaatgtgcatattctatcctgactattgccttatcatctgcaaacagccgaaaaaaatattaacgaactgcccattatatactcagcaaatttaaagggctcaaattttgaacagttggatccggccatctagacctgttgaatagtactccctccatctaatttatttttgatagtcatatttccaaatctggaaaaggtatttttgattggcatatttcaatccaaccacctatccttttaatgattttctatgatttaatacatgactctctattcttttacacaagattaactacatgagcatcgagaaatataaaaactcattagtaaccaataaatgactattaaaagtagatggagtgagtaaataatgacttacaatagaacatattgatca

SEQ ID NO: 31989 - DNA, 454 bp, Oryza sativa
acctgcggcatcaagcttgtgaacccggagaacctatttttgttccattcaagcagatcacacatcctgttttacctttaatttgacctgaaactgaaaacattgctggataatcgttaatggtcacgaaaatgatggccttcactgtgaagtattctcttaagtactcgtcccacactttcaatctctctttccataaatcagccatatcttccaacaatggttcaagaaatacgtcaatatcaataccaggctgacggggtccctgtatgaggatacatagtagtacgtatttttgcttttgacaaagccaggtagaaagattatacatggcgagaagcactggccaagtactatgtgagctgctcatgtctccaaaaggattaactccatcagtactcagggcacatctaatgttccatgggtctttagcaaactctctatactgagcatc

SEQ ID NO: 31990 - DNA, 479 bp, Oryza sativa
aaactaagcttgccttgaaagcacttgaaaacacgtgaattctgtaatgcatgattaccgacgatcatgttcctaggaaggaaatgtaaatctttttagaacacgtaaataacggaaatgagaatcacgggtatagtagagatgaggtaccgatgcggaacctgtgtacctagaactaagaagacaattatgcccttctccatcttaaaaaaaatatccttttacacttactacctaagtacctatatcagtacttaaatatcttttaagtggtatcttttattatggaccattagatttttaccaaacaccgtaaaatctctccttcaacatatagggaatgccttggctgtactctcgagcttccgttccatgaagcggcctgtgtagaacaccggcctcgtcgtcactggtgatgaggacgcctattcacccattattagttgcaggcattcattgccgctggtaagctggcaccc

SEQ ID NO: 31991 - DNA, 330 bp, Oryza sativa
  unsure (1)..(330): unsure at all n locations
agcttgcttgagaggggtatcgaaccggtcattctatatggccggatcgatcgaagttctggtactatgctcacggtggaacgctcaacccagttgatggctccctggtcttcagcgatcagatacgcgaggctgcgcgtcgactaatggacacagtggaagcctcttctcagggcacgttccgacccgacagagagaaggacgagctgtcactcgccctgcagactctagagcatccaggacgaacacgagggaaaggggtgattccttggaagattggnatcaaggaggacatccacacgtataggagtcgaatgaggagcaagagag

SEQ ID NO: 31992 - DNA, 452 bp, Oryza sativa
  unsure (1)..(452): unsure at all n locations
tcttcgcattngctctgagtggtagcatcttctactcttttatgatttgtgggcaatacgccacgacctattgcgaggaacatgtctatcgagctcctattactagagcaatctaatggtgtatttctgaagcaacccgcagttcgatccatgagctcccaatcttgtggtgacttcggagagaagccctccatacaatcacaaaatggttttctactgccatcgcagacgccaaaaggtccgcaagtagcaatgcagaaactgaatggtccgcaggcagcaaataaagcgcagggatcagtgggatgggcatatacttcttgccaatattgattaacttgcgaccaaatgctcaacttgagctggccagacatgtctattgagacaaatgaggaagctaattcgtctgatgagtggtacatgaagtattcctcttcatcattattaacata

SEQ ID NO: 31993 - DNA, 412 bp, Oryza sativa
  unsure (1)..(412): unsure at all n locations
tcccgtgcatacttagtgcacatcaactatcttatattactttatatcctaaanagagtaggacacatatttccaatactaatacctacatgtgaaattctatcttcaaattcattatattttagccgcaaaataaaaccaaatcctgacagatttttacccttaatactgtcagatctttcaaattattcacggctcaaatataatgaatttgaagatcatactttgtaatgctattaggagtaaatgttcattttttttatagaatctttcatgacatctgctaattggcgagcacgcgaagttggtgtgtatagaatatcgtccttctatatctcgggacgacatgtagtatactataccaacatgtgattcaactatatgacatgtatcagcggcttaaactttctgt

SEQ ID NO: 31994 - DNA, 434 bp, Oryza sativa
taaggcgaaaccactcaacataatgctcaggggggtaatttgtccggtatgaatacttgaaggcgtaaaatgcccgatcttgtggttccatggagtaattcgatcgattgttatagttaggggggataaatcgtacttttcctttagattacatacacaaatgagtacagcagctagacgataaataactcgatcttactggataatatcttattacatgccaatacgtaacattatcttacattgtgcatggcgtattatatggatcatataacattgattgtggcacacccagcccatcatgatcaaagaaaaaaaattccatactaaaaatacttatctttaattcctggcacactagttacatgacaacactatatatttcataaatttctagtacaaaagcatctaattaaccaacgtttaccggagca

SEQ ID NO: 31995 - DNA, 399 bp, Oryza sativa
  unsure (1)..(399): unsure at all n locations
agctngatggagcaaaggccggttgatgatttatcggtcacttgtgaaattatttcgggtacacctatgcctaagaccggaattgttagtaattcccttcctattgctcctattgactttgacaagaagaaagtgttgattcggcctagtcaagccgaatccatgaaagggaaaaatgttattattagatatcttcggcctgagacaattatgatcaataattctaaggccaaagatcgtaacgttgcaaaagatgagtcatctagttcccaaaagactataaagccgaagctcacttttgagatgcttatggctaaatacaataaaggattggccgatcaatgatttgatgatcggcctaaagtgatttaagaggaccaagatcactttctagaaaga

SEQ ID NO: 31996 - DNA, 433 bp, Oryza sativa
tgagcactgatcctattctgctaatgatgctatactgtttatgtgatctacttatatttatatatatttctatacaaatagttcccttctgacatcgattgttcaaggaaatgctcttttactgatgtatatttcctccttgtaattctgctactttttatactatattccaaaacagttctgcctcttgaattaaaatatagggctagttctattcatagcattggattaatgcctaatgcagatcactgatgataactcaattttcactcgcagcaggtaatggagctactaatagccttgcagtaatgcccttctgctcttgcacttacggagaatttgattcttgggactcttagcttctgtttgtatgaaatgaatgtaattagtcttcagcggcttatcctagctgattgtggcgatggatatgatg

SEQ ID NO: 31997 - DNA, 254 bp, Oryza sativa
tgaagaaatgcatgttccgatttgaatataaacataggcaggcaagtccgtgctgattgatcatcatgtggaattacatgtctttcaatataaatctcctcttcacttgccaagtggcagggggcctgtacacttcatgttattttttcattgtatcgttcaagagactaatttaaataggcttcaaataacgtgccccgaaagaaccactactctctgttatattatagactttagcatgcacatctatgatg

SEQ ID NO: 31998 - DNA, 412 bp, Oryza sativa
  unsure (1)..(412): unsure at all n locations
gtggtgccaacccagatgaggtcaagaaaatggtggacgcttctgctgagtcctttggagttactgctcctcctgatatagtggtggaatagatatatagatgtcgcctttatcttcagaaacttctctgtgaccgagggtgcttcttggtcatgtccggaaaaatgcgtccatgtgtacattctagctttgctcctgtgactctgaatggtgtccctttgaactgataagcttgtgccttgcggtagtttgttctgcangctgcagctgtggctttaccatgctctatgaaatttacttacatgtgtttccagttgaaaaatatgtggttcagacttcagagtttagactaanaagaatngttgacagtatctggcatgcctagtagtgcttcgccctttcacttcacatg

SEQ ID NO: 31999 - DNA, 475 bp, Oryza sativa
  unsure (1)..(475): unsure at all n locations
tctttntctatcgtacagatgctacttgcactaatggatgaatcatacactggttctgctatagaagatgccattggcaatgcatgttcggatgatagtggtcctctagaccttgctgacccgatgttccttgatcttctaaaagatgagaatgatggtattgctgtaagtagttccttgaagtatgtgttccatgttcttcagtgaatgccttgatctagtcttctcattttctgatgttttcctcanggcaaacattggacatctcctacgatatcttcaaccttacaggcagcagttaatagcccacaatcggacagattgaaacagtcactgaaaatgggcacctcgtttcttacattatattttgctacagcattgcgggacgttaacgactgtatgttgcctatctttgtaattgctatacatactgatgagtgatgaccaacatattggtgatttgacctctactatt

SEQ ID NO: 32000 - DNA, 422 bp, Oryza sativa
  unsure (1)..(422): unsure at all n locations
agcttatgttggcaaaacacattcatcaagagcacatataataactaacaaaataattatagtaagaactgaatagcatcgtttttttttcttttcactgatgcttttattgtgcattttcattctgcaagcacaaccttatctgtagtaaaaacaggttaggtgggccacaactcagatggtcattgtattgctgctacgatgctntangaaattctttaacctacatgcttggagcaagatagtacacattattcaatctggcaaaagatgctatgaaaatggctccattagtttaccactctcgacagagcacaaacactacaattgaagctaaggaacacagaatactactgcccctatatgctgatcccataaacaatagccagtactctattgcatgatagttctacacaaaaaca

SEQ ID NO: 32001 - DNA, 450 bp, Oryza sativa
  unsure (1)..(450): unsure at all n locations
tctacactagaangtggctntccacanaaatatccattcaaataaactcctacattgaactatgctttcttctcctagaaaagttcttggcaaaaagaaaatgagaaaaggaaggaaaggcatggctagaaaaaaaaagaaagaaaagaaagaagatggaaataaagcttgctctcaaaatattgagcaaagaaaatatagccatgccccttccataatcatgccaagagaaccaattagagcgaaagtataggaaaaagggagaatcatttctttattccatcattccacanaatattttactttntcattntccgccataaataaagacccttgttctaggagtatgattgattatcttcttgagtcaatattnttggctttgcactatatatgatgcaggtatgtcacagnttatccctaccaagctccacatatcagccttctaat

SEQ ID NO: 32002 - DNA, 473 bp, Oryza sativa
agcttcaccgcactggagcgggctaaccatggtggatgtcgtcgggaagccgccctgccggagcgcgccgaggatcgccggagctgccgccgactgccaagacttctatcagttctcatgccggaggtcaagcatcacgcatggcgtcaaaaccagcggatgatgatggaggcaagtatggctgcagtacagaggaaggacgacgggaggacggcgagccagtgctagtggatggcaacaagctacgtaatgcatgttgattaagttaattattgtggcaacgtggccaaccaatcggaggacgacatgtcatcgctgctacagtgccatgcacaaaccaatgcgtgggctgaagaagtactggtgtgtcttcttattcgtcccaaatgagatgccgagctttgataaatccgggccgcgctacatcaaccatcttcaataattcctcactgattcttctctaatctaatctc

SEQ ID NO: 32003 - DNA, 407 bp, Oryza sativa
  unsure (1)..(407): unsure at all n locations
tcaaagccgtcaatgtctcccaganaattgaagttgatcaagcggtaatcttcttaactataacttgattatgcatttcttcattttcttcttctactaacttgtaataaataacctctcttgcagattttggagacacacaaccaagtcgaggaaaagaaaaaactttatctcccttacaacatcctcccgcttgaccctgacagcgctaatcaggctatcatgcgatatcctgaggttcccattcttctcaaaccctacctatcttaatcttacgtatcttttccaactcattctgcattttttattctcctcattntacagattcaagctgcttttcacgctcttcgtaatacaagaggactaccgtggcccaaggatccatgaaaaaagcctgatgctgatct

SEQ ID NO: 32004 - DNA, 370 bp, Oryza sativa
  unsure (1)..(370): unsure at all n locations
agcttanatttatgtatacacataacacataacttatctttgtaaagttaaatatatgttntatagtttaatgtttccgtatttgttatcggttttccgatttgtacagacatgtttccgttcctattatttcgtttccggtttttcgatatttccgatatcgttttcgtttccgactttaccgttntcgatttcgtttccgagaaaaatatggttatggtaatggttgaggctgttntcctatcgttttcatccctaaaggatctgctattgggcccatatgtcatagatatatgagcggcccacatgttataaacagcgagtgacaaatcattaattgacacatcttataagcagcaaataattaaat

SEQ ID NO: 32005 - DNA, 350 bp, Oryza sativa
  unsure (1)..(350): unsure at all n locations
gaatttatacactaatttatagtattaaatatagactacttacaaaactaattacataaatgaaagctaatttgcgagataattttttaagcctaattaatccataattagagaatacttactgtagcatcatatagactaatcatgtattaattaagctcaataaattcgtctcgcgaattagtctaagattatggatgggttttattaatagtctaccgttaatatttataattaatgtccaaacattcgatgtaataggaacttaaaagttntattcgagccacccatttctttttgggcatagctggtgcctctgcttgcttgtctgcagtctgcactctctgaat

SEQ ID NO: 32006 - DNA, 443 bp, Oryza sativa
  unsure (1)..(443): unsure at all n locations
agcttgcattaacaccatgtgttctttgcttgttttctggcangcaggcanggcatgcaacataatactcaaataataattggctgagattgttaagcacataacaattttaatgtcatgtcatatgacatgtaaatgttggtcctaattctttctccttgttttacagtattacatgaagactgggacttgcaaatttggtaccaattgcaaatatcaccatcctaagcaagatggagctgtgctacctgttatgttaaacaacagtggattccctatacgcctggtgtgaaatctctcgtaaaatattgcttattcatacacttgtttttcctgttttgaaaaagagatgttggtacaaataaaatgcatggtgagaaggagtgctcctactacatganaactgggcaatcgtaatttggaactacatgtaaattccatca

SEQ ID NO: 32007 - DNA, 398 bp, Oryza sativa
  unsure (1)..(398): unsure at all n locations
tgtttattctctggaaatactgaccgtatggcttattcttgcttgcgaatgaaaagccaagatgaaaaacactatcatggcattgaattcaccttttatgctattcctttggttgggttacgggagatgtgatcattggagttggctgacttctcagcattgatgggaaaacctaagtgcctaactgctgaaattgtataacacttaactttaaactgagctatttntccattcttcctatttctattatgtcattgtattataagccgtcttcagtaggttcgtggtgcattcacgtatntaatgctgctatggtgtgtcgatttttgaaatggttggcagatataaatctgtactcaactactttatctgatcttctgngttctctgatctctcta

SEQ ID NO: 32008 - DNA, 491 bp, Oryza sativa
  unsure (1)..(491): unsure at all n locations
agcttaagtaagtaagattctattatgcctgatacgatcgatcctggatcgatagaattgactgttgcccggtccggccagatcggccaccaagaggggaagggtcgtgtatgttttccaaaaaaacaaataataaaaaaatgaaaagaggggtcgtgtaagctggctgaaaagctgtttgtgtaagccgccggagagaatcgaatgtgacgcatatgcctncgccatcccccttccctcctttcctacacggctacacatatctaatgtgatgtttggatttagggactaaactccctgtcacatcggatgtttgacactaatttaaagtattaaatataaactatacttacaaaactaattatataaatgaaagctaattcgtgagataaattttttaagcctaattaattaatctataattagagaatgtttattgtagcatanaataggctaatcatagatttaatangctcaatagaatcgtctcg

SEQ ID NO: 32009 - DNA, 360 bp, Oryza sativa
  unsure (1)..(360): unsure at all n locations
tgtctaatacanagatagcttctttaaagagattgttttatatataatctatattgtgtgaaaccaccttgagatacatttcatttaggtgcatgatgttatctatataaggctactctatagggggctctgtgtatctaacgattaaagaacaattacgtttgtaaaattatactgtattgatattgatggcaagtaaaggtatacttcttttgttcagcataaagatattttcttacacatctaagtttagaacgaagagcaaataactgacgaatcttatcgattttgacacatattgcgaacaatattattcaagacgatccatgaaaatgtagtgtctaacagagatctatcaca

SEQ ID NO: 32010 - DNA, 418 bp, Oryza sativa
  unsure (1)..(418): unsure at all n locations
gacactatgaaactcaagctggggagatatctctcccctcactgaggtaacttgagtcacattgcatatttccctttctaattgcatgtttgcttttcaattgcattctataaattcgaaaacaacataaaaaatttgcaaaatagaaaatatcaaaaagataggttagattttattgtgctatgtaagacaaattagttctctttgttgagatgatagctgctctggtntatatctctcatatatgggttcataggtaagtgctctctcaaaaattgaatataagtagcgaacaattatctgggaacctgaggtaaatgagctgcatttgctaatctgagtctaagttattgcgagatatgagatagtaaataagagttgctatgatcttgttctaagtttgacttatattctggat

SEQ ID NO: 32011 - DNA, 361 bp, Oryza sativa
  unsure (1)..(361): unsure at all n locations
tgcatgacatactcatatttgttattcttagttttcctgccagcctgaaaaggagatacttcagtgttaacttgcctaccgggagatttatctatgtgcctcacttttgtaattctacaagcgacagtggatacaaattatgcatccataactagcagcattcgatattacacagaatttcaaggcctacttgtactattgagtgtcgtacatgaaattactagcaaggggaaccacctgtgtaaagaaggcgctatctggggtaccatctaagttcaaagtatgaaccaagaccatggtaaatctgtcacctggatgcatangatagacatctgtggcaacatctaactgcatgtacata

SEQ ID NO: 32012 - DNA, 449 bp, Oryza sativa
  unsure (1)..(449): unsure at all n locations
cgccatgcagaaatgggtccagaatgcaaggcctcttcagagttgagagttcagacatgctgatgctgaattgttgcatcagctgatctgcagctgcagaattggagctatagccaacaaccaaccaggtgcagttcagttcttggagagaattatcagcagcaggagaagaggaggagatcgacatcgatctctggagtggggtgcaagcgattctggagcactaaganaagaataggcaagcgaattgaatagaggagatgactaacagaggtagtgtgatagtgcagtgcaagatggaggaaggttgttgctggtatggttgttgcagtgaacacgtcgatccaaccctacactgatacggaatgcctaagtgctcactcctacatacatatgcatactacctgtacctacattgataccagtatagctggtgatcagatcagttc

SEQ ID NO: 32013 - DNA, 437 bp, Oryza sativa
  unsure (1)..(437): unsure at all n locations
agcttataaggangggactggatcgattcatgtctagccatccgataagaccacaatgcttcggtcaatcgagtatgccactgccgaggataatcaaaaatctttctcttaatcaatttgatcaagctcttgttagatgcctcggcctgcccattagcttgtgcataatatggtgaagaattcaacaatttgatacccatgctatcggcaaactgaacaaactcatcggacacgaaaattgaaccttgatcggttgtaatggtttgagggataccaaatcgatagattatatgttcttgaacaaattgtatagcatccaaagaatcaatattcttcaaaggaatcgcctctacccacttggtaaaataatcggtcgccaccaatataaacttatgtcctttactcgatggtggattaattatgccgatcatatcaat

SEQ ID NO: 32014 - DNA, 355 bp, Oryza sativa
  unsure (1)..(355): unsure at all n locations
cgagctcttctcgtatggcttggtttcgatatggtgcaaatatccgcagnntttgctttactggcttggcatcgggtcgcaccatgagtttgtgctcaatcacctccctatgtacccccggcatgtcggacagctgccaagcgaacacgtcagcattgtcacggaggaaggtgatgtgcacgagttcctatttctctcctagtgatgccccgatcttaacggtcttgtcagggttggcactggagagtggaacgatcttgattgcgccgtctggtatcggcgtcttgtttgtcttgctcactttcttgggtggctctgctgtancangtgggctgggcgtgtgctcgaccatgtc

SEQ ID NO: 32015 - DNA, 489 bp, Oryza sativa
  unsure (1)..(489): unsure at all n locations
agctntgccgacaatggtccgtgcagcagcatgtttaccacaaataccagaatgtatatccttcaacaattgtctcccttcttccaaagacacgcagcgctgcagtattcctgatggacttttcttgtacagctcagtcttatgaataatgtaaagtctgctgtacctagaaantccgctcggcttcgttttgtcttgagggagttcttgtttggtcaaaaattttatgagaggttctctccagtcggtttcgatcatgcttacgccttgagtatccatggcttcaattgtttcttttctgggtacggttggttcgtaaagatgttcgacgaacacatcagaaggggctgcttctcgttttgaaccaaaaatggccagtctgtcggctggctcatntgtatgtcagaggacatgggtgagctcaagtccatcgaaattatcttccaacttgcgtacctctnngtcgatagcggtcatattatcatctaa

SEQ ID NO: 32016 - DNA, 325 bp, Oryza sativa
  unsure (1)..(325): unsure at all n locations
acttttgaaatttctagaaaattcatatatactaagcccgatatgaagtaaaccaaagttctatgcatgggattcttacagtatttcctagttaacagtttttttgaatatatttttagtatggtcattcgctgatgtcaagttccataatatttttagtatggtggctgtcgtggaattcgactgcacaaataatcctcgattnttataggcccttagttgcaggaagtttgcataaacgtctgagaaaacgggttatagaccgtctgcacaaatgtaccggtttcagttgcgaggccattangataaatacttatcgcaccac

SEQ ID NO: 32017 - DNA, 436 bp, Oryza sativa
  unsure (1)..(436): unsure at all n locations
gcttatactatctattctcacatgtactactttttattgatatgactttcaagntacttaagtattgctatgcgattacaggggctgacctggactagataatctaagcctaaaaggcacgcggtacattttggtgttgtttggataatgagaaatggattaatttcccacctatctgtgactatataatcctaatcattcatttcttccacctcatttcatccaaacctttattcatttcctaagcccattccacatctcatatcctgttattcgaacgggcccttctgagattttaccatactagtggcccaagctatcatacacatggtccaccatggtccacggactagtctttgatcttcattggatgaacagcgatgtcatttcgaaaagttcacttcatatccctctcttgattggatctcatccctca

SEQ ID NO: 32018 - DNA, 305 bp, Oryza sativa
ttgttcgatgtcatctgtacaattgaatgtgtgtgtggtttggtgtgaaatctgaatgatgcaactatggtgcgatctgtttgtcaaattcagaaataaattagcccgaatggaatggaagtgaacacccttctgatgcatgtcttggagatgcatatgcttaaacaaaatgtctgcttaaacctagtacaaccattcacccaagtcactgaaagttttagtctgtgatcaaatgtaatactaatatctactccctccagtttacaatgtaagtcattttagcatttcccacattcgtatagatg

SEQ ID NO: 32019 - DNA, 467 bp, Oryza sativa
  unsure (1)..(467): unsure at all n locations
gcttaccggcagggtgttttctggcctactgtagtgttctacgccgacaaaattgtgcgcacatgtgaaggttgtccaattttcgccagacaaattcatctaccagctcaagagttgcagactatcccgctgtcttggccgtttgcgggttgggggctcgacatggtcggcccgtttaaaaaggcagtcggcggttacacgcacctctttgtggccattgacaaattctccaagtggattgaagctaaaccggttgtcacaattacagcagataacgctcgagacttcttcatcaatattgtgcatagatttggagtgcccaatcggatcatcactgataatggcagacaattcactnggcggagttttaaagacttttgtgaagactntggaattaagatantgtatgcctcagtagcacatnccatgagcaatggacaggtggagcgagccaacggcatgatact

SEQ ID NO: 32020 - DNA, 432 bp, Oryza sativa
  unsure (1)..(432): unsure at all n locations
tcacttccgctgatgtgtccttgaagctcgtatcatactagttgcacatatgactagcagcaaatgcagagatgtgttcttttattcatgcattttttgtcttctcttttttcttcatccatgcacggtgccagcagcagggcttgacttcttcagtgctgcccaaccaacctntncactgcgcttgcactgggaagtcagatctagagagaatatgaggaataagaatggggagagaagtgggatggacgaagaacataatgggcaatttggtccaaaaatacattttagtgtatggaacgggtatgtcgcggcatttcttaaatatctgttacattgcaatggcatgactgcaaatttgtactccctccattgcaaatgatctacatataggtgtttaggttatcctaaaaatctacatattggtcatta

SEQ ID NO: 32021 - DNA, 332 bp, Oryza sativa
agcttgtgtgttccacgtatggaacagattcttgtttatattatgaggaggagctgccaagcgatggcaatgtaatgaacagcttccacgagctggagactctgtacatcgagttctttgaacagataacaggtaagaaggtctggacaatcggcccaatgtgcctctgtgacagagacagcaacatgatggctgctataggaaacaaggcatcagtggatgaggcaaagtgcttgcaatggcttgattcaaagaagccttgttcagtgatctttgtcagctttggcagcctcgccagcaccgcacctcagcagcttgttgagctgggactg

SEQ ID NO: 32022 - DNA, 436 bp, Oryza sativa
  unsure (1)..(436): unsure at all n locations
cgtcttctattattatgtcatattttcgtgagatatggttagtatgaataataggcagaattgcttcatacaaattctcacatgatgttatttgcgcaatttcttggatggttccatgcagcagcatggcacacaagcgcagtgtcaatagacaagattagacaactagtgagatttcagaggcaacaccaattgaacaaccctatttgtaaccatancacctctctaattaatagtctaattaatcagtggtgttacttgcaaatgatgcaaagtggcatctgatgcccctcacttggcagacaaagtgtaggttgactgaccaaacaaagccctgaattacctcgtcttcacagacatgtcattaccaaagagataatgtccatcttttcacaggaattcagataataaggaagtaccagtactatatatcact

SEQ ID NO: 32023 - DNA, 398 bp, Oryza sativa
  unsure (1)..(398): unsure at all n locations
agcttgtggttggttcaattccatgtcccatggttgtgttctgttgcacaggagcaagaatggaggaagccacatgaagagaanaatcttcaagtatacacaaggagaacaaggtgtccagtaatccaacaagttgaagaggataatcaggtagaggaagatgtaagccgtgagcaaggatctttggagtcagggggagaagaagaggaagttagagaagaatctgacttaccaattgccattagaaagagtgtgagaagcaatgcaggtaaacctccactaaggtatggttttgaagctcaagatgagggtgatgatgaaaataatatatccaactatgtttcctatgactccttgtcatccacatataaggcctttatagcatcactagattcagt

SEQ ID NO: 32024 - DNA, 396 bp, Oryza sativa
  unsure (1)..(396): unsure at all n locations
tctgatggttctgttgtgttgatggcattgtgctagactgcttgtgttatgaaacccatcataccatatatgtgtttcgtgcgatcgagtgcgaagttttgtgcaatgatgttatgtgaagttcagttaactgggacactcttttgctttgtaagacaataagcgttttcttttggggcccatatgggataatacatctcttatatgatactgattttgcgttgcaatgagcagaaatgcaacttttgagacaattataaactgtctgactggatacattacctatcttgaggtagagcgcctaaacaaaggataactaatctgattgtaaatatatagtgcaatcattcagacttgatctttttanggaccaaattgtgcctatgttcaattcag

SEQ ID NO: 32025 - DNA, 463 bp, Oryza sativa
  unsure (1)..(463): unsure at all n locations
agtcacctgcggcatgcaagcttagcctattctacaatgtctcaattgggttatatttgttagctctaggtataggttcttatcaagctgctttattccatttgatcactcatgcttattcgaaagctttattattcttgggatccggatctgttattcattcaatggaacctcttgttggatattcaccaaataaaagtcagaatatggttcttatgggtggtttaagaaaatacattccaattacaagaactctgtttttatggngtaccctttctctttgtggattccacctcttgctcgcttctggtccaaagatgaaatccttagctaatagtggttatattcaccctttcttggaataatagcttcttttactgcangattaacctgcgtctatatgtttcggatatatttacttacntttgatgggtatttgcgtcgtccattttcaaaatacagt

SEQ ID NO: 32026 - DNA, 426 bp, Oryza sativa
  unsure (1)..(426): unsure at all n locations
atcttaagcacctgggcatgcactattgcctattataacgcactcttgtttcttataattgcgcgtaacattgcgcctgtgcttttggtgtgcttctaattcctatataaaatcaagatgcttgaaaccatctttctttcacttaatcctcttctaaaagagtatcaggctttgcgtactattattacttaacctcatacgttatcatctccaagctatgaagatatcccatttacaagtgttcataagatgcacagtcagcccaaaaacaaaaagcatttcgatggtgctcctaacttccccttaatccatagctatgtactgggtggttgcaacttgcaactatctcggntcaagttctgcgatcgtcaccttattgagtgaaggattcagattgntaataccatgattgatatggttctaatc

SEQ ID NO: 32027 - DNA, 332 bp, Oryza sativa
  unsure (1)..(332): unsure at all n locations
aaaacacatatacttgaaaactagagaatataacaagaatatcaccaaatgtgacattgtaggagagctatgggttatgcatggtgatgcagggtacatgatgcatgggatcacagacgatgtgctactgccacgaggcatgtaatgaattctgttgccaccaaaacataatttgacatgcccaaccattgaacagtggcctcaccgcgttacgaaagactgtgcaccttatcccaaggcaagctacactaggctgcaacacagagaactgtgcacagatgtcgctngtaatggtctgctacactgtttcagaatgcaatgagcaacatcac

SEQ ID NO: 32028 - DNA, 430 bp, Oryza sativa
  unsure (1)..(430): unsure at all n locations
agcttgtagttgcacanaatcaacaagttggagtcttattgacgtatatactttgtgttgtttagagtgttagaccgatttccaaattgttgctatcaggtatttcttttgaaaagctcaattgtttattcctactctgaattctgattgttatgtaacacagttcctaactctatgttgctatgcaacaacttttgcaggacctatattaaattctggaatgtgcagtgaggtatttcagtttgacatttcgacggcttctagcaatcctggtggcattatacctgcatctcctgttgtgaactcgtcaagtgtcaatgctaccgagaaaatcccagcacattctgctgcttatcatnggcaagctgaaaacagaagagtcatgtacaatgaagcgattccactcaccgggaagacggcgaacaacaca

SEQ ID NO: 32029 - DNA, 399 bp, Oryza sativa
  unsure (1)..(399): unsure at all n locations
gaacggtgtcccatntatgtatgataaggcaagtcccgtttctcaatgctactgtntttaattaatttgtcaatttcatcttgcttatttacaatttgggctttcatttacagataaggctgttggatagtttagaagaatacacctcaagaagacagcagaaagatgaggagaaacggcgatcgcgggttggtttttgttttctctgccatctgtcgtgcccaatcttggttgcattcgttagtgtgttcagtttgtagtttcctttagcatatattgctagtatatccataactatgcttttgcttggcaggcggatctaccgctgacactatactgttggggtgacccctagtgtccatggtgggcggacgtcctgccatggcacgctagatactt

SEQ ID NO: 32030 - DNA, 462 bp, Oryza sativa
  unsure (1)..(462): unsure at all n locations
agcttcgaaagttggatgcacattatgattgattatcatatttctctgcttccaaatatgccagcaagaatggactcatagttttcatccactaggataaaaggtatcctattcgcgtatataagattttaataggattttagtaaggctaggattataactttacttcattgtcatgtcaaaaaaagttacaagaacatcatgaaagcatttttaataacaagatcactatcttctatctcttgggaaatttgacctctccgtatgcaaaccgggaggagatcatgcacggtcatttccgcccgttgcttgcacgatcaacgcgatcaattaaggttacttattagcacatgaattaataagtattagctaaacatttgaaatatatattaatatgatcttttaccataactttcctatatnttattacaaaatacattgttagtattcggaggtgacatg

SEQ ID NO: 32031 - DNA, 482 bp, Oryza sativa
  unsure (1)..(482): unsure at all n locations
ntatgccacaattccagtgctaaagcccacagaatccaacacatgtaacaataggccttcacgagttagtaaatgaaaagcccatcgtgtagcaaatcggtcttctcatgttgtttattcatttatgacttgtgagaaatgagaatcaaagtgtaggtagagttgtaacttgtgtcaatatggccttgaaacaaatccgcacaccgtggcacgagctctctatgtaaagtttctttcgagtgaactaaggatttgaagcatgaaagtaatttttttttcttgttcattccattcattntccaactcctattagtactccaatcaactgatagagaccttctccaacattcatgttcacctaaacatgaacctcactaccttagtgaaactgagactaacatggatatttccacaccgggtgaaactgcacctatagtacgcaagatatacaagtgagataataataaaacgattgcatctca

SEQ ID NO: 32032 - DNA, 455 bp, Oryza sativa
  unsure (1)..(455): unsure at all n locations
agcttcaaggaggaaattcagcaatctatgttgtgcttataacctttgcttttgcaactcacctttagctgaggacatgactgccatagtcttgattgaatttttcgtatctatgtacatgaagatgagcagatggccgtgtattccttagtgcaagctcaatgtcttctgtcgttactggaccaacttcaggcaactctgcaacatttccccccaaaataagtcctactgtatcactgacttcgataatgtgagcagcaggatcattttntgtgcagtgaaattatagcatacttttatgtggcattggaggcgccatggaggaatataaattcttcttttggtgctactggttctttatacgggttcnggtntttcagctactgaatgcaaacatacaagtctacagaacttaaactcactgaaagtngtatgagtactaattactaaacaaa

SEQ ID NO: 32033 - DNA, 502 bp, Oryza sativa
  unsure (1)..(502): unsure at all n locations
actcagcttaggagaaatagagctaaagctctataaagagacggagtatcattgtttctttctttagagatttaatcatataaatggccgtattttataaagatatttgatgagatgaactgttgtactactatctcacttatgcacaggatcaccttgtatccttcaacagtcagggcccgttggtaaaaactgcagaaataaaaaaaacacgacccaaagtatggatgtggccatctaaagtttcttacaccggagccaacttggttntattccattcacatactccggagtactacatatttgtaccttttgtttctcaatgattaaattaaatttggaccatgaaagtttatggcagggtagcatatcgtgtcaatgtttcaattcatgtctccgtgggtttcatttttataattattagaaagtccatcaaaccctgacactatacttctctacagtccgtctgttgcctctctctttattgcactgtgattttaaa

SEQ ID NO: 32034 - DNA, 457 bp, Oryza sativa
  unsure (1)..(457): unsure at all n locations
agcttcgattacataatgatgctaaagaaatatttttgtatacaaacagctntgtttgttcagcggaagcctgtggcggaaacatggctctaagtttggttgacagtgctattcttaaaataaataagtggtgttttagacaattggagaattatcattcatactttaataaggttggccacctccattgtttggatcacagttttttttcagctgtttttttttcttttccatccaccaagggctcactntntgtgctctggctgcttattgaaaaagctattaatgaatattaaacctcacttgctgccagtaatatgagggccatggtcacatgatngttaatagcggttagtcttctagtacattacctaatcagccatgcaaactgcttaagcttgtggcattaagtcatttgtgggtaccacatgaaagatgatcagtcatttgatcactc

SEQ ID NO: 32035 - DNA, 408 bp, Oryza sativa
  unsure (1)..(408): unsure at all n locations
taacaaggatcacgaaattagtgatgggagtaggtatgtaatatcaatcagcagctgctcagttaagttgtttagtacagaagtggatactggatcttttatgaggtactaccactattactttttctttgagaggatgtcactaatatttgtgcgatcttgaagaatgatataaatgaatgataatatataccaggcagttgtaccgtacacaatgatttggtatcatatatagagtggctatcatttggaaatgaggattaccgagaaacactagtactatatattagtacgctcagtagacgtacatactaattagagctgtaaaggcacacctacgtacgtgcatagaagaactaccctaaatcctaatangaacattaagaacataagaaaatggcgactggg

SEQ ID NO: 32036 - DNA, 416 bp, Oryza sativa
  unsure (1)..(416): unsure at all n locations
agcttagcccactggcgccttgttacctatctgtcgagccaccttataccgaatcaggggtaatttcttattcgacccttttctaaattctatcttaaaattgacgtacactaatttttaaaactcatcaacatacaaatactcccccgtctcatcaacatacaaatgtgtcacatcatcacccattagcaattactcccncgtctcaaaatataacaactttagccctcaagatttgtcccanaatataacttctctatcaacattctcttcccaaccaatcacaactctctaccatttactttttctacctacctncactactcaacaaatcacaacactgcatcattcacttctacctagtagtactttcttaataacccgtgtcacctctaaaaatatttatattatgggac

SEQ ID NO: 32037 - DNA, 370 bp, Oryza sativa
  unsure (1)..(370): unsure at all n locations
actcagcttctactatttctttgaataaatttcgatcgtctttcctgcttcaaattacacgtactactttatcttctttntggtttactttcagaaaggaacaagtaatctattttgttgtagtagtagtagtatcaaacacacacaagtttgacgcgcaccggcaccgcccctgtaccgaaattgtttggtcgcctttatcaaaagacacacacgctgcctctctgttgctgctgcggtgtgtgtgctggtgctgcaactgcaggactagtactagcattcatttcagactgcaacgtccgacttgaagcaagtttatccaattgctatggacgctactgttatcgattcgaaatgatnaaagcaagcg

SEQ ID NO: 32038 - DNA, 457 bp, Oryza sativa
  unsure (1)..(457): unsure at all n locations
agctntcacatattcacgaatgaattgctcatctgctgaaacattaccagtcagaccagcaccctccgcgactgtcaccctgttctggcattgactgaagtaaaatgtttctccagggttcccaagcttcacttcatcagtggtgtcagcagatgatatgtcttttcttgattctcggagcttgtttctacaaagtaataaatcaagacttgttagaagccttgtggactacagatttacttcaattattgaacatgtttgtggcaagctcttatataggtggttcaagtatgttaccctatgtactccagatagtacttgtgtacacagtaaagttgcaacgttacttatagcanaacacaccacaatcttagtgattgattatagatgacatcacaangtgatgcactagttatgctagtatgatccgtcaaaaagaaaacccatacattctttt

SEQ ID NO: 32039 - DNA, 448 bp, Oryza sativa
  unsure (1)..(448): unsure at all n locations
tcacttggganaaatccatatgagannaatttactttgctactatgatcaatgctcggntntgttcatatctgtaggccgaaaatttcttagacccaagtggcatgctacagtacagatctactctgcttgaccgcacaacctgaccaatgaaatattcgtgtcagtgcagtggttagactcctgtttaggtgtctatcactacaggtttaagtggcagcatgtgcatcgcatcttgggttttgagtaataaagagtagtttccataatcggtggtttaagtaagatctctacatgtcaggcatcgatgcttgctgctatgtcaatgacaaagttctcgcatttctagagcaaattcatatagaggcctataatttanacagagaagccaagtaattccaaagaaaccatgcgttacataacattaagtaatcacttccctgtgcagc

SEQ ID NO: 32040 - DNA, 429 bp, Oryza sativa
caacagatcacctaccaaatgcagttataatgggttacttttatattgacaatggagaacgcgtagcaaacaccacaatcagtaagaacataatagaagtctcgatgcctcccacgtctaatgttaaagaaacaacaaatctatgcatccttggactatcagttcctacctctagttagcagcaagcccatgttgggtcatgaagggcatttttcatgtccctactattgaaggaacaacaagtctatacatccttgaactatcagttgttcctcagcccctagttagctatatgagtttcagactcagtttcagcaacaatccagcaattaatgtaggactagtggttcccagtctcccagatcctagcaatgactggtgtcaacatattgtgcttggtcactagtaaattacattgctgacactgga

SEQ ID NO: 32041 - DNA, 494 bp, Oryza sativa
  unsure (1)..(494): unsure at all n locations
catgagagagtttacgaganaaataaagtatattccgatcggatataaacccatacgtactgctcgcttaanaaaaacaaacgaacataagtgcagctataaagccaaaaaaaagttctacattgtacattgaagccgtatataccggaaaatcatgtccatacgagtgaaaccgcttataccgaagaatctacgtacgtacacacaattgaaaaagaacagaaactttaggtactgtttatttaaaaaaaaacgaacgtacatatgcgaagacaaaaccaagaaaaaaatgtacttatgcgtagacaaaagaacagatgggcttttaaaatagtattttctatagtagaagaacaaaacttattacttcacaaatatggtaaaanaacgtacaactaaaaatatatgaattgaaaatatatgttttcagctacgcgggcattctttaaaaagtgatctaacaatatatacagtgactgactttatttatacat

SEQ ID NO: 32042 - DNA, 386 bp, Oryza sativa
ctaaagtgagggccaaatcacaattggacttcaaaatgagggtcagaatgcaatagccctaaaaaagaaaactatatatggcttccaaagggaagtgagcatgatatgcatacatttctagcaatgatagaggaggatgtcttcaaactatccttctgcatttcccaagtccccagtccccaacaatttcgcaccacccatggtccatggatagatacgcacagccacttcactagttgatgatgttcgtacttgtgcagttgcacatcatcgagtggggagcaaaatggttacagtagtaaaatgggaataagcctgtacttagcgcagatttggattagtcctagactgacaacaagaatgtcagttccatacctagcagcgat

SEQ ID NO: 32043 - DNA, 231 bp, Oryza sativa
atgtgtgctctatcataaacatcaaatgatgcatcatgaaaaataagcacaattcattatgactaccacactacctgacatcataacaacgcgatatgttcataacaatagaatgttcatcgctctttactgagtaacttcacgacttctgaatctctctgtgcagtgcagtactagacttctatgagactgctagcattaaccacaaccggaattctgtgatcggatcac

SEQ ID NO: 32044 - DNA, 450 bp, Oryza sativa
  unsure (1)..(450): unsure at all n locations
agcttagtacagtgganagaaactagcaaagaatcatatctatacttcagtataaagntgtctagtatacatttactatgcactaatcgtacagccaataccccctaactacgccctcctggtatatcgagagaccacccctggttgccaagttccttacgacaacccgtcttggccatccgaccggtaatgaatacagaggagtacccacaccaagaaagtgtcttatgattatatatgaacgtggaggaatacccgtactgaactgtcaccatcagcggcccacctctactctactaacccgtggcatataaccccaattaatggtatctaataatctaagcaccgtgcttacattactaaatactactctacatccatgcatacgacatagagcaactttactaaatactactctacatncatgcatatgacatagagcaaccgaat

SEQ ID NO: 32045 - DNA, 472 bp, Oryza sativa
  unsure (1)..(472): unsure at all n locations
gatagctccccaccacttgtcaagggccagaagcgtgaacgcggcaaggggaaggtcggggagttggcgccggagccaaaaaggggcaaggctgcgacgtcgatgccagtgagcaaagcggggaatgtcgtgagtgcgccagcctaatttgagctatgcatgccattggtggaggacaatgtgttagccgtgatgggtattgcttgccgagagctacataagcaatacatggagctaagcaatgccaagcggaaaataagggagtcatccatagttggacatcacgaccaccagccgttcctatcgtcgcctgcctatataactataggctntgatgacctcttcgaccttttcaggatccggaagttggacactggtcttctaaaatgctactccttgtaagtgcataccttctatactcgtgatatgattggactatatctcttaattaaattagttcctatacgtaaat

SEQ ID NO: 32046 - DNA, 348 bp, Oryza sativa
  unsure (1)..(348): unsure at all n locations
agctngacttgtcccagctcgattcgagctcttctctatctacaaatgagccgaaccagagcctaagcaaaaactcgcgagctttaccgaaccgagctcgaacctctactaagcaaatgtgtatagttcaaaatgtttattcgctttattgatttaataaactaatatatcatatatattagtatctatttacacagcaaattagcatgtgttagcgtaatatatttatcttagtcattntctactcttttattagtgcgatcaaatagaaataattatacttataaaaaatttatcattaatatatatattatattattaatggctgaggtcgagctcgaaccgagc

SEQ ID NO: 32047 - DNA, 447 bp, Oryza sativa
  unsure (1)..(447): unsure at all n locations
tattaggaccttaaatctcagcttggaaagtctaatacttcctgcgtttcataatgtaagtcattntagcattntccatacattaacaacaatatgaatatgggaaatgcgagaatgatttacattgtgaaacggagggagtaccttgtaaggtgctgatccgctcaataatacttacaatagttaatagtttagaccagtacactagtcacaggactgtacatttcaacagaaccagatctgatggacatagttcaatcttttctcccccgtatttttctgtgttttttggaatggttttttctcttagttnttttaaacgggttttattgttttttcctcccttntttgaactgctttatatgatacacctagcaagagtaagagctctatacctgtttttttttctgaaagtatagaggttgtaataaaatcataaacaaattc

SEQ ID NO: 32048 - DNA, 342 bp, Oryza sativa
  unsure (1)..(342): unsure at all n locations
agcttaacgcatgttanaccgcgaggtcgagctattggagtttcactattggggatctcaatctgactgcgaaacagggaaatcttttatagtagtagctagcaaaagaactaggtgaaacggtatctatatacagtactaatacgaacatctctgaatattctcacgctagctttacacttgaactgggaagccaaaattctggaacgcccaatccgcaagctgaccggagctgaacatccaaagctccgatgcaaaagtcggatgagcacttgagcagtgacccggactgctcttggcagacgattgtttctcgtcaattttcgaatttcnaagcctcta

SEQ ID NO: 32049 - DNA, 403 bp, Oryza sativa
  unsure (1)..(403): unsure at all n locations
ctattaggacctataaaactcagcttcatattggatttgtttattatacttgattcagtcaactaattntatacgcttagccaacatatataaagaactttgactatgtttggggttattctccacgacgacaggtttggacaaagctgttcctttcacagatggaacaatatttcttcttcggtgctaaagttctgtgtcattttcatccaaagtatcttgaatgcgtccaaacatgtggaaaatcaattgtcttttagtcctttttacaattacttattccaactaccaaaattgagtgcatacttgtgttataatatatgtgactatgaatttactaaagatacctntattgtgatctagctcttggttcagcattccattttttcattcttaaccactg

SEQ ID NO: 32050 - DNA, 364 bp, Oryza sativa
  unsure (1)..(364): unsure at all n locations
agcttaacgccatgaatccctttcatgcttatctgtatctggatcctgcagaacaaacatataggatgagtagtatctgatgtaaatataatactcgagaaaaatgcaagtattttaaaacatttataaatatatatttctcctcttgtcaattttgatttccccgagcagatgactcatcacgtttaaacactctgtccgacttgtcatagccccaagcaatgggagtcggcctaggcactttccaaacatgcatatgagtgacatgagttcgtcattaatggaacaaagtttcacgaatcagaatttactactcgggtacttttgcattattaagagcagaanataatttatctcatctcta

SEQ ID NO: 32051 - DNA, 340 bp, Oryza sativa
tactggttagagggggctattataagtgtcagtttcttgaaataaccggcacatctgagaaatcatatggacctcgtgcggtggctcctgtgggtgggaaaagtcttaaatatgccggtgatgatgacgttttctattattgacaattgggaagtaattaacgaaggtacggtataattaattggtcgcatctatacttgtttggtgtgaaacttggtagaataacaataatggagtgactagtccatagttttcatgagtatttaattatttgacactctgataggggtaactctaaaattcatctattgtaatgatgacatggcatttcatttctaaa

SEQ ID NO: 32052 - DNA, 399 bp, Oryza sativa
  unsure (1)..(399): unsure at all n locations
agttccagttgagcgcctcccaggtgaggcagatctgcgccacgtacacccgctccagctccgggtacgggtccctcagcccgatcgccggccgcggcttcggcgtcagcttctgcacgatccgctccgacaccgatcgcggctgatactttatcgacctgtacgactctgcaaattaaccgttccagcaaacgcaactgatcagtaaactttctgtaaatattttttgttgtgtgagccccattgtgtgtagagaaagagttgcagggagctggaattgcgtcgtttgattgaggtttatgtttctcgagaaaggtttaattaatctagcttgggtaatgagtggtaatgatgacttgattntggaagaataattagtatgtacctggtctcgtgagc

SEQ ID NO: 32053 - DNA, 354 bp, Oryza sativa
  unsure (1)..(354): unsure at all n locations
atcacaacaganacggcatggacggcatgtgatctagagagggaggaagcgaacaaaacgcggggtgccatgccaaaggcgtcgacgtcgtggcgtaccagcgcggccggtcctagaataggatagccacgccatccgtatcggtatcgcccgtatatcgcctccccgtcgggttatcccgcgccgcgtcatgtctacgtacacgactacacgacgccgtttcgcgggcggggataggacgcgcggacgcgcgcggggcgtgaccacgcgccgggattgccctggtgagccgcggtctcatcgggaaccttatcaccacccgcgcgcgcggggccacaccacacaggaccacac

SEQ ID NO: 32054 - DNA, 432 bp, Oryza sativa
  unsure (1)..(432): unsure at all n locations
ctgctgcatgcaagcttaccatgtganaacaccctgccggtttcttttagttaacggcatgtcatgcacggaacggagtgaaacggagtggttggaactcacgggaagaaatccattaaacacgggaacatgaaacaccttaccgagagtttntagtgacccgggaagggtgaaattcttcccgtaagatttagcacacggtgacatttgagatgaatacacnggaagattatgtagctcattgtacagggtttcacacattcacgattgtactgcactgatacagtaggcaggcaactaacatgtatgcatatacatatcatccaaacatgacagacaagcatcacatatggaaccacacatatgtcaggtgaacattagctggatattatcccagtatgaatttttaatacaatgatacagaacacaata

SEQ ID NO: 32055 - DNA, 431 bp, Oryza sativa
  unsure (1)..(431): unsure at all n locations
ggccgcagcgccggtgacgacgccaccaggacatctatgattgtggcggtcggtgcgtgatgggcgatcggtgacgatggggacagcggcgctgcggacggtgcgcctggccggccggcggcgttggatgcgcggcgggcggatgctttctgtggtgctggggatgacgccaccaggatgtccgttattgggtacagagaacattaacactgctaaacggattctaactgacggctcgtgacggcaatggcatagagtacaagttgaagaanacatgacggtatattatggaatcagtggtggattgataagtacaatatactcggtgggttagtggattctatttatattatatttttggaagagagaaggaataacgggtacagattatagctactgacacgacgtcatagccatgtgttacacactat

SEQ ID NO: 32056 - DNA, 473 bp, Oryza sativa
  unsure (1)..(473): unsure at all n locations
aattccataggacatttcatgtatctttatgcgttatgtagatgtactgaaatgttgttgtggataatgcangtttatcgcagtgctctacgtctggttcgatcaatggtatgttagcatgctctatgctttcagtatttctttgtttgaagtttgtctttaagcaattcatctcctgtattggacttcgttttttaaatgtaattggttnttttattgagtacaaatgatgattcacaaggaaacaaaatcgtatattgaaatgcaccggaacaattaatatgatcgagaaaattanggtaaagaatgtgaacttgtgtgtcctcagtgtttaagtgatatgtatatatgtcctaagtttatcactagctcggttntnttatcattttattnntatctcgttngattttcagcactattcaatatcatacccangtatctgatgtctaaatattctgggtggaactattgta

SEQ ID NO: 32057 - DNA, 418 bp, Oryza sativa
  unsure (1)..(418): unsure at all n locations
ctcagcttcgggtgtcacatctccgttacgtgacaacgtttgtctctttgattntgttcttcttcgaccgatcgatctcctggtcaaattctttcgttttcgttgacaacaagactttgcttggacgaccgacgactaataattaagccagttatacgtacgatctgagccgttggagtatatctgttcacaaagttgcatccagctgatcagtcaagtcgtagcaaatatatatacacgtatatatgtacgtgcgtacgtacatcgagcgaagtgcttctacgttctagtgccaattgcgcgtgatgcatgcgcacacgtacactaataatcgctagctattgttcaaaaaaaaaaaaaaatcgctagctacgcactttgagagagtggactttgacctacttaccccatacacaca

SEQ ID NO: 32058 - DNA, 461 bp, Oryza sativa
  unsure (1)..(461): unsure at all n locations
tattgattaattagccttcttccactagctaacgagacgagcttggtacgtaagttgggatttggattgacgattgagagattttggattttgggtatgcaagagtatgtagttgattgtagaggactggaaggggaatatagtagcaaattatcttatgtgctactagtaagttttgttattagtggtggtgatggatgagaagctcctggatgagatccagagcatggatgatgaagtcgaaagcatggacgtgggcagctatgacggtctcgtcngagtagccttgtcttgtgttagatctctctgctcacggtctccatggccacacttgaggtagcgatgattgtatgtccttgcgtgctagcgaccatggtgatgctcagtatcatagctcacggaggtcggggaagcaggtgtcgcacatgatatttcatggtggtggacaagggtgttgactt

SEQ ID NO: 32059 - DNA, 410 bp, Oryza sativa
agcttactgattagcgtggttaccatctgccaataccgtaagcaattgttagcttgccatacagttatttaggatgttataaaaattggaagcagtgaacagacagacaaaaataaatgcaagaaaaggcagcactacatacacaaaagctgcatagtacagcaaacgggaaaaaggatagtatacaacagcacggcaaaaaatagtgctatagttggtacttaggtgccaaggtcctgcaattagaacagagaacatattagggtttggcctaatatatctttcggtctgtagtatgatgcacataaagccaaattgtttaataataccatcaatctagctgcatccaacacttcttgataaaccatattcctagtctttgaactacagacctcatcctcatcctctat

SEQ ID NO: 32060 - DNA, 354 bp, Oryza sativa
actacttattagtattggtattactatccacttccacaatgcttattaccaggtcatgggaatactttattgcctaatacctacattttcataagattgtggatgccagaacagtatgaagagaaacaagaaatggtagaataatttaaggcttttgttatttgtgtatcttcggtagatttctgcctcatcacccaaataaaggtcctactgatgtagcttcgttttgaccctagtcatgcatagggccaaacagaaattacattggaggctcgaggcatacctttagctttccagaggcatacaggtcaaaaagtttgtcaagatgatcttgccacaagtgagcatactgga

SEQ ID NO: 32061 - DNA, 454 bp, Oryza sativa
  unsure (1)..(454): unsure at all n locations
tgcaagctttaccaagctcttacaagttcttaccttagtcttctgaatggtgatgtacaccgcctcaaccaagcaccccaatggaggttggatgtatcgatgccttggcaaacacttgctgtatgactgcaattaaatctgtggagctctgggtaggcttaaatatgtagtaaaggaatagcaaatacttcaatcagagaatgcaaagttgaataattggtcaaagtcaagtaccatgctggtcctagggtataacgtactagaaacgcgagcctagacacaaacgataccacaggatagcactagaaacaacttaggcacactctgatatgtgaaagcaaactcaaagatagaacctgattttctcttttctttctttnttctatctttntttactntctttttcttntcttttcggtgcggctttttgtttctttctttttagcacctttct

SEQ ID NO: 32062 - DNA, 375 bp, Oryza sativa
  unsure (1)..(375): unsure at all n locations
tctcttactgaagaggtgaaggatngagcaagaatgagtactttctctgtactcaggcagccacaccggctgatgcatgactaatgcaatggagtacaagggggtaataatatgggctatgttttgcaccaaacagcatttataagtcacttagttgcccaaagccattttgtaaagacgattctagagctacacagtattattaaacaaggccgtgaaccctcaggagcctgtcttaacccaaggcatacgatgatttggaccgaactggccatccgacctgtgttccaactcgtgccaagacaacccaggccaaccattccaaattgtatttggtgagcacattctgagaattaacacactgacttgggtaca

SEQ ID NO: 32063 - DNA, 488 bp, Oryza sativa
  unsure (1)..(488): unsure at all n locations
agttcagcttcaagtggagcaagaatttcttctatatgtggcatatcatcatctttttgggctgcatgcactcttcgcagagttgcttctgctgcaaactgagcagccatagccgcctttttctcatcatttggtttcttgagttctagattctgcaaaatgttctccatcaaggagcaatcaaaaagaggggggcagaaacaactttaaaaagtataaagatagatactttgctttcaaggagagactctgttagcttgagtttctcatccagcttctcatattccgctgtgagctgttgacacgagattaacaaaaatagcaataatatcaatagctgtgaagaaacaagcatgaatgcacaatatatcatgcagataccccatatgcctagtatacccaataatgaanactctgaagaaacaaagtctactaatngaccaaatgcaggactaacacaacanagaagcactagcctgaaagagtac

SEQ ID NO: 32064 - DNA, 417 bp, Oryza sativa
  unsure (1)..(417): unsure at all n locations
gctggtcagtgcccttggaagatcatctcttttgtggacaagatgtattctcatcttcccttggatgggctatgtcagcagcatctactcgggcattccgtttgcatggtgaaatcccaatgctgttgcctcttattgatatgtgtaaccatagttttaacccacatgctangattgtccaggaaggaaatgtggatagccctgatatgtcagttaaggcaagtatcctgaattgtttgtgtacttctgagcccaagaaattttgtatttccttaagacaatttttggtaattgaatgccctctgttagtagctttgtttatgcataacagcataagtgacatgtgaatgcatttatttaactgaattcatggataaatgtagccttttatgttatcttaccatagatgcaagtaac

SEQ ID NO: 32065 - DNA, 521 bp, Oryza sativa
  unsure (1)..(521): unsure at all n locations
ctctgagtcacctgcggcatgcaagcttacatccnctcccgtaatctctacaaccgtttttatggtcaaaaatctggcctcctattgagccacgtggcacaataaaaatttagtaagacatctccagaaaactaccacgtgtccatgaagaggagctaagagtctgcttcgttggaagttgtctcctgtacacatacatgatacacctatcagaaatctctagaaaactcgaagactctccgacggagagattacctggtcgttggagaagatgaagaggtaacactcccgtgcacatcatggtaaataagtgtgtacagttcatggcacanattctatagatttgcaacttttcatatgggtaccacgaaaaatgacgagtattgtggctcctttaaacaacatttagaacacctttaaataatgtgattggctacactaaattntaacttaaaaattgattganattttattcgaatgaccttctttttgttcaaaaaattgactagatcttataaact

SEQ ID NO: 32066 - DNA, 348 bp, Oryza sativa
ccaccgggttcgccagccactccggatggatgacctcgcggatgaatccggcctccagaagtcgcgccacctcctcgcggatgaaggcttgacgttccggggcctggcgccgcactttctgccggaccggccttgcgcccggccgtacggcgagacggtgctcaatcacctccctggggaccccgggcatatccgccggtctccatgcgaagacgtcagcgtttgcccgcaggaaagagacgagcgcgtcttcctatttgccgtccagaagaccaccgatccgtgtggtcttggacgggccgtcgcccagggcaacctccttgaccgggacctcatcgcacgtgacta

SEQ ID NO: 32067 - DNA, 286 bp, Oryza sativa
tgaggcatgcgagcgcatacataccaccttttgtgaccacaagccttatatttatgaatgtgctctaaatatcgtaaaaatcatttcacggccactaagtgacactccttatgagcggcttgaaaccgtgcacacatgtaaacactaaacatgatatcgggcctagatgcggtaagggaaagcaagctaccaattatggaacgataaagctttaaatctacccggttacctccctcataaagtcgagatagcccgttggtgccataggtgtcttgatgggcttcgc

SEQ ID NO: 32068 - DNA, 272 bp, Oryza sativa
tgcacacccatatcatacatcgtgatgcacgacggcatataccatacctgcacgctgaggcgtagccagagcctcactcgcacgcaaggcagagaagatccgggagggatgagagatcaccgggggattaccgatgagcgtgacgaacgcgacggcggctgcgacgacctagcacctgacggggtcgcggtcctctgcgaggtactcgttcatgaagctaaggcgctccctcacggccacagcggggccccttgagccgcgtgcgagctctc

SEQ ID NO: 32069 - DNA, 434 bp, Oryza sativa
  unsure (1)..(434): unsure at all n locations
agcttggtcaaacttgaagaagtntgacttattatatacccacaacatgttataatacggaacgggatggagtagtaacatagatagtggatagcaaagcttgtttccagtataggctgtaacaattcaaccagggatcactgagatgctagcacgtctgactagttaggtaacaggttgagttgttcactacaaatacaatataccccaactaaaagtacactgaatctgataaatacagagtacaacagttggacagaaataagtcaattcaaataacagaacataacctggataaaaaattattctaccttggttnttgacacggcatcaagtgccatcagatcatatgctaaatacctnctcttcaatcctgaatctggactgtgtctataatcatttctccatcaatcaaagtcatctcatgtagtccc

SEQ ID NO: 32070 - DNA, 490 bp, Oryza sativa
  unsure (1)..(490): unsure at all n locations
aaaactcagcttataggtgctggtntaaatgaaccggcacctattagctgttccctgtangatttgtgaggatttttctagtagtgtgcccatccaagatggcttccattccaattaagccgtcgcttcactgaccgcaaacttcggggatgttgccatgatgatcgctgttgcaccgttcacaagccatgatgacacatcttctgatcctgttgccggcgccgtcgttgtgcagccttgctaagcgaggatgctctcaccaagactccaccgggcaatgcatgcgatgccttcacgctcgtcgcggtctcttcgccagcgctgcccccttcctcacgtgttcatcatttgtcgtcgctgccacgccattgtgtgtcacctgatatgctagtggtttacgtgtgcatgcatgctactgtacagtactacagtgaanagaaaccaaccaaatggcttattaattactccctctggcaattttgagtttttc

SEQ ID NO: 32071 - DNA, 456 bp, Oryza sativa
  unsure (1)..(456): unsure at all n locations
agcttaacaactcaggtgtggattacatacgtttatctatatcatatngcccgagtaaaagactcaagcatgacatatcagataacatgaggaatacaacttgccaacagagcagaacaggctgcttctagaaccaatcaaaagagatggtatggtactggagttcatcgacatgaagcagcattgtagggtttggacacttttgtttcagatgaaaacattaaacatacatttaagaaggtggcatcaaagggcacaccagtcgtatcttttttacacttctatgctgaaagctgtgagggtacaacagcagtcaaatctcctttntctcttttctttttcgcaggcaattcttttgcttntgcacttgcagttttggtcatgatcaggttccactccaccatgtaatggggcacaccgcatagctcaaggtctatacctaactaatgaacagta

SEQ ID NO: 32072 - DNA, 355 bp, Oryza sativa
  unsure (1)..(355): unsure at all n locations
tggaagaattggaagtcgaagctcttcaccgagtatgtcaacccgcccggcaatcatacgccgttcgatgaataccatcaaataaccgaagcggtgtgggaggaattctgctctctcaagaccacccaagagtttatggaatccagcgaggcacatcgcgtactgcaacagcggaatgagcacccgcatcggctgggcaccgcagggtacatcggcaaggaggcaatatgggcccaagaagatgcagccgctgcagcagcgaatgtccctgccccgttttcagacatccctgaacaaagagctcgcaactgggcgcgggcaangggtaagggtcaacccgacggctctgtcacat

SEQ ID NO: 32073 - DNA, 415 bp, Oryza sativa
  unsure (1)..(415): unsure at all n locations
gcttctaatttgataagttacgaagcttgttttttatcatttgcactaatctatattagcgcacggagaagtacgttcaaagcttgtgaaaatatcattttgtgcactaggattttccagcggcatcatctagtagtagtgtagtgctcattaatcaggacacacacaacatatttcatgtagtatatctgcccaaatacctaacttatttactcttaatttattggtccttttctttcatctcttgtatcttggagagtgtgcgtcttatatgagggtagctcatctcttccatattattatgaaaattntctttcgtctcttgtatctggtagagtgtgcgtcttatacaagggtagctcatctnctncatattattatgaaaatctacatgacactcttntaaaataacttc

SEQ ID NO: 32074 - DNA, 514 bp, Oryza sativa
  unsure (1)..(514): unsure at all n locations
cctgcattacggacctataaaactaagcttgatcgacaacaaccttgcaggtctcatccctcctcatcttgaactacaagagttgaaaaagttaaactatagctaatgaacaaacagttttgcatagtaagtggcaaagctccactgctccctagccctacaagcagcatcatcttgtgttgaaactagagcaattagaaaagtaatagccttacattatagacagagttttcaatgcgatccccacgaaggacttcccctaagttctcagcactattcttaattgcctcaggtttgcagtagtctagaaaatagtagtcatatggaagttgtgtcttcgtagacgaaagcttgttgactctaacttgaagctcatcatcctgcanattgaatggttagctgacctttcaaaataaattagcaacaaaatagctgctgtcagtgcagaataatgatgggaatcgcacaaacatatagcatgggacaatcatctcaanttgatcacatctcatgc

SEQ ID NO: 32075 - DNA, 336 bp, Oryza sativa
  unsure (1)..(336): unsure at all n locations
agcttagaanaaacgaaatgtggcgttgtttgttggttcgtgcatggagaactgtatcagatccaccgcacatgatagaagaccccgtcgctgacaccgtggccgctcgtcgcctccgccgccgatgacgcccatctccccgtcgcttgcgccttctccaacaacacaacaacataccccctcgccttcatcgtcgatccgagccgcatccgctccgctcacaacgctccgtccctgcatccttgtggccgtagcctggtggacgcagagaaggaggagaggtgggagaagcatgaacgaaggggagcggcatggaatatggagggaggtgcggga

SEQ ID NO: 32076 - DNA, 426 bp, Oryza sativa
tattaggaactatgaaactcagcttgcggatgtggttacaatttcctccacgccgactccatgtttcacctgtaagcagtgtaaaataagcatgtgtaaatatggagctatgtcccttgcaattatcatcagcttctgttaattttcccccgctaaaaaaggaacaaatgtgtatggtttaatactgaacctgtgcaaagacaaaaggccctcctttccgcatgcgaagcgcatctcgttccattacagccaggtcagctccaactgctggtgcaaggtctgtcttgtttattatctgtgttcagaaagaatgaaattgatcaaatggtaaatgcaaaagggtacaagcatatcagaaatatcaacgtctttgatacaggtatgcatcgtaacagaatggagaaagtaataacacaccaaaagatc

SEQ ID NO: 32077 - DNA, 379 bp, Oryza sativa
  unsure (1)..(379): unsure at all n locations
cgaggaggaagaagaagacgacggcgaccaaagttagaataattaacaaaacaaatctacgtcgtcctactcttctagcagccggtggatccgtcgtccatccagtaaaagcacgttgcattcggggatgtttaggtcccatcccaaaattctacacctgatcacatcgaacgtttaagcatctatataaagtgttaaatataggcttaaaaaataactaagtgcacagattgcaanctaattacgagacacatttttttaagcctaattgctccatgatttgataatatggtgctacggtaaatattcgctaatgacggattaattaggcgtaataaattcgtctcgcanatactaacggattctataattaggtact

SEQ ID NO: 32078 - DNA, 405 bp, Oryza sativa
taagatgctctatagaggttggttctggagcagcaacattatatgatggaaagctgtatttgacatcacgaggatgagcataccatcgtggacttatgtcaatagtcagttcatttgcaccagatcggactgcaaagtaaatccaacggtcaatataatgtgcgtacttgtgattgttgaggttgcgcttcaaggtgaatgagttaatccctgttccagcgtggtgccttatgatggtgttaacacacctgacaaatttagccctcctcccttgtttgtgcacccgtttatcaaacccacgccttcagtgaacttaattagataagctcaaatgaccattgcacactgctccccaattatacaacacggttagacacatcatctagaaatgtatttttttttttt

SEQ ID NO: 32079 - DNA, 402 bp, Oryza sativa
  unsure (1)..(402): unsure at all n locations
agcttgngatggatgctagctatgatgtattatggtttggatacttgattccagcattccatgaaatgcaggtagtagaagaaagaaatgcagttgtagtatttgcacaagcttcttccggtcctattgttcagcttatgcttatacttatacaccaaaatttgaattttaaaacctaattttagagttgattctgtaacttttattgtagtttattttacagcattaacatttgaaccactaaggacatgtatataaaagttntattcatagattattttttggttgcaaataaggcgtgtggataagcgtaatgatgggatttgttgagtgatgaactgaagaagataataacagcagctgcagatgcagagataccactggntngagtaaagcatcctt

SEQ ID NO: 32080 - DNA, 333 bp, Oryza sativa
  unsure (1)..(333): unsure at all n locations
gcaggatacacatcatcatacatgatgaaaccaagaattcgtcggtcaaagttctaacatcgagaaagagaagcagtatcaatttagtacttttataatntatatttacgcctgcgggcaacggacgctgtctgatgcgagacaacatcaggcaaattacatcgatcgtcgacaagttaactaactccatccaccactgctggatcgatttcatcatacatatatgtgcaaaacagaatcaaatcgcttctcattctagcagagatcagagtctgaactcgggaaattaaacaagcagtcaattgtctaatcaacgtttgctcttccttctct

SEQ ID NO: 32081 - DNA, 252 bp, Oryza sativa
gctaacaaacttcaaacatattctattgagcttgaagagcacgatcacactattgagattctaaatgctgaaattgataaaataaaatcttcgattcctgatgactgatattgccaatcttgtgaagctatatcttctgaaattaatgctttgcgagatgtcaattatgttaattgcaaaatattggaatgtgagattgaaaaatctaacaagttggaaacttcttttgctcttggatttgctttacatgct

SEQ ID NO: 32082 - DNA, 356 bp, Oryza sativa
  unsure (1)..(356): unsure at all n locations
tcttggggttcttgtctctgcccgaggcattgatgccaaccttctagaagatacgagctatagagcggatgcgcccncccagcaaacttatggatgtgcagtgcgtcactggttgcatggccgccctaagtcgttntatatcgaggctgggagagaaggcgctacccttatttaagctcctcaagcgctcggggccgtttacttggacggaggaagctgaaaaagccctcgcccagttgaaggcgtatctcagctctcctccggttctagtcgccccggagccaaatgagtccctgctactttacttagcagcgaccccccaagtagttagtggcagcgtggtcgtggagcgcgat

SEQ ID NO: 32083 - DNA, 436 bp, Oryza sativa
  unsure (1)..(436): unsure at all n locations
tctcttccgccattgatttcactctaatgcgctgtattgattcgagggatggctagggagaggcaaaggattaaggcggtggatcacgggagagattttgatgcacttttcgaaggtggatttgagcggaatggtgaaccctagttcgccggcgctgctttgcactgttgcaaggagtggggaaaatggcgagagttccggcggtgaagacgaagcgtcgcttggatctcgggttttcttgttaagggtatcggaggtgcaaatgggcctaggcctgaacagtacctcagcccagtatttttaacagcgtggcccattgtgttccttagggacttanngcatttttgctttggcaatttatgcgcacaatagtattgcccaatgctgataaaaatccttntatgcggtcatataattctttgaattaatgctatgc

SEQ ID NO: 32084 - DNA, 302 bp, Oryza sativa
ctgggcggcggcaccggaggcggagccgtggtgggtggtgtcttccatggcctcctgggcgcggtcgaggtatggcttgaagccgacgcggaaggagaggtatccgaatgcggcggtgcctagcaccaacaagctcgaccgcatcgcgttctgccgcgcccggctcctgccgccgagcgcgcctctcatcgcgattctttcctccctcccttctctctcgtgtgcgcttcgttggagtggcggattcgagactcactggaagtgattccgctttgtgaatcgtagctgactagctgttgctg

SEQ ID NO: 32085 - DNA, 377 bp, Oryza sativa
taactggatgtgctgcttgctatcaggttgcatgtgatgaatcattattgttgccactaccccttaaagcaagtggattaagaaaagcatatcggccaaatgattgctcgtctcaggtctgtgccatgtgttattctaatgtaatatgtgaagcttcaatcacggaagctatatatatttgagtagcttgttgtatgatttacaaaaaagataatgagcctaataaggtgaatgtagcacacacagtttataccaaactacaacaattgtttggaaggagcaagacattggtcttgaatgcctgaaatctattttgatgctaaatactatacaatcacacaactatataacaccgtttcattgtccgcaacaagtac

SEQ ID NO: 32086 - DNA, 454 bp, Oryza sativa
  unsure (1)..(454): unsure at all n locations
agcttcagctgcctccactcctgttcaaggtctttatgcttatgtagnggctcctatttagttgatcaaagaaatatgcagtcataaaaaatgataatagagattaagtcatgcgcaaggtttacaaagggttggtagaccaggcagtcaggcacatggttcatgcggttagtttgggtatctgtcttggttcttttggttatccaacaaggcagtcttatttagaaactgatcataaaagagatacacaaaattcttgcagttggaatcatggaaatagaatatataatcttaataatgcaacttaacaaatagtaatacataccggtagccatatacagcttatgaggaccaagagagcatatagtgatatacanagacagggtagaaggtatggaaatctgcacaattttgaatcacacatttacaattgcataatatttctcattaaatc

SEQ ID NO: 32087 - DNA, 511 bp, Oryza sativa
  unsure (1)..(511): unsure at all n locations
gggtccctgtattagtttaaatatgttagatccatgcccaacacatttatgatacatcagtcaaaggcaacatgttaagaacataagatatacccccatctattaaatttcagttacaaacgttctataactcatcatggaattcatacagatcagatcatttcagtggctaactgaactgcaagtaaatatggtggtaatatcatttacaagacaggaaaagtaccagaccatgtttctttntctattatactaagacaaaaggacatgcaattagataactaggagtttagaaacatcaagaaagaaggagactacagctacaacgttaaatgtggaagtagattntaattgtatggtgtatntattaatggactcatctccagacacaggtcggaacaaagcttttggctgaactcaagtatntaagctcagntganatacttgtaagtgctacactaggtcactctcatcaaagcatacatgcatcattatcatcccgtntcacttg

SEQ ID NO: 32088 - DNA, 441 bp, Oryza sativa
  unsure (1)..(441): unsure at all n locations
atgttacatcgggatcatatatatatgttcaactcttacagnagctaatcaactggacgtataanaagactagctggtaccatgcaagtatgacatgcatggttgaaaccacattctttacttttacttaactgatataataatatagntaagtcttttgcatgtccctgaaaaaaaaaggtaaaaagatacagacgaagcagatgcgaagaatcttagtagaactatatgtatctacatatgtgtgttttcacactagctagctaacagattatgtcttgtgcaccgcggtatattgagagaagaagagcctgctgcctgctgcatccataaaataccctaaatttctgcttttgctttntataattttttatttggacttgcatatattggttctaagtgtgatcacagagctagatataatttccacttaagacgata

SEQ ID NO: 32089 - DNA, 453 bp, Oryza sativa
  unsure (1)..(453): unsure at all n locations
angctgcagcttcgcggcgggggtcttcttaatagaatgttctattggcgataagcttgtgcctgtttggagagatcatcataaattattaaagtatgccgttcgcggtacataaaatactcagccagggctgctcccgtataaggagcgaggtattgtaatgtagcaggggaatccgccatttcagctactacaatagtgtattccatggccccctcttcatggaaagtagttactacttgagctacggaggatgctctttgaccgatagctacataaacacatattacatcttgccctttttgattgagaattgtatctgtagctactggctgtnntgccggttgtctgtccccaataattaactctcgctgaccgcgcccaatatgaatcatcgaatcgatagcgataagccccgtttgaaggggtcatatacagaacgcctggaaatat

SEQ ID NO: 32090 - DNA, 376 bp, Oryza sativa
  unsure (1)..(376): unsure at all n locations
tcgataaaaacggatatacccaatacgtcgaaactcatagcccaatggtagagaaagaccgtttccacatcaaaaacaacaaaaactatcgcaaacatgtaatagcgtattctgaattgtaaccaagccccncccatgggttctatacccgattcataactagaaagcttctctggtccttcacgaaccggagctaaaagtgctgaaatccaaaatgctaaaataggaataaggcttgctattattataaatgcccaaaaaatatcatattcgtgaagcagaaacataaatgtactcccattaatgtggaatatgcggaactgaattagtcaattcaagtcagcattgtcaatttatacagaatttctctcttttc

SEQ ID NO: 32091 - DNA, 503 bp, Oryza sativa
  unsure (1)..(503): unsure at all n locations
agcttccacagcccaacatattatcatcttctgttatcattagtagcacgagcaagctcatggtaggagagtagttgatgtctggccatgtcaaccataccaacagacatcttttgatgcttaactntatatttaagaattacatataagcagcaagctacagctccaactgtgataattataggagggactaagtattttatgatccgatggttttttttgggagaggttgtttggcatggtgaaaatcctaaacggacagcaccacatagccctgagttcccaaccaaggattccagcgtgatgttngagaagacacctgtttctggtatttgaccatgtangttgttgaaagatangttcaagctggaaaggacagtataattggccacgtattccgggatggtaccggaaatattgttgtgggatagatccanagtttctaagctggtaagcacacgacaagaatctggaattgaattttggataaactgactgatacg

SEQ ID NO: 32092 - DNA, 506 bp, Oryza sativa
actaagctagagacatttcacacaaatggtggtcgacttctcaaaatcataggtattaagatattcacaaaggaggaggtaggcaaaatcacaaacaattatagtatcattcttggaaagggtggcttcggtgaggtgtacaagggaactactaatgacaaccagcaagttgcggtgaagcgctccattgcagttgatgatgaggcacgcaaaaaggattttgctaatgaggttacaattcaatctcaaatcaatcataagaacgtggttagacttgtgggttgttgtttggagacaaatgtcccaatgctggtctccgcgtacataccaaaaggaagcctgcacgatgtgcttcatggtaatggcaatcacgttgcacaatataatctcacattacaagtacgtctagaaattgctattgaatctgcagaagctctagcttacatgcattcatctgctagtcagaagatacttcatggagatgtcaagtccagcaacatttctct

SEQ ID NO: 32093 - DNA, 427 bp, Oryza sativa
  unsure (1)..(427): unsure at all n locations
agcgacaagcttcgtccaggcgacgagctcgtgcactgtangttcctcttcggccccgacgatgtcgccgtgctgcgcgaccagctccccacgcgcctcgggccccggtgctcgcgcttccttctcctcgtgcccccaggcccagatcgccgctttccgccgcctacagcggccaacgccgcccctctgcctgcttcgggcgcgcggccgacgccgctgccgcgctcgcccgccgcttgccgcgtcggcgtcggcaacctgctggctccgggtccgggaacttgccgtcgccaccacggaggagaaccctgtcacgccgcttcgcctgtggctgtcgcgctggctgaagagagaagagagaagagaaggagaagaaaagagaatgaaganacanagatgtgtagctgacatgtgggccccatgtaac

SEQ ID NO: 32094 - DNA, 465 bp, Oryza sativa
  unsure (1)..(465): unsure at all n locations
tgtcttggtgagatacacataatgaaataagtttgctcaagataagaatgagttgaagcaggagcatcaagtggttggtatcaatagttcgaagtgctgttatttatagacactgagtcactgtatcttgcttaagcaagaataaatttaagtcgtcttcaactggaccttggagccaattaagggtgtctgccttactgtcggtctccataccccatacccaactccattcattacaatttagattagtgtaatttgatttcaatacaattattcagttgaaggtggttttatagaaagcatggttgtcatcatccataatttcaaacagactgaaagaacacaattctttgcaacttctgtttcattcagatcacaattcaggtaatagtgctgcatttcatttacttctatctttgattggcanggtagcctggtctactggactacanaatggttaattac

SEQ ID NO: 32095 - DNA, 477 bp, Oryza sativa
  unsure (1)..(477): unsure at all n locations
agcttgaatcagtgcaagttcaacaagatggttactttggagctctntaagtgagtcctcgttcaggcgtgaccacctaagccgtatcctcacaagattcttgagggagtgcagccaagaaggtattcccggcaatggccccctcagatagaggcgcctgaggcactgaggagcaggattcagggatccgagatcaagaatttcatcatcaagcgatgacgctgaaagggaaagaagttccgtcatcttggcaaccgatgagcagaggtgcatgcaatccctttcacgcagcttgacaatgcccaatcttctgagctgtgtcaggctacctagctcctcgatggtcccatttccttggtttgcttaacataagtcagcttctgcagctnctttaaattccctattcctcggngaagtgtgactccgagcgtatagtaatatgggcggatgccgaccgagtaatatccgtaagcaagt

SEQ ID NO: 32096 - DNA, 446 bp, Oryza sativa
  unsure (1)..(446): unsure at all n locations
tgctactntngaagaanacaagttgataatggagaaattttgtgatacatcattcattctacacaactttgagaactgactgagatgtaagcctggaaaatagtcatcccatgtgaataacacaaatgaacatcgaagttatatgtagcgccggaaatatatagaagatagctcatgcaactgtacgtgacatgggttgttcaatccataacactatgcattgttgatcgattggtgattattgttccctatatatgctctgggcattgacacgaaccgcataacattgcanggccatatatcttgagatattcataattgcgtttaaaccagatttttttacaagtgcatacgaatgtgtctttcagatctatatttgactctacacgcattgtcatgacttatccatcatatcgctttaatgtacttagcattttcacctacat

SEQ ID NO: 32097 - DNA, 366 bp, Oryza sativa
  unsure (1)..(366): unsure at all n locations
acgtcaatgctttatattctcttgatatgaaagcagctcctgttcttttacatgaaagatttccacaaaaattcagaatcgtaaatgagttccccatcaacttgttactgaatttttcgcacgcacgcacagaaacggacggacataaactgtgttgccgcaagcggccgcttctgggaatagtcgagcagatggtgcgacctgcgaagggattcacaatcatacggaangagccgacgaggaggagcgcgcgagaggggaactgtgtctgacagtcaccgactgctgccgtgttgcgttcatctatcgggtttctatgaaccgtcggattatattacactgttcagaataacaagtatactggtt

SEQ ID NO: 32098 - DNA, 460 bp, Oryza sativa
  unsure (1)..(460): unsure at all n locations
actcagcttatgctacacatctctcttcttagctctcacttatgtatttgtgttgattacttgagatcccaccagcagacagatgttatatgtaaggcacaaagacttattacaatttacaaaccacaagcaagaaatcaaaaacttaagttctccaaaagtaactttgtcacaacaagacaacataagcagacaaataatgaatttcagctcgtactagatagcagagaggggagcattttcaggtacctcattaggcttcactgttattatgtggggagtaaaagatgtcccggaagatcctgaaaatcagcacataanagaacatatatatcagatctggcatataattattgatccacacaaagtggtcaagttcagttgatgttaatagagacccaaaaaaaaactacgaaatctgacaaatggcatatcattatcattctgaccgtgcacatgg

SEQ ID NO: 32099 - DNA, 499 bp, Oryza sativa
  unsure (1)..(499): unsure at all n locations
agcttctgattgctggagttgcgtggactgatgtgctggcagctatgtntctcggttttgggcacttgtcggcgaaatgacccattccttgacaattgaagcaacagatgtcttcccggactcggcattttcttttctcatttcgattcctctgtcctggcactggagttaggctgaaactgtaatcttggagaggattggtgttgccttgatgcttctctccgttggaactggcgggttggttagccatcttcttcgtcagcagaaaactgaattgacaatctnttggtacatgatcagttccttcacaaaagaaacangtgatcctgctcgttggacacctgtcgggtggatggtcttccctcgcatgaacgcatatagtggcacacgagctggcgacatgaccgatttctccacaacgagagcatgccttacgttccatttcatcttcatcatctgaggagacttgatctgaatcttcactatcagacactctacc

SEQ ID NO: 32100 - DNA, 365 bp, Oryza sativa
  unsure (1)..(365): unsure at all n locations
tccaaaagctgagtgctctcatcaaaaggtgacagggcattctcccactcgcgccacgttctctgtgcacgcatggacctcccaacagtgattagtgccaaaggcaaaccacggcattntgcacaaactcttttcgcgacattntctatcggcatatctgcacatattgtgtcttctgtagcactgtatttgaacagctcccatgcctcatcaggctgcaaacattccagattgattcttttatcggcttccatcacacaacaaatttcctcagagcgagtagcagagactactttctggatcttcgattcatttggaggtggaatgccaacctctaaagatcaacgtgctctcaaggtcatcca

SEQ ID NO: 32101 - DNA, 397 bp, Oryza sativa
  unsure (1)..(397): unsure at all n locations
gattttcaaaacctggtggttgtttgacataaacttcctcctgtataaaaccatttagaaaatcacttttcacatccatttgatacaatttaaaaccttttgaagcagcaaaagccaacaaaagtctaattgcctcaattctagcaacaggagcaaaagtttcatcaaaaagtttcatcaaaagtttcatccaagggtacttcgactggcaggatgccggagcagcaaaactcagatcatcagtactacattaacagcatgggcagcaaccacggccaacagggaggtggtggagcacagaacagcacctaatttagacttatagattcatgtgaaatcgttattaattagttnggctaatcccctgtctcggcttgcataatatgtgtnttttctt

SEQ ID NO: 32102 - DNA, 389 bp, Oryza sativa
  unsure (1)..(389): unsure at all n locations
tatctcttacgctccaggaatggatcagtcagaacatcaccaccggctcgcctcgaccgccgccgactggtgtttccgcctgcacggctggcctttatgccgccgttgttgggcctctacgtcttcaccgaccggcttgccttcgccgccgccgactggtgtttccgcctgcacggctggcctttatgccgccgttgttgggcgtctacgtcttcaccgaccggtttgccttcgccgccgncgactggtgtttccgcctgcacggctggcctttatgccaccgttgttgggcgtctacgtcttcaccgaccggccgcctcgtccgccgccgactggtgtttccgcctgcacggctggcctttatgccgccgntgttgggcgtctacgtc

SEQ ID NO: 32103 - DNA, 392 bp, Oryza sativa
  unsure (1)..(392): unsure at all n locations
ctattacggacctataaaactcagcttggtgaaacaaatgggtggaaaacccataatttacgtgttccaatgatagtacattcccctgggaggaacataagggcaactcaaatatgcccggaagttaatcttataattgaggaagttgacttcctagccaaaccgatagtcctaaactcgcaaagcttggacatcatcctatggataggatggttggctaagcacacaggacagatagattgtgccgaanagtccatcaccttgcaaggacctggaggaaagcatgtccgctttacctctaacacccctactgcaagtcggactatcctaacctgtttacaagtcaccttcttggagtcngtgcccatagtctgtgaatatcccaacgtatt

SEQ ID NO: 32104 - DNA, 466 bp, Oryza sativa
  unsure (1)..(466): unsure at all n locations
agcttaacatgcaaccatgccacatcatcacctcttatctattattacatattcaacctcatgcgagcatgaaagagcatctgcaatctatttaattctacaaattaacatgcaaagcatattcaatcaccacctctcacatcatttccccaatagttttacaaatctctttatcatttttatattatttaatatatacttatcaacatgttctacattanagtgcgaatatncattgtttcatggtaaatattgataagccctaagatttgattatttttttttctttttactcctagctgaattgtaacgaaaaaataatattgaaaattacttagtaattcccgaagcaaagcgcggggaatccctagttacaaaaatcctctggtgagagtcgagactacaaatgggcaacnnaaaaaaaaggtctgcaaggatcgaatcagaagaacacggaaagagatat

SEQ ID NO: 32105 - DNA, 415 bp, Oryza sativa
tactcagcttagaatctgttaaccgcgggtagaattagcatatatctatctatcatcatggctgcaatcctgtgggctcggatacatggcatatattctttgactgtggctgtcagaatctggcaccctggagaaacaagttgcgtgataatgtgatttgaaatggcagcatattggtatccctttcccggaggatcttagactatcacacccctaggggagccattgtaataccgatgttctgctcaagtgacttcagatagttcagtatctttcacagagttatctgcagtacaacattactactctgtttgggctttggagtttggagtgcatattaattttcacgtaattagcttgtagtgccatttgctttccagagaacatgaagtgtgagagattccgagattatctt

SEQ ID NO: 32106 - DNA, 495 bp, Oryza sativa
  unsure (1)..(495): unsure at all n locations
agcttgaccggtccatatggagtcgatgcctttctatntcatatagncttgctcggagaactttgagggctctggccttattctaaaaagagttgcatataacattaatataataagtagataaatgaacaattctacaaatggatatgattgatttccacttggtgcatcaaaagtgaagacaacaaataagtggtaagataatgctaagatcaataaaactattaaagaatcagaaaataaatatgagactaaaaatatataaatgaagggcataacataggaacagaaatacgaaaatgaggtatcaaaggccctgtttgattcagcttaagattattataatctggattattaggagtaagttgaaacanagagatagcttattacgatagaatattacaatctataagccagaatactacaatctggtaatccactctaaagggtgtntntttattattgggtggtaacaactaacanacatctaataat

SEQ ID NO: 32107 - DNA, 394 bp, Oryza sativa
  unsure (1)..(394): unsure at all n locations
agcttcccagacttgcaagtgcgacgaccacattctctatcnaacgcgatgcgctctattgcgttgaatactatggaggagcacaatggcggaacacgggaacagtacggtgagctcctacttcctcgaagtcgtcgctctgcccgattgtcaccttgccaacttcatctcggccatcgtttttccgttcatggctgcatcgattggctactctctcacgctaccgtcgggcccagtcttttggagcgcgtgtgtagctcagcgactaaatagtcatcggcttatgttctttctcttcatttatcccctccagctcactattcgagcctacatggaatcactatcaccagcgttcacctgaagcttgcttggtcatctctcccagacccatcta

SEQ ID NO: 32108 - DNA, 400 bp, Oryza sativa
accttgatactcaagcttggtaggctccatttcggctcatttggagatcgggccgatatctaagtgctcgtgagcctcaagttatttccacgaccctgtttatttgtgtgatgaatataacagaatagtcaccagaaaatctaatgccatttcggatcgaacattaaatatttgcgataagagagtctatcggatgatcgatgtgtcatttcggacccagttatatatagaacgatttcatcgtgcatccacatctcttggtctaggaaatcaggaaggagtgaaaacgaatggtctagttagcatgttcggtgaagagaaaaagctagtaggaaactactccaagcatcatatggtcgatctaatcatgcacaaaaacaggatcgaactaaccagcatt

SEQ ID NO: 32109 - DNA, 448 bp, Oryza sativa
  unsure (1)..(448): unsure at all n locations
agcttgtttatggacatgaagcagttatgccattttttactcaattagctcacgaagaatagatntacaggatgagttgacagccgatgagtattataatcttatggtagatgaaacagaagatctagttcagtccagattaagagctcttgtaaaggtgaccaaggataaggaacgaattgcccgccattataataaaaaagtggtgcccaagtctttttcagaaggggagttggtttggaaattgatcttgccaatagggactcatgacaataaattcggcaagtggtcaccgaattgagaagggactgttcagatctacaaagttgtatccaaaggggcttatatgttgcaaggactttgatagcgaagttatggacgagcgcttaattggcagtacttggagaaatattacccaagtgtatggattaaatcatgatcggatgat

SEQ ID NO: 32110 - DNA, 370 bp, Oryza sativa
  unsure (1)..(370): unsure at all n locations
tcacacccnctatagtatttgaagcaatcatcaatcatcctctgtcaatataaccccgctctgcgaagcaaccaattcatcttgtgggccgattgatgagttccacaaattccttcatgtacctctcccatagccactttagattgatcttcatctatgcacttcaacgagacaccatctatatttcggcgatatagatcttcatcaagcaacgtgtatntgaacgcttgccgccgaattttccgatcaaccttaagtgtgggatctttcaaatatcgaatcacaggaattctccaatcctcttctgtttcctgggcacaaatgtccgaattcacaattaattcagcctctaaattgattgaagcatgcc

SEQ ID NO: 32111 - DNA, 247 bp, Oryza sativa
gtatgatagccaattctacgaggattgatacgaatccttagggccaatcttgcaatctcaggatcaaaaccaggcatcaactgatcaagtgcttcaacaaaagtaacctgtccaagtgaaatatatgtaaatacaggtgaaatatcatcagatgacaacacgccttaatcatgaaacagcatataggggtaattagaatttaacatgcaattattggtcgcacctcacaaatatatcatatatgtat

SEQ ID NO: 32112 - DNA, 369 bp, Oryza sativa
  unsure (1)..(369): unsure at all n locations
agatatactaagctatcgggcgcatgagaacctttactttttctttgagacgatgctgngtgggttcctgacttacatctggtaaagggtggtgaaggtcgacgactaacaagacgtctaagaaattacatggatgagtccgtatctggtggccccattatgagatgtgtaacttgtctgcagtatggtcacaggactatacattgcacgaacaacaacgatggtacctcgtcgtcagctcagctaggaccacaaacatgggaatcatcacgtgcttcattggctatgaggacaagaangggcacgggtttcttccgcaacacaccggatggcaccaccctttgatcgctccacgacggtgtcatctag

SEQ ID NO: 32113 - DNA, 188 bp, Oryza sativa
  unsure (1)..(188): unsure at all n locations
agcttacctcttgtcacagactccgtcnatttcaattctttgcataaatgaanaaaagaaagctgtataactattgctccctccgtcttaggttggaatacattttgacattggtcaaaatcaaactactgtaggtttgactaattatatagagaaaaatagtaatatttacaacactagcataattc

SEQ ID NO: 32114 - DNA, 430 bp, Oryza sativa
  unsure (1)..(430): unsure at all n locations
ttaagtcacctgcggcatgcaagctntactgtntgacaccttataagatttattgtacttttctcctaaaaagnncgagtcacgtgcgggataaagagattttaaggtattgggcacttgatcacgcgcactttggcctaagcgaaaagtgcctaagtccctaaaagaacgtgacaggccacacctgagaatatgggctgcagacatattatgcctagaccaaaaaatatgccttcgacaccctttaaaggatgacgcatgtaatatgctctcgagtaataaatcttccgggtgatatacaccaggtgtagctcatatgaatagcttctgatctgagtgagtatctcttatgagatactcgcaaatatatataataattgaatcccgactggcgcatgtattcggttgatacccttacggggaataataa

SEQ ID NO: 32115 - DNA, 482 bp, Oryza sativa
  unsure (1)..(482): unsure at all n locations
agcttaaactttggtattggaaggcggtgtttgtttactgttggtcatgatcttaattacttttgactattagtacgtaccgtacgttatatctagagagagatatatgggccgggtcatgcaaacaaaataaaaggagtgttcgatccacgcgtgcatgtttgagaaaggattgatggatggaggccggccgggcagctatctgctgcatgggtgcacatactgataaatttagattagattacaatagtatttgattagattgcattcgcggggcggtggcggccgggagggaccacagatatatgtgcatggcctggtgtggacaatgcanagctgatgggcattctgtcgatatagctagtatanaactaactgatatcgattacgttttgtggtccttaatttgctgtatatatgcatgcatgtccaaatccatctactcgatcgtcgatcagatcagattttcccaccaaacctca

SEQ ID NO: 32116 - DNA, 446 bp, Oryza sativa
  unsure (1)..(446): unsure at all n locations
tncctctcacagtgtctgatcggatccaatccggaataccgtatgatcgattttggattcccttgttgccactctaccctagctactgtactttgctagctgtatagtacatattccaagcccttaaacatgcatgcacggttgatatatactttatgttaatccttctatgcaaaatgatcgacgacgaaaatactgtccaactgctaagtaaacacaatcactagctccatcttataatatagcaatttagaatggaatgagacctattttataacagaatctagacatgaggcatatatccagatntattgttctagaataaaatctatcgtagattgctacattctaagatagaggtagtagcttacaactagaaagcacaattcataaggattnttgtaatgactggaatattacatctacatgaatgctngtgtcatgac

SEQ ID NO: 32117 - DNA, 329 bp, Oryza sativa
  unsure (1)..(329): unsure at all n locations
gatctctaagtcacctgcggcatgcaagcttatgtcgagctcgagcctgngcaatcgttctctctcgagctcngctcattcacagntatactattaggtatatctaaaaacttttcactcaaaaaacttgtgataatttgtagatactcctgcaacctttgtatgattgatctatgcttccaattaaattcatggaaattaatagcaggaagcatgctgcattggtataggtccttctttgaaaaatccagataattctaaacattttgtcttccaagcctatgatgcattcagcgaccgtaccacacgtgagtacctcgtcctccatt

SEQ ID NO: 32118 - DNA, 411 bp, Oryza sativa
actcagcttcggtggcattctcgttagccgtgtcaccataatcttatcttctacaactgcaccaagcctccgacggcggcggtgcggcgtctcctcggtctcgtcgagacgaaatgaagcaacaacacgttcgctcgcctcgaggagagttacaacgagtctgtacacttactagagggctgcgacgccgtgatcgtgccggtgaggggcagagatggcgaggcaaacgcgagcaactacgagcagctcatcagtgatatggtttcctcttgacatggcaagccgcgccgccgcagaagtctggtaagttcgttcgtgagcttatccatttgatcaagtatcttcattcatgagctcattcatttgagcaagtatccaacagtgcacgcgcttagtctacatgaaccctcc

SEQ ID NO: 32119 - DNA, 490 bp, Oryza sativa
  unsure (1)..(490): unsure at all n locations
agcttatggatcatctntttaatctgtgttatgaaaatgcattaatattacacacgcatgagggtagggaggagttgttgctctccatctatttaaggctccattagatttgaagaaatctgtaggaaagttcaattttaaaagaaaattctctgtgagagcctctggatggtgaaattggttcacaagaatttcaaatgatacgaaaaggtgcttcatattctagaggaactttaacattnttacaaattgatttgggaaatttagtgcatttcctctatctcccttatctataataaatcaatatataaatcttatatattttttttgttagaccggacccgaccggacccaatcctgctaaagtgacttaccggactgcccatattnttggcaattntatccaatgggtacttttttttattttcactcgtataancagtcaattatctgtaatanattacatatntattatntaattttatagata

SEQ ID NO: 32120 - DNA, 379 bp, Oryza sativa
  unsure (1)..(379): unsure at all n locations
tcacaccgctgaaccatgtcgcaagcatctgaggtgcggtgtgtcataaaacccttatcggagagctnttccgacttatgtcccaccggcggcatgtgacccacagatcccttcaattcatgtatgtcgaggaggaggtgtctgccgtcgtcggacgagacgcattttatgagtaccccgtttggtgccttcttgtatagatcattgccgatcatacagtagactnttgctttgcgggatattttctcagcttctgcgtcgtcctcgggcaactcttcgctgcttatgaatntaatgagtgaggtgcgccagtcgtccgtggtctcgatatcggcaacggcgcgctctgcctctgtagcccccgagctgatgtcggggg

SEQ ID NO: 32121 - DNA, 425 bp, Oryza sativa
  unsure (1)..(425): unsure at all n locations
agcttatctcttacgctccgggtttgttttattttaacatcaccaccggcttgctgtcgccgccaccgactagtgtcctcgcctatacggatgggtggtcacaccgctgttattgggcgtcgttgtcttcaccgaccggccgcctcgttcgccgccgattggtgtcttcgcctacatggttggttggtcacgccaccgttgttgggcgtctacactttcactgttggcttgcctccgtcgccgacgactagtgtttccgcctgcacggctggcctattatgccgccagtgatgggcgtctacgtcttcactgaccaattgccttcgccacctcgtatgatgccaactggagctatcgtctttacagcttggcacgtcgctgccactgctaatangcgtcgtcatcctcaatgcaagctgtctatg

SEQ ID NO: 32122 - DNA, 429 bp, Oryza sativa
  unsure (1)..(429): unsure at all n locations
tgatggagcanagaccggatgatcattcatcagtcattggtgaaactatttcgggtacacctatgcctaagaccagaattgttagtaatcctcttcatattagtcctattgattntgacaacaagaaagtagtgattcagtctagtcaaaccgaatctacgaaagggaaaagtgttattattgtggattttcggcccgagacaatgaagatcaataatgtgaaggctgaagatcgtaaggttacaaaagatgagtcatctagttccaacaagaccaaaaagccgaagctcacttttgagatgtttatggctaagtacaaaaaaggattagctggtcaacgatttgataatcaaactagtgattcgaaaagaccaagatcatctcgtaggaagagaattggtcaacaccaaagcaatcggagccatcaac

SEQ ID NO: 32123 - DNA, 247 bp, Oryza sativa
tgtctttttcgtgagcatacgtcttaaagtagaaatcctgaaccgtttctgctctttaaatggaacccacattcttaatgagccgtttcttagaaaattattgtagctaagcgaggctgagtttgataatgaatgatattcctttactaggcggacgctcactctcggattcagttctaaccctcgctggaaatgcaactgtacttttgcaggtacacttattatagtattattcagagttacactc

SEQ ID NO: 32124 - DNA, 261 bp, Oryza sativa
catcactatgggcggaacacattccgcagtcagacgcataggcgatgacattcatgcttatgcgcttgattatgaccaatatgactcattggcatactttgaggcgaaatacctgatctatgagtactcagagggtggcgatgatgatacaaatagccgtgtatcagatagcatgtctcaacagagtgcaatgtcttggacatccatgatgacacggcattgaatgcactgtctatataccagaaggcctggacatatatg

SEQ ID NO: 32125 - DNA, 431 bp, Oryza sativa
  unsure (1)..(431): unsure at all n locations
agcttcagggttgcacagatatcttanatcctttcttcttgttnttctcatgtccagacaaacatttcttactaggtctgtcttgaactttctgcagatgatatttctgttcatgggccaatgactcaatcccagttcttgggctctcttggtataaacttccgtgtggaagccctgctccaaaactgtgctactgatgagcangccgagtctctgaggacaggctactggcgtcttgtcggagatggtgaagccccattctgggaaggtcctgacgaccaaaccccaattggcatgggtactangtacttggccatggccattgtcaacaagaagcaaggcacacccgttccattcgagtaaaagaaatactggaaccgtttcttctctcctcaggtaaaataacatcactgccgtgtaactcttatgct

SEQ ID NO: 32126 - DNA, 413 bp, Oryza sativa
  unsure (1)..(413): unsure at all n locations
tctcgggttcttggtctctgcccgaggcattgatgccaacctcgagatgatacgagctatagaacggatgcgccctctcagcaagcttatggatgtgcaatgcgtcaccggttgcatggccgccctaagtcggttcatatcgaggctgggagagaaggcgctacccttatttaagctcctcaaacgctccgggccgtttacctggacggaggaagctgaacgtgccctcactcagttgaaggcgtatcttagctctcccccagttctggtcgccccggagccaggtgaacccttgctactctacttagcggtgaccccgcangtagttagtgcggcgttagttgtggagcgcgatgaggacaaccctcattccgcgcatccccacccttgtgtggctcggcccgggagagagc

SEQ ID NO: 32127 - DNA, 327 bp, Oryza sativa
  unsure (1)..(327): unsure at all n locations
agctntatgttcggcgcagtactaatactggttcttatgagcaagaatggctctatcaatcaccatctactttagacatatcttctgaaactctnttcaaatccaaaagtccagtatcttcctacaaattagtgaattaggaggagctctttgtgccgaanaagaaagagcagggcaatatttcaaacttgcattcgaactgcgaaatatttatacaaaggaggagagatcaagataatgcagcagggttggttatctaattggctagtcaaacatgaggtggttcatagatctttgggcttcgatcatcgaggaatagagactttg

SEQ ID NO: 32128 - DNA, 382 bp, Oryza sativa
  unsure (1)..(382): unsure at all n locations
tcctaatgtgggagggtttggtcaaggggatgcacaaatagtgcttcaagatccattacgcgttcaaggccttttgttcttcttcgcatccgttattttggcacaagtttttttggttctcaaaaagaaacagtttgaaaaggttcaattgtacgaaatgaatttctatgtcccgggatttcttaccatcaagttggtaaaaagccgcgatttattggcgattgctagaattctctatgatccattctggaaatcttttttttggttagactattntttgtttgcgagatgtcttgtctgcgattccttatttctatcatctcatgcaaaacgaggagaatgcaaggcaagggcgagaacaataaaaggaacaaatcctttt

SEQ ID NO: 32129 - DNA, 406 bp, Oryza sativa
  unsure (1)..(406): unsure at all n locations
gcttataatttcttcttaatgttaaactctctatcaatatagtgtgctgtgacaaccatgtagcctatattttgaattgaagtccacatatcggatgttagacatatgtgcaaatcaagattatgtaattcagcatgcaagtcttccctcattcgctcatacaagttaaaggcatcatcacgaagtgtttgacgccccacaactttgaaagttggctgcatggactccacccactccaaaaaataaggatcctcaattntcttgaatggcacctctgcatgaatgaagaatctgaccattagctcccggcttctcttgggaacaaacacganatcttccccagtctgtttcttaattgttgcaggaagttgattctagcatcaccatcaataactggacatgattc

SEQ ID NO: 32130 - DNA, 462 bp, Oryza sativa
  unsure (1)..(462): unsure at all n locations
gcttaggtagctagatcaggcggntcctgagctgttgatttcgtgagtggtgatggaagctgccggagtaccgaggaggcgtacatttggtgaggacgagaatggtgagaggacgataagtgtcggtggtggcaaaggctatgaggattgtgggggggtgtcgaggaaggcgaggaggagatcaatgatggtggcgagagaggagtaaaaagggtgggttgacttggtggggtttaaagtattcccaaccccatgacctattgggtcagctcacgtcagctttttataagtgttggaccagcacctatacttatattgtaggtggtggttcattttagagaatcccgcgctaatattattggtgctggttttatctagaactagtacctatatctggtcaaagatgttgattctatattttttcgtcctatggaactggaaatttgcaataggtattggttc

SEQ ID NO: 32131 - DNA, 427 bp, Oryza sativa
  unsure (1)..(427): unsure at all n locations
agcttgaggagccgagataaatcgccatgccgtttcccactcgtccaggccatgtttttcaataacaatggtccgagttcaattgatgctgccaaaatcttcaacaagctgagaactgctccggatacatattttatgaacatcaaagaagctggaagtatgggggcgagtctagcgttggcgatgaccaagtccttgtacccgaagatagatattgatgccgntgatggcttcgcagacgggacaagtgaggaaaccgcccttgacctcatcagtgatgcgcaaaaagctgcctgacaaatagcccgtgatgtagtngagagggtccgggacaacgatcttaagccgactaggtctgataactctgatgattgaaaaactgaatctgattgattgtgtattctgatgatcatgatgatgataatgg

SEQ ID NO: 32132 - DNA, 469 bp, Oryza sativa
  unsure (1)..(469): unsure at all n locations
ctcagcttcntcatttgctnttgcanagcactcaaggaaatagagctagtagcacttgcttcaatatcaatatctttgcatctcacacatggttcattgcttgggacaattctggaacaagatggctcgctagggagagagacactattttttaaggattcgaacttctcttcaagagtgaggtatgctntgtccaagccatccactctctcttgaagttgagcgttcgccacctcaagattagcatgagactctctggtttgcttgtgaagccgtaccaatgcctcatttttctctctctccttagcaagctcactcttgagtttatgagaccgctctttctcacgaatgagcaaagtctcttgcctcttaagagtgcatatnggtcctcaattctcccaacaactcactcaagtgtgganggattcctatttatggacttgaacaatcatatccattacctatctca

SEQ ID NO: 32133 - DNA, 428 bp, Oryza sativa
  unsure (1)..(428): unsure at all n locations
agcttaccgcataagcaacacaacatattttattcttaanaacggcatctnttccggctggttgtggatgctccaacttcacaccaaaaaaaaaaacatcttcaatntatctgcattttatcatttgtttcacatcatctcattttactctgtttctcctattccctttcgttcaggtataagtactttgactttaactttttatcaatttttcttcaggtttgattaaagtttataaaagaattaacaacatctacaaaaccaaattaattttattaaatatattntgataatatgtttgttctgtgttgaaaatgttgctacattnttctacaaactttatcaaaatacaaaaggtatgactaggaacaaagtcanacaaaatttattatatgtaatggacgaagtatatcttatgtatatgatct

SEQ ID NO: 32134 - DNA, 506 bp, Oryza sativa
  unsure (1)..(506): unsure at all n locations
tcgaacccagatcgtctagcccactaactagtggtgctagccggaagaccnccaggcgtttctcagtaggcaatatgacgggtactagagagactaaaaaaaacaacaatgcatatatgagatgattccttanagaaaataaggagtggcacatggacaggagactcgggatacaacaaagacagtgtaaagaggtttattgagatttgtgagaacaatagatctactttgtaactcgctataatattatagatcaagaacaaggtttatgggacatataatacttagaacattgcccacaagaatagatcttatataatatagacataaggaaaggctaactgaagtacgaaagtataatctgccaagtgttaagaggtaacgtagtgctatcacatcaaaagttatatgataaggggcctgtttggtacagctctagctccatgctcacccctnctgtagctggaagctcagcaaaacagttcagctncatcaaaactgggagt

SEQ ID NO: 32135 - DNA, 170 bp, Oryza sativa
tgagctgctgacgtgtttatgcgcgttgggtacatccgtctcaaaattaaactctatagcaaaataaactgaaccccaataaggaataaaaaagtgagatgtttcaactaagcaaattagatttacatattataaaacataagtaaaaaataagcttccccttgcgtgca

SEQ ID NO: 32136 - DNA, 451 bp, Oryza sativa
  unsure (1)..(451): unsure at all n locations
tcccgctaccaccagatcagcatgacataataggatgaggagaanacaacgttcatcacgcccttcggtgtattttgctataccaacatgccattcagattgataagcgcacggaacacatatttgcacggaatccaaggggcacttggcaattagctgggacaaaatgtcgacagcttacgtaggacgacatttgtcgttgaaaacccaagacaagccgattcactaatcgacgacctaatggaaacgttcgacaatctacgctgatatcaaatgaaactcaacccggagaactgcacgttcagagtaccatcggggaaactacttggcttcctagtctcagggcgaggaatcgatgccaaccccgaatagatcaatgcaatcgagaacatgaagtcgcccacaaggctcaatgaggtccaacaggtgacaggatgcatcgcttcgctaa

SEQ ID NO: 32137 - DNA, 405 bp, Oryza sativa
  unsure (1)..(405): unsure at all n locations
agcttgtgactngatcgaagtttgtggtttgttctatatgtccaaagacatcaattctaaggcccacttcgcaatccgtccgtttgcttcgcattatgaagtatatccccgagtggaaacgatgtgaccaccgtgaccgagtgactttgaaagtagtgagataatttcctgatggtaattaagacaccatataataacttttgaacctgaggataccttgtcttggagttggctaaaacctcactgacaaaataaattggtcgttggactttttgaatatggccttcctcttcacgctcgacaaccaggaccgtactcacaacctgggaggtcgctgacacatataacagtagcggctcttgcggatgtggcgaggccaaaactggtggagtggtgaggagtttc

SEQ ID NO: 32138 - DNA, 451 bp, Oryza sativa
  unsure (1)..(451): unsure at all n locations
cgtactgaatgttgcctggtgctatctggtgcacgtggatgagctatgattgccagcagtccctcgagcatcaatccgcagttagaacagtaattcatgtacctttgcttgtgattggcattgacgtgagaacccattgctatgcaattgcagttgaacaattaatctgtgtatgtgtttctcttcatgagtcgccttgatttgttaaaccgagcttgcagtcttatatcttccactctgccttttagaaaaggggatttcgagttgtgatgggttgaggttgattagatgcatcatatgatgctctgtcggtggtggtggttctctcaatttggaatactgtcctagtgtcattggaagcgtgctttggtgcaagtacaacatcaataggttgcctgcttctgctttgcttgcacctanaaatngtacaaagtattctctctagtggatt

SEQ ID NO: 32139 - DNA, 465 bp, Oryza sativa
  unsure (1)..(465): unsure at all n locations
tatcacggaccttgaaactcaagctttataatatggccgtgatctgtcattacgtgcgactatctccactatataaagaanaataagaaaggatcaaattttctagtatttactagaaaagggggctttctacatagggatcgtcaaaacaacgattttgccctatcagctgtaggaagaaaggacacttcacgagaatcaaaataggaagaaagaaagtatggcctatactactctatggatagagttctcaaattgatagagaaagcaccgtanagatcaattagtgaccgactgggtcgatacaactaanaaaaactgcttacttatcccatgatatggtgcaaaacttaagaatccgcttatgtaatagagccgatccactaagggattaagcagcggtgtagtatcagatcccacagatagtaagttcttttttcttgcttatggggaaaaagtcttttc

SEQ ID NO: 32140 - DNA, 271 bp, Oryza sativa
  unsure (1)..(271): unsure at all n locations
caagctntttgagcctaaacccatgattctatttataactntcagtcctcgcagactaagtagaaaaatcaaacaaggcaatgatagaccaaggaagcaaattgaattgataaaaaatcacactccgttattatgatgatagcccccgactgacaacttcaagaagaaaacttgatgttgacagtcaagatagggaagtacagtgataagcttaagcgtataaacgacgaagatgttcgatgttccaagaagtgtcgaccagtgtaccgtc

SEQ ID NO: 32141 - DNA, 335 bp, Oryza sativa
actcaagcttcgtcatctttgcgacaatcctctttcacaaatatagcacatcacacacaaccagctcctaaacatgatttgtgcttttggacatactcataggttctcgattctgatttgcccggttcgtcttgtgtgtctaattctgcttttgagcaaaacaagatgatttgctacattagtataacatgtgcctactactacatgaattacatcaaaggtccaagtatgagcagataccttctgacttataggttatagcaccgttgacagtaatcatgatttcagggtcagcaggatcaatagcagtacatcttacatatagaatcagtact

SEQ ID NO: 32142 - DNA, 395 bp, Oryza sativa
  unsure (1)..(395): unsure at all n locations
agctntacaagttcatgcaacacagttttgattattctaagtggcttgtcatcggctcctgccctgcaggacatgcaaagcatctacttgtatctaaaaccccaaaagaaataaatttaaaagctaactattaagctccaggagaacagcagtaaccttctccgaatctcttccatccctagntcttgcaaataaatatgaatgctntgaagaatgcgatcaaggtcaacttcatatattgtactttgtaaaacctgaaagacaatgtgacatcaggcggatatcctgtatacatgcacatccatagctagcaaataaccacatacctttgtcaacttaattaaacattggacaactaaatctgagaacttctggattttcactgcgagggactc

SEQ ID NO: 32143 - DNA, 307 bp, Oryza sativa
actcagctttgtagttacaccgggctggttgattgcttgtctcctttataccggctacgtaaatgctgtgcttgttgagtaaaatatactgctaactaagcacgatttatattcattaaagcaaaatatacagtctgtggtcaacacgcgtggttatgacttaagcaggattaaagcattttaagactgtaccaccaaatcacacgtagtacgtggccgtgaaggaatgtgaaaatcttttgtcggcgggattatatgatgtacacaacattagaatagtcgctctctttctttttctctatcaaag

SEQ ID NO: 32144 - DNA, 365 bp, Oryza sativa
agcttccagaaccaatcaaatttgtttgtgattatgactcggctgctgcttgtagttcggcataagatatcctctcattcgtctcataaagaaataggttttcattatcaatgatattcggtttcatccttgtcttaatgaagcagtatgcagtcatacaaaacaaagagaaaatcaaagttccaacaatgcaaaagattaagacatgtagtcgatgcactgaagcctggtctgaatctttagatgggcatgaagggaattgcaaatctggagggccgccacatagcattgtattacctgagagtgacactatagtgccattaccaaaaatccctgtatttggaacaggacctgacagtgcgttg

SEQ ID NO: 32145 - DNA, 159 bp, Oryza sativa
attttatatttttaagctctcttgtaaatcatacctctaaaaaaaggtgatagtatcaatcagcatatgtgggcaggatacaggtttcattttctagtttaatcaaaatatattcactaatgagaaaccattcttaatgggttggacaaaagccacaat

SEQ ID NO: 32146 - DNA, 417 bp, Oryza sativa
  unsure (1)..(417): unsure at all n locations
agcttaaagccatgaatccctnttatgcatatctggatctggatcctgcagaacaaacatataggatgagtagtatctgatataaatataatactcgagaaaaaatcaagtattttaaaatatttataaatatgtatttctcctcttgtncaatttgatttccccgagcagatgactcattacgtttaaacactctgcccgactagtcatagccaccaagcactgggagtcggcctaagcactttccaaacatgcatatgagtgacataagttcgtcattaatggaacacagtttcacggatcggagtttactactcgggtacctttgcaattattaagagcagaaaataaattatcttatctctatgctntngatttattccgaataatacttagcaccttgcgttactcggtcca

SEQ ID NO: 32147 - DNA, 247 bp, Oryza sativa
tatatgattcagatacttccgcaactgatccaagtgtacaatatatgctccaaagttcacgcctctccgctgagcatgcataggactatatgtactacagagtgcagagcatctgctgttctgctcatctgtctagatacgcggtaaccgaaagtctgaagcgagccggaatatgcgaagaaaacagccttggtatttgagacaattgcttgcatgggatgactcgacaaacatttgcttacatagt

SEQ ID NO: 32148 - DNA, 448 bp, Oryza sativa
  unsure (1)..(448): unsure at all n locations
agcttannaattcctattcccgttcgattatatttgttcccttccttcgatccggngacgacgacgacgacgacgacggacaacgacacccccagatgagacggtcaaaacggggcaacccaaccccaggccgtgccatgccggccggtggccggagacagcttcgctttcgttgaatttttcagcccccggtcgccgccccanaacaaatcacacacacacaaaaataactctatctaaggcatctagctctagtagctagctacccctatcatcatcatcttcttcttcctctcgatcgccatcacctcccggttgcgtacgcgaccggcgaacccgtctccggccggtgtcgtgagctgaccctctaagcaaccaagctaccgacgacatcgtacaaacgaacgaaagaacgagcgagcgaacgaacaatcttctttcccatcat

SEQ ID NO: 32149 - DNA, 431 bp, Oryza sativa
  unsure (1)..(431): unsure at all n locations
tctaacgtgccgntggagtgaaaacttagaaagtaagtaactcttaatctcccatcaacctagtcccttgtattttatcttcactctagcatcaaggttgtggcttgtggctctataattcatgttcttcttctcaacagtggctgtgatactttatacgaagtccactaacaaattacacaaaatttggtgctccctataggaaaatttgcaatgatgttaactggtgacttctatgttataccacgagtagaaaaagttatagctattacccgtaagcggagcgattaaatagctactcctccgtctcattgtaagtgcaaccatgagttatctagtctaattctaatcgtccgtcttattggaaataccatttatttgcatccttattgttattagatgagtaaatatgaataatacattatacatga

SEQ ID NO: 32150 - DNA, 510 bp, Oryza sativa
  unsure (1)..(510): unsure at all n locations
agcttgaagacgaacccaagaagaacaccaatgtgttcacctgcgatatagtagcagccaatgttgacgtaagctacaaattgttgccatccacatccaacagccactcctgtataaattgatgtttacaaatgagcaacaattagttgcgagcttgccatcattataaagatgatatattgcacagccggattagtatttaatcagtattcgacattttgctacaaccaataacgatggcagagtcccagttatttgtttagtgtgaatatatacatgtgtaaatggcggcataaatcttggatgtggaggctggtgtaaattctattgtctacaanaatatacatgtgtaaattccaaaaataatccatttgtcacatactggattaattgtgccaatggtattacagctgccaacaaattatgaattcagcatgctgccaacaaattcatatactggaattactaatntccctatgcatatacctgaatatttgcaaactggagaag

SEQ ID NO: 32151 - DNA, 437 bp, Oryza sativa
  unsure (1)..(437): unsure at all n locations
ctcagctntacaaactttccgtggcacaccacaaccttgggtgttcactggcgacgcctanccgtctatgagatcttagtccccaagaataacaagcacaatcaaagatttgcttgctatgaactcgagtgctcaaagtatggagtgaagctcactagctctcaacttctcaatctctcaatccaactttctccccttcttaaatccctctcacaaatatgtaccaacaaggtanggaaatgaggatggctatttggctntggatgtgtttaatactccccaagaacagcagccactcaaaggaggggtggaggagtttgtatacccgagcccatcaaaaactaaccgttggaagccaagactgtaattttcagaagttctgaatagcatattcggatatgtccgaanatttacagaagccaatctcaaattcgcag

SEQ ID NO: 32152 - DNA, 313 bp, Oryza sativa
  unsure (1)..(313): unsure at all n locations
agctngcggggaatcatgttccataaagagtattttatctttgcatattggaggatggacaatccaccatcaatgagatgatgcaccactccaacaagctggcctgcattatttgctctctggatcataaccgatagcatgtccgctataatattgaataaaacgggagatagcggatcaccttgtcgaatgcctttctttgtttgaaagaaccgcccaatgtcatcattaactttgattgctacacttcctcccgaaatgaaggactctatccaagaaatccatcttggcgagatacctctcatgcgaagag

SEQ ID NO: 32153 - DNA, 434 bp, Oryza sativa
  unsure (1)..(434): unsure at all n locations
ttcccaagctcttacaagttcttactaaagcaagcagaatggtgacgtacaccgacttaaccaagcaccccaatggaggttggatgtatcgatgccttcgcaaacacttgctgtacggctgcaatcagatctgtggagctctatgtacgcttaaatatgtagcaaagggatagcaaatgctcaaatcacagaatgcaaagttgaatgatcgttcaaagtcaagtaccgtgctggtcctacgctagaacgtactaaagacgcgagtctagacacaaacgataccacatgatagcactataaacaattcaagcacactctgatatatgaaagcaaactcaaggatacaactgagttttctctnttccttctttctttctttcatttcttttcagtgattgtgccgtcttcttttcttctttttttcacacctttct

SEQ ID NO: 32154 - DNA, 419 bp, Oryza sativa
agcttcatttcctcaagatccaatatgagacattctccatgttgcctcatgagagtgtgaatgatatgtatgggaggctcaatgtcattgtgaatgatctcaaggggcttggggcaaactacactgatcttgagggtgcccaaaagatgcttagagccctaccgaagaagtatgagacccttgttaccatgctcatcaactccgacatgtcaagaatgacacccgcaagcctcttgggaagatcaacaccaatgacatgtacaagttgaagaagaaggagatggaggaagcctcaccctccaagaagtgcattgctctctaagccgaagttgaagacaagagcaagagcaaggtgaatgaagtcatgaggacttggaggaagagatggtctttcttactagaaggttcaatcgatcttt

SEQ ID NO: 32155 - DNA, 235 bp, Oryza sativa
  unsure (1)..(235): unsure at all n locations
cagcacattcacgcatgtctttntgtcattcttcccataatttgcaagagttgggtctaataagacgtttgatttatatgtggagggaggagctcttggctggatgaaacaattccagctggaaaaaagtgttcaacatattacaataanaggattcgaaaaggacatgtggttgatgatatagccgcgcctgttttttcatatcaaaattttgtgagtcatctataaatattgc

SEQ ID NO: 32156 - DNA, 467 bp, Oryza sativa
  unsure (1)..(467): unsure at all n locations
cggacacatanaaactcagctttcaaaaaccaaggtgtagcttatagacagagcctctgattttgagcaatatgttcaactttaattggtacagtatgatcaagtgggatcttcataatgaccggngatgttctcccatgcttcgatgcttcaaacctagttcttcctgatgatgctgcttgcatcgtcaccgtgccaacaactctagatgtggctgctaatcatggtgtagntgtagcggccaaggacggaactgatggggagaactattccctgtgtttggttgataatctcctccagaagcctacagtgcacgagcttgtggagggccaggctattctagatgacgggagagcactgcttgacacacggataatatcagccaggggtaaagcatggcaggagctttgtagacttgcatattcatctagccatgtcatgatcaaggagctcataactggcagaaa

SEQ ID NO: 32157 - DNA, 470 bp, Oryza sativa
ggatcttaagcaccgcggctgcagctgacagccagctcgaatagtttttgttcctatgttgccaacatttcttttcagctggcgttactgtctctcacatttttaaaatttttcttgtagcagagacaccacaactactactcatctcccaactcctaataaaaagctgcatagaaatagagcatgggttcacgcctgcaggccctggcctcctgctagtactattagcatgcatgcatctccattaatattactattattagtcacatcatgttttaaaacgataatagttccggtacaagtctaaggacatctacaatattgtgctataagaatgactagccatatatattgtaggcactagccataagatattaaatgctaaaaaataactataaagcttatggctcaaccttaagaaaaaaaatgagataaagacacatgccattatagaggatagaatagatatg

SEQ ID NO: 32158 - DNA, 388 bp, Oryza sativa
  unsure (1)..(388): unsure at all n locations
tctcgggtttttggtctctgcccgaggcatcgaggtcaaccccgagaagatacgagctatagagcggatgcgcccccncagcaagcttagggatgtgcaatgcgtcaccggttgcatggccgccctaagtcggttcatatcgaggctgggagagaaggcgctacccttatttaagctcctcaaacgctccgggccgtttacttggacggaggaagctgaacgtgccctcactcagttgaaggcgtatctcagctctcccccagttctggtcgccccggagccaaatgaaccctctgtactctacttagcggcgaccccgcaagtggttagtgcggcgttggttgtggagcgcgatgatgacaatcctcattccgcgcacccccaccct

SEQ ID NO: 32159 - DNA, 495 bp, Oryza sativa
agcttcctccataatccacaggcaaaatctcttcgtctcacataagcctaatcttcatagaactcaccatccgacaaattctctgcttctgggagattgggaaaataaagcaagactgagtacaaccaccgtactcaataagacataccaaggagaatgtacgatgcaagggtaatcaaaggattggctcataggatatttgtagtaaaaagcagcatttataaatcataagttgaaagcagtaaaacagtagataattaagcagtattaaaatcatcactgtccaacactaaaccacgttatgacaggcccaacctaaaactacatgaactataccagttcattaagtcaaattattaaggtgagactaatcacggtgagctggttgactgcccaataactgtgggcacggctatttcgaatagtttactctgatcagaggtgacaatttacccacaagacacgatccacacatgttaccatgccccaaagtac

SEQ ID NO: 32160 - DNA, 490 bp, Oryza sativa
  unsure (1)..(490): unsure at all n locations
ntgacanactgagtgacagcaagattcataccangcctatataacagttggttcatcctctgataaggtgctctttcaccagaatgacctcctagagctgagtcatgaaaagaaactaataattgctctcgtagtgtgttgccggccccaactacaatatgatctttgtatctgagaatgcctcctttcaaagtataaggagggtgagattgcggtgcaatgtgcaggtgagattccaattcgtggcattttgggtcagtactgtaactagcagccacttcagttatccactggggaacaatgacagtagtagttaaagcattaagctgctgcattctggacagcgcatctgcagctttgttctcttggccctttttgtattcaatttatagtcatagcttaacaactcgataagtaatctgcgctggacaccttcagtgattcgctgctcattaatgatttcaagctagcttgatctggtctgataatg

SEQ ID NO: 32161 - DNA, 453 bp, Oryza sativa
  unsure (1)..(453): unsure at all n locations
agcttctactaagccattctaatccagcttgctaatcaacacatgcagagtaagatcaaatagcagaagaagagaattccacgaatcgttctatttatgtactgaaaataggtgatatgttttgttttgtatactgatatgattaatcagcaaatcacacatcaaaaccacatcctcaccatttcccccaaacaaaaccattatctcctataggacaataggacactacccatcaactaccagaaaaaatatcttccataagaagttcaccggagaaactaaacatgagtntcttttagctaatcaatccagtaatcctcatcaaatccccaaataaaagaacccaatcaaatgaaaagaaagagagaaggaccaaccgagcgagcatgaacaaccaaccccgatagtggccttcgccatcgcaaccgtcgtgccttgcaaagtcgtcgtgta

SEQ ID NO: 32162 - DNA, 358 bp, Oryza sativa
  unsure (1)..(358): unsure at all n locations
tgcgcggcggggctcgctggcgacagcgatgcgcggtgcgatatggttgacagaccgtagggcttggccgggtttggagatggaggcgccgangctggcagcatatcctctgagctgtcactgacatatgggcctgggcctcatgccaatggggtgattctttcttaaaaaaaaactttatttttcttaaaaaaacaatggagngattctctctctctcttttttttaaaaaacaatatgctgtgattcaaaacctacatgcaatgagtcataccctatcataggaattgtataagatttgaacactcctatcataatcaaaagatcaaatacgaaaacttcttataggatttcaatc

SEQ ID NO: 32163 - DNA, 465 bp, Oryza sativa
  unsure (1)..(465): unsure at all n locations
agcttccatgagagggagactggttgttatgttctatcgcgacgtggnttggatttttggaacatggaagaacggcgcgacctcgtggccgtgatgttggccgctnttaatttccgtttaccaagttacctcgccgcagccgatggctatcctatcctattctctctgtccgtttcacgttacaagttttgactttcaaagtcaaattactttaaatttaactaattttatataaaaaaatagaaatatttttaacctaagacaaatatattataaaaatctatttaattatagatttaataaaattatattgcggttgaaatattactgttttttctacataattagtccacttagaatagttgacttgactaaaatcaaaacgcttataacttgaaacggacggaatacgcgtaagttaacccacttattctanactcaacatacagatatgatacatcatca

SEQ ID NO: 32164 - DNA, 438 bp, Oryza sativa
gcttacaaagcgagggtgagtccgcgccgaagaggcgtgaagatgacatcctcacaaaggcgctcggaaccaaagaacatcctggccgaactcggggaattggtagcgatgtgccctggaagcatggactccctcagtacagctcccaatacaggaaacggaaagtctccaaggaagagagggacgctcgtttgaaggccgaacttaaggttgaggtcattcaagaactagaagctagcatgaatgcaagggtggaagaaagggttaacaaggtgctcgccgacatgaatataccccgagtcacaacacctgctgtgcaaccaactcctcgtgtacaacacgacgcgagtccgtcacagcatatgagtagttgtgcatccacaaaagtgccgagccctggtcttccgatcgcaccactagcttgcagggaccacatcg

SEQ ID NO: 32165 - DNA, 363 bp, Oryza sativa
agcttcatgaactggatcgctggaatgggttttacgcacaattccagcgagatggccctattcacgttacattagctcgggtaaagaggaagcaaaccacaaatttaatggaccaggctcacggaagtttagctacttcttttcatagcaaattcaggttcttgattctggtatagcaatagagcatactgtccatgtccaaattaaattcttattcagattcagaatcagattcttgattctggtgaagtcatccacgaaaattaacattaccgtgcctgctgatgctgaggctacagaaactcctactctcccgcaccagcctcctcaacagccggcttcacgcacgcctgtagctgtcgt

SEQ ID NO: 32166 - DNA, 308 bp, Oryza sativa
tgtacgcaaatattatctgctcgatcgtctggtgcgacaggtcacctctagcgccatgcagagtcgtgtgccaagaagcaaagatacaactccggcatcagctaattatggcaaacccacacggtacggtacacagtcgggagtaccataccatggccgctctggaatctattgttcggttaatcgccacgcaagatttacccctgaactttcgagagacccctgtgtttgaacattacattcaacaatctcataaccctatggttaaagctgtgagtaggcgcacatcaactatagatttatagaat

SEQ ID NO: 32167 - DNA, 435 bp, Oryza sativa
  unsure (1)..(435): unsure at all n locations
agcttagctcatttgtgatgtgccgtaccatttactacagaaanacatttgccccanatgacttccaaaatgaactataaagctaatcaaaataatcagttcaatagaaatggggccaaaggacatcggcagttactattcaaactcaatgaagtgtgcacttgcaagattaaaagagtgaaggtgtgatcaataatataaaatgtgaaaagaatgtcccacactgggcaaattgtactggtgaatgttgaaaactgagaactaaaagtacgtacagaaagagctttcaagaattcttcttgaggtattccaaaagaaccaaatctttgcataagcttgcttgtatttccaatancgtctccgatacgggaaacttcaataatgcgctccaagtcatnctgcattgctacanatacgctctgtttgtacaccaat

SEQ ID NO: 32168 - DNA, 355 bp, Oryza sativa
  unsure (1)..(355): unsure at all n locations
tccctaaacagaatattaagctattgctaaatntgattttgtggcacgattgctaatcaccttgcgataagcggtcggcggtagcggcattggcttatcatttctcatgggatttctggaggaagagtatatttangcagataattgtctctttcaacttgagaaacaagctaccactggagtaatgtactagcactacatacccgtagtaatgcttgtcacggtaccgcggctatctccttggtccatagtgcggatgtcgtagcagcacttgtgaccgctcactccggctaataataaccttgagaaaaactaagccccatgtgggacccacccacttgatgctgctggctat

SEQ ID NO: 32169 - DNA, 239 bp, Oryza sativa
agcttcattaattttatttctgtacaaagcgtcaaatattgacagacggagggagtattttgttggtaatactggtttggcccctcagatttgtgtcgctgtcaagctccaccactgaatctgtataagttgattttttttttctcttgatggtgagagtacactggctaatccgcagtggctagatgatgtgtccatcttcgtggtcgtcggtggcggggctcctctgtagggtacgg

SEQ ID NO: 32170 - DNA, 367 bp, Oryza sativa
  unsure (1)..(367): unsure at all n locations
gtactccgcaagccaccacagcaacaatgcacatgatatgggtatttcaaaggatggctatgggtcttttgcgcaaagacagatttgctattcttttcataagcctaagacctatcactggactgatcaaaatttattaccagtgttcacatttgaataacgacggttctgtccaacatccattgtgatctcaatgataaatnaccgccattgagtcgtcatggttatctgaagacgtacaccttcccgcctctaagaatgggctcaacaacataaaatcatatgcataacccatcatacaagttaaattcaaactatccagtgtaatacacgtctgtgctaataacgcagcacgtattcaataatt

SEQ ID NO: 32171 - DNA, 242 bp, Oryza sativa
agcttgtaagtcttcttttccttgtgtgtaagaacctggctcaccaattttctagaagcatgtaatatctctttccccacaaggttggattcagcaatttgagaactttttctcaattctgatgttgaatctttatgagatgactgtgtattctcaagtgttacaaatattttatcctttgctatttcttctaggtttctgttcaggcttctaattttattaccaatctcatggtgaacccg

SEQ ID NO: 32172 - DNA, 243 bp, Oryza sativa
agcttcaccattggcatttcctttttcattgacgtgtatgatcccattctccattcctggaccgagatcaagaagggttgtgtcatggtcacctctcatgctgtcatcaacaaaaggctgttctgcatcgagtggaagaaccagcggtcactcgcgatcttcaacccttcagacagttcatggcagaagatcccggtgccgcttaccggtagctcagccactctgttcagccttggggtgctt

SEQ ID NO: 32173 - DNA, 314 bp, Oryza sativa
  unsure (1)..(314): unsure at all n locations
attctgttttctgattattaattcgctcgtcagttagataagtattgggggtccttgcttcatctctcatttagccatttaagaatagttgtaatcacccatcaccccatgtcttaagctatactgttgtataatcgtatgtggaatcaactatgaactagttcacttcactccatttttgtataatcgtatgtggaatcagctatgaactagttcacttcactccatataaattagaatacatgtactggtatcatttntgctgaggaactggactataacctttgactgtagtactgcatatgcatgtatat

SEQ ID NO: 32174 - DNA, 243 bp, Oryza sativa
agctttatctccgtcgtttctatgctcgtgttagagcaaggttaatagtatagccaactaatagctccaatttatctatagtcaatcaattcatacaatagttgtttactatactattagtatatggtcacactgtcatacacacattgcatcttggagtctgtgctgcagctggctacagatctgtagactgctgctcttctctatcatcttttatctcattaaaatatgtttgtagctagc

SEQ ID NO: 32175 - DNA, 463 bp, Oryza sativa
  unsure (1)..(463): unsure at all n locations
tactaagctattatattntgtcctcgaaattatgtgtagtcattgtgattacccttctttcataaaagactccaaaacatagtttggttatctatggctctatgcatttgcccattctctctttctttgtgtnttaaaacttttctttgatcaatctgctgtatacgttgtaatatgacagtttctttgctgtcaactgagagttggtttcttcttcaagaatgaggcttggtaatctgtactgtgatcctctaatggttcccggaggtcacaagatcacagcaaggcagcgatggacaccaaccccaatgcagttgcagattcttgagaacatctttgaccaatgcaatgtgacaccaagcaagctaaagataatgacataacagcagagctctcacagcatggccagatctcatagacatatgtctataactggttccagaacatgcgtgcacgatcgaaa

SEQ ID NO: 32176 - DNA, 250 bp, Oryza sativa
agcttaagtaagtttgtttctattatgcctgatacgatcgatcctggatcgatagatgggactgttgcccggtccggccagatcggccaccaagaggggaagggtcgtgtatgttttccaaaaaaacaaataataaaaaaatgaaaagaggggtcgtgtaagctggctgaaaagctgtttgtgtatgccgccggagagaatcgaatgtgacgcatatgcctacgccatcccccttccctcctttcctaca

SEQ ID NO: 32177 - DNA, 337 bp, Oryza sativa
tgagatacaattcatgtatgtgcatgttgttatctatatagggttactctatgttgggctctgagtatctaaaggttaaagaacaactatgtttgtaaaattatactgtattcatattgatggtagtaaaaagtatactgttttttttcagcatatatatattttctacacatctaattctagaacgaaaagcaatttactgacgaatcttatcgattttgacacatattgcgaacaatattatcacataagatccactgaaatgtattgtctaacataaatctatcacaagaaaacaaataggcttctgtcataatccccactcctcagcgacaca

SEQ ID NO: 32178 - DNA, 239 bp, Oryza sativa
agcttttgtttattttttactccctccgaacatactcgtaaaagaagttattttggacagcgacaaggtctccaaaacacaactttgacttcatatttttataaaaatattcattgaaaatgatatatgtatacttttatgaaagtatttttcaagacaaatctatttatatattttgtacattttcaaactcaacaacttgagagttattaatgatttatatttctaaggcttgactt

SEQ ID NO: 32179 - DNA, 435 bp, Oryza sativa
  unsure (1)..(435): unsure at all n locations
ctcgggctggaggaggaagaagacatatatatangtgtgggactaaagatgatctttaacgggcatctttagtcccggtttttgttgcaaccatgactattgtggaattagcctgaccgacgaaagatggtttctccaccattggtatgtatgtatcacatgtatcacatgtatacgtacaagctagctacttatctagcgtatgtaatactccctccttcccaaaatgtttgaagccgttgactttctaaatatatttgaccagtcgtcttattcaaaaatttttgtgaaatgtaaaactatatgtatacataaaaagtatatttaacaataaatcaaatgataggaaaagaattaataattacttatattttgtgaataagatgaatggtcaaacatctttaaaaaagtcaacggagtcaaacattttgggat

SEQ ID NO: 32180 - DNA, 239 bp, Oryza sativa
agctttgaataactttatttcccaagtgatgtaaggtttttcaaaaccgtttgcaccatgatgctagagaaaaagtgcttatcaaaagtagatccgtcatgactatatttcaactatatttgaacgttgttactacacataagacacagtgttactgcacattggtcgtcgtgttactgcacgttctgtgggacgagatctgagaagaggtgggtggtggggggagttagtaggcgggt

SEQ ID NO: 32181 - DNA, 375 bp, Oryza sativa
accgttctacgtcatcgacacctcttcgcactgggcaatcacactccgcgacgattcatgtaacatatttaatgtaaacggtcaacgcttaaagattttccttgagctgaatgaaacttcagataaagaagtagatattattgaatatcgattatgaaccataatgatctcatctaatacacacttaaaaccttgtaaagttgtcatttttgtgcttagcttatgtcggtgtggggccaagacaaaaatggaggccaaccgaacccaccattgttcgaccgaacctactatttcggtcgaacatggtggcacccgttcagctccattttcgaatggtagtctcccacgctcgttcttaatctatttagatgcgag

SEQ ID NO: 32182 - DNA, 240 bp, Oryza sativa
agcttagggtttttttccgattgaaatttgttcatgatagttgctaccttggagtagcgaaggaagatacatttcaatgtcttatgttttagagaaagaagctattgcaggacaaatccgaaacaagtttgtagtggtaggggcagctcctgggtaggtcggggcgattgcccaagcttcgccacagccgcctccattactgattgtggttaataagtataaagtttggtcgaccgccat

SEQ ID NO: 32183 - DNA, 337 bp, Oryza sativa
  unsure (1)..(337): unsure at all n locations
cttcggaagagnttgggtatggctctaatancatttctcttctctcttgtaagaattgtacttttattagaatactcttctatatacatttatggtattgaaatactctccgagtatatgaatacctactttacatcatgttcatgttatactgaatatacggttagcttatctatgagatgctttggtgcgggtataatgtttgcatatgcaattactctatgtcatgacgatgatattagagtagtatctggtagtttaagcgtagtgtctagattacnggatatcattatntgtggttatatattgcggatgagaagtgggccgttgatggtga

SEQ ID NO: 32184 - DNA, 240 bp, Oryza sativa
agctttccgtccttatttttggctcgacgagcacggcgtgtttcagcaggaaagcccattcaagtttacagctttccaggtgaaattttactgaactcaccatcatcgtgatcgaattttctgaacttggtgatgagacagtcctgaattctgactacctgagtgaatcttgtgtaggccggcccaagaatctgcatcgggaaggatttcgcgtacaggcagatgaagatcttcgcggcc

SEQ ID NO: 32185 - DNA, 437 bp, Oryza sativa
  unsure (1)..(437): unsure at all n locations
tgctgctatatgatgcttatattataacatcggtacctagcttctagcttactatataatatatacatgccctatgattgtgttgcagtgcagtaaatggttgatcttatatcttctatgggtgtacgaattggcaacaatacatcgttctgtaattgtgtatctagactccattngaatgtatgtactgatcctccatctccacactccatttcttatggattgctctgtnattttctgtcatataaacgctagagtctataccctccatatgttgtttgcttcttattgtgcctgtaaccacattgcaagtttgcaacaagaaaggtccaagatgaccagatattttttttccttgaataatatacgagagctgcatatcatttcattaagaagagagcataccgaaatgttctcgttgttataatatatgtaac

SEQ ID NO: 32186 - DNA, 246 bp, Oryza sativa
agcttacatttgctcatttgggacgagcatactagcatttagagaaaagtagcaattttatatccaggtaaatacataattggccgtgtacatccagttggatgtagaggccgggtttatcccattttctaaaaaaaacataaatacattataatcactttcatcaatggttgcacattctaagaacatctgtaattggagctgtagagtgcaaataccaacctttggaatttgttcttccagtac

SEQ ID NO: 32187 - DNA, 319 bp, Oryza sativa
tcagcttagtcgctcgcgcggcgacgaatgagaagacactctgttgtgttcgggtctactgccgcgtgtgcttctccacggcgtcagctccaaggacctccatatggaccccaactccttcctttacgtgcgcatgtttctgcccaccttgccaccgtacccgcacagtctatggctccgtccgtgccgcgccagcttgccaccgcccaccaccaccatcgccagtcgccaggtccctcctcttctgccggatggatggcttggatgggttggctcgcgagcctaacgagctagctcgagctttcatacgagccgagcc

SEQ ID NO: 32188 - DNA, 234 bp, Oryza sativa
agcttgggctaatgtcacccgcgatggttatatataggctctctacaaaagatctatgtcagcatatttttctacttggaagagattaaatgaatagagagagagagtaaagctatctactaacctatagatagtctatagagaaaaacgagacaatgtattagagagctatagatacttatgtagacatagtattgaggtggttactactaatctagtctattgctgaggtgt

SEQ ID NO: 32189 - DNA, 509 bp, Oryza sativa
  unsure (1)..(509): unsure at all n locations
tataagattcctcaacttaacagcgagatgttttaagacctttaaccacacaacaagatatatgtaccccttaactcacagaaactctagtcacagttggtatcaccaaccatttttagtcccggttttttcaaccgggactaaagatgccctcccggattcgtagtcctagttatgcagggactaaagatgtcttcccgaattctttaaccgggacaacaagaatgttacaagccatgatggaagaattgaggaccctctttctagtagcgtttactctgtgttggatcatgcttatatggatgcacgtatctaaatttggactaagatggtgcatatatggtcaaaattgatgaactacctacgtagctctgaccctggaaggaacatataacatattttggataatgtgtgtgtggcatctngctattcacttatgccttcaatgaaatgaccagaaaccatgatggtatcagcatttcatcataatactggaccgatcattcatg

SEQ ID NO: 32190 - DNA, 237 bp, Oryza sativa
  unsure (1)..(237): unsure at all n locations
agcttctattattttttgnnctaaaaaatatcacatccaatcttagatttgttcttttcttttacggagggagtactagtagtagtatgtatgtctgtccccatgtctggtgttatcctttcagccaccacgcaacgtggtacaaaattatattagattcattcacatacttacattccatccattttagattgattttatggaaaagagggagtacaacaggattcaacatcactt

SEQ ID NO: 32191 - DNA, 418 bp, Oryza sativa
tatagcgtattcaactctatatcttcacgatctgcagtccgttataatcatggacaagacgacattatgtgtaaaacatagtcgagtttgagtgaagctatgtcctgagaggctatttcttgaggcggacgcttaatccaaccagctctggaatatgaggctattctaaactagcagatctcgattaaaacaatgtgctctaaaaatcaatgtttagagccggtgacttataacaacactgttgaccacggtcatttggcagatgtggatttccttattaactgccaataaagtaaaaggggactcgttcgacaactatgtgtctttttataaaaaacaacacgcgttagaagttaagagaaacgtatgaattacaccccttaactattaagatcgatcgaattatcctcctatactc

SEQ ID NO: 32192 - DNA, 241 bp, Oryza sativa
agcttgtggctggtagtaaaacatcgatttttcttttgagatagagttcgatcctcaactatttctcgcgatatcttcttacgaagttttgttagggcatctataacagcctctggtttaggtgggcaacccggcaagtagacgtccacaggaattaacttatcaactccccgaacagtactataggaatccgtactgaacattccaccagtaatagtacaagctcccatagcaatgacgt

SEQ ID NO: 32193 - DNA, 470 bp, Oryza sativa
  unsure (1)..(470): unsure at all n locations
gcttttattctttagttactgattnttttggtggatttcactccacccgcggttgggaactactaattcgttgggtctataacgatcttggatgggttcctaacgagctaattttcactatttttgtttgtagttttcctgtgattctagatacatgtttgaaattttgggtcttcttttgtttaaaccgcctatctccttcgcttgtagtcatttatcattcaattagtgaagcataaactcatctgatctcctgatattaatcaaaattagcatcctttttcctttagaaagaaagcctttttccattttatcaaaattcttttgttctatttctacctgctcaaggtattcatcattccagtacaactggtgcagtataatgacaacagattcgtgtatatggaactagattagcttagctacctatctacattattgtagaaattacgggatctgtgattggacat

SEQ ID NO: 32194 - DNA, 243 bp, Oryza sativa
tgctttgatccactttattcttctgatcaactgcaaaaaaaagcccgttaaaaggtcattgagatatgattacttgttgtttatccactaccatagaaacacttatccattaacgtgagaatttctagcctataaaaatagccataaaagaatcagcgtcaaccgtattaaaaaccgtagttatactataacattgcggcttttaatgtgagctagaagtaaagaaagataaactgatgatag

SEQ ID NO: 32195 - DNA, 385 bp, Oryza sativa
  unsure (1)..(385): unsure at all n locations
tgcccgcatgtacaccaaacacacacttatcggtgttcagctntatgctgtcggagcggaggttctcanaagtttccgctagatctgaaagtaaagtgtcttggttgcgacgttttacaaccaagtcatcgacataagcctcaacattacgtcctatttggctacccaaagaaattcgagtagtacgttgaaaagtaggacctgcattctttaacccgaagggcattgatatataacaatatgttcctacggtggtaatgaacgcagttttttcctcatcctccctagccatgcgaatttgatggtaaccagagtatgcatctatataacacaaaatgtcgcaccccgcagtggagtcgacgatctgatctatgcgaggcaaggg

SEQ ID NO: 32196 - DNA, 241 bp, Oryza sativa
agcttctaaatgatttttttttctcaatataactattattgattaaagctaaatacattgaccttactgaacacataccattctgatggtaattccatctaaggccatcaggaaaatgattcaattgaatatatacaatagaagcgcataactcatgccaataaacaagattctgacccactaaagctctcctaaaataaacattaagcggaacagatcccataacattagcaatagaaga

SEQ ID NO: 32197 - DNA, 195 bp, Oryza sativa
  unsure (1)..(195): unsure at all n locations
gtggcgctcgcatagcacctanggcggcgccgtctgctaccacaagccggcacaagacgacgcctgccgcaactgtggcaagcatggccattgggcaccatactgtctacatgctcgacgcatccagtcccacgttgcacgggtggatgaggtaaaaccggctctgcttctggcacacgcaagcatctagctatc

SEQ ID NO: 32198 - DNA, 243 bp, Oryza sativa
agcttaagcttccatgttttcggcgagcgaaaccctagctaagctaccactataaataagcaaagctgcagctagctagctatcgccattggagctaagcttggagctgagaagaagtgaacaacatgtatagctcggccacgatgagcagctctccagcaatggtggcgatcgcgctgttcctcctcctcgtcgtcgccggcgccggcgccggcgcgcagggaggagatgcagggtctttgc

SEQ ID NO: 32199 - DNA, 249 bp, Oryza sativa
  unsure (1)..(249): unsure at all n locations
agcttgttcttgtttcttttcttgttctgntactgtttaagaccaccgtaacgtctctctggacagttgattgccttgatccaatgatgaaaaacgatcgcaactgccaaacttgcagtccctagtatgactgcaccggatccttgtccggtacattatgatggagaatagtagcacttgagtaaaaagttctattggaaatttggaatctgacactgaaacttatgtggtgtttgaatctcctgaagg

SEQ ID NO: 32200 - DNA, 365 bp, Oryza sativa
  unsure (1)..(365): unsure at all n locations
aaacacacttaatacacatattgaaacatatcactatcacgtatgaaatattttgttttaacggtttgaaacatacgtttttcttttgacatgatataatcatatgatatcttgttgtanagaattaattgcaacgaatataacggtgtgatcggttcgtatatcggataagtaatttagaagaaaaaatatttatagagatgagaaaagaatgaaaagaaacagctagaggtatatgcatgcatggtacagtacgacagtaccacgttgctgatctacngtatttccttgacgtcaacagatagaaagaagatattatcatgcaatgactgagctgatcgtatgcgtctgatgttttcatctga

SEQ ID NO: 32201 - DNA, 239 bp, Oryza sativa
agcttcttcgttgtctttcatgtcttcgtgccgccgcatgtcatcgttgatcaccggagggccaagagagagaaggcgatgatgatgctcgtcgtgccgaaggggagggcgaggaagatggtgatgcgtgagtagtgctgaaaattttgagggaaatgttcgtttcgctctgaacagtttttgagttcgttttgtttgaattgatgaattcacgtgggtgcaaccaagttagtgtaatg

SEQ ID NO: 32202 - DNA, 479 bp, Oryza sativa
  unsure (1)..(479): unsure at all n locations
ctaagctaagtgctgctaagatcaagaatgtatgtggatttacttttatgggggngttaaccaacgacaatgtgtgcagacgaaattagaatggtagtctaaaatgtttttctgtatgaacaatgatactattcaacattcattgtatggaatatcattatgcaaagattatttggagaacagatcaattctcttttcgactatacctttctagtagcatatatgatatttctgatggttggcttctgggggttgacaagaaaaaaagtaaacttatacttgttggagcctctgccttatgttacgctctatgattgagcagtaatgatagggttcttgataaatcaccatatgtttcctatatgcaggtaattctcatggcaacatattggctccgtgtgtgggcacaattacgaaaatgtgatgaagatggagaatttctaattgtgcatgtcgtatgcttgaacgatgttatgcac

SEQ ID NO: 32203 - DNA, 238 bp, Oryza sativa
  unsure (1)..(238): unsure at all n locations
agctnncngtanccttccttnganngactgagagatgggagcgacaatagtattttactgagcctcctttattcagactcatccagatccaacggctcggaataaatctttctttcatcagatggtcagtatttacttgatgacgtggcgcaatatggtgaggaaaaactttagtattttccctactttagatatgcatgactacggatctgattgcttcaatgttaaatgtgcatga

SEQ ID NO: 32204 - DNA, 241 bp, Oryza sativa
agcttggcatattttattagtttattgtcagaaaagggaaaaaaaacagaattgcttgtgatgatcatgatcatgttttataccttacgtttgagtgggagtagcatccaaactccaaaagagaagaaatcatcaccgatcagctcgaaaggcactacacgcatcacatatttggcttgtttataactgaacataggtaggacggtgagggccggagagataggaaaataataaacatggc

SEQ ID NO: 32205 - DNA, 506 bp, Oryza sativa
  unsure (1)..(506): unsure at all n locations
gcttcttccattgtaactaacacatcatttcaataaacagatgaatgcctacacctacaacaacacctacggntgctaagatattgttcaaggatggtgcccagcatataggcaatgacaggttactcctcaaacataaactcacctatctacacataactaattagcaatgtataggcatttcctaatctcacaactcttaatttcatctacacagtgaatgagttgtcgacgtgcaatccatctcaagacttttgcttatatatatgtacaaagctatgtcccagctagaagacagatggcagttgtgaaattacctatgactaaagaaccaagatactttgttcatggctntttgtcatgattatcattgtatataagtattgccttacctacacttcttatcattgtatgatccaagatgctactgcatctgctaccaatgctatataacatagtacatatatgcatgcattctatctgaatgactngcctttatactatct

SEQ ID NO: 32206 - DNA, 241 bp, Oryza sativa
agcttatctcttactcttcaggaatggatcagtcagaacatcaccaccggctcgcctcggccgccgccgactggtgtttccgcctgcacggctggcctattatgccgccgttgttgggcgcctacgtcttcaccgaccggcttgccttcgccgccgccgactggtgtttccgcctgcacggctggcctattaggccgccgttgttgggcgcctacgtcttcaccgaccggcttgccttcgc

SEQ ID NO: 32207 - DNA, 382 bp, Oryza sativa
gttaagaaaggtagctcaaatcaggactcctcatgggaacgatcaaaagcctcgcttcatgatgggacaacatggtgggccttccaccctgatcgtctgacagcaccgtccctactacccgagtaacttcaacaacgactacaatggtggcagtcattacagaagtgagcagggcaacgacaactcaactccccacccattaatggcaccggctcattcataactgccagctgtgtcagctcatccaatacagctcaagaatgagtctgcaagaaagccaggaccctacttcaactatggcaagtatgaccactctgctggctagtgtccgaagctgaatcgcgctatacactatgttcttcatgcccgggtcaatcatgcg

SEQ ID NO: 32208 - DNA, 248 bp, Oryza sativa
agcttctatttgatatatttaacatgatttttttagaaagtgtactgattaattgatctataacaaataaaagccattttgttttactccaaagttctttggtctatgtctatatatctctactaatataaaaattgaagatgcttttgccggtattttggtacatcatctatattaatttgagtcagtttttaagttatttcacttttggaaatagagatccgtgtatgagttggattttaagttcg

SEQ ID NO: 32209 - DNA, 390 bp, Oryza sativa
gataagtggtatatggcatcataattactggaactcttccatcatccaacatctttgacaacggcttcccattgacaaagcccttaatatacaaaggcctaagatgttgatgcttagtttcttcaggcttctcaaatattgcttgttgaggtgacaacactaactacgccattgatacttcaacaacctcctcatcggatgtggaaactttatattctgcaggcaaaataaaaaccatgtttatagaggacgaagttcctgcattatcaatcttgacaattgtaatcttcacacgccactccttccttggactattcaattgatgactaatttcttcctccacttcttgcatctgctacctattcctcaatctttgaactcttctttttt

SEQ ID NO: 32210 - DNA, 236 bp, Oryza sativa
agctttattttttatcaacatatcggtaatgtagaaatgatgcctaccttttgcccaggtgatagcctgctataactataagcgtatcggcgtgtgctatctacggtgtatcatgcctatgtatgccgtattctgaatagtaacgggggcacactgtgaatatgagaggtcagtgcaatatattatcacatataagatgtatgccaacctggtcaccactttaagccttcatgcgg

SEQ ID NO: 32211 - DNA, 264 bp, Oryza sativa
atctgcgatacctgcttatcgcaccacgggtgcatgttgttcttcccccattcaatgcctatcactatctccctaatctagctcctctatatactactctcgtgtgagtatatgttctgttacacatatcctttgtgcatgtgttcgtaaactacgtcccttcatatttcttctgatcacaacccgacctaacgcgcaacgtgaacatggtggatacgtccaattgtttataccgcgctgatgatctcttacacatcgtatgtg

SEQ ID NO: 32212 - DNA, 238 bp, Oryza sativa
  unsure (1)..(238): unsure at all n locations
agcttaaataaggttaattngaatgaaattcttttttctgttgaatcgtttttcaattccttgtcttaagccaagagaagcttaaataaagtcttaaaacattaaagatagggtaggagaggagaggagatacattgctgttttgatatgcccttactgctagcaatttggccttaagacgcaaaacttctaaccgactgcatttccaagtttccactagatacctgtcagagatgac

SEQ ID NO: 32213 - DNA, 240 bp, Oryza sativa
agcttgcattggttttttccttctcttaattccactcagtttgatgtcctcttttgttaactattttacaacggcatagtcctcttttgtgaaagactgaagttgatattgtgttttgtggtaaccattgatcaagaatttatagaagcaaaagttaatccatgaaaaagatcagactgtccgactgcaagcagataactgcatagtttcatctcgagcgctgctacacttcttttacaa

SEQ ID NO: 32214 - DNA, 76 bp, Oryza sativa
tttgacgaggtaaaatatcatgactgcacgtatatgtttgctgtattatactaatctacatcaatggcatgctcag

SEQ ID NO: 32215 - DNA, 242 bp, Oryza sativa
agctttcatgacattgctctttgaaagccgacacaggtttaccatatgccgacgagaggggtcccagaccaacaacaggttaggtcccagaccatactgtgccaggaagcccaggggtcctccccgacaccaccccggcgaatccacatgtctctcggcatcaaggctcccctgataagctagttactcagccaggggtgtcccattccacccatgtggtcgtacttgtcttatgttcggat

SEQ ID NO: 32216 - DNA, 328 bp, Oryza sativa
  unsure (1)..(328): unsure at all n locations
tactaagcttccatcgactcccaccccactccccacggtatggacgactcaccactctggctagccgctctgagttggtctagtttgttctctcctccattgcgatccatgtgtctatggcaatcggccttccagtctaagttattaaagctattgacaagaagcgacgtgccttcctatggacggatacggactctgctcatggggggcagtgcatggtgtcctatgcgaatgtgtgttgtcccaaagctntcggtggattgggaattcctgacctcacgatggcatggtttgctctgcgtgttcgctggctttggctttattgctc

SEQ ID NO: 32217 - DNA, 241 bp, Oryza sativa
  unsure (1)..(241): unsure at all n locations
aacttgtggctggttttttttatctgngcaccacacttgtaatttagacaaaaacatatattttgctttgaaatctgcatattttcatatatgcatgcccccttaattttgcaatattgagtaaacattgataaaattataactggactaagggcgatatgacaaatatcggccgtcatatatcggcatagcataaccgattatgataaaaataaaaacgctaagtgtgatataacttata

SEQ ID NO: 32218 - DNA, 483 bp, Oryza sativa
  unsure (1)..(483): unsure at all n locations
gtgcacatatcgtacaatanatgcaacaactgcatctggtatattttgccctacaatcaatgatagcatgcacaagcccctgtgacataataacaagattgagatcaaacggttgaaacgctacatagttagaaatttgtgatgataatcattgtattatagctcaaatatccagccagattacatttaaagcatggtgtgctggaaagatacctgatgctagcaccctccatagcaaacacagcttcattggataactgagcagatgatatgtgcatggtttttaaggtatgacacgtacgacccatgccatccatcaatgtgacaagatacagacagtcgntactctgctgtgtgaacacatcgagattctctcatggtagacagttatgacctaaatgctttaccttcatgaatatattgacaagatctgtaagtgtaaagtataatcaaatataccattttaaaggaacaaatctgccg

SEQ ID NO: 32219 - DNA, 242 bp, Oryza sativa
agcttcaggattgttattttgtggtagatggttaggaacttaggtgttgtccttgattccctaattcaacttttgcaatcattccttttgacaatatgtttgtcactgtgagctatgaggtgaatgtttagcattcttcttttatggtcttatggcgaggaagtgttgtagcttcatttcttcattatattccttttttggcaaggacttcttctattattcttgtgggctcgtggttactg

SEQ ID NO: 32220 - DNA, 298 bp, Oryza sativa
tgttacactatatatagcaaattgggagcctctcaagagcctattcactgttgatagtggcgtagaaaaaactacatatttgatataattatgcaaattgccatgtgcctatgcgtgtatgagtagatttcacaatgtacatatatatgtgttacacactatcaagtgttattaaaaaaacgacgggacatattcaatgaaaaactacaatatatattttgaacatgcatatatataataccatggtccatggactgttcatttcattctcaccccacagcaaacatacctgaataca

SEQ ID NO: 32221 - DNA, 248 bp, Oryza sativa
  unsure (1)..(248): unsure at all n locations
agcttctggggcttttcttttttctcccannnccatctcagcaacaattaatatggcgataaactcttatactctgttatcatattgtggatatatataagtgtttttttaaggaataagtccactttaggtctcctaatttgtcgacgtcgctggcgtcggtaggctgcggcttcatgcgcttcttcttctcgtatctgaagcctcgataaaccccgtgcgcgggcggggcgggtcgggcctggtgc

SEQ ID NO: 32222 - DNA, 451 bp, Oryza sativa
gcttataacacattcggtgggccacctccacatgcaaacctcgcaacttacattctggtatcatgtgggagcatggcaagtgatggagctgatggaactgacaactacatgtgttatctctcgcaaccacgacgtattgacgttcaccccattgaaccccatccgccgtgactccagcttgctcgctgacctcatacttcatcgaagggaaatcataacatgctgctctttgccccaaagttcgtctttgctgctcctccaacatgtccttaacttttgtgggccacttctttcacacaggatatctacagttgcctctttatgtctatcgacaaaccaactattgcaacttcaaaatgtgtatgccacaatatctgtaaccggcagtttccgaatgcctctcaatacattattgaaactctcggccatattactagtcatgatgctatga

SEQ ID NO: 32223 - DNA, 236 bp, Oryza sativa
agcttgccttctttttttcaacgccactgccacacttgacgctaacgcatgtgaatccgcccctcctagggccagggccacccatcattgtcatagccagatctacaagagaggccagtggcggtggatccaccgctcctgaggccgccgccaccagatctgcgagggagaaggctggctgtgctggtttgcatggaagaaggccgttgccatcgggtctgcgagggagaaggcca

SEQ ID NO: 32224 - DNA, 439 bp, Oryza sativa
  unsure (1)..(439): unsure at all n locations
atttaaccctctatccgaccacatcagcacctctggttctgcatgacgtaacatttcctctatgtcgtatttgtcctcaacagaaccatcgtcatgcaccatgtcttcaacttgtgtcggaactacattntcatgcccgtccacttgttcttctccatgacgtgtccatatttcgtacttgtccataaatctacgagttactaagtgctccttcactttaaaagcatcgtcaaagtcccacgctatttcattcttacagtcagcacatggaccaattatcttcctcatattgttcttctcagcgtgtgccttggcaataccaataaatatatacacttcgtttctatatggagacaaaaatctcggccaatgatacatccattgccgactttccgtatctcttaaagaatacacgtataatatgtgcacaattaatacc

SEQ ID NO: 32225 - DNA, 239 bp, Oryza sativa
agcttcccataatttttttcaagtcatccaactaattgcgattagtcatcctagtcggtactaaggcaacttgattctaaccacgattgatcggaaagtctcctaattagtcgcgattagttatgattaatcatcctagtcggtactgaggtgattttcctcgagtttccgatttgaaaacatgctgccttgttgtggtttactcctagaggtagctagtcaaagtgccaagagactat

SEQ ID NO: 32226 - DNA, 476 bp, Oryza sativa
  unsure (1)..(476): unsure at all n locations
aagcattagcttcaaaaataaaattagttgtatatatataccattacacaatttaatatttaactaacttgtccctctaacataatttatttatcggagtccattccagtgctataactggctataaatatgtaataacccctttttttcttctctcctctcattcttcccactacataagcacaggtacaatgtgacaactcgtataatccatttatatcattctattgcagtcgctttaatacacattgtttgttagataatggaacagagcattccgacttttgctcanaaagttacagccaattattagaatctcatactcaaaatgagtggaaattaaataaatgtgaaggacgaaacctagcagatgaattttattaaggctgtgtttagatccaaaagttggatccaaatttcagtccttttccatcacattaatatgtcatacacacacaactgtgtagtcacatcat

SEQ ID NO: 32227 - DNA, 240 bp, Oryza sativa
agcttgaaattcatctctgctataccgatttggatccaaaatccactcgatatatccaaagaaagctgagctgtaacctgcaagtcaaggtcgagacgttacgtcgagggacgccgatttctgcagcgagaattgagcatatatcaaatgggatgacgggatcggggtggaggatgtaggttgcatgcaatgcactcaggcccgagagggacccatccccgattgcggccacccgggcgt

SEQ ID NO: 32228 - DNA, 245 bp, Oryza sativa
tcaagcttgagctatactcgttattcaaactcaaagacaagggatgttaggggggtgttgtttgcagttggtaaatacacataatataaatggaggcagatttgtttattccacaaaataaagagtaacactctttgtatagatggttgatagaatctaccatgaaggccaaggtaatttaaagagagatgctggatccccatctcggatctcgggtggtgtaacatagcaattgttcttggtag

SEQ ID NO: 32229 - DNA, 248 bp, Oryza sativa
agcttggatttattttttgaaaatagggaaaaggaaaaggtaatgttgaagttgaaattgagctctctcttacgtcaataaaaaaaacattgaactctcatgagctccgcgagaaatggaacatttattgcttgatttttctgcatgtattcctacctttggcagtggggcatcaccgcttaaatttgcgcacagtacattccgttatgctacgaatgcatgctgaggtgcacgatgcgataagccga

SEQ ID NO: 32230 - DNA, 342 bp, Oryza sativa
  unsure (1)..(342): unsure at all n locations
tcctactgatttggtctttttggcttgttcctgggtggattcatgggcattcttgcagaagttggaagcatatcgataaagactgcagttgggagccagacttataagacaggtggcaagtgacatcttctgctctagacatggatggagacctggaatcaggaggatagaaggatgaagatgttattagttttttgtgatctgttctatccttttgatgaccgaatgatgtattcgtgttcagccatccagccctatgaggcatctggataagctctttagctttctttcctcgtatttgttntttgcttccctgactttgtaaggatatgttcatttcta

SEQ ID NO: 32231 - DNA, 236 bp, Oryza sativa
agctttatgtcattatgaaacaatcatttaattagccaacgagtcaactccgggagtcattatcttcgttcttcgcttcagaacaagcattttacttcaacaactccaattatttcactggcaattttggcttccagatgctgccataatctacttcaaatttctcaaatatcatattcaagatttaatctacatgtcctggtcagactcagctttgcacctggatatggctttgt

SEQ ID NO: 32232 - DNA, 423 bp, Oryza sativa
  unsure (1)..(423): unsure at all n locations
gacccactnggcaatgcgtcctacaacatctttgttcctttccacctcgcatanggggaaagaagagatgaccgtgactntgtgggcctagaagtattgaagcggtttccatgatgtcataatcacagcgtagagcagcttctgtatctggggatattgtgttttggcgtcgtggaggacctcgctgacatagtatatggggtgttgtactttgtccctctcgacaactatgacggtactaacagaataaggtgtggcggcaatataaaggaatatctcttccactggttgacggacaaccattacatggggttggacaagtaccgtttgagcgcgataaacgcgttctctacatactgcgtccactcaaatttgtcctacttttaaggaaagcgaagaaaacngttctcgttctccatactg

SEQ ID NO: 32233 - DNA, 238 bp, Oryza sativa
  unsure (1)..(238): unsure at all n locations
agcttttaacccttcgttggnccaacctagcaactactcaaacctgaccggagaagagtctgagcggctctctcctccaggaaggcaagagcaatttcactcgaagaaactcacacgcgcactcaaagggggcggctcgggctccagcctccagcagcagcaggcggccgcgcgcgccaaatgttctacgaaattccagagcggccgcggacgggcgagaagaggaaactggaagagg

SEQ ID NO: 32234 - DNA, 306 bp, Oryza sativa
tgaaagaaaaagatataatctaagattgactgtggcgtcgaggctcattacaacgcgccctggtcgcctgactcatcatcaccgtcttcctcaccactggcatctgcctcctcttctgagctatgggcgaacgcgatccgatgggccgagcccttctaaccagtgacgatgtgtgcagaggcataccagacgcgcgcgcgcgcgtctttctctgtcccgggagggaactcctccaccgccatacatggagagaagttgtggtccctggcctggtatactctcaacactagttcgatacgctcctgc

SEQ ID NO: 32235 - DNA, 242 bp, Oryza sativa
agcttttggttctttctttataggtatatagatataatccaaatttagttgcatgttacaattacgtagagaaatcccattttataatagatattatcatttcatcttatcttatgtataactttatcgtttgactatacaacttcactatttattcttcagcttataagtcataactaaaattttaattttaaaacttaattttgagagttgattttaaatttttatcatagtttatttta

SEQ ID NO: 32236 - DNA, 442 bp, Oryza sativa
  unsure (1)..(442): unsure at all n locations
tctatcctcatcgccgtccgatcagaaatcgacggtctggatgatgtcatggacgtttcagatcatcttctgcacgcatcaaccctcactcacgcatctcatagttcatcggacggctcccgagaatagatgcagaaagtgttacatctcaagccagcatcggatggtccgaatctgcacttgtgcagtttgcatgtatcaaagatcaaatttttagtcttgttgttaattagtgacaagaatntaatttgtgtagcatagagatgtgtatatatatatacttaagtagtagatgatagatagganaaaaggaaaaaagaatactctgttatntgagagtgaaaataaggtcacatgtaattcgtcaaggggacagtgatcactcacgagaaggtagtgtgtataaaggcatagtattactaacattgttgtgtcattttgg

SEQ ID NO: 32237 - DNA, 240 bp, Oryza sativa
agcttttctccgttactttttacttaccattggggcttgtgggcgttccagccccacctaaattggaactccccaggtacccagtccatagacactagcaagctaattcaaataactggcaaggggcagcaagtacgcttggtcttagacatggctggcagctgggactgggaagaataagatgccacactgggctgccttggtcttagattaactggtcaggcttagaagttgggtggg

SEQ ID NO: 32238 - DNA, 413 bp, Oryza sativa
  unsure (1)..(413): unsure at all n locations
gttatcagcatgaagaagaaacatataagtttgtctactgatttcctgtccataactccaaattgaaccattttagttaaaatntattttactagaacctaatataatttgatatatattctcaaaatgaccgagtcagtaagtatggtttttcatttgctccattttctcatcaacattttcaccactgtctaagaatagttgttgattcccagtttcccaccttctcatgatgtacagagatagatgctttaaaccatgttctcgcagttaactggataagagctatgtagattatctcatcttccctttgtaacacatgaataaaagggcatcatatctacagtggtcttattgttaagacaaataaactaatgttgtgtaatttcttttgtattccttggatacctatc

SEQ ID NO: 32239 - DNA, 243 bp, Oryza sativa
agcttgatggagcttttaccgtttgatacttcatcggtcacttgtgaaactatttcggttacatctatgcctaagaccggaatcgttagtgatcatctccctgttagttctattgatgttggcaaaaagaaagggaaatgtgttattattggggatcctcggcccaagaataggacaaaaaatgcgaaggccgaagatcataaagttacaaaagatgactcatctagttcccaaaagactaaa

SEQ ID NO: 32240 - DNA, 245 bp, Oryza sativa
agcttcatctctttgtttatcgggtgcgcggcgatctcgtcgatgaactcggcctcgatcgcccgggacgtgttcatgagcatgccggagctggtcgcgttctcttcgtcctgctcttcccggctgatgaactccacgaattcctttggcatgcaggcctccacggggtggaacttgaggccgtgctcgcgtacgagccggttctcggggtccaaccacccgatgttgtacgacatggccacgcc

SEQ ID NO: 32241 - DNA, 381 bp, Oryza sativa
  unsure (1)..(381): unsure at all n locations
catcttataacctaaaattaaaatggagaangtacttggtttctctgttcatgcatatatagacttcgttctgggtatatatgctcagtcagtcagtctaatactcaaatctgttaaaaaaaactcaatccaaattaaatcttaacgtccattccatccatcacagaatataagaactttatcaatcgttttaaaatataagaacattgtttaaagctagctatcactttagctactttctcatttcaatcaatcataactgttgatctattatttaatttctttatctactctgtcatatcaaccaattataaccatattgtacttgattntgtaatggactgtcttatcttcaccaattacaatcatcgttcatttaaa

SEQ ID NO: 32242 - DNA, 428 bp, Oryza sativa
  unsure (1)..(428): unsure at all n locations
tactaagctgagctatctgtctattaacctctatcatgaaacaatataatatgggtaanaaataatcacagcagctgcactgtgttattcggaatagtgcaccaacatatatgtaatagtatcataacatgcaccggaccaaccgcatatatgaccaatggttcataacaacatgctgcagcacgtcgtatctcgtacgcggncgaccgatttcctactccgtccatgcctaataaaccattaatgccgggttcgaatattctgttgtccaacctctagtttctagtctcacgcacattcttcaaactactaaaccatatattgtgtattaaaaattctatgaaaaagttgcttgagagaatcatattaatctatggaaaagtgttttaactagtactaaactaatcatgttctaatgaagtacctcg

SEQ ID NO: 32243 - DNA, 240 bp, Oryza sativa
agcttatttttcctttgtatgccaccaaaaagatgcagaaccggtacacttattactagcagccttaatcatttgagcattagaaaaatcatactcatcaaattgtttttctactgctagctcccaattaacataagcggcggaatcatacttaccatcaaaaccaggcaatttagattctacccttgcaagatcattatcatgtacctcatatgtgatgcgtgaagaagtcgctatatc

SEQ ID NO: 32244 - DNA, 443 bp, Oryza sativa
  unsure (1)..(443): unsure at all n locations
atatgcactttgtcactgtgtgtgcgaaagatacacgcgtgtgttaaccactgtatcctattccgtaaagagtacgatgatntggacagatgtccaacatgcaagagtagtcaatacaaaacaagccgtatccagtccgatgatctggatgttgcccttgacgatatataagagtccgatccatgcaaagacagtaacaaaaagaagattccacagcttgtcatgtggtaccttccggtgaaagatcgtttgaagcgtgtgttctcaaacccaatggatgccgaattgatgtgctggcttcatgaaaagtgaaaaaaggatggaatgatttgacatcctgcagaggcaagacagtggaaggaatctaacagaaagtatcataagtgtgcagaggacccaagatatgtaatgtttgcattgagcaccgatggaatgaatccatt

SEQ ID NO: 32245 - DNA, 239 bp, Oryza sativa
  unsure (1)..(239): unsure at all n locations
agcttagnaaatttttttttgtttagccttacattctggtaggccgatgtgtatgagttcgtataattcagaggagcttcctatttaccccgaagtggtagtttaggtgactaagcgtgtccaatacaacattattgtgccacgtagtgggttcccgttgtgtccgccaccacggccttaagtttaaggcgtgggcccgccacttaacggttctaggtcatatttccagtatgactagg

SEQ ID NO: 32246 - DNA, 294 bp, Oryza sativa
  unsure (1)..(294): unsure at all n locations
gaacgcaatttcacagaaggtcatcgatccataaagtttatctgctctttangtggacgtggcgcaatgccttatcagctttgagttgatcattccactgtaattcttcaacataatgacgcatcttctatgccaccttgtgatagagatcggtattctatgtcctatgtacctacacaacatgtttcctttcgagaggtacatggcgttctaataaagtacgttcgtaaccgttctcatccggaagcatgcatcgccaatgggtatggaacagaagagatcattgaagtctat

SEQ ID NO: 32247 - DNA, 243 bp, Oryza sativa
agcttcaacattgttgtggcaattatacctcatgagcaagccaggattgtatgggaccacccacctattgtccaacactgcacctctaatttttacacgccacccatcatctctcctcctgtatgaaggatacaagtccttcccttgttgtgttgcttgacagaacggtcgaggaaagctgaagcgacactctctgtccaccatgcaggcgcactttttgtttagctcacctcacgggatgtg

SEQ ID NO: 32248 - DNA, 364 bp, Oryza sativa
accactcagtcgggatgatctgagcggtcaaactcgattgctgtctctgaccatcgaagatattgtggtgtgtcgggctgaacagcgttaatctcccgttcggtcaacttttgctttcttttagattcataagccaaggggccgccaaagatgtggttaagctccttgcggtggtgttgaaaacctgccgtggggtcgccatcgtccttcttctttgacgtgctttgttcttcgtcggagttcttccgtgtagtcttggtgtattgttccgcgaactgtttgtatacgaaacaatctttggccgcgtggttggagttatgatgatgcgggcattgtgagttcatgatcttgtcgaatgtattga

SEQ ID NO: 32249 - DNA, 242 bp, Oryza sativa
agcttcgcgttcttgttttaccaggaacccgggttggctccaaccgaccccgccccggcgttcccaactattggcatgcgaggtttccctgaaccgactagttacttagctagggtgtcccataccaccttgtggttgcactttgttatacttgatgagtttcccacaggaatcggtccttatatgcgaatacgggacaacgccatgcaggcaccacccccacatcgcgagttttcataatt

SEQ ID NO: 32250 - DNA, 382 bp, Oryza sativa
atattatagattagtaataaattaattaatcagacagggggtcggtgcacatgagagacagcagcatggcatatctaatctacctggatcacgcgataggcagagggatttatgggctccgacacgcacaacctatctaatgtacatgcatctagtttaatttggcagcatgaataaatatataattatatatgtacagcactattgttgctgttgttaagcctatcttggttttcctgtgggctgtggcgacgactatggttttagacacatgaaggatctaagaaatatcctataatcccattggttatgtattttcatgtttttctgccaacatttctatttataaacagcattgattctgtttcttgattcatataat

SEQ ID NO: 32251 - DNA, 244 bp, Oryza sativa
agcttctgcttcctctttctcaccggcgagaggggtcgactccgcgatgatgaagcgcccaccacggcggcggcggtggcggaggaggaagcttctgccccgccggccgtcgttgtcgccggcgccggcgacggcgatgacgacgaagacgggtacgtgacaccgacgtcgccgcgccaacggctgcagccgccgacggtgtgcccgccggcgccgaaggcggcgcgttcggcgccaacgcggc

SEQ ID NO: 32252 - DNA, 297 bp, Oryza sativa
  unsure (1)..(297): unsure at all n locations
cgcgatatgaaagaatgggaagctcccgaatcanacataactattgcgggttctgagttgacagaaaacatacccatcacaacgtctggagcatcctgagcggtttcagcttgaatgtgattcacacgtcctctaccaaagtgggtggaatcacgggaaccttgtccacttgcctgatagttatgacgagactgatctgccgctggagtaagagttctggcggtgctgccattaacatgccctgagttggtgttggtatgattctgaggacactgtctatcataatgacccatctgg

SEQ ID NO: 32253 - DNA, 236 bp, Oryza sativa
agctttattcagatctattgaaggctgcaagacaatgagttcatcgacatcagttgaaagtcgaatatgtgcgcacaatttctaaattccaatgaaccgaagtaatgaaagttcattttatccctccatatgtctataagaactctggaaatccttttttctaaataactttcacttcttattctttaaagatcacgttttgagtgcatttcagtttacacaaagagactgaggaa

SEQ ID NO: 32254 - DNA, 417 bp, Oryza sativa
  unsure (1)..(417): unsure at all n locations
tgcttacgcactactgatggcttcgcgcaagcttaaacactacttttatgcccacaaagtcacggtgccatcgcagtatcctttgggcgaagtgcttctgtgcaaggaaattactggctggctcagaaagtgggcggcggagttatctcccttcgacttgcattntgtcgcccgcactgccatcaagtcccaaatcctatccgacatcgtggctgaatggacaccgccattcgcccctgaacctgagcccgttgaacaaccttgggtgatgtactccaatggctcgtggtcgcacaagatggcgggcgctgcggcggtactcacttcgccaggcggcgtgccgattcggtacgccgcatggctacagttcgacacaaccaataatgcggcagagtacgaagctatgctgttgggcct

SEQ ID NO: 32255 - DNA, 241 bp, Oryza sativa
agcttctcaaagtttgcttcatcagagaagttctccatccagagtggcgagccaacccagtcatggtgcgcaaggccaacgggaagtggaggatgtgtgtcgactttaccgatctcaacaaggcgtgtcccaaggatcacttccctcttcctcgaatagaccaattggtggactcaacagccggctgtgagttgttaagcttccttgacgcttactccggctaccaccagatcagcatggg

SEQ ID NO: 32256 - DNA, 454 bp, Oryza sativa
  unsure (1)..(454): unsure at all n locations
gagattagcgtgctattgctgcatcagattgttgatgttggtaaactgtgcatcatcatttcactgccattcttgcgtatgagctatgtgtccttcgagttgtgctagatttttcctgcttgcggttcaagggtgtccatcctcctattgatctcacccaagtcccatcgagaggaagtcgaacgctaccagttggagaatggatgcatgccgctcgaactataataacatgagttcatgttttcacactacacatcctgatgtgcttgccactggttgtctgtcacatcctgattntcgtttcacgatttataaattatttaataaattattaatagaatgtatattaaatgatctctattttcaagtgaagtataatgtgcgaaataaaatttcttatatctatagcatggatgggattaatttttgttaaattctccatggctaagtcaac

SEQ ID NO: 32257 - DNA, 241 bp, Oryza sativa
agcttgcagcagctatgtttttctgctgctactatagtactatgtgcctcgatcctcttgtttcttttctagcataagaatataagtatgcttatgttactttctggttgtgacgagacaatggcttattgtcctcacacgatagctgcagatataaaaaattaatgtagactcgtatacgtcactattgcatccttgtccctagactgattattggaatcttgtgtgctgcttcagaaga

SEQ ID NO: 32258 - DNA, 431 bp, Oryza sativa
aactgagccatttctcaggttttcaaatgtgtcttgcaaatctttgccatgggtttatgcttgtttactctttaccacaatgtcatctacgtatgcctcgacattccgtcctaactgcttatccaagacttttcctatgagcctggcaaaagtcgctcctgcattcttcaaaccatatggcattctgatgaaacaataagttccaaatggtgttataaatgatgtcttttcctcatcctccttcaccataaaaacttggtgatagccagagtatgcgtctaagaaactcattagttcgcatccagctgtggcatctaccaactggtctatccgtggcaaaggaaaatcatcttttgggcatgccttgttgaggtctgtaaagtcaatgcacattctccacttgccatttgccttctttactaacactggat

SEQ ID NO: 32259 - DNA, 239 bp, Oryza sativa
  unsure (1)..(239): unsure at all n locations
agcttactgnagttgcttttttatggcggaggagtgctcgacccatggggccgacaccaccgcctctcggacagactctgaagctgccacaatggacagggaacaggacaaggcgtaaagcttacaggcgttaagcaatggaggaaagcgtaattatgtgggagaaagccgatttatgtaataaaggagtaggcgtgcgtgacacatggcgagcgggccctgcgcggccagaccggcag

SEQ ID NO: 32260 - DNA, 246 bp, Oryza sativa
agcttgccacttatcctagagttccatgccctaagcgcttgctttaatccatacaaagctttatctagcttacacacataatcaggagtggaagggttctcataccctggtggttgtttcatataaacctcttcttctagaacaccatgaagaaaagcattctgaacatctaactgtcttaggcaccatcccctagacacagcaatggacagaataattctaatagttgcggccttgacaacagga

SEQ ID NO: 32261 - DNA, 428 bp, Oryza sativa
  unsure (1)..(428): unsure at all n locations
tactaagctagcagtagtcatcgatgataaacatcacggagctatattgcgactgactgtttgaaaaatgcgatcagcaaatgcataatgagaagaaagaacatgaaaattaagcttataaaatagaaacagagaacaaacagagaaatacaacgtctcaatgtcaatggcatttcgaatacctaaagcggatgcaaaatgatctggccattattggttatacgaagacatcctaatgaacacaagctgcgttagataatgcagtatgtcaaattntacttanaaatactagtctccaaagccatggcgaacacaattcgaacatgcatgttaactgacattgagtaatcggctgacgaagcaatgggcgaaatttgtggcacaacagcgtcgatcaaatagaacaaacaacggccattagcttagaa

SEQ ID NO: 32262 - DNA, 246 bp, Oryza sativa
agcttgacgttgcttttttttgggtctagtaccagggggtaccgccccgggtggaccactcggtctggatgatccgagcggtcaaacttgattgctgtctccgaccaccgaagatattggggcgtatcgggctgaacagcgttaatctcccgttcggtcagcttttgttttcttctagactcataagccagaggtccgccaaagatgtggttgagctccttgcaatggtcttgaaaacctgtcggg

SEQ ID NO: 32263 - DNA, 329 bp, Oryza sativa
ttcaattaaatttcagcaagcatacacttagcaaatgggcatcaaaatagatgttaaccacatagaacatagctccttattgccttccatggcagcaaggacaaaaatccataaatcagatcacattttgaagttcaaattcagctttagaagaataaaatacaagtctatactcatgacatattcatacgcctctcttgaccatgagcacagctaattgattagttttaactctgcagagtacgtacactttacccacatgatgcgaaataataatcatgaaagagcatggcatgcgatacataagtacccgatttattactcacaac

SEQ ID NO: 32264 - DNA, 252 bp, Oryza sativa
agcttatcataattttgctccttacaaggggttttattcgttctttgagcaaaaagataaagatcggatagattcgaaccgcaattgcaaaggtaatcactactatgccagcccaaatcatgatcttcaccaacttggatttggttctctcgcgaaaatcgcgagttgcagagatgagaaccatgaaaagcaagatcccgaataagaaaacagaaaccgaggaaaccacaagagtgaagactagtagagtct

SEQ ID NO: 32265 - DNA, 239 bp, Oryza sativa
agctttacttaatcttaaaacccatgagatggatgttttccatcggaaaggcctcaaacactccatggctttggtagctgatccctctggtagtacttcttctaatgactcagcttttgtgtgtggtggcttctctcttgccgctttacactcagtcactgaggagcaattagagaagatccctgaagatgatcttgctctttttgctagaaaattctcaagagcttacaaaaatgtgg

SEQ ID NO: 32266 - DNA, 426 bp, Oryza sativa
tcacctcatcgcgcaacaccctcctgctgaaggagttgcgcatcttcaacgaagccaaggtggcggcagccactgcgctggtggccggcggcggcttctgctccggttcctgccctcccggtggctgcatctactctggcggtgggggtggcggcagtgggagtggtggcggcgcacgccataccttcccgggcggtgggactggtggcggcggcttccctgctggccaggcccgcaccgtgcggttcactaaccgccgcaaccgcatgggaaatggtggacgcggcggcggaaatggaggatggaacggcggcggcagtgggggtggtggtggcactcgccaggccttctctggcggcggtggcagcggcgtttcctctggtggcggcgggttctctgctggacggagttcgaccggctgggtgg

SEQ ID NO: 32267 - DNA, 240 bp, Oryza sativa
agcttgaccattgttggtttccgaccggtcccactctagctaggggaccagctcccgccccagcaaggctgggacgtcgctcctcctctggccgccgtcggggtcaccgggacccgatctggctggcgggaggccagatccatcgtcgagggaagcagatccgcatccggcatggccggatccatcgtgccgaccatccggccgtcacctcctgcgacccgccgccgccgagaagccccc

SEQ ID NO: 32268 - DNA, 487 bp, Oryza sativa
  unsure (1)..(487): unsure at all n locations
aatgaagtacacaattgaagggacaattgttggtagaactttttntgaatgaccgcactagacaatgcgaaagttctattgatagagcaggataaaattacaagattacaaccctgtgaggtcgtaaccaggataacggataaagtgtaccaccacccacacacagacagatctaacacacagacccatgagaacgctagcaccggaccgaccaccgctaggccaacaaatgaactacagctgggattgccataacctcacccttacaactgacacgaaatcccgctctatccacaactntgggattgagggagagagggtgagagagaagaatggaaccgtgaaagttcaagtggccattaatttggtttgatgattaataacaaatccaattatgtgagactaatggttttataagcagttctttgcctagtctcatgtggatatgaaagtggagtgtgtgagaagtgattcccggatttcatat

SEQ ID NO: 32269 - DNA, 243 bp, Oryza sativa
agcttaacttacctcctcatagaccttgatgtatacaagtaatatataaactgttagcatagtactttcttatcatatcttcccttgggataaaataaatacgataccttggaatactcctgggtgaaatgctgcaatggtatatccgtgcgcttgcggatcacatctgtaaccgtaatataccaggattatttctagtgctattgctgggaattatatttccaatagtatcgctaagaaata

SEQ ID NO: 32270 - DNA, 299 bp, Oryza sativa
  unsure (1)..(299): unsure at all n locations
tacaagcaagaggagttgccctcttcttttctatgcatttgctgctccactccaattggcagttctacatttgcccaattaagagagatatcctacgtctctacagcattgtgccaacggatcacgccttcaatgcacaatgttcttgcacctgatgtgtgtgcatgaccaacttgcttgcttgagttggcatggtcaatgtgccttcctccgctacaatttgcattgtgatggaggagaaaacgacaatgatatgtgaccatgccactgccctatagattcanattatccatcattct

SEQ ID NO: 32271 - DNA, 244 bp, Oryza sativa
agcttgggatctacgtcccgtcctaaggtcaagggggctctgataccaacttgtcacgaccggaaataacccaacgggcgttccttacgtgcgtgcattaatccttgtcccaggaggcaaggtgcaccaaaagttgatacaattcagagtttaacaagcggaagcgtaaataattaatttattacacgggcagcgaaggcccagcacacacaaagacaaacgagaaacagcggaagactaggtc

SEQ ID NO: 32272 - DNA, 392 bp, Oryza sativa
  unsure (1)..(392): unsure at all n locations
ctaagcttccttaatagattaatntccttaaccgaatatagcaagaatttttctatgtgcaactgataactcccatcggccgattctatgactctgaaaccgatattgactctatgccgatgataacttcggggcttaccgaatttctctgttaacagacggctgatgatgcaagactaagagtagatttgtaataatgtgagcccctccatggactataatatgaaggggactagatacggatgaagggttggattcttttaggttagtactatcactttgtagcccggaaatgcctcctttgtacttatcagatctagagaagacaacgaacactaacacaggagtaaggtatcacacctctatgtggactaaacctgtataacctcatg

SEQ ID NO: 32273 - DNA, 247 bp, Oryza sativa
agcttgcatgtagttttttatacagccatgcagatccatgacaccatttatactctgtatttattttcataacactcttctcacgcgaaaaaataaattccacaccttcgaaaaaataaagttcatgcgatttcaaaagggggaaaacgaaacaagagaagagggtagtacaatcttccgatttgagttataaaatgagtcttcttgtgaatgtggaggatgtggatgtgtatgatgtgaatgtaat

SEQ ID NO: 32274 - DNA, 415 bp, Oryza sativa
  unsure (1)..(415): unsure at all n locations
cgtaacagtgaaatgatggaaaatgtaacggtaggggcatggaagggatcaaattgaattttcatgggtatagaaggaatcgggtaaatttcaggggtatgaaaaggattgagtgagttttcaggcgtacacagggaatttactcttcatttattcatttgangggagagagaatgattgctgctgggctgactgccacgttactggtgatacgtggatatacagtgtgatattatcggcctgtggcttgtatggctgtgcgtccggttgctactcgtcgtccaatttaggccatgtttgatttagtataggaatattataatttaaattattaggagtangctgaaataaaaaagtagattattacaatagattattataatctggtagctagaatactataatctaataatct

SEQ ID NO: 32275 - DNA, 237 bp, Oryza sativa
agcttcgtgcaagtttgctagaagatcagttcagagtcgtcgttctgcgaagatcaagtgaagttttctcggagatgacctaaacccaatctttcccagaagagtagttccgttagctttctagatcgtgtgttgtttgcttgtgtgtaggggtatggtttgcatcattggtggggatgcgaccatactaggttgtttgcttaagcaacttaaaccataaaaatctactcacaacag

SEQ ID NO: 32276 - DNA, 503 bp, Oryza sativa
  unsure (1)..(503): unsure at all n locations
tctgtatcgctgatagcataccggcgtgtcggtcatacagatctttcacatttggtctgttttcaacaacacacattntaatgtgccgcatataccatatccagcttgatgtgttctcgctttcaacaaatgcaaaagcaacatgaacgacatggctatccgcgtcgactccgatcgctgttagaattgttcctctgtacttgcctgtcatgaaagtgccatcaacacagatcaaatgaatgcaatttctaaaggcctctatcatggacccaaatgaccagaaagcccgacgaagaacattctgcccatattcattcacctcatcgagaatatccatgtgtgtacccgggtttcttgcctgcatcacctccaatagtgggtgaagattgtgataagaatcctcataagttccaaacctcatctccaatgctttctggtttgccctccaagccttgtcgtacgatatctcatatacgtattctctctcaacgtcatgcattatg

SEQ ID NO: 32277 - DNA, 241 bp, Oryza sativa
agcttttttttttttttggctaattacgtctgttagcttaaacgtgctttaattgttgcttttcattaaattggagctgcctaattacctgcgaatgtagagctactattgatgcaaagagttccgtccaaaaaaaaaactatcaatgcaatgataggtgattcggtccaaatgttatccatgctcaaagtgtaaaattatgacattaacatatgggaaattttatcatccttacaaaaaa

SEQ ID NO: 32278 - DNA, 428 bp, Oryza sativa
  unsure (1)..(428): unsure at all n locations
tcatgttgtacttcatcagcgggtcgtgcttcactcttatgnatgttgaagttccaaggggtgttatccggcacctggtagagacacggaagaaatgtaaaactctcggcagagtaagaactatctccgccccataatgttataacttctggctccagctccagatccgtatgtgcagatatatagccaaaagttactatattctaggacggaggtagtaattcttatgttgttgagtcttgaaaaagcatgcgttagaaaatcatcaaaacataccatgtagaatcctatgaatctgtcactgagaagcatctggaccttctcgtagtgagtcgggagatatccatgtgggttgcttccactgtccttgttgctacggccccactcgtaaccacttggcgtaacttgtacgcggcaatgaacaagat

SEQ ID NO: 32279 - DNA, 242 bp, Oryza sativa
agcttggtgtaatgtttttttttgttgcaggcctgcaaggtgaggccctgcaacagtaacagaactagaaatttcctaagtgcagaatgcaaatattgttccaattgaacattaacaatactaacttaccgcgaagaggtgccatttgattcttaggataattagatgtcaacaaggttgaaacatgtccagcagggtcctttcctttctttccatccagcttgaatgagctttcacgtgac

SEQ ID NO: 32280 - DNA, 318 bp, Oryza sativa
  unsure (1)..(318): unsure at all n locations
aactccttttgatcagctttcataagtataatagcatcatctgcatactgaatcactagaanatcactttcatcatcaggccgaatatgtttagaaattaaacccaactggcaggctctattaaggatntcttgttatagctcaacccccaatacaaacaatagaggggataaaggatcgccttgtcttacccttcttttgcatttaatagacataccatgaactctatttaaaaaggactgaagtacacgttgagttataaatcatgtcaacccaacttataccattatcatgaatacacatatgcctcattatcat

SEQ ID NO: 32281 - DNA, 242 bp, Oryza sativa
atctttctcgcattttctcgtttcaccaccattaacagagttttctcctgaaaggctggttggatctattgcataatttagcagtatgcgcataacatcgacagtacgagcttcgtcttcagcgttcggaatgacataggctttatcacaagatccacgtaatttgcaagcactacaggcctgtataaagcacaaaatattgtgaatgttttttgcaaagtcaaagtaaattatgagaaaag

SEQ ID NO: 32282 - DNA, 257 bp, Oryza sativa
taagacttgaggaacttgttgcacaacattgcactcaagcgtatccattgttaagttgtgagtaagtgtagctcggagttctacgtggatgatcaaccttaatggtctcattcaaccgctggtttataaacaatacattggataaggcaaatctcatcgggattctgaaacttggtgggggattgtcggaattaatgaatgggccttatccaactcgaagaataattctttggataatcacacaatccaccctcatg

SEQ ID NO: 32283 - DNA, 251 bp, Oryza sativa
  unsure (1)..(251): unsure at all n locations
tcaaacttgaatgntttttttttttaaanncccaaaatattgggcattcgccatgcgcacactgttttaacatatgtgcttaagtccctaaaagacacatggtttcaccacacccggaaatatatagcatatgtggtataaaatccgagtaaataaactcataaaggatttaccaaccacctgaaaaatgaccacaatatataatcagcctaagccataatattggtcaataaaaacgcacacttacgtgg

SEQ ID NO: 32284 - DNA, 276 bp, Oryza sativa
attcctggaacgccacctctctaaagcgcttctatgtctataatgggtggcacccaaatcgccaactcgtaataatgtacatactgttatgttagcacttctgcactatgtataccctttggcactatgaaagcctttcagcttgaaatataattgaagatagagagaataacgaataaaaactggatgtatggctattatccaccatggaggcccgaaccagtataaaatctatgtgtgctccgccttcttttaattttttcgtgtgatgataat

SEQ ID NO: 32285 - DNA, 246 bp, Oryza sativa
agcttgggaaagactttatctcgaagggtgtcgtctcacctgcttgcgtcggtgtatatggctgtactttttttttctccaagtgtgtcgttttagctgtatatgcctgtactattgtactagtatcttggttaggtcgctttacatatcactgtccaagtagttggccttctatcttgtatatacgtataaaggccatataaatagaggactaaactgcaaatacggctagttggttggggtggg

SEQ ID NO: 32286 - DNA, 274 bp, Oryza sativa
cactgaatcacttctgaatataacttcatctgcacgtgggccagcttcttttgtgatcatccgtggtgcttgtattctccttatgcctgctgattatgtaaaatattagatataaacctaccagacagctgttacgcatactgaactatattagcaatctctaagactaagagataactgtcatgaaattatgtttggccgtagaataatatgaaaacttaaccttgtatattcataatctgaacaatggattgatcatacaaattattcctct

SEQ ID NO: 32287 - DNA, 250 bp, Oryza sativa
tgcttccatttctttagtatatataactgattcgaacaaacatataaagcaaacaaacgataacctgtaatcacttagtgtcataaggtgaattggttaggggagttttccgtgaaccatgagatcatggtttcaagttttaaattctcttaatttatttttcttttttttagaaaaaagaaaccggatggagagattaggaggaggagccgggaagaggagggagagaaaaaaaagaaaaaaaatgagg

SEQ ID NO: 32288 - DNA, 239 bp, Oryza sativa
agcttcagttttgttatttggtcattaatgtttaagtcctgcagccaccaatattagtgatgttagtgatttgctagaagtcacatttatttagcgtgtgacttgatagaatagtagcaagaggtgtatgattttaacccgaggtcttgtatttaatcccaacacatttacaatttcttcttaataaatgtttttgtgtgtgtgtgtgtatgttaagaggtgccctcgcagctaagtaa

SEQ ID NO: 32289 - DNA, 239 bp, Oryza sativa
agcttgaaaggggttctttttctaggacttcttggctaagaggatgcttgctataagaagtataagtaggcgggtaacgtttcatttcttccatagaatctcaatatggcgagaatgaagcagggcaattaaagtttgaattcaattcaatagtcaaggtagagtagaaagggggggcgtgctacttaacgcaactgcacttggctaagaaaataggatagagcagagagagcctaatc

SEQ ID NO: 32290 - DNA, 318 bp, Oryza sativa
  unsure (1)..(318): unsure at all n locations
tcngatgtgcatcgactacaccgaccttaacaaggcatgttcttttgattcttaccccctgcctcgcatagatcagattgtcgactccaccgcggtgtgcgaccttttgtgttttctatatgcatactctggttaccatcagattcgcatggctagggaggatgatgaaaaaactgcgttcattactcccatatgaacttattggtatacgacaatgcccttcgggttaaagaatgcaggtcctacttttcaacgtactactcgaatttctttgggtagccaattatgacgtaatgttgaggcttatgtcgatgactt

SEQ ID NO: 32291 - DNA, 242 bp, Oryza sativa
agcttcgcttcatctttgaaagtgaattttatggcagaaaaggaaaaaaatcataatttgccctgaaagcaaatgcaaaaaagagccgatgtgtatattatcatgggtaaacatatatgactattcagctgaacccgttgtgtcctggaactagtcttgctgaaagattagctgaaagatggtagtgttggttatgggacctggcattcttcactaaaattccatttaaggttttataacag

SEQ ID NO: 32292 - DNA, 378 bp, Oryza sativa
  unsure (1)..(378): unsure at all n locations
gtatntatatgcgtaattctaacacgaacgaattatttatattcaccacaatagtccctctttacaagaacaatacagttaggttgggtgattattntcttaaataaaaaggtttggataatcattggactactaacctacttcgtatgctaagccagagaatgccgaacaacggtgcccacccaccatccacaataccaaatggtccgtgtcanggttcgtctctgattcaacgaagtagtagaagagctcagtgccagtcttctcctcgataccaatatatctacagtgtacacatgtacgtgcatatgtacccaattcttacatgatgaatttatgctcgtataatatgtaacagttgaagaaaatgggactctc

SEQ ID NO: 32293 - DNA, 245 bp, Oryza sativa
agcttctacttctttcttaaccgagaactccatcgccgagagatctggcggcacaacaactatatcaaccgagttacctcagcagcagcagccagtacgtagtcccggtggtcgaggcatgaggcatcagtagtcccacgtcaaggcatgtcacgacgcggacatgatggacgttgactgtccaacatcctggacgacgacgatgaccacgatcacgccggggtcaagcactactacatatccgg

SEQ ID NO: 32294 - DNA, 285 bp, Oryza sativa
cagcatcagagcaaggtttattattaagccaacaatgagtttataacttatcttaagttaacatgtatagtaaatgggctattaaggtaccctctttttttttctcactctctctctatctctcacctatgtatttaatgtatttattttgaaatatgtgaataactaacttttacaaaccacccctctacattttcaaatacttttcctcacataacttatagttggctatatccactatttacctgctctcacttataccaataaattaacagcgcaatatat

SEQ ID NO: 32295 - DNA, 246 bp, Oryza sativa
agcttcccgtttttgcttgcttttatcttttccgctgcatttgtaatcttttctatttttgtaagacgtggatctgtatgtcaacaattgtcgtttgtgtaccctggctggtcctggacagggatttaatgcacattcagcttagaaattctggttcgagaatttctgggcgtgacaagttggtatcagagccgaccttgaccgtaggacaagccaactggaaaccctaagagccctctgaacccc

SEQ ID NO: 32296 - DNA, 235 bp, Oryza sativa
agcttgagattaataatttgcaacagatcgtagttgtgctagcaaatcaagcattcagaaactataactgcctgccttcaactgaaacacccccgtacgctcgctgtttggtttacagggatttattccaagcccctgtcacatcggatgtttggacactaatttagagtattaaacatccactaattacaaaactcattccataagcttggactaattctcgagacgatttttt

SEQ ID NO: 32297 - DNA, 454 bp, Oryza sativa
  unsure (1)..(454): unsure at all n locations
tggactgtacagtatactgcaacaacaatattgcttttcaattcattatcttaaaagatctacattaggttcattgttgagcttatttataattccaagtctcaatctacataggaagggaaaatatcatcatctgggaaatccagataaacaaaagatgacttctatcgattgtttttgtcatggttcacagagacattggaactacctatatggttgtgttgtcaactccaatatctcccgatagcaaaacccagtaaaataacggtagccatatagatagaggtgcatcnatttgcaaagttcaattggtacaaatgctcagttgggaagacaaaccttgaacctacttctcataagtcatatcacctactcccatctacctttgtgaacctatactaggacagagagacgcacaattagtgaagatacctactacctattaatcaataat

SEQ ID NO: 32298 - DNA, 242 bp, Oryza sativa
agcttgtttttgcttccacaatttccttttttattatgtgccagcagctcttgtagaaagctccagtgaaaccatctgggcccggcgctttttcctttggagagtttttaattgcttcccagatttcatcctctgtgaacggctcatccatgctatcatcttgtattgtactcagtcctaatgcttcccaatttaatgtgcagccacgctgtcttcttgtccctaagattgagttgaagtgg

SEQ ID NO: 32299 - DNA, 492 bp, Oryza sativa
  unsure (1)..(492): unsure at all n locations
gctgtaatgagggcactatgcagggttatgtngagaattgagcttattagtttatgcaaaccttcactgctagccatctaacatatccagatctcctgattgcatgcattgatggagcataacaggtacaagcgggcctcattttcacagaagatgaagttgagtacatagtgcgcaatgttctggccagtgttgaatcatctctctctaatgcatcatacctatcgggaaaccctcctgagatagtggtgtggagtgcctcattgtatgactacaaggtaattntntatctcaggttatcattccctattgctatcctctagcaacctatatatgtttggcatgctgaaatcattccaccagaatccgatggaattgtcaacatcacacaaccaatttttgaatgaaaattaccgatgaaacacctcttgctgcccgtcttacctgtctgacattagatagaacaggngatttcagtctcttttttttggt

SEQ ID NO: 32300 - DNA, 241 bp, Oryza sativa
  unsure (1)..(241): unsure at all n locations
agctttgggtggtggttgttgtttggngatgcagccgacgggtgagaacggggcgacgcgggcgccgatagtggtcgacctgcagagggatccggggctgagcagcaaatccatcgtcctgcagatcgacagcaagtcgcagcaggtgtcggcaagtgagtgagatcttcccttggctagctggatctggcaatgggcgccggctggttggtgtgctgagtttggtggccctttctggtgg

SEQ ID NO: 32301 - DNA, 457 bp, Oryza sativa
actggacaacgagaagtcgattacttatgtatgaaactgcaaagagcatcatagcagcaaactgacaagaagactgatatagttgatggtgatgagaatggctcgagccaagaagtggtcgagagggaaatcagtgaagcatatgatattgatagagatgagtctgagcaccaagatgacatgttttcccaatatgatgaggatgagagtaatgctggcccacgtgtagattcttcatacattgaaatggaacctgagatggataccgacagtgaggatgatgattctgtttatgaaaccacagatgatgatggaccagtattatcatttttgaaaggtgctgatggttcatctggattgaacgcatcatctaatgctatatcaagagtgtcatgagaaccggaagcactgatgtaccagcaatgctacaatttataaagtcaagtcatgttcttgt

SEQ ID NO: 32302 - DNA, 242 bp, Oryza sativa
  unsure (1)..(242): unsure at all n locations
agcttccaaagtttggcatctttacacttgngctgaacagcccgttgatttataaatgatgcaagattctaacagttacggtgaatttccttgcggtgatatacaattaaatcagtaaaataaaggaaacgaatttgcctccctcataggcacgccagccgactgagacatggctcaggatgagaagatccccgttcagatgttgaacatggaatcttaataaagatgattattctattctc

SEQ ID NO: 32303 - DNA, 385 bp, Oryza sativa
cattatctgatatcccaccggatgatatgggagatattgttatatgttaacgcaggtgacgcgataatactgagatatctttgtattacagcacaatcaatatgaatttgaaacataactgatgaaacagaactacatactttgccctctctaatttgactttacttaaacatatagcatcacataattagctacgtaacaacatgaatgcatagcatccaactcttactgcaaatacatatacgttagcacaaactacatatatcgacaaattgagatagaggggccacgctttattgcatgaacaacatttatacaatactctaagtgatcagcagattaatagcaaacacataaagctaaattattattggtgtattggaac

SEQ ID NO: 32304 - DNA, 156 bp, Oryza sativa
  unsure (1)..(156): unsure at all n locations
gcaggagaggccagcggaagacgacgnactaccagccgcagactcggagcgccgacgagccaacgacaacacnggcgacatgcgggaactgcaacaaccactggaagntctgctgagcgccaatctgctgaaaatgttctcccggctagcggtgtc

SEQ ID NO: 32305 - DNA, 250 bp, Oryza sativa
agcttctacttatttccttgtttttaagcaacatatagcttgactaactgtatatgtctattattcttcttggcaataaactttctttttgaagcttttctttaaaccattcgctgtttagtctcaaggagatgtcatgaggaatagaatagtacctctgttcttttctgtatcgaaattattggttgtttcatgttctatgatgtgtaactttgaattaaactctgtagaacttaatattgttacaact

SEQ ID NO: 32306 - DNA, 239 bp, Oryza sativa
agcttgagcttttttttttcgaggtatgctaccagagtgattgcatcggctaactcatctggaatcttgtcatggatctcatgaaatctatctcggatagatccacaactagtaactagagtttctagagaaccctcaagccgttttgaaatatctagcaaagtagacttagtgtcatcggctaggggctccaaggccttgcttgtggtatcttcttcttcatccatgaactgcctgat

SEQ ID NO: 32307 - DNA, 428 bp, Oryza sativa
tggagaagaattctagggggagtcgtagatgatactctcattgagtgcctgtgaagatggagccgcatgcccgctattccgcatctatttatttctgtttgtcacgccttaagtgcacttgtaatgatgtaaatattattgccttttgtatcatgtttgttgaagtgtaccctgctttttcctatgacggagatcaaggcactatatattgtaacaaagtatttttccaatcgcgacaaaaaaggtgttttcatggtagcacaatataattatcagtggcgaccaaaccatagattcgcttgtgaaaatgtaacaaaggggttgggggataacgaccgccagtgaagatcgatcctcgctggtggctgggtaatgtgaccgccagcgaatatacaccatcttagtgtaagtgtggtgcttagatatta

SEQ ID NO: 32308 - DNA, 239 bp, Oryza sativa
agcttacctgcatttgttacaagacaggtaaatgcacagatagacctacacatcgtaaatgacctgccggagctatctgtccagattgctcagtgttctcacaaaataagctatcagaatgttaacagactgcgattggcagatttatatttgaacttcatgcagtgatgaattaaccatatggtaactaagatctgagtacagtttgcaaacttgggcatataaaccagacaagctct

SEQ ID NO: 32309 - DNA, 482 bp, Oryza sativa
  unsure (1)..(482): unsure at all n locations
tgatcgtcgggcaaagcgtggccgacctatgtccaccatgctgaagtccncaatagatggtggagtccgaataaagcgcatttgttcgaactgtcatcttgatgggcactatataactggatgccccacatatccggataacacatcgtaaaacanagtgatcaatgtgtgcacgaaatgcaatgtagctggtcactatgcatcaacgtgtggtggtggtgtatagaagcaagtctatcgttggttttaaatacaatcttgtaaaaatattcccatatcttgcgtgttgcacttggacnaagtnttaattaaattcggatatgttttctatctcataattatgtcattcatcttgtgggatatacatgtatacgtgttcgctctgtcactcatatacctatgtgtacatgtacacctataaaagacagattatgtcattaatctngtggtattcagacgtgcatgntttcactctctctcta

SEQ ID NO: 32310 - DNA, 245 bp, Oryza sativa
  unsure (1)..(245): unsure at all n locations
agttngatctttggtanctcccaagtaagcttgcacctacttgttcttacttcttgaaccttaatgaatggattcaatcattcaaacacaaaaactccaaactttagaagttcatttttaaagatagcaagaggaagagaatattttctttgtagtttaaggacatcttaggaactgcaaattaaacataagagaaaaactaaccggcttatgtgatgtctagttgaatagaaactagtgacact

SEQ ID NO: 32311 - DNA, 462 bp, Oryza sativa
cggacgtatttgtagaatctttatttgtttatatccacttataaataggaaatatatgaaatacaaataagcatactgttgtttcatgtctgattttgcaggttcatacctcaattagaatagcaagatcaacaacaaggcctgtgacatatcccatgactataccaataatgctccgtgcaacggatgaagaaccaatgtcaacatctatctgcaaagtatatgttacttgtgaggtcaccgaggattcttttaaataaatattaatataatataaatatagtactcggttttttcccaatctaaaacaatataatttatatattgagagattcccgattatgcacatctttaagtagcttgagtcaaatttgaagcaacatgcacagaatccttcctctgttaatataatttcaaaatgtcaagatcacaaagcaagttactaatcactctaaagtatct

SEQ ID NO: 32312 - DNA, 245 bp, Oryza sativa
agcttggtttattctacttacttaccttttactttgattttctaactttattcaaattaatccaaaaacttgtgctattaaatggataaatgtcttaactccctcctttcacttgtctttagatgccgcgctacaagcctgagtacttgtttggtgttgagggatttgtccaggagttgcgtacgatgtcctttgccataggatttgggactgcccctttttatgcccagattcctcatgatcat

SEQ ID NO: 32313 - DNA, 463 bp, Oryza sativa
  unsure (1)..(463): unsure at all n locations
cacaatgctatagagacgttcgatgcatctctttttgggcaatatgcaagtgccaactggagtggagcatacacctatataagaagatggcatttcctcttgctcgtatgcatgtatgtgttgcgggagcgagatgtgtgcacagctatgagtggatgaatgctagcttatccaatgcggcacatgacctcatgatacgggttgggtgtatccaggcagcataatcactacttgcgatgtgcatagccatattttatagactcgcacataatgtggtcttttatctagatgtagcccgtcaactctcttgcgtngtttctcttctcacatactttaattttttaattttatttcttctgcctctcttttctttatgattcttttcttctcagcaagggtaagactaacatcaactacaacccaagatggtcttggttgatgatactcgtcatgcaagctcgtc

SEQ ID NO: 32314 - DNA, 243 bp, Oryza sativa
  unsure (1)..(243): unsure at all n locations
agctttttttttttttttaaagatcngattggataaataaattgaataatttaaaataaacttaatagatagtttaagattagtggtccgagtagtagaattttttttaagaaaacgtattttaaaaatgtgaaataagtaatcaatttcaataatctgataaataattaaaaagagcgtggcatggcttatgaccttatgtagctaagtggttttaaattttcccttgcccactcaggcact

SEQ ID NO: 32315 - DNA, 439 bp, Oryza sativa
  unsure (1)..(439): unsure at all n locations
cccgtaatgcttaacaaagtgcatatactttgtatnntgtggttactgttacaaacttgagctaacatttggagcagaagagttggagcacatggtgttacatgatcagttntgtactcataaaccatctctatggagctttcatatttccgtcttatacattgattgggtcctcggctaatgatatcaaattgcatctctnttatgtttattggccgtcaggtggttatggatggcgcttgcactaattccgaaagtccaacctatacctttctgacattgctcaggaatcatgattatnttttacaaatgaatggtggttntctgcatgaacccccacaatgttgcagcacataatcctaagccttcttgtacttatgcagagattggattgtgactacagctggttattatcaatacttgtacagtagctcatgct

SEQ ID NO: 32316 - DNA, 236 bp, Oryza sativa
  unsure (1)..(236): unsure at all n locations
agcnntacttattgttgtatcactgngtgacctgtgcaatccatgctcacatcgtccgtgtccgctcccgtgagaaccggagggaccgcaggcctccggaacgcttccgccgcagggtacctgatccccgcctcttaactattatatctagcgcttaattgatagtgtaattagtatatcatgatcggaacgatttcctttatctgttactgcagatttaagaaacaaagtctgat

SEQ ID NO: 32317 - DNA, 179 bp, Oryza sativa
cagctggctacaattgatgttcccgcaactctccctacaccatactgtgatggtgctgatggtcttcttctgattgtgagtatatcagactgtcatcgataaaaaccacaacatacttgtccaagtattccatgaacactttattcatttaagtcatgaagaacgcaggagcattggtc

SEQ ID NO: 32318 - DNA, 244 bp, Oryza sativa
agcttgaattattgtgggaaggaccgtacctcatcaaacacaagtccaggacgggatcttttcgcctagcgacactcgaaggcgaggagttcgaccattcctggaacgccaactctctcaagcgcttctatgtctagaatgggtggcacccaaatcgccaacttgtaaaaatgtacataccatcatgtaagccctttggcactatgtaagccctttggcactatgtaagcccttcggcactatg

SEQ ID NO: 32319 - DNA, 447 bp, Oryza sativa
  unsure (1)..(447): unsure at all n locations
gattaggagttgctattatgctgcatatctcacagatacatgtgcatgggatatgtactctctctctcagantaaataatctttggcacgatggcttacccttacccctgattcctacgagacactgcttctccttgccttgggtggtttgaagacagtatagcaattagagcaccattcacccaatattcattcaactcttattccggaagatttcaaatgattttcgcaaaagatacccaagttcctcacatgattcactcagtctctctaagtgtatcaatctcttgattcctcaccacattttgactttgtgattcctactctaacagtttgatatgtggagctcggtagggaatcaaacatgtgatacttgcattcacatttattactaagtcaanaacttatactatagcagatgactatacattctcatgatcaagatcg

SEQ ID NO: 32320 - DNA, 242 bp, Oryza sativa
agcttcgtgcagtttgtttctttatgttcagcccagagtcgtcgttccgcgaagatcaagtggagttttcccggagatgacccaaacccaatccttccgagaagagtagttccgttagccttctagatcgtcttttgtttgcttgtgtgtaggggtatggtttgcatcattggtggggatgcgaccatactaggttgtttgcttaatcaacttgaaaaataaaaatctactcacaacagatc

SEQ ID NO: 32321 - DNA, 341 bp, Oryza sativa
  unsure (1)..(341): unsure at all n locations
cattaccaccaattaaacaatatcaatattcttctcacatacaacaagtaatatgctagccatgttccccttgcaaccggtaatcacatatatagtttgccaaacaaaagcacatttagttgcaatggacatcagcctcttccctcactatgggcacgccatattaaactagtgcatgttcattcaaatcatatcgagaagcatgtggtgcaactatttccacttgtggagccacaaccaccgaagataaagcaccttgtgcgtggagcttgatgatgcggtttctaatggcctcccggagcttggccacactccgcttgacanttttgaccatctcggga

SEQ ID NO: 32322 - DNA, 243 bp, Oryza sativa
agctttttgttggttattttacgattcacaccacgttcaagtacaacaaaaggacagtacctttcacgcccttatctaatatactcgtgcttcaaaaatagctgacagcactaatatgtgttgggcattgtacaataggcagtagcacttaataataacaacggcatccacgttactggaggagaaaaggctactggtttggctccataagctgacattagccttgaggaaagctgcaagata

SEQ ID NO: 32323 - DNA, 382 bp, Oryza sativa
tactcagcttaatagtgcacacgcgatagatgcccttgtgtttatgctgaaatgctgtatgaattacctgccctatcatatgagagaatatgaatgaggaacaagaaaggcatcaatatttcgagggggattgcctgattgaactagcgacgagaaccgattcattcttttctaatgaatacgatgttaacacaaaaccaaacgcccataccattattatgcccggtgaaggatcataatcactattgccctctgttatatcatcgtcatatcattattgtgtcggtgaacgatgataagctcaagtggccattaatatctgcaaatatgttatttttaccacttactatcttaatgatatcagcatttggtcaatcccgtt

SEQ ID NO: 32324 - DNA, 243 bp, Oryza sativa
ctgcaagcttcggaagatcttttttttgcaagccaccctttgatcaattgcccctataattgaaaagtcattattattttgttagcaacttgcattattataatcacacacttaacttgcttggcctcggtttgcgtgccaaaccgacggacctacccagtaatcacactaatttccgtaggtcgtactaccctgaatccttgtcgctccacccttggggtacctcggtattcgtgctctctg

SEQ ID NO: 32325 - DNA, 249 bp, Oryza sativa
tgctttccataaagtcttttttcattggaaactgagtccgaagcaagaagttatggttttttcttcaggtattgtcaagtggtcatgagactccgggtcgagaccaagagactccaaacttgtgcaagccggggcttacattacaggagactctggaatagaacctccaggcacccgaaaaggcttcccaaagactctgggccaaatctaggagattctggcctctgtacttacttgtgcatgatggct

SEQ ID NO: 32326 - DNA, 308 bp, Oryza sativa
cagtccctcgagcatcaatccgcagttagaacagtaattcatgtacctttgcttgtgattggcattgacgtgagaacccattgctatgcaattgcagttgaacaattaatctgtgtatgtgtttctcttcatgagtcgccttgatttgtaaaccgagcttgcagtcttatatcttccactctgccttttataataggggatttcgagttgtgatgggttgaggttgattatatgcatcatatgatgctttgtcggtggtggtggttctttcaatatggaatactgtcctatcgtcattggaagcgtgc

SEQ ID NO: 32327 - DNA, 250 bp, Oryza sativa
  unsure (1)..(250): unsure at all n locations
agcttcccgtttnatccctcttnnancnnnnccgctgcatttgaaaaaanccacatctaacaaataatctaacagaaactacagacttatgacaaaacaatcatgcaaaaatggcgttcgagtttgaccatcaccaattttgcaatgtatatgtaatataacaatgctatatcaaacctatttgagaataaagttcaacatatatttcaaacttaaagactgtgtcaatccataaatctggtttggggct

SEQ ID NO: 32328 - DNA, 338 bp, Oryza sativa
ctcgtcagagattccacataagaatatgatgttggtgtttatttctgggctaccgctagacaagactctaatctataatattttaaagactctgtgatggtggttatgccataccctgtaagtttaagtgccttaatatggttctgttgattaatgacaaatctaattatatgagactaacaattttatgagcttttgtttgactagtctcatttggatatgaaagtaaaaatgatgagatgtatgtattaaacttcacatattctaacttggtctctctcgtggatccaaaatatagtgtgagctctctcattgatactgattgattatgtgcatat

SEQ ID NO: 32329 - DNA, 236 bp, Oryza sativa
agcttgactctcttattctatagaatatcatggatatctgattagtaagagctcaatagttggcatacaaacaaaattaagaacactggtctatattttctgaaccactatcatatggcatataatgacctttatagcattattgaatttgtcggataactccatccgcatattctgcccctctgttgacacccttcggcactcttcctgagtcatcaacgctaaaagatattata

SEQ ID NO: 32330 - DNA, 457 bp, Oryza sativa
gacctataatactcaagcttagggactccttgctctggcgagcgcgagccgtcacgtgttcaccatcaccattatcatacctaaggctcgggctgacgctagacctcgtgctttagctattagtgtacattggactatggcgtacattgttccttgtgctcgtgctgcgcccattggcacgcacagggcttcggtagccgtcatatgggctcctgctgttctccctgcccacatggctgtcaccattgcgctcatcattatacatgtgtggtgggcttacccgatcctgctgactccttggactcgcgctaccatactggctgggggtgcgctcctttacacttgcttgtggggagatggatcgcctgagactttgctgtatctaacactccctgatctcctatcataactatctctgcgtaccctgcgaacacagatatggatctcgacctacatc

SEQ ID NO: 32331 - DNA, 239 bp, Oryza sativa
agcttgcactactttttctacaggagattagtgccgcccggccggcctggaaccacaatttcaagggggcttgctcggacaattatacttggcattattgattatggctcaagagtactatacatcatatagatacggcgtcataacaggtcattggatggaaacgaattaggcatgcgggtacagcgtgtgtacttcctccactatccgtgaagtggaagtcaatttctgcaagattt

SEQ ID NO: 32332 - DNA, 509 bp, Oryza sativa
  unsure (1)..(509): unsure at all n locations
tatacctatcccacaacaagctgagtggagcaataccatggcagttatactcgttgtcatcactgtccgtgttctcagtgatgtacaacaacttatcatgatgtataccaaactctggtcagttcggctcatttgatatggatagctaccaaggaaacaacctcctacacccatcgtcagaatggagcgagtgtgctcccagttcatgtcattcgctaccggatgatggagatggaaagggaaatgatccaatcctttacgcggtcactgctgcctcgttcgtagtgacattntggattactttcgcattcacaagctttcgaatgtagagcttcagattntttaatacttactctgtcgctatttatgcgcagccatgagtgtccgtgtctaactttaattgtcggtcttatttgaaaaanaatcatgattaatatcttattgttattagatgataaaacatgaataatacttacttatgctctttaaatttttcagaannaatcaat

SEQ ID NO: 32333 - DNA, 247 bp, Oryza sativa
  unsure (1)..(247): unsure at all n locations
agcttataattttttcttgataattnttggataatttaatggaaagcaaattcatttgggaactaataaataaccaaataaatattcaaatcaaacatttgaattctcaaaaccaaaatatattgattacatttcaattcaaattcaatcccattcacttttgcagattagcccctccctttccttcctttccctttttcttccttttctctcttttctcagccgccactattcaatgtccgccaac

SEQ ID NO: 32334 - DNA, 160 bp, Oryza sativa
tatacccaacatgcactgttcattgtcttccttatctcaatgcgaaacaaagaggatggaagatgggcgccggtgctccggcgaccatatgacggtgaggaatgtagtttgacatgttccacgatatgactcatccatagatgctgaatgttggcaatga

SEQ ID NO: 32335 - DNA, 248 bp, Oryza sativa
agcttggtgagtgttcttctgagaaaaggatgctataccgctactcttctagctacggaactcaccgcacatagaaaaacttcgcccgcgactcaccaaggcaagatataacacctcccccctatccacattgccgattacggtcacggcttgagtcaaataggctccttatgtacacttgtcaccaactcggaactgacgagtcagagaagttcccaactgctgcagcagcaataaagcctccatgc

SEQ ID NO: 32336 - DNA, 375 bp, Oryza sativa
tttctctggcacgcatgctatctgggcccccttccgtgggcttatatatttttcttctgttcacgctcttttttttcttatgttcgcacttattttcgccgttcctttccttgtttttctctgaatctttcgcacacctctttacaaatgtacaattgaaagattttaattatgacttgaaagatctcaaatattgtattgaaagctttcaaatttgagttgaaaattttcaaattttgagttgacagattataatttgaattgaaaatgttcaaataagggtcgaaagtttctgaaattctagatgaagaagtgaaagttctcacattctgagttgaaaattttaaatttgagtgaaagtttcaaatttaagtg

SEQ ID NO: 32337 - DNA, 245 bp, Oryza sativa
agcttaaaattttttttaaagctcttaatcggagaaccgatcctaggcggaaatttaaatgtccacactactcaatcactcactcatttttttatgggcttctaaattaagagaaaagtacaaagaatcccttgagaaacacataatagggataaactcaaagttgttttctatcatatatcattataagagcaagttttatagtggagatggcaactatatctccagttttagttgcatcatcc

SEQ ID NO: 32338 - DNA, 257 bp, Oryza sativa
ctaacttaccctttttatcctggccccttgtttttatgctttgcgggggtcctgagtacgtgatgtctcattgctatctttcctttcataaaacttggaaaaagtttagggagtctgctttcccattgacgccggaatggtccgttgccctttcgctgctgtattttgatgctgcctattccttgtatatgtaaatttcatctaataaatgtgccttgttctgttgttgggacccggtttctggacggattaacact

SEQ ID NO: 32339 - DNA, 235 bp, Oryza sativa
agcttagaataattcggttagaactccgatgaatattgcataaaaacctatcgacttagtagaagtaaacttattagcaacaatctaatagatcggatctaaccgagacggtatacaataggatataataggaaaaacttatttagccgatagatctatacaaatgtgatggatgtaccagatcaaaccaagtgatcaagcaatgcagccttagccaaagctgatatgtcaagat

SEQ ID NO: 32340 - DNA, 491 bp, Oryza sativa
  unsure (1)..(491): unsure at all n locations
ntggagtccatcgttaacagccaagattggatcgctaccaatgttcttacgcgtcgtaggaggctcatgggctgaacaaacccgcgccgagataatgagtcggatattaagcccaaacattccgtgagatggtaagtttcggcatgtataggcatcccacgtactacaagtttgctgtgaaaatcatacatttaactcaacctcatcagctaatggctcaagaactgatgccaccttacccatgttcacgccttccagtgttgctggcttacactttggtttctacagatctatctatatctctattgctggctttgtctgacagaatcagataatttaatctgtttcaactagcccaatttctatgtagaaaataaaatgtggctatacattcaagagcattctactgattcttttttcaattccatacacacatatccactccgtgacatattcggcgtcgcaatgctcttcacaataacatgtgtcat

SEQ ID NO: 32341 - DNA, 261 bp, Oryza sativa
ttaactgacgtgtggcactcaacttgttttttttttaaagggaggctatccgaaacttctcttgctaggggtcacaacggtcttatgaacccgaatcctccggatctcgcaaaccatgtatgcctttttgccttgaacacatcgacccttactattaattgatcattctcatacactccatatgcaccagttgtttataccgtggctctgtggagcataaaattcacatttctgattttctgggagcttgtactcacatca

SEQ ID NO: 32342 - DNA, 323 bp, Oryza sativa
  unsure (1)..(323): unsure at all n locations
agcnttgtaaattcanattcaaaagaaattcgaattatatccataaatatgaaaaaatgaaataaaatgataaaatagcaaaaatagcctcaaaaaatagagaaagattttagaagaattttggtccaagtttcactggaattgggtttatattttaaaagatatgggcttctaaattttggaattcacattaaataggaaaattacgaaaatttactgttgaagggcccacctgtcaatcttcctttctttttcttttctttttctctctcctctcatcttcttcttcctctcttcttttcttctctttccagccgagcaac

SEQ ID NO: 32343 - DNA, 391 bp, Oryza sativa
  unsure (1)..(391): unsure at all n locations
ctgattgctgntngaagcagatgacggtcttctgcttgttatcgccctcctgagggttgatgcccttcgctcggcctggagtangtcggggagagaaacaacttcttccatcgacgacaattctttgctgaagctgtcngtgcagagaatggttggtgctgaaggtattattgctatgatttattgcagagtcatgtgcagcangaggagcattggtgctgtggatgatatcgtcgaggttgctgttggagctgactagctgatgagacaatcgtanggttgttcgttggatttctgcggtcttggtcaacaacacactgagttggcaatccttgtgcacatgngttgtaccttcgcatagaaaacatgtgaccttgcgggtgggacattc

SEQ ID NO: 32344 - DNA, 395 bp, Oryza sativa
agctctaagtgattagtgagatgtaactgtagaattgaatggtttcaatatatgaagtgttgattatgtccactatataagttgagtagtgcttctagataaacttgatagtggggtttagatttattcctacattacgaaaaactccctataaaagtgttaacacctaaattagacaccaaacattgaaaataagaaaacacagccatatatagaaaagacccggtttgccatatgaagctggtttgagccctgccatatggttgattagaccgatggtgtgggcccaatttgaccgacggtatgtggccggtcataccagcagaatctacttcgagcccaatgtgagggttattagtttccttattttgttccaagggtctatagtccaaata

SEQ ID NO: 32345 - DNA, 244 bp, Oryza sativa
  unsure (1)..(244): unsure at all n locations
actaagcttatcttcggcctctgatacacttatatntgcaatggtgagttccatctgctctcattaagccaccacagcaacaacgcatatgacatgggtattcaaacgatggctatgagtcttctgcgcaaagcaagatttgttattcttttcacaaacctagtacctagcacagactgatcaacttttatcaccaatgatcatatcaaacaatgacaggtttgaacaccatccattgtgatct

SEQ ID NO: 32346 - DNA, 440 bp, Oryza sativa
  unsure (1)..(440): unsure at all n locations
agcttcctgtctttgattatgtatgcaagtactttaatggcacgaaggtgcttaatttcatactccgtaatatagttcatattntcatatagtaccaattggttccgtaatgtgaagaccacaataccacatgataatgtttgaatactaccggagtgccgcacaacgagaggaagacaaatagaaaactatgactcttagctgacttttctgataaagaaaataacgaaccgaactctgaaaaaaaaaagaacgaacaaaactgacattcctgataaaagaaatccagcaaactagggcgaggggaggttcatcgtgtaagaatatacctgtgggagacaaactagttagggaggttctatctgacgttttcttttaaaaaattcttcactttgatcgaatttgccccacgcattgatttgttcaccactttatgaact

SEQ ID NO: 32347 - DNA, 423 bp, Oryza sativa
  unsure (1)..(423): unsure at all n locations
ctttgaccaaatcatccagggagagcttccncacctgtatatcattccagaacacanacctatgggttagagtatcaccaacaatactccaatattatcctcanaactgattntgagggccataaggaccgcatgatctatttcacacggatggaggaaaactcgagaatttgttggtagtttgatagaaatgctcactcttattcttttaagataaaatatagtgtttctcttggagagttaagctcttttgtactttctattnttagtttagaaagcataaaacaaatgtttagagagattatatataatctcttggtgatgctcttannaaagatttcatcgtgataaggagcggatggaggcgggatgaaaatatatttccaaacatctagtattacatctagtattacgatcgacact

SEQ ID NO: 32348 - DNA, 496 bp, Oryza sativa
  unsure (1)..(496): unsure at all n locations
agtcacctgcngcatgcaagctctgctgcctcacatcgtgtnttaagactctgtactatngacgcctttcagataatccgaaagaaagaaatatgtcctctggccgagaaaatatatacaggtctgtttagattaatttgctgtggcaaattattttggcaaaaattttggtggaaaaagatttggcattgaagttatgctagttggtgtgtaaatacatggtagagttttgccgactnttgctactagtgtttagatccattttgacaaaaggtgctctaaaacagcaaaacttttactatnttagaataactaaacaggggggcatagtgaaaatcacgtatgtagtaaaaattatcgtaagatataatagacgtatgtgatttatctacattactataagttctactgtggtaaaatgtttacccatattaacgtgagccaattcttatcatttcattgnttttatcttacaataattttcactacatatttt

SEQ ID NO: 32349 - DNA, 477 bp, Oryza sativa
ttaagtcacctgccgcatgcaagcttcctcagatcccaagtccctcaccttctaagtatggtacttccctgtattgataattacacaaactacttagatgttaaaagcccctagatggagatatttaaccatttgccacatttagatgaggcagctcgacagaagggaagggagaagatgaaaagctaaagattctagtttattccttgctttaaaaaatagatatgggaggatttgaacttgggtgtctatctcaatttaagtagctaacaaaatcaatcttatctcttaatgaccatttgcccaccatgaacagtaaccacgaatgcatttttttttttgatgggaacgaatacatattgtttcacatgaatacaacgtgcgaacagcattaccagcctagtaaatatggcctacaggtgctgcttctaagtggtctgttacatgttgcacatgacacctactgcagcaacatgt

SEQ ID NO: 32350 - DNA, 365 bp, Oryza sativa
tcttacactgcatcctttcccgaggactaccctatctcttgttatgttcttaaaaagatgtggattgctgacgggattgtcccaaatataagaggatatacacaagaagaagttgcctacagatatgtagaagagctggcacagagatgtatgatccaaattgaagaaagaagtaaaaacattgggtggataaagaaaataaaagttcatgatgtgttgcgtgagtggggaattggacaagccaggaaggaaggtttctttgaaagttgctcaagcggcacagatgtggagacttattatgcagatgaacagaggtgttaccgtgtagcatttcatgggttactttgatatgaagtgggaaaatc

SEQ ID NO: 32351 - DNA, 337 bp, Oryza sativa
  unsure (1)..(337): unsure at all n locations
tgtttgntaacattggtatgcttgcttttcaagatggttttaaagtatgctcaaaatgttatgccaataatgataataacggtgaagcagatatacattcttgagacaaaaaggagcggatcgacaatcattcttctagtgcatggacagatgcagaaactctccttctctcggaacgtgtactaaaacatggagatgactgtgatctcatcgcccancatgtccgcacaaagaataaatcataatgcattgcaaggctaattcagttgccttttggtgaacatatgctgggcacagtaaatggtaaattgtataacagactccatataatccaaac

SEQ ID NO: 32352 - DNA, 341 bp, Oryza sativa
  unsure (1)..(341): unsure at all n locations
tgngatggctccgactcgccgagttcttggagcatctgcttcttgttatggtaaatcacttgccaatggttgtagatttcaattgttcgttcaattgatggatgattgcaaagttaaggtctcattgatctgtacgatggctgcattattttggtctttcacttgaatatcctgttatttgttattacaatgcaatgaagtgatctaatggtactatccacaacgttggagacagggacttgatattgcagagactcgatctgcgcccagcgaatgtggaaagaaggagctagcagcggatgcggcgatggtcatggcgccgccggtgttgccgaacccgt

SEQ ID NO: 32353 - DNA, 304 bp, Oryza sativa
  unsure (1)..(304): unsure at all n locations
cattcaaaaattaatacaataagacatcttagacaaaagagatatttaactatttgccactcttctaaaccaccactctctgtttgccactttttcccaattatgggtacttcgctgctttcttttttattgtaattacgttaaattctggaaagtttaagaaggagagaaaaatcatgggtgattctgtatggttcttgataacaggttgttggaatcgacatgaaacatcttcgctttgacactcttcatctnccctgtttaactccctttttcttgatgtataaacctgtatctatttcat

SEQ ID NO: 32354 - DNA, 339 bp, Oryza sativa
  unsure (1)..(339): unsure at all n locations
tcgccgcaatgagcccgtcacttcgggcatcctccacgtccgcgacctctcattcctccgcccncgcagccacaacggtgatgatgatgaggagaccgaggagatgacccgtgagcaggaggagaagtacttgcagtggaggagctccctggtcgagaagctggccgggatcgagctcaacctcgagagggttaagtttcggatgagcgtcgaaatcccgccctccgatgacttcagggcaatgaagaagtcttgggagaatntctacgcctccgagctcctcagtagcagtatgggaattcatttttanaatgaaaatgctgctcttagttgtgattc

SEQ ID NO: 32355 - DNA, 334 bp, Oryza sativa
  unsure (1)..(334): unsure at all n locations
ttgttcgagatagacagctggagtaaggatatcggctagctcatccaaaatcagagcttgaatttcgtgtaaccgagccctgattgatccgcaatcgaccaccaagctgtccagtgatgactcctctagccgatgagaaatgtnctcaagtgttcttttcacatcatcggacagagaggccaaggcctcgctggtggcataagatatgtctctcatcaagaagtcttaatacaaacgaaacagatcggtaagacctgcaaagaaaaattgagacactatagatctaatgcacatacagccgattaatgactttgaaggaacacttactggatag

SEQ ID NO: 32356 - DNA, 358 bp, Oryza sativa
  unsure (1)..(358): unsure at all n locations
agctntccatcaagtccaagatcacccatatcgtagttggcatgaaagcgctagggtccgttgaagtcagtgctgtctccggaggccgaactggattccaaaactcattggattttaatatcttgtagatcctccgttcactcgatgtattctttggccatgttntatatttctcatgcttagatgtatgcatatacttgatggtcacatcagtttccatttgcaagaaaatatggagcactgacaaaatcaggggtttggaactgcaaaccaccaagcatttaatatttgcactgcaacatggcccctcagttagagccactgccaacagttcttcccatgggtcggagtcatcgac

SEQ ID NO: 32357 - DNA, 544 bp, Oryza sativa
  unsure (1)..(544): unsure at all n locations
ctcaagctgagccaatccatacaaacactcaaaaaggaagaacagtatggtcttttgtgcgatgcgaaatgagcaacgggtggaagacatttgacatgatctctcaagtaatcttctgaccgtatatctcagcatttggaaactgcttttgcaaagtacccttgtccttggcggatcaattcgaggatacagtcagatggaagtggaatgcctttggggatacagtctgcaattctgcataccatgtgcgaattgggagatgatcaatcctgcatcagcaagtttgatatggaaaccatgggattcttcattcgattattgtgtccaattcttcttctcaaagtaagtttggaacggcatcatggcctgggtgctccttcggcaacaactctcttaactggaatttggggtccatccttggttgttggatgggatctgaaccaaccgctcagaaaaagttgaagtggatcttcattntcagaagaagctttgccaatatacctctcggtacgtttggattcattgtgaaacatgttacacactt

SEQ ID NO: 32358 - DNA, 283 bp, Oryza sativa
tggccaccggccgctacctccaccagcctccatgatgggagcttgagttggcctccccatgtacctctgaccgccagctccacggacaagaggacgggtcatcatgctcacgccgctttgccccaccacctcttccttcatgagtatacctgtcgtcggcaactccgttggcgctgccggcacaccatggccccatcgaccatcgccgtcggtgccccctggacctacctaatagaccccgctggacttacccatttcttcctcactgctaggggacatgccc

SEQ ID NO: 32359 - DNA, 270 bp, Oryza sativa
ttactgctactgctgctgctgctgctgttgtcacagtaatttaacgtccctataaatctacccggtcgctgatgatgatgttttcaggtgagagcttgaatacacgtgaactgaacccatacctgaagtcaattgggtcagactacagcaatggtgtcaacttcgctatggctggctcaacagtatcacacggcgactctccctattccttgaatgtccaagtcgaccagcttgtgtacttcaagcacagatccctggagctcttcgaac

SEQ ID NO: 32360 - DNA, 463 bp, Oryza sativa
  unsure (1)..(463): unsure at all n locations
atgccgcgagactcgcacagaataaagtgttgccatcacctccctctctctgcttgagcacacgagaatggagtctaataacatcacaacatgtcccataatgccctgaatctgtctcattgtgcgttctgcttaccacccacagtgttcttggtcactgtttaagagctgactcttcataagctaatctctatttagttagtacatactgatatgaactaaggtttccagatgctaaacagttcattntatattttatgatttttgctaaactcttcctctgataaggcgcatganaaaacataaatcactagagacatctgtgtgtgagaattttattcaactgcatcttcatgtggagggaacattgatcacaagttttacaatatggagtttacttgaagtacagttctacaagtttcttcaaggtgtcaaacacacttgtgaatgggttgaatgcaac

SEQ ID NO: 32361 - DNA, 414 bp, Oryza sativa
  unsure (1)..(414): unsure at all n locations
tatttgaactcttttctaacagcaactaagtgagtgctgtttacacgacacggatgatgcagtgcgtctcgtccggtccgagtatgtgcaatgtatcactctttagaatttgaaacaaggctggcacccggccaaaagctttttatacggccacccgggcctacacctttcaaacggccacccgggccaacaacttttaaacgggcacccgggcctatctgatcccatcagctgcatgttttcctaacatagaacccagtttctcaaagcaatttccaagcagtagtcaatcaaactcnctatgaatacctcacatctgctatgatcggggcacggctgtctgacagtttgtaacctctgcaatggggacactctaccacatacattactacccgatcatcagccgtgggatag

SEQ ID NO: 32362 - DNA, 458 bp, Oryza sativa
  unsure (1)..(458): unsure at all n locations
taagtcacctgccgcatgcaagcttattagaatattntgtatttattatataatttattaaagatagaagtttaacttttcccaagtttaacaggacagtgttgattaattttaagtcatgccttccccgaaaaaaaaaattaagtcatgcctttgacaagaaaaccaaacacacatagaggaagaagtaaaagggagagatggatcaagctagtaaattggttagggatggcaattttggccacgggtccgggtatacccgatccaatgggcacggacgtgggtgtgattntntgcctgccgaaacccgtagacattgtgggcaatagccgggtttcattntttgcctgtgggtaacccatgcccgacccgatacatatgtattagctaatttcgacttatctcttaattcttatactcctttctcttgggtcatttgtgatactaactaataataa

SEQ ID NO: 32363 - DNA, 496 bp, Oryza sativa
  unsure (1)..(496): unsure at all n locations
gcctggaacatcaacctacatagctgtggtacatgtatgacagggcgctctacctagaccctcatgaagttcagctggtaaaactatattattctcttagcatatatgaacaccagtttgacagatgttgtgtttttctgcctccagtgagttaagcaatctactcaatatgtagattgactttcatgtagctatgtgtcattagagtcttgatgtcacattgtcacatgcaccaatatgatcagcaattcatgcctttccaatggtgctccggtgatggctccgtcctctcaagccctcccgttcacaaaataggaatagaanagagaacagtattactattatgcatccttgtctactatgcgtgcagtcagggatagctatcatctcgctatctggattatttcatgtccacgataaactgaaatctcttttgaaggactctggttattactgttggttgatagccttacccgggctcattataatgctagca

SEQ ID NO: 32364 - DNA, 147 bp, Oryza sativa
ttgtggtctatgccctatggatacttctgttctcatcttacaacaggtacagaaagatgcatttgttagttatcacatcttatacggcacagggcactgcctactccattttcttaagtgatgacgaatatttatggaacaatgctt

SEQ ID NO: 32365 - DNA, 263 bp, Oryza sativa
  unsure (1)..(263): unsure at all n locations
gctgtctctcttgtaccgaacactgagcacagacctggatctatggttgacattgattactcgctctgtgccaatgtgactgtaactgtggctatgaatctagacaagcatgtccagagtcatagcgagaactgaagactttntgagacgaaggtagaaatacctaagcatctgctctgtctcttgcgatgacagctatggtgccgcagacatctgcatggcgagaagcactgaccagatctattggactccgttcatttgat

SEQ ID NO: 32366 - DNA, 356 bp, Oryza sativa
agcttgccgtcagttagcagaatggcgtagccagaatattcatatcccggcgttatccgtgaacttgtcggcgctgcactttcgcagaaatcaactgcctaatcaggtgtctgatgcaatgcacgcctggggtattgacggccaccagctgacggtagaaatcactgaaagcatgatgatggaacacgataccgaaatctttaagcgcattcagatcctgcgtgatatgggcgtgggcttatcggtagatgaatttaggacgggcttttccggattatcccgcttagtcagtcttccggtaacggaaatcaaaattgacaaaagttttgtcgatcgttgtctgacacgaaaacgca

SEQ ID NO: 32367 - DNA, 453 bp, Oryza sativa
agcttaacctgttcatgaattgatcgagctgcgacaattaactgaattactactgaatttgttgctgcagctcctactacaacatcagcatcacgtcgatgagcgtctgggacaagaacttgccgttggggttctacgccattgctgactccggcacgtccttcacctacctcaacgacccggcctacacggtctacaccaccaatgtatagtactaacttgtcctacatgttcactgacaagtttcttatagccacttaatggatcatgtctctgaaactctgatgtgagctagatattgattatacttaagacttaagaaagcccaagttggtgactggctttctttagtttttgtagaccaagtcagattaatcgggtggagtactatatagaatggtcctgaagaagtgatccaaaatgcaattaccaaaagaatgcaatgaacagagt

SEQ ID NO: 32368 - DNA, 253 bp, Oryza sativa
agactgtccggagcttcttctagacatttatctagcacgtcgcacacaacgatgcccgcgccagagatcgacccagccgacggtgccctttgcgcctccgagcatgatggtcttggctggtggtcacgtgggacatatggatctctcagctgagtgatggatctggcacaacctgtacctcatcggatcctccacggacaccttctggcatgtccaactcccggcgatcgggacagtggacgacggataagtg

SEQ ID NO: 32369 - DNA, 308 bp, Oryza sativa
gcttctcggttcttggtctctgcccgaagcatctaagccaacccctttaatattctagctatagagcggatgcgccctcccagcaagcttaaggatgtgcagtgcgtcaccggctgcatggccgccctaagtcggttcatatcgaggctgggagagaaggcactacccctatttaagctccttaaacgctccgggccgtttacctggacggaggaggctgagcgggccttcactcatttgaaagcgtacctcagatctcccccagtcctggtcgccccggagccagatgaaccgttgctactctacct

SEQ ID NO: 32370 - DNA, 303 bp, Oryza sativa
gtcttctcgcacagagactctgaacagaaccattctagagcacttatgaacaagttcccagtacaagacttctatctgcgtaaatgcttataatttgacatatacattcccaagactggttaccattaaccgcgtcatctgattcgagcacatctttttcatgttcacgaaaaaaatcagtccacaaatctggctgtttgatattactcttacaagctttgtcttaagaacatatttattggtcaaaaaagtaattcattcacatcatttgccccaacatatattgtgcatcaaagtatttat

SEQ ID NO: 32371 - DNA, 500 bp, Oryza sativa
  unsure (1)..(500): unsure at all n locations
tactcagctngngcatagtcagctaacagatagtgaatatcctaattagcgcaacatacctatcttacataaccatgcaaccaagcaacccatgtagttttctcagttgcagataagccacacaagaaggaggctggggctctctcccagattcagataaagaggaggaagaagagggtctccagtctttattntataagatgacatagatagagccaccttcgatccattcaatcgataaatcctttggaatgaaggagggggttgtgcagttttaccttttgaagggctgatctactccatttcatcctatctttatatgggtgcatgaatcaagcaacttggcagctgtcgtggttgtacctgatggtggtcagggtaagaccgagcttangtatggacacangagtatangatctttgtgcctaaccatttctatctgatcatctgttcacanataccagcagtacacaaaagaataatcataatgacttctctca

SEQ ID NO: 32372 - DNA, 323 bp, Oryza sativa
cgacgcccatcttctctctccacacgaccatactccgcagcagctgctcaccctccgcgacctcctcgcgagcgtcctcggtggcggcggcagcctcactcacgaccgttctcggcggaagcaactactcccgcgcccgtcttcacggccatcctcagcagtagctatgccccctttccgacctccccgcgagcgtcctcgccggcgagcggtacgcccgcacccgtattcgagaccgttctcggcagcggtcatgcccctccgcgaccgagctcgtcggcagcggctgcaattgtaccctctcctgccttgcgactgtctcg

SEQ ID NO: 32373 - DNA, 498 bp, Oryza sativa
  unsure (1)..(498): unsure at all n locations
gagagcatgtgatctaacaatgacaagcactacaaggcaaatgcgaaatatgtgtattcttttntaaaaagaatatcctagcgacaacagtttcatgtccagggacagggaagaacatagcacagaagcgtccccggttcatccctttctttgtctcttgcctttntcgtctggggcctggaagcgtcacaattataggcttcaacgagatagttaggcatgtggcattgcaagatggttggcaagtaatccatgtgagcggcaacgaaccacgcgctgtcatgctcacattcacgcaactagccaggatagcattaccagctggagtagcaggttgcaggtagcagttggaggcaccagcgccggcacaccggccatcctgattccgccggcttccgcctttcaccgcaatctctcgccggcgggtctaccgcagaaagtatggcatggagagctttgcctttacactgtcttgtagttgagttcttaacattcaat

SEQ ID NO: 32374 - DNA, 379 bp, Oryza sativa
taatacatgagagccgattattaggtttagataatcgagctacttaaagagtatgttgattgctttgcctgggagtaccatgagatgccgggacttatccatgagcttgttgagcatcggctttcacataaaccgggttttaagccttataagcaaccacctcgtcattgtaatcctttgctatatgaccgagtcaaggaggagattgatcgtgtgttgaaagcggcgtttattaggccatgtcgttatgcggagtgagtttctagcatagttcctgtggagaagaaagggagtggtaagattagagtttgcatatattttagagatttacataaagccactcccaaagatgagtatcctatgcctatagccgacatga

SEQ ID NO: 32375 - DNA, 415 bp, Oryza sativa
  unsure (1)..(415): unsure at all n locations
ctatgtacgtcacagcggntgggttgtgcgggataacgtgcctatcagtacggtgtactggcaaagaacaagggcacgcggagatcatgagagctttgtcccagattcggagaaagagatgctgtggaccacaatgctcgagacattcacccttcccgcgggtacagaggacaaagtgaanaggtggactctgaagaatatggcagaacagtttcagagcttcaagggagagctgtacaagatatatatcctgaaggggcagacactgaacttcacacattctcaagctagggatactgagacagttcgtgctataaactgtgacatggctgcatgatgaagaacaagaaatgcgcagaaaatccatacactgggcagcggttacgccatgcgatggagaatgagtacttgtgaa

SEQ ID NO: 32376 - DNA, 477 bp, Oryza sativa
  unsure (1)..(477): unsure at all n locations
agctntgcctccacttatgtcttctaaccggtagtcttaaccacatccacatgtgaatcagatagcccacaaccactcatgttggatgatggtgcctgacgacaacacgcctcacagagctgtctatatgtccacgccaacactgctgacccccaactgaaacggcccagatcaccaaggttggcgaccaaaggaatccatatcgccgaagcaatgtcacccccatcatcaggaaacagaacccctcccaacaagtgcaagatgtatgcacgggcataacactcagcacgccatggctcagcatcgtcgtcaagatgtgagaagttctgactcatccaagacaggggtataccattctgcttcttcttccccccttgcccctgctcaatgttcagtggaatgccaaacagctgctgcacttgagcatgccatccaggagtctctgtcctgcccgtcacagcatgcccccgtaatggg

SEQ ID NO: 32377 - DNA, 386 bp, Oryza sativa
  unsure (1)..(386): unsure at all n locations
tactcagcttctcgntcttgcattaccaggaacccggttgggctcctaccgttctctccccggcgttcccaactattggcatgcgaggattccctgaaccgactagctacttatccagggtgtcccattccaccttgtggttgcactttgattatgttcgatgagtttcccacaggaatcagtccttatatgcgaatactggacagagccacatatgcacaacccccgcattgcgagttttcacaattcattntattatcaaacacaccgacaccacatgtcgggtttgaaggcttacaaacccatctccaagtttcgacaacaacggtgatgtgggatattggatactcgctcaaagcacaataccgtgtaccacaaggtggacg

SEQ ID NO: 32378 - DNA, 441 bp, Oryza sativa
  unsure (1)..(441): unsure at all n locations
agcttcagtccgntagcctgtgtccttttagtagtgttctactattgggagaatttcatcaacattttacatgaaacgtgatgtaatgaacctctgttaattgttaattgtcagagctctagttttctgtggtataaaatttgttgcaagggggcaatgcactcaacttttgaatcatttgattggtatggaaatcatagcatttgtgcagagttcaagcagagttcagttcttgcatttgcacatcgtattactattacctggccttgtttggcacatctccagttccagctccacctcttctagagctggagctcagccaaacagtttcagctccaccgaanatgggagcggagctgggtggagcactctaacaaaatgaactatagaggtggagctatggtaagctgttccacaacttcacttcagatctaacttcta

SEQ ID NO: 32379 - DNA, 406 bp, Oryza sativa
  unsure (1)..(406): unsure at all n locations
ctcaagcttctgtcagctgaatcataaatgattatctttataatttaatttcatctngactaatcnttaactgaattctctgagattatttctttctgtccatggatgactaactgatataaggcctgtactccttcagaccaaaataattcatggaaaattttcctcaatttctaacagcaatatgcatatctcgacaataaaatgtcattaatatatagtaccggtgaatgaaattcccacctttaatattcatgcagctgtgcacctcacttggattgttcgaaatttccattaaagtctggcttaatttcattaacccacttaaatgacccactattttgactcatttagaaacttctactagagtccttatattgttcatcaatctcaattattcttatat

SEQ ID NO: 32380 - DNA, 446 bp, Oryza sativa
  unsure (1)..(446): unsure at all n locations
aatcaataacattggttacatcctcaaccggttatggctcanagtacaaacggtcactggtatcatagtcagttgaaactgtctctgggttggagttcatcattataggttcatatccagcctgataaatcattgcaaataagcaattaacccatcagtattacataacacatataggaactcttaacaaaacatacggtatttgatgatatagcttgatattgcagactatgttatttgaatcacanacatgttaataattggtaacaccaataagtggagacacatgaagcacatacaaacctctcgaatggcaaatgaagcatggcaacaacaataatcatactcaataccctgacctatccgattgggcccgtcatcccaaatcaacacctctctcttattatctggaacagactcacattcatactcatacgangaataca

SEQ ID NO: 32381 - DNA, 365 bp, Oryza sativa
agcttggagttgcgcctgcagagcctattcctcttctgtcactggttgtggcgcttggcccggtggaagaaggagtacttttgtagcgacttggtgagcttgcagttgcacgtgaagggccggatgcactgctgcggccgattgctgcccaccgaaatacattggtgcttgtgcgacttgtggcgaaaagggctgggtcatcacttgcggatggacttgaggtgggacataacctgccgaatactgaaggattggagtcgacgtgaccttggtccgccttgccacctcgtaagcctgttgttgttcttgcatttggcgaaacatgtcttggagccgtgtcatgttctgtcgcatggcttccatgt

SEQ ID NO: 32382 - DNA, 539 bp, Oryza sativa
  unsure (1)..(539): unsure at all n locations
ntggaccanattaagtctgcatgtggtgaggagtcaattatgtggctaaatcactcttacggtcctaaagaagttcctgtcatatctactggatcctttgcattggacatggctntatgaattggtgggctcccgaaggtgagttaagggtattaattcttttgtttaataattgttatattctagtatccaggatcactgatgcatgctctatttaggacgagtaaatgactttctactattgaaagtttaatgaaacttattntctattaaaaagagtaaattgaatcagagctccctgaatntgtagacttgtctcacctagctccctgagctgacttttgttttctaggctctntgaacttaaacccatttgcatcactggtcatctattccnncgttgctaacagaataatccgagcctaacagcanatggatgcangtttatggaggctagcangcataataaaactgctaggtcaattaacatttangaagttntncatgcatttaatctttaaacattactgacctgttat

SEQ ID NO: 32383 - DNA, 305 bp, Oryza sativa
tactcagcttaatggctgcatcttgctcattcacgcatcggcaatggtgtgtcttgcatggcacatgtccacgtgatgacttgatccgcggacgaacacgtgacccgtctcctctgctgaggattcgtcctctggatacgcctcaaccacgccatgtgcgacgcctcgggtatcgtgcaagtcatggacgccgtcgtcgatctcgctcgcggtgcccgtgaaccggccgtctcgccggcgtggtcacgcgagcttctggacgcgcgcaagcctcccaagctggcgtgtcatactcgcgagtacaa

SEQ ID NO: 32384 - DNA, 473 bp, Oryza sativa
  unsure (1)..(473): unsure at all n locations
agcttaggggcacactacctaagactagagcaatgtgtggcacgtagtttatcaaganatgctgcccgaatgaaaccgacattgccagaagaagccaagggttaacccacggacgcatgctcagaaagctaccatcctccgacagcgcattcagcgagttgaacatctcaatggccaccaagacagacagggagagggttgtcgctttaattttgccgccctggaagtaatcacatgggttcacatcgaagatgaatgtacgggcacctgctgtgaatggtgacaccttgaaaccctcccatgaggagcactggccccagtttgagagctgggagtacgatacacgagagtgaccatcaccagccaggtcaattcccaggaaagagccatgtgtgtaccaaatgataaacactcccactgtggcaatcccaacgtaccatccaatgacctgtaagatggacatgggatccaag

SEQ ID NO: 32385 - DNA, 346 bp, Oryza sativa
  unsure (1)..(346): unsure at all n locations
ccccgattaacaaattgtattaagatggatcacatcacattctaggttaaattattttaagatgaagggagtaacaatttaagagtaactaatggtcaaagcttcaaccgaagaattaaaattgtaacccttattaacaaataatcctttctaccacctataaaagatatcctttcaaccaccgagagaattaaatgatgcttcaggagaggataactttgcaatgacaacgtctgatttatcatgattccagaaactagtcgaagcagacatatctcatcatatccatgtgatgatcaataatacttctncccgtcccaaaatactctctattctaaatagttta

SEQ ID NO: 32386 - DNA, 354 bp, Oryza sativa
ctcctgacgcagctaaacctttcccggcccgcccttaatcgcctggactcgctggccgagcttgccacgcgaggacccaccaattattgacacactccacccacacccgcacgcaacgcatgtgcgccgtccatcgcatccaccccgcgtcgctccccgacgataaaaagtctccgcctcgcagccgattccttccttctccttcctcctcttcttcccctctcccgaagaaagaatataaaggaaaaaagaaaagaaaaagaataaaaaaacttgagctcacgcgcacacgcacgcgacgcgacgcgaccccgaattggaggcgaggccgccgactccgagcggatcgggccg

SEQ ID NO: 32387 - DNA, 284 bp, Oryza sativa
taagcttgagtttagtggcagctatgaataaagcgatgcatgacggtgggattctgtgggttcagcatgcagcaatgtgcagtctgtggacaagctggagcaacagaaactgcgttggactctggcgtactccctccgtgcacaagaaacaaaaactctagactctcgcgcctaacgattgatcatacgtgttatcttatttaactattcaaggaattcaagagaccacttatggagtatacatcatgttatagtgtctagcactagtaagaatactacttata

SEQ ID NO: 32388 - DNA, 169 bp, Oryza sativa
cgcactgcactggcgatttacgacatctcgtatgagctatctagcactgaggtaattagacacacttccatgtgatttcatttacatgtgtgaagctttcacttgccctatgtatgaaactgattatgctccggactacttattatcgacttaagagctcaattatcgc

SEQ ID NO: 32389 - DNA, 304 bp, Oryza sativa
agcttcgagggcggcgcggctggctaatacacagtgcctgtgtcgaccagcttgtgtctgtctggagagaacatcgtaccccatttaagtatgccgatcaccggtcataaaatacttatccaccgctgttgccggataaggagcgatgtcttgcgatagttcatgggaatactgcatttcaaatactacaatagggtatggcatggacccttctgtaaggaaagaagttactaattgagctacggacgatgctcttttaccagattctacctcaacacacaatacatctcgacctttttgactg

SEQ ID NO: 32390 - DNA, 294 bp, Oryza sativa
  unsure (1)..(294): unsure at all n locations
tatgactgcagctgcgcgttttctttgaacaacattgcacaagctcactcgcataaatgacattctccgagatgcttctccctcttaacgaaacctgactgatccaattcgatgacgggtgggagttgcctttgcattctattcgccatgactctggctcttatattaacagagccatcttggacggagattggccngtcaccgccacgagtantcgttttcgccgcgtttgggataagaacgatgaatgccctgtttattatttcattgtccgagtttcgttataatagctct

SEQ ID NO: 32391 - DNA, 473 bp, Oryza sativa
  unsure (1)..(473): unsure at all n locations
agcttaaccaanagaagtagtgtaacacttagcttctcacatattccttgagatattagagaaaaccaaactaactatgtgatgttctgattagtgtatacgttagaatgtgaatntgctagtgaagccttccagatcaaggttcatcaaacataattctaactaatttctttacatagctttgtagatatggaacatattccttgagatattagagaaaaccaaatcaaactatgtgatgttctgattagtgtatacggtagaatgtgaatttgctagcaaagccttcctgatcaaggttcatcaaacatcatagtaaataatttatttacatagcttcgtagatatggatgaagttagtaggtagcttcatcaatcaaaccacattaaattcaactgttgagaagctagttagtgtcaaagatagcatgtaatctctatttnttgcataatctcttctatacccctaatca

SEQ ID NO: 32392 - DNA, 364 bp, Oryza sativa
cttgggaagcctcactgattatcccacattttgagtacattgatatcaatgagctcatcaccaaagccttatgctccaagccagctttgattgcccagaggtgtactcattttccacatccaagggaaacgagagatgcacatatggaagatacaacgctcaaagtggcttggtcaaggttgagtcctccgcggatcatttctgacagcaaagatagtgctccttcatctctgtacccagagatcaatgtgttccatgagaacgcatccttgttggcgctcttcgaaaccaagcatatgcactatccatgtcgccttggtgaacatatccttgcaagatcgcatccacgatatctgatccctgt

SEQ ID NO: 32393 - DNA, 474 bp, Oryza sativa
  unsure (1)..(474): unsure at all n locations
gagcttctcaggctcttggtctctgcccgaggcattgttgcctaccccgagaagattcgagctatcgagcggatgcgcccccccagcaaacttatggatgtgcaatgcgtcaccggttgcatggccgccctaagtccgttcatatcaaggctgggagagaaagcgctacccttgtttaagctcctcaagcgctcggggccgtttacttggacggaggaagctgaacatgccctcactcagttaaaggcatatctcagctctcccccggttctagtcgccccggagccaaatgagcccctgctactttacttagcggcgaccccctaagtagttagtgcagcgttggttgtggagcgcgatgaagacaatcctcatttcgtgcacccccattctgtgctaacttggcccgggagcgagcggngaggagaggccctcgagtcggacagtggcctacgggctctgacgaccggagtc

SEQ ID NO: 32394 - DNA, 434 bp, Oryza sativa
actgagctggagcgcgcgccgcactcgtgagtctcctactctccttcctcctacggtcgtagcaggtgagcccagcggtcgcgccaccgtgtcgttcccccgccagctgcggcgcctcgcctggtccaccggcggaggggccgtgcggcgccccgcctctttcgcccgcggagaccggggaaagcgcagttacgttgctatcagcggccttcgcctctgccctgagtatgcggcggaaagcgcggtggctaacgactccaactgcaacggcgtgatccagaagtatcgcggatactgacgccttcttccgggagcaactgatcagaggggaactattatcttggtatatttcgttttagcgagcaaacggtaactgaaatcatgactgctaattcagcttgactgcattcattctcgagttgttgtgacatcta

SEQ ID NO: 32395 - DNA, 460 bp, Oryza sativa
  unsure (1)..(460): unsure at all n locations
cgacccggatcttaagcgactgagctgcagctcttacaattaaaaacatgggtgggaaaattatgatnttcaaaacctggtgggtgtgtgacataaacttcctcctgtataaaaccatttagaaaagcacttttcacatccatttgatacaatttaaaaccttttgaagcaacaaaagccaacaaaagtctaattgcctcaatgctagcaacaggagcaaaagtttcatcaaaatccaaaccctcaacttgagtaaaatcttgagcaacaagtctagctttatttctcacaatcaaaccatccttattttgtttattnttgaaaacccacttgggtccaataatattatgtccaaaaggtggttcaactaaagtccaaactttgtttctctcaaaattttcaagttcttcatgcatgggcgttaatcacgattcatcagttaatgcatggtgacacatct

SEQ ID NO: 32396 - DNA, 421 bp, Oryza sativa
tttccttgagatatcagagaaaaccacactaactatgtgatgctctgattagtgtatacgctaaaatgtgaatttgctaactatgcctttcagaacaacgctcatcaaacataatcttaactaacttctttacataactttgcagatatcgaacatattccttgatatattagagaaaaccaaatcaaactatgtgatgttctgattagtgtatacagcacaatgtgaatctgctagctaagccttcctgatcaaggttcatcacacatcatattcaataatttatttacatagcttcgtagatatggatgaagctcgccagtagcttgatcaatcatacctcattacattcaactgctgagaatctaggtattgtctaagataacatgttatctctatttgttggataatctcttctata

SEQ ID NO: 32397 - DNA, 366 bp, Oryza sativa
  unsure (1)..(366): unsure at all n locations
ctcagctntccaggcgtanaaagctgcacgccttaatgcctaactactgttggagcttacagaagagcttagagaagagctcactactgagctgtttcgtatggaggctcggatggaggcacgcatcacggatatgtcgacagatgccactcccggtcccatatgtacaagtgagccccacgcataggcgtagcaactgtgcatcaactgaggctccggcagaataacctgaaggccccgccgcggtggaccacataatggcataaacaacttaatatcgcatatattgtattagcacccagatacatcgctacatatactaaggacactaatgaatctatcgcaggaacccacatcgtgtaccct

SEQ ID NO: 32398 - DNA, 434 bp, Oryza sativa
  unsure (1)..(434): unsure at all n locations
aataagaaaagtgaagcaatggcctgtgcacttcaatccacattgactggatgtgaaaatttcctctgtttccgctctactaatagcgaagggaaattatttcttatacttcattctacaaatcgaatagtactacttataagaattatctcttagaaattcaaataatttgttttcctgttaacaggataaagcactttataggaaaattttcttggaggttgaatcctccaaatttctatatatgacaatccaccagtcaaattaagattaattcgatccatgcttgcaaatatgtcatttcagataaatgccatcataattagtctatntgttgctgtgcaactgaaattttacaaaattagaaccgtgtcgctaccgtcacattttctatcttcttcctctgcacatgggacccacccgttagattcatc

SEQ ID NO: 32399 - DNA, 417 bp, Oryza sativa
atttcggctatcagctgcttcataaccacttaaagtgttatgagacccactggtgggtatagcaatagcctcgtctttatgtccattcatcccattgactactggttcaatttttgcttctgttgcaagatttgagtgatctgccaggtgaacttgtacaaaaatgtgcccccgttctgtgaactgcgacaaggtaaatattgttatcttgtgttcacattgaacaatagtatactaagaaacaagttgcctgatgtcattggtgagaactattggtatcgctaaagaaaatcatgaatggatacaaaggttatgcgcatttaccttgatcgagttcccaccaagtttgaattatctgacaaacctttcaggtcgccaacaagattcatgaactcttcagaaacatatacacaagct

SEQ ID NO: 32400 - DNA, 437 bp, Oryza sativa
agctctattgtcactcaatcattcgcaatgaaatgtgtaaggtgagatcacagtatttaggtacttcatccatgattatacacataccgaaagaccccaagtggatattagtcagatgaactaatggagtaaagactctacacatcaaaattactactagaaagtaaccctcggcttacagatactagtaacaaagtaaaaaaaaaaaactaggtaatatatattccccacagtgctcaatcgatggaaaaccaaaggcaacaaccatccttcctactaatgaataaacacaatacattggctagcatccagtacacctcccatgaacaacatgcaactaatgatatatacaaagagatattaactaaaactcaccgggatcagactcaatcgtgcaccacgacatcctctcgaaaaccctgaaagattacagtgac

SEQ ID NO: 32401 - DNA, 484 bp, Oryza sativa
  unsure (1)..(484): unsure at all n locations
tcggtacagttcagacgagaaataactggcctgaagtcctctgcgattcatctgtttaacagcaatctcggtgcgctcagttggttcatcggaattcttgatgacacccctatacacacatccaaacccaccctcaccaaccataagagaccggctaaaattgcgagtggcattcttcagctcagagaaagagaacaccctgaggttactgggccgatcagtgaagctgggatactgtgtcctccgtattgattcggcactcatgtcagagacattcaaggagttgaagtcggagccggaccggacatcccgctccgtcgatagtgtgctcaacgaccggacagaagccgacttggtgactggatcctnnctcttggaatctccatgcaagaaaggcacgcacctcattgctgcaatgcagtgggaacaaattaagagctaattcatgcttnctccatgcaacacaaacacaaatagagaattg

SEQ ID NO: 32402 - DNA, 391 bp, Oryza sativa
  unsure (1)..(391): unsure at all n locations
agcttagatgttgactattctttaggcttcatttttgtcaggcggacattctgcgacagcagacattgcatcaaatgccacgaattctgacgatccggcaagcctcgcgtgctcttcttgccatacacgattacttttcacgcttgcgtgctntgagttcgctgtggctcgctaggccacgggagttacaaaatggtcatgtgtgcctgagacgaagttagacgctcattttgatggactgcagataattgtgtttttccctgtacaattgtgtttggcagctgtggactaaagataacaactgtacctaaagtggtgtatgcaaatatgtgaagcctctaaagaagctataacgattgcattaatgtgttagcaataaaagttgggtgat

SEQ ID NO: 32403 - DNA, 340 bp, Oryza sativa
gttgaatgtatggactgtattgtatattgatgtcagatgctgggttagattgcataactgatgcacacctctgaatgttttactgatattagggcttgattgatctcctgtctgcattcaatccattgtgctactatttaaatgcaattcaccaccttgtctaaactgtgctatgtgcagaatacaaagttgcgaaacgggaaaataccgccaaactggcatatgtcagactggttaatcatcagtggctggaagattggtatgtgcatctaatcaactacctaatgaataatatgttaccgaagcaccatagttactactagctgaaataccacatata

SEQ ID NO: 32404 - DNA, 414 bp, Oryza sativa
  unsure (1)..(414): unsure at all n locations
agcttcgcttcgtgtcactctacccttatattatattatcttctgcttttatctntgatgaaagcaagtnatatatatatgtctagataggcatggctctctttatcacaatcttcccttgggattaaacaaatacgataccttggaatatttccgggtgtaataatacaatggtatattcgtgcgcttgcggattacttctgtaaccataaatatgctaagactatttctgtgccattgatgggaataaatatntctagtaatgtcgttaagaaataccaacagctgtctgggtcgagggaaatgagagaagcaagttcgagcctatcgtgacaatatacgggaacgaccatacgaagaaatctatccagcctttctacggatgttacgatcccctgtcataccctctattct

SEQ ID NO: 32405 - DNA, 285 bp, Oryza sativa
tggagctcccccacttattatgtctcttgaccatccaaaatcaatgtggaggacgattcaacaatctctccattcacacataaatgtccgttaaccgttccccgaccctctactgtataacgatggtctcacatgtataagccctgcttgcaccaaccgtccatcaggtcttcacacacatgctctctggccagagatgttgaattagacagatctcctacatccatgcatatggttggagaatattctatatggtctactacggagatattgtgtgcgtattag

SEQ ID NO: 32406 - DNA, 464 bp, Oryza sativa
  unsure (1)..(464): unsure at all n locations
tataacactatatgtcgaagcatatcttatctattattatatattaacagnctattaaatttcctacaaacgctctcaagccgccacgtgtaaatactaccaacgctcctaagtcgccacatggtggtttaataaatttaaggaatatctaataattcttaaaaggtaaaccatagaatttattttaaatacagtggacccactttaaatccgtatcgtgtacgtgcactggtgcacgtactgtgtgcacgtacgtacgccatatatactttctcttctcctcttcatgctatattatgtagaaaatacataatacatcattagaacattagaatatctaccacaaaaatatagttgaaacccaaactactatattaataggtaaaaaaatatacacatttataggaaatctatagatatttacaatctattacaaccctattttaaaagacatatgcatataa

SEQ ID NO: 32407 - DNA, 315 bp, Oryza sativa
  unsure (1)..(315): unsure at all n locations
tggataagcatatcgaanatatgcgtgcgactgagttacaacacgatggagatgccccttctcatgatgactttgatgttgatgaacctcaaccttggaaagcatttcctccttattggattgaccaaagaggggggatatgttgtgtgacttgtgggctgatgaaaatgtaaagaaggtgtcagcttcaaacagcataaatcggatggaaggaggtggtgttcatcatacttgtggttcacgaagtggtgctatgcataaacaagccatggtaccaaagttaaatgattttcctattatgatttatactacttt

SEQ ID NO: 32408 - DNA, 365 bp, Oryza sativa
tactcagctgcacgtgtctcactagcaatactgaacgggtcctctctcttcttgatctaaaaccctctgagatactcgcgcgacaaagtggcacttggttatcactaacacgagcgtgaactggcttgactgctcttatatcaatcggcatgaagatcgtatcatcttgtgaaatcatgagcattgtacccagagatgagcacatctttctacgataccagttctctgacgttcgctgataaaccactcgggactttcacactatgcaagcatctacataatattttttctcttccggaatcagcgagtagcaagccggaggaatatcgatcttcacatatggcagctcttttggctgaagctca

SEQ ID NO: 32409 - DNA, 477 bp, Oryza sativa
  unsure (1)..(477): unsure at all n locations
agcttggcgagatcgttcttgacagcaaccacgctagcacctttctacatagatccgatgttaagcatgaggatttcacccttggtgagcttggagaccttcccagccttctctgtgccttttgtcctcacacctaatagcctccgaagaaagaagaagttgatctgtgtgaaaggttcagatgtaagtaatgacattcgttcactaaaaccctgaagaaacaaatgagttatggcaaacctcaagctccacatatacatcatgaagggatccaacttcacccagaacctgcccaaccagtctatcggcacgtgtcaaagttggatccatggttgttccaacaccaataagacctcctggcacagcaaattggagttcattctgttcagcatatagtgaaacgatcctcgaatagaatggggtgcatttgatgttgccgctctcatccttcattacaantcccgggcgaacttcaat

SEQ ID NO: 32410 - DNA, 364 bp, Oryza sativa
  unsure (1)..(364): unsure at all n locations
tgctaccgcgttgcactagttccacagattcaagtcatcacggcgcagagagtataagataaatctcatccagaaacgctcccagatcaagaaagatctgcatctataaacctcaactgtctacccaactcccaagatctcgggcaaaaccccaaccatccacctccaaactccacattggatatggattagaccatcacaccaacggatactccaacccaagtcgcgaaattttggtcaagattcgccaaacccccgacggcggccgcacatggattcagaacagatacagcacatagattntcttcgcggacgagcataccccccacaataatggcaggaatagcaacaatcccaacaaacc

SEQ ID NO: 32411 - DNA, 284 bp, Oryza sativa
  unsure (1)..(284): unsure at all n locations
agctaggcgggaccacctctctctctctctccttccacctttctctccctgccctgcgccggcgtgcctgctccttcttctccctcggcgacagcctcggaccgcgacgccgacaacgagaagctagctcacgacggatgagcttgatagtgatgtaagcacgatggaagcggtggcgcttcggcaggcccagccgtccgctgccttcgccttcgcactctccgggggccctcactgccaatatgctccgcggccatgctgccgccgcctncggtctatgtcgt

SEQ ID NO: 32412 - DNA, 429 bp, Oryza sativa
  unsure (1)..(429): unsure at all n locations
tagctggctcatcgtcgttttaaccgtttaagtcttatttaatttaaaactaactttagagttgattgtatatacttctttattgtagtttattttatagccttttcttttaaatcgttatggacatatatacagaagttttacctataaaccgcctttttcttctaaagagccaaccgatggatantcctggaaattgcaatggatagtaaaaatccatganatgctctcctttcaacagacgtatcagaccatcatatataacattgacagatggagaacaaattgtacacaactgaattatctcagttggtctcccgtgtatgtaacacagccacgggagcaaaatcttattccaatntctctacanatactctactacactatcactgtcaagaactctagtagtatcgtggcaaatactagcaa

SEQ ID NO: 32413 - DNA, 484 bp, Oryza sativa
  unsure (1)..(484): unsure at all n locations
gatcttaagcactgagctgcagcttttacctccttgttgtccganattattctacganaaattcatcgcatgtagcgtgccctccaaaagtcacttaagcaaatattgcagttcaaatgctccttcgttcaagaaattgttcactctgaccgttgcagccatccaagctgtgtagaaatgaatcttgttaaacattagacaacaaaactggctgaatattgaaggagcagacaacatttgacatgaggaaataccttccaagcatacatcacaaagaatgcaaccgtatctgctgaccagacaacagcgaaagatttcacgaagaacgggataatgacgttgattagagggaccagtagaaacaagtagttgagagcctctttctccttactagagcagtcacgggcccgaagagaaggtatagctgcagaagtaggtagttgatcagttacagcatcacagaaaatgtatctaattcattgca

SEQ ID NO: 32414 - DNA, 372 bp, Oryza sativa
ctcagcttgcttctgctacatgaatcctgactgctgacttctgaccatcccatttttcagtggatagtaactcagccaatgacaggatacagagcccaaaattattgctcaaactactatagttctgtacttgatacagtgcttaactttcttttgacgggtaaattgtgattatcttacgatatgtttctgggagaactccttggcgctgtttctttggtggaaggatcaaatatcaagcagtcattacaacggaaaccaataagcattgttgctaacagtactacaagcattgatgggcagactgtagttgacaaccagagtgcatatttggttaaagtattactcgatttcaatagtgaagaatattat

SEQ ID NO: 32415 - DNA, 337 bp, Oryza sativa
cagcttaacgcacaagtgcttacccactcaccgtatatgttcttatgcccatcagtcccaaaaagcccaagccacgtcccaaaaggtttaaggcaccacgcctcgctgctgctgctgctgctgcaaagaaactctctaatctactctatctctatctatctgcggctactaacataggccgaatccacctcgtacgtagtatatggtgcttgtttgttgtatgttccggcaccggtagcgcgaggggcaaggcgtcctcacgcaacttacatcgcatgcaacagatgggtcgatcgacttgccatgcaagtgggggataaagaaaaaagcggcgggc

SEQ ID NO: 32416 - DNA, 308 bp, Oryza sativa
  unsure (1)..(308): unsure at all n locations
acagaagccaagtccatcggcatttcatgttatgctaggaanaatggagttggatctgtgcagncttatgaaaaagtggctatggttttgatgcaacatcatgcaaatttaacattgacccatcggagaaggaagcaaacaaacttggtgtgagttattctatgattgcacactattttgagttataattcatacaagaattggtaagtttgtttatttctaaccatgcttcttctaatgacagacaacttaatacaactacttgactaagcctatcaaaatcttccatctctttgagaattatttgt

SEQ ID NO: 32417 - DNA, 363 bp, Oryza sativa
tactcagcttcaaaaacagaggaactccagcactaagcaatagattcattgttggatatcatatactacataagtacgtcttaaatcacaagtatgtgcaaacagaatgtcagtcaacttgtagatatatatttacctcaaggttagttttatgatgattatgattactagtttaccacaatcttggaatttatttgacactgtacatgaaaagctgaacaacaacacatctacttgtctaagcacaaaccttttatttaaacggaataaccaaaccacaaacattcaacttcgatgtagaataataaaaagggcatatttggatagaggtcgaaccttgatcgtcgtgtcgacttgcccaca

SEQ ID NO: 32418 - DNA, 368 bp, Oryza sativa
  unsure (1)..(368): unsure at all n locations
acctgcacgcatgcaagctntaccaaccaaagtgcgcgaagcggagtgggctccgcattcgccttcatggatatcggcaagaagcacaacgccttgttcccgaggaatgcacttcaagaggattccattagctgcgcgccgatagagggtcccttctaccagcacgtagcgtttggagatgcgatggacgcgttcactcccttcgcggtcctcgggtagagtcttatctgtgaggtatgcttggatctcggcgatccaagcaatcaatctaaaggagttgggagcactcccctcgggtcccgaggcctggactccgacaggcctcgggggccggtcaggcgcatccgtctcccctaaagggtcgggtc

SEQ ID NO: 32419 - DNA, 400 bp, Oryza sativa
  unsure (1)..(400): unsure at all n locations
tagtacaactgcacccacagatagttatgctgtcattcatagctaattaaattaactaggtaaccttgatgttgttctacgagaattaccgtggatgctatactttgatttctgcaaatctttttcgattgttatacttctattattcactggatttgatcctttaactaggccacgcatatataaactgatgtactctacttttggctttcattgcgttcagtagtccatttggtctatacttcaatttagacattgcttatntacatgggtcagcactatcttttaaaaaaatgtatcgaatatataatgtaatcgaagtacatntcagtttgattccatgatagattcatctttacatcccatcttgtattaactgtcactgtgttttatccgttac

SEQ ID NO: 32420 - DNA, 484 bp, Oryza sativa
agcttcctcgacgcttactctggctaccaccatatcagtatggcgaaagaggacgaggagaaaacaacgttcatcacgccgttcggagtattttgctatgttaagatgcctttcggactaataactaccgggaatactttctagcgcacggtccagggcgcacttagcaaccagcttggcaacaatgtcgaggcttacgtcgatgacatcgttgtcaaaaccaagacgagcgactcattgattgatcacctgcgggaaacgttcgacaacctccgacgatatcgccttatgctcaactcagagaagtgcacattcggagtaccgtcggccaagctactcggattcctcgtttctggcagagggatagaggcaaatcccgagaagatcaaacaatcgagaacatgaagtcgcccacaagactcaaggaggtgcagaagctaaccggatgcatggcagcattaagcagattcgtcgctaggatggg

SEQ ID NO: 32421 - DNA, 277 bp, Oryza sativa
  unsure (1)..(277): unsure at all n locations
ttctttgccaacatggcgatgtgcttggcttggtgttctttaacccatggtgtcatccattagcctcatcatagtgggacctattccttttcacatctcataggagaacattagtctcaacaaatcgggtgtcatgcttcacttgatgactaaccgggtgcatatgaaagatatggatatatttgntgaggattcatttacaccacaagtgccatattctcgtatgcaagcttaagtgcgaaaatccaatatgtataatacgtgaataacatggatc

SEQ ID NO: 32422 - DNA, 477 bp, Oryza sativa
  unsure (1)..(477): unsure at all n locations
agctctggaggttcggcgctagctcatccgaacagactccaagctggtgtttagtcatgttaacaaatccttagaggcgtaagaagaaggaatgaagagatatctggaggctgttcagtctatggaacagtgctttgccggcataacggtcgaacacttacctanaggccaaaatgaggaagcggataccctggcgaaatccgccacctgtggaggcccgcattcgccaggcatcttntttgaagtcttgtacgcacctagcgtgcccacagaaagcctggacatcatggcaatcaaccaggcagagctaggtgaagacctagaggactggcaaacaccgttcgtcaagtacctcaagaacggctggctcccacaagatgaagcagaagcgaagcgcttacagctcagagccacaagatgcaagcttggctctggccagctgtatcactccggggtgctncaacccttacttcgctg

SEQ ID NO: 32423 - DNA, 315 bp, Oryza sativa
  unsure (1)..(315): unsure at all n locations
gagatgaaacattccacatatgttcatttatgttnttctttcanaattccccaggattcattctcacataaggaattcctagagtcctgtctgattagtgacgcttctctgtgcgaggaccacaaccaccttacagtcctcatttctaacatgtttataagtgtgggtctggatgcttatatttatcatanatactacaaatcttgtatttgttcgtggcactaatcttgcagcatgatgtccctatcgtcgagcttgagaccataatcaaagcactgccaggagatagtccagattactacggtaagtttcttt

SEQ ID NO: 32424 - DNA, 309 bp, Oryza sativa
  unsure (1)..(309): unsure at all n locations
tctctgtcgagctgcgtctatactcatataaaaaggatgagtggcccccttgcaatcctagccgtgaaatcattggtgacggtcgctaacgactattctacaccgactatcttactagaataaaggacaactagtgatgcttgctatgcatatatctgntcgaatcatatactccactagtattaggtatgctaacctgttgcagataacgacaatctaatggaggagaatcgacatcaacttatacgatacatcaatctgaccgagtctacaatatgtatggataggctaagaactcataaatcacat

SEQ ID NO: 32425 - DNA, 351 bp, Oryza sativa
  unsure (1)..(351): unsure at all n locations
gcatatcacactgtgcggcatgttatagatgtttatatttctgacgcaagctccctctgtattgtatgctccttgatgacattcgggtcggtggcactggatggctattgagccattgtgcctcttgttctatcctatcatctcatnctttttgtaaggacagatgtattattatacgtgttgtatgccagatatgatttgatcgttagtctgtttggctcagatatgccgtcaatgcacgcgggtcttattcctaacaatggtatgagaagcaaggaactctatcctggtgttatgtgccattttctcctccaagatatgacacaacgtaatgactgccttatatagcca

SEQ ID NO: 32426 - DNA, 316 bp, Oryza sativa
  unsure (1)..(316): unsure at all n locations
agctctcaaactntacactctaagtggatagttttatttnttaacaacttatgcaagtcgtgggctgattctatgcctcgtctccccctattctactgttcgccggcatcgcacgaggtgaggatagataggaggagtgtgctatgacccagtggcggatccagaaaatcgatttgttggagtcagaacgcgtctatcgatgtcctaatatgctaattatacttagatcatggtgttatagcatatgaataaacaggttagctatacgttttgccaaaagtactcgatgtcgcctgacaccggtcctataactata

SEQ ID NO: 32427 - DNA, 422 bp, Oryza sativa
  unsure (1)..(422): unsure at all n locations
ccgtctttcgtcaccgagaatcttggaaagggttttttatttaaggganaacaagaagaatcttggaaagtttgaggaggctttgatctgaagaatgtgcgtgtccggtactccggtgcgacagcataaacccgattgatggaacacaggagctcagttcagctccgtacaaattcatggcttattgggtttaaaggaaaaataaataatttggattcctaagaattaatttctacaaatgtcattagatttgtagggatgagggatagaaaaatcaaaataaaaattctttccctccacagttgtaaaagataacatanngggaatttcatcgactcanaccttttggaannaatcatatagatngatatgtgcatatcttcctatntctctcttttttcattcctatgagttcaaatcct

SEQ ID NO: 32428 - DNA, 444 bp, Oryza sativa
  unsure (1)..(444): unsure at all n locations
ttgtgattattgctaacgctagtagaactaccacttaaacggctgtgctatcaccacatgataacaaatcaatgtntcagatcaatgcatcattgtagcgtctatacactttagcgaaaattattgttttacgtgtcttgtagcaacgaatctggaccgttggataaaaatacaaatggtctagattactagcaatcattattgtgcagtcgtagtaccaactgcacttgatctcaattcgccaatgaaacattaactctgcactgttagaccctttatgtctacgtattactctgtactgcttgatccttttaaagtccgtgcacattgcactcatatatgtacatgaccttataataaacacttaaataattgggaataaaacacacgaagttaaacttactattgataatggagctactggtgaacaaataacatatataa

SEQ ID NO: 32429 - DNA, 323 bp, Oryza sativa
ccaactcgcgcaatagaacaactgcacgcacagatagttacttttcctttcatacctaatcacaaaaactacgtcaccatgatgtcgacctaccataaccaccgaggatgctatactttgatttctgcgaatcttttctcatcgttatacttctattagtcactggatttgatccttgaactacgccacgctcatataaactcgatgtcactaatcttgcttcaattgctcacagtatttctatttggtctatcttcaacttatacattgattatttacactgggcatgcactatcttgctataagaatgtcatcaatatata

SEQ ID NO: 32430 - DNA, 471 bp, Oryza sativa
  unsure (1)..(471): unsure at all n locations
agcttaggcacctgcgtacttgtcaagcctcgaatcagnttatttctcccccaaccactccaagtgaggtggcaactccagccgtgcatctccagatcagatctgatggcacatcatgcattccctcagtttgccaggcagagcacatcatcaaatatctctccctccattggtggggcatattattctacgtgcttgatgtacaaggaagaaagcctccaccacagctttgctccaactcatagcggctagcagcctaggatcacgagtgagagtgatgctgataatctctaactatattgctctactgattagttcatgtaatgtagcatatatttatcgagtgaagtaatataaccttcacaattgttggctaaacgtctcagataggaattaggatatctaacatgggtcggaaatggggcatgagatataactcggataaacaactagcctaagattcgcacaaag

SEQ ID NO: 32431 - DNA, 303 bp, Oryza sativa
  unsure (1)..(303): unsure at all n locations
acataaatcctctgattcataggggcccttacaggatgtcattcctatacgaatttatcctacaaagccctctgaatcaaagaaatgaaccctatgaatttcaagttttggaggaatcttaacaagaggtagaacctcatggaaaaatcctctgagcctttatctctcctcaaatgcctcagtttatcctgtggtccaatcaaacggtcattcctacgtttgtcctgagtactgcttctctgtnttacacttacattcatgttagaattctatatcttttctattacgtccgttgtttattca

SEQ ID NO: 32432 - DNA, 467 bp, Oryza sativa
  unsure (1)..(467): unsure at all n locations
agcttaagatgcgattccatgatgctcttatataagtttctgaaaagtggagtgtagatgtactctggtttacagaagataccatgctatgctgtgctgagtaaaggaaccattccaatatatgtcttttgaagttatttcacaggcttattctgtttcatttttaaatttgttattgcatagctggaggggtgatttgttctcaatatcgttggaagtatgattgctccattgttattctattgggccgctgntagagtatgattgctccattgttattccatcctaccaaaagcattccgccacaaaatatagcaacctaagattggattagatgcggagtttgtctagatttgttggactaggatgtgtctaatccagttataggtngcaatactttgtgatggagtgcgatccttaagcacgtcaagctgttgatagtaacttcttttgatgtatggagttta

SEQ ID NO: 32433 - DNA, 472 bp, Oryza sativa
  unsure (1)..(472): unsure at all n locations
ttaagcagcagatgcaggagacgtcgcgctgcggtgcgtggcggcgtgggggcaactggccggtgggcgggcaggacatgacagctagcgagcgcacagaacggagctctgcgtgggcgtgtgtgtgtgttctttttttgggtatctgcgtcttctgcgatggcatcgagtcgtctagactagagacacggctcgtgcgcatcgntggcctggcttctgaagtggctgcgccaccatttctccgctacttgatttgcttntatcttagtatttaaataatgaacccgttcactaattatagtggtgatcaactactaataaaccgcctttgctggagatatatatatactatatacggacaggtgtatctncaatcatatgacatcttgtcattatatctgtcgtagttctgctggatacttcatggacagtatcaactacctgtagtagtatataacaacgagctcgatcg

SEQ ID NO: 32434 - DNA, 348 bp, Oryza sativa
  unsure (1)..(348): unsure at all n locations
atactacaaactacctttgattctgcaaccctgatggatagcatgcctattcccctttgagatctatgacttattcttcctttacattacattggttngcatgagatagatgtaatatgtatgatggcttttgctaattcagttatattaggtcatacagtgatgcaatggctgtttctttgaggattcattatgcataatggtattctactgcagctatgctttctaacttgcctaaggcggttaaaccaattggagaatggttcctttcacgtgcaaaggcagcatgcattggtgtagaatgttatcctaagcactttgcattcctattgaaggaatgcaagtctg

SEQ ID NO: 32435 - DNA, 364 bp, Oryza sativa
  unsure (1)..(364): unsure at all n locations
tgcctgccagcccttcattgctgcttactagaggcatatcttttatccatctttgctatcactactgtctatgacacaagtagaccatcaactcagggccagtgattngggattgtaattcaacactactatctgtcatcggatagtgtaccactcatatatatatatatggcacttctagctccacatattacttctggatagcacaagatcttgatccttgcaatcgctgactacgccttctaggtatcctttgctatgctggtaagaaccctatcagagcttcattaggaacttcatattgctgagaatcgtctagaggcaccactacacctgcgtagttgattattatggataaccttca

SEQ ID NO: 32436 - DNA, 407 bp, Oryza sativa
agcttcagtccatttgaaagttaattattagctatcttgctccgtattataaccgatggtaaaaccttctaaaaaaattaattaagttgtgcatgtgaatcgtagcgctagctaaggatgatatttgatcagtaacccgtagtccccgtaccagtgacgcttaagtacgcatggtttggttgttcatcgttgaacccctgtagtgtgtcgtcgtcctgtacatgcatcgaattatggaattaattaattaccttaatcgtcgtgtccattgcggctaacaagcagacataggatcatgtttgtaatatagttactacctcttttttttttctttctgcgtggttagccgagcatctggttaggaattacatgcatattttgtgtggatctactaatactagcacata

SEQ ID NO: 32437 - DNA, 305 bp, Oryza sativa
ctctaccgtggctacatggttaatgacctcagtggctccatccattgcgaggatggtggagacaatttctaatgcatcaactgtgtggaagacattgagcataatgtactcatgggaagacaatgcaatgatgatggttgaggctcaagacaaggtggagaacttgaagcaagagggaagaactgttcaagaatatgctagtgagttgcaacaattatgggcagatttggatcactatgagagggggactgggaggaggaatgggactggagtcacgcgcaatgggttgtggtacatcaattatg

SEQ ID NO: 32438 - DNA, 437 bp, Oryza sativa
  unsure (1)..(437): unsure at all n locations
actatagatatatatttttgttgcctgacgtttaaaagtgatgattgttagtgggtgatgatgtggcatcctgttaattagtggatgatgatgtggcatctntgtatgttaaacataaagagttagtgggggataactttacagtaagataggacatgtagttctgatgcaaactcaatatgcttatatacaacaaatttcacaataattactccaatatgcgactgcagctgtgtgaaaaaatgggtgcgacaaaccttgataaaatgaacaagtatattcactanataatctggaggtattcatttatcgtccctaaacagtttgataaactatacttgtaagttttaaaaatagtttggatcatataatactcccatagttcgatattgttatttaccatccttaaaaatagccagaggtatcatatttctact

SEQ ID NO: 32439 - DNA, 425 bp, Oryza sativa
  unsure (1)..(425): unsure at all n locations
tcatgattcttctacgcaacaacttacttgttcatgagctcatttttgttctcaanaacagaagcatgccacaatcaatacgagctgatggcaggaggggatgcatattcataagaagctcgaagcggtctattaacaaatgggtgtgacataagttgtgatgcagaaggccgctgctctggatcaacttgtacacactggctaatgaaatcttgagcatctttngacaaatagctgggaatttgaggtcgttctccttttccaatcataaaaaaagcatttgtctggaaataccaaatcaacataagtggagtgcttaagataaacttgagttacaaccgaagcacgttaagaagaacattagttgaattaaagtatatcttaacacanaataatntcatagactaataatgctatttgtccac

SEQ ID NO: 32440 - DNA, 343 bp, Oryza sativa
agaaagaccgttggcacattaaaaacaacaaatacttgcgcaaacatgtaatagcgtattccgaattgtaaccaagccccccccatgggttctatacccgactcataactaaaaagcttctctggtcctttacgaaccggagctaaaaatgctgaaatccaaaatgctaaaataagaataaggcttgctattattagaaatgcccaaaaaatatcatattcgtgaagcagaaacataaatgtactcccattaatgtggaataggcggaactgaattagtcaattcaagtcagcatagtcaatttatacagaatttctctcttttcctcagtgaaacaaagatc

SEQ ID NO: 32441 - DNA, 476 bp, Oryza sativa
  unsure (1)..(476): unsure at all n locations
agcttaacatgcaaagatgccacatcatcatccactaattaacaagatgccacatcatcatccactaacaatcatcacatttaaacatcatgcaaacatgctatatcttatagttnttataatttaagagctttttaaatacaaacatgttaaattatcatccaacataattcatataatgtttcaatgcatatctttattatgttttatgatattctatgggccaaaatatctttctccttctttcctctaattaagtcatatcacatcaattgtttttagcctttagatgattaatctacgggccaaactatctctctacttttcttgttccataaagtcataccaccttaccttnntacgttgaatcatcattctatatactatttaaatttatattatcataaagcacattaatttacttaatctgatggtatctagctatcttccacgntatttttttactggtatcatac

SEQ ID NO: 32442 - DNA, 477 bp, Oryza sativa
  unsure (1)..(477): unsure at all n locations
ctcagcttgctaatagaactgggccaacaccttcaattgatctgccatatgtgcactttgtttcgagtaacaggaccaatacgccaagacaagaagctgaccggntagctgacatgatgtggaaataacagatgttcatgattcttctgttccatcaattaagggttgggtagttaccagtttgaacttttgtagtacttcaaacatccaaggacattctgcaagtcacaggttaaccaacagatataccatactgtccaagtcatacagcatttcatgggaaatggcagaatgcaataatcaaatcctactaagcaacaataatgtactcagaacattatattatttcccctcaattacatatgtaaagtgttctaaataacaataattactccaacatttatagatcatangcaagactgtcaacggacactatangcataattactgagacattattctaatactgaacagtcg

SEQ ID NO: 32443 - DNA, 448 bp, Oryza sativa
  unsure (1)..(448): unsure at all n locations
tccatttatacaggtaatggtgtattgctcctgattgattgctatatttatccataatagggactgatatccatatagtgtgccccactttgtcatatagtagntgttctcgtttttagttgtcatatagctggttagtcttgtatggatcccagcaatatgatgttacatcaacctggacatgcctacttatttggtacgagtactagttaacatgtatccacgtgtagaatcttcacaccgcacaacagtggctgatagacaacattgatgatatatgcatctctgtccctgggttatctgttataagagatcacggcagaatgaaatgagatgccattatttctgaacccaacttgttatattgtgatatttataaacttgagataatgcttccctcccactatatttattgttgttccatcagattttgtacatgctaatattg

SEQ ID NO: 32444 - DNA, 287 bp, Oryza sativa
  unsure (1)..(287): unsure at all n locations
gctttcttactgaaggggggagaaagatagattaagaatgagctcttttacatttctcancaagcgccaccggaggtgcncgatgaatgcacaggaaattctcgtgtttctcctctccggattaagctttgcacgaaaccgcacttaacaatcacttagttgcctcaacccattttagaaagacgatcctatagctacacagtgttattaaacaaagtcgtgaaccctcacgaacctgccttaacccaaaggctacgatgatttggaccgatctggcaaccctaccc

SEQ ID NO: 32445 - DNA, 377 bp, Oryza sativa
  unsure (1)..(377): unsure at all n locations
ctaagctttcttccactcctcngtgatggaatacatgcncctctctcaatctattctgttcaccttgcaacagcgtatatgaactcttatcacacttactaacatcagaggtgtatctgaatnttcgcctacttagcatgtgtaggtttccaagctcgacacattagtcgtttagacttaggtgagttcacccactcgggcacacatacatcgacatcataatcagtagccgaatcaccattctcactatttgctaacacattatgcggatgctatgcagtgtctctgctcttattatctttaaatcgactatactgcctagcatccttaacgcgggtctcctgcactatagctctctgcacaacctggttatatct

SEQ ID NO: 32446 - DNA, 442 bp, Oryza sativa
tcacctgccgcatgcaagcttgcaacgccgctagattaagacaaaatttatcccttggactgttagacatgaagattacgaaattactgaccagaatttagagatcacctgcgtagtgatcaagaaatgacaacccaactgcccttgtagcataaggctgggatgcatctttcaagtgtctatgtctactcacaagctaccgatctatagctcttctcaacaactctttatatacatttaggtcatactgcttacttaaaacatgattaagattttcatcaaatgtagaaggaatgccacaacttatagcaagaggctcttcttgttcatcttcacataccatggttcaaaaagcaaggtacataatatattaaacatcattaaagatattgtcaaaggaacttaagcagaccaatgactcacattcaaatcagaaagtcag

SEQ ID NO: 32447 - DNA, 305 bp, Oryza sativa
atcacatcattctaatgccttcaaacgtctaattttagcatggagctaaacacattctcgaaggatgaactgtttgaacgcttgataggctagcaggccgctacacccctcatatgagaatctccgccgcgcggccccacaagtgcacaccgattgacacacactgtccctcagcactctttggtgcacccaactaaatcgacacttacaggggaccgccatcgacagagtagaccaggcaagctcaattctaagaatgacctgtcctaagcacatgtgatcgctgtcacacaaacctctctctc

SEQ ID NO: 32448 - DNA, 273 bp, Oryza sativa
  unsure (1)..(273): unsure at all n locations
agcttggtggcgggcggcgggatgtacatggcatataggacaagctctttttctatgcggagataagacggcagagctctggcttgattagcantatcancttcggcggctccgaaggacatggccgccacctttcgcgatggcggtgattcaggaaagattcatggccactacaagagctgcctgcttgcgcgcggagctggttgtctatacacgagaacttgtcatacttcacgtgagagattgaaatatggacggaaatgcttcaagccg

SEQ ID NO: 32449 - DNA, 469 bp, Oryza sativa
  unsure (1)..(469): unsure at all n locations
agccatgaatctctttatgcatatctggatctggatcctgtagaacaaanatataggatgagtagtatctgatgtaaatataatactcgaagaacattcaagtatttttaaaatatttataaatacgtatttctccttgtgtcaatattgatttccccgagcagatgactccttacatttaaacactctgcccgactagtcatagcccacaagcaccgggagtcggcctaggcacttcccaaacatgcatatgagtgacatgagttcgtcattaatggaacaaagtttcacgaattagaatttactactcgggtaatttcgcaattgttaagtgcggaaaataaatgtcgcgaccgagaaaaattgcattttcccgaacgctagtgtattaatccccgtcccaggaaaagccggtgtacaccaaacaaacatgatacanaaggcacatctttattatatcgataatatt

SEQ ID NO: 32450 - DNA, 313 bp, Oryza sativa
  unsure (1)..(313): unsure at all n locations
agagcgcaagctcttattatatcttgcaagatatgattgactcgctcggnctgaccatcagtttgcgggtgataggccgcgctgaaatataaacgggtccgcaattcttcctgtagcttctgccagaattgtgaggtgaactgactacctcggtcggatactatcttcttgggtaccccatgcaaacacatgatccttgcgaggtacaattctaccaatctctttcccgtataggtggtatgcactggtataaagtgagccaccttggtgagtcgatccacgactacccagagtgaatcatgacccgatgatg

SEQ ID NO: 32451 - DNA, 411 bp, Oryza sativa
  unsure (1)..(411): unsure at all n locations
agcttcttatgataatttgtctcgttagtagcctccattgcccagaggaataataatacttactatgacctacatacatttacatcggttgatgatcgaacaaagagtgtgctgcacagagcctttttctcattgggtgcttgcatcaatgcntttgtgcattgtcgacctgttctatgcatagatggaactnttatgacaggtaaataccgaggtcagatattgacagcaattgtgtgtgatgggaacaatcaagttctacctatgagctttgcatttgtagagagtgagaacactgaaagctggtactggttcctagagagagtgcacattgcagtggtgcgtatgaagcccaacgtttgccttatacatgatcgtcatgcgggtatgttgccggctattgactacttg

SEQ ID NO: 32452 - DNA, 529 bp, Oryza sativa
  unsure (1)..(529): unsure at all n locations
actcagctattagatctctacttatgtgggagaaaaggcggcttctattattgtctcatgaatgcatactccatcttgagtaccaaataacaaacttttctgtaatcatttgtcaatacagcacaatttagaaggaagtagcttgtgcgaaactgcaacagcgacccatgcagttgagtggtatgggctagtacagtagtacactaatactactatgtactagtattattaaaanttttgagaaccaatacttaatgagacttgctggtatggttntacagctttcttatcttttcagtatatnttcttatcttttgagtataaaaatgttttaaataataaaccatacctgattggttatgcgtttctagtcataattaaaggtcaccatatngatgtccanatgtcntttntttccaaactaatcacagatatattagagcttctacatatgtacgggagatatacataaacattaaagtagcataaccatacaattgctagcataatgtcatacataagcattaat

SEQ ID NO: 32453 - DNA, 177 bp, Oryza sativa
actactaccctctgggtataaacacatagcatgcgcactctctacaaatatttatgcaaccgacaaacatgtaggcatgctaagacctttgatgacgacctattcgtattcaactttgagaaaaaatcaatggtgccacatttagtcaatgaggtctgccgacgtatctgaaatctg

SEQ ID NO: 32454 - DNA, 459 bp, Oryza sativa
  unsure (1)..(459): unsure at all n locations
aaacacacctacttggatgatgaccaactaaatacttaccgtcgccgtgagaggcttctggcatttcaccacagtgatatccttccttctcatgctccccactgctggtgcanaagatcaaaagagctttcttactagggcgtcatccatttcaacccaggatgaacaccaccgcatcctattgtcccccaatgacgaattctcctgtggcttctacaaggtggccaccaacgccttcaccttctccatctggttntccaggtcgtcagagaagactgtcgcttggaccgcgaaccgcgatgctccggtgaatggaagggctccaggctcaccttccagaacgacgggaccttggcccttcttgactacaatggcanagttgtatggagcaccaacacaacagccactcaagcatatcgagcagagcttctcatcaatggaaaccttgttgtcatggac

SEQ ID NO: 32455 - DNA, 406 bp, Oryza sativa
gctggccattcataaagttctctgtgttcacatcaccatgctcaaacctacaaacataaattaagaatggtgcatctaaagataacccggttaagaacaaagataataaggtaccctttagaatggagcttctcaagaattgaaatggcctctacagcaatgcaagcacccatatgtggagacatcctgttaatgatgttattacttttaatacataaacacacatgatgaggaacacgatgcaacagcaatgaatgggataaatctaggtgcttacgtctgccctaatgaattccacacattccaaaggctgtgaccaagcatatccatgacctggaaaatttaattaaaataagtcaagatacgtgagctccatggcagatagaatggtattaacttcgtaaac

SEQ ID NO: 32456 - DNA, 389 bp, Oryza sativa
  unsure (1)..(389): unsure at all n locations
cataaatactcagctgatgatngtactgatggtaactgtaacagctgatctctattttaccataggatcggccataatgtgcatatactttctagccaaaccacactatggatagcaatatcttctatcttgaaagcatagagtaatgacttgtgaactaacctgcccagtttccacagctcgaagtagcttctcctcagttagaaaatcacaatagccctatcaagaataagttcaaaacacatacataaaaatatgtagatttattgtatggtactgatagattagtcacacaaggtactcgaatatcataattttcattatttatttctaatatatgatgaaaaaacctaatgatcaaacacatagatggagaccatgtcttgatg

SEQ ID NO: 32457 - DNA, 449 bp, Oryza sativa
  unsure (1)..(449): unsure at all n locations
agcttctagctgtagtttcttgcatgatattcagttattcaaactctggagattctgattatatgtaaccatagaatctagaaaataaactattaagcagagtttatcatataatctggaaaactgtcttctggcttctagtttattttctggattctacaactataacttcttataatatgggcggaaagcagagattatcttagaatctggctaccaaccagctactatagaacctggaaaactgtcttctggcttctagtttattttctggattctacaactataacttcttataatatgggcgaaaagcagagattatcttataatctgggtaccaaccagctactatagaactttgaaaactatcttctggcttctagattattttcagaattcacaactnatacttcttataatatgggcagagaagtaaactgttctgggag

SEQ ID NO: 32458 - DNA, 295 bp, Oryza sativa
cggagaatctacactgcacagagtggcgggctgagctctttctgtagatgaggacagctggcgcattgctatctaagacatccagtcgtgatagataactcggagaccacgactctgttgagagaaatgagtgggacgcattgtgctcctgcctgaccggagacggagcatcgtgggagcgtgcaaataagtggatcaaccatccgtatatattagggcgtataacgagacatctcaagctcagctcttttgaactcattgtcttaacgagccagctctgttcgacttgtaactt

SEQ ID NO: 32459 - DNA, 405 bp, Oryza sativa
  unsure (1)..(405): unsure at all n locations
agctagtgggttgtgttgaaagagaatgaatatcttgccaaatatgtgtattaccacagtttagtttgtgatgtctgacctagccaaactgaagttcatctgaatntgacatgtttagttntattttatctttttcttagaaaactgctgtctggccactggctattttatccctagttcaagcttgcttgcactcctaagttacattttggttctactattttcttatgcaggaggcgactctttaatatgataaacaatttgccaacaatatttgaggtagtgacaggagccgctaagaagcaggcgaaagaaaagactcccaacagtagtagcaagagcaacaagcctagttcgaaagttgtaaattaatgagcatgcactttctgtttatcgtgacttgaa

SEQ ID NO: 32460 - DNA, 357 bp, Oryza sativa
  unsure (1)..(357): unsure at all n locations
cttgtaaaacanatatgaagtaacatagtgtatatatgtagaaatattcagaaaagtgtcaactaccgcannaaaatcatgactgatttagtaatacaaaccttgtgatttagccatatcaacattgaaaacatcagctactcgtgctgttgcacctggagacaagggcgcagatctcagcacataaaaaataatgtgaacctcattggttcactctaatactagcaactaaggtcaaaataacaaccaatgtatgagggaaagaacagagtaacaaatagcaaatccccccccncccaaaaccttcccccgaagcacgaagaggggggaaaggactataaccatactgacaaatca

SEQ ID NO: 32461 - DNA, 452 bp, Oryza sativa
ctgccgcatgcaagctcgctagaggaggttcttgcctcagaaatgagagtattctgcctctccgcgcgcctaggctggtgatttagaacactagcttgtgatatcacttgactccatagttgtccaaaggctagccttacgggtgataccaacagatgatttgatcctgcagactacgtcatataaactagggagatcacgcttacatccataaatgatgagcgaccggctaatcgccaaagacatattatttatctctaatgccgatgtcatttgtgaaatcactcgcgcaatgtggagtaattaggaaggagtaatctactctattggctgtctaccttaacaatatataatctttaccaatatacttaaaccaagtgattggacatatcagctcgcatgccgcgacagggtaatcacctcacatcgaactatatttatcaccgagatta

SEQ ID NO: 32462 - DNA, 267 bp, Oryza sativa
atattaaatactgtgcgtgtgcctctatattctagaattctctacgaattgcttgagcaacggaagtattttaatataatgaaacaatcatttcacgaaattattctatattggtaaagtttttataattcttccctaagtctttgggccgatttctgtccaactcttttcttcccgcgcggtctaaccgggccaagccggtccatccgacgccgcccgtccacttctcctttggtcaccgacatgtgtgacccacatgtcggaccc

SEQ ID NO: 32463 - DNA, 373 bp, Oryza sativa
aagtgcatttataccctctgacagatacgtaaatatataggactatttacttttagcagctccaactcatctcatgtttgttaaacatttctcacttcctcagtcagagggaatagataataggcacaacacattgcaaagcattagtccaggtatctagatttatgaatatgaacagtataatttgaatgtaagcattgtaagtatcattagactgcacttttatcaatagcacacctgggaataccaaaactatggtggtgtttacacttgaacagtgcttaaattatgccagtattttaggtcataaatgagacaaaattgaaggaggatagctttttcttcaacaatattgttgatgaagatttcaata

SEQ ID NO: 32464 - DNA, 426 bp, Oryza sativa
  unsure (1)..(426): unsure at all n locations
agctcactaagcatgattcgtacaaagagcatctgcagtaatatgaagtattatggcggcgcggaagaaagaatatatatcttgcacaatacattatgactgatcaagtcatatatcttgcacaatacactatgatttggacgacgagcagctgcactaatttgaaaaacaaatggcggtgtggaagaaggaatatatatcttgcacaatacattangactgatcaatgcgtcgtgaaaagaaacgtnctgctacctcaagtcatagnttcaccaaatgtaaccttcgattcattcaacccatcccttgctattcaaaaaagtaatgatcgttgtgtatatgcattgctacttctagatttgctgctatacaatatgcttataatgctatggatggatcaatgggtgtttatacagcccgatgcac

SEQ ID NO: 32465 - DNA, 514 bp, Oryza sativa
  unsure (1)..(514): unsure at all n locations
ctcagcttggagaataaggctgctacaagtgtagcatcatatacctgtgtatcatagctagtcataacaagtggtaaagctgaaccactcaaagcatatccagcagtatcatatggtgtaggcaattcactaaccggatgcaaattttgattataaaggctctcaaaataatatggtgcatataaaggtgtcgtcataccaagcggtggtaaaaattgctgcatgtcaccagctcggtattttaatagagtatgcgacaagtnctcaacataaggaacatggagaagatgtgttccttgacgaatcattcgaataggatcacctctggactaatagtgaggggccataactgctgatgacatctgccggtcactgctgcttaacatgtatggtatcatagcgtattcaacatatctctcaattcttcatattggagttcacagattctattcagtcataatagaacgctgcaaactcatcattccatgctcattgctatgctagctctcttgct

SEQ ID NO: 32466 - DNA, 488 bp, Oryza sativa
  unsure (1)..(488): unsure at all n locations
tctgagtcacctgangcatgaagcttttcacactattaaattaagagcatttattatttttcacccatgcattgtcgcaataagtttggaacattcatatgcctcataaaaactgagtaattatatttttcacaggtgttaatgcaacggaggtatcacaacttgtgatgtgggttacaatttagttactcatcttacatatgggtgaaaccagtcactcatcttatttcggtggtacaaatcttacagaataaatcatatttgtttctaaattgaaaactctactgttctaacataatgcatttgtcagccatatgggccgagcatgcttatatgtttttaggcaagcaataaagatacaaattagcacccatagtcttatctatgctagttgctactagcgtgctttaaatacatntagcaagttataataaaattcatcttgacattgaaatttactgtcaatcgtatggcagttggcttatttg

SEQ ID NO: 32467 - DNA, 371 bp, Oryza sativa
  unsure (1)..(371): unsure at all n locations
gcctggcttatacnctagtttagcttctgtgaagatggagccataggcccgctagtccgctgctggttatttctgtttgtcaagccttaagtgcctctgtaataatgtaaatattatcgatataataaagatgtgcctctcatatcatgtttgtgtggtgaccccgactnttcctgagacggggattaatacactaacgttctggaaaacgtatatattctggcgcgacacgatctctcggtggctatttgtatctaacaatctgttctgagtattgatttcacgaaagtcagtatttacggctttatcgtagtcgagaatgtgtggatgactacttgattattcaagaacggttggtcggagttgacaaa

SEQ ID NO: 32468 - DNA, 382 bp, Oryza sativa
  unsure (1)..(382): unsure at all n locations
agcttaagctaagctcgcttaatcgaatggattttatttggacgccgctggaagacgactactcggtgcagccgacgctagtgcgaatgctcaagaacaagtaccccatcgtcgccgctgccatctgacaacggcaacttgacctgacattcagtttcatcgacgacgagagatgaaacggaagggacactcgagagtagatagtgctaggctattccatgggtttactctactatataaaanaaattacacaaacaacacgacacgaatcatctttgcataaagcccatgcctcaaatcggcttgcttaatcctggataagcaatacccatgaattgaataccacttgcaaaantgcactcttgcagtatatactggatga

SEQ ID NO: 32469 - DNA, 440 bp, Oryza sativa
  unsure (1)..(440): unsure at all n locations
catattatcagaacaatctatcaacagatgaatagcaattccgtatatctaatgttagaaaatatattcaatgttagaattaatgaaattaattcgatttttaagatgttactaattcttatgtaaatctagctaaacttaataaaatttgactagaacaaaagtttacgacttataatataaaggggatggagtanntttataatttactgngtacacgttgcgttaaaaggccccatggatgtgttgacctcacttgccgatcaccattccttcactgatcatnnttttgcctctcctctgaaagagaacagcaggtcaccttcctttcacagcataagtaacaacgtaagcatgatgcatatgctngnngaagtgggttgatgtcaccgggtattaccgtattgtgttcctcttgagtatctgtgagtggtcacacc

SEQ ID NO: 32470 - DNA, 369 bp, Oryza sativa
agcttgataaagaatcatctcagcatagtgaattattttctcattgcaagccttaacaagcaacagccaaaattatgcatatgttccggagtaattacaatatacttgggcatatacattacttaactgccactttcaaagttggatggaccaattgataattcggtcaaaaatattcaaccaaaatatgttcagttaaaaatctagcctatcatgaagctctaatagtcaattgacacagatatcatgaacaacgagctattctcaatcatcaaatgaaacaagcaaatcgagactctacattgatccggcgatagcgattatctacactacagcagttggaatggtacaagacaactaatctgcata

SEQ ID NO: 32471 - DNA, 307 bp, Oryza sativa
  unsure (1)..(307): unsure at all n locations
gatttttttttttaaatnaaggggtggtggtataaggantgtcaattaagagtgattagatatgagagtgnngnatattaatggattgaattatattatctgaccaatattttttgacaaggacgaaataaaaagcataagatggttgcatcatcttttcttttttacatagaatatattgcatgctgtgggtgatatctaaatttccacttctacctgttgaagtacgaaaaatctatatgtatattactattttttaatactaagtttgaggttctttgattaatagagtgaagtacggaaaata

SEQ ID NO: 32472 - DNA, 435 bp, Oryza sativa
  unsure (1)..(435): unsure at all n locations
agctttaaattaacgaatcactatcttatnnataatatttcaacatatatcttgcagttggcctatggtttgcaccaaacaacaatgtatgatacacatgttatgaaataccaactttaaattgtattgaagccgatatggtgcacctattgaattgcaaaggatagttttctaatttccaataaaaactgacacatccatgactagtatgaagaagaataaatatatccaaactattcactaaaaaaaatggaaacattatacgtcatcgaaatgtaccaaattgccaaagtatacatcaattggaaaacacactgatctaattgcacaactgatgagtctgagactggatttntcattctaacctcagtgttctcatttgtaactataacattttcaagaatcagttatgggtcacgtagtaaataaatatgc

SEQ ID NO: 32473 - DNA, 410 bp, Oryza sativa
  unsure (1)..(410): unsure at all n locations
ctcagctagcttgtccttgtcgaaacattctcttatgcgctccgttattgggagataccacaccacctttgctgggcctgccctctttgacttacttccttcaccttcactctntgctcgnttggatcttgatgccccacagatagggcagacatccaagtcagcgtattccttgtaatacaaaatgcagtcgttcggacatgcatgaattcttctgacctccaagcccaacggacataatacttgcttcgcttcatatgtcggctgaggtaaatagttcccctctggcaacagatcctttaacagctcaaggagttctgtaaaactcttgttcgaccaccattactagccttaagcttcatgagtccaacacgcatgacaacttgctgtgctcgacttgcatcatatac

SEQ ID NO: 32474 - DNA, 466 bp, Oryza sativa
  unsure (1)..(466): unsure at all n locations
ctatgagttcatgtcactatgggacttgcataaattcctatacacaaccagagatgatataaacttgtcaaatttgaatcacattacattggctcagagaataagtattgtggtggatgtatcagacgcattggagtatctacaccacaacaatcaatggactattgttcattgcgatctgaagcctaataacattcttctagatgatgatatgattgctcatgttggagaatttggccttgcaagttataaaaccaattcgtcaatgccatctctaagtgattcaaattcaacttcttcactcgcaataaagggaaccattggatatattgctccacgtactggttaactggttctagtattgcattgcacttgctcaaatngtatntcattatctgacatgctgatgtgagtgaactcgaatcctgtcatatgcaatctacagaatgttcacatggtgggcaag

SEQ ID NO: 32475 - DNA, 289 bp, Oryza sativa
  unsure (1)..(289): unsure at all n locations
tatcaancttgaccagaatggaagcattcgccaacgaagaaaggatgtctccatgaaagaagttgatgcccatggcaatctgcctaagattgggcagcacgctaccgatgcccgatgggagctcaccactgaagctgtncgtgctgaggcttagcgcaaccagcaccgacatgttcaggatcgcctttggaaacccacctaacagccggttgttgctggcgtanaggatcttctcaccacttagcgtcgctagcttcaccgggatgctgccggtgatgccattgaacgc

SEQ ID NO: 32476 - DNA, 462 bp, Oryza sativa
  unsure (1)..(462): unsure at all n locations
agctangccacatttggctaactatntctaagccacacttatgccactatactntatctagttatggcaatgttagacatcaaacaaacatcaccttaatctctttctttagttttgtgacgtgtactagttttgatctgttttggtcgcagccaccatgattatttaacagacaagaattggaccatggactcgtccggacggcaaggcgccgcgtccgttggctcggattggatgacatgcgcttacttttcgtttattntttctttattttttattcactcgtctgtcacgactgccgtgtcacgcgtagaggccactcatcgatccggtgtgatttattgccagcataacacgttagtaacatgttctttcttcttcccagttttctaatctcaaatcaaatatctcaatatgaaatccgagaatggagcatataacactgttcaattntgatataac

SEQ ID NO: 32477 - DNA, 504 bp, Oryza sativa
  unsure (1)..(504): unsure at all n locations
gcttgtcttctggcctcaaggctcaagagttaagaccatgaattctgacattcgcttcttttttntttggataattccaccttgtctgtctcttttntcagntcatggtcaaagattcttatttgaaaaagaaaacattattgtctaagactttaattcactgggctaacggaagtaaactcataatggcaatctgatccgcagtagcgtcacacggccacattgttaaatatactttcacagtgcatatactgttgtgctgctcggtagtttgtactacttcctcagtcccataatatatcaacgtggtattagatagtacacaacatagtactacgcccttcgctgacacccttgtcaaatttgattacgaattatgtctatctatactaggttgtatatttatggtgagtacattatgtatactctatcactagaactattcngattggattaatacgcatagttactgtgtttattataggaccaacttgcattatttaa

SEQ ID NO: 32478 - DNA, 454 bp, Oryza sativa
  unsure (1)..(454): unsure at all n locations
tcaagtcacgacagctaacanagcaactacttgacctttaccatatttaacccttgcttgccctataaaaagaataattgaaatcaacaggaataccagcccaacatattatatccctttttctttatcaaaagggcaatacccctccatttctattaaaagaaatgtgaaagtttctacaaggtcactcatgcctggacagttccagggcatcgaacaaaaagcttattaacagaaaatcgttcaaactaacacacagctacatcatcaggatctatcagtctatcactaccaggctaaactgacaaacacagaanacttaagggaaaaaagaacttctacaactgatatagctccccatccatatgaattcatttccaggatctgttcanaccaataaaaacttcagaaacccttttcttgaaagacttntcttcgcgctttgcatacatac

SEQ ID NO: 32479 - DNA, 502 bp, Oryza sativa
  unsure (1)..(502): unsure at all n locations
tctcgactcgagattctcagagtcacctgccgcatgcaagcttagctctggattctcatcctgtgaatagtggatttaaagccaaaccaaacgttactaaattacaattctttagagattatagctagtgtaatgccccgntttttacgtggcgttcaaaactgatgaaatacctatccgtgaaaatctcgtattctgagtgctctatttatctcctttccttcaaaaccaaaattgactcctcaaaattaccgtttcgaaatagactcggagtttaaatttgcttgtttgaacctccctccttaagtctatcagtaaatcctttcaactattcanatccaatcctcgtttcaagaatcttacaactccaaaatatttgagtcccaccagtgttcccttcttgagtagtccctacattcaatataaacttgaatanatttcgtacgtccatttcaatcaaataaataccctaaactcatcaataaacctctatgctattctc

SEQ ID NO: 32480 - DNA, 296 bp, Oryza sativa
cagatgataattcgttcatattcactccacagtgtattctacccgctactagcatcaactaattgacactctgcagtatcccgtatggcaagtcttctgcatcaccatcgatgtggcaagggcatttccagataagcactaccgctgatgtgctccaccatggtggactgtaccagtgtaccagacaagcagtaacaaatgtctacgcggaagtagcgaatacttaccggagaccaaacgccacaaggttacgacggtccgcgccgtcagctccaccagcatgtggatggcgcgtg

SEQ ID NO: 32481 - DNA, 393 bp, Oryza sativa
  unsure (1)..(393): unsure at all n locations
ccagctgcaaatgcttcanatattcaatagtttgacattaatcttcatggagtcataccaaatgcgatcttcagtcttccgtcattaatacaagttgacttatcttacaacaacctacatggacaacttcctattgacattggcaatgcaaaacaactagtatctttaaagctttcatcaaataagctatctggagatattctgaatgctttgggtgattgtgaaagtcttgaagtcatcacgttagatagaaatatatttagcgggagcattcccatttcattaggcaacataagtagcctaagagttctcaatttatctctcaataacttaacanggtcaataccggtatctctagcaatctacagtatcttgagaaactaaacctatcat

SEQ ID NO: 32482 - DNA, 96 bp, Oryza sativa
  unsure (1)..(96): unsure at all n locations
agcttgcagcagtaacactttttatgaccggcattantttgtgcgcggaagagagcgagaaacattttctcacaagaaacagctattaccatgatt

SEQ ID NO: 32483 - DNA, 456 bp, Oryza sativa
  unsure (1)..(456): unsure at all n locations
gcttggtctggcttattcaaaataacacatgtatggagtacatacatagtcatcaagtatgttgcaaatggtatgagatgttgagatgccataagcatgagataaatgttcaatttaagtgtatatgtcaatgtggaccacttttttagatgtacttttccacgaatgtaagtcaagagaatggaagtgaacttacagcaactacaataggaataagtactatcttcgattcgccattcacacccaatagntgagctgcatgccaatggagatgagccagtcagataaactggcaataattatttaacaatccgtgacattccaagtattaattataaggatatatatagacaagataactttgttttcacacacacatggtgaaacaaatgacacttgtactaatcaacttgaaaaggccgactccattgtatgtgatcacaatcgagagtaatt

SEQ ID NO: 32484 - DNA, 466 bp, Oryza sativa
  unsure (1)..(466): unsure at all n locations
agcttaagagtagcatctatcatataaagagtattgctatcaacctagattaaaagcagcgattctccacaactaaatccttaagatattcaaccatgaaaaatgtgtagaggtgcagttattcatggacttagctcacttatgctataagtgaacaaaaagccctcaaaactcagtcaagagattacggaggcaaaagtccactgtaaaggagctctaactattaacaccttgaatcatgagacattatgggaaaaaacctgaagtagaaaagctggctgtgtctgacactccagctgtccgcagttcagtcacacttgctcttaatgggaaaaaataattcttgttaagtcttnttttaggtttatcatataactcttaccttttgtaacgctgatctcattatgtgtaaattttctggtgctttggcttgtcatcaccacctaatgccntcgcattaatacta

SEQ ID NO: 32485 - DNA, 472 bp, Oryza sativa
  unsure (1)..(472): unsure at all n locations
taacccaatgcactcgcctncagcatgttatactatactacatttagcttgtaggcagtatacccaccagatttggaacgcttcctgagctgaanacattggatctctccaacaacgccctcagaggtgacataccaccattgctgggcagtagcccgtctttggtatatgttgatcttnggggcaatcagctcacaggaggaatcccagagttcttggtaaatagctcatcccttcaagtgcttatgctcacgcanaatagtcttacaggagagatccctccagccctcttcaacagctccacattgactaccatttacctggaccgtaacaactttagtggttccataccacctattacagcaattgctgcacctattcaataccttagttgagagcagaatatactcacaggagggataccagcctcactgngcaacccttctatccttggtcatgtttctttaaaagc

SEQ ID NO: 32486 - DNA, 450 bp, Oryza sativa
  unsure (1)..(450): unsure at all n locations
agctaggttntctaatgttatttgttgaattcttaaattcatgtacctcaatatgtgaagcagttntcatctctgtgttcacttaaaagttaaaagtacattttgtggtatgatagtaccaagggtgaggaattttgagagacaaattactactgtaatgccaatctggaaaacatttgcatcgcagtaagttatgtctggcatagacataagcttactttcaaaaatattcaactgatgtcactgtttggaacgcatgagtctcttaagaatatcgtaagaaattgtacacaccagacaggatgtcatatntctaattcttgtaggatttttgtattccaaacacatccaagaaagcagatctcatctagtaatcatggtaataactagctccattttcttatgaacatggcatgtgatattttctcaaacttattgtatatactagta

SEQ ID NO: 32487 - DNA, 393 bp, Oryza sativa
  unsure (1)..(393): unsure at all n locations
gttgattttaggcttaatatatgcgaatgattttctgcatatttgccatgaaaaaatgctgtcatatagtcatatcttttatatttcatatgaattcataaatattactccatccacttgaaaatatatggttctttttttgcgtgtattcanaatatatctagacatccctctatcttaattagatatatcttgaaaaacacataatatttttatattctggaatacagtgattattaaagatgacgctgaanaggaaatttactactacataacatcatatagttgttgcccctatatgtgccgatagtgctaanatcggcacctcctataggcatattttcaccttcgcgggttaaaatcgtataaaaccgcacctttaagatttatagg

SEQ ID NO: 32488 - DNA, 326 bp, Oryza sativa
ctctttgacttacctttttcaccttcactctatgctcgattgtatcttgatgccccacaaataaggcagacatccaagtcagcgtattccttgtaatacaaaatgcatgtcgttctgacatgcatgaattcctttgacctccaggcccaacggacaaaaacttgcttcgcttcatatgtcgtctgatgtaaaatagtcccctctggcaacagattcttaacagttaaagagtttgtaaactctttgccgaccagccattactagccttaagcttcatgaggttcaacacgcaagacaacttgctgtgctcgacttgcatcatcata

SEQ ID NO: 32489 - DNA, 192 bp, Oryza sativa
cctgcatgcttcctagcccgaacccatccaccaccccatccaccgcattctgctccccaatggtgtgcgcgtcgcctgctgccgccgacgacgacgaggagtgcttgtgcaagcggcagccacggcatcggagagtctggagcgaatgagtggtactggtcccggaagacggtgccgacattgacgacatgg

SEQ ID NO: 32490 - DNA, 153 bp, Oryza sativa
tgccttttctcccggatccctcccatgcctttcatggcgcctcctggtgcacttggatccttccacggtccgtctcgacaaaactgggtggatctcgttccctttctcgttcagtccggcacttccttccgatgaatgtcaaaacaggcctat

SEQ ID NO: 32491 - DNA, 423 bp, Oryza sativa
  unsure (1)..(423): unsure at all n locations
tttctccctctgcgattntccttgaacatgcttgataattcatggggtgatatatatctgtaagattcatttggaccacaccagtactgttgttggtccttgcaggacaagatctaatggtttctgaatcaaaaaataaagaactgttttcatgaacatgcgatntatatataaatcatgtgctgcagctgctcttgtgaatgaggaaaattacctcttggagaaagtcagctacctcttttcttctggcatatgaacccacactctcaaaaaattcgagctcattcgagggcatggatatatttcctctgcattatatcagcacaaaaatcaatcctcagtgtgtgaaaaggaataccatggtctcctgagtcgcatgctggacactatattgaagtgttactatcaactttgaattcatct

SEQ ID NO: 32492 - DNA, 390 bp, Oryza sativa
  unsure (1)..(390): unsure at all n locations
agcttgtagcctcctaagaaacgagttatgtcgttatctatgctttggagtttggtctcttggaagcaggccaaagtgcactttgtgtcaagcatgagctcatggactggcgtgcagcgtgcacgtgaatttaagcctctcacattccaggagatgagatctatactttgtgccatttaaaaacgaagagttctctatatctggaccgggccttaacctcttttaaaaaaggccacttctgggcgcatgggccattaacgtttggcggcccaattcgcaagtcagtgttgaaaaagcagcctttgggcaagcgcggtctgatacgcacgcggcccacgagcttgcgcatgagcgttcttgtattgcgcgcgtggcccangtgactcatgg

SEQ ID NO: 32493 - DNA, 354 bp, Oryza sativa
gatcatgcggtctgcatcaacagattcacattaatgaatcagcatatacaagataatggcttttgacgtattgattattggtaccttcaacctcctttaaagccgaatcccactgtcttgccagctctgccttgtcattttccacaggctggatctgcttctctagttgaaatatcttggcagcttgcactacattaacttcggttaatcaagattacagagataacagctcaaatcagttgggcagagtttgcgcgaacctttggatgagccactcatttcaaaattggattcctggagcttaacaatccgatccctcagatcgtgtcattctttctgcaagttctctgcctc

SEQ ID NO: 32494 - DNA, 488 bp, Oryza sativa
  unsure (1)..(488): unsure at all n locations
tctcctgcctcttgttttatttccttactccagatattntcctttgctttatagnnttattntatctttctgtgggttggtaagtactctcaccgtcccataatacaagggagtttaagtntntacttacaacgtttgaccattcgtcttattcaaatttttttaaaattattatttattttatttgtgacttactttattatctacagtaacttaatcacaacttttcgtttcttatatttgctaaaaaaatttgaataagacgagtgatcaaacgttgcaattaaaaactcanaatcccttatattgtgggacggagagagtagtagtattatcatgtctttatttttgttccggataggtgtcatcatttggttgacaaaatacttgaaccactatattcgagattanttgtaccactgggacgatgccttaataaatatatatatatatttatatatatatatagttatatatatatatatata

SEQ ID NO: 32495 - DNA, 436 bp, Oryza sativa
  unsure (1)..(436): unsure at all n locations
agcttatggtgagcatggcatgattatcaatattatgcccagcagacagctgctgttgatgcatcaaacaagtgcaagaattaaaggcacggaatgatggtagcagccaaaaaggttcgtaaattcattcttggtttcttaccactcctcatattttggggctgcattgttctttcagtttatcttctgtactatgtctgttcggatccgacgagcatatgatgtgaacaaaatgaagttagatgcttgcaaacatgtgtgtgagtcttgtgacagttacatctttgtagtactaccatcatattgctgtcaatatgtggccctttagttgtggcttgtgctgcgagtattcgacagtatatatttcatggaaagaanaaaaagaccagttgcacagttaaaccgaacagttcaataatacagttggatgagctat

SEQ ID NO: 32496 - DNA, 347 bp, Oryza sativa
  unsure (1)..(347): unsure at all n locations
accgcttctcttgatggagctagaagctctataatcaaccgtgcttgtgacgatgaatggtggatatatacatcgataatcagccgctaccccgctacaagtacaatcgtagcgataaaactgtaggaaagtactcattacagtagcaagtgggaaacagagagtatctccaaattaatcatgctcaaatttaagttatgctcaaacaatagattatgacaccggcagagaattaacaatacagcttgggattntatagctggatattaatctggccccatcataacacacacggagatactcctatatatcaaccgagcgaagaagcacacacaagatcacacaat

SEQ ID NO: 32497 - DNA, 291 bp, Oryza sativa
ggtgacgaggctcgaaaaaatcctctgtctattaaatagacttctaacacaattttgtaacagatctgcaccttttcatttgaataagaaggtcaacatccaactaaaaaccagtctgttttacaggaaacttacgaggacttattgctttgagaaaaaggctaacactgacttatgccacgattgttagcaaccacggcggtactatggtcaagccccctggccaatgctaatctcatatatccgcacaggctgcccagtcctttccatttcagcttcatcacgcctctt

SEQ ID NO: 32498 - DNA, 436 bp, Oryza sativa
  unsure (1)..(436): unsure at all n locations
agcttgcatatcatgatagtatgaagtaacagttctggtatctngttttaaacattgcagtttgttgaacaaaatgtcagcataatacatgggaacataaacatctctgaaatatcgtttcaggtctttccaagattgtggtattttgttatgcctacaaagatgtttccaatcattagaagcatgtttaattaaaacactagaggcacacatatacctttgtttctccgacaagacatgctnttgaaattcactatcaaccgctagctcccaattaatgtaagcacgaggatcatagtctccctcgaaataaggcagtgcagatttgatcttacctagaacatcatcacttacctcataatggtcatgttgatccctcctcatgtctcgacgaagatgtcgatgttgagcgcagctattcccaattatcttgcgt

SEQ ID NO: 32499 - DNA, 276 bp, Oryza sativa
tttaaccaagctcttacaagattttattaatgcaagtggaatggtgacatacaccgactcaaccaagcaccccaatgaaggttggatgtatcaatgccttggcaaacacttgcggtacggctgtaatcaaatatgtggagctctgggtaggcttaaatatgtagcaaaggaatagcaaatgctcaaatcagataatgcaaagttgaataattgttcaaagtcaagtaccgtgctggtcctaagctagaacgtactatagactcgagcctagacaca

SEQ ID NO: 32500 - DNA, 438 bp, Oryza sativa
agcttgttcgatgttcaattctaagcaactgcatgcacgaataaacgacaatatattactaacatctagatgtgcagttctccattgcacttatacgttgagtcgagagacttacatcctctgcgttggtcatgtacctcccattaaccctgaggaattcgcatgtgtaataactgcagaggacaccgcttttaagttgcttgtgacacttcatgacatacacatagaaggaactagttaaatattgcaagtaaaacaattgaaatacattaagtgtgtggagtattactggccagtatgtatgcactagtggtttctcccttgtttgcagtagttctccacctttaccttgtagtagttatacacattgtatggagttacagattctcattaaggaggagatttaattataattcatgaaagttagacatgcattta

SEQ ID NO: 32501 - DNA, 274 bp, Oryza sativa
  unsure (1)..(274): unsure at all n locations
ttatacttcacactgcaagntacttataatggatactaccaataccaatctcttttacttttcatctctgcctctcctctctttctttccccaccagcaaaggaagccaaggccagagaaagcgaggtgtccgggttgagcggcggcggccgacgcggtggtccatgcggcgacagtaccgggcagcccgagcggcgccagcgccggctccaaatcgatgacggcctcgacctcaaactcctctgcctctccgtcacttccctctcagtcccct

SEQ ID NO: 32502 - DNA, 275 bp, Oryza sativa
tcactataatagggtaaacacctttttaataaaacaagacaaccttcagagtaacaggacaaaccttccaaaagacaatctacatagtactagtactaccatctgacttcttaattcaagtacaataaaacagaccttgctaaatccttgtactagagaatggctttctgcccactctaagcttggttctcctagtgcaaaaggatgttttcgcagtagtaaaagtggagccgacgctctgcatgttagcgcccatctgcaaatgactcataaaa

SEQ ID NO: 32503 - DNA, 436 bp, Oryza sativa
  unsure (1)..(436): unsure at all n locations
agcttgtcataatttggtttgactgacctgccttaggcttgtctatcataactgaatccatactttagttagttntaggcaagtttgccttctctctctctctctcttttcaattgcatatgggacgaaaaaaggaaatttatcataaatgtggctacaaatcaaacgtgtgtctatcttgatcaatttatctaacttaagctatggtaaacttaaataaattgtgtctatcaagcaagcaacccttagtagtagtaacatataaagagcgatatatgattgtattgtgatgagacaacaacattacaaaatgttcactatggttctctctctagatgatggaaaaacctgatctttattttaacaaaagaaataagtaattattactataaagtttgcagcaccaacaactacattccacattcaatgtgaagac

SEQ ID NO: 32504 - DNA, 278 bp, Oryza sativa
tcctctcaccttctcaccacattttcttctattaccctgatgaggcagttgcatgtcaaatgttgacagcactttcactaaatgcttagtagaaatagtagcaattatgcaaacagacactgggtatagcttctttaatgagggatttgactggctgatttgtttatgtcattaatcatatataatccacttctctcacttgcatagttgcattgccatgcctgaatacactttgtctgtattagccagttcttggttcagtttaaaccaagaatgct

SEQ ID NO: 32505 - DNA, 377 bp, Oryza sativa
ctgcaacttggatagacagctcatctttttgttatctctccgcacattgaaagcagtaaatattctgtgtatttcataaaatggttaatcatcctgcaagcaacgatggtgacagcattgatgtacggactatgaagaagaggaaatactgacctgactattaaagctcttgaagttctcatacctgccaacatgctaggccatgaagcccgtgtagttggcaacatctgcgccgtctttgagaggaccgccgcccaccgcgtcggccagtgactggtgcagctggtgaagcccctgcgcgagcgcctcctctgtctgctccgacgactgctgcaagctgcacatccccatcagctgctgctccgtcagtggatcga

SEQ ID NO: 32506 - DNA, 271 bp, Oryza sativa
tgcaatccctaggctttgttttttcggttgtttgctaggggtattattacgaatttgatcacgacgaaaacgaattgcagatggctctgattgctcggttgcaacacccttacattgttgaattcaaagaggcttgggttgagaaggtttgtggattaggaacttactatatctagcttatctggtttatacttatttagttgacatgggtcagtaatgcagggttgctatgtctgcattgtcacgggctattgtgaaggtggagatatgt

SEQ ID NO: 32507 - DNA, 408 bp, Oryza sativa
agcttcgttatagctatctcgccatgtctctcatcatattttacacatcagatggtatatcactcggatcatgttatctggatgattcacaccgcatatgctatatattgatatcaagccactcgggtgagcacgattatcaaaaccactccgctgagtggattatttattccctgactatatgattggattgttcaaagaaccacattgtgaggggctacacctattacgagcatctagtcggtgcacaacgacttatgttccagcccttcacaggctccacatgtggtacaagcacttcaggagaccatgacatacattattgatacgcttggctttcgagttatctggctcgagagaccattatctcttcgactgcgaaggactcaagagctactgtggagacta

SEQ ID NO: 32508 - DNA, 197 bp, Oryza sativa
cgaccccgagaccgaaggttcattgcatttgtggaaaggctcaaataacgcgaccttagacaatggccgggctagctgaagggagcacaccgccttggcgagatcgacaccatcctagcaaaaggggtctacgaagcaagcgcgaggctgatcactcgccgactgatttcatatacctacaggggagatctggggcc

SEQ ID NO: 32509 - DNA, 425 bp, Oryza sativa
agcttctttatagctattttgctatatcactcattatattttacaaagcagttggtatatcactcggatcatgttatatggaggagtcacaccgcgtatgctatatattgatatcaagtgacttggttgagtacgattatcagaaccactcggctggctggattatttattccttgactataatgctgggattgttcaattaaccacattgtcgggggctacacctattaggggcatctagtcagtgcacctgactctattttccagccctccacagtcttcatatatggaaaaagtactcaggagaccatgacaaagatgattgaagcactcggctttggagtaatctggttcgagagaagatatcttttcgactgcgaaggtctcacgggctactgtggagatatgggtaccccatacccaca

SEQ ID NO: 32510 - DNA, 219 bp, Oryza sativa
tgaccccaatatggatttttcttgcaaaggtatcatgctgcaaagaatggagtcttaatctttcacagaccatggtgcttggagtaaaccggctttgctacatagacgctgcactatcaagaggggtctatgaagcgagcttgaggatgatctagtgccatattactacatatgcctataggtgtatatggtgggcttgtctacccaagcgagtaaagc

SEQ ID NO: 32511 - DNA, 430 bp, Oryza sativa
agcttgacaaattccatcattgactcttgactaatgatagttgcaaaatcttactgttaacaaatagtcagtactccatcatgggaactcgaaatgacgagccaattgttggaggtgaaagtagacttcattatttttgcaaccatgtatagtatgcgtggggaaacttgactgcctgtgtcacacatctcttgggatttgaagcatctacgcctaaccaatcagctcataagtgtaatccatttcagtttgagcgacccatcccatccttgacgtagtaattcgtaggtgtagcattgaccatgtcctaatgtttaaaactaaaaaaaaataataaatgtacaccatttagatagtacaaagttctcatcaatattaaagttaaatttaccaataaacgagttcacctttttgccgtatatttgtaaaa

SEQ ID NO: 32512 - DNA, 271 bp, Oryza sativa
tcagcgaaaccgaagttctttgaccttaagcgcgtccagatcagaaacatgacaacgaaccttccataaatcctcaagcacagaaataaaaaaaatccggctcgaataaaccgaactgggctaatcgggagacagttcaccaactccaaccgagagagatcacggagagagagaaagagagagaatgacggtgagcaccttgatggacgcggcaacgaaggctggcgggaccgggttcccgtgcgggaaccaccacggcgccggcgggggc

SEQ ID NO: 32513 - DNA, 421 bp, Oryza sativa
agcttggaggtctcccgacgtggctgatcccctctggctgggtgatccgggttagtaatgtcgtgtgggtaaagtgtaccccctctgcagaggttaacaaactgttcgaacagccgtgcccacggtcatcggcggatgtgaggtgattcctagcgtagttttgtttgactactgcttgtgaaattgctgttgtgaaactgggttcgatgtttggaaaatcagcagctgacgggatcagctaggcccgggtggccgtttgaaaagttgttggcccgggtggccgtttgaaaagctgttggccgggtgccagccctgtttcaagatctaaagactgatacattgcacataccccgaccggacgagacgcactgtctcatccgtgtcgtttgagaagcactcacttatgttgctttagaaaaga

SEQ ID NO: 32514 - DNA, 274 bp, Oryza sativa
tcctttcctttgctcttcctgaaaagcagaggtaaacataaccaggttaaactatttacacatcattcttccacgattccatattcatcaacatcaaatactatattgcagagatgtaatttcaagcatctactgttgtcaatttcaccagccatgtacattaagaaagtacgttctcagacttgtcggcaaaatattttgatgcaaatatacaacctttcgccagcttgtttatgtgcacggttagtgtggcaacatgatccagctagcacaa

SEQ ID NO: 32515 - DNA, 428 bp, Oryza sativa
  unsure (1)..(428): unsure at all n locations
agctttcganttttcctatcttataccacgcaatctagtaacctaaaatacgaaccacacgatgtcctggtaaatatcagtaaatcaaacaacgttgttgcaaggtgattggtgccatgtgcctgcatcctgtangagatcgggtacagtaatcgcaaatttgcaaagtgcctggcatgagatgtatgggggatcggaccaaccttgctgagggcgcagtggaagacgacagtgtccttgtcgccggtggcacgcgcgagctccggcagccgcgccgcgaagctgcggctggagaagtggtgcgaccccccgatgtgcgcctggtagctcctctcctcgtccctgcaatcccccaccacacatagaaaaaaacgaactatctcatcaacatcagccaccaaatcatcgcggcggagggtcggagagag

SEQ ID NO: 32516 - DNA, 249 bp, Oryza sativa
ctggaggtgcccaaagtcgcacgtaactttatagcttgcaaaattatgccttggttgggattggaccttattctgttttggccctgtacggcaaaggcaaaacccgtggggcctacctaacttggggcatatggatccttctattggtaaattggtgatatccatggttcctctttggtaacacaatcctaagattgccgccctcaataaattcgtgcactctgtgcgagtattggcacacccagaaat

SEQ ID NO: 32517 - DNA, 435 bp, Oryza sativa
agcttgagtatagattaagcctataataactcgtcgttgtagtaggcctcgctaccttctgggacttcttcataacacggttcttctatatgttaaataattcaagaatgagtacttatgtactctgcaagacacttataatatgttatgaacataatcatggaaatttaaatatgatccttctaagcataagatattaaaataaagagaaaataaatataacagcaaattctcattatctttaccactattttatgtttaaaactacttatatgtcaggagtaggaatcacccttatgacacaactccagaatcgggagtacggacattcaaatgatttaattcacctctgcagagactgtccagctttacccacacgatgtcaacagtttgcaaggctgaggacaccagaagccgtcgaaggtcccacttact

SEQ ID NO: 32518 - DNA, 266 bp, Oryza sativa
taccggcagggttttttctggcctactgcaatgtccgacgccaacaaaattgtgcgcacatgtgaaggttggcaatttttcgccagacaaattcatctaccagctcaagagttgcagactatcccgctgtcttggccggttgcggtttgggggctcgacatggttggcccgtttaaaaaggcagtcggcggttacacgcatctctttgggggcattgataaattttccaagtggattgaggctaaaccggttgtcacgatcacagc

SEQ ID NO: 32519 - DNA, 424 bp, Oryza sativa
  unsure (1)..(424): unsure at all n locations
agcttcagaacatcgatgtgagcttttgggttttcctcaatgattntcttcctcactacagatgcagcctctgtgttccttgctgcgatgatgacatgggctcctctcatcgcaaagactcgcgaggtctccagaccaatgccactcgctcctcctgtaagacaacagaatttacagatttccgtaaatttgcgaggatagatgtttatgaacagtttgcagtaactagctactgtgagtctgacacaacatgaaatttactcacaagaatacaagattgatgtttggtgaaaactgaattctatgacagattggttatggatgcactagaagactatgattaatgcttttatgagcaagtttaattgacaagacctaacacagaanaagttactattatataatgggaaaatgttatagttta

SEQ ID NO: 32520 - DNA, 276 bp, Oryza sativa
tgaaacaaaagctaattaaatgatttttttaatgattgaactgtattggactttttaatgtcccctgcaactcataaagtaaaaatacttgatctggctacctttatgtaaatttaattcagacacttacagtgacaggtcactgaagctccaaaatcaaaggctctaaactaaacatcgtattttttttcaaattatagaaaactaatgtatgtatgtaagttttctgctactaaacggaaatctcaccatccaggattgtatatttcactggac

SEQ ID NO: 32521 - DNA, 424 bp, Oryza sativa
  unsure (1)..(424): unsure at all n locations
agcttacaaatatcccatcttctcgcttagagctgattatataccgtaactcttgctagaaaaaagcggataacttttgtatatgtattcttagtgtataaaagccaatgttagaaaataaactacgacgaaagacatcaaaatcaactctaaaattaatatttgaaatttaaattttggttgcagctgattataaacaaactaatgtaaataatgcaaatttgatgttaatagatttatcattaaacaaactatcataatacgctttatttaaaacattntcttcttatagatattattggttaaaatagcatctcgaagacgtgtcaaagttcaaaaatgcttataatttttggacggagtgagtatgtgatagatcactcaacaaacatacaataaaatttagcatctacatgttgcaatg

SEQ ID NO: 32522 - DNA, 273 bp, Oryza sativa
tcgctagattttgttttccgctgtttttttcttcatggtgaggactaagtgcctcttatgtaagtatttatcgttttagttattttgatgaatctgtatattaaattgtcagtttgtgtacctcggctgattcctggacaagggtgttaatgcacaaattagtttagaaattacttgtgaatttctgggcgtgacacctgccgagatggtatcttttttacttcaatctaaatttgaattggtatcgttcttaggcaagatcgaataggtaac

SEQ ID NO: 32523 - DNA, 405 bp, Oryza sativa
agcttgagaacatgctaacttactgagagcctgaatctatctatatttgtacatccgaaaatcatagcagtatgtaagagcccaaattttaacaaaaaactgttgaatattcccacattggttgtggaacggcaaatgacctaacatataagtgggggagctactcactttattggctactctttggggtgggaaaggcccttacaatcctataactggtatcaaagcctggctaataaacatctctggcttgatggatcgtgggtgcctgagggacccgtatacctaagggactgtggataaacaatgaacgcgcggtgaaggtctaaatgacaccaatgtgtgaatggtgatattgttgaatagtcgcacattggttgtcgaagaaaatacgatctaatatat

SEQ ID NO: 32524 - DNA, 269 bp, Oryza sativa
tgtgagtgtgtcatgaacgtgattaattgacttctatttatatgacagttaatgaccgatgtggaacgggaaatactctaagtgccctccaaccgccatcaacgaatgagcacgatcgaccatgccaatcccatcctataacggtggaggtactggttccgacgatccctgtctggggactgctgttctggcctctatcgcatctttcccttagaacttgctctatctatttctgtaacttatgagctgattctttgctttttccataa

SEQ ID NO: 32525 - DNA, 443 bp, Oryza sativa
  unsure (1)..(443): unsure at all n locations
agcttctacactggaagttggcttcccgcagaaatttttgttttctatttaaataaaactcctactttagactatgcttttttctcctagaaaagttcttggcaaaaagaaaatgagaaaaggagggaaaggcatggctatgaaaaaaagggggggggagaagaaggaaataaagcttgctcccaaaacattgagcaaagttggaaaaaaaatatagccatgccccttctatattcatgccaagagaacaaaatggagagaaagtataggaaaaagggagaatcatttctttattccatcattccacaaaatattataccttttcattttctaccacaaataaagacccttgatctatgagtatgaccgatgatcttcttgattccatatttntggctctgcaatatatatgatgcacgtatgtcacgatttatccctaccga

SEQ ID NO: 32526 - DNA, 274 bp, Oryza sativa
ttgagtcatcactcttcaccaatcaccaccacctccccacactaaccgtcccctcccatgattgaaggtcttgtggtaacatggatgacggatcgtgagcagcactccatggagtttgtgcatcgggctgatgagctctgtggtgccgagggctgctcggctgaaggacgatgttgatggcacagatcaggcgataagcttggcagtggtgtgtcacgcttgacggctgtggcacagatctggcaaagagatcggccgataagccttatatcaa

SEQ ID NO: 32527 - DNA, 423 bp, Oryza sativa
  unsure (1)..(423): unsure at all n locations
agcttcactctttcattgtactgttaggagangtttgatgttctctttcatgctatatcnagcattcctactttcccgtggattttatagcacttacctctaaatttcgccttcaattttcagttntattcttttctcgaaaacactggagagctgcatttcatttcatttcagttttattttctgtgatgaggttttttttttctttaatgcaaagggtgattatcanactttcagaactgcaatatgctattctctgtntaattcttattatcggaatataccatattatgccagtgtcaatcatatcaagcacttttaatattatgccaggggcaatcatatcaagcacttttaatcaaagaacaaatgaacgccattctcagcagcgtacagtaccaggtatattctgctattctataa

SEQ ID NO: 32528 - DNA, 426 bp, Oryza sativa
agctttattaataaggagctgcctcattgagtgttttattattcgctgagctgatgaaatagtataacgtcttctccaaaacaaatgacaatactgaaacttacgtacttgatggccacgtcattcatgtcgaactcgaacttatagataatcatcagtcatcagatctgcgcaaatttactccaaggtcaatatcacatttgtagttcaatacgcctaatgtcaacttgaagtgaccaatatgcgtgtcaacttactaaaaagatgggctctagaaacacacatagaataaagtataacacagaaggttctcaacatcactaaacgcaagggtaaaagcatcatcggtttcttttcttactcagaaactgataaaaaccacagttcagtggagggaaaaataattcagagttggagaaaataact

SEQ ID NO: 32529 - DNA, 273 bp, Oryza sativa
tgaatgcaacccgctcgattctttccaagcatggcgatctatcgatctatctgcgcatgcactacaggtcgtccacggtacaaatattatctgctaatgccggcgccggccgtgccgggatcgatatgcaccgaggctgccctaccaaaaacgagaatccggccatcttcgtcgtcatcggcgccggcggcggcggcggcggcggcgcggcgccccgaggggggaacatcaggtcgtcggcttcctgcagctaaaaagaatcctaggcaacac

SEQ ID NO: 32530 - DNA, 426 bp, Oryza sativa
  unsure (1)..(426): unsure at all n locations
agcttcggcaggacgagggcactttgctgccatttcaactactgttcgtcagtggtgacggtcacagtgtccgagcaaaacgaagaaatcaagaagcggataaaataaaattcagagcaggactgctgctgcattggattcggttgatgatttgccgttgcatttgtcagtaatctgaagttntaacagtttttaatcacgcagtgggagccatttagaggctaaagccaagtgagtgattagctgggtgctttcttgtgtcacctgctaaaattccaaatagtagtacaaatcaagcgaaaaacaccaaccggaatgcctagttttgatgcgacaaaccgcagctataagctgtaatggtcagagtgtgacgggtttctatctgaatcatctcatggcaactgaacatagaaccaaccataacac

SEQ ID NO: 32531 - DNA, 271 bp, Oryza sativa
tggccgcccctccgttttcgccgtcgaccaccggagcttgctcgacgccgtcgacccgagccgccgccgccttcttcttcgtcgccggccgccgtcgtgcatcgtctcgtgtcggggtgggtaccaatgagttcgtctcgtcgcccgctacgcgttggtgccctccaatctcgccgccgatgtctctagcgccgacgagctcgcgtgcccgagccggccgccgtcgctgacgtcatgctgacgtcaaccctagggctgacgtcatcagggc

SEQ ID NO: 32532 - DNA, 433 bp, Oryza sativa
  unsure (1)..(433): unsure at all n locations
agcttggntcgaactaaggcaaattgttatttatatttacctaggcaaaactttagcaatgctaattccgagaatgcttatagtcgaatgtccaatcaagccacaaatgtccaagaataattttgatgtataggcatgtaccgacttctttctaatcttcaaacatttttcttctaaattacttatccgcgtgaagtatgatccgattatatttttgtactcgttacaactaaatcaagatcccgttgattatattttgatgattttctacaatataatttttcaatattgcacacatttttatatgtatcgttcaataagtgtttctagcgtcttactactttatttataaatgttgtatgtgatgttatttggatgtttcaatagttatattatgatgtttcaataattacaatctgatggttcatatgtc

SEQ ID NO: 32533 - DNA, 270 bp, Oryza sativa
tttacaaacgatagaaacttgtttgaagtacaagaatttcagaggaacggagactcgtatgaagaaacatctagacatatttaagaaggggatgagccggaagaacaggcatttcccaatgaaggaaacttgttcaaagaacaatcaggtcaaaataatggaaactcaatggaagtacagattcgtgagaataatggaaattcatgtgaagaacacatatctcagaataacagaaattactttcaaggagaggcatctcagaatgatgga

SEQ ID NO: 32534 - DNA, 439 bp, Oryza sativa
  unsure (1)..(439): unsure at all n locations
agcttgtgctgaagaagtatgtaggagtaggtttgttacttttatcttgnagctctgatggttgaggatgacaatggttaatggcaatggatttggaacaaaaaagcattaagattttatttcacggactaaaccaacactggctgatccaagctgttgggctgaaatattcaaattgggaatatgctttgaaaaataaatggtagcacatgtactcttgacaganaatatagaagattaccacaacttaacacattccaaggatatttctgtagtactttctgaccatccacattaaatttggtagcaactatcgcaggaatgtgctcaaaatacagtcgtgttggggctttaattcaaatattatctgataaaccaagtggccaaacatgagtggagccatgctggggctgttcttgtttttntttctctttgggaa

SEQ ID NO: 32535 - DNA, 272 bp, Oryza sativa
tgactatgtgaagctattttttttctcagctccctgcgtaccaaactcagagagttcatttcgacagccatatcttcccccttgcccagtcctaactattcgccgtggtcattctttcatgctggctctaaccaatctggcctgttgttgccatttcctacacatccactatcttgcccctcctgcgaatcagtcagctaacaccgtttgatatgcatcactacttaaaccgtcgatcctccctctgagttccgataagatgtttcacatat

SEQ ID NO: 32536 - DNA, 408 bp, Oryza sativa
  unsure (1)..(408): unsure at all n locations
agcttataattaagaaaagaaagtgagtatatggtatatatagaagtaggaaatctataggtgaaatattattatgggtaaattgtattagcggtccatgaacctgttaggtaggggcnnntnnatgtntgacccngttcaatgctcgntttggtgctcgcacttgtcttatactcccttcatccacaaaagctacacttaatacatattcggatttttccaaataatttagtcatatctgtacccttcagtgctcttaaaactatatttaatacaacattatattcttacatataacctcgagacatttatattctatcgtttgatgcttgtattcctcttagttttgtattattaagagattaacttctcctcgttctggcgtcataattatatctgcatctttat

SEQ ID NO: 32537 - DNA, 273 bp, Oryza sativa
tccaacccacctgctgcaaggcgtcggtctcgtccggctgcggggggccgacgccggtgaggcggaacgatggggggccgccgggacgaagggcgagggcctggaggagagctggccattgcatcccctgcttgatgccgaagtcgacgacgtggacgcggtggcagccggcgaaagcctcgaggatggcttgatttgcggtgaagtgggcgaacttgaggtaggggcaggactcgtagaagtgggcgtgcagaaggtcggcgaaggcggcgt

SEQ ID NO: 32538 - DNA, 269 bp, Oryza sativa
tgcgccccaagtgacaaatgcatggcagacaaaattttttatgcaaaattatattatatattagtgtattattattacaacatgttttggtgatcctttttaacttggcttgaattaatttgttgattaaatgtgatgttatgtccctttgttaggtcgatgcaacagccaacagctatccggcatatgatgcatatgacaacaagttgatgtgttgcacttgtacagtgtgcctcggctgattggccatcttgagtttcttttttggg

SEQ ID NO: 32539 - DNA, 432 bp, Oryza sativa
  unsure (1)..(432): unsure at all n locations
agctttatatagctaccccgctgactttnttatataagccaaggtgttgtttgggttttttaaccaattgattggatacaatatcgttgctttttgccacataagtgtgcatttttattgaccaatattatggctaaggctgattatatattatggtcattttctaggcggttggtaaatcctttatgagtttatttactcggattntacaccacatatgccatatattttcaggtgtggtgaaaccatgtgtcttttatggacttaagcacatctgttaaagcagtgtgcgcatggtgtgtgcccaatactttggaaatttctttattcacaacatacaaacttctttatggcctatttgctatgtgaaatttcaataatgtagtcaactttaagttgcacgcatcatattttacaaagcattcggtatat

SEQ ID NO: 32540 - DNA, 319 bp, Oryza sativa
tctcgggattagcttcgctttttatttttttccgctggcatttggtaatcttcttcctattttttggtaagacggcggaatttgtatggccaaccaggtcgtccgaattgtggtacaccctggcttggtaccctgggaccaggagaattttaaatggcaacattttcgagctttaagaaaaatttctgcgtgttcgtggaaatttttcctggggccgttgaataaaaaaataaattaccaaaacaaggccttttataggaattaaccttgagaaacaggaagaaacaataaacccctcttttttgaaatgggaattcct

SEQ ID NO: 32541 - DNA, 437 bp, Oryza sativa
  unsure (1)..(437): unsure at all n locations
agctntgtggagaagttgagtcagtggatcacttgttttttgcgtgcacaccagctagattcctttggtgttgtctgagagatatcttaagttggagttatgtgccccgaacaagaaatgagctaattgagaaacttaaagatcctggcataagagcaatttgttctacatttgcattttctctgctcgattgttgggtatttggcttgtgaggaatgattttgttttaacaataaatgtctttcgggcattactttgatggctcacaaggtggtaatgttgctgcaacagtggagtcccttggtggcacagaaattttctggagaggtggagcccttcaaggactcgctgcgtgctcgaatcaaggagctggaagagggaagaccaggctgatctcagggtcctgctcgaggaagaagatagtgtacggagatagc

SEQ ID NO: 32542 - DNA, 276 bp, Oryza sativa
tcttatgtaagcacaccttttagtttctccattttcacaatcttgaatatggggtagcgcagctatataagttggtatataaaactgcaaatgtaacaacgatttggctggccaacaagaaagaatctagggatgccaagatatcattttgtcattactcatatctacagagcctgtttgaagacaataactttacattaccttctaccatagcttgggctcctccggtatcttgggctgcggctgcgactacgaccgcggtaccttggactccgg

SEQ ID NO: 32543 - DNA, 438 bp, Oryza sativa
agcttggctttcgctcagggtccttgacaaggattgaacctttgttagcggtagtacatttgaaggtcatcgtgctgttgctgcatcatgttgttgaagtttgcgaactgagcatcagcagattgttgccattcttgcgtttgtgctatgtgttccgtgaggttgtactggatctcccccgtctgcatataaagggtgtccattctcctagcgatttcacccaagccccaacgagaggaactcgagcgccattcacttcgagatggaggcacaccacttgatctggaaggttggttattcccccaatgtatgtcattaggcgcatgccatcggtcctaactggcacttgcccagattgagactacgatgctatggcgttgagcttgggtccattcgggtgcatccccagttggttcccaacctgcctcatacatttgc

SEQ ID NO: 32544 - DNA, 275 bp, Oryza sativa
tacaaaagaggaaaggaaagcttctattgccatactcgaactcttccgaaggtttctggactcctgattcctattctaattctattccactagctagatactactaaactaaacttgagagaaataagagagctcttgcttgaggtgtgtgttgaagtgaagagagtgagctccttatatagaggtaggtatgacggttgtggaaggggaattgtccgaagtgccctgccctccaaccgtcattaggatgcaatcctagacgtccacgccaaaac

SEQ ID NO: 32545 - DNA, 430 bp, Oryza sativa
  unsure (1)..(430): unsure at all n locations
agcttagacttctcttcgtgcacaagctgncgattgtgctggattgtggctccaatatctntgcgttcctggcgatcggctaatctctgcctggccttctccagcttgaataggtgttacgcaaggcatacggctggagtaaaggcatcggctagctcatctgggagtagagcttggatatctgtgaaccttgcccggatcgagccacaagtggtcaccaggttgtctaatgatgcttctagccgatgagaaatatcttcaagcattcttttcacatcatcggacagaggagctatggctttactggtggtgtcctcttctgtttcatcaaaataatcctcgatgtcaaaggaaaacatatcggctaaaacctgcaaagagataatattatggatggtcaaagatcaacacatgattggccgatatcaag

SEQ ID NO: 32546 - DNA, 275 bp, Oryza sativa
tgagttgtacattgcagttagatctgcaatggacaaattgagattggtcagatagttcaatagagtcggccagtaaagtttttcaattattttttccaaagtttcagtgtttatctgcgagttgacaagcaaggagattccttcggatgactgcggcacccctttttcccaacccatctctcttgtttttttttgcgcgcacgcttttcaaactattaaacagtgtaatttttgcgaaaagtttctatataaaagttgcttaaaaaatcatatta

SEQ ID NO: 32547 - DNA, 434 bp, Oryza sativa
  unsure (1)..(434): unsure at all n locations
agctntgatctangccccacctttcatcccctcatggatttttcaattaannaaacaattttggaaaatggaagaaaatcccaacaattccctttctcttttattggatttatttaagtcaaatttaaatcttccaaagcccgtgactttctctttttaagtcggttttcgacgaaactttcaccaaaatttttctaaatacaagatctatanaatggcattggttntgcatttttttttatcttttttttctaggatctttgccttctccgttggagcaaaagttatgttatattaataccgcgattcaaccaaacaggctacctttgtgaggaggaaaccgaaccagccgagcaagaacctttgattgattaaagcaagtcactacgccccctcctagaacatgttaattataaaactgtgtactaaaacat

SEQ ID NO: 32548 - DNA, 276 bp, Oryza sativa
tcgggggcaacattcccaccatatggaatgtccagggacagcatgggaactggcccgcttcaaggaaacccagcatcggctctaggaaaaacaatgccctcttcagcaacctttcaaaagccgatgtctggggtacaagactcgaagatccccaatccaggacaattggtgcgagcttcacagatgcagtccggcggaggaattggaacatcggctcttcagctacttccaagccaacagatgttggccaatcagccgatggtgcatcaaacactg

SEQ ID NO: 32549 - DNA, 450 bp, Oryza sativa
  unsure (1)..(450): unsure at all n locations
acctgcngcatgcaagcttggatgaatttaagagcaaagtttggagatggaatgaaaatgattttaaatggggnggaattccctctcttggccgtctggcttatatagggtacccacaacggtcataattgacatgtgggacccactagccgttgctctgccaaaaatggcaggtagccgttgcctggccggttcggtcgaaccaggggttcggctgatcccctggtgggccaactggccccacatttggccgttggactccaacggtcagtgtggccgtggcacaacatattttcattgaaaattttatttttgtttgctctaaaaaattcattcgaaagaatttccttaaaattcaaatcctaaatgcaaattttggaattcatacatgtgttgaagcaaaaattaaaatcgatgaaaataaatatgcggatacataccaatntacat

SEQ ID NO: 32550 - DNA, 277 bp, Oryza sativa
tgtgacttgatcgaagttcgtggcttgaacgatacttccaaagacatcaattctaaggcccatttcgcgatccgtccgtttgcttcgcggttatgaagtatatccccgagtggaaacgatatgactaccgtgaccgggtgactttgaaagtagtgagataatttcctgacggtaattaagacaacatatagtaacttttgaacctgaggatatcttgtcttggagtcggctaaaacctcgctaacgaaataaattggacgttggactttttgaacat

SEQ ID NO: 32551 - DNA, 434 bp, Oryza sativa
  unsure (1)..(434): unsure at all n locations
agctcgtcattntcatatctcccacacttaagttattatctagtgattctttcacctaaattcaagttaacatgtgctctacccactatatttatttcataatttattgatcattttgcatgtgcatgtttatttggctcttattcgcacattgcttcttttcgatagattcagagtttccggagagtaacgagccatatcccgaggaggatagtggctaccctcagcaacaaggcaagcacctaagcatatataacctatgttttctctaaaaaatgatttggttgcaatctatacgtgtatatatatatatatgcatgcatgcattgcctagatattaatattgtcggtttatggtgtacgggtagaacctaattatgcatctagttcttgtgatattgctctccttataccctattaccactggttgggat

SEQ ID NO: 32552 - DNA, 272 bp, Oryza sativa
tttcgccgatcagtgcaatgggttctttctctggcatcgacgacctcgtcttcccgcccgggcagacgtttctgttcggcagcctcgacttcatcaccgacaacttcggcaagatttctctcctcgactcggaatcaaaccagtcgggagagaaccggatttcggtcccgtttggattcccgaacgcggctgaaagctacttcaagaccatctcaaccgagtcggcttcaaaccactcggccgagattgcatcttctccaatgacaccagat

SEQ ID NO: 32553 - DNA, 436 bp, Oryza sativa
  unsure (1)..(436): unsure at all n locations
agctntaagttttattgtggagatggcacggcttttggttttacttttctttntcttctataggcaattctcatcatcttttatttatttctagttaagtaggagtggtaggactagtacattgtaccaaagatgaattctttttccaatctgcatgaaggtgagtgcatccatccatcgggttgcacaaaactgcaaacaaaggctagcttccatggtttcaaagagcttgttgccgcgctcgtgtggcttcctcaaagagacttttttttttcttctttttttttcttcctcaaagcaattcacaaaagtttcaaagttttcagttatcactccagcctgcacaacagctagtagatagaaagatgggtacgtgcatccaacccggttgtgcgttttccaatcaagataggcatgcatgcatcatcacacacag

SEQ ID NO: 32554 - DNA, 271 bp, Oryza sativa
tgcccgcaggcacaccgatcacttcacttgtcggggttcagctttatgcgggcggagcggagactttcgaaagtttccgctagatccgagagtaaggtctcttggttgcgcgtcttcacaaccaagtcatcaacataagcctcaacgttgcgtcctaactggctacccaaagaaattcgagtggtacgttgaaaagtaggtcctgcattctttaacccgaaaggcattgtcgtataacaataagttcctatgggggtgatgaatgtagttt

SEQ ID NO: 32555 - DNA, 222 bp, Oryza sativa
  unsure (1)..(222): unsure at all n locations
agcttcgcgccgcgctgatgtcagcctccacctatcacgcgccgcgtcatcatgctcacgctgagccgtcgcgtcgccgaggaatggcctcgccgccgccctcacagttggccgcgcggaactccggtggcgcgctccggcggcggcgaggggggagagaatttatatatncttttcttgaattagtttgtggcgcttgccagggcatatcacgacgattat

SEQ ID NO: 32556 - DNA, 279 bp, Oryza sativa
ctcagcttcagaaccgcgtggccatttcttctgacctatggacaccaacctcatcaaaaaaaaggatacatggccatcaccgctcacttaatcaatgatgaatggaaatcgaacagatctcttttgaggtatattgaatatgtgctgcacattatgctatatcatgctttttacatttgattaactctataccaatgttctctcgaggcgtttcatgtattcgacgtatatttatgtaccaacacctcataccgctgatcttataagcgaaattattta

SEQ ID NO: 32557 - DNA, 436 bp, Oryza sativa
  unsure (1)..(436): unsure at all n locations
agcttctntcgaatgccgagaaactccatattgttgtctgtatggaggcgctacgaccatgtgaagtcggagttgtctctacacgccccacctgattccagaactgattgaaccatcatattctctcagatcatccattcatactgcgtatgcattggcattgggtcatattattccggcctggccgaaagaaatcactccgatggttatatcaacatgggcagatgggtgtgctntggccacaatgtgattcaagctttcgatattatatatctggttgattccaatcattattcatattgaacattacttaatatgcatatgagaaataatagtgacgatttatagatagtagcagcgcataataatactatacgaatagagctatatgacgctatccgttgcaagcttgcaacaaatatttctatcttcacca

SEQ ID NO: 32558 - DNA, 437 bp, Oryza sativa
  unsure (1)..(437): unsure at all n locations
agcttgaccaaagcgtgagtcactggtggccacttatggagtcagtcggcgaacttcaccaacaactggatcttgtcaacaagttgaaccaaacttcttcaacgacgtcttcccctcgagttccgttgacagacgaggaaaggaaggcgccgttgctgcctacgccgccgattccatctcaagcggctgctgcggctgaaggcggaagcaagatggccagtggccgcctacaagttcatgaacaccggggaagggcactgggagtggcaaccaccctgngcccgactccggtcaagggtacgtatgaatctccttccacatctctgaaaaattntgagcaatttgagttcgggaatggggattgtgatggggatcagtttgggcgccagtataaccatagggttcctaaattagatttccctaagtttgatggttca

SEQ ID NO: 32559 - DNA, 275 bp, Oryza sativa
tcgtcaggtaagccgagaacagcacattccaggacaatttcatgctaaacaagaaatcaaaccagagtaaacaagatgagtaaccttcaactaaaccattgggctgtcttcaattagataggtttacaaagtgactattggaaactattcaagtaaaatggagattttaagtttttacctttattattgtctacctttattcttaccacaaggaaagtactacgtatcagcaagttctttcaaggcagtacgtttgctaataatgtctagtgtgg

SEQ ID NO: 32560 - DNA, 430 bp, Oryza sativa
  unsure (1)..(430): unsure at all n locations
agcttcctttagtagatcaatttccttatccgtaatatcaagaatccgacaactgacgacatgacaactctcatcggctaatctcaggacttcgaagccgatgctgactctaagccgatgactactctgggcttaccaaatttcactgttaacaggcccgtcctccgcctactctttattctaaaaacaaacataactatcggtggaatttattttttattttctaaaagtcccatcaaccgtcagcggctctgcaactatactactatacacccgccggctgcttctcctttttattgtcattgacattttaaaaattgaatatgattatcattggggtttactctctttttactttctagaagtcccggcaatcgccttcctcattngcttcacggccatctgttgtccctccttataaacatcatta

SEQ ID NO: 32561 - DNA, 301 bp, Oryza sativa
tatgtgatcctatacaaatacctcaagcttgcgcgcccatatttttttggatctcccggaattaagctgggttcttttttaaggatcccaacttccccgtttttcttgcacgcacaattttggaatcgctaaacaggtgcttttttgtaaaaaaaatatctatgcgaaatttgcttaaaaaaatcatattggtccatttttaaaaaaaagttcagcttatacctaatttattccttgcttattaaccggtccatttttattgcatgacggattatttcccatcctgccgaaaatgaacaca

SEQ ID NO: 32562 - DNA, 430 bp, Oryza sativa
  unsure (1)..(430): unsure at all n locations
agctntcatgagccgagccatttgcactcctaatcattagttctccacagtagctacccacctttggaaaactagttgttggttactcgacttgttttctgcattaatccaaccactttagttggtcaacctgccagaaacagtctgcagacacagccagagggcagcatagatatccacaatccctgtagcatgtcctgcaagagttgcatgccttgtctgatttggatctatttgatgggatgaacatctggttcttatctgattggaaactgacaatttctagtatgcatcagtagccatagttctggccatttgcagaaatactttgtccttgcatacaccccagacttcatttgtacaacatgatctgccttacttaactgtgcaatgtactaacatcaattcaatctttgcatggtgttgattc

SEQ ID NO: 32563 - DNA, 263 bp, Oryza sativa
tattgaaacggagctaatcacaattgctaggaactgaaaagaagtggaggaaacaactgtaacctgtgtaaagtcttgcaatatcttcatatgaccagtcaatgtatgagaaaggacttcttagcctcctgatgatacccatgtctgcatttgagaatttacttgctgaaattgcttcaacgatctttctatatcggactcgatatcatttctcagaaccatcagatttcatggaaaataatttacggtaagcactcatttgg

SEQ ID NO: 32564 - DNA, 440 bp, Oryza sativa
agcttgttcgacattctaatcctggcaactgcatgcattgaaattaatcaatatattagtatcataaatatcaagagctgtctagtacatagtatagagacttacatcctccgcgttagtcctgtaccgtccattaaccctaaggaattcgcacgcataatacccgcaaaggaccgttccttgcggttgcttgtgacacttcacgacatatcatagaaaaaagtagttaaaaattgcaattagtgaaacaattggaatacataaagtgagtggagtattaccggccaataggtacatactagtagcttctcccgtgttcaggtctgttctccacccttgaacttgtaggagtggaatgcactgtatggatgtcgaaccgcttcagagtaaggacgatatttatttgtaatacattcatatacaatatgcagagtcataat

SEQ ID NO: 32565 - DNA, 274 bp, Oryza sativa
tccttataagcattaggaatatgtgggggaacttggggattacttgtagcagtagatacaggaggatcaaatgttttaaagtgatacaaataactagcattagtcattggatctatagcctgtattggaacaattgtgccggtctgaccggccctggacccggtctgaccggcgtcatgatgtgcagtcggaccggcctgagagccggtctgaccgccggggtaatacccggtctgaccggccgtctggctggtcggaccgacggctgtgtcgc

SEQ ID NO: 32566 - DNA, 384 bp, Oryza sativa
  unsure (1)..(384): unsure at all n locations
agcttntctattttgtttctggtgcagaaacatcgtttgatgatattgctagaagggcacgctctcgaagagtggatccatatcatcttcttatcacacactagactagcctttgccgctaaaccagtgacagtcagacaccgactgtcagcttgattacgaaacctctcagatgatcactgatactgcctctgagcctatattaatctacaagagcgtaatgatccttctcccaacggtaaccaacctaggaacctagatggctatgatgcacctttgtctaactttgcacctacgctagagcgaactgaacatgattcgaagcccatagctgatatttaacgagcttatcgagagtgtggcaagattagacaaatgattccc

SEQ ID NO: 32567 - DNA, 269 bp, Oryza sativa
tgactgatgggggtgtacacatatggattggtgcgtactgagcgacaataattcttgcgggactgggggcctacgagcctgcttatgcacgacataattagcttcacccctgtacccgactatctccatggtgaatcgcaacggggacgccaattctgtctacaatcaacggggatatcagatagcgccatggccaactcaggatcttttgggagggacagtgggtgactcgtcagcataacgacgagtgccctctaccttctattcta

SEQ ID NO: 32568 - DNA, 205 bp, Oryza sativa
aaaaaaagtcagctttcaaagaaacttgataaaacccattcgttggccttcttcttgatttgatctaacaccgaactcacctcactcccaacgcgctcagtgtggccaacttcatacaattgattacacaccaataacgtccacgttgccatctaaccgtacagccccggactccaattcaattcaagtgactcttataataccc

SEQ ID NO: 32569 - DNA, 179 bp, Oryza sativa
tcccaaagtcttaattctgagataatttatagcagataaaagctgtccaaatactccctccgtccaaaaaaaaaggcaaaccttaggtttccgtgtctaactttgactgtccggctaatataaaatttttttataattcgtatttttattggcggtatacgcgaatattttggcaatcg

SEQ ID NO: 32570 - DNA, 430 bp, Oryza sativa
  unsure (1)..(430): unsure at all n locations
agcttgattccagatcttgacttaatgcttttgttttgtacccttgagccgtaaacagtaaaatctcctccgttttttttttctttttggttntgaaacacaatactacgctcatatacgcaagcacgcttgtttgatgaacatacgtcaaagtgtcaaacatttataaacatctccaaagactatgtcgacatacgttaaaattgactatgtaacatttgcttttaacggacaaaggctatgcttctaataagatcagggcattacgccctttattttgtctccttggctgaaagagattttgagaaaataaaaggggtgaaatcagattaatttagtccatcaaattntgtccgagcattagtttgtctctgcagntagtaatttccaactgtccatgtcggagtcgtgtaaatttcgttgtcctcat

SEQ ID NO: 32571 - DNA, 275 bp, Oryza sativa
tcgattgcaaccttgccttcggtgttcacgaggattatatacataggattttctcactttgcatcggtctcgtcagaaaacggacctgatgaaaggatccttgtcgggtgacccaaatactcctctgaattgatcgatgaaactctatcatcctgattgaccattgcaccacataaaaacgatggatttcaatcgctaaatgtagggtgctgaagtgctttgctcctgaatcctgatctagtaattccaacgagaatcatctacagtcatgtcca

SEQ ID NO: 32572 - DNA, 349 bp, Oryza sativa
agctggtcctctatgtttgacaacttaaagaataggagagattgggaggagaattttgaaaaaccgtttcacaataaaatgccgataggggagaggagacaatttgtcagtatgggtttcagaaaacttgttcttataggttgaccatctggctcaacctacagtcaagttgggtttgataccacttttgtcacgcccagaaatttaacccaaatttccagactaatttgtgtattaaatccctgtccaggaccagccagggtacacaaaacgacaagttatatacagttccaaacgtatattaagcgtaaaatacttaccaaagaagcacttagtcctctcaccgaaa

SEQ ID NO: 32573 - DNA, 273 bp, Oryza sativa
ttatgattatcaattgctttattattatcaattgtgtgatacacatttcaacctaacaagcatgtttcatgtctttaattcattgtctgtaggtcaatgttattcgtgcaagaaccaaggtattgataaactcaagcacccatctagaggagggtactcaaaaggttatgatggtgctgtatgcaaccaccttggtgaggatagttctgatgaagaggacgaacttatgtaaccacctgctaactagccaaagcctttaggcattagagccag

SEQ ID NO: 32574 - DNA, 381 bp, Oryza sativa
agcttggatatcatgctgaggatggattggatgttttatctcacaagacagatggattgtgccgtaaagtccatcaccttgcctggacctggatgaaagcaagtccactttacccctaacacccctaccgcaagtcagtctatcctaacctgtttacaaatcacctacctggagacaggacccatagaccgtgaatattccgacccactttcataagaatgaacgactatgccaccagaccgagaaattgagttcgccatataactggcaccatgcactgctcccattgcataaaagaccatacccaagggcagctaatgaattatcagaacgtaaaacacatatcaaagaactggaaaaaaaggctatgtcgacctatct

SEQ ID NO: 32575 - DNA, 276 bp, Oryza sativa
tgtattggtctccgaagagtttgtgtttgatctagatcaccacaaccatcatgtcttgctcacggtaatggggttgaaagttcgtgggtcataacttatttttttaccataatggaccaaaacaatttataatcaccatatcttggccaaggccttgcctctgggggaggcaggatgagaggaaagggcacgagatggtggactcactggcgatttcattggcagtttagcaccggcaacacccaaaactatgacaatgcttcctttgtattaagg

SEQ ID NO: 32576 - DNA, 395 bp, Oryza sativa
  unsure (1)..(395): unsure at all n locations
agcttatatttcatgccacaggactgcaatctcatgaaagtatttgcccatgctgttctcatataccattcatgatgaacatcttctgtaccgttgtgatatataatgcggagtgattgtgttgatcaactgcaacacacctatgtagaacgcagcagtagcgactgagcgtgtacacatggcgagcataacacatgatggagtgtattcatgagataataggtattcacctgaggctacaattaagccatctacgacaggtatgtctatctacgcggctattctattataccaacantgatagacgcttctatcacagactgccgatctttatttgtgaagacagacaggacatttctggtcacagacgggctataatggcactgattataatc

SEQ ID NO: 32577 - DNA, 271 bp, Oryza sativa
tctggggctctcgtattttggctcaggcgctgttgccaacctccagaacagaccggctaattggccactgctgactgcctgcaatcttagagatgcaccatgcctgaccgtgttcaaggccaagcttaacttgatcatagacttgctgaggaataaggctaatggcttatggagacccgatcatgcctccgaaccttccaccttggcagaggaccatgggcatgcactcacgcagctgaaagcgtctctaacctgtgcacgatttcttgat

SEQ ID NO: 32578 - DNA, 439 bp, Oryza sativa
  unsure (1)..(439): unsure at all n locations
agcttgtgtggggnngannatnnntcttgaaatattcattancnntgntctaaacctgttttcgtcaataatttgtttgggattaattattttgttggttatgaatttcttgtaattatccttgcaacaaataaattctaaacttaaattacttgaaaccttgcgattntgaatttataagaattgtgtcacactataattgagtttgttcctatgtatcacttgtagtctgcatatattttttgaatatatttggcatattttatttttggagttcctaaactttaattaacattattttcttgtatactacagntgtctttgtggatttaaggatatattaattgaagatatttngtattaaaaaataaggtaaatagcaatgttttatctaattaanaataaacttctatctactcctcccactctttttatatgc

SEQ ID NO: 32579 - DNA, 433 bp, Oryza sativa
agcttcaaatgtgccatacctcatctcaataatcttttgtttggctctccaggcctttgcatagcttatggtgtacttgaatttgttctcgatgtgcctaataattgattttggttcaaagccaatgttaccaacaacactgctgtacatctcacttcccacaaaagctgaagtgatgtttcggtgatacttctccaccccttgtaagtagcacttgtgctcggtcacaatgctaactttccaataatcattccatttacccttatatgcatggacacgccacggacaatcttccttcatgcacctcacttcatacacataatttgttgacttgaccaccctaaactctctctgcaaggaaactgcccaatgcttcaccgcctccttcatctcatccttatgagcataccttgcaccctcaattacctcgttc

SEQ ID NO: 32580 - DNA, 428 bp, Oryza sativa
  unsure (1)..(428): unsure at all n locations
agcttgtggctggtagtaaaacatcgttttttctttttatatagagntcgatcctcaactatttctcgcgatatcttcttaccaagatttgttatggcatctataacagcctctggtttatgtgggcaacccggcaagtatacctccacaggaattaacttatcaactccccgaacagtactatatgaatccgtactgaacattccaccaattatagtacaagctcccatagcaatgacgtattttggttcaagcatttgctcatataatctcactaaagagggagccattttcattgttactgtaccggctgttaaaattaagtccgcttgcctaggactngatcttggtaccaatccataacgatcaaagtcgaatcgtgagcctattaatgaagcanattaatgaaacaacaactggtaccatat

SEQ ID NO: 32581 - DNA, 274 bp, Oryza sativa
ttatgttcggcgcagtactaattctggaacttatgagcaagaattgctctatcaatcaccatctactttagacatatcttctgaaacttttttcaaatccaaaagtccagtatcttcctacaaattagtgaattaggaggagctctttgtgccgaaaaagaaagagcagggcaatatttcaaacttgcattcgaactgcgaaatatttatacaaaggaggagagatcaagataatgcagcagggttggttatctaattggctagtcaaacatga

SEQ ID NO: 32582 - DNA, 421 bp, Oryza sativa
agcttaacatgcaaccataccacatcatcaccctttatcaataattatatatttaacctcatgcgagcatacaacatcatctataatctataatctatttaattctacacatcaacatacaagtatatctaatcatcaccctcacatcatttccataataggttaacaattatatctatctttttgtaatatttaacatatacttatcaatatattccacattaaatcacgggtatcatttgtttgttttataataagtactaataaaccctcgcatttcttcttttttttgactcctagcttgattgtcgaaaaaatatattgaaaattgcttagtattcccgcagcaaagcgcagagaatcactcagtatatatttaattctaatgccatacaaatgccacatcaatgctacattggac

SEQ ID NO: 32583 - DNA, 267 bp, Oryza sativa
ttatcaaacttaattaagtttgattaggaaaaaaagttaaacggtttataatatgaaacggtgggccaaaagtttgctagaattattctgcggctgctcaaaaccgtggttcagacgttctgtaattgtaactgagatagtaactaatagtctcctaattgttctgtacaatactaatcgtcatcctattcgtatggttctagcaggttcaacaaacggaggaacaggagcaaactaaacgagttagcctgaacatacattcactga

SEQ ID NO: 32584 - DNA, 381 bp, Oryza sativa
  unsure (1)..(381): unsure at all n locations
agcttgagatgaacaagcgagcggccttattttttttgtgacanacccaacatggaagagtgccgcgtgcatgcggttacggcgaataaactttatattaaaaaaagagagcatgatccatcaggttagcacttgctccaaaattttccaatatcatgtctcgggcacagaaaattttcgacgtaatctccacgtctcaatttttcacaacacacgatatttctatgtgttaaatattgaccgtatatgctgcacccacgaaaccagatatactggtatggtttcaatgacactgacattatctctctatttgtccactatggtgatcaaccctccgagatggcctacgatctggctcaagatacaagcacaccatatgca

SEQ ID NO: 32585 - DNA, 284 bp, Oryza sativa
tttaggacactttaatactcaactttttatctatctgtcattactttttgcattccaatttatgcataggacaaactttcatgtatactgcttttctgggtggccattttgctcctgactttatgagatgatgctgaataacgtgcatgtaagaatttttctttggcaatggttgattattaagaaaatagaaattttacaactttttgccgggtgtattacaacttttcatttttcttgcacctgttagagacctatttatcttaattctttttcgtctacat

SEQ ID NO: 32586 - DNA, 420 bp, Oryza sativa
gcatgcaagcttatcaagtgtgagttctggatgaccaaaattaaattcttatgttctatgatatccgctaaaggagttgttgtggacctccaaatagtgaccgccttcactgactggaagcaacccacaacagccactcaagtccgcaaatctttgggttcggcaagatactaccgaagattcatctagaacttcttccaaataactcgacccatgacacagatgctgaatacagacgaaaaattcgcgtggaacctgcaatgcgagaaggcattccaaactctcaaagaaaagctggtttcctctccagcgttaatcttaccggacactcgcaaggactatctggtgtactgtgacgcttcccgccaaggaatgaggagcctgcctatgcacgaaagtcatgtggtagcctaatcctca

SEQ ID NO: 32587 - DNA, 274 bp, Oryza sativa
tggcaccctcagtacagaatttttttctaaaattggtctaagataaatcatacataaagcatacacaaacttataaaatgcatataaaattcatctcaactcattttagagcaaactcagtttctatagatccatcaacttatgttttcctaaaaagtaaaatgaaatagtatacatactttagatcaaatgcctctgaaactattatctttaaaatgactagttttaggtaagctgaaatttagaaattcacataaaattcatcttagaacta

SEQ ID NO: 32588 - DNA, 438 bp, Oryza sativa
agctggttaaacttaaaggagtttgactagaataaatttttcatcttataatatgaaatgtagaaagtagatccttagaaaaaacttatttaggaaatatacccttttctcttgctccatggtccaatatgacagcgccagtgacattgacgctgtcctccttgtcccccacggaagtgactgatacgaaggaggaatgacatcaatgtcattagcattgaggaccaattagttaaaaagttatttacaaataggtccttggcaccaatgaccctgacaccaagaacctatttgtatatatttttattttaaatgagtcctattcagaaatttttttttgcaaataggtccacagcctcaatgacaatggcgttgttcccattcacatcgatgacttatcttcctcggagggcaaggtgatagcgtcagtgtcattag

SEQ ID NO: 32589 - DNA, 273 bp, Oryza sativa
ttcctgcagataacattgtcagtgctttcaagcatcaaccgcagatagttatctttgttggcacattggtgagaggccatggaagtaagcgatctactagacactttgcttgcatttttctgctatgcttttatcttctattgtcataatgcataataccattgtttcaggaaacgtttctctatcaggtaactcggcctgcaaatggtacataaatattgacacaccagatgccaaatccttggctgctaggtatattattcatatcttgcc

SEQ ID NO: 32590 - DNA, 444 bp, Oryza sativa
  unsure (1)..(444): unsure at all n locations
agcttcggcatggctaccaccaggggcatcggatcctccaccttaactttctctgcttaagtcatcttcaccaagatcctcacgctgacctctcctaccatgttgccgccacctagcactagcgcctgtctaccccgccaccccgacaccttctccaccgccggcgcactgagggactcatcctactaggaccttgctcttccccaacctctacncaggccgagagtcgccgttaggccgctggtgctgccctgcatccatccccaagccttgccgatgggaccctgccccttgcacgccgccccaactcctcttctacatcatccgcatctttggtgtcctcccccgacctctgtgctcaggacgccaccatccaacctccgctgcctaaagagaaagggcgtcctactgtatccgtagtccctcgatagcttcgccgctcta

SEQ ID NO: 32591 - DNA, 272 bp, Oryza sativa
tgcacgccgacggattatacaggttcgggccgttatgaagcgtaataccctactcctgtgtttaggattatggtacagttttacagaggtttcttcactccagagagcacactcgctttctttcttctgaagctcaggttttctgggagtcgtcccccaatctcagtgggcagggtcctccttttatagctcaaggggataccacatgcgccgcctctacctaccctccataggagggggatcccactccactttttttgggccttaaaccg

SEQ ID NO: 32592 - DNA, 433 bp, Oryza sativa
  unsure (1)..(433): unsure at all n locations
agcttcnaacaaagcgactgaactctgaagaggactgttttgtattgtaaatnctatccaccgggctaatcatacggatgaatcatgagacgaacaccctgaaacgcgaacaaaagctgtcgtcgtcattggcaaccgcctagtatgcgtggtgcgacgcccgaaaataacgaggccagaataaatataaaaacggtgccccgtgctgtgcagtgtggtgcgaattgtttgtcccttttgtccgcggatttccctgggtaacacggacacgccacactctgaccacagctcacattccactgtctccacttcaagcctaccttaccacctcggctttagcgcccatctcanagaccgcgtcttgcctctctcctcccaccttatctgtcttccatgatcttcttcgtttgtgcaagtgcaacaatggcttcct

SEQ ID NO: 32593 - DNA, 274 bp, Oryza sativa
tcgctatttgatgtaaggggagtttaaaaaagagagtacagtatagacatcagcttaaccaaaagctgataaatttgggatcgagccaatgaactcaacgtaggagaataaggggagagaaaatgtacctcatccaaatactgatgggagtaggaaagataaacaccaggaagacaccaatcgcctgatgtcaggagctgcaaatgaaatcatgttgacggaggacaaattagttgtttaccctgcatatatgccctatatagatctcattccc

SEQ ID NO: 32594 - DNA, 380 bp, Oryza sativa
aagcacgagctgcagcttatacgcgaaggccaccctttttttttttttacggcgaacgtcaactgttcggaacagaagtattatcggaagcagaaaagaaagtcagaatcatcatggaaagggtgaggattgctcaatctcgacagaagagctacccggataaccgtcgaagggagctcacttttgaggcaagagattacgtgtatcttcgtgtcactccgctccggagagtacaccgttttcagacgaaaggcaagttggcaccacgcttcgtgggaccatacaaaatcttggaacgaaggggagaagttgcttatcagctataacttccatccaatatgatcggcattcgtgacgtgttccacgtgtcccaattaaag

SEQ ID NO: 32595 - DNA, 274 bp, Oryza sativa
ttacattctatgatgccggatcatcttttactagcaatcgtgaacggaaacatttgccacatgaaagattatctataattttatagtttttataatttaagagcttttaaaatataaacatgttaaattatcatcccacataattcacatgatgtttcaatgtatatctttattatgttttataatatcctacatacttatatagttcatcctcacttagttagtgcttaaatgattaatctatggtccaaattatctttctccttttttttct

SEQ ID NO: 32596 - DNA, 437 bp, Oryza sativa
  unsure (1)..(437): unsure at all n locations
agcttgaatgaactttcagagcaaagtttggattgggagtgaaaatgagttgaaatggggtgaactcccctctcccggccgggtggcttaaatagtgcgcccacaacggtcataactgacctgtatggcccactagccgatgcctcaaagaaaggaggtagctgacggttgcctggccagttcgtccgaactcggggttcggccgaacccctagtgagcccaatcggccccacttttggcgattggaatccaacggtcaatgtggtcgtggcacagcaaattttccgtgaaaattctattttattttgctctggaaatttcatttggaaggaatacctcagaattcagatctaaatgcannatttggaaattcaaacattcatacgtgatcattggtcactatactaataatttatatattacttgtgataaatcaa

SEQ ID NO: 32597 - DNA, 271 bp, Oryza sativa
tggcggtggcgagcggttttattggcgcatgcgttggggacgatgcaaccgcaatatggtgtagatggagttgacctcgaagacgatgcggtggaaccgcgcgtgcgcctctgcgaatgagaggcagagctcggggacacctgaacacatcggcttttgagcaactcgacgaggggtgggggagtatgagcttgggggataggagcttggccagcgtgacgaggcagaagccccatccttcgcgcgtgcaggtgaagacgacattgcaatt

SEQ ID NO: 32598 - DNA, 297 bp, Oryza sativa
  unsure (1)..(297): unsure at all n locations
catgcnaagctcctagcttcacatcgctacccgccacatctaattgttcgcgtacaagagtcacgagctgtcacccccagcaaaaactagcgcttatggagacgaacacctgtgcttggctcgtgatcgagcgtcgtcgtcatcagcggtggcggcggtctagggagggaagagatacattatttgatcgatgggggggcggcgcaagggcagatcacaccggcgacgaggctggcgcacgcgctggaggtggcggccgatcccgcggagaacaataaggccacgctggccatgccg

SEQ ID NO: 32599 - DNA, 271 bp, Oryza sativa
tcacaccgttgtaccatgtcttttgtgtctttgagggcggttggctataaaaatccatgtcgaaaggcttttccaaccaatgtacgaccggcggcatgtgacccacagaccccttcgtgtatgtcgaggaggaggtgtttgccgttgtcggacgagacgcatttgagaagtaccccgtttggcgccttcttgtatagatcgttgccgatcatacagtagatttttgcttgacgggttattttatcggcttctgcattgtcctcgggcaact

SEQ ID NO: 32600 - DNA, 444 bp, Oryza sativa
  unsure (1)..(444): unsure at all n locations
agctntacaaagtaatgaacacatcatgtatttgtttgctaccaaatttagtaattcagtaaaaaaattcactaatacaaacataacaaaaagccatgttatgattctgaaaatatgcttcacgcctagaatttgccactaaatcacacattaacaagcacaaaaacagaaactggatttgctaagcaaaaagcaccccttaaatcaaaagccttccctaaaacccccgaatccgcgcgctaaacaaccattccccaactcaaaagcaacgctctgcagcaacaaaaacaacaaaatctcatatccatttcgtgaacgcttcccacagcctatgaagaacaaatctccaaacctggaaacgcaacttggcgaagcagcagcagcatcacgatttcaccgaccaataaacattggatgccacacaagaacgatgagacaaactaa

SEQ ID NO: 32601 - DNA, 266 bp, Oryza sativa
taaaaaggtttaactattttttatttaaagttaaaagtttcgagtaatacagaaaacggtgggagtacaagctaccaaaccaacaaccgaacctttgtggtggggaatatatactgggcgggtcacctggccggaatcgattaaattataaattatcgtgcgtgcatgggtttcagcccctccatcgatcgatgtgatgtgatgctgtgatgggtttcagattttgatcgcactactagtaggactcctatttaaataatccacgt

SEQ ID NO: 32602 - DNA, 432 bp, Oryza sativa
  unsure (1)..(432): unsure at all n locations
agctggcaccccgctcctccttgagcatcttctcttggcttctcctccaaccataaaggataccgctgccttgaccttcagtccaatcgtgttcacatctctcgacacgtcgtatttgatgagcactcattccctttctcccagcagccctctcctcccaatccggcggctcttgattttctaactaatgatgctaatccagtgcccagttctatcggtgcacctctatctgtatttcctacaggtgcttctgctggtgttcctgcacggccacgtgtggcccctactgtcggcatgccatcagcgcccagcgcggactgtcctcgtgtggcatccatcgcaagcacagccgtcgagacagcagctgccactccggtgcctagcacgatntctccagtcagaccaggtgcccaggccgtttcctctgcgcct

SEQ ID NO: 32603 - DNA, 271 bp, Oryza sativa
tcacaaagcgagggtgatttcctgccgaagaggcgcgaagatgacatcctcacaaaggcgctcggaacgaaagaacatcctggccggactaggggaattggtagcgatgtgccctggaagcatggactcccgcagtacagctcccaatacaggaaatggaaagtctccaaggaagagagggacgctcgtttgaaggccgaacttaaggttgaggtcattcaagaactagaagctagcatgaacgctagggtggaagaaagggttaacaagg

SEQ ID NO: 32604 - DNA, 394 bp, Oryza sativa
  unsure (1)..(394): unsure at all n locations
agctntcttaatgatagatcagnatgatccacattttctttttaagggtcaaaanttgctggccttatctcagatgagatcttctttatccttcctacgacatcaagaaactgggtccatctttcaaccttcttcctcttcatctcttctaggtatgggaatattgcaccgagctcatcccgtaatccacatgctttctgattagactgatnaaacaatctaaaacaaagaactaattactgccttactggtagatcctatttcgctacagcatacttctacctttcaagttggataactaaataatacacattaaatgagcccatctgtgactgtaatcatatactacctccgtctcaagatatagcaaccagtactagatgggatataatct

SEQ ID NO: 32605 - DNA, 275 bp, Oryza sativa
ttcatcgtctaagtctgcatagatgttttcccttgagttggcttggcttaagctgacccttataaacaatggtcctgtaaaaaaccgaatttcaggaaataattacttggcacaaaatggaatgcatgcacatgtgaccaaatcaaacttcacttcagatgagatcaaatcacaaaggaaaaaaaaacatccaaaagttttcttctattccttgttatcaaaatgaagcatttctgaaacatgtttttttttattccatatcacagcttactgtt

SEQ ID NO: 32606 - DNA, 394 bp, Oryza sativa
  unsure (1)..(394): unsure at all n locations
agctttggatgactatctttctatgtttaacaatattttgagngancttagatctattgattcttcttatgatgttaattatacacaatctgaggtttctcgccactttttgaatggtcttgacatgtttatttgggagatgataagttcatctattcaggattctgttgatatgtgtactttgactttggattcgctttacacaaaactgaaaacacatgagataaatattttttctcgtaaaattgattctaagtcaagtgttttggtttcttcctcaacttctttggatgttgatcctacattgggttgatccgtaagaacggcggttgctttgatcaacaactacatcttgtaaaaccatgattttataagtgcccgatataattcattg

SEQ ID NO: 32607 - DNA, 266 bp, Oryza sativa
tgaaagcgtgcacacaaacactttttaaattggatggctggcatataaacagttagatacaacaaagatccaatcatacttctatatttcttttgatcaacaggttcaccattttcaccaggatccaacacaggtgtaaaaccaattggtgttgaaattggcttgcaattctccatcttgaaccgtctcaaaagatccttcgtatacttcctttgatgcacaaaagtaccttgaggtgtttgcttaatttgcaatcccaaaaagta

SEQ ID NO: 32608 - DNA, 432 bp, Oryza sativa
agcttatgtatatagacgttccaaacatatttattttaaacatacagcccttagcatatgatgttgattagtatcaccgctctggtattcttactttttcaggaatcaagatttattatgatcattcagtgagcttgtgataatattgctaatcaacactctttctgtgatatctataacaaataaatggcatcacatgtgttttatcagagaccaataatgagtgggaaacatataggaaaatcactacattggatcagctgcatacttatcattaaacaggttaggtcataaatgaaatgtacattaagctgatggcatctctgacaggcagtgaactgatgtttggggtggttggatatcctttttgttacgaattcactctgagggtgcttcccataatgattgaaaagctatgtattagtttgattt

SEQ ID NO: 32609 - DNA, 85 bp, Oryza sativa
  unsure (1)..(85): unsure at all n locations
agctntctaaaaaagaactatacgtttcatatatatagagttggggttggggggggggngcccncgcccttcaatctcctctcat

SEQ ID NO: 32610 - DNA, 278 bp, Oryza sativa
  unsure (1)..(278): unsure at all n locations
tgttatcccttcatctcaaaatttaacaactctcttnctctcaggatttggtccttaaatataacagacttctccaccatcattttctttctaaccaatctcaatactccactgttcactgtatcccacctatctctactactcattcgatcacaaccctccaccactcacttttacctacttacttaataatcatgtccaaccctaaaactttttatattctggaaggaagggcgtacattgtttactggagaggcggagtgctaataatataacaa

SEQ ID NO: 32611 - DNA, 439 bp, Oryza sativa
agcttactgcataactttcttttcagaccctcaatttctgtttattccagtagcagaaccaacagctaaatacattatattacaatttatgaagaaactgacagggtttaaaaaagagctatacataacacaccattttctccaggcttcaaacgtccaccaggaagcttgcaaaatgtattaccaatttgcaacagcagtatgtggggatggttgtgttcttgcacctatttaggacaatgcaagcaaagatttcagtttgtttgacacactgcagtttatatggactagtagtaataactacacaaaatttgacaactgttggatatttcaaacacaaaattgtgtacataaataatgtgaagaaagtataaacacaccaataggattgcttcaacactggtccgcattccttctttcatgtagctgtcattacaga

SEQ ID NO: 32612 - DNA, 274 bp, Oryza sativa
tccgaaccatggctagctaactcctatttagcttacgtgcagctagctgtgtgagagtgatcgatcaatggatgaagcttaagctaggctatgtcggatgtcgctgtaaactgagttggccttttggtcggagcgagctgcgcttagctgtgcttttaaagaggctgctgcggcgtgtgcaagtagctatcaaagatgcgagcgagcgaaagcctgtcttcttcttctcttgcattgcatgttgtttaattaattagcagctacctgcacttaa

SEQ ID NO: 32613 - DNA, 444 bp, Oryza sativa
gcttctaaactatatttcttttggattcctccccaatggctctcacccaaagactcacccggcctttgtaaaatctcctcccttccgtctgcattccttcctccattatttctccatccctttcccctctccttctctcctctaccttctctctaaaagactggatacagaacaaaaaaaagggaaaaaacagaaagaaaggaaagaaagaagaacacctaccaagcaagtcttggtctttgagttcatgggctgtggaattgttcccaggaatcccctctggctctgaaaagattcacaccgagcaacagttctttgattttcttccccctttgttttgctgaagaattgcttgtacagaactgcttctttcctgtttccgcttggatttccggtgtttattttgttggaattatcttgggccctctcttcttcgcttgtgga

SEQ ID NO: 32614 - DNA, 407 bp, Oryza sativa
  unsure (1)..(407): unsure at all n locations
agcttatctcttacgctccaggaatggatcagtcttaacattaccaccggctcgcctcggncgccgccgactggtgtttccgcctgcacggctggcctattatgccgccgttgttgggcgcctacgtcttcaccgaccggcttgccttcgccggcgccgactggtgtttccgcctgcacggctggcctattaagccggcgttgttgggcgcctacgtcttcaccgaccggcttgccttcgccgccgccgactggtgtttccgcctgcacggctggcctattatgccgccgttgttgggtgtctacgtcttcaccgaccggcttgccttctccgccgccgactggtgtttctgcctgcacggctggcctattatgctgccgttgttgggcgtctacgactccaccacc

SEQ ID NO: 32615 - DNA, 275 bp, Oryza sativa
tgtggacaaggctatccctcatgaagagcaacgcaacaaattagaccgtaaaagaaaggtagctcagatcaggactcctcaggggaacgatcagaagcctcgcttcatgatgggacaacagggtgggccttccaccctgatcgtctgacagcaccgtccctactacccgagtaacttcaacaacgactacaatggtggcagtcattacagaagtgagcagggcaacgacaactcaactccccacccattaatggcaccggctcagtcagaactgc

SEQ ID NO: 32616 - DNA, 277 bp, Oryza sativa
tgccatatgtctgaaccaccacctttgttttaagaccaagaagacgccattgcctaacaggtcggagccatctttgaaagtgccagttgaagtacaggatcacttcattcgcaatgcaaggccacctgcccgaaagcaacctattacggacttcagacgcatgatcaggaaaagggattgcaagaattttccaagaaagaattcgagaaagatgaggccagcgactatgcaagactttctaaaagaggcagggctgaaaagtatggatgatgtggat

SEQ ID NO: 32617 - DNA, 423 bp, Oryza sativa
  unsure (1)..(423): unsure at all n locations
agcttgtgcagctttgcggtctttgtattatgtattgatggngcatgataaagttatcaagtcaggacttggttcagatgctnttgtagcaagcactgttgttgacatgtactgcaaatgtggcataattgatgaggctcaaaaacttcatgataaaattggcgggcaacaaattgtttcatggaatgccattttatctgggttttcactcaatatagagagtgaagaagcccagaagttcttcttcgagatgctagatatgggtctaaagccagatcatttcacctttgccactgttcttgatacttgtgcgaaccttgccaccattgagcttggtaaacaaatccatggtcagattatcaagcaagaaatgcttgatgatgaatatatattccgcactcttgtagatatgtatgccaaatg

SEQ ID NO: 32618 - DNA, 270 bp, Oryza sativa
tcagatatagcgagctctttatcttctgacccaaattgcgtccggctgatgaacctagggtggacatccagctctcaatgcggccgatcgacttaggtgattgttctgaaatggagggcggaatttttggggcccgagccgcagccattcctgtggccttggccgtggcagctgagatggggtagtacgcgaaccagaagaggtagtattcgaataccgacaggtgaagctcggagtcgacgcggccagcgaggagaggggagatcacct

SEQ ID NO: 32619 - DNA, 270 bp, Oryza sativa
tgcccttcaaaagtaaggtcatgtttaatcattaacaaaaagaagaggtggaattaagcttaatatgcttgttacagaacagtgcaaattagtgttaccagactttatgtagtaagcaaaccagggtaatgtatcacgcatatactcataaaatgaaaggacaattaaatatcaccgaaggacccacaatatgcagaacactaatgatcaaataaaagtatatgatgtgatgttaaaggataaatccatataattgcatacctattacct

SEQ ID NO: 32620 - DNA, 441 bp, Oryza sativa
  unsure (1)..(441): unsure at all n locations
agcttgcatatgaaccacatcgcaatttattgattctgcatatgagccaatggaaaacgaaaccctacaaacctgtgttacctttgctcttccggaatcgtttaaccactgaatatagtaaggatgtggatgtgtacgtgtagtcaagccaagcttcttgaccaaatcagaactcaccaagttgttgcagctacctccatcaataatcacacgtgcacgacggttgtngatgacgaaaaacatctgaaacaaattatggcgttgcaacctgtcatgctgctgtacctacatgctgagcacccgctgcacaatgatggttctgtagttcgttgtgtcatcacgaccaaagacttcgccatcctcatcctcaacttcttcttcctcctcttcctcttccacatcggaggtggtgatgtagccatcttctgaagcaacatcggc

SEQ ID NO: 32621 - DNA, 271 bp, Oryza sativa
tggtcaggggttttcgtcagcttatccgcttgaggaggttgatattggtgatgggagtattcctagacctacatttattaatgcaaacatgggggctgactagaagagcaaggtatgtaaattacttagagaatttgttgattgctttgcttggagttatactgagatgcctggtttgagtagggatttagttgagcataggttgcctattaaatctggttttcggccgtataaacaaccccctagactttttaattctgatatgtatgac

SEQ ID NO: 32622 - DNA, 435 bp, Oryza sativa
  unsure (1)..(435): unsure at all n locations
agcttcttaaccttttctctataatttttctgttttggaatgttactgcgccaagcggaaagaattttgaccactctgcaggtgctttcacgttgcctatgcaaagcaactttgctgctggtctccttcatccacctttttctaacaaccaaatctctcagcttcctacgaattaacgacatgtgtgcatgattgtgtgtgtgttgcaagcatcgatgaatacaagagcagcaaaccagcagggttacttgcagtagttgaattcccatctcagagtcgtcattttaaattatttcactcctttaagttatagtcaacaagacttaattaattaattaaactgtcagtaacatatgtttaaacccatgcttttaattgatgatggtgctatcatcaccaaatgatcgatcaaagcacccactatgatngatcttc

SEQ ID NO: 32623 - DNA, 272 bp, Oryza sativa
taatactccctcaactccaccatgccttgccatgaacacacaaaccggaagctaatttgcgcacctcaacgcacagctcggtcagcacaaacacctcccctgcaagcgccggcgccggcgccacaccgccaccgagtcgcacctccacagcagcgccaagcttcttcagggaggctatagctatagctgccgaacgcgcaggcggagaccgcgggcggacatggtctcttcaccattggtacttggccttgacaaggacctcctcgtagagc

SEQ ID NO: 32624 - DNA, 66 bp, Oryza sativa
  unsure (1)..(66): unsure at all n locations
agcttgtatactaggcctccaccagattttattctttctgtatctagacgcgnatcttaatatcta

SEQ ID NO: 32625 - DNA, 271 bp, Oryza sativa
tgaatagctatttgctcttcaatcatctatgcacgatatcaagatttatgacacccagtccaccttgatcttttggccggcatatataatcccattttgctaacctatatttctttttctggctatcactgctccagaaaaagctcgatcggtaataatccagtatttgaagtacagctagaggtatttcaaaaaacgataacatgaacatgggaaggctcgaaagaaccgagttaagaagaaccaatctcccaccataggaattattttt

SEQ ID NO: 32626 - DNA, 435 bp, Oryza sativa
  unsure (1)..(435): unsure at all n locations
naagctgcaacctttctaaaatatgatcttatattttaacgataccaacattatcaccagcttttcaatcagcaattcagcaccataacaccaggcctaatcaagcaattctcatgtgcatattcaattaatctacagataaaaaactacatatgtgagaggtacggttgtacacataatttatatatgtctgctcacataaacagagtgtgttgagatgttactagtggagtagagtaaggtaaagcattttttatagaaaaatgatttgctccgaanaataacgaaaggaatgtgctaagtggaaattgtttgactcgcccaagagcagtcctgtccttgactgataaaaggggaccaaacccatacaaccatggaaaaatggnggggaaacagagatatggggagggacaatacattgttattactaaccat

SEQ ID NO: 32627 - DNA, 268 bp, Oryza sativa
tacacgagaaaataaactcatattaaaatctgatgcacgatctggcacgaaactggttcttctacccagaaaacacagcacaagggtatctaggaacaaaataaaagatgcccggggcaaccattgacacttgaaacttaccataaactttcataagaacatggctttcttatgccatacactaatgaatactaccatggtcatactacgggtaaatttgcccactgaacttttgggaaagagctatgaaaaatacttaatgatcatt

SEQ ID NO: 32628 - DNA, 430 bp, Oryza sativa
agcttcactccttggccctacaatgagccagacattgagaagacagtggcctacctttttgagagtactgccactgcacatgctcaccgggatgtggcatacaagcattatgtcaatgagatggactgcttacagtctcaacatgtaagtacttccaatatcacttctagttagacatttacttctttaattgagatactaaccaacgacatctcttcaacttttgcagattgaatggttaccataccacacaaatgaggcttcaagcctgaccctgaactcgatgtgcaatcgagactttgactatttaatgtaccagtgcccattgatttgtttctgggcagttgagtaccaccttccgcaccgtgtcatgcgacagttcgggaagaaacaagactggccggttgaggacatctcaactggagttgaa

SEQ ID NO: 32629 - DNA, 280 bp, Oryza sativa
tggggggttttgttgacgggtcgtttatcgatacagatttcaagccgtctcaatatttacctaaatatagcagggagaactacgtgatggtttgcaatgcatatatctgttagaataataaacttccactagtattaggtatattaaccttttgcagagaatgacaataaagtggaggagaatcgacatcaacatagatgacaaatcaatcggacgatgtcgagaaccagacttacgtatgaataggccaagaactcagaattgatacgaagaattgggc

SEQ ID NO: 32630 - DNA, 425 bp, Oryza sativa
  unsure (1)..(425): unsure at all n locations
agcttgtacagtntgtgaaggagttnttngagattattatataatctacttcaaccgatatgcccttaggcacggccatacataacatagaaatcacacgtggaaggggtgggcaattagctagagcagcaggtgctgtagcgaaactgattgcaaaagaaggtaaatcggccactttaagattaccatctggggaggtccgtttggtatcccaaaactgcttancaacagtcggacaagtgggtaatgttggggtgaaccaaaaaagtttgggtagagccgggtctaagtgttggctaggtaaacgccccgtagtaagaggggtagttatgaaccctgtggaccacccccatgggggcggtgaagggaaagcccccattggtagaataaaacccacaaccccttggggttatcctgcgcttgga

SEQ ID NO: 32631 - DNA, 274 bp, Oryza sativa
tcttccaaagcatacggctttctttatgtttatgacgatctctagacagatggatcttatatgaatcgtatgaagaagtaccacatgagtggatatataggaaaggaatccaaatctgccgaatcgctcatgttatgatctactacatcctaggtctccgcgttccgtcatctggcttatgttcttcatgtaacattcatatcgaatgactctatgaaattacgccgatacttctacatattatgggtaacgtaagagacatccctattttccc

SEQ ID NO: 32632 - DNA, 281 bp, Oryza sativa
tccaaccaccgcgctgcgctgccgtaggtccaaaacggcctttctttttgtgccacaaaacggcctcgagagaaaatcgacgtgctatactcttgaaatcaccatgttactatcatggttgtattcctaccgaggctatgagccccaccctgaactgaatggtctttatttggaccaattgcactggacaaggcggaacttattacctttttcataaccaccataatttttgtttgaccagcccaaagatcacccctcttctattttgaaaactataccga

SEQ ID NO: 32633 - DNA, 442 bp, Oryza sativa
agcttcaatgttgtgaccgatctgagttgtaaaacatctctggatcatgcgttgataagttgctccttcgttcttcaatccaaaaggcatggtgatatagcactatgccccgaagggcgtgatgaatgaagtcttcaagcagtcggattctttagtcggatctgatgatatcctgagtagcaatccaaaaaactgagtagctcgcagtcggccgttgagtcaactacctggtcaatgcgaggcaacccatagggatctttatgacaagacttgttgaggtcggtataatcgacacacacgcgccattgccccgtcttcttccgaaccaggactgggttggccagccagtcgggatgaaagacttccttgatgaagcctgctgctaacagcttggtcaatttcttcttgatcgcatacttcctatcctgtgtgaaacggcgga

SEQ ID NO: 32634 - DNA, 275 bp, Oryza sativa
tttggtggttcccgtgcaagatatccttaatattatgtagcatatcaagagctcctggtattatttcttgtgctattcacttgctatattaactatcctattcctcactattatttttcatcttctgtaaaattccacgtcatgtaatactattcacaaaacgtaataagtacttaacagaccaagcggcatttgttccaccttttattcttactaaaagacagtaagaaaataaacagaatgctttttttttaagctgattatttggaaatatc

SEQ ID NO: 32635 - DNA, 411 bp, Oryza sativa
agcttggaactagcaaggtatgtattataagatttatttattttatatccaaacattctggtaacagcgaagccacttcccgtatcataagaaatgaggacagagacaagttatgatctccactggcccacaaacgaattaagaactgcaaaggtttaacaatataccatgagctaatgtcaactaattagaaaagaatttgacacagcagatatattatagaacctattttcagatagtcatatggtaactgaacaacaaatgtatgtcagcacaatataagatactgataccgcaacaattctgacacatcaggaccaataggaagtgtactggacctaaaatgggtaaaaaggagctatggaagaagcattaatggtcaattacactagaattttggaacagcatact

SEQ ID NO: 32636 - DNA, 274 bp, Oryza sativa
tgggtcgatctgttcacgattttccggttgggtagcagccattgaaggatgattggcccgggatgcgtttgatccaccgattgggggagccatgttccggtcagctgcgtcttgcatctccgctgcttcagggtcttgaggttcagtatccatgttgggatccggaacaccgtgaaattcaacttgttctgtgccatccttggaaccctcctggttctctagacacatggcatgtgctgcttgttcttctgctacgccaactatatctttcctg

SEQ ID NO: 32637 - DNA, 433 bp, Oryza sativa
  unsure (1)..(433): unsure at all n locations
agctttattaggctgcaaaagaagtttgggttgtattgatatgactggtttattaatagtcattcttttagcatgttatatgcttattttggctatggtaagggtcacagcctatgctattagactcattaattaccatgatattctatcatgtttggtgggtcattttatgagaattttactcggattcctatcaaacatgtctatttctggacctttgagtgcttatcactcggcccttcttgtattttttgtccttgatatgttcaagttgagaagcaatcggctgggtatcttactaagtaccatgtgtgcttcgctataaaactaactcggtcttgactatatgtttaagtnttcaactaatcacatagtcgggggctacacctaaataagtgcatttactcgatgcaccatggtttatntttgctct

SEQ ID NO: 32638 - DNA, 269 bp, Oryza sativa
gcttccttccactatggtttctccattttttttcctgggggtctatcatgataaatggccctgtattgattctattaatctggtctcttatgaagcatgatatacggtatttgaatacatatctttgtaaaaagttgaccttttacttgctatctcttttccttaatatgatgatgcgcaacttcttctgctcatttgagaaaaaaaaatcaactccttaatttaactggtatgcataaacaaagattttataaaataggggatgatgt

SEQ ID NO: 32639 - DNA, 421 bp, Oryza sativa
ggagttttgttgacagtcgttatcttttcattttctaccatcaatattattcaatatatgaagactagctatgcttgtcatgcataattttcaaataaaatattctatttcactatatactatgctactaacatgtatgcatgagaagtacatattaatggaggagaatcgacataaaatagacgaacaatcaatcatatgctgtcaaagatcagacttatggatatatgggctgagaactcatataagacacgatcaattaacgccaaaatttcatgttatggattaagaagcaaataatgagtcggcctgccaaaaattgggccgtttgggccagatcatggatcggctaaactccttggttctgccaaacccccatcacagccgttcatgcttgtggttggcgtgtacgctccggatg

SEQ ID NO: 32640 - DNA, 271 bp, Oryza sativa
tgttcgacattctaatcttggtttctgcatgcattgaaattaatcaatatattagtaccataaatatcaagagctgtctagtacataatatagagacttacatcctccgcgttagccctgtaccgtccattaaccccaaggaattcgcacgcataatacccgcaaaggaccgttcctcgcggttgcttgtgacacttcaggacatatcatagaaaaaagtaattaaaatttgcaattagtgaaacaattggaatacataaagtgagtagag

SEQ ID NO: 32641 - DNA, 425 bp, Oryza sativa
  unsure (1)..(425): unsure at all n locations
agcttctagctcggtcatgcatgatacatacatgtattcccaagctaatttgccccctcacgctgacagtgtcctgagtaatgtcgatgggggcaaaatagtgaccgatcaaagtcttaattattttctactcaagaaaaaaaaatgaatctcaattttttagactactatccaatgtcttgtactctatatgtacgaacgaagctatnaccgatctcttttcctttgcgttagatcaatgtatatggcccacaccattaatntatatatatctaatggttaaaaataataggtccaccgatttgaatgaaaaccgatggctagatatttttcttttttttagaatttataggatgttacctaatttattatagcgcaaagtgatgatctaggagcacttgtagaatatgctcgtggtggcttga

SEQ ID NO: 32642 - DNA, 271 bp, Oryza sativa
tgaccagtgtatggagatgcttttctggggcctgaaaatcctccggatcctcgctgctcacagtgacaattgtagagtcatctgcgacactgaaggtctcctctcaaggatcatggcgcccatgagctccgacctgctccaccgcatcgaccacgaggtgtggcactcggttgtagaggagtcgatgcaactggtggcacttctcgtcgttgctcccggagtgaccggcgtcaggctccgccgtgagatctctggcaacaaggaggctgtc

SEQ ID NO: 32643 - DNA, 436 bp, Oryza sativa
  unsure (1)..(436): unsure at all n locations
agctngtattgcagccggtgtactggtgtttttttttacctgcgcatgaaggattttttgttgtcagcaatgctgatggaaatttgtttgtgtatgacaaagtaagcccaagcccaaaacttattctagaatgttattgctaagtatcatacttaattaagtagagtttgaactgattaattttcttttacatgaccagtccaaggatgtaaatactgattggacatttccaactgtagaggatcaaagtgagatgaagatttcatatgcaaagtctagtaaggtatcttaagtatctctatatatttctactaaaaatatgcatttacatgtcactgacactctatatatnttactgaaaattcattttgttgaattatcaatgtcatatgagatggttcaatatgaggtgacaagtgaaatacatgctatgaca

SEQ ID NO: 32644 - DNA, 271 bp, Oryza sativa
ttatcatcctaaaccaatttttttattatcaagagtcctgaaaaaccacttctatggcaagagcaaataataacattagtcgtttcaaagaaaacttcaattttagaaccctaatcaagccaatcttttatatgctagtctaagcattacctaatcatcacatattaaataaaaaagggcataaatattagaagcattaggtagaagattcaaagtgagctgcaataaaaactggatgcatccaatgtagaacatgagaagcatctgaagg

SEQ ID NO: 32645 - DNA, 384 bp, Oryza sativa
agcttgtacagattgggaagggtgtttttgagattatataaaaatctacttcaaccgatatgcccttatgcacggccatacataacatagaaatcacacgtggaaggggtgggcaattagctagagcagcaggtgctgtatcgaaactgattgcaaaaaaaggtaaatcggccactttaagattaccatctggggaggtccgtttggtattccataactgcttagcaacagtcggacaagtgggtaatgttggggtgaaccaaaaaagtttgggtagagccgggtctaagtgttggctatgtaaacgccccgtagtaagaggggtagttatgaaccctgtggaccacccccatgggggcggtgaagggaaagcccccattggta

SEQ ID NO: 32646 - DNA, 435 bp, Oryza sativa
agcttatctacacatcatacactagaataacacaatattgcgcaatctagagatgccgtagactcgaatagtcattttccatgttaatatgatattataattaactcatgcgtaggctaatgtagcaatatggatatggacattgtcaaaagtggtttaaaagaagggtaattatgatgatatgtggtaactggagcacgacctaatttacggtgatcatccataacttaacattgacaattactcttaccgacaataaaataaggttcatgactaatgaaatactaccacatttgagtattgtactgcacaagctggtgtacttgcacgacacaaacttgttttcagataaatatcccatactgcgatacttttgaatacatattattgtaaatggagatgtcattggagccgtccgaagaactatgatgacat

SEQ ID NO: 32647 - DNA, 439 bp, Oryza sativa
agcttcactctaatgtggatgtttacctatcctcttatcctctgggacactagctgcttctatgcaaatatctggctgagagctaatctcatgtacaacctttgtttggctatctgtgaagttgacaacacaatcttcttccttttttttttactttttggtggatgattgttttgccaggaaagtgagtacttatagtacaattttattcttttttgggtgattattgttgggaagaatttgtgccgcaaaacattggaaaacattgaagggatgcttacataagcttttgtggtcttcatggaatgtgatgcaacggagttggtgcagtagttgactagtgagtataacgttgatgaaaaagcgaggaagcatgctctcgtgaaaaaagaagtgtactatacagttttaagctcttgtatttttcatggaacagtca

SEQ ID NO: 32648 - DNA, 274 bp, Oryza sativa
tcatctacggcctatgattaagtttatatatcgcacgggtgaataccaactgtactcagcaagccaccacagcaacaatgcacatgattggaatatatcaaggaatggctatggttcttttgcgcaaagcaagttatgcaactcttttcacaagcctaagacctaccatatactgaccaaattttagtactagttcatattaagcaatgacggttctgtccaccatccattgagatcccaaggatggcttcccgccattgagtcaatatgtttt

SEQ ID NO: 32649 - DNA, 430 bp, Oryza sativa
  unsure (1)..(430): unsure at all n locations
agcttactacaacctcgtcaggaggctaactatcgcttcttggtggaggtgcaataaaagacaactcaagtctaaaggatcggtggatcaacatgatgattctatgatctatgtggcgtatattagaataagtgtcaaatatacacagtcctagtagttacaattaaactttaagntatataatagtggtaggggatggagttagtatcagaatctggtaccagacaatcctttagatagagaagggcatcacaatataactatggtgataacaatgtacacaggctagtattagcgtgggtatggacccacagcgtgcaggttatatagtagtctcatcggtagaactagtcttagtcattgattcatgtatttcactaccagtaaaaataataaattatactcacttaatttcattaccaatatttat

SEQ ID NO: 32650 - DNA, 277 bp, Oryza sativa
tgaccaactccacagttactcggctttgccactattaattccagcccaccccatttcaagtcaagtccttaacaaaactaaatgctatcgatgtttaccatcatgcggtgaaattcgagaagttgcataaactactcgatgcgattatgttcacaatacatggcatgcctaattcacctgcagtacaattgtactgaaatttttcggagtcaggtatctactcttattattgagatatgtgatgccatgtccataatgcatattttaaagatgatat

SEQ ID NO: 32651 - DNA, 436 bp, Oryza sativa
  unsure (1)..(436): unsure at all n locations
atgccttgatttggtttagatttcttatatttaatataatcagccctgctaggaaaaaataaatgttttagaaacataaaactattgtgtttactactatctcaattntaaattaattattgctttaagtttgtcttaattccaaatatgtttatctttgaacatcaactgatttctgtaaaatcgtaataatttaccacacatgtgaattatatattatgaaagtattattcaagttaaatctggaaacataaaccttattgtgttaactatattagattctagatttttagaaatattgatagtcaaagaccacagtttgacttatgactacaaaactagaatgaacaaataacttataatggagggagtatagataacataatcttataatttttaataaagtaccctggagagctatcatattttttacatg

SEQ ID NO: 32652 - DNA, 275 bp, Oryza sativa
tctcaacataactaggggatttacctggacggaggaggcagaagagactttttgccaactcaaaaagtatctctcttcgcccccaatccttgttgccccatacctgcaaggggtaagagcatatgctgtagacccaaatatcgatcccaggctgatcatttatcatctagagtttatgccccttcatctcatatccaagctatatgaggaggtattcaggatattgagacgggagctgtcagcccttggtgaagatgctactgcatatgccgcaa

SEQ ID NO: 32653 - DNA, 448 bp, Oryza sativa
  unsure (1)..(448): unsure at all n locations
agctntatacggccggaagtgccgcacacctctctcttctgtgatcagacaggcgagcgtcaactgttcgggatagaggtattaacggaagcagaagagaaagtcagaatcatcagggaaaggtttatgattgcccagtctcgacagaagagctacgcggataaccgccgaagggaactcacttttgaggcagggattacgtgtatcttcgtgtcactccgctccggggagtacaccgttttcagacgaaaggcaagttggcaccacgcttcgtgggaccctacaaaatcctggaacaaaggggagaagttgcttatcagttagaacttccatccaatatgatcggcatccatgacgtgttccacgtgtcccaattaaagaagtgcttaagggtacatgaagaacaggctgattcggaacacattgatatccaggaggatctaaccta

SEQ ID NO: 32654 - DNA, 274 bp, Oryza sativa
tgatcaactatctgaaggccctttcttgtctaacattgattggcttgaggctcgcaagattgaccttttagcacaacttgaagaatgtaacgctgagctggatatggaacacaagaaactagccgatctccccaagtctattgaagaacagaaagcgagactcaaatcggctattaaacatgttgctgaactgaccaagtccctgaaagttatcccaggaaccgatgctcaagatgcccaagccaaagaggaagtagagcagattaggtagaag

SEQ ID NO: 32655 - DNA, 269 bp, Oryza sativa
caccggaagtgttaaccgcgaggccccccgcgaggacgatcgaagacccccccacccaggcgaggaggcaggcgatctcggaggccagccgctgacgccgaacccccggaggagggcacatcccgcccccggcgacgggagggaaccaaaaccgggaagaaagtgccaaacgccaccccactcggcgaggacgggacccgcgaaggggaccgaccgcatggaaccaccccgcgaacaaagccgggaccaccgccccagcaaaaccccaa

SEQ ID NO: 32656 - DNA, 325 bp, Oryza sativa
ttgctctgaatatcctctccgccaagacactggatgacatgcatatccctctcaccgagttaaagccgagtaacgcgcccttacacggagacatcccagggttatccgctatgccactcggtcagatcactctatcagtcacctttggtactcgggagaatttccgcacagagaacgcctgcttcgatgttgctgattacgagacaaggggatcacagccatactcgtacacccggcggtagccaaagatatggccatcccgcactacacctacatgatgaagaagatacctggtcctctaggagtcatatacgtacggagcgac

SEQ ID NO: 32657 - DNA, 329 bp, Oryza sativa
acttccagcatgtgtgctccgtctatctcttcgaataataagtaccctgggaggttttcatgtggactgattcataacttggtcaaagttatctttcaattaaatattggcactatgtcctacttcctaactgagggcgattatgctcaattgtttaggaacatatgaattccagggacttcccaatactgtggcaacactcaggtaataaaaaaatgccacacgaaatgccattgttagcacattttgaaattatccattgcctttgtaatttttcctaataggctttggaaaaatttttggttgggtctaatggaacataatttttg

SEQ ID NO: 32658 - DNA, 345 bp, Oryza sativa
agcttcatccataattacatgaagattttaatatattactattcaaaagaactcaatatccttaccccaggcctctttccggtcaatacatatggttgacctaaacactgacttaggtctatactaccaactacaactctctcttctccatcttcaacacactgaaagggcacaaaaaaaataagacatcagattcacgggacagactcttatatctaatggttaatcctgttagagacgaataccacatattagcgtaaagctttaagaataacaagccggccaagagaggtgaatatgtaaaacttatgatgaatagtgcacatttcgatctaataaaataat

SEQ ID NO: 32659 - DNA, 272 bp, Oryza sativa
tgcattagagcagtctgcgtacggcagtttattgttcattagcacaaaaccatagaaacattttatttagcacaacagaaatgaaaacaaattaaagagttgatattcaattatccattgaagagtactccatgtgttatatcaaagctaaggtaaacaacataatccaaacaaaagaaaagtaggtctgtctagcttgctgcccctttctaacaaaggctactgcttctcatcccatagaacgttaggagcctcatatgcacgtggaatgc

SEQ ID NO: 32660 - DNA, 308 bp, Oryza sativa
agcttgtaactagtctaagtggatattatgtcttctgtgtagactcctgtaagggagtgaatgtctaatatgatgtggcggcttgtgccttactcgaactgacatactttggtaattacatgatgatggatgactgtctcatggacattgacggttctgataacaaagctgtattgaaatcaaagattgtttgctcatggaactgggtacctaatgccatggcaagacatccaaggctgatcttttgcttggatgatggagaatttcatcttctacagtttaatttggatatggaaggagtgaatgta

SEQ ID NO: 32661 - DNA, 265 bp, Oryza sativa
actttcttccatagctcgttctttctggaaaccgggaaaactctttaaggtcagcccaggcgaccttttattctcgaaccccacagaaaatatatcactttggttctacccctcactgtatgacttttgaatcctctttttcagacctcagccccctgtagaattgacccaagctgaaactgaacattccgtccatgttgcgaagcccatttatgacggccctgttgtgctcccatacaattgcacccctaactatacctgaaca

SEQ ID NO: 32662 - DNA, 143 bp, Oryza sativa
gattactgactgtatgcgtggatcctgtgtgctccttgacgcatggagatatcgcataagaatcatgggggcggtgcctgccatattggctcgctccccttccacctcagcgtgatcccttcattgctgcaggatgtcagagg

SEQ ID NO: 32663 - DNA, 268 bp, Oryza sativa
tatgtatgcaaaacttattatatttcgcacaatcatcaactgttgactcggaagctaattatgcatacaacgtcacaaacgaagacttaatgccttggcatatattgtttttaatctataacttacaaaccacgatatgttactcaacattatctagccacaactagctgacaaaaattctaatggcattaaaaatcaagatcgtggtataaaattaatcatgcgcatgattagatttagatccacaaaatagaaacttcttcaaata

SEQ ID NO: 32664 - DNA, 419 bp, Oryza sativa
  unsure (1)..(419): unsure at all n locations
agcttgaagtacctcataacttagaaatgtctttgtcatccacaatatgtagattttatcacatgaagtttttggacctangccatggtaattatattttgcctgacgacattaatcgtctagccaatttacattatttccttgccaaaaaagaactttgttccaatattcgtgggattggaaagatgaagtatttacggaggctgcaagaattccatgttaagaaagagcgcactgngtttgaacttagagaattggggtatttgaaagagcttggaggagcactacaaataaataatcttgaaaatatagcaacaacggaagaagcanatggtgctgaattgatgttgaanaggaatctaaagacactataactatgttggggtgcagagcagcagaatagtggatctgagattatt

SEQ ID NO: 32665 - DNA, 269 bp, Oryza sativa
tttctaatcccttgttcttccttcatctggcttggttagggtaaattctacttattatttagccatggcgacgattgttaacattttaggtgagatgttaggaggtttggagtgatttgtctgtccatgatgggggtggtatcaatcagatcgttgtttggtggtgcgattggctgtattggattccatgatttggtgccaagttgtgcgtgctggattcgttcattttctgtttcttttttagctggcctgtgactggttggcatgtg

SEQ ID NO: 32666 - DNA, 445 bp, Oryza sativa
tctaagacacctgcagcatgcaagcttgcgacattggtttatccagtgcatttgttattcctgtccgcacgtttactcacgagggactatagatttgtgttcaacaatttgctttcttcataaagtacatttttttttgtcataaagttcattttttatttaccttttctatacactagcacattaactcacaatggatgtctatgggaagtatttctcacgttgtaacccttgggtatagagctccagagatacttcttggatcaaggcagtattctacaccagttgatatgtggtcagttggttgtatctttgcagaaatggtgaaccacataccactgttccctggtgattctgagattgatgaaattattaagatattcagggtctattattgtactgagaataccttttcttgtctgttaattgtgttatgccaactcta

SEQ ID NO: 32667 - DNA, 267 bp, Oryza sativa
ttgctcgagcttgccgtgcactttaatgaccctttaccggcggtataatttggtgcggcggtgagctgccggccatgtcgaccgtctcctccaggctggcgtcgatcctctactgctgcttttcccccaccggcggccaccggcacggccaccgcgccggcgcgtactactacagcagccacccgacgagcaccaacacctactactacgagggtggcctcgccggacgcacgatgggcaggagcaggccactgtcactgcagggat

SEQ ID NO: 32668 - DNA, 417 bp, Oryza sativa
agcttcttgtcgggttaaaacgaaaactctttttcttagatgctctgaatgctgctcggtgtcatgaaattcctcatggttgttggcgaggagcccatggtatacactaaacacgtatagtatctggtggaagatgaaaattggagaagccaccgagaaaaataaaataattggaggttgttgaacttgcggttttctccgtacgtatatactccgtatctgcgttctctattgcatgcatcacatggttgatgcaaaaactgctggcattgtatatttgtatttggttatggccaaggttgaattggttcctggggacaccaggagatcgagaattgaaatgtgttccgaggatctacgatagtgcacgtacacgcatgttacacatatttaatggagactagtgtacgtgtacgt

SEQ ID NO: 32669 - DNA, 268 bp, Oryza sativa
tatggaagccaatatccttaactggcacaacttctagaatcagtggtgagcaaaggttcacacataagtctgctgaagtctttcccttcaataggaactgaaagtctgcacttttcataacatacgcacctgcaaatacttcaggaaactggtgtgtttgtgtcaaagtaacgttattcagatgttctgggtgttcatatgcagtcaatgatggagggaaatacatctctagtggatttccagccatttcatcgaggatcatgtctgg

SEQ ID NO: 32670 - DNA, 245 bp, Oryza sativa
agcttcttaaatttgttgtggaccaagcccacctctatacgaggggggcccaacatcgcacccgtgcttttatccttgctttgcgaaaggattaaacaagagatgacttatttttgaaatggtcatgttaattatatgttggctataacctattttaactccctatcttactaaaattttccgctctgccaccgaaataatggaccaatctattacagtgataaatcctttttgaataaataaag

SEQ ID NO: 32671 - DNA, 443 bp, Oryza sativa
ttgaacctcttccatccaagtcgtaggctgtgtaactgattcttggttgacacatgatatggatgacctcccacccatgtaacgcataaatagctagacatttgtcgccacctctaaggtttttgttatgcttaaattattcctactctatgtagtatcgctgctagattgttttctgcaactctaggctatgtgtgcttcatattcctttgcaatttaaactgtgtttttcttatgaacttctcgattgtttgcaggctcaataccttgtgagagcatcgttgataactactagacaaacagatgtagggattgcgaggtgatatctactgatttaaagcctcaaattgtgaatgtacacatgtcgataaatcaaacctattgaaagatctggaactattcgtataacaagatttaaaaattacaatgtaagtttttaaatt

SEQ ID NO: 32672 - DNA, 244 bp, Oryza sativa
agcttcggcttcatattactgcaggtacatccaccatccgcctttaagacacattcctgcacggcttgcttgcgatagataccacgcctgctcctatcaacacacattatttcataccgatgcacttgtgtgccttgagcaacaactctatgtctccgtgcctttttgattttatcttccatgtactttgtcactacgttgccaaacactatgttgttatcggccatggacggaccaattttct

SEQ ID NO: 32673 - DNA, 458 bp, Oryza sativa
  unsure (1)..(458): unsure at all n locations
tgaattatgatcagaacttcagtggaatcacattntaaaatattattaatcattaccaggcaatttctgcatcttatgatgttaaaggccttgagtagctggatctctttctgtagccgatatgagataccatcgatctcaagcaattcttgtctcacagaacatgacatgggaagtttgcttccaatgtgatatgacaaaatatctggttttctcacataatcatccatgcttggatttacaactatttgtctccacaaatctgccacaaaaccaatttaatgtcatgcatacatcacatcttaatcatagtaacaaatgacatgttagccagtgggaaagaatattatttggctaaagaatgcatgaatacaagacaaaacggatggaaatagctgtagtgaaataattcaatacctgccactctgcgagcaagggaatatgaatcgtacatttca

SEQ ID NO: 32674 - DNA, 246 bp, Oryza sativa
agcttatattcaatcttttttcatcaagggcattaaagaaatttgtcaccaacttaacggtgaattgaaggaaaatgtgacggcaggggcatggaagggattaagttaaaatttcaagggtacagaagggatggggtaaatttcaggggtttaaaaggatcgactgagttttcaagggtgtacatgaaatttactcttgaatatgacatacgtctctacactcttctttagataaaaggagagata

SEQ ID NO: 32675 - DNA, 423 bp, Oryza sativa
tctgttggtgctgttctgtacaattattagaataagaatgtcttctgtttgcatgtgaagggctaagaatgtcttaggatgttattgttcgttaagtttaagtaggctatgatttgcaagttaagttaatattttgtagcactttatgttgtgtattttattaccccatggatcattgcaattgaaagaaagttctggtatagaacatcttcaaacagattttgatgatatactggtattttgcagcaggctttccttcttgatatgctagaaagctatgaatcagcactcggtgaatcaaataccaaaacaccatgtcgcattgcacgaatcccacctccatttcaatcagttccgtgtaatcctattgttcttgatatggcctacaatgcgatcgagttccctaacattgagaacagaatg

SEQ ID NO: 32676 - DNA, 247 bp, Oryza sativa
agcttcttccgagtgttctcttccagaatgtgcctctcttcttggaggcgggccgcttcttccttctctttcctaagtgaatgaagctcttccttctccttggcaagtcgaccagtgacttgcatcaccttctgctgagcccagtctgtccaatccctcatatgtgcttgcaactctttctgccgctggacaagaatcaagaccatttcatccttcttatcttgggggatccaaaccttctgatcct

SEQ ID NO: 32677 - DNA, 423 bp, Oryza sativa
ggaacaccaaagtaatttgaaacatagtagttcaaatactatattctgaattacaggctaaaggagggaaaatacttgaaatgcaattaagttttacaagttacagcaatgtcagatagtagtacatagttgcagctcctagctctgcaaagggaacaatgttcctgagaacgaaatactaaagcaatgtccaacattgtgctgtttacatgatccttcttcggatttacttggaaaataaattgaatagcagcatcagtcaggtcagtaaagagtcccttgttttctcagcaagaaaatgttacagtccacttgttgcttccagtttccactatacccccttcgaactgaatcatgtgatgtccaattccatgagatcttgtttgtgtaccacatcattcagaggttgagctatgaagaaat

SEQ ID NO: 32678 - DNA, 248 bp, Oryza sativa
agcttgtttattattttgtggtttagatgaatgcgaagaagcaaaagaattgaggtttttatgtgggcttaacaaagaaattcaggacatgcttgattgttaaagatatacatctctttctcatttgttacaacttgcttgcaatgctgaaagtaaaatagaggaggacatgaagaagcaacatgctatgtttttgtcttctattactaaccatttgcaggaagtgcataatcatgaaaaggaggaga

SEQ ID NO: 32679 - DNA, 456 bp, Oryza sativa
  unsure (1)..(456): unsure at all n locations
tatacatatgtattgcaatccacaatcttctcatttgctatttcttgatatttggatgaacgtttttgaatagtgagcttttatgtatctttctgctcaatcttatgagttaacctaaatgttcaactctttgatttcaagtgagagatactttagagtgaaattgtgcaaaccacattcatgtatctcttgctctcaaaacttgaaaaatctcanaagttgcattcattggtttcaaaagagcatatttagtcaaaagtcaaaaatcgtatgtaaaaggccacacattgtgaaaatcttttcaaaagtatttcaacatgtgtttgaaatgttttccaaagcttttggagtaaaatntcttattttcaaaagaaaacaactctcttttgtctaaacaggatctttagtgatcttcgtttttgttaaagtgagatttaccccaacatcaaatctatt

SEQ ID NO: 32680 - DNA, 242 bp, Oryza sativa
agctttgacatgttagatttgagcgtgtttgcatatttcgtacgagtacaggaaaatatgcattacatttccatgatactagaatatgaagtaatctggaattagatgggttacgaagaatgtggtgatattttagtgctaaataattttatcttttctctctttttctttatattaatctttaatctatctcgtggattagcaacagaaaacaaaaaaaaaactttttatatgtgtgtctt

SEQ ID NO: 32681 - DNA, 446 bp, Oryza sativa
  unsure (1)..(446): unsure at all n locations
tccattatcttanaaaaagcatgtttgcctcaaatttcatattaaaaaatcagttcttgctctttgtggactctccactgtttagaaaaattcgatggtgattcatggtagcacttctacatcaaattttaacacttttttcagttcttgctattgtgagttctaaaagattaagcagaattgggcattaaagaggtagatctggaaatgcggatgtagtttcaaactttcaatccgtttcaattcggttgttgaactgaactgactttggcgtcattgatatctttgctttgaagaaaaggcgttcaaatagaagtacagattgcacaagaagctcaataaatgtaggatttattaacgggataagataacgcttatgagagtgcaataggatgcttgacttactggagtactagctgattgagtacanttgacctaatcttttt

SEQ ID NO: 32682 - DNA, 243 bp, Oryza sativa
agcttgtgaatattcctcttaccaacatgggctagcctccgatgccaaagccaccccgtgttggacttagccactaagcatgtctcatgtttggctttacttggggaaaaatccacaaggtaaagctttcccttgagaacaccctcaaagaccacggatgaatcattccttctatagacggtcacatcaacatcggtaaagagacaattgtaacccatagaacataattgagaaacggataaa

SEQ ID NO: 32683 - DNA, 326 bp, Oryza sativa
  unsure (1)..(326): unsure at all n locations
tgtccttctcctgcagccgcagtggcgcaggacggtctgttcatttcttcaaacacctcgcgtgcgcggagcctagtcgcgagacaagcgggaggaggacggagggggcggaaagagagagaggagtantacctccgtggagatgtcgatctgcgcgtagtcgtcgctgacggtcgtcatccgaaccaacaagggaaggaacaggcggcggaagagaagaggaagaggaagcttctccctacgtcaggaatggaggattgtgtgaggaatctgcggtgaggttggtggagagtggggccgcggaatgataacgactctctgctcga

SEQ ID NO: 32684 - DNA, 245 bp, Oryza sativa
tgcttggcatttttttgatgttcccgcaactttcccaacaccagacggagatggtgttgatggtcttcctctgattgtgagtatatcagaatgtcatcaatgaaaaccacaacaaacttatccaagtattccatgaacactttgttcatcaagttcatgaagaaggcaggcgcattggtcaaaccgaacgacatcaccgtgaattcatacagcccgtatcgcgtggtgaatgcggtctttggaat

SEQ ID NO: 32685 - DNA, 426 bp, Oryza sativa
  unsure (1)..(426): unsure at all n locations
tcagcttcggccagatcgacggcaccctcgccgccggtctccgatgggaccaggtatgcccgcctctactcctaggtctgtccgtgcgccgcgcttcggtgccgatcgatcccagtaactcgttttatcccacatcgccgattctgatcaagcgcgacctctttataaggtcagttcgactctacttcatcgcctcaccaggggcacccgccccgactgaatacagcgaaaattatcgcccctgtgtgcatcggctgggcatgtttgtttatatacccccttccggttaatagctggaaaaagaagaaaaaaaaggagcagtgaanagattcaatacggcaacgataagggtgtgtcagtcggtcctctggttggaggcagcgctagacactagcgccttagcttttnntaaaattgggatttttt

SEQ ID NO: 32686 - DNA, 245 bp, Oryza sativa
agcttcaccattttttgcttctccgcactaagctaaaaatcgactgaaatgctcaattgttggtatattgtcttgtcctaaaaatttagagaaatctggaaccctatcaaactacttaggatatgggcattgatacatataggtttgatcgatcccaaactgttctctcatcatctctatcggcccactcattattccttacattgtccatgttatagtgatgcgacattgttccttgcatacaa

SEQ ID NO: 32687 - DNA, 455 bp, Oryza sativa
  unsure (1)..(455): unsure at all n locations
tgtgtttatccactcaaacttgtgtcttcaatcaatatttatctgaaagctataaatcagggcctaacgccatgtgggatgcacatcccgaagactccaccatctaagtggtaataagcatatgttaactgattatttatttatttatttttcataccttggcaataatgtgcatatatagggtgtgtttggttgcaagccacactttgccacagtttgccacgcctaaggttaggcaaatttgacaggtgtttggttgtagccacagttgtggcaagattcccctccaacaaattgngtcccacgtgtcaatggctcaaaaaagtgtggcaagattcccttaggcttagtaagttgtggctaacaatttgatcacctcaccttaggcaaggtgtggcaacttttgttggcaagtaatggtaaagtgtggctgtgaaccaaacagccccatatgt

SEQ ID NO: 32688 - DNA, 241 bp, Oryza sativa
  unsure (1)..(241): unsure at all n locations
agcnnaagcgttttatggacgaacaagggggaccgccccccgaaaaaagcaaaccccggccacaggacacccgcaacgcgccgccgaaagcccaaggacacccgaccaaacacactacggggggaaaacaccccacaaacatggaaacccgccagaggacaccgcgcccacccaaacaacaccccccggccggggaggacacaaaaaccccccgaaacgccaaaaacgcacccgggcccaa

SEQ ID NO: 32689 - DNA, 419 bp, Oryza sativa
ggacctataaaactcagcttcagcactcgaaggctgcgaagtaaatacttgccactgttttaatcagcaagcttgcatgtctcataataactaccacgccgtttgctgtcatggcagtaaccataccgtccacctctacattcatgtgctatctgactatattcatgtagatcgtcatcgctgtcaatatcagagccataattgtaatcatcaaccaaattaccatgacggctgttcagatattcatcatataggatgtcatcgttgtcatcatcatcataggcatcactatcagcatccattttactatcacaatgatctgatgtaagcttatgggcatcctcatcatcactggtttcctcttcaacctcatagaggaattcatcacggcgtacgaaagagtcaataagcatgatagt

SEQ ID NO: 32690 - DNA, 241 bp, Oryza sativa
agcttgttatcacctccaccacccgaagcaaccattgtcatcatcgatccgcagcccgaagcaaccatcgccgctgctagaaaccagctgtgccttcgcccagtggtggatccatagggtaagcattggtgtcagcggacaccaatgacttcttactaatctctttgctaatgcactctagaaacaagaattactctcttatatatatatattgacaccaccatatttcagtaatgatccc

SEQ ID NO: 32691 - DNA, 430 bp, Oryza sativa
  unsure (1)..(430): unsure at all n locations
ntagatgaagaaganattggtgaagatgttgacctagctgtatccaaaatgagtgacacagaaagaacaccatcggcttcacccaagcaaacgcctccaactccttctgcccccgttcattttacatgagtaagtacctctctttgacttcttctgaaattacctccctctttggctaattacccatagactntgtggttgcagaagaagaaaactgctgtgaagaaaaaaccagcagcaacaattgttaaatcggctccaccagtaagatgtccttaattcttttacttaaacaatctcaaccgattctatataacacttgtctatttcgcagcttcctcctccttctcctcctgtacagcaatcgtcaagtaatcagactccatcggctgtggtgagtcatcacgtcgaagaggaagaacaaccagct

SEQ ID NO: 32692 - DNA, 242 bp, Oryza sativa
agcttgtatttatttggagattcaaagggaccggaaagattcggggtcaggtgagccctgttttcttggcagtgccactctccattttctggttctctaacacaataaaatagctcgagcttcttatattggtattcatccagggttgtaaataacatcagatttctcttgtttgaatatcacctcaacaggtgcattttgagctactctactgcccatttgacatgaaggaggagactccc

SEQ ID NO: 32693 - DNA, 442 bp, Oryza sativa
  unsure (1)..(442): unsure at all n locations
taatacgaaattagatcggaatcaactattaacaatgaattctaatgtgggaaggtttgatacgaaatgaatttctagctgatacaaagaatcctaatgtgggaaggtttgatacgaaatgaatttctagctgatacaagtaggaaggatttgttcattctctctctcgcactggaagatcagtgaaaacacaagggcagtatgtaaactctgtatgaacaaccaggtcatgtagcaagaacaaaatcattcagaggctcaagccacttttcagtatggagtggacataatcacatacttcctccgtcccanaataaagctatttttgaggttggcacgggtattaagaaagtatgtgagaatgattggaggaagtgtgtgattagttgaaaagagaaagtacgtgaagaagaatatttgtgattggttgagaggaggaggt

SEQ ID NO: 32694 - DNA, 245 bp, Oryza sativa
agcttgtcagttttatatcaaacacacaaagctaccagcccaagcactgcaaaccatccctctcacttggccgttctcgtgctgggggctcgacatactcggaccattcccacgaggacagggtggctacaaattcctgttcgtggcgatcgacaagttcaccaaatggatcgaagcaacactcacaggggaaatcaaggccgacaacgccatcaaattcattaaagggatattttgcagatatg

SEQ ID NO: 32695 - DNA, 394 bp, Oryza sativa
  unsure (1)..(394): unsure at all n locations
tcgagttttaaagctcctagaaagaccaaggtgaccttcgatatgctttttgataagtatgagaaacaaggtggtgaaaaagctcgcaataaaggaaaaagaccaagatcaccacctagggagcgatttggtcattcaccaagacggtcggaatcacctacatatcatcatcctctagacatgtcatggaggccttatccaataccaccgccgggttatccttatccttactacatgccatgaggggaaacaccgccaatgttcaaccatatgcctccaatccaattcaaccaagggtggggaggaccaagcaggccagctcgtgagcgtttgtcttcaccaaacaatggtcgngtttatggtaagaaccaggccaatgaatataagagggaac

SEQ ID NO: 32696 - DNA, 278 bp, Oryza sativa
gatctacagtagaccagctggcgggctgcctgcaaacagtttattgttctttaaagccaacctattaggtcatatgatacatgcacccggagaggtttaatagtcctaagattaatggttggaggcatacatactacctcgcattacttagacgatttgcagagcacaaattcttttgtgagaaaatttaaaacgtgataaagggggtaagactacttaattgctggccctttgcgtgctttccactatatttatgagcatatgggaaatgtgtaatc

SEQ ID NO: 32697 - DNA, 363 bp, Oryza sativa
aactagcagatatttgatcttaagtgcctgccaaaattccgcagagcacaccaagcatgccacactaggcggcaccacagcagaacaggtatagggaacctagagctcagtaacaaaagtatgaccaaaaaatataaccacgcactctaagtaaagagaaaatggtataacctgcagcacgagggggccatccaggacggcgaagtgcatgctcccaacgccctccgggagcacgcccgcgccgcacgcgttcatgaaggcgaagaggaactgctcgaagcacgcgcctgccaacggctccacgccgccgaggccgagaacccaggaccccagcggcgcatgactcgagccactccaggcgca

SEQ ID NO: 32698 - DNA, 246 bp, Oryza sativa
accttattttcattatttttttcaacaaaaaccatctaaatgttgctccagttccactatttttctcacttaagatgcattataagcgtggatgatacagtggtggggaacgaataagcgttggttccacaaatatatgtgtttgagtgcttaatggaaataaatgtttccagacccggaacaaaagttccaataaatacatcaattttcatggagagacatatacggctgcctgagacaatgtgt

SEQ ID NO: 32699 - DNA, 407 bp, Oryza sativa
tgcccgcaggcacgccgaacatgcacttgtcggagttcatctttatgtttgtggtgcggagactttcgaaagtttccgctagattcgagagtaaggtctcctggctgcgtgttttcacaaccaagtcatcaacataggcctcaacattacgtcctatttggctacccaaagaaattcgagtagtacgttgaaaagtaggacctgcattctttaacccgaaaggcattgtcgtataacaataagttcctacgggggtaatgaatgcagttttttcctcatcctccctagccatgcgaatctgatgataaccagagtatgcatctagaaaacacaaaaggtcgcaccccgcggtggagtcgacaatctgaactatgcgtggcatggggtaagggtccttatgacatgcc

SEQ ID NO: 32700 - DNA, 247 bp, Oryza sativa
agcttcgaaaaaatcttttcggacatgggagatgatggacgatagaaatgttatgaatctttttaatggaatcggatgttttttctttctaaattcggacagttttttttcacattgcacggtgccaaaccagattttttttttttttacaaacgggggcgtttttctcgcgttgagtcggacagttttttcaaagcggttcttttataaatggcgatgttttttcgcgttgaatcgtacggtttct

SEQ ID NO: 32701 - DNA, 433 bp, Oryza sativa
tcgaataatcaaatgtagaggataaaggttctcaaaccttttttatattgaagattgctggcttcatgaagtagctgttgaggacaaaactaaaaatttatatgcttgattctgcagattctaccaaagtggaacagatatctcatagcaaggatgctataggtggtcctttgcagactagaaaggataaggtccaaggaaaggttgttgatgctcttcctcagaaagtgttgtgtgatgccaaagttgatggaatggatgcagcaacagcagattcccgcattccagaagatcgtgcttcaccatcatttgtttctccactaagcgaaaagaatgcactgatagcatcatgcagtgatgtaaagataaatgacagtgctgtcaaccagaagttctacagaaccaagatgaccgcctctcatcaaagtactac

SEQ ID NO: 32702 - DNA, 250 bp, Oryza sativa
  unsure (1)..(250): unsure at all n locations
agcttattatnngtgactggttttaattgaataggagtattctcaaaggttttcacccgaaataaacttataacaattgtgtgtttggacaaggactggtcttccaaatctatttctatttcagaaatactatacaccacttgacacaatttcggagacatcatttaaatcatatgagtttcttatgttgcgatttgctttgtgatttgtactttgttagaggaatgatcggtgcgccgatggttcggcg

SEQ ID NO: 32703 - DNA, 453 bp, Oryza sativa
ggcgttggcgtgcttcgtggagcggatcgtggtcgagggttattatctggtgctggtccagctgctgcgcggcgaggagacgcagacgaggatcccggcggccatgcacgaggagatactgtccctgctccgccgcttcaccgagttcgaggtgcggcacatatatcgagagggaaactcggttgcccacacactgtgccggcaggcgtaccatggccgtggattgtggacggagagagtgccgatgccgggcgccgtccgggagaagatcgacgaggattgtgctgcacgagcgcctgtgcaagaagaagaagtgacgccatcggcatgaagaatgtggaggcgatcgatgcgggcgccaaagcgagtcaaaatattttgatcaaatcgatcggttcggcttgtgaattgttgcagtgaacatgtaattaaagctaattagttggtcctggt

SEQ ID NO: 32704 - DNA, 240 bp, Oryza sativa
agcttccattctttttgcttccgagacaaacccaaacagaaaatagctgaataaatgcattaaggcccaaattaacagaaaaaatattaaacaacaagtctaggaattatacagtcagaatgtattatctgaccattagttcagcatcaagttatgaattgtgaagtaaaaagatttagtcattcaaacgtttgaataagagaatgcgaaataagtaacacagtataatataccttctcc

SEQ ID NO: 32705 - DNA, 455 bp, Oryza sativa
taattaatgcctcattagcgaacgtggactgcagctttatattgtcaaatcatgacgcaattaggcttaaaagatccgtctcgcaatttacacgcaatatgtgtaattggttttttttactacatttaatacttcatatatgtgtccaaacattcgatatgatagcatgaaaatttttcttctggaagctaaacatgacctgagtaaagatattaagaaatgcatgatgaatataatacaaattcaaagcgctccatcttctttaccaaacctgcagctccaccatgatttgagtgctcacgagcatatccacttacagttaccagaacatccaccattgcctcccacaacattgttaaatttaactcgatgagttgtaccgtatgtcccttaaataccgatcaggtataatctggctgtacatccctctttcttattgtcttgacagttttttt

SEQ ID NO: 32706 - DNA, 240 bp, Oryza sativa
agcttattggcttttacttttaagtcagcttattagcttatatgatttataagccggtggatttaatatcctaagtttaatggtggagtcatacatctacctcacataagccaaaaaagcttctccaacctagcttttggcttaatagtgttagagtggcttatggcttcaaaaaagacaaacgaaaaagccgcttgtttgtttagtcttagacttttcggcttataagttggcttataa

SEQ ID NO: 32707 - DNA, 467 bp, Oryza sativa
  unsure (1)..(467): unsure at all n locations
gacctataaaactcagcttgcatacaattgatgttcccgcaactntcccaacaccttacgtagatggtgctgatggtcttcctctggttgtgagtatatcagaatgtcatcaatgaaaaccacaacaaacttatccaagtattccatgaacactttattcattaagttcatgaagaaggcaggcgcattggtcaaaccgaacgacatcaccgtgaattcatacagcccgtatcgcgtggtgaatgcggtcttcggaatatcttcttcacgaatacgtaattggtgatatccggaacggagatcaatcttggagaatacagtggcacctttgagctgatcgaacagatcatcgatccggggaagagggtactngtttttgatggtgacttcattgagagctctgtagtcaacgcacatcctcttcgtcttgtctttcttctctacaaaaatcacaggagcaccccatg

SEQ ID NO: 32708 - DNA, 245 bp, Oryza sativa
agcttgggcctgtttttacaattaaaaaatacaaggcagggcttgtggccaagggttatacccaaaaagaaggcgaggatttttttcgacacctactcaccagttgaccgtttgatcacgattcgagtactacttgctctggtagcctctcatggttttctcgtccatcagatggacgttaagacagttttcctaaacggagagctagaggaggagatctatatggatcaaccagacgggtatgt

SEQ ID NO: 32709 - DNA, 449 bp, Oryza sativa
  unsure (1)..(449): unsure at all n locations
tccctcgaggcctanagcccaagacggacgaagggctattgatacgatccggatttgggagcgatgcgtgaagccgattgaaaagtaatgaattttttaagttgttatatatattaaggatttgttggtacaagataacgggtccatcaatttaagtgaaaatcgatgacaatatagatctaatctaacgatataaaataacgggtccattaatttaaatgaaaatcgacggtgagattagacagtaccatgtggctgcctatgagcatttgtaggagtgcaatgtgacgacctangagtgtttgtagaaaatttaatggacttttaatgtataactagttgggcgtcccacgcaattgcgtggcttgcatcaatttttaattatctanttttacacattantttttttaaattatcattcgttaccccttgctcctttgacaccttta

SEQ ID NO: 32710 - DNA, 246 bp, Oryza sativa
agcttctaattaatttttacagtttacagcatacagcatacatatttggtgcttttttataaaaaaataaaacaaaaattggacaatttccgagcttgccaaggaggaacatcaagctggaactctaattgcacatctatatgtctgcacagttatccacatttcacacacaaacataggaacatctgatatatttcgagtattaaatcctttggattaaattttgtataccttcattggagcatg

SEQ ID NO: 32711 - DNA, 313 bp, Oryza sativa
  unsure (1)..(313): unsure at all n locations
tcacctgcagatctctgtataaagacatggcaacttcatttatctagctagcatacagcaactgacacaggggcctcgtgcatgcactcacccccttagccggagctgctcctagctacaccgacggcagcgaaggccgacaacccaggcctcgacanctactggggccgccacaaggaggaaggctgcccgagaaaaggctgcgagacgcgccactacacaaccgacagcatcaaccccaacaacatggactgctaccgccgctactcgctcgacatattcgggcacacgcttgtcggcgacagtgccgaca

SEQ ID NO: 32712 - DNA, 245 bp, Oryza sativa
agcttgccgttcgtcttgggaacgaccaccgggttcgccagccactccggatggatgacctcgcggatgaatccggcctccagaagtcgcgccacctcctcgcggatgaaggcttgacgttccggggcctggcgccgcactttctgccggaccggccttgcgcccggccgcacggcgagacggtgctcaatcaccttcctggggaccccgggcatatccgccggtctccatgcgaagacgtcagc

SEQ ID NO: 32713 - DNA, 446 bp, Oryza sativa
  unsure (1)..(446): unsure at all n locations
tcagctaagaaaatatgtgttntaaggtcgaagcatacttatcatagatccaccaattgacgaccttggacagttgtcataacttggtggcgaacatgcaatataatttgagcgttacttatagtattggaaataaatttcttttagtaaacacttgatataactatacttgcctatggtctaaaacttttgtagatccaccgcaccatttggtccgattggctcttctgaataagatgatcagatcgcccatcataagcagaagttgccatctacttcctccgtatctcatattataagtcattntgatttttttttctaattaaacttctttaggtttaactacatctatagaaaaanttagcaacatacacaacacactgaattagttccattaaatgtaaaattaaatatattttaataatatttttaaaaaatattactat

SEQ ID NO: 32714 - DNA, 239 bp, Oryza sativa
agcttctctctttttcctccggcccacgcacagtaccagcagcagggagaagacgacgagacgagacgagaccaagaaatagggagggagctcccagtccactcgtgcggcaccaattttacacaaacacccttaaataagggataatttgcttttggtgtctttcggctacagctctcaagtctaaacggcgccgacagtaacacgagaaaattttggaaagataggaggggggtcag

SEQ ID NO: 32715 - DNA, 244 bp, Oryza sativa
  unsure (1)..(244): unsure at all n locations
agcttaacatttttgcagntctttcgtttgtactcatcatcaaaaattatgttgaagaagtttttttttcttacgctagatagagttatgaccctactattaaacttagtacttcaatccattagcctataaatcatataaactaaaaaggcgacttaaaaatccaagaaaaaattccctaaataaagaggctctaagtatatttttcttccctcatctcttgcttctaattgaattgtctcct

SEQ ID NO: 32716 - DNA, 438 bp, Oryza sativa
ttgaccgcccgatcggaatgattggggtttggaatggatgtcaactttcgattcattccgttttttttcccctatcgagtgctgggggtgtttttttcagaggtgaaattactagtttatgttcagaggttgatctctttcctcctcccctgcctgcctgacttgatcgagtagtagtgatacttcaccggtaattcgcactttgcagaacctggagatgatgacagcagtagtagtagtagtaatctcgatcgatctcttggatgcgttttcgttgaaggattggttattagcacaaggtgggatggtagcttgacccataactacaaatatatagtattattatcatgctcgtgcatggtttgtgttagaagcgtgcaatcaatttcctcttgcgaacacttacttatcctgcctgtaactttatactcgaattta

SEQ ID NO: 32717 - DNA, 245 bp, Oryza sativa
agcttgggtcatgtctttttttcacagcgtgcgacatgaaaggttatgcacacggaaagatcactatctgttctaaacttaaaactgaaaagaatatattatctcagaagagtgatatgaaacatctgcttaccttgtagcaatctttcattatagctggacaaagccaggcttataacaattgcatcaggttcctgtgatcacctacttacgtttaatgcctaggaaggcatctaacgtagcca

SEQ ID NO: 32718 - DNA, 451 bp, Oryza sativa
taggggtactgagatgggactatctacattagaccacatctttgtgttatgccgcgaaatattcttggatgaatggctcactgtccaagcctgataacgaagtgccgtagcatctgtcctacctactcccactgcgcatgtgtctaccgtagccgggggcattgattgctccatccatgctgtatccttctccacatgcctaacaaggagcccctctacgacggtctactgcggagcctacacggatcagaggccgctcaggacccgctatgactggaggcctgtgcaaacgacgatcagacgtcttcctaatccacagttaaacgcatgtcatagatcacattaatagacacatgcgctgataccattgtagtgaacttcggaacttgcaggcaacttcgttaacaatttctcatgactcctcttcatgtaatcttccttgcaggggcag

SEQ ID NO: 32719 - DNA, 244 bp, Oryza sativa
agcttaagactcatactgaagggtattttggttagttaccccaccccactttaccatgcatgctttaatcatgccatggttttctaagagcaagtttaataatatagcttattactaaatccaaaatttaaatcatcatctataatcgatctaatagcttactcgtacaatagttagctatagaactacatcattaatgaataatccacccatctccctcacatagtttattggagctcgtgct

SEQ ID NO: 32720 - DNA, 411 bp, Oryza sativa
  unsure (1)..(411): unsure at all n locations
ncacatgtgcaaaccatatattctacagaagaacctataatgatttctgcacgctacaatagctccactaaagtcaatacttgtggaacattacaaaaaagaacagcattgctcctcacaagtataatggtccattgtggacaagatggcgcatgctgtaattcatttatggctgttttatgtcaagtatgtgtacggactacagaagtaatggaactcataaagtcaaagtgaaatgaacaaaaggaaaactgaggaactatatccaatatacacctgagaaacctcttgagtttacacttagcaatttcatagtatcttgttgaacttctaaaatattttactgcaggtgtcatccttcctgtggtgaaataaccaatcaagaagcgaagaacctatagcatctttact

SEQ ID NO: 32721 - DNA, 248 bp, Oryza sativa
agctttaactgtatcattttgactatatcatagcatttgcacagcagaaatgcagatacatgtgtagttgtttcagactcagtgcatatgcagacagcatcaactctagattagggaagggcagttgcaacataatcaggcataggaatatgtaccataaccaggcctgggaatagccgatgcagagtaaatgccgaccctgaggttagcagtttctgccattctgcattgcacacagagctcctcgc

SEQ ID NO: 32722 - DNA, 376 bp, Oryza sativa
  unsure (1)..(376): unsure at all n locations
tacacatttctttcatacttataaattatctaaaataaattatctagttaactggttaacggaatatgcaacgaatacctaaatgttcagtgttttccattaagatgatagagataaaagggagtataatcaccatagcgagctgagaaccaatgatgaatagtcctagctntctgaggtgacattttgatgttggatcctctcacctcttctcaaagctcccaagaggagatccacagaaatagtaggatgaatgaaggatatttgctaaccttattctccaaaggatccataacctattctattcaatgcctactccctccgtttcaggtataagaaggtctgacttcntatagttttacttcttcatgtctta

SEQ ID NO: 32723 - DNA, 248 bp, Oryza sativa
agcttctccaggttttttctcaaatttaacgtattcctttttgaaaagatcacgacgaagttctttaatgttatttgtaccttgatgaaaattattcaaagcaacccagatctcatgagcagtttgaagatgagcaacacgatcataatccgaatgagaaatcccactcaaaagaatattgcgagctttgcaatttagttcaaaagcagttttttcagcagcagtattaatagcttcaggaatgacat

SEQ ID NO: 32724 - DNA, 405 bp, Oryza sativa
tgcatactcgatcgacaaaaaacaaaagtagatcatatttttattagaaaactataaacgtagacgctcgtaacgcacacacagtcacctgaaccgatatatcttaatattaataaagtcaccagtacacgtgtgtctcggtctcgctatcaacgaatacctcatatgtatatcgcttaataataattagccgtgaatacgattacaccgtgtctaatctagagatccaattttagtgggttggttcagctaaaaaaaattctagccagttaagctagctcgcttgtgaaaaaagttaattaattagtgtgtggtgattagtgaatcaattggcgaattgttcgtttgttttcaagtgttccttgcctcaatggctcagtgggtttgggcactactatacaccta

SEQ ID NO: 32725 - DNA, 250 bp, Oryza sativa
agcttaaagaaagattttttttggaagaaaagagaaatcaacaaaaagcctgaatcagccagatccctgcttgcacctctgaaattgagtgaaaacaattcttcgtactgtattttgcttatgaatattttctaggtccattatgtatcaccctaggatgggttctagaactaacatgacctaaacaggttctttagtggtgctgtaagtttgtctaataaccttttagtatagattcagctgtcatcta

SEQ ID NO: 32726 - DNA, 411 bp, Oryza sativa
  unsure (1)..(411): unsure at all n locations
tgtcgtgtctacgccggaacctagaagagtggcatctcctgactattttttatatccaggtaccctcctcgtaccattagtttacagcttggttcagagtttattgtttgatttttgtctacgttatactttaatgtattgatccttttctctttcggagatgactggataaaccatggccctgtggctatttgttggaagtgattgttccagctgatattttactaaagtaatactggttatctgtgagaacgaacatacctgagatgaatacnttgatctgaagggatggttacctggattgaaaagagagggtgaaactgaacaaacttcaactattgccattgtttcaattatgatacttcggtgctgaccagtacgtttcgtgaaaatggtctagtgcctctatat

SEQ ID NO: 32727 - DNA, 243 bp, Oryza sativa
agcttaacatgtgttatgaaaaaggatcatttcccactgcccttcattgacgaaatgttggaacggctggcaaatcattcattcttctgtttcctcgatgggtattccgggtatcatcaaattcctatccatccggaggaccagagtaatactacgttcacatgtctgtacaacacctatgcatatcgtaggatgtccttcggactgtgcaacgctcctgcatctttccaaaggtgtatgatg

SEQ ID NO: 32728 - DNA, 359 bp, Oryza sativa
tctcccgctcagcccaatggccgaacgggcagtggtgcattatctctctccgagcgctagcggtgaagacggtgagcagaacccgcgccgtcgagctcgtactccactgtccccctctcgccgaagtcttgggcgggaggaggcgctcgaggaggtcgaaaaatccgcgacttcgccgcacgcgggcgatggagaatgactgcgagacggggagcgtcgtctcctcgtctacggtgatggcagcacgccccatggcgcgctccaggctgcgggcgcgctcctgcgtcacccgcccgtcattcctgatccagagactccaactggactgtggctatatgacgtggccaatatggtcatga

SEQ ID NO: 32729 - DNA, 240 bp, Oryza sativa
agcttgagacattttcttatctgggcgctgtcccaagttctggaacattgccccccgtaagaccatggctctgactatgcatatatgctaaaacaacagtataccatattatcagattaatgccgagctgtgcaagtagtgagaaatactatgatacctggtcaaccacagatggccattgctgccactgcttgaacttattgctgtattatagcttatatcaactttgaccatgctgag

SEQ ID NO: 32730 - DNA, 428 bp, Oryza sativa
  unsure (1)..(428): unsure at all n locations
tgaccttgcgcggntgccttggttgttcgcgatagcttgtatatagttgagtctgggtggccataactgcagcaagagtgggtaagtccggtgtctgagtttcctcattgctggttgttgcccgacgccggcttgccatctgtgtaagttgatggagtaaatatcctaattttctaactagctcctatggctttatctcattaagggagttgtgttgatatgaactttgttttgcaagcatggtggtataaatccatttatatcacagcatcactagatgtcctattaacataacagagtttcacacatggtacataatcatgatgctatcgaccgttacatacgcagnccaataaggttcattctaagatcatctaactaatattattcttctctctattcagtaaggaggggcttatttatctcta

SEQ ID NO: 32731 - DNA, 245 bp, Oryza sativa
agctttcatgtctttgcatttcgaaagccgacacaggtttaccatatgccgacgagaggggtcccagaccaacaacaggttaggtcccagaccatactgtgccaggaagcccaggggtcctccccgacaccaccccggcgaatccacatgtctctcggcatcaaggctcccctgataagctagttactcagccaggggtgtcccattccacccatgtggtcgtacttgtcttatgtttggatgaa

SEQ ID NO: 32732 - DNA, 451 bp, Oryza sativa
  unsure (1)..(451): unsure at all n locations
taatgaggtctacgaaaaggagccggacaacatggtatttatttttgagatcatgcaaaacatgcaagaatgtggtcaaccccccagtgatcttgttcaagacattgctccagatcttgatctgagcaagttgggacaactgtgagtcttacaaaccttttcttttaagtgtaactgttgttagtcattactgtttgcactcacacattcaactgaactgaaagtttataccctgttggttccgtacgatgctaaattgtttcaaaatatttggtctagcatgcatttctggatcaaactttgcctggcaattgctttactgatatgttggnttttgatttatactgttaatattctatcatgaatataaagttctaactaacatattgtaatatgtacaactgtctaatggtcaaactttattaatgaagatcatggcggacttttgtag

SEQ ID NO: 32733 - DNA, 248 bp, Oryza sativa
agctttattatattttaactgttcagacaaattagcctacctgcaaaataggcagtttgtgggcaaaactagctcatttgcagcaaatgcaggcccgagaagggggaaccatcctgctgaaagacatcaaaggctcactgcactttgaagttgagactgaccactgatatcgctacaaactcacggcatgaccaacaagatccagggcaaaaggcagacacggctcatatgaggctgagagagagaga

SEQ ID NO: 32734 - DNA, 215 bp, Oryza sativa
ttgatcgaccccaatttgttatgaagctaatgatagtgtatatctgcattcataatctcaatatgggattcaacacaacttatgataagtgaaagaaaaagagcaatgaccgaatgacactatgctgtgcgggagttttagaaaatcggagatatttcgttaaattactgctgtttctgggaacacgggacataggagtaatttacaaagagggg

SEQ ID NO: 32735 - DNA, 239 bp, Oryza sativa
agcttcttcagtgttgcgctagtggaggatgatttgccgagatccatcgccgatcggagatcgccggagaaagggttgaggtcgactagctagggtttcttgtgggagcgaagaagacgaagaacgcttgcaggcgggaggttttcttcacaataggcagacttcaaaatggatccccaaaattcctttaaatagacgcactaccgacggtgcgaattccaaggaaaggagagagatag

SEQ ID NO: 32736 - DNA, 409 bp, Oryza sativa
  unsure (1)..(409): unsure at all n locations
taatcatcatatttgatagacaagtgctgataaatttaatgcgatattntcatctctgtagttttttttatcaggaaagcaaacatcccatgaaattaccaccacaagacctataaacataataacattcaacctccaaagtactaggtttaaagtttaaacagcttcgaacactccatgatatagatggtattctgaagttgtgtcttctgcttctttacagccaacatgaactgtgtggagcgcctgtatcgtgatcttagctaatcttaattctgacaacagcttctgctataatgacatactcatgatatattattgctgcaagctgaccagcttctgtcggcataaatggctttattcgataatctaagtgcataggatgggtagtggaacccaccatttccac

SEQ ID NO: 32737 - DNA, 245 bp, Oryza sativa
  unsure (1)..(245): unsure at all n locations
agcttggtcttgttgctgnntccccagtacatgatttatgggttcaagcaggtcagcccacggttccagcgatttaattggagttacatctggtagagtttccaagtggcaggtccctccaatctttcagtcaccacctatgtaagaaatatctaatctagttaaagaaatagtttgactgaatatttgaaagatactatgatgtttgttcacaagtccaacaataaataccatcagcattgttt

SEQ ID NO: 32738 - DNA, 438 bp, Oryza sativa
  unsure (1)..(438): unsure at all n locations
tgacaatntgttgtgtcatataataattattggaatcaactccccactttcttaaaaattatgcaagtgataatcactgtaatatattacagcatttgaaatgaagcatggatctgacagcttgtccttaatccatatgactactccctccgtcccacaaaaatttgattcctagggtcgatcatttgtcccacaataaatcgattcctatgccagagatcgagaaacactaattgcatctttatcattttccctgtgttgtgttgtccaccacccaccgggtgaattaaaaaaatgaaatcaacgcatcatctccagtgaagggaggctgaggaagtagttgggcacgaatttcgcaggaactttttntatgaaaagtgctaatccatggtgtacttgatgagggtggtttggtcttttgttgcttggactaaaact

SEQ ID NO: 32739 - DNA, 244 bp, Oryza sativa
agctttagcactctttccatggcagcactcctctgattgacctgatattgttgaccgtgttttccaaatgaagctaagaatatttatggatgacataacaaaataccagtttttcagtcctatatctggaagtaatttccataaatccttaattttgtccacaatttctcatttaacatgccagttttttaagatttattttatttgcccagttttccccttcactgcttcttatttgcttctc

SEQ ID NO: 32740 - DNA, 444 bp, Oryza sativa
  unsure (1)..(444): unsure at all n locations
ntatatagctgccccattgactntntttatataagtcattgtgttgtttgggtttttaagcaattgattggatacaatatcattgctttttgccacgtaagtgtgcgtttttattgaccaatattatggcttaggctgattatatattgtggtcatttttcaggtggttggtaaatcctttatgagtttatttactcggattttataccacatatgctatatatttccgggtgtggtgaaaccatgtgtcttttagggacttaagcacatatgttaaaacagtgtgcgcatggcgtatgcccaatactttggaaatttctttattcacaacattcaagcttctttatagctgttttgctatgtgaattttcaacgatgtagtcaactttagaattgacgcatcatattntacaaagcagtcggtatatcacctggatcgtgtta

SEQ ID NO: 32741 - DNA, 244 bp, Oryza sativa
agcttttcaaacttttttactgggtatttttttgcagtaattgtccataggaaagttgctttaaaaagtcctattactcaatttttaaaatttaaaatagttaatactcaactgatcatacgttaatgactcacctcgactcttaatcttcgctgttcctctcctctaaaacactccccatatatactatttgggataattaagactcctctgcaagtactcgttgatatgttcgatgatacta

SEQ ID NO: 32742 - DNA, 353 bp, Oryza sativa
tgatggttggctgctcaagctcctgcttgtcgaagctctctgctagatcattatccctacgacctctggtgtcgcgtacctacgccgaatgccgccatcctaatccttgcatgtttaaagcaagtagcggtaccgagactctcttcaattctccttgcagcagtattcaagctgaggactctctccgggttgaagctagactgcctagaccatgcatattgatatgaccgcagtatgtgctcctcagatgtgatggagaactccttgacacatattttgttcgtgttcgatgaggcttaatatcaagttatgactcatcaacagacctccaatttcgcggcttccgtgtatgc

SEQ ID NO: 32743 - DNA, 227 bp, Oryza sativa
agctttccattttttttggtcttctgcgaccgagacttgaagaccgtgtcatacatctctacaatcgacgaatgactgtgctttagaatcttgatcgggttcgctgttgcaaataacgaggcatgtgctccaaaaaagatccaacaaattccctataatgcaggactgtgcccaaccatgcgtttcttgggcaccctgatgtcctcagctctctccccatatctttc

SEQ ID NO: 32744 - DNA, 455 bp, Oryza sativa
  unsure (1)..(455): unsure at all n locations
tttcaggtcagagctacacatggccaagtagctcagctatttcacagctacacatgctatcatctgcaaccgtcttatatttattagttagttatatgttcattagtttaattcagtcttgacgacagacgtgcgacgcagtagtcgttcaacccgcatagtatagctaagctaagtctcactcgaccgatggcccctctccgtgcatctcgctggtattaatacagcttagataattatatattatatgtacaaattctggatcaagacatactaactaccagtctcccacactaattatatagttatgcgttgatgatactgtggtagagtaaacaacaactagtgcatccctggtctattcttagtgatcagttgataatnctttcttgggttcatgcagctacgcatttgcagatcggatttaattgattatagcatgcatgcactccgag

SEQ ID NO: 32745 - DNA, 248 bp, Oryza sativa
agcttgaactgatgtgttccaatgagaaagattctggatttaccttttcatcctacgagctgcagtgagagactgacaggcctgttgtcattatagtatttgcggatgttaatatacacaatgtgtgtactgaactcataattttgaatggcgtcccattaaaagagctgagatggcatgtttgtaacagtgattttgagcaagatgtattttattctctttgtaatatgattataagctggtaaaat

SEQ ID NO: 32746 - DNA, 415 bp, Oryza sativa
  unsure (1)..(415): unsure at all n locations
tcaacgtcacactcaggccaggtcagcagagcacaaattgttttactaaattaaataagagaaacatcatttttagtcttcttttgtatacagtactcgcgtttgtttagtgagaagagtatatatagaataaggccaaattggaccatttgatagtagtcctgtgtcccaattcccagatggccccttagcatgtcggtttaatgactttattaatcacacacctagagactagagagagagagagaggggtgggtgtggaggaagaangtggcgctcacttgcatatgggtcccatctcgaggccgccgaccgcaatcctcaactgtgtttggatggtgggtcccatcttctgaccgcaattcgcaatccttaacttggcaggccatttttttatgggtgtttggtccttatc

SEQ ID NO: 32747 - DNA, 197 bp, Oryza sativa
agcttgtggggtggttttgtcccccactatacgccgtggccgcattgtccgccgtcgccgctccgtccatcgcccgccgtcaccgccgccgttccggacgccgctctcgcatgaagagaaagagggacagatagagaagggaggagagggaggaggaagaagggataagggatgatgatacgtgggccccccaccct

SEQ ID NO: 32748 - DNA, 442 bp, Oryza sativa
  unsure (1)..(442): unsure at all n locations
aactcagcgtggccactccttgnacagcacaagntaatacgactttcatgagtatggagttacgctccataacggcccgaacctgtataatgtcttgactcccattctcttccgaagaatctcaccagctatgtccatagcggaaatacgctcttgatcgacagccgccaacaataagagaattttgctggcagctgtggtaagctagctgccagcgataattgattctgaggcaaacaagattgaaaataaccacatggcagtgccttctaaccgctagcaaaacagaatccacattcaaaaacattgctgcattttcaatctttaatccccatcaagagatcagattcaatccaatcttgatcacataacatccaacatcaattctcacacatccaaagtccaacatctaaataattctcacgcattttacatacaacat

SEQ ID NO: 32749 - DNA, 244 bp, Oryza sativa
agcttggaaattttgcctagaaaaaagtgaaaaagcagatggaaaaaaaagcagaaaaaaagacggaccaaaaacagaaaaaaaaaggaaaaaagaaaaagggtgaaaaaggacggaaagaaaaaaaaaagcccaatacacattttttttccggttttctccatccgatttgttttttcgtccgattggtttttctgcacgcggtttttttcccccgttttttttcacgcggtttagattggtt

SEQ ID NO: 32750 - DNA, 456 bp, Oryza sativa
  unsure (1)..(456): unsure at all n locations
ntaacttaccgatatgtaagggtacgccccctgcattgtatggaatggtcccaaacatgaagggcatgcaacgaggctggagaagatgcaaagttttaccagaggaaaaagcgggctctagcaattgggtataccatggctgtgtgtctgaaccctatgacaaatcagtccaaccaataactccataagctatttttcaagaaaaaagcgtgatctacaagatgtatactcatgcagccatcgaaggaactcacaacaactatcctggagaggatatcaagatagtctgtcacttgagagggagaatagggaggaggcatcaggtagtctgtcacattaggcaacggataaagggcaggaaacacccgacctgaaacacctgtcaattggaagtactcaagaactatgaacacattcacctaattttttganatatngaaaagtcacgtattcatt

SEQ ID NO: 32751 - DNA, 242 bp, Oryza sativa
agcttcctcctctttatttcttccatccacatccaccttcacctcctccttaccatgttatcaacgaagacccgcctccctctgctgcttccaggcttgccacagcggtgtggtcgagcgactggttgagggcgagccccctgcgccgctaggcagagaccgaggcggaggagcccgatgttgcagatggaggcgagccaaagaaggggagggggaagtataggaggtggggccattaacga

SEQ ID NO: 32752 - DNA, 452 bp, Oryza sativa
  unsure (1)..(452): unsure at all n locations
ntacagttagtgggttgtaactctatagaagtataaattagatgacttgtttatactccctccaaccaaaagtttatagcatatttcttgtttcaccaagaccaaataaaaaattaactcattctatatataacaaagaaaaaaaatatgcattcatgcaaccagtgttaagatgctaatttagcacttcattcaaatcttatatgcatatggagactacaaatatgcatatctcattttcttttcagaaaataaataagctttaagacttttgggtgaaaggagcaacaaaaaaacttttacaagagttttagacacttaaattgaanaacagtaaaagatctcatatataacattccatcgttataaagagaccncagttntacaccctagtagcttaggttatcataatcaagttagtagcatgcacggctggtatttgaatctcctga

SEQ ID NO: 32753 - DNA, 246 bp, Oryza sativa
agcttggctggcgtcactccatgcgaggagatttggcgggtgcagtggtatttcgccttcttaaaaaaatggtattgttttgacttcttttctaattaaatatttttaagtctgatagagtttataaaaaaaaacagtaacatctgcaacactttcattcaaactaagtagtatgtatgaaaacgaagggagtactttttagtacaaatctaggtgcaacctccatacaacgctaaattaagtatg

SEQ ID NO: 32754 - DNA, 455 bp, Oryza sativa
  unsure (1)..(455): unsure at all n locations
cgaatctaganataatctatatcttagatttaaatctcattagttgattctgtaggccgaaagttgtatctcccagtgtgagaggcgaaaataccatactatatctttcgatcaaaggtggagacggctccaggtcgaacgaccgtctatgcttcgctgtcggcgtctccactaccaatcaccgttgacgcgtgtaaaaatggattgatcactacaaaacactattagttatccgggctcgacgatgtcgctggcttcaccaccgctttagatacctccttaagcacagtaagatcactccctcaaggaagatgataacagaggaggtataagcatgggagaaagcctcgtgatgctatccctagtgacgtattaggaccagttattatctgacataaatattttctttcttttttatctctgganagattcggcttgatcttcaaatcctcatg

SEQ ID NO: 32755 - DNA, 244 bp, Oryza sativa
agcttaaagaaattatcgagaaatccgatgggatggttatagctattgatttacagaccgaattgctagaaaagaagatctgtaagacgaatggaggtgcaagaagaagaggctgttattaccctcaggaagttgtgcacttcctgaagaaggttggcttctctgctgatacaaccatctacttgacggagacatggtggcacaaaagcctggatactctgaaggaggcatttccaaacactta

SEQ ID NO: 32756 - DNA, 458 bp, Oryza sativa
  unsure (1)..(458): unsure at all n locations
cttagaaactccgctacccaaaatacggatgaagtccaccacaatcggtgctatcttggagaggatgntgnatatcttggtagccttgtcgcacactttcaccgcgataatcgccttctcctcggcagtcaccgcaacgatcaccttctcctctcccttgagagcgagcgcacccacgaagaggcacagggcaaggatcagtagattgagcgagtgtttcttcagaaactccagaatcgccgccatcttgccgccatgctcttggggaggtggaggggcacgcagcacagcatccaccgccaccaccgcatcctggagagacggcgccgggtccgcctccgccttctagcaggacggcggcgcggctctgagacgggggcaaaacccgatggtggtcgccatccgccctgtgggaaccctcgattgatttagcatttcggctacccactaccctcgtc

SEQ ID NO: 32757 - DNA, 246 bp, Oryza sativa
agcttatggttactgcttgtactctgtttttcaaagaaaaaaatataggtgcatgaaacatgtattatttccttcagaagtattatgagttagaatgccttcctagttaattatgtcacgaaaaagtaggtacatgtgcaatctaattacatcaatcattaaaaaaggacaggtaatatcaactaaatggtattcacaacatgtagctttcaagttagcactcctaagaatcatgatacataaaaa

SEQ ID NO: 32758 - DNA, 453 bp, Oryza sativa
  unsure (1)..(453): unsure at all n locations
tactgactagtctccaggcagcatttagaatcaggctcttgttctccatctgaatatctcttatacctaaaccaccatcctgaacaggtttgcaaatatcagaccaggatttaaggcagagaggcttcttgtcctgaccctccctcactcctgtccaccagaagattctgatgatagaagtgagtttggcaatgatctttttgggaaggagggtggtagccatgtaataaacaggaagggaggcaaaaacagttttgattaaagtaagcctaccagcatgggaaagtttgttagcctttagattagtaagcttggctttgaatttatccacaatgaattggtagacaaaaatttttgctctattagtgacaaagaggggatggcccaaatgtttggtattggaatcaacagaagcaacatggaagatggnnttgatggaattctggatgtaaa

SEQ ID NO: 32759 - DNA, 241 bp, Oryza sativa
  unsure (1)..(241): unsure at all n locations
agcntcttgattatcttccagcgggagaacccgctgcatgaacttcaaccctcatgcactctaggcgtcagacatttctagcactgataggagatatggcgcataaccggaaaaagaagcctcagacatattaaagtatgaatcatgttaagatctatctttcacgcactcatggaaggcctacccatggaaacaccaatgtacggaactcctttcgggcctacctgaagggttgtcccac

SEQ ID NO: 32760 - DNA, 430 bp, Oryza sativa
  unsure (1)..(430): unsure at all n locations
tngccagttgcttatcaagcctcggagagtgtttttgctctgatctcctgtacatgaaatgctgncagtgctatcatttgcgagtcttttgctagcgtagctaacattttttatgccatctatttcctagatgactacctagctgaaactgactctgaagaggaaattgaggtcttagatactggccaacttcatcccgggatcttattctctgatgaatcgatggagcatagaacagcggattctgtacaggtggaagaatatcaagtcagtcattctgctgttgttaacgatgattctagtatttacattccgaccaaccataataattcatctggtcgactgcagctggagatacatcttgatgccaccaatgaaacatctgttccatccaatgctattttggatgcaagtgtaacacatcctcatc

SEQ ID NO: 32761 - DNA, 243 bp, Oryza sativa
agcttctttttttttaacatgcatgacaacttgctgtgctttgacctatatccatcatacaagggcatctgacaatcttccaccaacttactaaacttctcaaaatctctgtcgttgacctctgcgtcttcaatgttatgcaacattggagatagacattgagtgtccaaatctatggtatctccacctaacggagaaggtacgaacatgccttctcgagctgcggcggtgttctctacatcc

SEQ ID NO: 32762 - DNA, 444 bp, Oryza sativa
  unsure (1)..(444): unsure at all n locations
tatattatccactaccctaggaattaggaagcacatatatgcatcctatggncattcatgctccgaggtttgctttaaagaaggccagccaacattgagggctctgtcaagaggatatacatgtacacacgttgatattgtccgacagttagtcagtgaaataccaagcaatagtccatgctaattggtcactttgtggtatatatagcactgagccactgatcacatgattgatacctcacaataacgatcgatagtaatccatgtagtgcaaatagtatgatagctaaggctaggaggcattatagaacagaacaaccacctcttgatagaagttacatgtggataacaaagaagacgtacaaggtacctcttttgtgccaagatgggactgagatcctctgcattgaagagtaaaatgcagaggatctacagtattntaca

SEQ ID NO: 32763 - DNA, 244 bp, Oryza sativa
  unsure (1)..(244): unsure at all n locations
agcttggcgcacacttttgttggcgagagctcanaagatcactcgcagagccccctacctggcgcgccagatgacggagcgtggggctcctcaccgggagaccgcgctggcccccctttgccggttcggccggggaccctgggtgagactctaagctcccaatctgtggaaggttcgcgagacaggaagcacacaagacgccggcgaagtatacaggttcgggccgctgagaagcgtaataccc

SEQ ID NO: 32764 - DNA, 244 bp, Oryza sativa
agctttttcagttgtttactgtcatggggtcatatttctcgcatcgatcctcaacatatgcatgacaacgtggactcatcatgaattcgctgtaacggtattagagctaattattatcatttctgatcgcatatggaaagcttcaacgtcatgactagttcagtcagcaagacgtagctgatttgaattaatcaagagaagcttgtgagagaaacgacgcacaagcggaatttggagttttgta

SEQ ID NO: 32765 - DNA, 405 bp, Oryza sativa
  unsure (1)..(405): unsure at all n locations
tatgacatgctgtnggtntgatttgtctacttatgtcgatattgtttatgagaggacgccaaaccctaaatctaattgcccgatcaagtgcgcactgtaaggagtacgtgaggttctctgctggttcttttcatcaacaggaaatcagaacgagaaaagcaaatgaacaaaagacaaaactagaagaatcattgatggcttcaaacataggtcggtagattgattttataattatgagaggtgattgtttataggctaaagcttaagatcttgtaatctagaactctaacatgatgagggtaatacagcatgaacctggacgcgatccggcatgctgttccggggtgtatgaacctggacacgattggcgacgaacggtcggtgaaatatgggaactgcacatca

SEQ ID NO: 32766 - DNA, 248 bp, Oryza sativa
tagctttgcaactttattttttgggtaagcgctaacctggaaaagacaggaaggctgctccgttgacatgctgaccccacatgtcaacctaaaggaccgctgtataccaatttcacgaagtccgtccacgggttgacggaatcatatctcgattatgaccctaggaaaacggacgactaacggactctactatacaccacacaggttgaacacatgtaaaccaacccgctaccgatcggtcacactaa

SEQ ID NO: 32767 - DNA, 411 bp, Oryza sativa
tctgcggcaaagagcgagacggtcagctcagagccgtcgttctttgtttatcatgaagagctttcccgagagggacctaaacccaatctctcccagaagagctagcccggtagctctctagatcgcgtgatgcttgctagtgtgaagggcgatggcttgcatcattgggggggatgcgaccatactaggctggtggctcaagcaactcgaacaataaacgtgaactcacaacatatcagtaggcacgcggtgtaggaccttatctttagcaacccctctctttcacctctcttccgttctgggaacagatgcgcagtatctgagagacgagcaacaccaacggtgcatgaaagccacagatcaatgaaccagatcagagctaccaggtacctccgaggccagaagaaccct

SEQ ID NO: 32768 - DNA, 248 bp, Oryza sativa
agcttcgagagcttttttgtgccctccgatgtgacagaagataatctgaaggagatggtggcgcacggcgttcttccagcaaaggagatcatcggatggcgaccatcattcggcgaagcattcccgacccccgatacgcgcgaaatcgtggtatttgctcatttcttctatggcggtttctcccttccaacctcaagattttttcggggaattctaaatttctacggaatcagcctgcatcatctgaa

SEQ ID NO: 32769 - DNA, 439 bp, Oryza sativa
  unsure (1)..(439): unsure at all n locations
tgcctggctaggagagcttggntgacaagcctcatatccctttttttaagcctcccatgaatttaggcagaattagctgttcccaagcgatccaatgcactttccgtttattggtctcatcaccccaccaaaaatccctgatcattttggtataatgtcggctcccaaaactaatgattcaaaaaccgacatgtttagactgtatcaagccctggatcagtagattgatacaagttcaataatctggatcgtctttgcatacgtctaggcatagctttgaaggagatattattatatgaaagaatacgggatttacaagaatgtgtctaactattacagcagaagctttagaatggactacctctgctgttttgctatagacttaaactatctatctaatctataattgagaattaagttagaatgaaactaacttata

SEQ ID NO: 32770 - DNA, 242 bp, Oryza sativa
agcttgctggtttttctaaaatctgctgcacctggtagtagaattgtagtgacgactagaagtgctaaagttgctcgaatgatggcattcaagatacaccaactggggtacctcactgatactacctgctggtctgtgtgccgaaatgctgccttgcaagaccgtgatcctagtattattgatgacggcttgatttctataggtaaatctgttgcagccaagtgcaaaggcttgccattggc

SEQ ID NO: 32771 - DNA, 448 bp, Oryza sativa
  unsure (1)..(448): unsure at all n locations
ntagctcctgctgatattgaggaaaggggtcctgctnttatgcctgaaaatcatgaagttcagcagcaagatcctttggaatatggggttgtgatcgacgatgattctccttctgaagagcttactccttcgttccccagttctactgacagtaaacaggatgcacctcttggccccattgtccatccttctgtaactacccctgaggaagagcctatgggagaaccagccaaacaaacatacgcttcagtggtaagcaggcatatgctgccttttagtcaagttgaattcctaatttctttctttggttgatgttgaactctttggactgaatggaattttgtcagctgcgaacaaaaggacaccctagccatcaggctattcactccattcctctcaacaaggccacggcaagtagtgtggagtcacaactgaatggacatatgac

SEQ ID NO: 32772 - DNA, 243 bp, Oryza sativa
agcttgagaggattgttgcactgaggacgagcgcgtggttggcgagcttccgccggcgaggagggcggcgagagacgacgaggacttgtggaagttgaagccgacgcgaagctcccgcgcctcaccacctccgccgtcctcttcccgaccccgaggccgttcggttcctataggcccgccaagggcaagccgatgccgccgcccatcaccatctccagccgccgtcctcgacccggcacacct

SEQ ID NO: 32773 - DNA, 414 bp, Oryza sativa
  unsure (1)..(414): unsure at all n locations
tggaactgcgactaaattggagagatgctacaagttcattgtattcgagaaaaagaaagcagtatgaggcgagagaaaaccgatctaatgatgaaaagggggatctagccgatggggacttacctcagcgtatttggccgatggtgcggcagatgggctcgcggaggttgacatcgtcgcaggcggagatctggctggggatggagtcgcctgggaattgccttgcgcattggaggaatcgccagagagagagagggtaaagtttcgcttaagcggtgaaaacggaagtcacggtgtgagatatctcggngataacggttagtatttaaagcactagagtaacggttgggaaaacggtagagtgcgaaacttgctcggagtcgatacacggcanatccggaacattatcaaata

SEQ ID NO: 32774 - DNA, 244 bp, Oryza sativa
agcttgggggtcttttcacgttatggacagatccgtagaaattggacaagattattaagttaatctctcactgttttgcaaaatgtaatcaactacctttttgtgactttcttgattcacctcaaatacctgcagtcatcatgggaggatgaggacactgggaagatatacagctgtgttgacctatacttcgtgtcccaggtaaattgcagttatggcaaaaaaaaaacttttgatttgtcac

SEQ ID NO: 32775 - DNA, 342 bp, Oryza sativa
tagagaactagtagtaattctctcatgtgaggtatagtcttctagctggtggtacacaaacataaacacgaacacatgttcatcgcgtacgtactagctactaggtgagacacctcttggcgtagtacgtacagtagtactccggccagatctagtagggactgtattggcgcgtgactcgcctggttcgtccagcttgcatgcagagaccgaccgagcaagcaagctaattaagctggcccgaccgaccgagtgcatgcgtgttttgtgaacctagctactgaggggggagtgaagggtgtgggtgttcaatccaccggcctgtctcgtctatgctcttgc

SEQ ID NO: 32776 - DNA, 246 bp, Oryza sativa
agctttgccgttttttttactcacataagatgtagatgtagggggatagtcataaggaatcttagctcccttatcaccattattcccatcccccacttggcccgacatgatctctccaagcggttaagccgaattaggagattaggctctgataccaattgaaagtgtcaataaggcctatagggggggtgaataggctaattcaaaaaattcaattaaaagcggaagcaataattttcagatatt

SEQ ID NO: 32777 - DNA, 458 bp, Oryza sativa
  unsure (1)..(458): unsure at all n locations
actcagcttgacnagctcaacttagtagcaggaactggctnngtattatatcagctgggttatcatgagtacttatcttgcataccttaacatcaccttcagcaatcacacctcgaataaagtgatatcttacatcaatgtgctttattctctcatggaacatctgatcctttgtaaagcatattgcattttgactatcacaaaatatattaatgcaagacataactccacaaagctcagtgtacaaacctctaagccaaatagcttctttacaagcttcagaaatagccatattagataaggcaacagttgcttgcaatcttgcctttcaactaacagcacatcctccaatagtgaaaacataacatgtgagtgatcttttcctatccaaatcttcagcacaatctgaatccacataacccacaagtccatctttagatctcctcaactacaaacaa

SEQ ID NO: 32778 - DNA, 247 bp, Oryza sativa
agctttgatatttttttcactttgctaggatatacgtacatccttggtttgcaaacacttactcctaggtcaatctgatttgtaagaaaaacgtaagaattttaatcttataaaattatttctacgaaggtttttgaaacaaataaggatatgattaatcatatcctatcattctaaattcctttagaatgaacaatcctatagaaattttaaatgaacaatcatttaaaattatgtaaaactgcat

SEQ ID NO: 32779 - DNA, 450 bp, Oryza sativa
  unsure (1)..(450): unsure at all n locations
tggtctttntntttctccttgaatttcctttnttttccttatatgttttacaaatagaactgttaaactctgcaatccataagaccgacattatggtttacataagtgtgctggagcctggagtgcaactgctagggctatcttgtggggatcttggactagtagctcaaattattgccggtgccggcatgaaccatgacctcaccaatatattctcttctagatcaagtagaaaaggaatactttataagtgtgttcaccagaattcttcaagcaattgcataccaatcatattcataagttctttctttgtcaagagagatttatgtgcaatgcacaagatccaactgtaatagtagttgccaacttgtaggatgccacataactaggttcgagtaattttggctcaaatttccatgtatattcctctgtattatcctaaaactgact

SEQ ID NO: 32780 - DNA, 240 bp, Oryza sativa
  unsure (1)..(240): unsure at all n locations
agcttttgccttttttagtttgtttttaaaaaaaaaaacattgtggaaaacatgcgaaacgaatgtgatctcaactacaacccagcgtccatgctgnttttttttttttttttttttttttttttttttttttttttttggcggggagcgtccatgctgttgattggattgaatttcaacaacatactgttaaaaactggaatttcgtgaaaaaaccgggtactcctacgcttgctataa

SEQ ID NO: 32781 - DNA, 442 bp, Oryza sativa
  unsure (1)..(442): unsure at all n locations
nttatgggtgcattgctgattgtttctgtttttggaatgtctgtgttcagtaacagatatggttgagattataaacgggatagtggaagctaaagctatttatattcacaactgatggtatgagttgttaggaacttatgatagcgtgaacttcaagcataatgatgtttttgtgcacgaagtggcaaaaacaggggtcattcactatacttctactaaattaaatagaggccgagatccttttattgaatactacctccgtttcaagttataagactttctagcattgtccacattcatatagatgttaatgaatctagacacacatatatgtctagattcattaatatatatataaatgtgggcaatgctagagtcttataatatgaaacggaggaagtaacttatttggactntgaaaccattggggttgctttgactc

SEQ ID NO: 32782 - DNA, 243 bp, Oryza sativa
  unsure (1)..(243): unsure at all n locations
agcttttcaacactttcgcggnttggttcttcgattggatcttgaatttcctggttctttgaaaagaattccaagtgataatggtggtgaatttaaaaatgcttcttttgaacaattttgcaacgaaagaggtcttgaacatgaattttcttttcctcgtgttcctcaacaaaatggtgttgttgaaaggaaaaatcgtgttttggttgagatggctagaacgatgttggatgagtataaaac

SEQ ID NO: 32783 - DNA, 408 bp, Oryza sativa
cgacagctgaagattatagaagcacttcacacagttccatagtcttttgacaacatccaagaaacgaaacgaaaccaggctctgaatcaatcttgactcgatacttttcccacaagttctcttcgaatcgaccgattcgttacaatgtcaacaccacaatgtcacaactacatgagacgagatgatattacagaaaatattacagatcagtttttgagtttctcccaagatcctaatgcaagagaagcatagcatatggttgttcaaaaaataaaaaacgaagataatcgctatagatcagatttagatctacagcatcattcaatcacatcacgaggaatgatccactaagcttttccaataggatggttgggctatatgacattattcatttcgttaagacttttt

SEQ ID NO: 32784 - DNA, 245 bp, Oryza sativa
agcttgtagggttcaatatttacttggaagttgggacacactcccttaaactacacacataacaacatcgaaatcttttatcctttcaactattaaaaaaagtacttatgtactccacacagtttaaataaaacaacatgatatcaatatagcaatttttttgcctgccttaatacaacgaaatgataatagtgaaaacaatatagggcctcaccggttgcccaaaaacttattataagccgtag

SEQ ID NO: 32785 - DNA, 394 bp, Oryza sativa
  unsure (1)..(394): unsure at all n locations
ntaaccatgttgtcatcaatcaccaataaggtggagattgtaagtgcttttatccccctagtggattatggtgattaatgacaaatgtggttgagggactaatgagttcattgagtaactttcaggtgcattagtctaaatgtgtggaagatggatgcttggagaccccccaaaagtacaaaatcaaagcggaccggaactcgagaagtgcataggatagtttatctcttgaaatcgagtttttaggataaaccgtactattaagaggggttccaggtgatgctctgagatatgtcaagtgctcttagtgtgaaccaagtgtcaagtttccctacgagtcagttttgcttatactccatctgtccaaaagtgcaggtccagaacttcctgtctt

SEQ ID NO: 32786 - DNA, 245 bp, Oryza sativa
agcttgtcaagttgtttccctcgagaatgaggaagctgatggcgacaaagtagagctcgacgtacatgacgaggctgatagccatccggccatagccgccgaaggcggtggccaatgtctaggtagctccatattcagcgattggcgcgcatgcagtggtcgatgagtttgccggtgtagaagcagttggcaccgaccatggtgaagagcaccaggctgagccacccgccctgcgatagcgcgta

SEQ ID NO: 32787 - DNA, 314 bp, Oryza sativa
  unsure (1)..(314): unsure at all n locations
agcgccagacccacagtggttgtcaacaaacgaccctggcgcctagagaaaaaatagccgtcataccgaactctcaacacatagacttgcgaaactgaaagatagatatgcagaaagcacaacgctaccagaataccgagaccaagcagtggggacagacccttccgcaaacagcggctgataattccatagacctcccccaacaatgcaaagagcagctgctngaaagctagagcaggatactaggcgtaaacccggccaacatcacctagtacaccgactaaccgaccatcaggaactggactaccggcagg

SEQ ID NO: 32788 - DNA, 252 bp, Oryza sativa
ggctggcttcctgggcttatgtttttacatgggatcacagaggattcgacaaaaaaattggacgttccctcctaaaccaattacacggttcagtgaaatcttatttccaaatccattatattacagctgtaccacaaaaagagtgaataccgacatatgtttacccttaaaaccgccatattattttacttttttagaacaggtaaaaggtgatgaatttgaatgcggtactacactaatatgcgtataact

SEQ ID NO: 32789 - DNA, 264 bp, Oryza sativa
agatggcggctcaaaaaaagcgctggtatacacaggctctgtccgtcccccttaacagagtactgagcgagacacaacgatggacgtatgtcctaaagggaggtgaacgctgcttgcgttagcggggacaaagagggcaccttggaagcaccgaactacgtggcgcgcggagacccgccccccatgtgaggttgctgaaagcgctgccgggccaaaacaaggcaccgactttccaacagacccccgccgcagattacgagactc

SEQ ID NO: 32790 - DNA, 248 bp, Oryza sativa
agcttgagcctgtctttttcacacacttggcaaagcacttgctcccaacagtctgtaacaaaaacataagagatgattatgatcatgctatgtgttgaacaaagaagcaatgccatgaattgacatgttttatgtaaaacacgtttctccgttttccacatgtaatctgtattgcacaaatataatataccaacagtggtgatatcacttgatgagcgggactaattaattacccacatgtcaaactc

SEQ ID NO: 32791 - DNA, 245 bp, Oryza sativa
agctttcttcgtgtcttgtcatcaactgccaccgcctccgccggtttacacacacctacacctcgtcctgtggagctctcgtcggggaaacaaaaaccttagcggtgaaacgaataacgaaaagtaggagtacgcaaacagcctctgctgatcaccgtcaatgaaatcccggtctcatcgcgttattgcacatcaaaagtttttaccgagacccgctggtcaggtcacggaaacacgccttcttc

SEQ ID NO: 32792 - DNA, 446 bp, Oryza sativa
  unsure (1)..(446): unsure at all n locations
gtatcaaacagcgacagcaaaggcacgtacgacatctactcagttagttaatgaaattattggctctcagcctctcacactgtgtcactgctccactcattgtatttttgttagtgaatagatcaatcaaccaaccatgtaatcaaagtgggctaattacgctgctgntttcgaaacactgttccttcccccaattcttcaaaggaaagcacagctgcagagtgcagacatacacatgagagaggagagcagaacaagaaaggttgacagattaattgacgaaatgcagngtagctactactagcaagcaagattaaagctaatataaagatgctttggaataatgccatgacgcaacccacactatatggtggtgctgtgcttgctaggctagctntgaccgtgctgatcccgaccaacgaagccccaagtcccttcactatctt

SEQ ID NO: 32793 - DNA, 248 bp, Oryza sativa
agcttattattttttttatcaaagaatccctgcagatatccccttcatcctatacacgaaagaactatttttgagcattttgagaaattccatttttatagaccatattgttaatccagcaactcatcgatcttaatggcgttatttagattgaatacgtaactcttcattcttccacataagattggttacatgcgcatcgggaaatataaatatcaaaaaatcggttatttacgagaaatgaatac

SEQ ID NO: 32794 - DNA, 243 bp, Oryza sativa
agcttttgatccctctgtcctccccgctgatctcccgcccatttcattggttgcacgttagctgttaataaattgggggagctgctgtttgctgtgcgctgagagaagttggggggttgtggcattcttggtagataagataccatgtttaaacctcatttgttgtgataactaattttagcgttatatgaatgctgtgcctaaaatgtagtttaggtgcgatttgctacaatttaagctatg

SEQ ID NO: 32795 - DNA, 454 bp, Oryza sativa
  unsure (1)..(454): unsure at all n locations
tgtcaacaatatagcaatatacatgaatagctggaatatttcttataatcaaattgttaaccatccacacagcagaaactttcagatggtaggaataatggataacttttctatgaaacaacatccttgttgcttaagtacaaaattgaactaattgttcagaaccagtataatggttaatgaaataaccttcattatacaatgcacagatggattttgttagtgactactatctcccaagtattcaagaaagacttgttcttctgtaggcaaatgatacaatgatgtgttagaagaataaacactaggatcaaactaaaacactactgaagtgctgagctgttaccatttctccatcaaatcaacgaatgaccttgtttcttctcagttctcacagaaatttatgcanagaagatgccattactatcttcaagttctcccccactccatttga

SEQ ID NO: 32796 - DNA, 244 bp, Oryza sativa
agcttggatctttttgcaacatgggaatttcttggtattgctttagatgaggcatggcatctgtcatacccgttcgtgttcaaatatgagaatgaggtagaattttaacttcagtcatatctatagcttaaggaatgagtagctgtttctgaatatgtcaatacgttaccttttctcttgtagatttatatgatgccagaggggaacaaaaagaaggagctacgactttatcgagctactaagt

SEQ ID NO: 32797 - DNA, 395 bp, Oryza sativa
  unsure (1)..(395): unsure at all n locations
tacaataagcaccaaaagatttggaccagctgtacgatttctatttctgatgatgcactgagagaagtgcaaaggaagattttgggtgactgatgcagaaaattntatgtgtattaacaatagccataagagaatacaatgggaaggtgtacatcatcattttttgccacagatggtaataaagagattgatacttcatacacgatacccatcttgtgcaggaaagaacaggatacaagtgtttgttgaatcagcatatcacacgttccatcctttttgctaggcacctaattcgaactggaattgttgggaatccagaaagttatggcagttgacgcagtttgcaacattgctcgacggggagcccacttcaaagcagtgataggaccgatgtg

SEQ ID NO: 32798 - DNA, 246 bp, Oryza sativa
agcttgcaaccatctatttagggtgtgttcggcactccctttttccaacccatctccctcgttttccactcgcacgcatttcaaactgccaaacgatactttttttgcaaaaaatttctatatgaaagttgcttaaaaaaatcaaattaatccatttttgaaaaaaaaaactaatacttaattagtcacgcgctaatggaccgttccgttttccgtacgtactattccaagttcccagccgggaat

SEQ ID NO: 32799 - DNA, 435 bp, Oryza sativa
tcgcgttcttgccttaccaggaacccgggttggcttcatttcttcccgccccggcgttcccaactattggcatgcgaggtttccctgaaccgactagttacttagctagggtgtcccataccaccttgtggatgcactttgttatacttgatgagtttcccacaggaatcggtccttatatgcgaatacgggacaacgccatgcatgcaccacccccacatcgcgagttttcataattcatttatttttaaacacaccgacaccacatgttcggttttcaaagctcctcaaacccattttcgaatttttcgacagtcaaccgtgtatgtgggatatttggaatacgcgctcagagagcacggatacggaagtaccacaagggtggagcggcaaggaatcagggtagtacaatctacaggaattagtgcgactact

SEQ ID NO: 32800 - DNA, 249 bp, Oryza sativa
  unsure (1)..(249): unsure at all n locations
agctttgntgttcctatttacccaaagaagctattaaaaactttcagtcctctcaaactaagtagaaaaaccaaacaaggcaatgataaaccaagtaagcaaactgaattgataaaaaatcacactccattattgtgataatagcccccgactgacaacggcaagaagaaaacttgatgttgacagtcaaaatagggagatacaatgataaagttaagcgtagaaacgacgaagatgttcaatgttcca

SEQ ID NO: 32801 - DNA, 139 bp, Oryza sativa
  unsure (1)..(139): unsure at all n locations
tctaagttcaaatttgtcggtgacatgggacaggngaaattttactatacgttgggcaactctgtcacccactggcctgaccccctaagggggggtcgggccctatagcgataaaaacatccctccctttatctacccc

SEQ ID NO: 32802 - DNA, 241 bp, Oryza sativa
agcttgggaatggttctatatgaggagatgacgacagtaccagccaaagctcagggcagataggcaagcttgccggtgcttgggggtcgacgtgatgaggacgttatggcggtgacggatggagctcaaatgcggagaagcgagctcgctgacactcgaggtcgatgtgacgacggcgacggcgacggtcgtcgcttggggtggaggaagcggcctctggcgctcggggcccgagaggaca

SEQ ID NO: 32803 - DNA, 437 bp, Oryza sativa
  unsure (1)..(437): unsure at all n locations
tgatgagaaaccggcagatgagaatgatcctcaattgttgagattaagaaattctgaacagatacattcctattcaccacaaaagagcataaccttggcatatgcaaagaaagaggtggaccatctgaccaaacatcatcccagaaagaacaagacaatccattacccagagtacaccttgatattcctctgaaaaggtccattaacttgcgaacatccttccactaaaaagacccccttggaggagacagatgagggatcttgtcatagtaagaagatcagataagagacacccaaggcacttgtcttctattataaaacttgtccaaatatttaagtaaaatagcctgattctggatagacaaatttattacacccaaacccccttttaccttaagcttacanaccttgtcccaagcagccaaagactttntact

SEQ ID NO: 32804 - DNA, 243 bp, Oryza sativa
agcttaacgggctttaaaaaaacaattaattttagccgtataaaatttgactgccgaacactttgactctttgatttagtaagctcgagtttattttgtctacgttgaatccctttgacccatgtaaagatagtccaaaggaacattggctcacttctctttgctaaaaaaaaagcaggaagccgtcaccatcatgctaaagtagattaattcgccctatagctagctttattatcacttaat

SEQ ID NO: 32805 - DNA, 447 bp, Oryza sativa
  unsure (1)..(447): unsure at all n locations
tcacagttagaatatgttctagagaaattcatttttataaaggtcagacaaatgaaagcatcatcttctcggttctgcattattatactctgtcaacgagaagcaatgaaatcgaagctacactttctatgggcattccatcgaacacctagcaaacgctaaaacgggacgaccaaaatccgatgccatatgtacgatatcactacacaatcgtgccgtgagctagacctgctcattcgcacaacaacgcgtcgccccgcaacagaggaagaaactcacggagcacaagaacggtgaagctggctccgaacccttccgatttccgcgatctcaagccggcgccgcgctccgaacccactccctactacgcctgcaccgccgctgtcgcgaggaacccgatgaggagcatgaggactgggaccagngagaggacgaggagaacctccc

SEQ ID NO: 32806 - DNA, 245 bp, Oryza sativa
tgcttgaaccgatagatatttaggatatccagaggcattaaagctggaaaagggaggtgacataagatcttcagttaccttgataggtgatcacaataaacaggatgaaccattttcactgtaacataacagaagcacaaatcacatgcaatgaatcagagatgtgctcacatgcgatgaatcagatatgtgctctcactccctccctctctctgctgcaccaccttgcccaaagcccttataat

SEQ ID NO: 32807 - DNA, 436 bp, Oryza sativa
  unsure (1)..(436): unsure at all n locations
tagcttggcgtcgaccgtcgagtttgtactgtcagtctctattttttataagaacttttgtcagtttgtcgtgggctatgttcaagagattggaatggtgtgtaatacaagttgatcgtgtgccctttttgagaacttctctctgatggcaacatgctcagcgcttgaagaaattctagtaccgtctgaagcagaccattcgctaagggcttgtccactttgctaccattttcaatcttatcatttttcttgtaaagntaaaaaaattgctacatttacgttgttgctaaatcttagtaagtacatatgaaatctncgctaaatttgataatcttaccaaatattgataaccttacccaaatttgacaatgccaaaacttggaaccgttgaacatgatagcatagtgaacaagcgctcaattattatcatagattg

SEQ ID NO: 32808 - DNA, 246 bp, Oryza sativa
  unsure (1)..(246): unsure at all n locations
agcttgtcccgtcgtatcttttggagacacggngcccgccgttcccactgcgccagtacggcggcttctggctaccggagggcatcctcccggcgttggaggccatccacaccaggttcgagacgaggccatccgacgtcttccgtgcgagctttcccaagtccggcaccacctggctcaaggcgcttgccttcgcgaccatcaaccgggacgagcacccgccgtccgacgagcaccacctgctct

SEQ ID NO: 32809 - DNA, 449 bp, Oryza sativa
  unsure (1)..(449): unsure at all n locations
ggtaacanaatatcgcactgacgttatatataagaatagtgtttacaaacatatataaattatatcatcatatcactattctcaaatatatacataactaaattagctatgcaatattttaaaataaagtttacacccattatatatatagccatctattatctatctattatatactaaaagtggcgctctaataaattagagaaaatcctacaaacgctctcaagccaccacgttacgctctaataaattatagaaaatcctagaaattctaagataaaaagcaaaacatcaaccccttgattttcacttaattaaattggtaagccaatattatacattgttagatgagattgantcttaaacagaccaaatactatggggtcccacctctccttctcccgacatacttaagcatacgtacttaccatgtacgtacgcttccttcc

SEQ ID NO: 32810 - DNA, 248 bp, Oryza sativa
agctttttcagtttttttttttgaaggactttgctatgttggctttcatcaaaatataggaatatatttgcttgcaggaggaaaaggaaacatgcgttcattgttagaacagggattaagaaccatttaatatccatcaaaagggctctatttgatgattaaatatatatataggtgttcctgtagcacttccatacaattccattcctttcagtattttgatgtgctggatgctattttattactgc

SEQ ID NO: 32811 - DNA, 367 bp, Oryza sativa
  unsure (1)..(367): unsure at all n locations
tttgcgggaaatgaagagcatttcaacagttatcattgtgaatatatagagcttgtgattacctgtctctggaatgcttcgaattcatcggagctcaaggagccatcgctgnttgcgtcgagaagatgcatgagctccttagcatctttgcccccagcaccaaggtcttccatcacctctgggagctcctcaatactgatccttccatcaccgcttttatcaagctggcagaaagcacggntcgtgcagttgctggctccttgatcactagctgggaggtcacgaagacgcatagctgctaactctgctgcagccaacatgataaccttcagccttttagcctgtagaaaagaattcaatgaatgac

SEQ ID NO: 32812 - DNA, 250 bp, Oryza sativa
agcttctacactgtaatttttcattcatctcactcatatccatgtcatcatcgacaaataaagctctccattcatgcattcttctccaaagaaaaatcttttgcaaaaagaaaagaaaaagggagagaaaggtgtggctataaaaaaatgatgaataaagtcttgctctatcaaaatatggagcgtgatgaaaatatatagccataccctctccatgaaaaacaaaggataatttggaggagaagtataa

SEQ ID NO: 32813 - DNA, 244 bp, Oryza sativa
agctttctggctttgtcaacaaagaaaatcaggagttggctttgttgctcgatatgacacaaagaaaatggtaagtttgtttacctatctttaagctatttaagaatcatgattacagtgtccacccatgtgaagttgttaggttaccattcatttaccatgtaactaatgcccacggcctcaaaaggctacgttcaaggttttataggatagatttctaagcgctgttctagcgctcagccat

SEQ ID NO: 32814 - DNA, 241 bp, Oryza sativa
agcttcatctcatacttgatcccagatgatataatgttttttttttcaacagttaacatgatgacaagactgggtgtcattcaatttcttaaatattatgtttactgaccaattgtagtttgcactccatgatgaatgctggctcggagaataataatacggaacagaagttagaattttcattggcatcaacctaatacttggtaggacacgacagccaaaggtgacaaaacacgtcgaa

SEQ ID NO: 32815 - DNA, 454 bp, Oryza sativa
  unsure (1)..(454): unsure at all n locations
tccttttacctgcatcttcttgaaattcatcagacaacttacatatgattgcaaacatcacattttaggcctcgtttggctgtttgtgtttcgatgtggaacaggccccanacccgcccttccgtggaatgcagcccacgcctggatcaattcccacatctggcccaaatgtgcatttggctgttcgtgtattgctgtgtattgcggctcgatccatgccgacccacggatgagagaataatcctcacccgaggcctgtaactttctcgcgtgcacgccgcagctcgcggctcctcctgcaccgccaccgctttttccaagccatccaccgcctcctcgccatcctgctgcgccgccgtgcgccgccgcttcttcgagctatccaccacgtcctcaccatccttctatgccgccgacgccgctgccttctccgagccgtccaaccgctcctcgt

SEQ ID NO: 32816 - DNA, 245 bp, Oryza sativa
agcttaagattggatatgactttaattttgcaggttaattcgggggtgtgtgggacagaggggctaaactttagcctatttgaaaaaaaaaaagcaacacgtgtattccttaattactgaatgattggattcagaaccacaagacagcaaagggaatgtatatgtaaaaacacttcctgctgtatgatgtcgaggaatcaggatcctttgcatttgacattaggagaaatgaagaccatccaatc

SEQ ID NO: 32817 - DNA, 434 bp, Oryza sativa
  unsure (1)..(434): unsure at all n locations
tgcagagntatatatggctagagtggcatgtttgtatgttgttcctaacaagatagtggcggatagaggtagtcagtttactttgaagctttggcagaaattacaatcagaattgggtacccgtttgaatttcagtaccgcttaccaccctcaaacagatggtcagacggaaagagtaaaccaaatattataagatatgttgagagcttgtgttctagattttggtggaagttgggataagaatttgccgtatgcggaattctcatataacaatagttatcaagctagtttgcaaatgtctccgaatgaagcattatatggtcgaaagtgccgtacgcccgttttttgggatcaaaccgagagcgtctaagttttgggacagacatattgcgagaggcggaagaaaagtgaagatattccagaaaggttgcgcg

SEQ ID NO: 32818 - DNA, 244 bp, Oryza sativa
agctttggccttcttttgtttcttttcaaacattaagtataagaaaacagcaaggatgccagaagctaccaagatggctgggagtagaagttttagaagaggtctgctataagggtgagactttttaagacagggtgaaaatccaagacgtggagaaccacataacccagcattcccaatcaaagattgtctcgtaaggttattagagaaaattcctccctctggtattgggccttcgagccta

SEQ ID NO: 32819 - DNA, 448 bp, Oryza sativa
  unsure (1)..(448): unsure at all n locations
aactcagcttatgtgatattacctcgtaaaaactttggatgagaaatcncttttgggaaaactcatacaaaggaaaaagagtataatatgacaaatataggttattctctagagaaagatactccncctgaatcctgcaaatttttaagtcatctcataccaattccttcgacacatttaaagaatgtggagtatggtagagattttgtgaataaatcagcaagattatcacatgacttagtttgcaagatgtttatctctccatgttgctgaagctcatgaggataacatacattaggagcaatatgcttagtgaagttgctctaatataaccagtttccatctgaataacacaagcggcattatctttatagataatgggaggtgattcccattgaaccaataccacaagatgttagtatgtgggtaaccattctgcgaagccata

SEQ ID NO: 32820 - DNA, 237 bp, Oryza sativa
agcttcttcttcttttatggcgcgtcgggcatgtccgtcgcgaagcgctgctccttggcgatggagaggtgcacgctggcggccatgcggagctgcccggagtgggagcccgacgccttccagcaggtggcggcgggcctgaagaacaagccgctcatccccctcggcctcgtgccaccgtcgcccgacggaggccgccgccgcgccggcatgacggacaactcgacgatgcggtgg

SEQ ID NO: 32821 - DNA, 203 bp, Oryza sativa
ttttgcatatatggggttactgttcatcagagtatggatgctactccccagataaatatgaacaccaacatccagagtgctggttgaaacaggcatcatcatgttggcttcttttatatttgatgacggtgtagttgggtactttctattctgctttggagaaatgattctgaaaactatacctaaaaatagagggacccatc

SEQ ID NO: 32822 - DNA, 242 bp, Oryza sativa
agcttttttgtttttttccttttaagatgcattgtaccaactcctaaaaagttgagtaactgcggtataaaaggattttaaggtattgggcacttgatcacgcgcactttggcctaagcaaaaagtgcctaactccctaaaagaacgtgacaggccacacctgaaaatatgggctgtagacatattaggcgtaggccaaaaaatatgccttcgacaccctttaaaggatgacacatgtaaca

SEQ ID NO: 32823 - DNA, 461 bp, Oryza sativa
  unsure (1)..(461): unsure at all n locations
gacctataaaactcagcttatcgaatgaccgagttcaggaggatgggcatgtttgttatctattaattaggaatagtttgttaatttccttttatctttaggaaaatatgttcagtgtcctataaggactagtatcctcccatggatataaatatgtacacccggggtcattgtaaactatctctacgatcaatacaattcggcgcatcgccaccctctttcacgaggtttttacttatcaaccatggaattatgcacatgacgtggggctgcatcggttcagttcgatctccagcgaagaggtaagtcctatgttccgccggcccatgcaattgtctcgtctatgtcggcgtcgttcaaggctgcattagtacattcgacctcttagattgctccggtttggatgatatatttatcttcctatttatcatatgtcttagntaatctcgtcttagtatctc

SEQ ID NO: 32824 - DNA, 243 bp, Oryza sativa
agcttattattttttgtacctgaaaacttttaccttctctatttgcttttggagggatatgacttttcttgccactctacctataccttaatacctaaagcatacgatttatgcatttgtttgactgcaaggtgtatagtcttccatattcccactcaccattttagctctatgtattataactaaaatgcattaaactgattgtggagtaagcttatgaactgttctagattaaaacatgta

SEQ ID NO: 32825 - DNA, 426 bp, Oryza sativa
  unsure (1)..(426): unsure at all n locations
tgctgcctcctccatcgatagcattgtcaatggttgtgattgtgggaaggagcatattgttgctgccagtggtagcacggcggtggcggtggctcaggtcgaggcgaagacgctcgttgtgcagcctaccgatgtcgcgggcaccagcgaggaggttgctgtagtccccaaggtcaaggaagggccgaaccggtgcgctacctgtaagaagagggttgggctgacgggattcaactgccggtgcggtaacatgtactgtgcgttgcaccgctactccgacaagcatgaatgccagttcgactaccggactgcggctagggatgccatcgccaaggccaacccagtggtgaaggctgagaagctcgacaagatctaaggcggctaggggcgtggaatggattgcaacctacaagatntcaacatcca

SEQ ID NO: 32826 - DNA, 272 bp, Oryza sativa
  unsure (1)..(272): unsure at all n locations
taagccttggacncaattgtatttttctccgncacataacctagtttgaatggaatgccttcaagtaagtaggatgtccaaatggctaccaccactcaactaattcgtgaagtaatgtgaaagttattctacccacaacttgttaggcaatctggccattgcacatttctaattatttgataagaaaactccaaggtagtttcctcctctagataatatcataactatatgtgcatgcatatcaacatttatataggcaacactacaatgtt

SEQ ID NO: 32827 - DNA, 457 bp, Oryza sativa
tatattcacacgtaaatcatcgagagcataaaagacatttcaaccaattataacagaaatgaaggaaaatgtaacggcaaaagtatagaagggatgaaatttctgagatatagaagggatcagctaaacttttcgatcgtcacctccaactttcgtccatcatccgcatcagacctttcgtcctacagcgcgtgcatcaaccatcgctagcgagtccgtgtcgatttggaccgtcgacctgcctcatccgtttcggcgccatcctattttattttattttgcctaaccatcatccgcgagacatgacagattagaatctgcgcgtgacatgaccaatcggacgtgatcggtcggacgaggccatgcggcgttaggctacccctttgaagttggaccccatggacgtctgtctgtcggaggatgctacacgtcggacgttccatatattgaaatatcc

SEQ ID NO: 32828 - DNA, 244 bp, Oryza sativa
agcttgtgtgcattttttatgttcacatcttccatgcaaaatgaaaataaattaaatgctctctggtagatcatgctgaattgtgaatgttttgggtcttcacacgtgtaaaatctttctcaaactattaatacaagctgtgagaaagggagcacttataggatgggatccaacatacacaaggagaagttttctcccctactggagatctgcattagggcctcggggtccatctcaggaagca

SEQ ID NO: 32829 - DNA, 391 bp, Oryza sativa
tatgtcgatgatgtagtcatcaagaccaagcataaggattacctgatcgcggatttggaagaaacttttgcaagcattcgtgctttcaggatgaaactaaaccctgaaaagtgcatctacagagtaccgtcacggaaattgctcggatttatggtatctcaaagaggtatacaggccaacccggagaaaatcaacgcaatcctcaacatgaaaccgccaagctcccaaaaagacgttcaatagctgactggttgcatggcggcgctcaaccggttcgtttcacaactcggcgagcggtggatgcctttcttcaagctgctgaataagactgacaatttccagtggggacccgaagcacagagagcctttgaagacttcaagaaacttctta

SEQ ID NO: 32830 - DNA, 244 bp, Oryza sativa
ggctgcaacctcatgttttttattattcacgaccgggtcgcattttataaattctggggcggatattatcttgtgcggcctggacttatagcaagcttgatttaatattcgagggatactattttatcactttgggcgaatgcacatcaaaaacatgtggcaagaggcaaactgtgggtgtgatctcttccccacttttatcaactcacatgtctcggtttctgcacgtacgttttctaaacta

SEQ ID NO: 32831 - DNA, 344 bp, Oryza sativa
tccataacaaaagcaatgcacttagcacataaacgagtccatgccatgaaaagctaacatcagcgaacatagcaacctacatttatacaaaagcaaattacatgtcactgaactacagactccaaatggcaccagctagacttgctgcttggagcatcaacaatccacattgagagctctagccctgctccttggtatagggcttgcttgaattaacccacatgctagtgaccttgaaggcgcggacgccgcaagaaaatgacaaacaacatacaaaactgagaggaaaaatacgaaatgaacggcataacaaagacatttgccgttacaacaacaacaaaact

SEQ ID NO: 32832 - DNA, 244 bp, Oryza sativa
agcttgttgaggatgtttgatttgtgggctggtgagtagactgagtgaccttggtcattagggaacctcggagacattgccatgtctgaagcatacatgtcttcaagattggatggagcaattgttggcctgatactcagaccatctgaaaggcgtggttgggggcggctgctgggtggcaggcagagtgccccaaggtattgtgattcccattctaggagcttgccaaggtcatcaacagcag

SEQ ID NO: 32833 - DNA, 437 bp, Oryza sativa
  unsure (1)..(437): unsure at all n locations
tgtcaagggatagagcgcctttactgcctccagaagcgccgtctatatagctgatacaacggcaagcttcgcaaactggaaacattctttcattggtcangagacttagcatattttataccataaatcatgtaaacctgactgagcagttcatcaaatttatatatagaatcactgcaaatgttcatcatatttatatatagaatcactgcaaatctgcacatttaatcattctttttgcgcatttgctacttcacaataatctgaatagagtggagtgaatcctggatactaatcttgtattgtcaggaagctgccctcctccctcggcgtgcatctctncgtgaaccacgcgagaatgtcagcgcggacgcgctcgatgttctcgtcaggctctcccgagagcatggagtgcatcatcccgtccgatatcttga

SEQ ID NO: 32834 - DNA, 238 bp, Oryza sativa
cagcgcgtttttcatttcttgaacagctccttaaatatatacaatctagcaagattgtttatggacaacaaagtgggcattgctaatccacgatgacgagccgtctttacaaggagacgcgctcgattgttgggagctataaccctatactgaatattgagccacgaaatgatcatgtcccaatggctcttaagcgattacatttcgcctaaaccacacagaaaccacaccaaggccc

SEQ ID NO: 32835 - DNA, 332 bp, Oryza sativa
tgcctaggcgctgctgtggatgagacagcgtatgtttctttttggtgcacaaggcgctggatgatggtggatacctgactgcccatacgacctagatatatgattaagaagtggactagatccatgtttgctgtgtatatacaaagcacaacctgccctttatgatatctcaatcatctatgcatagatagactcgtagatatatgaggctgccctcggaattaagcctaatcaagcctcgatcaacttccctcagaatgactcggccgttgttactgttggctcattctatgaccatagccctcactgcttccctgtcagatctactttct

SEQ ID NO: 32836 - DNA, 349 bp, Oryza sativa
  unsure (1)..(349): unsure at all n locations
gacacaacaaactcaagcttgtttgtatgtngttatggtgaagaaattcatcataaatatgctcgtaaatacaaattagagcgcataacctattgtgaattatataaaagaaaaaagattaaatggaatgggccaagtatgcactgttcacgaggcccaataacgcccacaatgggaggaaaatagtcttggaagcctctgcttcgtttctctggcgaatactaccgtttttcccctctctcgcgtagctgcgctcaagaccgaaagggcgacggcgtgtgcccgctccatatccgtcgactccgtgccggcgaggccggttcccgtgtaataagcggcggtaaccgct

SEQ ID NO: 32837 - DNA, 244 bp, Oryza sativa
agcttcgaaacaatatttgttctacctcaaacggaaatggtactgatggaggaactagggcggcagacgtatgattgaataagagttctttacggttttgataatttcagctcaatgaagacatattgaacatgtcagaaattcatggtgactaataataactgaggcattgtgttcgattaattattgtcatatacagctacaattttttccctgaaattaattgcactgttttggcttggtg

SEQ ID NO: 32838 - DNA, 440 bp, Oryza sativa
  unsure (1)..(440): unsure at all n locations
tgccacaccagaacctcaaccgactgacttaacgcanttatttttttctttagngcgagatgctcttccatttgcttgatctttggggatatgtagatctcgtaatgtccctgtgtgggtgctggcgtgctgcaatggcatccgctacctcagctttctcggctgcaatgtcttatttagtcttcataaaacaagttctattcttttcgacagatatacagtattggaagttaaactggagtttcaaatgatgaaatcatgtccataccacaagaaacataatatttaatcgtggaatagacctcttcctcgtggaagcagatactgggccataagagcagtggagaacaaactagtgtggtaccaacacgttgccgtggggcacaacgattatggataccttctctatctatgcttagatctattggcttagacttagc

SEQ ID NO: 32839 - DNA, 244 bp, Oryza sativa
agcttttcctatttttaaacggacctggctcatatatatatatatatagatccatttaatttacagttttgcacctataaatatatctagtgggtgcatgttttatacatacaaacatacaaattaagatcacttaacctactaccttgcagccatggcgtccaaggcagcttaatttgctagtgttcactctcctgctcgccgctgctttcatcgacgtcgcctccgccgaggactctcgtga

SEQ ID NO: 32840 - DNA, 439 bp, Oryza sativa
  unsure (1)..(439): unsure at all n locations
gacacaagaaactcaagctctganattcatccgtgcaccggagcaatacaatattttttgttcgcgnctgcgtctcatgatttcctctttctctataacatcaggctccctctcccattattctattactgagcgactttcatcctctttccttggcagccgttcctgatggcagcacttcttatcttcaaattggtcatcccatttatgcttgtccatgaagtcgtctcagcgatcactatgacaatggaccatcctgcggtgcagtggcggaggcaagaattttgccatgggtcgaccaaaccgataaaaactccatacaacacgaatcttttctagcacacaaatgagaaagacgtctacatgtgatatgacgagctcgaaccgctgttccagtgaaaaacacgatttagcccaaatataatatgaaacccaccaa

SEQ ID NO: 32841 - DNA, 246 bp, Oryza sativa
agctttgtagtttatcacctttttatttaaatttaattagagtggcaaacaagcgttaatagtctttaatacaaataaaagaatacagttaggccccttctcgtcctcaagaagggtgattttcaaaaaacaccctcatggagcgtctagatctgtagattttttaaactaaaaattattttcataaatattttaataaaaaaatttcttctaaatattcctcctccccaacaatcacattttccc

SEQ ID NO: 32842 - DNA, 449 bp, Oryza sativa
  unsure (1)..(449): unsure at all n locations
tcgacgtgttgtcgcggcggaggaccatggtgtcngcgttatctatcattaatccctcgacgtgtgggacatcaactggtgcgaggtattggtcggctgagtccaagtcgaacccgacaccgatccctaccaaccaagcaagcacgacgaggagccaaaaatctactgctggattagtactaccgcgttctaactaggacaagatttctagccacgatctactggtcgacagcctgacgtcactctgcatgtccctgtaccgagccaacacccatgtgcgcacgtgcatgtatattggccgtacagagctcttatatgtgttttcatgacacatactccatgtttcccaagggaattagtaagaataatttttaaattaatctactaattnncgtaatatatccggcatatatctacacaggtacacaatattttatatgcaatttatc

SEQ ID NO: 32843 - DNA, 242 bp, Oryza sativa
  unsure (1)..(242): unsure at all n locations
cgcacccgggaacctaagagcccacctgcaggcacgcaagccaaatcttctttcaatnggaagcaagccagggagaccgaattcacagcacccgatcaacaaaaaaacactggcatttagagccaccgcacaaacgataggaataccattgaatgccagcgggcatagaaaatgaaacggaaagcggatagaagcccggaaagaaataaggcacggccggtagacaagggacacaaacaacg

SEQ ID NO: 32844 - DNA, 437 bp, Oryza sativa
  unsure (1)..(437): unsure at all n locations
tgttcaatgagatcgaagatgaccaagtcctccttaattatttctacgaggnggtcatcctcttttgctgtacctaacattacttatagctcgagaaaatctgttagcaaccaaaaccaagtcctcgtcactgatttcttccagttgatcgttggacaaggcattaaaaataacaagtacatccttaggagaagtatccaaagaagatccagatgaagacaccacagcagtagaattcgaatctgttctttttgaaagaatattcatctgataggttttcaatttactataaagaacatccaaaatcaaagtgttcatgtcaacagattcctgaatagaggtcactttaacatcacaaactatcatatcaaaaccattcataaagtgacgagcaatctcagattgagatatgtaacatccaagaatcatcacagatc

SEQ ID NO: 32845 - DNA, 241 bp, Oryza sativa
agcttgcatctttttaataatcatgaaactcatgctccatttgtgaccatgtagaaattgaactaggagcaagcaaactataccatgtagatgcaaagtttgacaaagaaaggggaaacaacttcaacttaagcaaatcatcgctaccggccttaccacattgatcaataaagcagccgatatgctccattgtagtcatagcattctcacctgtgaatttcgtgaagttgggcacctcaaa

SEQ ID NO: 32846 - DNA, 451 bp, Oryza sativa
  unsure (1)..(451): unsure at all n locations
ggctntcgaacatgaagaatatggttcaacagcacaggatatgaatcatccaaatcgccttttataagaccagtcctccatagataatcactctaagtagtgcgagaaagaaaaaaatatgagaacttttattaaaacataacatcctatattgaaccataactttatgaataccagagaaagcatacaaagatagcaaattaagagggcatgtccacaatctggcaagccaagaataagtgcataatcaatatatgaaagaatttatctagcgatacacgtataagcgaataaatcagaaagtgatgattctatccacaatattaaaaagaagttaatcgaaaggggaacataaatatttggaattgtgtataaacgaacactttaattaaatacaacctcagtcctagtgtcttccgcgctacaatactggaatagnntattaattttt

SEQ ID NO: 32847 - DNA, 242 bp, Oryza sativa
agctttttattgtactactatatcatatatccattgacattttatccattgatacatcatacatgagcacacacaatctttgttgattatttcgtcctacagtacgtctgattaagcctaaagctaagcaacaagcccaaagtaaacatgctattaatgaacttgataaaacaacagaaccgtcctatatatagtctccgatggtaaaacgagaaaatgaatcatcagacggatatcataac

SEQ ID NO: 32848 - DNA, 256 bp, Oryza sativa
ttcatgacaaggcatatccaaatttttctcaggaataccatatgccgacgagaggggtcccagaccaacaacatgttatgtcccataccatactgtgccaagaagccctagggtcctccccgacaccaccccggcaaatccacatgtctctcggcatcaaggctcccctgattagctagttactcagccaggggtgttcccattccacccatgtggtcgtacttgtattatgtatggatgaaatttcaaggaaatc

SEQ ID NO: 32849 - DNA, 257 bp, Oryza sativa
tcacatatggctttgccgatatattgttctacatgatggccccatgtgtgctgatctccagggacatgggttaaacaatatcatgatccaacaaaccgtcggtggatcggattgcataaagacaaacgacgacctagcccaaatttcacaaatatatagggacatgacatgagacccaaaagcatgtttggtttgatatcttttctactatgaaattgacatgcatgagctatgttatttgtttcaggaagaagata

SEQ ID NO: 32850 - DNA, 275 bp, Oryza sativa
gtgacctatacatactcaagcttgccatatgcggaattctcgtacttttaacttctaccaggccagtctacatatggcaccgtttgaagctttatacggccggaagtgccgcacacctctcttttgggatcagacaggcgaacgtcaactgttcggaacagaagtattagcggaagcagaagagaaagtcaaatcatcagggaaaggttgaggattgctcagtctcgacagaatagctacgcggataaccgtcaaagggagctcacttttgaggc

SEQ ID NO: 32851 - DNA, 251 bp, Oryza sativa
tggtatccgccccttctcatatgggctggttattaccaatgtctatgacagtgggtcagtcttcagccctgaggtgcttgacctcactgaggatgacctgatggagaagtttgcttctggtgtttctatggttgcctcagtctccctggcaatctcgtacccaactattgctgctgcaccacacatgttcctcaatgggtacaagaatgtgcttgctgttgctgtggagaccgaatactcgtacccacatg

SEQ ID NO: 32852 - DNA, 287 bp, Oryza sativa
tgggcgtgcgcggcttcccacaactgtttattatgattcaccaacaccggctgaaacggaggatatcaaaccaacaaaatttaaaagagagggcagtttgcagtcggctaacaacatggacgcagcaagccaattaacacgcgtaacgagttgtctactaactgacagtgtcacttgacatctgcaattgcaacgacaatgtacccctacttccatgcatcgccttcatatacatacatagcctttgggtatggcaatttggcaattcgacaaagctagcccaatag

SEQ ID NO: 32853 - DNA, 253 bp, Oryza sativa
tctgtgagtgctaaaatgtatttattgacaggtttacaagttttcacatgtccaaaagcagagcaagagtgcatgtaaaattcttggctaaaatgaaaaaggcaccttacgacaatggtagtttgggcccggaagctgggtggaatagaacgtaatgattcttaaaacctgctaagcctgaagaagaaatattcatctacttttcagtggcatgcataaactatatcaatggaaaaataggaagaatgcactc

SEQ ID NO: 32854 - DNA, 251 bp, Oryza sativa
ttcaccactaaattggtcaattttttttggaaagactataaatagtgagcataaagtaactggttgttattgaatggatacaactttggagctaaaataggaggaatctaactaccaacagtcagttacagtgagagagaacagaaattacaactgcaagtgaggtacatttccactgtaactacactataagtggagatgagttgccctgtaagtgtgttttaagactacatgaaacctaaaatattgac

SEQ ID NO: 32855 - DNA, 220 bp, Oryza sativa
cactaataattctcaagctcgtgcttcgattgcggggtgtttttctcaaccgatttccccgccggcagttgcgcccatcttctacaccctcaatgtccaaagtatggcagtcctatcatctaccagtcaccaactttaagtttgcatgacgagcttgactggtcactcgctaacaccaattcgaccaggtcaagaacaacacaaacgtgccctaaatagc

SEQ ID NO: 32856 - DNA, 247 bp, Oryza sativa
tcactaaagataacccatgttctttttcttaacgcttggaaatgaaggaatgggatgcaccagaattcaaacaatattactgccggtgtcgagttgacggggaatgtgcccaatataacttctggtgctgactgcgcctactttgcagatgcatgattaacacgggcctgaactaacttgggtccagcacgtcttggcttctggcactttccaaccgtgtgtccgggtttgttacaattgaagcata

SEQ ID NO: 32857 - DNA, 248 bp, Oryza sativa
tatgcttgcacgaaaaacgatgttttccattaactcataatataattaataaagttttagtttttcttttagagaaaatattaatatgattttttaaaataacttttattttattataaaacatatcgtttacggttcgaaaaacatgtgcatagcgaaacatgcgagtaaaagtgagaatttatagttccgaacatggcctttgtcacgttaacttaactgtggtaactgtggtatggttcattgtg

SEQ ID NO: 32858 - DNA, 249 bp, Oryza sativa
tgctagcgcaatcactgttttgttgccgcgcgcgacgagcccgccttagctgttgccgctctcagagtagttggtcctcagacggcgacgatgactattcgatgttgcacccgcatccgctggtctatccgctattggggcctcttcttgccggtgtcgtctcgccataagtagtgtggcggtggtacggcgagccggtgtagggggcggtggcgcgtctcttggtccgtgcttgtggtgggatgaagg

SEQ ID NO: 32859 - DNA, 244 bp, Oryza sativa
tgaccgcagcttggattgttcttttcatcggtgacagtggagaagacgacccggcagcgacggaaatcggcatggcgacggcgtcgacgttccttcggtcttcaagctgccaaggacaggagggaaacggcttatagggaacctagagatgctctatcagtgaggaatcgcgccgaagctcacccgatagtgaggaatgggcgacgatggccggcggccggacttaaggtagacgacgccgatc

SEQ ID NO: 32860 - DNA, 258 bp, Oryza sativa
tcctcccagtattcagcagaatccttccatctgtaaggtcaactgccataggcactacaacattcgttgcaagtgagtaatctggccagaattttaaattgattgtgtatgctctagtccatagaccatgatcccacttccatatatctaactcatctgcaactgaatttgaaagaacagcacacaactttcctagaagctccaccacaaatgcatggcagcgacttctggggtcccacattgcaatgcttgaagggg

SEQ ID NO: 32861 - DNA, 248 bp, Oryza sativa
tagataaatttgcagattgagctttaccaacacagtttctgaaactactttttgtcgcaatgattgcacaatactgacccactccagggtctgcaaagacatttgtatcaccgggaatgctggattcttcaatcagtgacttgaggtggcaatcaagtaattgattcacagactgagagtagttccctaacatccactgaaaatttacatgaactttagttgaaaagctgaatgatagttcaaaatga

SEQ ID NO: 32862 - DNA, 251 bp, Oryza sativa
tgaaagagtttcacagccgctggggactccagcttgcgagacatacaggttcagttgccacgcaacgaccacccaaacacaccagcaacaaagcaaacactataagctagagaagcacccaggcatctaaccaacacctagcaagctgcaacaagacctgtatagatattatagagttgtatagatacgttgtatgagtgttgtcatttttttcagtttttggtttttaagcaaacggtaggacatcccct

SEQ ID NO: 32863 - DNA, 250 bp, Oryza sativa
taaacagaagaggcattagaactaataattacaaaacctatattaaaccgttcgcaagacgcgaacattcgaggattagaccctcccaaagccgagcatactcttcattcccttaataacattgtccgctcacttatgtttcaggcctacctccccagatccttctgggttgaggctctccacaccgccacctacctcatgaaccgtcaccccactaaaaccctccaacaccacacttcctacttcgccc

SEQ ID NO: 32864 - DNA, 255 bp, Oryza sativa
tatcattttcaccttccacttttttcttatttgtgagcagttcctcaaacttcctcttaagatcctctagttcctttgtgatttcatcattttgagcttcacatgccttcgcagcagcctccttcgcctccgtcaatgcaaccaattccatattgagtgtctcaatctttgcttcaaacatgatttgtttttgctttgtaatcagagcttccgaccgaagcctatcattttcactctccaccaaatccttattgg

SEQ ID NO: 32865 - DNA, 255 bp, Oryza sativa
ttggagaaattactctctgctgtttaaacctaaggctttgccaatcttgaacccaaaatgcacttagagctaaatagagcctaattaagttatttctagttttagactttaagaatttataactcacaaatgcaatatgataaaatagaatttccttcaccacaaattataaacccacagcatctaaccacactagtgaattcatgcattttagaacattttgaatatttgtatgtttcggtatttacccgatta

SEQ ID NO: 32866 - DNA, 249 bp, Oryza sativa
ttcatgacaaggcatttcgaaattcttatacaggtttaccatatgccgacgagaggggtcccagaccaacaacaggttaggtcccagaccatactgtgccaggaagcccaggggtcctccccgacaccaccccggcgaatccacatgtctctcggcatcaaggctcccctgataagctagttactcagccaggggtgtcccattccacccatgtggtcgtacttgtcttatgtttggatgaaattccaa

SEQ ID NO: 32867 - DNA, 246 bp, Oryza sativa
tatgattagttctaagcaagtgtttttatcatataataccagtctcgatgtggacacgtttttgcaaggactttacctttttaaaaaatggtcttttacttggtccttgacttcatcaagtgtatatggagtacttgacgatcgaagtcaatatctagagtccctgatcgacttggaatgcaacagaaacgaacaaatcttattttcagtgcatatatataatatattatatatggatgattagat

SEQ ID NO: 32868 - DNA, 248 bp, Oryza sativa
ttgttttccttatcaatctaactttagaccaaaaatatgtgtgcaggcaagcaatccgtgactcggacgcaacgcaaacgaatgcagtaatgtatatatagtggattggcatgtagcttcacgttgaagaaatgcagtatgataatattacttaagctttggccaccaaacatttatacccaatcagattagccgcccttccataaacaaattaaattaagatcgatctcttaccatacgtgcaacgc

SEQ ID NO: 32869 - DNA, 253 bp, Oryza sativa
tcgttggagtttaaggagaatgatctgagattgtgggagcgcgaatcaccgaagcaaattgtgaagtaagaaatttataaggttttaggcccaagtctaggataacaaccatttatccattaaaagaagtactcagaataaatccccttaatcccaaggggtaccgtgaaaaaaaggagtacggctaaaccctcgcgagtccccactcttcctctccccgttctgcatcaccatgttcgccgccatctgccgc

SEQ ID NO: 32870 - DNA, 246 bp, Oryza sativa
tctaaattttctttgaagttttttggcaagttgaaaccaaacatgcactaccatgttttcacaacaaaagtgaaaacaaccaaggttagtctgcaaaggaaaatgattatacagaggtaaatataaaatattagttcaggtaatctctattatgaatcttcctcggcaacggcaccagatatgcttgttagtatttcttaacgacattactagaaatataatccccggcaacgacgccagaaatgc

SEQ ID NO: 32871 - DNA, 257 bp, Oryza sativa
tgcaaaaaccctatgtttacccaagcaatagaaataactagtttatatgctctttcttggccataatgactagatgcattcagttttgttgcctatagttgtcatagtctggtaagttcggtttcatccacctctctggtgcattgtcacgaatgctttggtggttttgtttgaagtagtttaccacctcttaaaacttagcttctatgttgtagacaatctccttgtgtgcattacaatgccttcatcgagccaag

SEQ ID NO: 32872 - DNA, 255 bp, Oryza sativa
ttcttctcaaatttcggtgttgatggtctcattgtgtctgccatgtgttctgctgcccagtctgtggtttcaccaaaagtgagtatcattctttaaagagtgaattatagtaggatgcgctaatgatagtactcctactgttaattgttttccgtcttggttaatattaggattgtcccttgtggttcatctttctatttttcctacgtaatcggattgttttctttgtgattttcagcaaagccagcatatatg

SEQ ID NO: 32873 - DNA, 247 bp, Oryza sativa
ttactgttccctgggattggctttgggcctttcctgcgcagcttaggtggaaggcgaagaaggcccccttccgggggggcccgagccatcagtgagataccactctggaagagctcggattctaaccttgtgtcagacccgcgggccaagggacagtctcaggtagacagtttctatggggcgtaggcctcccaaaaggtaacggaggcgtgcaaaggtttcctcgggccagacggacattggtcct

SEQ ID NO: 32874 - DNA, 250 bp, Oryza sativa
tggatcacatgaaaagttgaagccaatcaaagatgaacttccagaaaatgtaacccttcctccatgcatgattagactactgttgttaatatctaatagatctgttgcatcaacaaacaactgcttcttatgcactgccaagttagatattagttcatccaaagcgttcccaaggcctaatttacctggcaaaatgcaacatgatacttgcaggtaacttatgagatgatccagacattcttggcaattg

SEQ ID NO: 32875 - DNA, 253 bp, Oryza sativa
taactattattttcaccttaagtctgaagtaattatcctacaacatccaagacatgttttatgatatgctatgattttaatcttcacacgcctcagaaactgtgactactattggcccatgctttacatttcccttttagatttgacttgtaagacactttatatcattaaaaattttcatatactctattggtttcatattgcaagtcgctttattttttaaaaactttttaggtttgatcaaggttattga

SEQ ID NO: 32876 - DNA, 248 bp, Oryza sativa
tgttgatgagcacactgtgttttttttcaagagaggcggaggcgaagacaattcctgtgaggacgcacttggaagaggtggatcctgctactacgcagtgacaacaactgccagtatcgcgctgtttctggctgctacgatgacatctatctgccattgatgatgtttttttttttagcatgttctattgcctgtatatttgtatctgatgcgctctttacatgtagatctgaattgaagcatagatg

SEQ ID NO: 32877 - DNA, 254 bp, Oryza sativa
ttatgtcatgatcgaggctgagttgttcaagaaaagtccctcaggaattctgcaatgttgtgtttctttgcaagaaggaagacaattgctacaggacattcactctggcatttgcggaaatcacgctgccgcacgaacaatggttggcaaggcttatcgacaggattttttctggcccactgcagtatccgatgccgagagagttctgcgaacatgagaaggttgtcaattctttcccatacagattcacttac

SEQ ID NO: 32878 - DNA, 242 bp, Oryza sativa
tcgttcccccggcccatattatcttaagctgtgatgatggacagatccaacggaggcggcttctactgtgcgcagggaggtggcatctgatgatgagtatgaggctatgggcttttgggatgtattgggggtttgtgatatgggctttgttaaatcaagatctgcgtgatttgtgtcatgtttatggatggacctatggcggctttgagtttagtgctttggggatgtctatatatggatgg

SEQ ID NO: 32879 - DNA, 249 bp, Oryza sativa
ttgtaattagtcatacgcatgacaaagtctgctctcaaacttcaaacctttgccacaaggtcaagatgcacatgccaaattgatcgacaagccccttgtacatgtaggccagctttgtggtcgtccccatcctctgcccacagctcccgcttagcccacatctccccgccatggccaaccggctgcatgccaatgtttgcagcttttgcatcatcgccaatcaataatccaatatgttaataaatcatc

SEQ ID NO: 32880 - DNA, 251 bp, Oryza sativa
ttgatactccaatgtcacaccctttgtttccccttttccgcattttctaattcaccaataaattgtctatagaaattactttggttaacctggagaaaacccaaattaacaatgtatttaataatcggaaatgttagagagatttttttctcgaattctctttgctctaaaatcattaacaggacttaaagcggaatattcagatcatcggagttaatgttgttaatttaaattgtcaagacttgaattaa

SEQ ID NO: 32881 - DNA, 243 bp, Oryza sativa
tgcacaaatacctataaattgattttgatgtcatacgttgttgcaccattctacatgatggatttgagttgcatgtgcaagtgtgcatgcaaattgcttaacttggtcccccatttgttgcatttcagtttctgggctctctggcactaaagaggttgctcagagtcaggtcttgattggaatgggcctgctcgcggggtcaacggttatgctcttgaccctactttggggatcttgtgttgt

SEQ ID NO: 32882 - DNA, 257 bp, Oryza sativa
tggtagaaagattcaaacatgtttttttaagctcttagccatctagtacttgtttcatgccagttttggcatgaccaggcacatgaaagtactaaaataagtgtagccatggaaatctgtgtccaacgtttgaccgtccgtcttatttaaaaaatttatgaaaaattttaaaaaagttagtcacacataaagtactattcatgttttatcatctaataacaataaaaatagtaatcataaaaaaatttcaaataaaa

SEQ ID NO: 32883 - DNA, 255 bp, Oryza sativa
tgagtcgagatcaacacttgtgacattttgatgccaccatggatattccgaagtatttaccatcattcgtgcaagactttcttttcatcacaagcttgatttcattcttgccaacatggcgatgaccttggcttggtgaccattaacccatggggtcatccattagcctcatcatagtgggacctattccttttcacatcttacacgagaacaatcctctcaacagatcggttgacatccttcactggatgacca

SEQ ID NO: 32884 - DNA, 259 bp, Oryza sativa
taaaccttggtggtgttgccaattatttttttcagcgtgaggaattaatgcctaaataaaatcatgcttgagcttggattacagcttagtaaaaataagcataactgccttgctcttttaactaatggataatggctcctttacaattattaggctactatattattcgcaaatttaaaaacattttcactatgcaatattgtaagtctgctgcttgttctttgttacggggttttgggaccataatttgcttgacgca

SEQ ID NO: 32885 - DNA, 249 bp, Oryza sativa
tcgatgttttcatgtgcatacaacattttggaactactatatatctgtcttagttagagatcaatgatgccttgttgatgttaggttgtaatcttttagtggagattgccagatagttgggatagtactgttcctcacttcctttgtgtgaatcagaaaactgaacttataaggagaattagatacttactagatctgtataacggggataatttggatggtacacaagtggcaagcttgtcatgcaag

SEQ ID NO: 32886 - DNA, 253 bp, Oryza sativa
ttcttaaataagtgtggttcataatcttctgttgtcattttgactggccagacaaaagtcattagagaacctattttttcttgcagaaatatatagtaagcaatgcagaggttcttgcaccctgaacttgcattatatataagtatgactatggtagtaccgatgtcctaggtttctgcgaattattgatgaatttcttacattgtactaaatcaagaagctcatgtgaaccagtcaattctgttcagattaa

SEQ ID NO: 32887 - DNA, 254 bp, Oryza sativa
taatagcgctaaaccttactgattgggatttcgagccaatgtgataatgttctaaacgctaaaaggtatgtgcgcggatacattatacttcagcgtcatcctcgacgatgttgaattgtgatttatttctaaaataatttcttggcacggttctttttgttgtaataagttaaaaaaaaccctaaattgtcaaaatttcggccactagttgggatattctgatctgatccctcatcaccgctagcagatctctg

SEQ ID NO: 32888 - DNA, 253 bp, Oryza sativa
tgcaaataaggaagcttgctaattcttatgacaagagcactaagggtgtgtttgaggagaaggagattgggaagatatgtaaaacgaggtgagccattagcgcatgattaattgagtattaactattttaaatttcaaaaatgaattaatatgactttttaaagcaactttcctatataattttttttttgcaaaaaacacactgtttagtagtttgggaagcgtgcgcacggaaaacgaggtgctttctcac

SEQ ID NO: 32889 - DNA, 248 bp, Oryza sativa
tttggggtagataacatacaatttttactggctagtaactggtgtgggtgtggtccaacaacacatcctggttttctctaacgatccattaaaaaaaaggtttatgtccatgacagctatcaacttcttgttgatggccaaagccatcaacctcatgttgatggccaaacttttgtggaggtgtaaattgtttatttattaattaatcatatagcaaatgacgaacatgagaaacggacttaacatga

SEQ ID NO: 32890 - DNA, 247 bp, Oryza sativa
  unsure (1)..(247): unsure at all n locations
tgggcctttcttcagnaatgtnctgttgtgtttntgaggaacacttcttcgaaaccttcataaacatccattccattaccacctctaccaagttcagcttagacactgagagtcatcttgatcaaattgcaatccataaccttccctgccctgtcctcctcaatctggtaaatcaatgcaccagcaccattgtaacatccttttatgcatcttggacaatcggtcagaaaacgaaacaagcaggagg

SEQ ID NO: 32891 - DNA, 251 bp, Oryza sativa
taacaaatgaacaaaagaattatcacatgaacatgaaacaattctcttagggcgtgaattcactctactcgaaagtcgcagcatcatttactgtccaagcttgctccatatgcctttccgtgctgttaggcacttcaatttgccaaacacaaaaccagacttttgagggttcccgtctacaagagagttctcgtatatttccttgcactcttgtacaacctaagaacgaggaatgaacagtgaacacgtaa

SEQ ID NO: 32892 - DNA, 251 bp, Oryza sativa
ttttctgtccctcctgttgctgtttctgtccagcatcttgcagatgcccactactactttcctcttctttcttttttttaaaaaaaattttcctctactttggcgtgctgaaaaggagagccttatctaaattacaccaactcaagtgtgatgagagtagcagcagcagtaggaacaagaaggaaaagtggagcaggaaaaaggagggaattagagcacaagtagtttggtcatcaagctttttatcataa

SEQ ID NO: 32893 - DNA, 227 bp, Oryza sativa
tggaggactaccgacgtgtttttttctcacaggctgggtgatccgggttatgcaagtcctgcgagtaaactgtaccccctttggagaggttaacaaactgttcaaacagccgtgcccaccgcaatgggctgaatgtaatgtgaattctagcgcttgaatttgcttgactactgcatgtgaaattacatgcgtgaaaaggggttccaagtttgaaaattctgaatgtg

SEQ ID NO: 32894 - DNA, 255 bp, Oryza sativa
tcctagaagattcacccaaaatctttattttctgcgaccaacagtcaagctcacaaaggtgagttctttcaagaatgctctgcaggacaacatctttgctaattaaagccaacagaactcattaaggcatagccaacctgccttgcagctcacgagagtatatgcatcttcacttggagagggtatatatattggtactctcctctagtttattaatggtttgttcttcccaggatctaattcacgggatctccg

SEQ ID NO: 32895 - DNA, 251 bp, Oryza sativa
tggcatacaattgatgttccctttttttcccaataccagacggagatggtgctgatggtcttcctctgattgtgagtatatcagaatgtcatcgatgaaaaccacaacgaacttatccaagtattccatgaacactttgttcatcaagttcatgaagaaggcaggagcattggttaagccgaacgacatcaccgtgaattcatacagtccatatcgcgtagtgaatgcggtcttcggaatatcttcttcac

SEQ ID NO: 32896 - DNA, 249 bp, Oryza sativa
tctaaatcatacaactaatttctgtttctcgtaaatctttagattgtgtataactaaatttacagttgaagaccatatttcactacaatttagcttttaaaaaatgccattttggtttagattttctaacttttgcgtgccattcaagcaattataaaaacatataaaataattataataatatagattttatcatcatatataacttcataataattaaattaggtctacaatcataaaagtaaaatg

SEQ ID NO: 32897 - DNA, 248 bp, Oryza sativa
tctattaccttttgttacagctttctttggggcttgcttaagaagcaatattaaccatgatggcatttgcaatagagagaaatttggaattcacactttcagagcaaaaattattctcctgtgacctctcacctatcacaagaaccccaaccactggatgaagcgggcatagtacatgtatatgcaatagtagcacccattaagaatagggatgttccagtgtctttcgtgttgctttattgtgtcgt

SEQ ID NO: 32898 - DNA, 251 bp, Oryza sativa
tggagttctagtcttgtgtgtgtttttgtgtttctcacgtactaactatttttatttataaccttgggttatgtatccatttctagatatagaggattatgtatacataaaataatcctcggctgctctccaacctggatgacatcgtctcgcttgctcagcggcgtccgagcgagtcagcaccaattaataccctttgatcagccgagcagaaattgggtcgtgcacaccgtcggagaagattattacat

SEQ ID NO: 32899 - DNA, 250 bp, Oryza sativa
tgccgcatcgtgctccttgtttttttctcgctgctcgtctccattgtttacaggtacgtcatcctcagctaattatcaggtaccagacttgataggtatcaagcctgatacccaccggtattagacttggtacccaagtatcagccgatacccatagttatcaggtgccaagtaccaggtatcaagtatcaggtgccaagtactaggtattaggtatcaggtgccaagtactaggtatcagttatcatgt

SEQ ID NO: 32900 - DNA, 253 bp, Oryza sativa
tgccgcctcctgtcctgtgcactacaatgcacttcactaccagagcacaagaggccggagggaggaaaatatataatctcctcgcatgcatgcgacatcaccacactttaattcttcctcccttcgcttttagccgaacctttaactgaccacatgacaagggtattacactctaacctactccctccgtcccaaaaaaaaagacaaaccatggttttcgtgcccaacgtttgaccgtccgtcttatttaaaa

SEQ ID NO: 32901 - DNA, 256 bp, Oryza sativa
ttgcgataatgatgtgatctctttattccgacgcgggggaattattattttttttatttacaataaaattctacaaattttcacatgctaattattatttataaaaattaattatcactttttaaatatataaaaattatcaaataataataattaaatttataaaagttaaaaattttttattatatttaatttatatttattaataatataaattattaattttgttgaaaatatgaatttaatataaattttc

SEQ ID NO: 32902 - DNA, 243 bp, Oryza sativa
tgctgggggggcgcatcctttctattttgcgtattctctcaggatttggttctatgcctcgggaagagacatgaaaatcgtgaagtttgcccgccggcacgccgaacacacacttatcggggttcatcttttcgcgcgtggacctaagactatcgaaagtttcggccagatcctgtaacaacgtgtcctggtggtgcgtctttaccaccagatcatccacttatgcctttacttgggccctat

SEQ ID NO: 32903 - DNA, 250 bp, Oryza sativa
tgagttctggtccttctggactttacacagtggcacacgatgcagcggatacccatgtgcacggcttatgtccacttgtctgatgttaatttttcatcgtgcttgcttgttactgtagttgttactgccttactggtatcatccaggagtcatattttcgttgtttgcatctctataaccttttccagggaaatgcattgttgcagtctttctgaacatatacttgatgaattcttgagtttccatgtac

SEQ ID NO: 32904 - DNA, 248 bp, Oryza sativa
tgttgtgtattactatcacctctgattgctgctttaagtctcttcttttgcaggcaacctgtgatttcgttcaatcctacgattcctctgatgttaaatctcagtggcatgaaattcgattgcgttttgcagacaatgatccaagcaaagatattccttctcatctccatcttcggagacgaataaacatggacacttgatgcagaagcctgtcttggagaaacatctctgatggatggacgaggcaa

SEQ ID NO: 32905 - DNA, 244 bp, Oryza sativa
tggcatggacatgataatgtgcttaaattgccagcaggtcagaaagcaaagtgacaaccataatgaacattattctacttggaaacggcaaattctaagatcaacacatgatgtgtcatgatctgaagctttccatttttctaatgctctcgagcaagaaaacaacctcgtaacagcacagcacaagctacaatgctgtgaataccactagagatcttccttcaggtggagcttgaatccgaga

SEQ ID NO: 32906 - DNA, 253 bp, Oryza sativa
tcttgttggtaacaagtgtgatttttcttatagcagagttgttgaaactgcagtagcacaggtcgcattgcaaaccctattacactatggatggcttatccatgcagaagttatgttatatttagttaagctaaatgaaaaggtacgaatcactgcaggcttatgctgatgagataggcattccattccttgaaacaagtgctaaggactcgatcaatgtcgaagaggctttcttggctatgtgtgccgcaat

SEQ ID NO: 32907 - DNA, 253 bp, Oryza sativa
ttatatagctgccccgctgacttttttatatagtcaaggtgctgtttgggtttatcaagcaattgattggatacaatatcattgctttttgccacgtaagtgtgcatttttattgaccaatattatggcttaggctgattatatattatggtcatttttcaggcggttggtaaatcctttacgagtttacttactcggatgttataccatatatgccatatatttccaggagtggtgaaaccatgtgtctttt

SEQ ID NO: 32908 - DNA, 250 bp, Oryza sativa
tatactttcaacacgaactatccatgggttaccatgcatcagttcatgcatcagcatcagtagctaggcttgcagctagcagccgcagcgctgctgaacgagggtacacttgccggcggggtcgcagttgaaggtggagctacagctagtgagctcgcagttgctcgggttcgtcttcgagcagcaccggcactgcaggcacaacggcgccgccaacgtccctactacgccgccgccaccgatggccacc

SEQ ID NO: 32909 - DNA, 250 bp, Oryza sativa
tgtgctggtggtggtggtgctgttgtatgtctccggcgtgctggcggcggcggcgaggacgctgcctggggaggagtggctgatgccggaggccggcggcgtcgtacggacggtggtggagatgctcgtcggctccaagtccggcggaaatggcagcggcacctgctgctagctatatctagtttaattagggacagattcacgaagaaatagtagtagtctgaatatatatatatcctccgtacgcata

SEQ ID NO: 32910 - DNA, 247 bp, Oryza sativa
tcgtagttttattagaatacccttctatatacatttatgggatgaaaagactttccgagtttctgaatgcatcctattccttatgtccaggttctcccgaaccgcccgctagccgaactgggcgatgctattacagcgggaataatgatggcttattccatcccgcgttgccatgtctattccccccctgtttcatctcttatctgcatctggggactatcaaatacgcgtttatcattttcggtgc

SEQ ID NO: 32911 - DNA, 249 bp, Oryza sativa
tctgcagcaggccaataaatatttttaattttcaggcttcaattgatcgatcgattttattcctcgcatttatagatcgattttattccatcgcatttacagatcgattttaagaagtaactattcctggctatagatccataatgtatggggatttttctttattgcgacaagttattaggattcagagagggtcgcatgcattcagatcgactacagtgttgctcaggttacatgctccgtgtgtgc

SEQ ID NO: 32912 - DNA, 250 bp, Oryza sativa
ttcaaaaacacttttggcatagtttctagggttaaaaagcgtatagatcaaaaactctaccctgaccactattataatgctccatatcctcaagggtttagactgcctcattgtgtaagttcactggagaacatggctgatctactttagaggatatcgaccaatttatttgtcgggtcccaaaattaaaaacttggatccggctgagattaatgtatcaacccctggatcagtaaatattgatacataa

SEQ ID NO: 32913 - DNA, 245 bp, Oryza sativa
tagccgatgatagcgcatttctttttccagagccatcttactatatgggacttaacggggacaatgtcaaagctaagctgatcacaggatctgtaacttctggggctacacaagtcattactaaatttcactcaattgactacaatatactagatcagattctacgccattgcaggatagagagcaataggttgatctaattgagccgatagattctatactaagtgatgggtatataattcaat

SEQ ID NO: 32914 - DNA, 248 bp, Oryza sativa
taaggagttagtgggaataactttatagtaatataggattagaggacacaacaaggaacattctaattttgggctggcctaatgaaagtaaaagatcatatttttttcagtatggatcttttaaacctggtaatgggatggaaataagattttgggaagacacatggttgggcttgcaacctctcaaatatcaatatccttctctgtacaatgtggttcgaaagagacattctactttggcagaggtt

SEQ ID NO: 32915 - DNA, 250 bp, Oryza sativa
tcactcggcaattgggtccccattatggttggttctgtccacagatgctggtaaaggcattgacacagcagtcaccagagtcttcaccaatggagtagagcatagggaatgcatgagacatttggtgaagaactttcagaagaggttcagtggtgaggtctttgagaggaatctgtggcctgcatcaagggcctataggcaggacatattcgagagtcactataatgagatgaaagaggcatgtccaaaa

SEQ ID NO: 32916 - DNA, 249 bp, Oryza sativa
tgaacccaagtcctacagttatttatataagcgcaattgaaattcctggggagttatacatttgtgtattgataagaccgttcacaatttcttgaagctcgatctcccccccagatgaaccatatagccaagagaaaccatgaaccagaatagaagagcttgccccacccatgagtaaatatttcatagtagcctcattagaccgtagatctctcttggtatatccagacaataggtaggaacataaac

SEQ ID NO: 32917 - DNA, 247 bp, Oryza sativa
tctaaaatatgcaaaaccatcatccaaaaccaccttaacggtaatatggatggtatggcaaagttcagggggttggatgttcgattttaaagtgcaatgtgctagacagacttcaatataaagtttagggatgtatatatactttttcatattacatattacatacgtatatacttatttgggcctaatactttattctcggtcttcttttctcaacacatctactcctcccgacactattttgttt

SEQ ID NO: 32918 - DNA, 254 bp, Oryza sativa
tgtacctagaaagtgtaagacaattggtctccatagaaaacttcccttcccttgttaatcttcagctgattgaaaacccaaaactagagagagtcaccaataacccaagcttgaaaaatatttacatctgggagtgcccagcgctaaaggtgctggaagaattgccattactgaatagcatatactggtgggatttgaaagcagaaaaactcccagaatgctttggagtaccaatgttaaagaagctatttgta

SEQ ID NO: 32919 - DNA, 253 bp, Oryza sativa
ttactgtccaaagctgcaggtcttttatgagacgcaatcgataacttgggtcgccataagtgatctgcaacattgtgggatccaaagttaagttctagacactataaaagaacagcatgcttgtgtaaacaaataatatagttcctttaccagaatataaactcccttgtccttgagaattctgtagatagaagaaagaaatagaagctatagtaagttaaacggagatttcacaaacaaataaagtgcgtga

SEQ ID NO: 32920 - DNA, 251 bp, Oryza sativa
tctttaacgcacttatgaattgttcttacagccttcccttctcaactttaatatcatcaatctccttcacgctcgccaacagcctactcgacagtgtactcggagcattcttctggagcctccatatcttcctgttgagtcgacgtacctacgatatgacaagttaagaaccaaatgtcacataaaataaaatggttcctttaacacgtacacacagctgatatatacctctgtcatcaggtagcttaatg

SEQ ID NO: 32921 - DNA, 251 bp, Oryza sativa
tctgcaatttctgaatcaccctgtttaatggcctgttctccccggtcggaataggtagttccttcccctagaaccgtacttgagagtttcctacctcatacggctcagaaattgctatcttaatttcccttgtcttaactgaattcgatttctcaaaaatcgatccaatttcttcttgggttacgcagaagaagttaattacctaagtttcaaaccctaaattttgatcaataatcagtttgatcttttct

SEQ ID NO: 32922 - DNA, 252 bp, Oryza sativa
tatgaagtgtgagttctggttgttttttgtcaaattcttggggcacgtgatatctgctaaaggagttgctgtggatcccgaaacagtgaccgccgtcaccgattggaagcaacccaagacagttactcaagtccgcagtttcttaggtttggcgggatactaccggaggttcatcgagaacttctccaaaatcgctcgacccatgacgcagttgttgaagaaagaagagaaatttgtgtggagcccgcaatg

SEQ ID NO: 32923 - DNA, 251 bp, Oryza sativa
tcctgtatagcacgcagttgctttttcatgttcatgtgggcaaaaagaccattgatgacatttattttgcatttctgaccttttgcccagccctcaattgcatcatatacctccttctcattgcttagtctagattcaacctttccactgtggcgtggatgggccaagtagtcctctcgccgaacaaagagaacattgagcccatttgatgttttggatgacagtatgtcatccctcagaagatcaaaaga

SEQ ID NO: 32924 - DNA, 251 bp, Oryza sativa
tcacgaatcttggagaaaacccttggttgacggaaatctggaaaccgggactatacgcaaacaatcgataacctagacggaagacaaagaagaaggccctatttagactaaataatagcgccattaaatagagctgaattttacggaattactagaagtggaacgggggcaatcggatgagcggttgaaaagatatggattttctaaggaataaggaatttgtgtctaaaggaaaaaggatttaataattt

SEQ ID NO: 32925 - DNA, 248 bp, Oryza sativa
ttgctttgctactcgtattctatatagctatcgcctatcgatcgtgcacaccaatctcctttggaatgagaaattttggatgaactaaaactagattatatgaaaatcctgtgattcatcatttttaatcatctcaatttatgatctctcactgacatctcaaatatcaaatgtataattttttatgtcgagtctaagacagatttggcatgtacgatagaccaattaaagggctaggagatgcctac

SEQ ID NO: 32926 - DNA, 249 bp, Oryza sativa
ttgtcctttatctctaagattattttttcccttgattataaaagggggcactgcattgtaatcaaacaagcaagatcaatccaatctagttctctacacattcagagcctctcgctggctggggatgagccctattttcggcctgagggcgatcgtgagtatcactgttaccccctccgcaatcatccctttcgagcattcgccgctacaacaccaccgccgccgtgcgcctatcagcttggcatcata

SEQ ID NO: 32927 - DNA, 248 bp, Oryza sativa
tgattggcctcgccgctggcgatcttcggcggcggcgaggtgaaggagagggcggggttgcagcggcgcgggcggctagggttttgccccccgagccacccgtgcgagagcgacacgggaggaaggggtctcttcgagcactagtccttttcttgaatatctcaccaaagcattaaatactgcatctctacccttgcttccacacgacagagcattaaataatttattttactaatgtaaaagtgtag

SEQ ID NO: 32928 - DNA, 248 bp, Oryza sativa
tgccaccggcggccaaagcccttttgctgtaacactcgagattgaactgccaagagattgaatcgaaggcttgggctatgtcaaagtttcaggagagccgtaggctggtgcctctcatgcaaccgcttggcagactgtcggaccaacataaagttatcatggatgcaccgcttctggatgaaagcgctctggtggtgcgtgtacacttgactcgtggagcccattatatcaccaatcttccctgttgg

SEQ ID NO: 32929 - DNA, 246 bp, Oryza sativa
tttcaaatcttatgaaatttctttgaatggcacattccatgtggattttgaaggaaacttaacaagagctccaacctcttgttttacatttcaattcctattaaaattctttgttttttcaaccctgtgattcaaaggggcccaagcatatgttaataagtgtatctgttgatgtatactgcgtttggcagctggagaaagggagagagcttgtttcgttttccgcgcgcacgcttcccaaactac

SEQ ID NO: 32930 - DNA, 253 bp, Oryza sativa
tgcgtggcagcctgtcaggcattttttgtatggctgagctggcaagccaagtgcatatgcttcatatcatatcatctcatgcgtaccctttccctcggctaatccttgtgaattatacacgcgcttgattcattaattcatatgtgtcgtgtactactaatcaccattcaccaagcaagcatatttatatgctaacaagattttttttagagacgtacccaacatccacaaagctagctagctagatcctcct

SEQ ID NO: 32931 - DNA, 253 bp, Oryza sativa
tgaatcaaagtgggaaggaccatactttatcaaacacaagtccaggacgggatattttcgcctatcgacactcaaaggcgaggagttcgaccattcctggaacgccgcctctctcaagtgcttctatgtctagaatgggtggcacccaaatcgccaacttgtaaaaatgtacatactgtcatgtaagccctttggcactatgaaagcctttcggcatgaaaaaaaaaggaagaaagagagaaaaaagaaaaaa

SEQ ID NO: 32932 - DNA, 251 bp, Oryza sativa
tcaaagtgtagagtaaatagagacatgttaagcaatgtgcattacactaattctgttaagcaccgacagctgcagcagacaaattttgaaggggaacaactacattggtctcatcgggtaatagagcaaagagaagttaaggggacacatgcgagtgaaacccaaagtgctcaccagacatgtggacatggcgctgcgtcgaacgccgtctggtccagagaggaataaggccataaatgatgcaaagaaaa

SEQ ID NO: 32933 - DNA, 257 bp, Oryza sativa
aggagcttataacccaaaggccgatcgggctatttctcacggacctagctcatgtaccctacgtacataaaaaatataatgtatcagtgacataatgctctacattacacaaatatagatggagagcgccagctgctcatataaatgacccagctgacatatctctatgcacccgttgcgcccataatgtgtcacccatgctctcaaaatatataaaagggatcctacttaacatattccttcagttcaactaacta

SEQ ID NO: 32934 - DNA, 249 bp, Oryza sativa
tgccctggaggaaggggaacacttcgaggagtcgaggccacaatgccacatggatacatgattcccttggatctgagcacaccgcccccaagtcaggtaaaagggacagagagcccacatgctgagctacccagcttctactcagccaacaaacaaccagaaaaatggtccttgtccctactccttaagatctcccttaagaccaactccatgacaaagcaaatggcataaaagaaaacgaatagcact

SEQ ID NO: 32935 - DNA, 250 bp, Oryza sativa
tcagagatgaaggtcattaactttattctgagcaccctgaggatttcctatgacaatttggagaatgatcagctgaaagaatgttttctggtttgcttgctatggcctgaaggctattcaatttggacagttgatcttgtgaattgttggattggtttgggtctcgtccctgtcggtagaacaatcaatgatagccataacattggattatcacgaattgagaagttgaaaagattgtgcttactggagg

SEQ ID NO: 32936 - DNA, 250 bp, Oryza sativa
tgccgcaacaattgatctccgttctgtgaacccagagccagtgaccattccaccaggtgaattcctcctccgtggatgcaaaacctgtaccaattttaggtgaatttcgttctgtttcaccattcatctcgaatatttccaaaatgcagtggagaagaaggctatgccagtgataattcaccggatgacgaacgcagagccagctaaaccttctccaggtaaccttgacgaaatcatttgtcttcttttg

SEQ ID NO: 32937 - DNA, 249 bp, Oryza sativa
tttccttatattaacatcatatttactcaaacaaatatacttcaaagtcacaaatttcaaatatctatttcattcattaagtctcggacaaacacatgaggtcattacagagtgccaccagtttaaaaatcaaactgaacatatgttcctgattataaagagtaaaaaaacaataatacagcccagatgccaaaaatgacatggaatattcagtattgaacgtgcaaacttcagttgattgaagaaaaa

SEQ ID NO: 32938 - DNA, 249 bp, Oryza sativa
tcggttggccattctcgattattttgtcaaccataatcttatcttctacaactgcaccaagcctccgacggcggcggtgcggcgtctcctcggtctcgtcgagacgaaatgaagcaacaacacgttcgctcgcctcgaggagagttacaacgagtctgtacacttactagagggctgcgacgccgtgatcgtgccggtgaggggcagagatggcgaggcaaacgcgagcaactacgagcagctcatcag

SEQ ID NO: 32939 - DNA, 249 bp, Oryza sativa
tattattgaattatttttattttttgcacgatgttccattagatatatcggaattgtttcactaagtagattgaaaatgtttcactcgtttgaatcgggtgtcgtttcaccttatataaaaacaatgtttcagcaaatagcgaaagaatgtttcaattcactgcaacatttgatccatacatagtgaaacattataagtacactaggtgaaacatttttcggtggaacaaaaaatgaaatgaattctct

SEQ ID NO: 32940 - DNA, 245 bp, Oryza sativa
tactatctccacattgtgagagctttaagtaactacaacctggttttggagatcccaccttactatctacttgggaaatatacattgaggaccctaaggccattcacaatgcatacagttggcgttcagcctgggtcatccacgtcaaatattcgctgccacatcctcctcacgcgttgtcccgtgaagaatgccgagcccaaactggtcacgcgttcttcaggtgtaccgaggtcatgcggcac

SEQ ID NO: 32941 - DNA, 254 bp, Oryza sativa
atttaggaactatgatactcaagcttgcttagcccacaacattttttaccaaccataaaatttgctgatgtcctcaagtaccatgcacaaacagtaggctgccctgaattcgcagactcttaacaaggttaacactttcagcaaacttcccacatttgtgaaagtaccggagtaagcatgtcatactgatggcatcaagggtgattcctttcacatgcattcgatagataaccatacggataactgaagcattc

SEQ ID NO: 32942 - DNA, 453 bp, Oryza sativa
  unsure (1)..(453): unsure at all n locations
agcttcaagaaattatggagtgataaacaaattataaagttgtagattcctgacattcagttgggtctatatctcacttctgttccatgtagtctaaactaaggatgtaaacggtcggaaatggtcgaaaacggtatcactattttattattttttcgaaaacgaacggtaacagtaggaaaacttctatacttatgaatttatctatttagtgtcaacttcaatatttatctatttagtgtcaacttcaatgccacgttgacagaaatntaaaaaactaaaatttaaaaacggtaaccatcggtaaaaatattattattatattagttctacggaaacggtataagtacggtcgggaaatttctataccgtattcacccctagtctatactatatntgtctcgatcaatttctctcatactattaactagcatagatagtcgtgcatttgca

SEQ ID NO: 32943 - DNA, 459 bp, Oryza sativa
  unsure (1)..(459): unsure at all n locations
tggacggttgttaagagatggattctatgatatggtagctgatgtttggaaaaaggaggttaggggggttacaaggttggaaaagtggcaaaataggttacgaaggctgcgtcaatttttgagaggttgggcaaaagatacaagtggggcctacaagaaagaaaaggctagcctgctagcaaaggcggatgaattagataagaaggctgaggtgtaatgtttgtctgaacaagaattaaatctcaagaactttgttaaagatagattagcgcttttgctaagagaagaagaaataaaatggtaccaaagggcaaaaacaaagaaaattgtggagggcgatagaaatacaagatattatcatatgatagctaatggaaagcataggaaaacccgaatttttcagttggaacaagaagagggtataatcaaaggtgatgtacaactaanggagtacattac

SEQ ID NO: 32944 - DNA, 484 bp, Oryza sativa
  unsure (1)..(484): unsure at all n locations
acctgaggcatgcaagctnggaagcgtgctggtgataatctagttgtatgagctgttaataacagggtaccattgaaaagcatgatattcacgagcgttgggtatttgggatcctgtccttcctatttcttgtgctgccttgattgagaaaaaaaggaactatgtcactgaaagtatgtggttaataaaagtgcaatacaaggattatgacaagttctctgtcagtactattttgttgtagataaaattcatgattcttgagaggtacctgaggttctgagatgtaccaaattctctgaatacctcctcggcaagaaatttagtgtaaaatcactccaaacttttatcgaatgctaagcaagaaggtactgagcaccaacgcacaactaactgtacgtactctttgagctatagttactaaagatgtataactccatattgattacatgtgtacagtgttgcacagtacagattgacatcactt

SEQ ID NO: 32945 - DNA, 327 bp, Oryza sativa
gaccacgatggttacgccgcgtataatgccacagatgttctttaaactctccgactatgtatatcacatcgaaacttttgaacacatgcagacttttaacgtattcgtcacattttttcaatttcatctagacttttaatttgtatgtgaactaaatacaggcttaattaagtttggtactggtaatcatctcataacttataggtctaaatccgcctttaagctctcgacatctcaatctgaacaggacgaatgggatagccacttgcccatttctatcacagaacagctggaatgtgcttctgtctctctattggatatttcttc

SEQ ID NO: 32946 - DNA, 457 bp, Oryza sativa
  unsure (1)..(457): unsure at all n locations
atctcagagncacctgangcatgcaagctttcctccaaatttcccatgaatgaaatgagtcattcaatgggagtttcaaaggattttgcgtatgcttatcctttggtacagaggatcaagtatgattatnttccataagattttaacactttagacttcctctattttttttctttgttccaaaggaatccttataatgtcatatgctaccgaatcccacaagaatatgagaatcattcataggaatttggttgatttccataaaaacatataaattcggaaggatttctgaacattcaacattattttttcactagctggcgtaggatagaatctaaattttgtgtcaggacaaccatgtgtccaaacaacatttcatacaaaaatcaattgctttctacttgtaatactattagcatatgtataggaatatggtgagctcaaacccttcttcaat

SEQ ID NO: 32947 - DNA, 461 bp, Oryza sativa
tgcagtagagcggtagtagcatttgtttgacgcagctatgatcaccctaagattccaaccactccctgtttaccaccacacacaaactttgtttactgcacacttaattgcccttttacccatgcctaatgacctaatcttgtgacctttttgaacgctcatagccgagctatagctacaagacagacaagaaaaaggtccacatggagagattccaaagacttgctcagtttaaatttctccccctatacatgctactccataaatcccaaaatataaaaaaattaagttgaatttgacaaatcctaaaaccatgagtctatacagtctcttgagatatactccctccggactgataatacttgtcgttttgaataagggtgaggtcaaactttagaatatttgattatcaatcatttttaaaatatttatctttcaaatatggtgactacatgtataga

SEQ ID NO: 32948 - DNA, 439 bp, Oryza sativa
  unsure (1)..(439): unsure at all n locations
tatgtttcatgtgctatgtgcctgtgcangaatatgatatatgtttctattccatcctacccagctaatgtgataagtaggattttgtgccatcctttctgtcctaaagaaagggtgggcaaaatctgcagccaaaaatagcatacgcgttggatcgatctgcattttccacttctacagggcaagccagatgcaaatgacatgcaaatgaccatcgatgttctgtagaccacacgtgaatagtcaatgtattcatgaccacttaccagctctactgccactgctatgttaattagtgttgcaccttaagattattatcataggtactgcagcaccttacatatatcagacatatgtatgtcgttagcgctgcaatctacttatctattgccgtctgctttcattactgttgccccaccaacacatgtttaacggtctt

SEQ ID NO: 32949 - DNA, 461 bp, Oryza sativa
tatatctgggagtatttggcttaaggaaagtgacgcgagttaatttggctacatcattcatacttccacagccagatcgttgttttcagattaaaacatacatggaaaacatctgtacgagggaaaggatcatgctagaatcgataggggaaatagaaaggttcatcagtcaccaagttaatttcgagtcgctccacgctcgaatttaacttggtgagggggcattttgttcgatgatattttgtacaccttttttttattttataagaaatggggtgcgttaaaatattaattccgggaataacagtacaatagtaaaaataagtgattaattaattatcattaatgatacaatctggtgtacatgagaatattatatgacacgtgcagtgctgcccaattaatgtacgggcgcgaatatactcacgtgtgtcgctatatatatatatatatatatatat

SEQ ID NO: 32950 - DNA, 439 bp, Oryza sativa
  unsure (1)..(439): unsure at all n locations
agcntgatggagcaaaggccggttgatgattcatcggtcacttgtgaaattatttcggttacacctatgcctaagaccggaattggtagtaattcccttcctattgctcctattgactttgacaagaagaaagtgttgattcggcctagtcaagccgaatccatgagagggaaaaatgttattattagatatcttcggcctgagacaattatgatcaataattctaaggccaaagatcgtaacgctgcaaaagatgagtcatctagttcccaaaagactaaaaagccgaagctcacttttgagatgcttatggctaaatacaataagggattggccgatcaatgatttgatgatcggcctaaagtgatttaagaggaccaagatcactttctagatagagagttggtccacctcaaagcaatcaaagtcatcaacaata

SEQ ID NO: 32951 - DNA, 441 bp, Oryza sativa
  unsure (1)..(441): unsure at all n locations
taactatcaccctctacagatctgatatcggattaaactctacatggtcgccatatcataaggacccttattttctctgtactgcacatgttacatgatctgttcaatggaaagagcgtaaggctcacaaagtcaattgacaatcatcaattcgtttgagcatgcttgcacaacactcctagacactaaacaggcattatcattctttaccatttgagcctcttttactgttacccaattactttttcctgctccttggacccattggtacgttgagaaatgtgagataaacatgcggaaatgaccgcgattntcgataaataatatgaactctatttttcgagaacacacagaagaactgcgtgtcttttgattggtaggaaaagaatactgcccatttatcgtgatatttaaatattgcagtagacctactgttgactt

SEQ ID NO: 32952 - DNA, 470 bp, Oryza sativa
  unsure (1)..(470): unsure at all n locations
aggacctatgaaactcagcttcaggggagctaccggagagcttcaagaatttgacatcactgtcatacctttctcttacggngaatggttttaccaacttgtcatcagcattgcaagtcttgcagcacctgcccaacttaactagcttggtgctcaccaataacttccgtggtggtgaaaccatgccaatggacggcatcgaagggttcaagagaatgcaggttcttgtcctggcgaactgtgcactcttgggcacggttccaccttggctgcagagcttgaagagcctcagtgtgctggatatttcatggaacaatttgcatggggagatcccgccatggttaggcaacctcgacagtcttttctacatcgatctgtccaacaactcattcagtggggagcttcctgcaacctttacacagatgaagagtttaatttcaagtaatggctcaagtgggcaggcgtcaaca

SEQ ID NO: 32953 - DNA, 450 bp, Oryza sativa
taggacaatgcgaatgaagatgatcaaatgaaccacatttttagcaacgatttggaccacctcttttcctgttcctggcattattcatagctcgagcaattctgttagcaaccaaagccaaatcctcctcctcgatctgttcgagttgatcatcgaatgtggcattaaaaatagcaagaaaagaagacttagatgaagaagcatcaacatccaaagaagaagaagaagaaaccaaagcactcgacttagaatcaactttacgagaaagaacgttcatctcatgtgttttcaattttgtgtaaagcgaatccaaagtcaaagtagacatgttaacagacttctgagtagatgtaactttcatctcccaaatagacatatcaagaccattcaaaaagtggcgagaaatctcagattgtggataattagcatcataagaagaataacagatct

SEQ ID NO: 32954 - DNA, 420 bp, Oryza sativa
tgcctgtgccgcttgggggagatcaagaacagtgacgcttgtggacgcttgggggagaggaggagtgggccgccgccatcacagccgttgcctttggtcgcagccgccgcctctgggcgaggccacagtcatagccgccgccacgcgcaaccgcagccgtcgcttccgggcgaagctgtagccgccgccgtctccgggcgcagctgcaagtcgcagccgctactgtcgcctgtagaggagaaggctgagactgaggaagagagagacgacgtacggctagggttactcctttacaggagaagtagatgggccttggcccatagctaatttcagcccatagccaaagcttagctgccgctaactgaaggctaaattagcagctatctcccgttaagctaagctattagcgtcatatattat

SEQ ID NO: 32955 - DNA, 400 bp, Oryza sativa
  unsure (1)..(400): unsure at all n locations
tcaagctttcataatagaacttgcattgcanatcatatatatgctaaaatcttaagtgtgttatgtgtctaatgcctacataatcaattgaagagaacatgaatgctatatactgctgctaaagatataccccagaacaacagagaatatttttatgagtgaattatggaaaacttaaaaataataaatcaaattaattctgagaaaaatgagtccaacttattttatctcctagggatatgaaactaaagatatggaaccttgtgctaggtttcgagtgttcattccaataccatttggagataagactagcataatcttggtaggaataagatcatcagtccttatttgcaacagtagtctctgtacaaaatgggtcaggtcttgtactacaaagaat

SEQ ID NO: 32956 - DNA, 458 bp, Oryza sativa
  unsure (1)..(458): unsure at all n locations
gaccggaccttaagtgactgngctgcagctttaaatgttagtgtttatttaaaatttgaatcgacagtttcaatttctcattagaaagtttacttcaaagttcaaacttgaaacataactatttactaaaaaaaaatctgtattataaaattttacaagaaattttaaaagtattcagagatgactaccaattgatatacaaaatttaaagctgcacgggcgcacggccacacgggcaaagacttgcagtctgtcttggtcttgttcggtagcgtggacatgtattagcttgtttggcctatgattatatggaactaattgataaaattctagcagtgttccattgtggttcaatctaacaatatattntccaatatgtgttgacattatttacataatccaagagacacatttaacaatcaatacatgtcttcccgcaaaaaaaaacaatcaataca

SEQ ID NO: 32957 - DNA, 445 bp, Oryza sativa
  unsure (1)..(445): unsure at all n locations
ntggaacgacgtcatctgatgttcttctcttttattaccaggtacttccaaatggttggattcgtaggtttgttgtgaatcaactctggccatttgacaactntatgctagatatactcttttttttattggtgacaggaggggagggtttccccacctgaatttgataactacatgctcctattttatcagtattaattaggcccattaaaatttaacaacttttatggtattatttactggatgtatatactacgagtatacatttatatctaattaaaaaatacgtaaaacttcagggaaggttttcgaccatcttagtctgtcgtccgcatcgtgtgcacctcctatccgcttcatctgtcgtctgcccgtgtcaacgtgggtccgctctaaagatcccacaaccaagcccaactcatcaaaatctacctaaaaactaatc

SEQ ID NO: 32958 - DNA, 414 bp, Oryza sativa
  unsure (1)..(414): unsure at all n locations
atgcaagcttcaccttctcaaccatgttgntctcatctctcatgaactaaacaacacaccaatccatgaattcagaacgaaatctttaaccataaacaacatgcaaacaacaatttagtactaccatttgagaggtgatgtccttagctgacaagccatcgtcgacgaccacgctctgcaccaagaacttgtccttgcactgcaagttcggaggcgccacaatctgcgcttgcatcgtgactgaagcacacaacgcatcaaaattccccacattccgacagccacaaaataatccccaaaattgagcggtttcttgaactctggcctagttcagttaaacactaaacacattacctacaacgaccgaggcggatcgcggccgcacgacgccattattggggcgcacgcagtact

SEQ ID NO: 32959 - DNA, 406 bp, Oryza sativa
gagctggctgctcaagcacatgctatgcttgtacagtatgtcatgttatttcttcgctggatatgcccttgaaaagttagttccctgcactctaatatcaaatttgcgcactctacatggggccactttagctgatggtgagatagctttgaagtcgcatcagcctcagtattactattactcacaggtcagagatccatttatctagaatatctctctgtaaactatctatcggaacagctcacagaataaactcctcatgcatgggtgtcgactattctatagacaagcagaaagctctgtcacgaattgttcctgctattaacaaggcacgacgtcatcgatgtaaaagatgagagaaaagctattctgctgggtcccgattcatggcatgcatatctatgta

SEQ ID NO: 32960 - DNA, 374 bp, Oryza sativa
agcttatctcttacgctccaggaatggatcagtcataacatcaccaccggctcgcctcgaccgccgacgactggtggttccgcctgcacggctggcctattatgccgccgttgttgggcgtctacgtcttcaccgaccggcttgccttcgccgccgccgactggtgtccttgcctgcacggctggcctattatgccgccgttgtgggcgcctacgtcttcaccgaccggctagtcttcgtcgccgccgaccgatgtcctcgcctgcacggttggcctttatgccgccgttgttgggcgtctacgtcttcaccgaccggcttggcttcaccgacgtcgactggtgattccgctagcaccgttggcctatatgccg

SEQ ID NO: 32961 - DNA, 447 bp, Oryza sativa
ataacccataatggatgggcttgaatgagccatgttgttaaagtaaatctattatcatcgcactatggcatttaatcaacaagttagatttttttttaacttgaagacttctagaaaatgctttaattagaatagagatatagcagaaagttagacagagatatctacatcagtgaaaaggggatcccaagatcccaccaggatgagccacatcatcaaataaatatgaaccgttggatgcatgatttgaatgaagagaaccgttggatcaaaagagagaaaaataagttaaaaaaaaaaccaaatagtgtcttgggatgttctagtcccttcaagcacattccataaaatgtgtgataacaaatatatgagaatgaaaaatatcttcaaaattatccttaataatcaccaatgagtattcaaagtaattctactgtatcaataata

SEQ ID NO: 32962 - DNA, 373 bp, Oryza sativa
  unsure (1)..(373): unsure at all n locations
aagtaaggagatattggatcacaagaacaattgttcagatatacaaattagtgctccattacataacaagggccacaattctaccacagcccaagctgcagttgaggatattcacagaagcttaatgaatatcttggtgggggactctgtactcaagacgattctttngatattctgaaatggtggaggggtaactcatctgcatacccaactcttgctatgatggcacgcgatattttaaccatacctggatgtgcagtttctactgaatctgcatttgatcagtgtgatcaacgggcggagctatttgatggaaaattgcgacctgagacaacagaagcacttatatgtgcccacagctggatcatatcat

SEQ ID NO: 32963 - DNA, 469 bp, Oryza sativa
  unsure (1)..(469): unsure at all n locations
agcttatctagaagagtctaagttcaaggaggatttgacatgctagtttatctattaattagccaggggttagttttcttttatctttataaaagtgtgtttagtgtccgataaggactttataatttccttttatgtttaagaaagattctttcttgtcctacaaggactaatatctaccaataagtataaatatgtacacctgccgtcattgttaattatctctcgataatactactcttggtgcatcaccaccctcttttctgagggtttacttatcaaccggcggaatttggcacctgacgcggggctgcatcaattcagttctatcttccgcgaaggggtaagtcctacgttccgtcaacactggtgaatctatcagctacattggtgttgttcaacgctgcatcgcttcgatctcttggattgtcttggttggtngaatatttgcctacctgatatctcaatt

SEQ ID NO: 32964 - DNA, 403 bp, Oryza sativa
cttcttcgttgcccttgtgtgggcatgcggaggagctgggggggcccttgactttgtaggtgccggaagaggagcttgcatgggagtaggtgttggagcactaggaggagtcggtgcaggatcctgaggaggagtctatgctggagcctgaggtggagacggtgctggcggagcatgaggaggagactgtgcatgatcctgacgaggagatggcggagccggaggagatggtgcacgagacgccgcttatcgcctatggaggatgatgtaccgtctgcgccatataataatggcatggcatgtgtctcgtaaatgcgtctcaccgtcttctccagagtaatccagctcgaggtcctcgtacgcgccttcgaccaactcaacttcgaccttcgagtatcttgct

SEQ ID NO: 32965 - DNA, 341 bp, Oryza sativa
acgcagcatgcaacttattataataatccgcagagctccatatatcagcattaaatttctgatgccatatattggcatgcgagctccaatcacccgtcaagactctaatgttgttatacctaagaacctggctttctcttatgaattgataatgcttctttataagctgggagcttcgctatggggctctgcgtagcctttcttcgttccagaggttcccgaaacgtgagttgtggtcgtcgccgaacgatcagaaaggcgttctctcttagcaagggcaagtacatcatatcttgagcatatcgaaatcccagtttatataaatattttgatttaaaata

SEQ ID NO: 32966 - DNA, 325 bp, Oryza sativa
ctacattaatactgtatccaacataactgatataaattggttttaattaaatacttctaggttagtaaaccaaattattcatacagataaaaaatgctcaagtggaatggtttgcattggaccagtattcaagaaatcagttccgagcacaacctagacaccactgagatcggtcagcaccctggtggactagccgagttgacaaaagctggccaccagtctatgaggtcatgcatacaattccataagcacattacattttaaagcaatgagaatatgcagtaactgtgacgatggggaactggcactgtgctatgtagcatgt

SEQ ID NO: 32967 - DNA, 455 bp, Oryza sativa
agctttcatcctccgctggagcagttgttagtaactgactactgcaccaatattactcaaagcatgacaccctacctcaacgcccataaatgtgggagcgggtactcacaaaagcagcaaggtgtctaaaaacgacgacaatgcgccaacaaccatcactctgcaggcaaggcggacaccaaacagagaaaccacccctacgcgaacaggagtggtcaagaatagagtatcagaaatagaggaagccaaagcgggtgtttaatgtatgcagcccccggcgctctacacttccgtctgtaccccgctagaggtatgggcaaatcccgatccatatgcttgtacacctccgaccattctctacaaggtcccacacatacaagaatgcgagtctgcgattgaattcctaagacctactctgatacagaggaagatgcacaacctcgaacgctgagcct

SEQ ID NO: 32968 - DNA, 417 bp, Oryza sativa
  unsure (1)..(417): unsure at all n locations
tcggcgatgaaatatactggcttctggcctgactctgtttcttggacaagagctgcactgaccgccaccggcgaagctgctagataaagcagcatttcgcttcctggtgttgggctgaccaaggtgggtgggttttgcagatactgctttagctcatcgaacgcgacttggcattcgggtgtccagctaaacttttccgcgccccggagggtcttgaagaagggcaaacctctttcggctgccttcgagagaaatcgactgatcgccgcaattcggcctgcgagcttttgtacttcgcgtacgctcgacggaggcttcatttgccgaatggcgtcgattttctcggngttcgcctcaatacccctttcagaaacatgaaaacccaacaacttgcccgcgcgaacaccaaaaacacac

SEQ ID NO: 32969 - DNA, 420 bp, Oryza sativa
  unsure (1)..(420): unsure at all n locations
ctacaggctgtgtgattcgtttttgtaatgacttgtgggtaaagtgtaccccctctgcagaggttaacaaactgttcgaacagccgtgcccacggtcatgggcggatgtgaggtgattcctagcgtagttttgtttgactactgcttgtgaaattgctgctgtggaaaggggatcgatgtttggaaaatcttgcagctgatgggatcagctaggcccgggtggccgtttgaaagttgttggcccgggtggtcgtttgaaagttgttggccgggtgccaatcttgatcaattcaaaagactgatacattgcacatactccgaccggaggagacgcactgtctcatccgtgtcgtttgagaagcactcacttagttggcttcagaaaagagatcgaataaaatcaantgcataaacaacagc

SEQ ID NO: 32970 - DNA, 456 bp, Oryza sativa
  unsure (1)..(456): unsure at all n locations
tgcagatcatatacttgcaagctgtgatactcctgtgggatgtttcggagatactcctgcactgatgtttcatagatgtacctcagtttcagagatgttccagtttcaaaaattcgcacctactccatatccacgccaacttcctgatgaccgctttacgttgatgtgaattgacagaattgtctataatgtgaatgtttgcaatttctttgtaagttaacagcaaaactcttggtaagttaacaaaataaaattaataaaattatggtgcaataaaggaggttgatttcttccaggtttcttggtaactgcgagtattcatccactgcatatgcagagcactgaattcaagttcagacactcctgtgctaattcaatcatattgcaagaatggtgcaattataaactgcanatcaaccattcaattattcttaatataatanaatcacttataag

SEQ ID NO: 32971 - DNA, 404 bp, Oryza sativa
tagcatggaagagagacaaggtggtttcgctaatactttgtttgaacacatatttgagatcactaagcgatttatttctttctaagtttgggtcgaaaaggagacttgcgtctcgattccacttaagagatgcttctcaacaactcaaatggtgatggacccgcctcctggcgcagatcattacttatcggctcccacagccaattcacttgaataagcggcttccagatcctttttcatctgattaggcggctggcagagccttcttcatatttgcagactcccacgagtcaactgcccagcaccaaaacactccgcttccactccggctgcctagtctatgatgcccgcagacatccccgatcacacagattcgatgttgaccactcaggtcattcatctgc

SEQ ID NO: 32972 - DNA, 436 bp, Oryza sativa
  unsure (1)..(436): unsure at all n locations
tgatgggtatttttactctttaagaacaactaacaaagagtacaatatgttggacacagaagcttgatgggctcatttntatgataatcatttatcagttgaatatctaacaaagagttcaatgaatcacttctggacattgttaaaatatggtataaaagggatccaggtacaacagtatgggatttacagattcacaatgcttaatatcaactacaaaattatctagattcataatgcctaatatcaactacaaaatcagcaatgaaacaaggatttaccatgatccaggagatgagggatcaccgccggccgcatcaaaccaaggttgagacgatgcatgaggaccaattgagctggtgaagtcacctccgacagaaccatcaatggagaaagccgggacggtcgtcgctgccgctactgacccgtgactgcg

SEQ ID NO: 32973 - DNA, 429 bp, Oryza sativa
agcttctagagccaatgggcgccctcctatgttatataggaaaacctgaaggatatggtggcgcacggcgttcttcctgcgaaagaaatcattgggtggcgtccagcattctacgaagcgttcccgacccccgacacacatgtaagtgtgatattttctcatttcttctatggcggattttctctttcaacctcaagattcttccggggaattctgaatttctatgggattagcccgcattacttaaacctgaactccatagttcacattgccaactttattcacgtctgcgaaggttttttgggcattatgccacactttgccctatttcgtcgcatcttcttcctcaagcctcaaccaaacaaaaataagccatgcgtagttgtgggagctggattccaactaatgggaactctgagccacaagtat

SEQ ID NO: 32974 - DNA, 447 bp, Oryza sativa
  unsure (1)..(447): unsure at all n locations
tatatatcagaatcaatgcaatgaagatatacgatgtatattaaagaattaaccaaacaaaattatactttagtccgcggtgactgaccaattacaaatgctccacacatacttatttcagataaattgtttttttcaaaaagaagatgggatgtgaaagaaagaagggcgtagaagtaaatgtaagtaaatatatcctaaaatctacaaataatctgtactataaaagaaattttgtaaccgaaagttctataaaataagatatgctaaatattcaaaaaagatacacacatagtacaaatgatagtctaatagtaatcaactctattattgcgacacaatattttctcataaatntaagattgcacggntcaagtaatattagtttataattcatatgtntgcagggtagttcaaagagtatcataaccaatatactgatgtaat

SEQ ID NO: 32975 - DNA, 354 bp, Oryza sativa
actccgacggacttaagcacgcagcagcaactgacacctctgatctaacagtgctaatggatcccaccacggtcccagcactaaatgccgactcagaagcaacagatgacacttgaattcataagacatcacgagcaagtttgcagaggataggaaaatctgcttgttcgagctaccaccaagacagagaattagatggatctttggaagcccatcataaccagaggctgagccaagtaaatttgtaagatgtggttattattacaaataggctgacgtttctcaagccaaaatctatgaaaatggtgttcatgatcatggctactggcattctcattaaagatataatcaaac

SEQ ID NO: 32976 - DNA, 445 bp, Oryza sativa
ttctgttgctcttatatatgcgtacggtggctgccctcttgcaattgcaccatgcaaccgtcatcaaataaacaagaagctatgtcgaactacacctcataaacaattcttttgagtgcacatacacatatggcatcagatccctcctccggccacactaatttctaccgatttgttcgccggtggctggcaaatcctgtaaggtaccaccagcaccatcatcttcggcgaagcaccagtactgggatctcatactcaacctatcctaggatcatcccaagatgcccatcatcatcatcatcggcgcaagaccgggatcgccttcgagacaagacgatgattctagatgtaaaaggagggatcctaatgatatcttctaccttccatgacttcatgcttgtgggcatggaggcaagtggtttctcacgggctcatcatgctatgc

SEQ ID NO: 32977 - DNA, 449 bp, Oryza sativa
  unsure (1)..(449): unsure at all n locations
tgattacatcacatattgtagtattgtctgaagccactactgggtctctttntaaaactgtgctatattccattntgtattactagcatatcatgaataaatacataattaccccacttttacattgaagaagacaaaacaactccatttgaggaatgtgttgggtacccattggctgacagtatggaaattattccttgtctgttagtattagcatagaataatcttgccccaatcgtggtggctggctggccgaaataagaattgctgcaatggatttaagaagattgtttcaatcatgttcctatcctaaccacatggacgcgtttttgcagtgttaaactgaccaagcttgcaggcttctttagaggataataatagtacaaaatgatggcaattatatatataatacttangaggagagtgagacaccttgattaacaccacac

SEQ ID NO: 32978 - DNA, 436 bp, Oryza sativa
  unsure (1)..(436): unsure at all n locations
actggaaacttgacagcagcatatacatctgtattcaattatctatcagataccctgatggaagaaacatggattaaagaagtcagcccttgcttgcgatcttctctgatgtggatgggagctgttgagttatcccttgtctgctctgtgtttttcatttgtgagtgggcaacatgtactttccgtgattgccgtacatcacaatgccaaaatgtaaaattttcaggaagcaaagatttctctcaggtctatatggcagtttccctgttgaaggataaaatgaatgagataaataatttatcttcttccaagagcagcagtcagcttgcaatgaaggatcaccttaaaagtgctactctgaatcattcttctatcaaggtgacagcaatggagactgcttctggatntagagacagtacaggtagcattgatgaga

SEQ ID NO: 32979 - DNA, 451 bp, Oryza sativa
agctattgctctacctctgcgataggtacgtactctaatttctatacagtaaatcacatagataactacacccgttgttgactataacttaattaaaacaatatattctgcacaatatatgaacaagtatttactttgattggtataacgtttatagacgatggattgaaccaactcatataaactttgggtgtaagattacgagtatattcatgtggactccaaatctaagaaaaattggttaacggtgtgttttatgataaatatatagtattataatatattacatgtggtgtgacacgtcaaaatataagtggtttgtgcaatctatatcaaaatacatgggtctttgtaaactttactcttcttgtgtgtctctctattgatatacaaacttaataacaataagcctagcatgacatcttatgctgaagtttagttcactgaccgt

SEQ ID NO: 32980 - DNA, 453 bp, Oryza sativa
  unsure (1)..(453): unsure at all n locations
ggatggagccgattgccgatacaactgatatggtatgatttgtgctcggtgtgggcctatattggaataaccatcattactaattagagatagagctcggataaggcaattgtatctattaattaggatatttgagtcggtttgttagagatttggcaagagacgtcgtatatggtcttgtttgtatcttgtttttagaaaggttcgagtcgtgtccataatggaatagtttgtactcggggtataaatatgaaccccatagcattgtaatacgggagacaatccaatacaacttcgcgcatcgccaccctttttactcttcttcgttttcgacgagttcttcgcaagaggtaacccgtctcaatggcatgcgctatcggngctaacatgtcgctntagacgtgttaggctcgatatcgcgagtcattgctatcatatgtcttaagtaatata

SEQ ID NO: 32981 - DNA, 334 bp, Oryza sativa
acctgtatatcgactttgtttcgttgtctgttacttgcgctcttgaggggccccagtcccctccgcacatgtgactagctccccaaccaaactcatagaaggggtcccatatcgacaactctatttgttggacagcgacattgtgactttgttcagttgcttggtttttgcgctctcgaagggcccgaatcccatccttatatgtaactagcacctgccgaacttatagaaaggctcccactttgactacttcatgtcttagataaccacattgtgtcttttataacactagcattgaaacacaatctattataattggtatggctattcaccc

SEQ ID NO: 32982 - DNA, 399 bp, Oryza sativa
  unsure (1)..(399): unsure at all n locations
taagcttgtactcgaatgatggcaaactcgaaatgcctggacactttgactacactagaaaggtctcgcgcgctacgccgcgcgggtgtaatagacgtgtctaaaagagcctaagacgcatgttattggagcttactgaaagtgttatatttagctggcaatttagcctgtgtgggacaacaaaacaagtagctcatttcaagctgtaatgagcttgattggttntattgttaaatttaggctcttatagacgtactgctatgatttaaggatgtacacctcctgttagattcaggcactcagtaagtaagcatgttcttatgcttatattacatacaagcctgttggaggtgcattatattcttacagagtgatgtgccatgcttggatatataacat

SEQ ID NO: 32983 - DNA, 315 bp, Oryza sativa
  unsure (1)..(315): unsure at all n locations
cgtttgcttactgggcccaaatcagatgggtcgggccggatactccaaacgggcctactaatcctttcgtcttctcttctctctctcgccgtcgtctcgtctcgtctcctccgccgccgcgattcatccgacaccaccggcggcatctccggcgagcggcagcgccgaacacccccaaccccaccgagttctttacggctggtgtctcccctcccatcctcgctaccgcgtcgccggcgcacggngagggtgggggcgtggcggcgaaaagattcctgggatctcangggatagtggactatggggtcggtggat

SEQ ID NO: 32984 - DNA, 378 bp, Oryza sativa
  unsure (1)..(378): unsure at all n locations
agcttgagcaacacattttgacgaagtgagatgctcaatgtttctcacaaggacaaaacanaaaatagatacactacctctgtctcataagtgtagttgtgattntctgtgaccaacatttgaccatccattttatttaaaaaaattatatatttttttaaaaaatagttaccataaagtactatttatgttgtatcatctaataacaataaaaatactaatcgtcaatatttttcaaataaaacggacgatcaaacgttggacataaaaaaccacatctacatttatattgggacagagacagcatttttttaatatatatgtatatgttttggataactaaagaagagtagtggagtgagagtgtgagacactcac

SEQ ID NO: 32985 - DNA, 429 bp, Oryza sativa
  unsure (1)..(429): unsure at all n locations
taacagtcaaagcagaaaccctagattntcacgggttcgtctaaagataattctgcctcattatataatacagcggaattggggggcatgtgttaacaacataattttgcatcatactcggagaggaaggagcaaggttgaagcaaatttggtacgagattggagctggacttggagtcgggctgcgcattggctagataccgtatcggctgaaaacaaagtgtgagctgatcaagcttgatggagccgattgccgatacaactgatatggtatgacttgngctcggtgtgggcctatattggaataaccatcattactaattanagatagagctcggataaggcaatngtatctattaattangatatttgagtcggtttgtagagattggcacgagacgtcgnatatggtcttggttgatcttgttt

SEQ ID NO: 32986 - DNA, 455 bp, Oryza sativa
  unsure (1)..(455): unsure at all n locations
agcttatatggtatgttagtgttatttcacatgcctctttttggggcataaagaatgcctttncaaagtcaaatacttttacaggaaaggtcaagattaccagctcctggagatgcgaatgagctctctgtcattgaaggacagctcacatggctagtccacataattgcagccattctcaagattaggcagaccattggttgtaggtgagaaattnacattccttgcttccttccttatattctgtttgatttccttttcttttcacttacaatgttcattgtgttatgcagccaagaatcacaggagttaattgacgcagaacttgcagcccgtgtgttacagttgataaacgttactgacacaggggtgcacgcacaggttagatgaaaatgatttggtcatctaacatgaaagctgagtgctgagctagtgacttgtagcaacaacaattt

SEQ ID NO: 32987 - DNA, 451 bp, Oryza sativa
gttaacctaacccgacaacgtatatcgtgccacactgttttattcggctcaatcggctaaccttgtccgactcgaactctgctgattaagatcgcagccgattcgaatttagctgattcttactctgtttccaaaacgatcttgaacttggattccactttgatctgatctctatctttgatacttagattatcatacgtcgactccgagagaatatcgcaattgccttttccgaccgttattccagcgctttaaatactaaccgttgcccccgagaaatctcacaccgtttcctccgttttcaccgccgaagcaaactccatcctctctctctctctttctctctctctctccggcgatcccctcggtgcgcaaggcgatttcctcttcggccaacattaaatttctcccgcggctatgtcgacctccgccagcccatctgctgcgccat

SEQ ID NO: 32988 - DNA, 447 bp, Oryza sativa
agcttcgcagatctctcatggatggtggcaatgcactcaatatcctcttcgctaaaaccatggatgatatgcagatccctcgcacggaattaaagccgagtaatgcgccctttcacggagtcattcgaggtctatccgctacactactcggccagatcactcttccggttaccttcggcactcgggagaacttccgcacagaaaacgtttgcttcgaagttgctgagttcgagacagcgtatcatgccatactcggatgcccggcgttagccaagtttatggctgtcccgcactatacctacatgatgatgaagatgcctggtcctcgaggagtcatatccctgtggagcaacatcaagcatgccgtctcatgcgacaaggaaagatgccagatggcccatacccgcgagatcacgctcgctcgagaagaaattcgactagctgcgt

SEQ ID NO: 32989 - DNA, 375 bp, Oryza sativa
agcacgaagtgataggcgcgattctttttcgatccaatggctgacacatgggtggcggcggaaagaaacacggtctgattcatcgatcggagaaggacacattgactcatcagcactctttggagacagatcacttaacgatccacgacctcgcaagagactgcggacaaatcctgacaacacaaaccaaattgaagaccttgagcggccactactataggagcgcgaggcaagagaacgagagcgtgaagaaagggagcgtgagaaggagagggagcggcacgagtgggagcaagagaaagaacgtgagtgtgaatagagggcaccatagaacgagcacgatcgaaaggagagggagctagagcgcaacgaaag

SEQ ID NO: 32990 - DNA, 455 bp, Oryza sativa
tcaacattgcgaccgatctgagttgaaaaacatcttttattcatgcgctgataggttgctcctgcattcttcaatccaaagggcatggtgatgtagcagtaggccccaaagggcgtaataaacgaggtcttcaagcagtcggattcttttagtcggatttgatgatatcccgagtaacagtccaagaagcagagtaactcgcagccggccgttgagtcaaccacctggtcaatgcgaggtaacccaaaagggtctttgggacaagatttgttgaggtcggtataatcgacacacatgcgccattgccccatcttttttcgaaccaggactgggttagccagccagtcgggatgaaggacttccttaatgaagcctgctgctaacagctttggtaattcctccttgatcgcatccttcctgtcctatgcaaaacagcggagtcattgcttgatggg

SEQ ID NO: 32991 - DNA, 346 bp, Oryza sativa
acctctctatggcgtgacccgaagatacacaaagtcatccatcgtgaatttcagatcacggcgaccgttattcgcataacatttctgccgagactgtgccacctttagattattcccaaagattctgactctagcttcagcttctctcaagatatcagtcccgaacacttgctttctccaactgggcccacagtagtggtgtttggcatttgcgcccatacaacgcgtcataaggtgccatttgtatgctggcctggtagctgttattgtatgagaacctcgcataggggagactcttattccaggactttccgaatctaagaaacatgcgccgagcatatcatct

SEQ ID NO: 32992 - DNA, 451 bp, Oryza sativa
tcataacacattctgagggccacctccacatacttcttgttctaatctccccaaaagaccttcatagcaacttgcttatcacgccatgctctgccatacataagccgatagagccatatttgctcaactgcctcaacaaacgctgctggagataaagttggttcagctcgcacaaatgcctgtaacctgtttccaataaaccttgaaataagttgcaaatgcttgccagataccttcgcactacagcatgtgtggtctttgcccaccctagtcacccgccacctatcttctccactcttccttgcattaatctgccatttgctatggcgatcgagacaagccacagaatactttactgacgctgtagattcctttccatggtacggccggtggacaccgatagaataactctgtaccatattttcagtcatacatcgatcgaaactcaacc

SEQ ID NO: 32993 - DNA, 298 bp, Oryza sativa
attgacaatctataatctctcttgtacaaatcttgtatttattaaatgaatatcaccctgaggctgtccctactctttccacgtaaaaaaaaggcgaatctaccaccactctcatcacgaattacctactctttgaaaaagaataaggacgtgctggccaccaattacctactctcgtgtcgcaacaagaattcggcaatactaaaaggggtggctattaagctgcgaaagcggatgggtttagagacaatgaaatttatacaggatcatgccttcttaatcaagaaacaatacccta

SEQ ID NO: 32994 - DNA, 434 bp, Oryza sativa
tgggtctgatcaagatagccaccatttatctcaagctgttgcaggtgctgctgctgcagatggcttggtaagtggcaacgctactgtgctatctgcctgagctgctggcagcattgctggggcatgagtcatatggcgggttggtgtttgagtgactttaaggttaatcatttgaagaacgtcaaggtggcagtgcaagtgcactattcataaacgctaatatcttgcacggcaaatctgatgttttgcaaagcttgataactgttatgagctataattcaccctgagctttgcatgtcaaatattgataaagctagttaattggattatatccttttttggaactaaatttttaatggtgagtaagttgttgccttcactatgctttggatgcgaagtattgttttgacataagctttctaagttttaacact

SEQ ID NO: 32995 - DNA, 410 bp, Oryza sativa
agcttcctgttcaatcctagctcacaattacattataaataacaacatgatgtactgtattctccgggttaccctctggatgaaatattacattgggctttatgactcatctggaaagcatttctttggagggaaaggaaggaccataactgcttctcaattgtcatacaacgctgaagtgtgcaagaagctatgggcagaatctatagctatgctcaatgagctacataatatagtatgtgaactgaggactagctgaactaacttgtgaataatatgaggttacacgaatttcacgtttactcttgctcgatgggccatagtttcacgacttttcagttagctggacaagggtttgtgcacaaactttacaaactcaattcagctggtctcgtactactcccttggcc

SEQ ID NO: 32996 - DNA, 441 bp, Oryza sativa
  unsure (1)..(441): unsure at all n locations
tatagaatatctccgattaagtttgtacttgtgtcattatcttcaaaattatatgttcatggaaggtgtttaaggatggtgcagatttaatgttgagtatgatagaatgagtggctttgtttcaccgaacctgngcacaatacgttattattacatcagtgtatagaaaaggtgccgtgatgaaggggatcttcagttcccactcatgtattccagcttttttacgtggatttgtgggtggttttcctcatcgatacctaacaatgtggatttgtggttttttttctcatcggtgcctaacaacggtgtatccattactatctgtttggacgcattaataatctagcgacatggtcttatcaacactcagccataattgtatctagcatctttgtcatagacatatatatgtggtgcccaagaacggtgtatccattccta

SEQ ID NO: 32997 - DNA, 458 bp, Oryza sativa
  unsure (1)..(458): unsure at all n locations
agctntggcggcagtggcatacattggtgtgcaatcgctctttgtttggatgggtgaagagtaatagctagatgcggatgcaattggctgactgcatactgcatgtggtagactcccacacgaacggacgagagatagagcagcagcagccacaatagactctttatgtcgatctcaagaccagaataatgtcgtctatgttggaaatatagtcattattcggcatattttaatccaagaaattgaaacaatgatcatggcataagcagacataaccagtagcatactatgcacatcatgaatgtcagaaacaggaacataccagtaacgcgataacatgctagaggcatcatgtagaacaggaacaagaacatagctcacatagtatagcgctaacagcagtagcaggaggagaaaatataccccgagaatggcccttcgctggatggtgaggcaga

SEQ ID NO: 32998 - DNA, 432 bp, Oryza sativa
agcaaaaactgatgagaaaagtatttgttttatactatagacaagctctccttgagaaatgggaacatctaaaataaagtgacaaaactgttacggagtactttcatgattctaaaatttgtatcactcatagtggtctacaagaatctaatgagaacacaatgactaaaattttcagagggcttaatttcaatattcaagctgggcttgttaatgtgacatataatcatataggccaattgttcatgcttgcttgcattgttgagtgcacaactttggagaatccaacggagcaacaagatatgcttgtgcctcctatcactgatgttttgcaggaaggtcagaaaagtctccacaatgagaagaacgatatgtttgagatagcacttccatcactcgcgaacgaggagatggctgatgccgctacattat

SEQ ID NO: 32999 - DNA, 315 bp, Oryza sativa
gcagcaagctaggccctctggaccacaagagcgacctcatatttttatttaccgcgaactcacactcaacacacggatatatccatagggactctactcatgtgcactattgctctggaagaactatatccctcggtaacaacccatattatccctgttctcaaaaaggtagcactcgtgaccaaataaaacaaacttcagagagggtgaccctaacacatcaaactagtgaaccaattaactaaatataagcacatctgatgaagtaaatcctccaacaaaaaataacgataccattcaacaaaagaaaaaaaa

SEQ ID NO: 33000 - DNA, 414 bp, Oryza sativa
  unsure (1)..(414): unsure at all n locations
atgagagaacgcggaatacctcatgagcactaacatggtttttaaggactttggtgganatccaacggaagccaatggcgctttgaaaatcaagataaccgttggcagccagacggtcccgactaccttctttgtcatcgatgggaaaggttcgtatggtctattacacggaagggactggatccacgcgaattattgtattccttcgactatgcaccagagtttaatccagtggcctggtgaccagatagaagtcgggctagccgatagatcggtaacgatgctaacgccgatttaactatttgggagatggacgtgattgattgcttatctagatacgtctgggaaggaagatatctgaatgtgtgcgatcatgacatacagctgattggaggtgaagaacctcacttgtac

SEQ ID NO: 33001 - DNA, 329 bp, Oryza sativa
tcagcttgtccctggatgatgcagtacaaacgtttcttttaagctgttggttccgacggcatggttgtcacttgtttatgcagtgaatcggtgaccatgaatgaccttggaagaatatatcaagaggccattgttgttgcgaaaaagatgattgtgatccgataataatgtgccatatgtatagcttaatcttatttcttgaagactgtctaaagggttggcggcctaatttttatttggcgcctttggttccctggagggccacgctaattaagattaatcgctaactgcgtaatcttggaattgacggagagaataatcatgttatc

SEQ ID NO: 33002 - DNA, 439 bp, Oryza sativa
agcttattgagtactaaatttctatatttctttttgagaattgtgtattctgtaccttaatgagagtctactaaattaagaaagcaaacctgcagaaagatgacatgatgataatggataattttgttacctttgctatagtgttttaaattatttcccctgtattgtttatgatatgatactgaactggtttcattcgatatagggcatgacaacgagaattaaatgcagtccttttttgtactatcatgcattgacaaactatggtgtaagaaagtacaaaaatattattgaggcaagtctgatggtatgctggcagcttgaacatgtgtaagatatatagttatatataattctctgaaatgaaagatgaattgatccctaatgaagaaatatatattggagatcttcaaatgtaaatctgtgtagcgtatacctg

SEQ ID NO: 33003 - DNA, 330 bp, Oryza sativa
  unsure (1)..(330): unsure at all n locations
cgcaaccggatctgactggagagagagggattttctttgtgagctgtgaatagaccttttttagatctgaatacaggcaccacattggcactctcggtactaaagggctacacggccaagtgaaatccaggtacgctagatgcatatcattagcatagaaacagaattacagaagtagtanntatgaccatacaatgtttgcctacatganaaaaaacaattgcaaaaatntaacaaataggctttgagatcattttgccatttttgggggaatacatgttgcctattgaatgcagggaattatgagttcactttttggcacaccgaact

SEQ ID NO: 33004 - DNA, 376 bp, Oryza sativa
  unsure (1)..(376): unsure at all n locations
agcttatatagctgcccgctgactttttatatagtcacgcgctgattgngtttatacagcaattgattggatacaatatcattgctttttgccacgtaagtgtgtatttttattaaccaatattatggcttaagctgattatatattatggtcattttccaggcgggtggtaaatcctttatgagtttatttactctgattttacaccacatatgccatatatttctgggtgtggtgaaaccatgtgtctcttacggacttaagcaaatctgttaaagcagtgtgcgcatggtgtgtgcccaatactttggaaatattcttattcacacgatattagctcttttataactgttctgctatgtgaatttttaatgat

SEQ ID NO: 33005 - DNA, 353 bp, Oryza sativa
tgatagacatcctagctgagatatgtacactcgcacgcttgctaagcgctatgtgggagactcatgtgagaaatggagacgactcgagtcttccccccacccacccaacagacccaactgattgatttgatcacctatggctccatggctgtggccatgtctgacccagccttctcgtacgctcttgaagtaaccatatgatgttctttgcatattcacccgcataggataggagacaaagagacagcactgccactgatatgtactccctcccgtcaaaaaaaaaatcatactatacaacgatcgtcagtacaacgaatataaatagcatgttcatattcgttgtactatat

SEQ ID NO: 33006 - DNA, 471 bp, Oryza sativa
  unsure (1)..(471): unsure at all n locations
gaccttaagtcacctgangctgaagctataagagaactgaattgaccatgtcttgcctccgataagaccacaatgcttcggccaacctagtatgccattgccgaggataatcagaaatcttcctcttaatgagcttgatcaaactcttgttagatgactcggcttgcccattagcttgtgcataatatggcgaagaattcaataatttgatacccatgatatcggcaaactgaacaaactcatcggtacatgaagatcgagccctgatcggttgtaatggtctgaggaataccaaaccggtaaataatatgctcttgaacgaattgtatagcatcccctgaatcaactttcttcaaagaaatcgcttctacccacttggtaaagtaatcggttgccaccaatataaacttatgtcccttgcttgaaggtggattaatcatactgatcatatcaattccccaacctctgaat

SEQ ID NO: 33007 - DNA, 439 bp, Oryza sativa
  unsure (1)..(439): unsure at all n locations
ngatgatattgcttgataaacataattcacagatctttttggaatgcaccaaagtaaaaggcaagccacaatctcaccaacttgaggcaccggcggcaattaccagggccaaaaaaaaacagcagcgggatcagtgggaatccaaagttatacaaaattacacatggtctaggacctcctccattgaacaaaattaaatacaacatcagtgacgagattaaaaaaattgcagtcgcactaataaatcaaaattagatggctgcagagaatacctctgaagtttacttacagcattggatntttctcagacttcattaaatacaatagtatctctaaaactaaataacctagcagagggggaaaacatggggaaagaaaagaaatgcgaaaagcagaacaacacatactacacattnttaacactgtattgatcttcttc

SEQ ID NO: 33008 - DNA, 393 bp, Oryza sativa
  unsure (1)..(393): unsure at all n locations
tctaatcgactgcagcatgcaagcttgtactgagctgctgtctgctgtcnattattctgtgtacaaggaaccatctccgatttatatggctttcattccacttggtcttcagcagcgtgatgctattggtattgctgaaacaagctctggcaagactgctgcttatgtgctccctatgctttcgtacattacccgccctccacccataattgaagaaaaagaggctgtggctccttaagctgttggtatggaactactaggagcttgctcaacagattgatgaatcactgtaaatttgtacctattttgcattagagctgcgctatcgtggtgtcaatcattgaagaacacggttctatatacgctggcttgaggccgtattgaactcctgtc

SEQ ID NO: 33009 - DNA, 461 bp, Oryza sativa
  unsure (1)..(461): unsure at all n locations
agcttacatctccatctntgcttccagttaagaacaaactggtatatgggatggttgatacactgctgacactacctgcagatagaacagaagagatcaggttgaaaaaccaactcgaaaagtaccatggttatatcacaaaacttacctgtatgcgcctttggtatatgccagatcatcccactgttgctaacaccgctggaagttccagacttagtgtcatgcattgaagttgaagatgccttaacatcatgctcgttggaacttctgtgatgcttagtctttccagtagagatgaaccgaaaatcatgcaaagttacatcttcacttttcccaccagttacaatcagcggtgagatagatccacagcctatatttctatcgaacacagaaagagaacgaactcctcctgaaagatgaagtccatggtcagcctcagccatatatcctanattctacac

SEQ ID NO: 33010 - DNA, 453 bp, Oryza sativa
  unsure (1)..(453): unsure at all n locations
tgcatttccagattatgacgaggatataccaatctgtgtttctgagttcccttcggccatcccagctgtaaacaataggttccagttcatgctcccaatttgatccaaattaattnttccattctactcatttatggtcattgaaatactaacaattttggtaggctggattgtgcctttcacgtgctctactacatgcgaaactgggatggaacttgccttgtgaaccccccaaaatccgtgagttttctgtacacactaggttcaacttaagtttcattgaaatagcttcctttataataaataattntctatattaacaacaggatcaacgagatcttcgaaaggaatttctgtccaacttattgtcattcataacaacgaagctattctgccggacttcgtcgttcactacctgaagttatctaacaagatctaagcatgttatgcaag

SEQ ID NO: 33011 - DNA, 389 bp, Oryza sativa
cgtgaacgacatatataaattcctcaacaaagtttttatttataaactagctgatatatccaactagacgaactttgtcaaaaatacacgtgttaatagaagcagcaccgtcgcgcccgactcaatcaatagatcgggagcttaggataggtcccaaacggcagagagcctaatccatcattaagaggcataaactatacccctaatcggctaacatcatcacatcactagatgctaaacagaagagcctgatgaagaattctttgatcacaatgtttaacacataatgcatgctcttcgcaactatgcaccaacacaaacatttccagacaatgcactgaaccttaaccaccagacacatgaattatttgaagaaaagtgcgagcaaa

SEQ ID NO: 33012 - DNA, 251 bp, Oryza sativa
ccgtgtgttatcccaggcgagtggtcgactaacggactccatttataaactacacggcctgcacacgtggaaaccacgcggttaccgagcgggcacactaacacggacactacactgtcacctaccgcacgcgtgaacgactaccaacaccggtacacggcgtccggtgtcgacgaccgcacaactggtacggtgcgacaccggaatacaaggacagggcaactagatgggagaccttaccaccactcgac

SEQ ID NO: 33013 - DNA, 393 bp, Oryza sativa
  unsure (1)..(393): unsure at all n locations
cccgcgttgcaacagctctcattccaatgtatgcactaccacaaggggtcaatgctcaatttcagccccagccaccagctgacaagacagaggccagtatctgggttgtacctttggaaggtccaatacagcagctgagaaatcaagtacaagatgaagaacccgagtgtcagaaagttattgtttgttacaactgctgtgaagaagggcattactccgaaaactggtcccaaccaaggcaaaatcgacctccacattaccgtcaatgtacacgaagcagacattccaatcgtattgtggtcactggagcaaacgccgtactcgtaaggtctcgtgattatnagaacccatagcagatacaatgcaccattgctcctccttgctgccctgact

SEQ ID NO: 33014 - DNA, 394 bp, Oryza sativa
  unsure (1)..(394): unsure at all n locations
tgcagcatgcagcttggacaaggtacatcggcaatctttttagaagnaacatngtgatggactaaaccatgccgacttttgtaacaaaacatgagagccgattataaggctaaattatcgagctactaaaatagaatagtgattgctttgcatgggagtaccatgagatgccgggtcttagccgtgaactcaatgagcatcggcttctcaataaaccgggtcttatgccttataaacaaccacctcggacgtttaatcctttactatatgaccgagtcaaagaggagattgatcgggtgttgaaagcggggtttattaagccatgtccgtatgtggacgggatttcagcataactctggtggagaagaaagagagtggttagattatagcttgc

SEQ ID NO: 33015 - DNA, 395 bp, Oryza sativa
ttagcatgctcagtactgagaataactttctcttaaagtacttatttacttcccttccaattgaggccacttgacacaaacacgacgcgtacacacttgagcgcttgttcacgcatctcacactctaacgcttgatttggtaaatcaagttgtaaattttatctcatttcccgttaaaattgattaattgtatgttaatggctttttcatttgtgtacatcggctctatcttgttgacctgaaaaaaccagctttgtctaacagtgtattttcattaaagagagatttacatatagcaagatcttaaagctatggcaaaatttgctacaggacacgtaaaaagtgtaattagctgaaggataccgtaaaaacgtgacactacctatggacgctac

SEQ ID NO: 33016 - DNA, 420 bp, Oryza sativa
tgcatctttataaaatacaacggtgcatggatggtttgccactcccttctacagcttgatagtgcctaaaagaagacccgccagattctgtcgtcattgggtccacaagaagtgtcatttgaatggattcatgtgaaacatgctcatttttctccatgatatgtgtgcaataatttcaagaattataatgttgtaacactaaaatatattctattttcgtaacacggtatagcatgttgatcctcatgagaaaaaatgatcaagctctattaaaaagaatggaaaggtggaggaggtatacacactactggaatccaccgggtccctagggttgtcaaatgttccctagagccctaattataacccaacgggataataatgtccctagagccgacactaaaacttaaggaactgagatga

SEQ ID NO: 33017 - DNA, 437 bp, Oryza sativa
gggatgaacagaaaactgcgggatgtatactttgtactttatattcatatatgcaccaaagatattgatatcttgagctcataattatagttaggaatccatgcgttaaccaaaacaaaacattatcagtaaacagatggaccatagaaattcgagagataagggaaggggagataagtaaataattacctgtgcttgccgtcgatgatcgattaaacagggttgaacaacgaaactaagccaataagattgaattgtaagctacgtttctcagagtacgaccctagagtaatctaatatctcactttgtggagcaactgtgcgcatgatgtactattaacaagcctacagaatgagaaagagcaccatggcaagatggttctagaaagtatgcaggcaacatgcaacaaatagtctcatcaaataactttttctat

SEQ ID NO: 33018 - DNA, 403 bp, Oryza sativa
cctgcagcacgcaagctatacgttgcacatagcactattctctcactacctcattttctaatgtacaaaggttcacgcataaatcactcacactatttctcaacgttagctatcatgcacaccgacgctgccctaaagcgtatgttctcgtaacatccggctatcttcacggatacttcacctgcatttgagcgaaaagcatcgcactgcacttttatacgattatactagcacccacattcccgactttcacacaaactgatcaaacgagtaatatggaatcaagcgaagaatgccacacagcgtatagctagatcagattacatacatcctccacctgacacagcaacgcatcaactcatcggaggagatgaaatgaaaatacattgagcactaacataaa

SEQ ID NO: 33019 - DNA, 464 bp, Oryza sativa
  unsure (1)..(464): unsure at all n locations
agcttaggtggaggagagaggtagtgaanaattaataatattggctctcatgcaagagctagcttatcacaagctccaaggcaaatacattaaatgtaataagtgagagatagagagaggagaagaaaattgtagccaaccttgtagctaatctattatatatgttgactttaagatggactaatagtaggaaatgggctctattattatacttgctcttatatgtgctgggtttaagattgactaatagtaggaactgaactctattattatccttgctcttaatatgatttcgctagcatagatatccaggcttgcagcgctgaactcgggaacatgtacaggaatgcaatgaggcacgacgtgtgcctcaacaggccgaacactatcttgctatggtttcaactggttcatcgttccttgcatntatattatattacccgcaacctatgcagtctagattc

SEQ ID NO: 33020 - DNA, 462 bp, Oryza sativa
  unsure (1)..(462): unsure at all n locations
agcttccttctgattgcttgttgaggcggatgacggttttctgcttggtatcgccctcctgagggtgattgctctttgctcggcctggagtaggtcggggagagacacaacttcttccatcgacgacaactctttgctgaggcttgcggagcagaaaatggttggtgctgaaggtattattggtatgatttattgtacagtcacgtgcaccaggaggagcattggtgctggggatgatatccncgatgttgctgttggagctgactatctgatgagacaatcgtagggttgttcgttggattattgcggtcttggtcaacaacacactgagntggcaattcttgggcccatggttatgaccttctctcagaaaacatgggaccttgcggtgggacactcccctgttgatggtcttcttcacatgagggccagtggagacacctgctttcacgtggccatatc

SEQ ID NO: 33021 - DNA, 353 bp, Oryza sativa
gcatatcaatgacctgtccgcgaacaaaactagctcagatgacgcatgcctatcggcaaagaccaacgcaagggagaaaacagtgtgatcaatcaaggaagtgaaagaaaacaatccgcatcgtttcctactttatgtacatatacatgtatacaaaagaactacatccacacaaccataatatatactccctccttccctaaatatataataccgctgacttttttaaacatgtctgaccggtcgtcttattcaaaaaccttcgtaaaacacgcaaaactatatatgtcgcatactcaacaacgaagcaacatacacgaagagaagtaataatcacttagaattctttaaca

SEQ ID NO: 33022 - DNA, 362 bp, Oryza sativa
  unsure (1)..(362): unsure at all n locations
agcttctgtctgagcattggcttctaacagtgcctatcttctatctttgcactcgactgatccacctgggtaatcaaaccttgtgcaacccatcgtcttatgaaacntgctcttcggacgccatcgtgcatgctgattccacgggtgaaaacaggtgaataccataagcagttctctgtattatttgacagtgcttggtaacagaaagccattattctgtcctgcctcccatgatctgtatattctttaccaacgcttgtattcangacctgcaactggtgtttcgtcgttccaggattgtagtagagggcatggaggaacatcttcatgcataagacatcatggcactattgggtgaggat

SEQ ID NO: 33023 - DNA, 449 bp, Oryza sativa
  unsure (1)..(449): unsure at all n locations
atcttattcctctctatatacccattatttattatggctaaatacattgatctaacaaagaaaatgactattttgatgaaagttcaatctaaatatatcatcctccactggtcaattaatatgcacaattgaagcacacaaattatgccagttgaccaaattctgatcaactaaagctctcatgaagaaaacattgagcggaacaaaacgcatagcgcacttgcaattgaagaactttttcttctaactatagaatacaacgacgggtatttgtcatttaaagaaaaattccctaaccacttattcttccagaatctgacttgctcacgaatattaattatccaggaattcatacttagaaataaactcttaaccttcataagaacagacaaataatgggaatcacnctcgtttctttccacctagattattgagttactactaagata

SEQ ID NO: 33024 - DNA, 419 bp, Oryza sativa
ggccggtgctttgttctgctgcagaggagcgatgcgacggctgtgtccaatgcacgtcttgcggaacttgctcctatcttgagacctattcagcacatggatggtttcaaccgatgacctgaaaatacaataatataaccaaagcaacaaagaattagatccaatatatattaggtaaagatgattagcaaagaaacccagatgaatttattaacctgctagtaaatttaggcagcttcgatagttggcaacggaaaggtcatgaggcaaaggcgagcgatgatgcccatcaagctgtgcgagatggcggatcgatgatgtcagcagcctcattcgcagaactggccggaatcggaatggcggagccgtggaggcgatctaatcttctctgcctgatgtggagcggcacggtgccagca

SEQ ID NO: 33025 - DNA, 374 bp, Oryza sativa
agctatgttgtgtaagatatctaacacattatgtcttggctacggataaggcatacctcctatcctgcgacttgtgaaatataccgatatggtatacctttacgtatatggattatttacatatacatcgtatggaatttacttcaaattaaggaaaatatctttatgcggtcacagtgatcttctaaaagtcctacctcgtaagtggataaaagattttgttataccgtcccaggtccgatatcctcaaaacctttcttggggtcaagatgacccacggtataaaagaagaccccttgggagaggttcggatcatcgaatctctttgccacacacccaccaaagcttactaagatggagttcacagaaccaac

SEQ ID NO: 33026 - DNA, 447 bp, Oryza sativa
tcttgtacagtccaaggacctgaagatactattattggtaagagacttgagcaatcaagcagcggaaacagcaagcaagcaacatttggaaaacgtgaaaaaaattgcaaggcttgaggcagaatgccgcagattacatcatctaactcgcaaagcaacattaattaatgattctaggcctctggcaaacaatacttgtgtggagtcacttactgatagccaatctgacagtgctgaacgcatggctgctgttgataatgaactgcggaattccgactcatgggcatctgctctggtagctgagtttgatcagttcaagaatggaaatgctgatgagaaaaatcttgtgaacaatcctgttgtgattgatctaatggatgatttccttgagatggagaggttagctgcattgcctgaatcagatcgcacaagctctaccttcgatat

SEQ ID NO: 33027 - DNA, 467 bp, Oryza sativa
agcttcttctatatgtactgtaaaaacagagcaatgaagctgtgggcctgcggcttacaaagttcactgccatgtgattccctgacggcggtatcaatatctgaagacatgacctctattttctcttccttctcacaaaccaactcggaagaaataatctccctgtaaagaaacatcccatgtttaaagagtagtcacatactatttatggtatatgttcgcttactttttaaaaatagaaaatacaaattacctttctgtctgattcacatcatctgctaaatctaactggataggcgcaacccatctttttttgtggctggcctccgaaaactctaaaaaaaatgcaatatgattcagttcttgtcttgcacagataatatggaaatattaagaacagggcaataaaagataaatgaaggtaccttcttgctcattaacttgctggcatgacgaaacacaactgc

SEQ ID NO: 33028 - DNA, 442 bp, Oryza sativa
  unsure (1)..(442): unsure at all n locations
ctacgctncagatggatctgcgaacaattcttctttttttcgaccgccgccgactggtgttttcgcctgcacggatggcctattatgccgccgttgttgggcgtctacgtcttcaccgaccggcttgccttcgtcgtcgccgactggtgttttcgcctgcacgggtggcctattatgccgccagtgttggacgtctacgtttctcccgaccggcttgccttcaccgccgccgactggtgtttccgcctgcacggctggcctattatgccgccgctgctgggcgtctacttcttcaccgaccgggttgccttcgccgccgccgactgatgtttacgcctgcacggctggcctttatgccgccgttgttgagcgtntacgtcttcaccgaccggcttggcttcgccgctgacgagctagcctattatgccgccgttgttgggcg

SEQ ID NO: 33029 - DNA, 369 bp, Oryza sativa
ttttgaccgaagatttcgaatcatcgatcatctttggccaagctattctaacaccggtgactcataagtctacgtttctatgcattgtgtattagagtgttagttactatatttcgtgataaacaaaactgttgactcaaaagactacgcttatatgcattgtgtatttgtgtgttactgtatttagtgataaaccttacgtgtacatgtgagggagttcatggataacacgtgcactacattcttgcctgttccactggtcaccatcagcaaatcgctcctgttcctttcgtgtggctatcactggagctattcaattcttgaaaagctctgccgtgcaagcaaaccgtttttttcaatggataagtg

SEQ ID NO: 33030 - DNA, 458 bp, Oryza sativa
  unsure (1)..(458): unsure at all n locations
tagggtanactnttctatagccgcacgtgtnattttacttataagctaacacgcgatcgatcacgcacggcgatcagccccctccccccacgttccttcctttattttttcaccgcattactttcctgttttagtaagtttatacacctaaagttggtacacatcaagtttatacatctaaagttcgtatacccaaagtttataggttaaaagtttatattaccggtttaaattcgaaatcgaatttggattcaaatatatttttatatagaatatttctatacataaagtcaagtttacacatctaaagtttgtatacccaaagtttataggttaaaaatttatatacccagttcaaattcgaatttaaatttggattcaaatatatttttatatagaatatctctatacataaagtctatatgtacgaaatttgttatatagtattataagtataa

SEQ ID NO: 33031 - DNA, 456 bp, Oryza sativa
ttgtctggagggtagcaagagggaaactgccaggatggacctgcttccttacaagcctcaagcaggttcatttgatcgcgagcggaattgcgcaagattcactcttgcttctttcgtcgctgccagggcttctgcatcttatcctcaatgccgcctaccgtgagaaggagatgacctttgccgcaggtggctttcctgcactccagacactcaccttgcatgagttgagtaaccttagtcagatagagtttcagagaggatgccttgctgagctacatgaactggtgcttgacaagtgcaccaagctagctgattcaccaaaaggcatggagaacctcacacgtcttcagaatctgaaacttgttggaatggcaccacagctgatggagaagctgcacgatggaaaaggagatgatgggtgttattacaagcctggcactggcagctcaatgatct

SEQ ID NO: 33032 - DNA, 413 bp, Oryza sativa
  unsure (1)..(413): unsure at all n locations
cttcgttnttccagaggcagtgaaggctaattcgacaattgatgtatatttgaatcgtaacctatcggctctggcgaatgagcctgatgtccacatcaaaggagcattcaatagttggagatggaggcctttcaccgaaagactgcacaagagtgaattgagtggggattggtggtcttgcaaactgcacatacccaaggaagcttatagattagactttgtgttcttcaatggtcgtttagtctatgataacaatgatagtaatgattttgtgctgcaagtagaaagtacaatggatgaagattcctttgaggagttcttggttgaagaaaagaaaagagaacttgagagagttgccactgaagaagctgaaaggaggaggcatgctgaagagcagcagcgaatgggagaac

SEQ ID NO: 33033 - DNA, 447 bp, Oryza sativa
  unsure (1)..(447): unsure at all n locations
agctngcatactctgctggaatattatgcttttacaattgcactcattcttttcattccagtttcatgtgaatgaatgccaacaaaattctggagatgctcttaaagttttgggtaagttcactcgcattatggtcactcgctatttaaatctggttcaatgtttgcatggctctgtagctgatgcccatatcttcttttggtactaataattcatacttatctaataatattcatccaaatgctcttatgctgtcacctgacaattgtttttttcatattcgtagtgtaagcatanttttttatagatttgtattcaattaatggtggcagaagctgcaagatctgtcttcaagagttgtgtcccagctgacctcatttatgtgcatcaatattgtacaactatctcttaatggtggaatttacaagaactggctttaagatttgt

SEQ ID NO: 33034 - DNA, 368 bp, Oryza sativa
  unsure (1)..(368): unsure at all n locations
nncttgctactttgaagaaaacgagtggataatagagaaattgtgtgagacatcatttattctgcgcaactttgagaactggctgagatgtaaacctgcgaaatatagtcatcccgtgtgagtaacacaaatgagcttcgaaggacaaacatcatgccattgggtcagttctgcagttaaagatagttgtctgaaattgatgaagttcttgactgcaggttgtcttttaagcagtttgtagcttaataaacggttgtgcaggtgccatggtcatactattgatcctgttagaacaaacaagataaaatggatgtgcccaacaactagacaataccacataacttatgatattaccgatagtgatgcga

SEQ ID NO: 33035 - DNA, 372 bp, Oryza sativa
gacccggacctctaagcacctgtagctgcagcttggtatggtattattgcatatttattaattatagaagcctactactactccctccgctgtttataaccgatagtctggatagctccaaacaataagtattcgtggattgtttgggcgtttatcacagataagaaaaaagaactttgatatccttcattaaataagactttattaggttggattgggtattctatatcttaaaaaataaaagagaggtgattgagtacacgggtataaatgtatactaatagcacttaaattacttagatttcggtacaaatttcaatagatagaaccatttatattgattaccgaccaacaagcctttatattcataat

SEQ ID NO: 33036 - DNA, 442 bp, Oryza sativa
  unsure (1)..(442): unsure at all n locations
tcagttcagtcgacatcaataattaatctctctcaggctcttttctcactcctagacatatggtcgattgtttttttttctgtacacccttaaatttgaaatgaactatgaaaagaattgattgatgttgtttagctaataaatcaataactgtatgggcagtacgcttaaggttgagtttgaatctacctcttcccatcttcgactccctagcttactcttcacgaactgttaagtgttgtttttttaaaaaaatctatatgaaagtagctataaaaatcatattaatttattttcaagttttttaagttaatacttaattaatcttgcacatattatacttaatgcaatgatcaactctctatacatattaatactaatgcaatgatcaactctctatacatattatanggaaaaaaattcaagcggtagcacctgtctt

SEQ ID NO: 33037 - DNA, 460 bp, Oryza sativa
  unsure (1)..(460): unsure at all n locations
agctnggattgcacatggtgttcatcaagggagatctgcagtgcctgctctcacactgcaatgttttggagtggttaagcctgacacagtgtttattgcaacatctgagcatctgccagaagttgtgccggttgcggtatctgtgcgtgcgcaagtgtatgctgcataagctgtatctgcaagcaccgaatttgacagaattcgagctcaccaactattcgataccgattgtgcttgccgaatgcctgaacttgtctgtggcgacaatcgagctggtgtcattctcggattggttgagctatgactacactgagctatcagctggtggtcttcattgcgtgcaggatcgtctcttcatctacatgacagtcagaactgaggtgagtactgttctagagctcacaaacatcaagtatatttctgtctaatataatgtacatgtgatatgcaacttcacatc

SEQ ID NO: 33038 - DNA, 435 bp, Oryza sativa
  unsure (1)..(435): unsure at all n locations
tctaagttcgaatcgaacttaaaacatcaaatattctccttctcggtgtcgngtctctcctctggcggcgatagagtaaggggagagaaataataagggaaataaaagggaaattgtaaaaaacaaagaacgtggcttatgtttctagtggattttgctcctagcctacatgtaagttcgatttcgcaggtaaatgggcaaagcaggcatgggtagtgattacccatacccatgcccatttacccatcgggcatagcttttgacccaataagatactcatgggtataaaatggagaacaaacccaaccctaatggggtttttacccacgggtaaacggtcaaacgggcacaattgccatcactattcactcacaagcccaattgcagtgtccagtctgatgtcaattgtgacgtgaaaagtgcgtcaagcaacag

SEQ ID NO: 33039 - DNA, 343 bp, Oryza sativa
agcttatccagaagtgatcaccgagttcaaggaggatgctgcatggcagtttatctattaattaggcattatctgttagttttcttttatctttacgaaagtgtatttagtgtcctataaggattttatgttttccttttatcttttaggaaagtttctttcttgtcctacaacgactagtatcttcccatgggtataaatatgtatacccggggcccttgaaatatatctctagatcaatacaactactctcggcgcatcaacaccctctttaccgaggttgttacttatcatccggcggaatatggcatctgacgcggtgctgcatcggttcagttcgatc

SEQ ID NO: 33040 - DNA, 403 bp, Oryza sativa
ccgttttataccaacacgatggcgttagcaatgttacggaccttgaggaggtaccatgaggtaccattttttctatcgaaaattaggtatcgcttgggacctaggcactatgaggcattacatcttgcaccaaattgttcattagatagagcttctccatggtctaattccaaatgttataggcaatacgagtgaccagacactagagctcacaaccatgcctaatgatcaccagcttgcactagatcgagtgttccgagtggaaagatatttacagttacacaagatgtgatgcacgagcttggtaattaagctgacgattataactgataagcaaacaacgcctacataaaaggaaggaacagagaaaggagaaaatttctctaagaaactctagaaaagg

SEQ ID NO: 33041 - DNA, 459 bp, Oryza sativa
  unsure (1)..(459): unsure at all n locations
agctntgcctgacatggtccgtgcagcagcatgattaccacaaataccagaatgtatatccttcaacaattgtctcccttcttccaaagacacgcagcgctgcagtattcctgatggacttttcttgtacagctcagtcttatgaataatgtaaagtctgctgtacctaaaaatccgctcggcttcgtttttgtcttgagggagttctttgttggtcaaaaattttatgagaggttctcttcagtcggtttcgatcatgcttacgccttgagtatccatggcttcaattgtttcttttctggtacggattggtcgtaaagatgttcgacgaacacatcataaggggctgcttctcgttttaaccaaaattggccagtctgtcggctgcctcattgttatgtcagacgacatgagtgagctcaagttcatcacatttatcttcccacttgcgtacctctt

SEQ ID NO: 33042 - DNA, 444 bp, Oryza sativa
  unsure (1)..(444): unsure at all n locations
ntactgtttgacaccgtntaagatgtattgtaccaacttctataaagttgagtaactgtggtataaaaggattttaaggtattgggcacttgattacgcgcactttggcttaagcaaaaagtgcctaagtccctaaaagaacgtgacaggccacacatgaaaatatgggctacagacatattaggcctaggccaaaaaatatgccttcgacaccctttataggatgacgcatgtaacatgcttccgagtaacaaatcttccgggtgatatagaccaagtgtagctcatatgaatagcttctgatctgaatgattatcccttatgggatactccaaaatagatataaaaattgaatcccaactggcgcaagtattcggttgatagcccttacggggaataatgaatagtccagtcggtgagcataagaaatcgactcatgacaat

SEQ ID NO: 33043 - DNA, 398 bp, Oryza sativa
cagataccatctccctgctcatcccacagacatcagtgccaatctgttgaagctgtatataacaatcagcaggggggcatcaatctcatcatctttagcaatacgatcattaagttccaaaggcaaagggttgagagagagcaagataccactttcttgagccagcattttaagcttcttggagctctttgccctaacacttccccttggcttttccacacccaaatttgggtcaggggacataaatacatcagaaagcttgttaattctttcacttctccgtatttctgaatccaacaaaatcaactttccagtcctccttttgtgccttcggggtagagcacgagagacatcttgttggaatgggtccaggagaagattcaacactgaaactgtgt

SEQ ID NO: 33044 - DNA, 419 bp, Oryza sativa
tagaatggtgaccaccaccggcgaagcgccgttcaagtgcgacgtctctgcttgagcccggagacgggccgaggtaccactgcctcacctgcgaggacctcaacatgcacaagttctgtgcccatgcgccgagcacgctctaccaccatctcttcggccgcacgttcgagcttctcgccaagccaccgcaaggacgaccggagaaaccgcaccccgccgccaccggtggtggcagaggcgaaagcggcggcaggtggtgcgacacctgcggcgaccatgtgttcggtctcgtctaccactgctcaggcgccaacctcgacctccacccatgctgtgcgagcctgcaggaactcccggtccataaccgggagacgttggaccaaccgaaagaaagtctgctacgcctcaaagctagtaaa

SEQ ID NO: 33045 - DNA, 303 bp, Oryza sativa
gctgcactgtcttggccaactccggctcttggtttcgttgcactatctgtggcggagagtcgtgccctgaccctgatctggcaatctgcatccgcttctcaaagtaacaggaccaagactcgcttgtcagagacctggagcggcaaggctttctatttcaggcgtagatccaaatttccaggccaaattttcgttccaatttgcttatgaatcctgcctggcgacaagttatgtacgctcctaataactgtctgacactaacggaacttatatttgataatgcaccgctacgctgagcagcaa

SEQ ID NO: 33046 - DNA, 446 bp, Oryza sativa
  unsure (1)..(446): unsure at all n locations
cttgacgcaggtaattggtcctatcttctagaagcacttgttggtttttgtttccgaatcaaatggcgcaattggatctcaaacctcctgggtacctcctcttcaatggcacttctaaatgggattccagggctgtcgatcaatcatgcaagaggtcttcgacagggatatccgctctccccaatgctcttcgtcattcttgctatggaaccgcttcacanactgatatgaaaggcagaagaggctgcccttctaacaaaattgcaaagacaaagaagatttcgctgttccctttatgctgatgatgtcgcgttgttcgtgacccctanacaagaagaacggctgactctacagataattctttcagtgtttgcacaaatcagtggattgcacaccaacatggattaaactgcaatctttccaattagttgcaacaacctatacct

SEQ ID NO: 33047 - DNA, 374 bp, Oryza sativa
tcagctctactgacacatatcatatcacgcaattttatagtgttatatgaggacgaaacgagcgcataaagtgtactgtgcaagaatgatcgatttcctttatatatggcactgcttctgcgaatcaaaacttatacaattgcggaccgagaatgaagaacagaagataaaaagcgagaaccaccttacagtacaggacggcaccgaacgccatcacagagaagtgaaaaacaggttacagacaaaaaatgcacaatatctcggtgagggagaaggaagccaaatcaagattcaagagatggaagtctctttgatatggtaagaatcagaagatttacaagttattttatggagcgacacatgcacgaatcatt

SEQ ID NO: 33048 - DNA, 470 bp, Oryza sativa
actcaagcttgttcgccacaaacctgacactaggtcctgctcctccgacttgatttgtgtcgatgccgaacctcgaatcacatcgtcgatagccgtcgcgagctcgtccgccacaagctcgattcacgctcccaatggagccctgattcgcacccacagccgagtcactccctcgttcacccatggctcgagttatattcgcacctcccggagctccgatttgcaccgcggccgcctggtgctagcttgtcggttgtcagtttgatttgtgtcaccggccaccgggatcctcctaccccagataccctcgcattatgccgccggcggtggtcgcgagctcatcggcctgcggattgattagcaacgccatcggacgtcgcgagctcacccaccaccaaaccccgaattggcgtcgcactgggctgcgcaagctacgtccgtatcagccaccgattcatgccaccaccagc

SEQ ID NO: 33049 - DNA, 447 bp, Oryza sativa
  unsure (1)..(447): unsure at all n locations
tctcgacccgnatccttaagtcacctgcggcatgccagcttgatanaacacatatattcttcanattactaaaagtatctcatgtggttatgaacaataggtgttgaaaacaaactatgctttaaactatagatatctttcacaatataaacaataatatggtgttctgaatattatcatggcgatatgtctctataactataatttttataactataatttttttaagtatcataatgattaacctcactcattttcaaaatagagtattctatctatatcatcaaaatttgagtagtaataattgacatcataaatgtcgacgtttgagatcgcgactagggtatttgcatagtatggggatcgttggtaccagcgtatatgcaagattgaagtaaaagagacggaggcaagggattttatacatgttcgagcccatcatctgat

SEQ ID NO: 33050 - DNA, 451 bp, Oryza sativa
tgagtggtaacgcaggcatcgatgggctcctatacttatttaccacgctcgcactgcccatcccttgccgatagccttctcctctccgtctcccatctctatattccaccccaccaccaccctaaagtcctaaaccggcgtcggctgtcatgttgagctccgatgttgcccgtctcgtgcatcgttctggtgcgccagcctaggggaggatctaggatttagaggttgggaattcgaaataggtagagaaaaaaatcgttttacacccaaaagctcaataattggcttgtataatatagcacactagtaattgtataatatagatagtagcatataggacaaaatatatagaattgatcataagtccaaattctttaatatatagaagtaataattgttcgacatatgaaaatagcaacatataaaacatgtataaggatagataaagatg

SEQ ID NO: 33051 - DNA, 346 bp, Oryza sativa
agcttacccgtaataagcatatgtttaacaacctatgtgtaacggatcctcgtgtacggagtatcaaccttaaaatctcgggttatttgtggctttgacttacatttcttcttagcttaaaaaaggctgtggggatacatttttccccatccatcgagtttttattataagttttatttccgaaaacatgtacgccctccgtctccaaattaaaacagtatagaacgggatgtgacccttatgttggttttttttagaacggagggagttcagtttattgctgaattttgacctccggctctatgttatatgtagctccaaagatgtgcggaggataggtcaatgc

SEQ ID NO: 33052 - DNA, 437 bp, Oryza sativa
  unsure (1)..(437): unsure at all n locations
actaacgaacagacaggattttttctttggttctctacggtcgacaactaanagaattggagagattgggaggagaattttgaaaaccgtatcacaaagaaatgccgaagggcgagaggagacaatttgcaagtagggttctcagaaaacttgtccttagggtttgaccatttggctcaacctacaggcgagttggctctgataccactntgccacgcccagaaatttagcccgaatttccagactattttgtgtattaaatccctgtccaggaccagccagggtacacaaaacgacaagtaataaacagttccaaacgtaaataacgcgtaaaatacttacagaagaggcacttagtcctcacaccgaaacaaaagcagcagcagcggaaaaaggcgatcctagccgtgcttcagctccactccacaggcagaact

SEQ ID NO: 33053 - DNA, 360 bp, Oryza sativa
  unsure (1)..(360): unsure at all n locations
gacacaagaaacncaagcccactccagaacaagggnaccaaacgcccaagaatacgttttcccagctgaaacgccaacacacaatagcccccctccggcacggcccaacacaaaccatacccaagaaaaccagccggatcgatacgaaccgatcacgacgggagaatcaaccgggatcgcaatggccgagaggagagacgcggaggaggcgcagctgctagtccacgcggcggaggcggcaacggcggagggcgcaggcgcggagggggaggagacgaccggcgacgccggcgagccggactgctactgcgacagcatgaacaaccagtgcaagacgcagggcgcggcgcccaacaagca

SEQ ID NO: 33054 - DNA, 466 bp, Oryza sativa
  unsure (1)..(466): unsure at all n locations
gcttcatctacaaacctgagtaagtcctgttttatctgatgttcgcacaacaccccattgccttgtgagtgcattcagtactgatgatttcccaacatttgatacccctaaaatttcagaggtatgttattagaaggcacgaaataactttgtggaaacactacgatagttgagaaaaagatcatgcagcttttaacactcatcaaccataatcccttccagagaaaaataaataccagctaagtcacatacatcaaacctaaacggtgtgcacaggaagataatgtgattaaactaaatatcacattcaaagattcaccgtgccaaacttcattcttctgatggtacctgcaaatgctatctctgggagcgtangaggaggaaatgatgacgacatattttgtgtagcaaataactccaactctattttgaacaccttgttatatgtttctgtgagataaccata

SEQ ID NO: 33055 - DNA, 434 bp, Oryza sativa
tcaacatctgtgggtaagttctccaacgaaagtttccatttctgttcactccagtctgctacctcatcttcacttggaaggtttccagacttaaactctgcagctagggagcaaatctttttataaatagctgactctggttccatggcatccggagggataccagtcccctcgatccacagttgaaggtcaatttggttttctattccacgtacattggttttcaggaattcaatgaatgactctgtgtctatcgacttgaacttaaatgtggatatgtaattcttcatgaaatcatcaaatgcaggtcgaccaatctaacatgggaaaaagaatgaaacatcacgacaagtcatgaaaaactcattgattttattaaagaacgttgcaaacagttgaaacaatattccaattttgactcaccgacgctcatg

SEQ ID NO: 33056 - DNA, 475 bp, Oryza sativa
  unsure (1)..(475): unsure at all n locations
agcttgtaagcaaatacagtggtggcatgaaacgtcgtctcagtgttgcaatctctctaattggtgaccctaaggtacaattcatatatgtcaaattcagggaaattttgaacattcttgcatgtataaatcatgcattntttaacattctgcaggtagtttatatggatgaaccaagctcagggttggacccagcatcaaggaaagacttgtggaatgctgtcaagtctgccaagcaggacagggccataattctcacaagtactgcactttgctntcaactctgatacaacagtataaccttagtccagttaatcaccatggaaatcttttgcaccacatcatattatcacatcatactttcacctattttcagcgcattcgatggaagaagctgaatttctatgcgatcggataggaattatcgcatacggcagcttgcaatgcatcgggaactctaaaagggacatctaca

SEQ ID NO: 33057 - DNA, 440 bp, Oryza sativa
  unsure (1)..(440): unsure at all n locations
tcatggatgtcgctggatgaatatcggtctcggtattcatattctcaactcacggacgagttgcttctccagggagggagagatgtcatgtggggattatagtataaacggcgccgcaacaggaacagcgacggcaatccgtgacgaggaatagtgtgtggtccggcttaaagtttgttatggagtttgttagttctttatctcttaagttgctaggattctatcccttggatttgctttaaatttgtaggtcaattcaattgagatcagatcacatctgatgtatntcctgcctccctggtgaataccccgtatattaaaagatagntacgtttttttatttgggttgactcgtcaaaaaaaatgttacagaaataattaaagaaaatatcttttaatgggccacgtgagaagccataacccagccttagtctccctga

SEQ ID NO: 33058 - DNA, 293 bp, Oryza sativa
tcgaccgcgatccttaagtcacctgcggcatgcaagcttcacacacatacacatgtatcgatgatttatatagagaccattgtaggttgaggaataaagatcaccgtatatggagatctgaatatgcatctagcgtactcaatgctactaaaaacatcaattgcttactgcaagaagaagagctgcttctgctccttggggatctatgaaagatacatatgcaactatcgaccactcatcaccgctgcccatggagcgctaacgaactgatgatactgctaattgagggctga

SEQ ID NO: 33059 - DNA, 381 bp, Oryza sativa
gctattacggacctatgaaactcagcttaagatgactgcgagggtcgatcatcgacggttgtgcagatcacattggagcctgagtactatgggaatgggaggctggctagagccatatggagtttttataactaccaacactctatgtgtcattattcattgaatagagtgcataagaattactaggctatcacactgaatagcatgcgtcatgatagacataacatcgatcaccacgcacggacaaacacctaaattaaacccgatagaaggctattaccggaccggacgcatgtcagcgtgatcgggcgactctagactaacaaagatgcgaactgtccaaaaacaaaccttatcagccgagcactatactcaattata

SEQ ID NO: 33060 - DNA, 399 bp, Oryza sativa
agcttcaagatatagagaaggttctgtgatctttgttatcctatcggaacagcacacgtcatgaaggtgtatcttttggtagctatacacgccggacggcgagtaatctttctgcttatactcgtgaatgatctacgagatgaatcatttgtaacctcacatgttgattggtcactcatatggatcccaaaagaaatattatttttgttcattgtacggttttcctgtgctcgtagttactaatttaatagagaaactccaaagaacagtgatatgttttcttttgagagtattaaccacaccaattttgggctaaacgaacatggtcactgaatcagaatctgctgtcttattgcacctgaatatgccaaacctcaacagatatttgatggatggtgt

SEQ ID NO: 33061 - DNA, 467 bp, Oryza sativa
  unsure (1)..(467): unsure at all n locations
gacctatgaatactcagcttgacaagttattccgctcctgcttgctatggnggcttttaaaccataatgaacttgcaagcaaatccaacgtacccaactgatcaaccagtacagcaagtttatcacaacaaaccatttcagtctagacacatgggagccactactaaaggccaattgtcttttcatggagagagaaggataaaggggagactagagaattttttatgtgtatttgaataatatgaatataaattggaaggaaaataaattatcaagcttaaagctagctaggctatagagttgatatctgctctaagtatacactccattcgttttaaaatatatgacactgttactttttatacatagcattcgatcatttatcttattaaacaatcagcgtagatatgtaaaagaattataatctatgctttaagtaccattaatgataaaattgattcgtaaca

SEQ ID NO: 33062 - DNA, 441 bp, Oryza sativa
acctgaggcatcaagctttcacaagtaacagggagcaacgtagtcatccagcttgttagtcctaaagtggatgcatgaaatagcatgagagctgccagtatctatagtatttataggagcattcctttctttccaggttgaatgtgaacctatgatcatggtgcttaacctcaaagctgtcatctccattgcaaattgcatgacagaaagctggatcattgatgtacatataaagttttttaagtattcctaggcacacaacaattgcacacttccagaatttcttctgcaattgcttgtcaagaaagtgttttttcccattggcatatatatgcctagcacagattctgtgatcagcctcaagagctcatttccgcacaggattaatgataccctgtaattgaagaatattcttaagtcagtaacatgtattcatgtctc

SEQ ID NO: 33063 - DNA, 449 bp, Oryza sativa
  unsure (1)..(449): unsure at all n locations
tgaacccgtactttagggtggtttctagaactactattttggtgattgcttggctgcctatcaagaacaaaagttagctttgcttgaggtactgaggaaaacaaattctcgggtttcactgacggctgacatgtggtcatctaatcaaaacctaggttacatgtgcataacttgtcacttcattgacaatgaatggaatatgcaaaagaggatcataagattcactcaagtgcgtaccccacatgatagtatagctctcttcaatgaaattataaagtgcattcaagattggcagatagaaagtaagttgttcagtattacagtagacaatgcatctactaatgattctatggttgtggaatngaaaggaaatctcttgngtaaacttgctatgccttgcacaggagagctatttcatttctggtgcgcagctcacatccttaatccta

SEQ ID NO: 33064 - DNA, 394 bp, Oryza sativa
cctaagcgacgcagctgcaacttgttcttcaaaataaacttgtaccttcactcctgttcaactcaatactgaaactcggatttttcttctagagccaaacaaattttctctcctgcagtaatatgtctcttgcttgtatctcctataccctgaaatcaagaatataatctcaatggcagtatatctaagaacacaaactatactaggtcctttatggctgagacacctaagttaacaactaggcaattctctgacttaataaacagtaaggaaatttctattattgtcctcataaaaaatgacatgaacttgaagcatataaactcagaaaaattataaatattaactactctttgttccctttccgtcgtgtaacaataacataaaaagctcc

SEQ ID NO: 33065 - DNA, 463 bp, Oryza sativa
  unsure (1)..(463): unsure at all n locations
tctaatgcagaaagaacactagatagatataagcaatttggtgtcatcatcctcaccacttcgcctcatgcctcctcattgtgaagaagattagtcaaagaggtgcttaaccaaggtgatgttcagtgacttcatagctgactctgttgttataccaaaggagaactttgagttagtcacatgggaatcacggatacccccttatagaagggttgtcaacattgtttcaaattatgataatgagatgaattttcatcatacagacttacctcacaagaagcgtaaaaaaatagataaataacatgatagctaatgaaatcaagcaatctatagctttctaaagggaagtcgaaaaaaaaatctaaaagtatagttgtatttctatttgataattaacaaaagtaccagctagtgtatgccatcgcagtaatcatagagactattgtatcatatancaatgtgg

SEQ ID NO: 33066 - DNA, 437 bp, Oryza sativa
  unsure (1)..(437): unsure at all n locations
catgcagctaacacgttcgaatctatggaacacactgctattgtatactccctcggtccctccgtccctaaatatagcaacttttagctatgaatctggatacacagttgtccagattcattgctaaaaatgcttatattttatgacggaggtagtactaattagctttctgttgtcccatcccaacgcttctacaagaactattgctgtgttccgacatcanggttggtaacacatgtgctgcgcacggaaaacggagcggtctattaatgcgtgattaattaagtattacataatttttttttcaaaaatgaattaatataattttttaagccactttcgtatatatatattttaaaaaaaacgtatcgtttagcagtttaaaaaatatgcgtgcacaccaccagaaaggtgtgttgagaactatgggtaccgac

SEQ ID NO: 33067 - DNA, 432 bp, Oryza sativa
  unsure (1)..(432): unsure at all n locations
tgcgtgagccatcaccagggcgtaagcgagcttttccatttcaatgtatattgtcttcgctccttgcaatgcttcggagacgaaatagaccggtttttggcctgaatccgtttcttggacaagagcagcactgattgccactggcgaagctgccaggtatagtagcagttcgcttccttatgttggcctgatcagagctggcgggctttgcaggtattgctttagctcgtcgaacgctgcttgacattcgggagtccagttgaattttcccgtgccctggagggttttgaagaagggcaaacctctttcggctgcctttgagaggaatcgactcagtgccgcaattcggcccgcgagcttttatacttcacgtgcgctcgacggaggcttcattngataaatggcatcgattntctcggaattcgcctcgat

SEQ ID NO: 33068 - DNA, 370 bp, Oryza sativa
  unsure (1)..(370): unsure at all n locations
gcttcaccttggtgctaccatatttctacacctatttatgttacttgtcgngcatcatcttcgtatggcagcttgccattcatatgatatagatgctaggcaacaccttaactggggttatggttcctaatcattactaactgactcattatgaaatgtcaccttcaactgtcaatgaattccatgtatatgtcatgtttgagctccataatcccgtatctattgtgctaaagggagcagaaacttaaactggtgtaacttctttttccaacaaacgaagctgttggagcttctgaaacttggcatggagaatggtcagtaacaagattgcgtnctgctgcacatggcactgctagcattgagagcttga

SEQ ID NO: 33069 - DNA, 458 bp, Oryza sativa
tcagagtgttggctgacatcacactgtcggttgaattgttctattatggcaaaattgcgccgtgctaatttgcatttcttgtctaagccggtcaaagatgggactactggaactgtgattgttctaacaactccagatgcacaacgaactatgcttgcatatcaggtcagttgatatgtttgtacttcagggttgttattcccccttctagggacttctgttgcaatatcagactaaattttaatttttgaagatgagtagtttaaccaggtctgcttttagtatgaatgtatcaatgagaaccaccatcagatatcaactttacttgacaggtcttattacttgttagctgtactttttgactcattgaacattcaccgtgtataatttacttactggacaactatatagaagtgttgctggcactatataggagtatgaccttactggttcctttt

SEQ ID NO: 33070 - DNA, 425 bp, Oryza sativa
tagcttggcctaaagtccgacggccagactatcgagtggctcctccgcgaggctgagccatccatcattggcgccactggcaccggcaccaccctagcctccttctccccacgccgcccccttcattctcggcaagcgcctccatgtcgccgacgaccacaccacctccccctcgcccactcttgcttctgacgcccccgtcgagggcttctgggtgctctccgcaggggctgacttcggccaattctggagctttgcggccgtgcgggagatgatggccgccaccgcggcgcccgccatgcttggggaggccttcgccgccagtgttggcaactacctttgttgcggcgcctgctcacccccgcgccacgatctctcatcttctcgacgttcccgtcgacgtgcctctcccttcctcatcccac

SEQ ID NO: 33071 - DNA, 420 bp, Oryza sativa
  unsure (1)..(420): unsure at all n locations
tcagcttaattgattagccttggaaagatggcagtgcattattgattataattggccttatgaactggattcgaactgcagtcaaatattacatttacatggccaaaatatagcacaaagaatctgagaaagaaaggcacaaacagattcaagaatatttttggttgttcttaccgggagattgcctgcctgaaacctccaccgagatggagatggaggaggtgcataagaactatgcaggagagcttanggctctgcttggatttgtctcctttttatatgcacatattttcttttcaactttcttgattctgttntgaaataaaaaaagggtagaaatagagcaatatatttggctgcattacagtgtgctctaatccgatctctctattttttttggtatagaaacttgtttgggat

SEQ ID NO: 33072 - DNA, 420 bp, Oryza sativa
  unsure (1)..(420): unsure at all n locations
agctcggctnttgtccaacaatgatgatcctgcttatttggtggttatcatgtcacacgtactacanaatgataaatcaaaaagatcaattcataactcaagatgatgaaacaacatcgctcattattgagaaactgagtatctctataacaaatgtagaaaacatcacatatcatatttcaagtttctcctataagcatgtttgatcaaaatactcacagnggaacttactgctatgggagaacttacaagatatacatatgtgagcctttttactttccttaagcaagcttgaaagattatgatgaggcaagcacacttatgtagtacttatatgaggcatgattgccatcttaaattttattataaaatatngctagactgtaatacatatgtgtgcttgcctcatcacagcggata

SEQ ID NO: 33073 - DNA, 459 bp, Oryza sativa
  unsure (1)..(459): unsure at all n locations
tgtgctcccgttagtcttaattggtgactcccttcctttctaaaaatagtaaacacatgcaacaaaaaagaatgtgtctacaccatgcactcattccttactcttanggcgtgtatggatgggtgcaccgcacctgcatcgcatcaggccagcaaaatctaacttgtttggttggctggaccggtccgcgagccaagctgggcggatgtaaaatcgccctctgggcaaggctgagcagaaacacgaggggggagcatcgctgtgcatccaggctgatccggtgcagcgcaactgcacccacgagacccctcgttgcagccgcacatgcaaaagggcgagggttacctccccgcacggctgtatcccctcctcatttcactccccaggagaagaagctagggtttgaggctcctgtgcaccgtcgtgggtgctccctttgcttatgcttcatcaattgat

SEQ ID NO: 33074 - DNA, 373 bp, Oryza sativa
  unsure (1)..(373): unsure at all n locations
gaccggatcttaagcgactgcagcatgcacttgatcaatccctttgaacaagaagttttgaccgggaggtatataatcaatcacttggcgtccatccgatgcatcgactatggatatttcatatccccncttctctttacgcagaaattttcttactacacactgttgacgttgcattatagaccggattgttactcttgctatcatcacgatagaactgtcccccatcttcgggttcccccccacatatattgggatatttataagaaatgaaccgctttcttcatatcatggtcgggggaaagaatgggaaagaccatttcactatatttcttaccgggaacagggcctatcacaagaatatattttttat

SEQ ID NO: 33075 - DNA, 442 bp, Oryza sativa
  unsure (1)..(442): unsure at all n locations
tgatcaaccattaacaagtaatcctaatgtgggagggtttggtcagggggatgcagaaatagtgcttcaggatccattacgcgttcaaggccttttgttcttcttcgcatccgttattttggcacaagtttttttggttctcaaaaagaaacagtttgaaaaggttcaattgtacgaaatgaatttctaggtcccgggatttcttaccatcaagttggtaaaaagccgcgatttattggcgattgctagaattctctatgatccattttggaaatcttttttttgtttagactattatttgtttgcgagatgtcttgtctgcaattccttatatctatcatctcatgcaaaacgaggagaatgcaaggcaagggcgagaacaataaaatgaacaaatccttttaggagggatngctggtcgtcttaatcctctattgggcac

SEQ ID NO: 33076 - DNA, 270 bp, Oryza sativa
gcaccctccttcgcaccactctaaattagactctctactcattatacaaatgtatatggcgtaaccatgctacactaaccagctttacagatatagtggacaaatttgccattggagatacctaaaaaagacatagcttaggacatttcccatgagaccactcaaaagagcatcggcccttgcaaccttcggcgaaggatccgcttaaacaaactacaacatcagtccatggcccattgaaataaacaatgaggcgagggtgtaagcaca

SEQ ID NO: 33077 - DNA, 418 bp, Oryza sativa
  unsure (1)..(418): unsure at all n locations
tctanatcatacaactaatttctgatccgcgtttatctttatattgtttataactaaatttacagctgaagaccatatttcactacaatttagcttttaaaaaatgccatttcggtttagattttctaacttttgcgtgccattcaagcaattataaaaacatataaaataattataataatatagaatttatcatcatatataacttcataataattaaattacgtctacaatcataaaagtaaaatgaatatactatgagtaatgtttccaaaatatgttaattagaaagcaaaacttgtgcagaaaataagcaactataacatctaactcacacaactaatatttcatgaactcatgaacttattctacattgtgacattattatttgacatatgcactgctatatcaactctga

SEQ ID NO: 33078 - DNA, 448 bp, Oryza sativa
  unsure (1)..(448): unsure at all n locations
gtgagtgatcttaggattaaactatgagtaattttatattccttgaggagataccaagtagttccaccttttttttatcgtagatttggtatctcataagtacctcatggtacctactaaaggatggtaaaattgctcttaaattttagtgtataatcatgctctcggtaccttcagtaaattttggtgtctttcaaggactgtaaaaattcttataatcttgtctcatgtcatctcaagataacattatcaaccaatcgtgtcaacacaacatcagtgagtcatcttgacttggactagaatcattcaaaagtgatagagaatcgcgagatgcatgattgccatgtcatgctcagagagttacaatattgcctaacttgataaggacgagatatggatctgctgcatattgtacaagtatgtcatanatgagaattctttggccatg

SEQ ID NO: 33079 - DNA, 435 bp, Oryza sativa
  unsure (1)..(435): unsure at all n locations
ctgtagaagatgagaaatcatatttatataaatgttattttaaccagacagaacgtacccactccacatgtctcttcaaactatgctgtgtccaatggatcaggacccacagtagaaagaaacgacagagcagcatctaattgcgcgggggtcttgatctggaaaccacaatttgtcaagttcacaacacttacgaactcaaccacacagcagcagtgtttacaacacaatcacacacaacagaactcacctttgacgacacaatgtatnggatgacaacgggacgatgcaccatggcattctccggatacttcttcgcgacctactccaatgcgcaaccaattaacacacaaactaactatcaccaattcacagattttaattagatcaatactactatcatatantaactcaacancgaccgatgctcacagt

SEQ ID NO: 33080 - DNA, 442 bp, Oryza sativa
  unsure (1)..(442): unsure at all n locations
cgatgtacgctcatatctggatgcatacagatatgtcatacatttttactgggaaccctagtagtgtctaattaaatccagactagaccactagtattaagaatgctttgtgttatttgcaaggcaactttaagtaacatgctcatatttctaaagtctgattggtctctaaagtttagagtcatttggacacttattttatgagatgtgtggatatttataaagattattaagttaattcagattaagctatgtccacacatacgagagaaataaccatggaaaagctccacaataatctattaccggatagtcgacaatgtcgntagattttaaagcatgatatgattaatcatatattcaagaatatttcccataactaagagaggtagatagcgctcataaaccactcataagtataccgcgttataagttgtacact

SEQ ID NO: 33081 - DNA, 437 bp, Oryza sativa
  unsure (1)..(437): unsure at all n locations
caagcttaccatcggatggatgcctcaacacattttcttcttctatgcgcttatcactatgatattgcaaaactgaagctattttcttattcatgaataatcggtgtaatcttgtgatcaaaggaaagcaccgcagaacctttcggggtactcgcttgaacatccctttatgttccttccaccttgattccttgccaactggacactcatcattttctccaattcattcctgaaaacacacaatcattaacacatgcatgtatactttcataacctagtcctaggtctctcagcatcttctttgcgtcataatatgcggctggaagagaatctcctgatggcaaagcctccttcattaggttgagcaacattctcgatgattnggtgctctaatgattcaaatcttntatgtggacaagcttcaacagatatgataa

SEQ ID NO: 33082 - DNA, 325 bp, Oryza sativa
ctacccgtctggccaaagttgtctagctataaaaatcacggttttctcatacgggcgtcacagtcacgcgtaaaaaccattttctgcaacagctttctctaggagggctgcccgcaaaagcagattctcatgaatggtacccgcttgttaatatttcttctgaataaaaaagaaaaaaaaatcttgaaaccctagcccatacatatcaagaacatgcaaaccatcgaatggagcccgacagcccgcatgcagcggattcgccgcttctattgttgttgccggtggatctagtgtccctgagcttcttgatgtgcgccgaagcacg

SEQ ID NO: 33083 - DNA, 453 bp, Oryza sativa
  unsure (1)..(453): unsure at all n locations
tatcttgatgcaatgcaagcctgttgtttcttgtgagattctagctgaaaagactttgattaattgagcagcaggagccaggcattattaagaggtgagtgagtccatgcatgtgacattccaagatctcacgcattaccgggagcgatatatagtttaacattcagagttgacaattttcagtcagggtcttgtcagataagatcgaccttcaacgcctacccaccaagcagatatactcccattgcatctgaatcctaggcagcgatgatagttcaccacaaatcttggctttatcatgcaaatgctgaacctgtaatgcagtaattcgttggaatgagcagaaagctagcacattattatggttcatgatcagcaatacgttgcgatgcaaaaatgtcattagcagcagcactgcatgcangcataagaatctgcaataattttcgcaag

SEQ ID NO: 33084 - DNA, 448 bp, Oryza sativa
tgatcaaacctgcaaggaaaataaaacccccactgcaaattctagaccatccatgagctggataccctgcatagattccacgataagttgcacgtcgttctcatatgcatgccctagctagcattgctatccttgcgagtcaacaactattaattactcttacacctctgaccatccgtgcttatccgttgattagtttaatactaatccgaacggctaattggcaagttgcccccctttggctttgagcatgtgtggagtatatgagttggcctgctgcttggcgtgagattatctccacgtaattatatgcagcagaattagttgttctctgctggctttatttttgtccgtccaacttggcacatgtactgaaatttcctcctggttatctgagtttttttcctgatcctgcctggctcactgtgctcacagcctgcgaatattc

SEQ ID NO: 33085 - DNA, 373 bp, Oryza sativa
agctctgcatgaagatgttcgtggcttgcgcacgtgatgttgagacttgaatgcttccccggggagattgcacactacagtggattcattggattctcgagtccaaatgttggagagctcccaagcatttgtgtatcatcgttgtcatgatgcttctcatccttccacttcggcgcgtactgcttcttcttcacaagagtgaagatctttttggtgcttgatgccacaagggggagaaaagtgtgtttttatgttgggttgggactagtagtaatgaggatagtgccctcatatctaataggttaacgtggtttgggctatattatgtgtggggatgggctattactctatattgtgtgatatttgtcgattt

SEQ ID NO: 33086 - DNA, 330 bp, Oryza sativa
ggcagctcgcgggcgagctgcttccgaaggaggagggaatggggactatgatgacatgggtgatcggcacccctcaacctttaggcatggcttccaccgcagctcgaggacgagctgtctcgaaggagggatggagatgttatgggcagaactcagcccctctcattattagataacgttgtaggaggtttgttaggccttttgttatgatgtttgttaggagctggctctatgtaaggagaggcaccacagtcatgtggaattaattaagaaagaagttaaacctatctctagtctcccctcttctctgtatgaccttacccaagctct

SEQ ID NO: 33087 - DNA, 349 bp, Oryza sativa
  unsure (1)..(349): unsure at all n locations
agcttatactatataaattataaattaacttcattntagccatgtacaaaagttagagatcttattgaagagtcattcaatctataagctgtgggtcatgtatnaacatgttctataatatcgacatatttagaatacgggtattaccatattataagaaaccggtaattccgcaagaataccgtaaatacggaaacgatccgtataacagccaaatcaantccattttcatatcatatttttacaatctcatttttgtttccggcaataccattttcatatggctcggccgggataaaagtcaaaacaaacccccggccgccggtaaataccgtaccggtttcacccc

SEQ ID NO: 33088 - DNA, 376 bp, Oryza sativa
ttgtacgcagggcatgcaccactgttgtatgtgctcttatcttagcaatctctgtgactctcagaggaattttttacttgctttctctgtgtaattttatcctgtctgtttggcttctgaattttgctgccgtgtttattccagctttggaacctctcacagtgttgatgcaataatattgctcttatcagagcatctagctatcttaggtagtctctttttttcttgtgaaataattgagttgacaagacaagttggcaatgctaaaacagttgttagtggctgaattagcatacgatggtcacagttcatacctcggtgcacaaactaatgtcgaatcgctcgctcacgtatgctttattagctagtgactact

SEQ ID NO: 33089 - DNA, 397 bp, Oryza sativa
agcttggaggtctcccgacgtggctgatccctacgggctgggtgatccgggttagtaatgtcgtgtgggtaaagtgtaccccctctgcagaggttatcaaactgttcgaacagccctgcccacggtcatgggcggatgtgaggtgattcctagcgtagttttgtttgactactgcttgtgaaattgctgttgtggaaaggggtgcgatgattgaataatctgtagctgatggaatcagctaagcccgggtggccgtttgaaagatgttggcccgggtggccgtttgaaaagctgttggccgggtgccaaccttgattaaaatctaaagactgatacattgcacatactccgaccggacgagacgcactgtttcatccgtgttcgttgagaaacactc

SEQ ID NO: 33090 - DNA, 456 bp, Oryza sativa
  unsure (1)..(456): unsure at all n locations
tgcggtcaatatgcctcatgtccttaggagtaggtattttaagctgctcaacctgcaaaaaatatgaaaataacataaacggaatgtcaaaaacccaaaggtacaataataactattgaatagagcataacagtggccacatcagtataaaacattggccatatgaaagccctatcctttgccagcaatgatatgaccatactttgacagggttttatacatcagcaaaaccataatttaaccattcaatttcgtagcaaaacccttctgagtatctacttgtgttcagtcaagcaacagagtttacatgactatactgatgtatttaaccaaggggaaaaagttcttaccaaataattgatcatattgattgacccaacaaatggttcgattggacaatcagaatgttgccttgaaaaaacactntccaagtacctgtgaacaatcgtgaagtta

SEQ ID NO: 33091 - DNA, 422 bp, Oryza sativa
gcttcatgctctatcactaactgctaggacagacaattgccccataatgcttgaggtaatcataacatatcattgtgctattcttttaactgtcattctgaggtactcaacgtgtgtgggtgcagatttatcttcaaatcttctttgtactgtaaagttcagatgtcatacctgactacttgcatgttgcagtcttttgtccaagacgaatccaacatcaggattgccatctattcaagtaatacacggtactattcctctcattgcgattaactgctactttctatgacataaattatgcattggatcccaatcagtggcactaagttttatgttgactgcaatgccttttctctgcagttgctcactgcaattgctttttgtcaagcctcattgatgtattcaacaagtatcaatcgctg

SEQ ID NO: 33092 - DNA, 469 bp, Oryza sativa
  unsure (1)..(469): unsure at all n locations
tatgatactcagcttgtaaanatcattgggattcattgtaaatatcttcaaaaaatcaagttccaatctacatgtacaaactgggacaaaaatacaattaatgaacatatataggggcaaatgtgcaaaaataagtgagggtacaaatgtctttttgaaaatgacttaacaccgctaatttgaccatccaaagtaggggtagaatgcggtttcgtttgaaaaaacaagagtaaaaagaaaaccctaaaaaaacgacagcaaaatcaatgttggacattaaagtaggggaagaatgaaattgcctcaaagaataattagatgtgaatgtgatcacccgtgccaaaactaggatttgaacccgagtgggctggttccaccagaagaaatctaaccaattgagctacacttacttcaaacatnttgattntttattagtatacttctttgaattaaataaattcatagaaaa

SEQ ID NO: 33093 - DNA, 433 bp, Oryza sativa
gcatgcactagaatttataatattgatatgattcaattacaagacaagcgagcatgctgtactatagtgctactaattgtacaatggctgaaccggcctggatctggaggcgatattggtgaccagtcttagccacatttattgactatgctaaactcacacactccattgatctccttctttgcaagttgcaagtatgcaatgctaaaagccacaaaatcgattgacaccatgatcattcaccactacaacagtggatccaaccatggagattttaatggatggctcaccacacatcccactatatgtggtcagggataaactatggtctcctaatatcttaacatatttctcaccgatagtatggttaaggcctgtttagttcatataacaacaatattcttccttgcacatcatacatgtctggagtatt

SEQ ID NO: 33094 - DNA, 446 bp, Oryza sativa
  unsure (1)..(446): unsure at all n locations
ntgagcaccgcatcaatcgctcttgttattccattcgagttttgggtcctttgggtgacctggatggaaggcgatcggaacctctatctctctctctctctcatcttgtttgttatgtgggcgactgttcttgccttcttggttggggatgatcatacattcagaccatcagatgaatcgagttctttggagagcagttcttgatttatttatttattttgcgctacgcactatatcggaggggttcatatgattcttggatcttttgggtgatttgatttgatctttgttcttcacatggatgaaacgagatttgtgtgtgtttgagcctttgccctttgcttctctgtctgcggaagaagatactcaacttttccccttcacttgtgcattttttctcagatcttgtggtagaaagaaaatcttgttgcagacttgatctcttt

SEQ ID NO: 33095 - DNA, 476 bp, Oryza sativa
  unsure (1)..(476): unsure at all n locations
cgtaccggatccttaagtnacctgacgctgcagcttttccggcagagaccccatctgagggtttctaatgctaagatccaagctccgcagccaggaacaagcaaatcctgccacaaatcgatcccagactaaaagccgtaacacgcgagaaacgcctatgcggtcacccacaagccaaatctatgccaaaaaacaccaaatctgcgccggaagaaacgaaatctagcgcggaatctggcactccacagcaacaagctcaggatggaccttacgagaccttccgcgctcgatcggagcaaaggacacggccggatcgagcctaaggaccgggctcgaaatccttgcttcttcgagggctaaactgcaaaatcgatatgatgaaaaaaataaagcggagagaagagaaaagcaggagggggaagcgcgccttctttagcacggggacgcctttggtatgtgcgactcggacagttttt

SEQ ID NO: 33096 - DNA, 344 bp, Oryza sativa
  unsure (1)..(344): unsure at all n locations
agcttgtaactgaagcgagtcatgaaaccggcgtgttataacaaacggaaactttatggtgggtgtagagaaangtgggaacaaaaacggaaggaaataaaaagcagaggcttgagatagaacaagggattgatggatgccgaattctaagaagaagacgaactcgaaggagatgatgtctctaacctggcgacggagaaggaccatggggtgatgagctgatcctcggtggccctgtcctcgccgtacgtgtnctccacgccgccgccggccatctcttccgatcctcttctcttctcttctcctcaaaattcaaaaaccaaacgatcgaacgaaacgatcga

SEQ ID NO: 33097 - DNA, 444 bp, Oryza sativa
cgcattgctcaccggccggaggagacgtcattgttggctggttagctacttactccgtctcaaaataagtgcaggtttacactattcacgttcaacggttgaccgtttggtttatttggaacttttttattagtatattttattgctattagatgataaaacatgaataggattttatgtgtgactaaatattttcaaatttttcacacattttttatataaaacggatgatcaaacgttgggcacggatatccacggctgcacttatattgggacggaggggggaattaactagctgtctatccatgaatccgcacgatggaattggcgtgtgtttcatcgtactttgcttaaagccatgaactgtttgaataacacttgtgtggcatgcacgtggtcatcagttgatgatcactgtactgttgatcgcacgcttgttgtatt

SEQ ID NO: 33098 - DNA, 433 bp, Oryza sativa
  unsure (1)..(433): unsure at all n locations
agcttgctttcgctccatccactattgttatggttgttgctgctgcaaaaagtaacctatccgtgtcatcacagggtgttcccgaccccacccatgctttttccggtgatctccactcgttccaaagccaccacagtcataaagctcttgcaaatttctccaagttcagaatgcctactcctcctgaggctgtatggaggcangtcccgtgtccaatttattttgcacttgccccctgtcagagcttcaccgcttgtccataggaactttcttctctgcttgtcgatgacctctagggactcttttgaagctttcaggcccatcaaaagaaaataaggttgtgaagtgagcaccgatttaaccagcgttgatcgccctgccaggccaatatgtcttcctcgccagctagctactttactcatcgatttgtcgt

SEQ ID NO: 33099 - DNA, 444 bp, Oryza sativa
  unsure (1)..(444): unsure at all n locations
ctagacttcagaaatagttagttggaatggagtaaaacaacttactcccactatntcacattaattataagatgtttcatattttaaatagatttatgtatgtattcatgtatgtgcttcatatctatatccaaatttatatgtgtgttgatgattctagacaagagtgttgacgtttgatgtcgcgattctggtatttgcataatatggggatcgttggtactaggatatatgcgagattgaggtaaaagagacagagatgaggatttttatacaggttcgggcccctgaattgtcaggtaataaccctacatcctgttggccgaaactggtcgttgctcttattcaccataatcacaccagtacaatatctggngtagcctatcntaactgtgtcgacttggcgacctgaagtatcatcacgtagtcgacaacagggtagtc

SEQ ID NO: 33100 - DNA, 357 bp, Oryza sativa
  unsure (1)..(357): unsure at all n locations
agctccataatttcttcacacaagaggngaggtcttgccacaatatctagtgaatctatttaggtgattacatataaatcggaggtgcctaaaaggtgtgcaacttcatcctccaaagtttttntttgtcatattacatttgcagctatgttttacacaacttcttgtctccaaaatttagatgtaagttgatgagagagaaaatctgtgtggtgaagaaagaatatattcaaatcttagttgatttgctaaagaacgtgttataaaatagttgagaaggagaactatattgaaagttaatctttataaatagagaacacacttaaatgaaatctaaagaagttaacacattaaaat

SEQ ID NO: 33101 - DNA, 442 bp, Oryza sativa
  unsure (1)..(442): unsure at all n locations
gtcgaacatcgggtggaaaaatcctttgtcacttgtcttctttattttgtgcaaatttactttaagcagagtttacaaactagagcttatttgtgttattaccaccctaggcttgcaaacctcaacataggctaccttctttgtgcacttacttgagactagttgatttaggttttgaattgtgcaaaaccgctttgatttacgcttcctcatacaaaactctggtttagccaaaagttttaaaaccacctattcaacccctccccctctagtcggcctccttgatcctacaatctctagtcccattaggtgttaccaactgggactaaagatcatttttagtcccaatctattttttgtcaagctctgttaggccgccaggggtctctagtcccgattgggacaccaaccgaggcttaagatanaattcatttttatactt

SEQ ID NO: 33102 - DNA, 277 bp, Oryza sativa
taacttgtacagaaatgcacatatttacttcccttccaattgaggccacttgacacaaacactatgcgtacacacttgagcgcttgttacacatctaacacttgtgcgcttgatttggtaaatcaagttgtaaatattatctcatttcccgctaaaatcgagtaattgtatgttaatggctgtatcatttgtgtacatcggctctatcttgttgacctgaaaaaaccggctttgtctaacaacgtattttcattaatgagagatttacatattgcaa

SEQ ID NO: 33103 - DNA, 423 bp, Oryza sativa
agcttactccttttcttgtccacccgcatattcctatcataaaaaatatgtgatatactactaggagggcatagaccaaaagaatattgtattgctctccatataaagtttgcataatggcaattcatgaaaagatgttgaatattctcatttttcatataaaaacaacatcttaaactaccattccaattccatcttgctaaattgtctttggttaacataacccctttaagtaagtaccacatgaagatcttaatcttaagcggaatttttagttgctgtcatatgggttcacaaatattaagatcaatatatgtttgctgcgtcaaaaatattatcgaacagcctcttattttgaacaactgaacaatagggtctttttatgtggatcaacctgatcacctgaacatttgctgatagaac

SEQ ID NO: 33104 - DNA, 400 bp, Oryza sativa
  unsure (1)..(400): unsure at all n locations
gaacaatatgatatgcatgcacgctttctacttagngataactccagatgattcatatcatgcacgtgctaaaactggtgattaagcacatatgctagacttgtgattcatatttcatggtaaaggctgacttggattttgctaacacatacagacaaaattgttgcattatactacttatttacactgcattgctatcacaaaccaatttgtcgtttaatactatacaaacaaggaattcaatttcaaatcctctttatggaatgacaacaaatatgacaatgcactatgatgatgggtgaaaatcatgaaatttggcaaagtcatgattgacaattaagaaatatagtgtacagttgttccggacataaatgccgggaaggcagttaggctagatgat

SEQ ID NO: 33105 - DNA, 341 bp, Oryza sativa
ctgctcctgtatacaaccaaatagccgttgatttggccatgccaatacgccgtacgcgcacacatgagcggattactgcataagtctcggagataacacggggggatcagtgatcaactgtacgcgtatgaatacgtgtcacgtgtgacaacttgtggttcttgcgagaattctctttagagattattggcattttgcgaaagaaaaaagaaggctcataattatagatttggttggagatcagcgagatattagtggtggtcgttcacacaaggcggatgatctattctaatcatgctgacttatgcattggagaaacaatgtgatgtgaacagaggcga

SEQ ID NO: 33106 - DNA, 471 bp, Oryza sativa
  unsure (1)..(471): unsure at all n locations
tggccactgcattggccattaatttcctgggtgttatatatgtgtcatgtgaacccactctacctaagtatttacagctagatatatagcttgatctggctaaattggctcagtggccaattaattaagtgtgtactctntattgtctcgtccgaacacaactacttgtatgtccagttgaaaacagtacgtggccatcgtgccttgcaccaaggtatatattgttgggtatttggttttctctccacgcttgtatatattggagttatatcacaagctagtgtgtatctcaccttgcaaatttgatgttatctgaagccacagaatttgaaataacaacaatgcaactatatgaggcatttcataagaaaaagctgctcttattaanattattcattccccatagaataatccacaaatattacatatatacagctgtgcttttgatatgtnttctgtgagatattgtat

SEQ ID NO: 33107 - DNA, 426 bp, Oryza sativa
agctttctctgtcaaacataccacccatccacttgtcttgactgtcctgcacaccgcagatagctgcacgagcatcacatgaattctcagggaagtatgttacatgtctatccggtgggtcaagaggcttcatgatatgaagaggaccaccaacataaggaggaacatagctgagccatttcaagattgcagaaacaccttcaaggtcatctgacacagtcagatggacgacaccatttgtagccatgattttggggccacctagttgcatgtgagagctgtatacctcccgccccagaagcttattcagcgcagaaaatcctgtcaaaataattggctgatcaagacgctgtatacacctcatgcctaaccgagcaagataagcaccaattccaacagcgtcgtcagttacgaatgtcagagtaa

SEQ ID NO: 33108 - DNA, 498 bp, Oryza sativa
ctaggagttagtgtgttataactctatagtaagaaaagattaatatgtattggatcattaagcaaacttacatgctccctctgtaccaaaatataacaatatctagtctctagaatttgtcccaaaatataacaacttctacaccaatattctcttctcaaccaatcacaatcctccaccattcaaatttctcacatatctctacttctcatccaatcataaccttgtgctattcaattctacctattttcttagtaaccgtgcccaactctaaaaatgtttatattctgggatgggggagtatatatgtcttagaaaatatccatagatttaattagttatatcaatattttctagacgtatagaccatatatatgtaggtgcatgtgggttgataactagctagtggtggcaactacatatgcgtacgtaccgtggcatcccaaatataaaacaatcatgtaaactagaagactgaacagtttttctaacctattg

SEQ ID NO: 33109 - DNA, 310 bp, Oryza sativa
agctttctctgtcgaacgatcgccccatcttcttgcctattctggcctgcacaccgaaaatagctgtaagaacttgacatgggatctcaaggaagcatgtttcaagactattcggtggggcacgaggcttcttgatatgaacaggacgcacctgtttatgttgaacttacttgagccatatcatgagtgcacaaactccttcaaggtcatacgatactaacagatggagtacaccaattggccccatgatttaggggtcacctaggagcatgtgagagccgtttgccttccactccagaaacttatttat

SEQ ID NO: 33110 - DNA, 191 bp, Oryza sativa
tcccatatattataatttctacaacaatattgttttgtcaaccaatcacagttgtacacgatacaaatgtgcgagatatgtgtagctttgatgcaattataagcttgagctggtgaattgtaccgtattttttagtagccgtgcccaactgtaatgatgtttatatggtgggatgggggagtctatatggt

SEQ ID NO: 33111 - DNA, 371 bp, Oryza sativa
agcatgcaagcttagcatttcattagaattctataataaaatagattgggtccacagattagtctcaggccactatgcagaaaggcctctagggtttcaggaaaacaagccgcagacctaggtccatatgtcattgagtggaaacattacacattgaaccttaaaggtgtttaaattctcaaaactaagtccctgacttctttttcacacgcataaggacagagcaaccatggctgagctcgatcccgggctcaccggaggcgattggtggctcggttggagttgggggtaaaagataaaatgaacgagcatgttcttgcgattccaatcctctagatttcttggttaggggacatcggagtaacgccagc

SEQ ID NO: 33112 - DNA, 456 bp, Oryza sativa
tgtggttgggatgcaccctgtgtatacaggctgacggagctcgtggctcctcaccgggagaccgcgcaggcccccctttgccggttcggccgggggcttatggtgagatctcaagctctctctgtgtgtggaaagatcgcgtgctatgaagaaacgcgagacacaagcgatgtatacaggttcgggccgctgagaagcgtaataccctactcctgtgttttggtggatctgtgtatgaaggggctacaaagtgtgagccaacctctccctcgttctaggctctgaatctggcaagaatcaatccccccctctatgggcaaggtcctccttttatacttcaaggggataccacatgcacccttctctttccaaactggactgttctttttctcttgaatgggcggagatcagcacgggtgctgtccgaacgacgcttcgatgggacagcccacacct

SEQ ID NO: 33113 - DNA, 359 bp, Oryza sativa
ataagcctgcatccgcccctgaatataaacgctgcatttgtttcgcacgattcataaattttctaaagcctatttaaacacttatgatcagttatatcagatcaagcaagattgatcgtcatgttctccttgggggccgcgcacgcattgtgcgaagctccaacgcatcgacgactgtcgatggtctttttcgggtcaaaagccttcataccttagtggtcggcgaggccttcgtcttcttgggtccgcttctttcttgtggtgggcgacatgctcttcggttgtttctactgatgaagtctaaactactcgctgatggggtgcggcaacgctcggcaaccatgacatgttgcagtctc

SEQ ID NO: 33114 - DNA, 322 bp, Oryza sativa
ttctgcatattccctataaaggtatagaataacctccagggctacactggagatctttaagctggaagaagttccacagatggctcctatgaatgcaggaactcctatagttacacagatgggttttagtagtccgtaactttggaatgatcagtgcagggactcccaactcccaagatgccaggcctagcagatgacggttctatcatgcaactattttttaattgggtgaaagattcactatagttaaatctaaaaaacaaagtgcagagagttttaatctgtatagtaagtactccctccgtttcataatgtaagactt

SEQ ID NO: 33115 - DNA, 318 bp, Oryza sativa
agcttgtcctttttagccatatgcatatgtttttcatattttagagctggtgcacttcatgtctcatgtcaacgcatcacttgtcgtcatttacaaaaatgcgtgttgctttttgctggaagatttccaggctgaagatactatgataaaactattgttggtcccaaggagaagtgtatacagatactaaactgatcactgataataatttcttttaggcggaactcctgcgtttggtttaacgactgctggagtggacaaaaaggtgaaacttgggttagctcctaacgctatttcaacctgaatgagtgtgggtgg

SEQ ID NO: 33116 - DNA, 495 bp, Oryza sativa
  unsure (1)..(495): unsure at all n locations
tgtatcctctacttcttcttatccaatctgtatggtattttttttcatgagattaaattggatttgattgctcttgagataattgagttgagaaacgtcaggaagcggaagcggaagcggtgtcgagctgtatggaggatgcgacgtcctgaatccgttttcaccggcgttcccgcgttgccatcctattcctagctcgtcgtcaccctgtcccttgtacgcagctagcctatgcgaaggcaagggcgacgccagagcagtgagggtgcctctggaggccgttgctagctccactggatctgagcccctcggtggtaatcattctccctcagccatccatgttaattgctggacagacagggccgtctatatgagattgtggcctcggtgtgaaatgcagagtgggacctataaatttaaanatcatatctaatataaataaaatatattttcacttaattatatagatgcaatatgtgttctaatattacgaat

SEQ ID NO: 33117 - DNA, 387 bp, Oryza sativa
agcttagccacgccacgactataattgtgtatcaatatcatatgatgcatccagttaaacatggtcaggccatacgatagaataccaagtatgagcatattacatgagtagaaggcgaacacaaatctgaatttgcactaaaaaaggaggacacaaaaaggaccatgaaaattatagataaatgctggttgaacaaacgatattatattgcttggctagttgcctagttggatgaaacatagacgcattatataataaccatgtcattaacagaacaccttagttgcaacttgcaaatggcagatttagaaactgacctgcatgcccacatagagcacaagtgaattaacaagaggtacattgtaacgagtcccagcaatatttgct

SEQ ID NO: 33118 - DNA, 477 bp, Oryza sativa
  unsure (1)..(477): unsure at all n locations
tccattatctaataaaaagaacttgtggaagcaccaaagaagaatgaacgtacctaaaagcttctgaaaattgttgttggatggcctacctctcttgcacctttgtactgatgtgagtgatgtgctattgatatgtacagatcctaagtaacggaaagttcagaagtgttgagcacagggccgtgataaacccaaataaggagcggatttcagcatcactgttccactatccgtgtgagaatatggtgatcagacctctgacggaatttgtgaaagatggtaaagtgaattacagatcaattagttaccttgatttcatgacacaattcttcacacaacagcttgatggaaagaacagactggagatgttgaagttggaatagcagccatgaccacgatgcctgtagtagtgtagtgaaatactgagatgaagctgcttcaaggctgtgtccttgagatntgctgcttattatatct

SEQ ID NO: 33119 - DNA, 420 bp, Oryza sativa
agctttattataaaggaattaaaactgcgtttgttctgatctgaattaaaaacacttaaaagagcaagcaaacatccttattaagacagccatatcataggcacatgatatcgaccgtgaactgaccccaaacaagcaacctaaacacacaaactaacaactagaaactagacaatcgataaactaatgggaaaacgagcctaatgcttggaacggctcctgcggtcggtggagtcgaaggcgttctcctgctcgtcaccaggtccctctgaacgactcctggagcctgacagatcagtctcgccgctgccactgggagtaacaaacaaacaaccttcggtaccactggctggtcctctggcggctgatgctggaacgaaagagagagtgaacgcgggaactggagctggagctggagct

SEQ ID NO: 33120 - DNA, 354 bp, Oryza sativa
  unsure (1)..(354): unsure at all n locations
atactacttgatctttttctttntattttagccatcgaaccaatggtactttctgtcacacctcaattagccaccgtcgtacaacggcacctgacaggagcgtgtcgtatgaaaaacggtgcgaaccgctttctacgaaaccgcaatctcagtaccagtcctaggatatagcgctggtacccacggtgataaatatgaatcattgcaatccttaaattaaatagaggacttatttaccttaacttaggttacagctcagaacagcccgagaatacaaccgacgacgcggacgaggaaacaccaacaacaacaacagcagcagcggaaccaacggtctaacacccaacaccacag

SEQ ID NO: 33121 - DNA, 418 bp, Oryza sativa
  unsure (1)..(418): unsure at all n locations
agcttcaacttctaaagcccctatgaagtatataatgactttngatatgcttttggagaagtatgagaagcaaggtggtgagagggctcgcaacaaaggaaaaagaccaagatcacctcctagggagcgatttggtcattcaccaagacggtcacattcacctccatatcatcatccacaagacatgtcatggggttcttattcaatgccaccgccgggttatccttatccttattacatgccatgcggggcgacaccgccaatgttcaatcatatgcctccaatgcaattcaaccaagggtggtgaggaccgaggaggccaattcatgagcgtttgttttaccaaacaacggccggttttatggtaaaaatcgggctaatgaagaaaagagggaaggaaagtgcatcaaggtggacg

SEQ ID NO: 33122 - DNA, 465 bp, Oryza sativa
  unsure (1)..(465): unsure at all n locations
tgccgatgttcatcccgacatggaaagcgattgctccatcaagctcggcaatgctgaagtatacaacaaggtcgttaattctctacaacgccacagacatcagccctttggtcgcgtggtacctcgcgcaccacctcgccatgtcaccggcatcgccacgaatgcatcgcacagcctccaccctacgcctgtgtcgcatcgctggtggcccctacatgcgctgtcagccgacgtatgctgagtcatcttcacgccctgactcctcgaactgccgcttgctgcccacatcctctctatagcgaaccgaggtttgaggccctagntttatgcgtgtaccgtggtattctcatgatcagtcgctagcacactcatttacaaagttaataccacatccatacacatataatatatacgaatgacattagttacatgtaaacataatatatgtcacgatacaacatcaca

SEQ ID NO: 33123 - DNA, 453 bp, Oryza sativa
  unsure (1)..(453): unsure at all n locations
ntaatgatnttgctaattctgtgacttctgtcctttgctgaagcagctcagcttctcttttggagagctggacagcatgaatatcaacctgcaaaatattattactctaatcaaactgccaaaattaaggaatgcacctccacaggtaactggatttttataaataataattaacagtaagggaattgaaaggacttcaaattttaaattaagctatgtggagcataatattttataaacaaatacagttaaatataaatgcaggtcaagatgaaagataaacctaaagaaaattatgctttacgtacagaatacaaggaaaccaaccatagatatagagtcctcaagttcagccttagttntgcctgtcacacggcctctcagtgactctaatacagtctttagattcttcagaaggatatcacgcttcaacanagccacttgtcttcattt

SEQ ID NO: 33124 - DNA, 328 bp, Oryza sativa
  unsure (1)..(328): unsure at all n locations
tgaaaagaaacttatcggtacggatcataggtctccaatataaggcccagcttcttgctaggccgcttggcctggcctatacaaaacaaaagcctaagacgctcccaccctanaaagccgcgttcccttcaagaaagcgtaaaagtatgcggctgaaactacatgctcgcttgtgcttcacgagaacgtagagccatgcggatccgtgtagtattactgtagtccactcctgcaatccacccgccctctggtttgtcaaacttctgatctccccttcccttacgccgccatgctgtcggtcggtagccttaccgacaagcagcttcac

SEQ ID NO: 33125 - DNA, 371 bp, Oryza sativa
tatccttaataagcaaactgatgtattacttactgatgtccgaacacgaaagccgagcgttgatagcgaacagaccattgcatagaagctacccaatgaaaattgcagcccttatcatgcaagaaagatcactgactaagaaactaattatatgcacgaatgagctaatctaaattagtcctgattatatacgaccgtgctggtagacactattacagggatgcccctctgagacgtcttcttcagatcagatgaccgtgttcttagccctcacatgaaccagcagctagcctggagaccatgcaccacacatgttattttggtcagcccatcaaggatcacacgtacgagacatccctcgccccaatcaa

SEQ ID NO: 33126 - DNA, 359 bp, Oryza sativa
ctgagctgatagcttgttgtccttacctgaggatgacttatctgtactctaagagggtccatacatcgcctccaattgctgctgaaattgattatgattatggcttcctctagaagcccatgggttgcatagaaagaaggcgcttaatcttgcctggcagctaaaagcttcttccgtctcatggagtagatgtgtataaatttatccctggtgtcattcggctgtcagtatttgcaggcattacagtgtattttgatgcttgcgtgtttcattgtaaaatttgagcccatttggatcatgaatcatataacttggaattcataggtagttatgaggaataagttcatctgaggtccctt

SEQ ID NO: 33127 - DNA, 402 bp, Oryza sativa
agcttacttacaagcgcgacatccttcagtatgaatttgttattgaccttgattgttcctttagccatcatgcgtccactgctcgcatccccaaaagtgatggtctcatcaccggatgcacgagtgagagaagtaaaccacttggcttcaccggtcatgtggcgtgagcaaccggagtccacaagccaagaataacttctccccacttcaaaatcctacaagaaaaacaaagcaaatctcgatgattcaatactggggttagtgagaaatgacttatgaatccagtactgaaccatgcgaggggtacaagcatttttagtgttatgagcagaattatatgcaagatgaccatgtctgttttgccccaaccttgctaagtcacgtctagggtgcacatctcgg

SEQ ID NO: 33128 - DNA, 182 bp, Oryza sativa
actcatgcttatgcttctctgagaaggactcagttgactctgtgagtgcagtcatttcagatatcgcgcattttcctcttggcatagccttcaatactgaatgtcgcgcctgttatattaatgcactacatatcaactgccggtaataatgaatgcacctctctgggcaaacgtgattctac

SEQ ID NO: 33129 - DNA, 420 bp, Oryza sativa
agctcgccagagctaacagctcactatcatcttgtttaattcagcctctgtttcggcattcctccctccgtttcagaatataagcaattgtagcatttctcacatttatattgatgttaatgaatctagacatatatatctatctagattcattagcataaatatgaatgtaggaaatactagaatgacttacattgtgaaacggaggaaataattccttatgcgtatatcacaaaatgtaacagtgcgtttaatctgaatctgaatctgatcttattgcacatttgttttgtctgttaacgatcagttgcatcggccgtgagtcagaaaggctaccttttgtgtaggagttggaggctctgtgcctaacgttttgtcataattttcagagagcaagtgctcatctcttgaatcttttct

SEQ ID NO: 33130 - DNA, 485 bp, Oryza sativa
  unsure (1)..(485): unsure at all n locations
nggacaagggtttacatcggccgatccattggaagaagtagacatatgtgatggaactaaaccaaggccgacttttgtaaacaaaaacataagagccgattataaggttaagataatcaagctacttaaagagtatgttgattgctttgcatgggagtaccatgagatgccgggtcttagccgtaagctcgttgagaatcggcttccaattaaaccggtttttagccttataaacaaccacctcgtcgttttaatcttttactatatgaccgagtcaaagaggagattgatcagttgttgaaggtggggtttattaggccatgtcgttatgcggaatgggtttctagcatagtcccagtggagaagacgggagtggtaagattcgagtttgcatagattctagagatttaataaagccactcccaatatgagatcctatgctatagccacatgatgataatgatgctcggtcataagtgatactt

SEQ ID NO: 33131 - DNA, 426 bp, Oryza sativa
  unsure (1)..(426): unsure at all n locations
agctttagaagcgcgcggctgttagcaaaggccttttgatggggacactgngacagccgatcctcgcaaagtccaaagatggaacaagttgtgctgctacacagagccatacaagctcgctcgacagcttccatgaaagtatggaaccacggggctgacatgagggcccgacgccatttcatgtttcagacttatcagctgtactagtatttctctattaccttagaaaaggagccattatttttcttcccaaccattgcacttctttcactcataagataaggaaacctggctgctggaaaactcacaaaaaaacgagacgttcccacacgaaattgatcagcaaaagatgaaaaaactatacctcgtaaaaccatttgaccatttttctttaaacgatgctgtggtgctctctactcataatat

SEQ ID NO: 33132 - DNA, 475 bp, Oryza sativa
  unsure (1)..(475): unsure at all n locations
tgcgaccctgtaggttcatatatactcggttgtaacctagatactcattttcggtccacgcgtcaacagcggcccctagcagaacgtattgacccaccgggtatacataaagatcatatcggctgaacctctagtgtatacttgtatgaacccctttgcctcacgatatcgattgagctcaaggctaaatatgtgacattctctaatagctcaatcattcactcgaacttgttgatagattatataacttgtgattgactcctcaatcacctttggcatggccatgcacttccataatctacaacatcgaggagcccagagatatctctccataagaggggcaaatcccatcttggatattcatatcccactacatgtttcatagcatacccgaagactacttttataactacccaattacggagtagcgtntagcagtccctaagtaagctactacatatgttgagaaccatga

SEQ ID NO: 33133 - DNA, 410 bp, Oryza sativa
  unsure (1)..(410): unsure at all n locations
agcttaagataccaatgcgagattatacttcttnaggtggcatgaccacaactcactactatccatccgtgacagatgaaattcaacggttgatttttccagccaacctcattcttctcgaatccaaggatctagatgttattcttggaatggattggctaacaacgcacacaggagtgattgattgcgctagccgcaccatcaagttgaccatcgcgaaaggagaagaggtaaccttctagtctccaataccgcagaagccagggatcagtctgaaccaggccactggtgaataacaagaagtagcagtggagaaaaccactaagaaggtggaggatattcccatagctagagattattcataggtgttcccggaagatctaacatcaatgccaccaaaaaaggatatc

SEQ ID NO: 33134 - DNA, 425 bp, Oryza sativa
  unsure (1)..(425): unsure at all n locations
tttcttcanaaagagggaaggtcatgccaaatattttatgtgaatctatttggtgattatatacaaatcggaggtgcctaaaaggttagcaactttatcctccaatgttttttttgtcgtattacatttggagctatgttttacacacttttttgtctccaaaattttgttgtaagttgatgagagagaaaatgtgtgtggggaagaaagaatatatagaaatttagtctatttgctaaagaacggtttataaaatagttgagaaggaaaatatagtgaaagttaatcttaaataatagaaaacaaactacaatgaaaattaaaagaagttcaacacattaatattagtttaaaactctaaaaatagtaaataagaaatatttggtggaataatttataattcttgtatgaataatgatatgtca

SEQ ID NO: 33135 - DNA, 407 bp, Oryza sativa
  unsure (1)..(407): unsure at all n locations
agcttggcgatggcgaacgttggtgaatttgtccatgcatcagagacgatgctaccgctgcgtggagtagatggagctgacatcgacaacgatgcggcggagccgcgtgtttgcctctgcggatgagaggctaagctcggggacacgtgaacacatcggctntngagcaactcgatgggggcgactatgagcttgggggataggagcttggcctacgtgacaaggccgaagccccaaccctcacacgtgcccgtgaagacgacattgcagttgtagttgggacccgagccacaccccgcacgtgcgcaagtccatgacgtgagcgctcctggtcattgggagccacgtcagctggcgtgctccgacgtaaagcttttaccacgcgaacgacacactcttcccaccca

SEQ ID NO: 33136 - DNA, 424 bp, Oryza sativa
agcttcacatcatcttcagtagtgtagcactgaagagtgaagacatctgaacaaatgtcataagacgcaggatgcaaataacaacaaagtgcatacttaactatccatcatagacagcaagatcttaagtccttgtctgccttagttaaagacgacagacaaatcaccaggcagcacacacaccaggcaatgcagtcatacactgacaggcttcaattcaagttcatcaaatcaaaagtatataattcattacatgaatgagcatagacaaaatggcaccaatgcttcaattcaagttcaccaaaaagtataattcattacttcaactgctcataaaacattacaactgaagaatgaagatgcctgaacagtgaaccctcaccatacaagtgttccaacacatcaatcaaattgcaaataacag

SEQ ID NO: 33137 - DNA, 393 bp, Oryza sativa
  unsure (1)..(393): unsure at all n locations
cggacactataaaactaagcttttcccgcaagccncaaaccctcgtacccctcccctagtgctctccagtcgcccggaacccgcaaatcccacacacttttcccccaaaaaccaccgtacgccgaggccccctcaacccaacccaaccccgcgtccttgccgcgaaaaaaacgttaacccacctcgcgtctcacggctgcgtcgtctcgtctcgtctcgtatcgcgcagctggacatgcaccggaggctggccgcgtactatcgatcggcatggaggcagcgggcgatgatgccgcggcggcggtgaggatgagggctgtggtgaagcggctcatcttcnggaccgcggaggagatggcggatgccgcggggaggtcgggaggctggctctct

SEQ ID NO: 33138 - DNA, 408 bp, Oryza sativa
agcttgcaggatgtggttcacaatttccttcacgccgactccatgtttcacctggaagcagtgtaaaataagcatgtgtaaatatggagctatgtcccttgcaattatcatcagcttctgttaattttcccccgctaaaaaaggaacaaatgtgtatggtttaatactgaacctgtgcaaagacaaaaggccctccttcccgcatgcgaagcgcatctcgttccattacagccaggtcagctccaactgctggtgcaaggtctgtcttgtttattatctgtgttcagaaagattgaaattgatcaaatggtaaatgcaaaagggtacaagcatatcaaaaatatcaacgtctttgatacacgtatgcatcgtaacagaatggaaaagtaataacacaccaaaagatct

SEQ ID NO: 33139 - DNA, 401 bp, Oryza sativa
cgtacctactgttctcgtcagacgacagatgaaactacgcgcagatttatcatataatcaatgaacaaaaaagaacatatgtacttagagcatccacaacgtgggacaaaagcaggtaatacgcattgaattcctccttctaacctgggtatatacactgtgaaagctggtattagttgttacctgttcatagcgtttctaccggcaacaagcaaataaaaaatgaattgtagtccgtcacaagctaacagatgtaccttttgtgcatggacccaccttattttatccttcataggcttatatacattgtggagcttagtaacaactactactacctaatcaatgggcccacgttattgctcactagtgaaataaacattgcgcgtgcccttagtactatt

SEQ ID NO: 33140 - DNA, 416 bp, Oryza sativa
agcttcgccaagtcatcgtcactgtggattttttgacgagggatatttcaactactttggatctgggaagtctaacctgaccagagtacgtgccccgacaagaacggaaccatcatcgtcgtcaacttggtctatcgagatcattcaagcctcaagctctgcgacgtaccaaaagatgtcagatcgcatgatatcgaacgagtacgcagcaaggtaattggtagagtggttttttaaattgatctactaatttcgtagatacatccggcatgtatctacaaagataagcaatattttatatgcaatttactgtacctatttagatcatacagcattgtcatatcaataatttattatgtttacctagagcatgttttttataccatatctattgacaaatggtcccgatgtaaatc

SEQ ID NO: 33141 - DNA, 355 bp, Oryza sativa
  unsure (1)..(355): unsure at all n locations
nggatttcagtatatcatgcccagatcgaaccacaatcagctaccagattatccagcgaagattctagccaaagggatatgtcttcaagtgttttcttgacagtgtcgaccaaaggggctagagccttgcttgtagtttcttcttctgtctcatcaaagtaatctttgatatcaaaagaaaacagatcggctaaggcaacaaaagagaaatttaaaggacaaagatgacaaacaaatatagccgatctaagacttggtgtttaaaagaaacttactgggatagcaggagtagctggttgtacttcttcttcaacatggtgactccctgcagctgatggagttttatcgcttgatg

SEQ ID NO: 33142 - DNA, 398 bp, Oryza sativa
  unsure (1)..(398): unsure at all n locations
gctattacggacactatgaaactcagcttctgggtgagaaagtagcacggatgagcaccaaatccacctaactccacaaaagatggttcttttgagggaatcctactaatttattcgacctaatctcacttaaacaaatgtaagtacagtcagtcagtgaaagcaacaaggctgagctgagctgagctgagatgactaacacagatacacataaacctaatccactgacaccattaaataacaaagggaagganaataaaaatcctcggaaggcgcacacaaagaacaagaagatgactgacacgcgtactagcatccaagaaccaagaactactaggctaganaaacacaagaaggattgtaaaacctttttctgggacctcacctccgatcacacg

SEQ ID NO: 33143 - DNA, 423 bp, Oryza sativa
cagcttatcataaagggcttcgacaaggggttttattctttctttgagcaaaaagataaagatcggatagattcgaaccgcaattgcaaaggtaatcactactatgccagcccaaatcatgatcttcaccaacttggatttggttctctcgcgaaaatcgcgagttgcagagatgagaaccatgaaaagcaagatcccgaataagaaaacagaaaccgaggaaaccacaagagtgaagactagtagagcctcgtcttttgtcattctttgctcctttttcactcaatgattcattcgaatttcccgaccaaaaattctatatgtctattcatagggcctcgttgctaagtgctacaagatatagtgcactggaactcgtggttatggacccgaatcctttagtatggaacattgtcttttcca

SEQ ID NO: 33144 - DNA, 404 bp, Oryza sativa
gcacgctcgacacatagatctagaggaaccctcttctttatgttgccaatatcaaaaatagaattataactacgaactcaccatgagaataaagctctcgtcaatcctttcagcattccttccctctaaaacataatcaatctcatcaaacatgtgcccgacctgtggaacataaggttcacaagctataagcaaactatattgcaatatatattaacggccataatatgagtaacctgggctagaacgagaaaacataatatatggcagatgcgactaaattgtctgaactaattatataacagatgtcttaatgagaccatctattattagtcctacaatacaaaactataatttggattgaatattgacatggcttctatgaattatttcgccacaaaaaa

SEQ ID NO: 33145 - DNA, 418 bp, Oryza sativa
  unsure (1)..(418): unsure at all n locations
ctaagcttaacgcctgaatccccttgatgcatatctggatctggatcctgcatatcaaatatatacgatgagtagtatctgatgtaaatacagtacttgagaaagattcaagtattaaaagtgtttataaatatgtatttctcctctcgtcaattatgatttccccgagcagatgactcattacgtttaaacactctgcctgactagtcatagccaccaagcaccgggagtcggcctaggcacttcccanacatgcatatgagtgacatgagttcgtcattaatggaacaaagtttcacgaatcaaaatttactactcgggtatttttgcaattgttaagagaagaaaataaatacacttatcttatctctatgcttttgatttattccgaatataatacttagcatcttgcgttact

SEQ ID NO: 33146 - DNA, 414 bp, Oryza sativa
  unsure (1)..(414): unsure at all n locations
agcttaccggatagcagctgggccagatggttgntgttcgcgccgacattttcggaaatcgacatttcattgtcgttgagaatcaccagcatatcatgacggatatcgcccgcgtgattcattcgcttcagacgccatgcctgcggtaatcgcgccatcgccaatgacacagacggtgcggcgatttttgccttctttttcggcagcaaccgcaataccaattccggcactgatggaggttgatgaatgcccgacgcttaatacgtcatattcgctttctccgggccactggaacgggtgcagaccgtctttctgacggatggtgccgattttgtcgcggcgtccgtgcaatatattatgcggataaaccttgagcgccacataccaaatcaatttggtcaaacggggtggtta

SEQ ID NO: 33147 - DNA, 407 bp, Oryza sativa
caagcaggcaagcccactaaagaccgaggagtatgacgtatacacttcattcaacgcgcacactacagaccgaggagcaccagacatgagatcgagatgaaacgtgacagcacaaaactagaaactcaaggcgtaacccattgttcaacctgtgcgtaagagaaactcggcagtccagatggaagatcaaccgtaaccggaccccacctaacacgtggtataaaacaaaacatcgaaacaggcaaatcgcagcgagataatgacaaacgccgggagaacgtagaaattaaaggaaaagcctaacccacgtgacgagaacaccttggaaacaaacaaaaacccacctcatgggagggcctcaacgaggagatcaggtaccaccttgcgtatactacgacaaggggacc

SEQ ID NO: 33148 - DNA, 474 bp, Oryza sativa
  unsure (1)..(474): unsure at all n locations
cgtccacctacacattgtgaganacaacactaggattatttatttatgcgttaattntggaatgagcatcacatgggctatcatatacttctctctcttcttctggtgtatctctcacactaatattttggatatactcaacctcacatttagtggaatcacatagcttactcttttcagcactctcactcaatttggctatgtggctctctttgtcacatgggttttctcgcatctcatcatgcaatgaccatgggccaacaatggcgcatttgccatcaacaatgatctgttgtgctgcatgcactgccgcaacatcactacatgtcacattagccgaagggaaagtaccatgcttgactatatactctttcttcttggatagcacatattccaatgtcctttgtttcctttctaccgacaagaagaaacatggttgatgcatcggcgaagtttatatgtttccttatgtac

SEQ ID NO: 33149 - DNA, 343 bp, Oryza sativa
  unsure (1)..(343): unsure at all n locations
agcttcncaaacatgtaacggtgtatctttattttatagaatctcaatcaaagctagaaaactggttgtccctgcttttttatgctctcacaactagatatccatttctcagaatataatctacaaaggaagatttccttagcttcctcgtagatttattttcgagtaaagtgtacgagcggtacttaaacttgtagcggtatagcatctagatcccccaaacttctatacatgcatattcaggccctataacttatcaaagcgtatcatctatgctccttaacgacccattccctcttggatcctaccaggcgcttatgtgaactgcaccatgacgggacat

SEQ ID NO: 33150 - DNA, 493 bp, Oryza sativa
  unsure (1)..(493): unsure at all n locations
tatccttgtgtcccagccacatttctatctggcgagaaactccaaatcaaagagcaagtaattgaaccctatgagctatcagatcgggacccttctttgaaatcctgcaggtagcaatggcagcataatattgttcgctaacggtgaagaatatggtatgcgcctcctttttctggaagtggtgatatgggcagtctgtatctactgaactacatgtntgatgagctgcatcctatttttgctcccaccacaatggagagtttgatctgtgcaagtctaggaaaactgtacatatagtacaattcactgcaccaactctatgtatgggctaaacagctctttcattgaaatgggaaaaactagataacgaaaaacaacaactacactttattcagttgttatgtggaaacccacaaatgatgaagcggaacaaaccttgtgctgtggcatgctaaacatgatagcttgccnaccgaatgacacaatacatgac

SEQ ID NO: 33151 - DNA, 377 bp, Oryza sativa
  unsure (1)..(377): unsure at all n locations
cgagaccagngttaatcggtttataaagaacgaaaccattgctaatgattaacatacttggcaaggccaaaatgatataatgcagtacgacattaatcctcggatgcatgtatacctccaatgaaatcaaagatttttctgagcgaaggtggagcaaatacatgtactggctgtattgttgtatcaagagcaccactatagtatttgagtcactacagagagctgaggatgaagctctacatatcaccatcacaaagaatgatgggaacttcacatatttgttcataatcatataaattctaacttctcaagtaaacttattacataccggacaatctcttatggatattttaaattgtaagacattgtgatggcat

SEQ ID NO: 33152 - DNA, 400 bp, Oryza sativa
tagcattggagttacgaagtgacctactgtttatgattactaccaagcaccaaatttatagcacgtagatgtgggtatgtgggcatatactacgtctttatagaaattgatataccagtagagaatttgttagtaataattttcacgacctttttgtttaatgagagcaaatacctgtcgataaataacaatgtgacctaatgcttcaattgaatggctagaattactcgagaagacgcatgttaatcataaattcgttagagaagaaatgtttgtttgcacggaaaaccttaaaaaagacgtgagcaccatagcatttcccttgaaatactatcacataatgttataactggctgctagcctgcaacgaaccgtcattgcaaccaaagtgctcaaataa

SEQ ID NO: 33153 - DNA, 404 bp, Oryza sativa
  unsure (1)..(404): unsure at all n locations
cgcattaaacacctaaattcccatgacttgctgagtacgattgttctcacccttgctctatataaatatatatatagttcctctgtcttgaagcgaagatgaagtgaagtgaagattagggtatcgtcctggtccccagccgtcgcctgtggtgttgggtgttagaccattggttccgctgctgctgctgttgttggtgtttcctcgtccgcgtcgtcggttgcattctcaagctgttctgagttgcaacctaagttaaggtaaataagtcctctatttattttaaggattgcaatgattcatatatgtcaccgtgggtaccagcgctgtgtcctgngactggtactgagatcgcggtttcgtaggaagcggtttgcgccgtntccctatgacatgctcctgtc

SEQ ID NO: 33154 - DNA, 402 bp, Oryza sativa
agctcaccggagagcaggtgcgccatatggttgttgttcgcgcctacaatctcggaaagcggcatatgaatggcggtgagaatcaccaccatatctcgacggatatcgcccgcgtgattaatcgatttaaacgccatgcctgcggggatcgggccatcgacaatgacacagacggggcggcgattattgccttctcttttgggagcaaccggcaaaccaaatcctgcactgatggaggatgatgaatgcccgacgcttaatacgtcatattcgctgtcgccgcgccacgggaacgggtgcagaccgcctttctgacggattgtgccgattctgtcccggcgatcggacaaattttatgcggatagcccgagccccactcccaaatcaattggtaaacggggt

SEQ ID NO: 33155 - DNA, 389 bp, Oryza sativa
agcttctcgggttcttgggctctgtccgttgtatctaggccaaccccgagaagatacgagctatatagcggatgcgcccccccagcaagcttaaggatgtgcaatgcgtcaccggttgcatggccgccctaagtctgttcatatcgaggctgggagaaaaggcgctacccttatttaagctcctcaaacgctccgggccgtttacttggacggaggaagctgaacgtgccctcactcagttgaaggcgtatctcagctcttccccagttctggtcgccccggagccaaatgaacccttgctactctacttagcggcgaccccgcaagtgggtagtgcggcgttggtcgcggagcgcgatgatgacaatacttattccgcgcacccccac

SEQ ID NO: 33156 - DNA, 436 bp, Oryza sativa
  unsure (1)..(436): unsure at all n locations
tatnntatcggaagcttatttatcgtgaagactgtaagccttcttatgctgcgttcggagataactctttctctccgcacggaanacggaatgatccattaacgcgtgattaattaagtatttgttaattttttttcaaaaatggattaatttgatttttttaagcaactttcgtatagaaattttttgcaaaaaaaacaccgtttagcagtttgaaaagcgtgcgcgtggaaaaagaaggagaagggttggaaaccctgagtagcaaacacagccttaattaatgtcaagttgttgtcctacaatactccctcggtccctcccacctatcgttgaccttcgtgattactctatggtaatggcacactccaacactccattatattatcggtctgatgaggatgaagtgttagcttgttcgtctcacccatatcat

SEQ ID NO: 33157 - DNA, 337 bp, Oryza sativa
gttcatgctctgccaggagaaaatgatgtggtaaaacgatttagagtatgtgactggccttggcacatccttctttttcgcttcctcatctgccttactgaaaagaagcaatggcttgtcggcacctgaaaaatggctatgtgattagcaacacaccttgcaaatattgaacaatgatttagtagattgagcacgccatcttaccaacacgtggtgagtctggggctgagagcacaagtgcatatgagccaacacggacagtcgaattaaccacagaaaggatggtgggtagcaatcccagcgaaaggcttcctatcgacacagctttggtatggtt

SEQ ID NO: 33158 - DNA, 419 bp, Oryza sativa
tatcagtcttgggtgacagcagtgattcagcttactcgctctagtgatcaagaccattcctggtcagacatgaacggagaaactctactgcatccattgactaccattagacgatcgttagtcccacactacctaattacattgtcatattatagtattttacactccccttttagtaaagttcacatattacttgtaatacttatgcgttatgattcagcccttcctgctattgtagctctgacgattgttagctgatctgtacttcaattcagaacttgagtaatctatgctatggcatataggggtgttgagcgtggttctcaaggtacatactatacaagattggcgaagatagttatgtgtgccacactgactcaagatcctagcaagctttctcaacttgagttgcaacatcc

SEQ ID NO: 33159 - DNA, 449 bp, Oryza sativa
  unsure (1)..(449): unsure at all n locations
tagtgcgttaggcatgcatttgttcattaactacaccactacggattcgtttttgactagagctttctacccagccgcccttgggttactggtcatgctgccatgtttgttccatctagggcatgcattctctagctagtttgtgggaatgcatctccatcctgatctcttattacaatccttagttgaataacgtttatcacaaggaactggaggtttgtcgtgttggtgttagctagtggtagagattaaatgttccatgcatgcattaatccctctgtataaaaaagaaaagttcagcctttctcattcatgtgccaagtgttttaccttttgtgccatctgtctttcttctgagaattaataaacaacagtgccgttggatatactgttcatngcctgtttggtgcatgactaagatgctatcattaaacttgatgtataactac

SEQ ID NO: 33160 - DNA, 344 bp, Oryza sativa
agcttgttaataataatcccaagcttatgttgtctattcatttatttgcgcaaataatgtgtgttcgtacttcgtactcacatgcaccatgcagcaacaaagtgcatgtccatcttttcccgacgatagactgcgtgaagatcagcgaaatcaagcgacaaaaaacgttcgtcggcaatgaaagcttcagccagtgtttgaacagttaatggcatgaggcctttcttgctggtgtacatgtaccattaatgtaaccttctcatctctgagagaaaattgagttgtggctatgcaataaagatggcttttaccagtacgggcttcctggtataattactagaagt

SEQ ID NO: 33161 - DNA, 438 bp, Oryza sativa
  unsure (1)..(438): unsure at all n locations
tcacttgcctgcgcattcgctattgcgaaggccctgcatcgtcgtccgctatgtgggggtttgcccgaggaggcaactcgccgttacaaacccggttcgcctgcccagacgcttgtcgtgttagcagctggctatactcgacgaccgatacgtcgccgatcatcctgcgggcttcggtttcagcctagtcgagggttaacactgcaaaagtaaaagtgtgtagccatgttaaaagtcagacaaggcaaaataacaaagcacagcagtatatagcanaagaaccgtcttactgttcgtcctctcaggaagaatcacgttcggcaaaccgtcaacctcttcgccttgatcaaccgtgacttgccatgcctgggagaggggaaagatgcgaagcatacagaattcctctaccaagtcatggcagctaaggcgggagcaaac

SEQ ID NO: 33162 - DNA, 299 bp, Oryza sativa
cgcttaaggaaaacttgctatatatactttctgagtaattccttttttgcaggagacaccttttttctagtcattgacgtgtgggacctggtttattgaaacaaaatcttgccgcatttatagtctcaaccagatggttgttatcgtgacctcatttataaaacttctcgagcgcgcccacgtacataggcccctcctacttccttcacttggatcatttaacgtttatgaattctcctccacccaatttttatttaactcttccccaaacttgttaatgtatttctcgtatttcgcct

SEQ ID NO: 33163 - DNA, 454 bp, Oryza sativa
  unsure (1)..(454): unsure at all n locations
ntaaattatgtagtttatatggtactgaatcctgagtgataacacctttgcttcttttcttgtcctcaattctccttccacctctgaaatttgatctatataagctgtttacgtaacttcttatcacccttttgtcttcttgtacaattagctacgagtctaatggtatgatagcacatatgtacagccttcctttntggttcctttcagagtggcatgcatttgctttttttggtaattcgttctagtaagtatttcttgtttaaatcttatcttgtgtagtgatcacacagagttgcagttgtgcttgaaaggctttgatttgtgatgcacagaatacaaacaagagttatacttctatctgntatntcttttgcctgatatatatatatttcttgattctagttgagtgccacaagtagtaaaaatataatactaatgggaattaaaacat

SEQ ID NO: 33164 - DNA, 155 bp, Oryza sativa
agcttcaatatttcttcaaaaaagaggggaggtcatgccataatttctatagaacttatcttggcgattacatacaaatcggaggcgcctaaaaggattgcacctttatcctccaatgattttttttgccacactacatttgcacctatgtgtct

SEQ ID NO: 33165 - DNA, 390 bp, Oryza sativa
  unsure (1)..(390): unsure at all n locations
ngatgaaatcacagtcgttagagtatattgcgtaatcgactattgctttctcaagggatgggagggtactgatctgccacccatcttcatatatttcaataataatcaaattctagatatttggagcctgattcctgaataaccatcttctcctatccaccatctttgtaaggaaacaacaccatcaggagtgatagtctttttagcaatatggagatctagccaacaatacttcaaatccttgtgctccttcttgaaagccaacatctgatagtgatagactagttagatttaagaaccctacgaagcatgttggaaaacctaggatgtcgcactctataagatcgagttgggtaagctcgcagcatgagaagatggagtggagaatgt

SEQ ID NO: 33166 - DNA, 408 bp, Oryza sativa
agcttgatataattatttcacataatttatataattatttaacatacatctctccaccattttctacaatatcctatatacattatacatcatcgccacttagttaatgttttctatcttctctcattaaaccacatcacctcaaatggttcagtcatttagatgattaatctataatccaaattattgtccctcatttttcttctctcatgaatccgcatcaccttacttttacttttggtattatcaatctatatagtatatatttaaattatcataaaccacatcaacttaaatggtttatagcattgtccaatgatcgaaaataatacaacatatataagcttacataatctaaatatatacacatattattactattatcatactaacttctgcacaacgcgt

SEQ ID NO: 33167 - DNA, 446 bp, Oryza sativa
  unsure (1)..(446): unsure at all n locations
tagatcataggtagctntggtagtgaaagggcggtttgttggcaatgtgtgacgatatgctatcccattatccaatacaaggatgaaagagaagggtgtggacagttccgtaaaggataaggattaggtttaccagagacgtgatgacagccatatgagctgtattgcagactctctaaggaaaatagctgtaggatatttgcccaaatcgatccattaattttttttctctgtcaaactcttgaaaagtatacataggtcaaacagtactcacacatatacaacattatttggtaattggaggtgcgcatatatatgttaatatgcttccggtaaaatttcagctaagcgtgtgattaaattctaaggacttaactcacacgttaatcttgattagacatgaacntactttatgtttcttcaaatgaaatgaatatgctactata

SEQ ID NO: 33168 - DNA, 317 bp, Oryza sativa
atctttgattagcctatgccatggctgctttcgcttggatataagctcctggcactgggcactttagcccactagccacatagtactatggagtatggacctgcttgaaagctgtagaattcaagggcccggactaacgagcattttggctcagctaactggcggcacttataataaaaaaattctattaatgcataataatcgggtcctataaacttaaaaatagaattatttgattttagaaaagccttttgggtagaaaacaattacatgagacaccacgtttagtaattccggaagtgtggtcacgaacaaaa

SEQ ID NO: 33169 - DNA, 394 bp, Oryza sativa
  unsure (1)..(394): unsure at all n locations
atgctataggacacttaaaactacagctgtcttattgaaacaatgtcccttctactntagccacatttagcttgagataacttaacctcgaagattctaattatagcaccagctcagtgcttctccccaaattacagctctgtgttgatcactgccatcatttgttctgagttaacaaaatgttttgacaaaagtagtagtacatctgtagaatttattttggcatatatatatatatataatataatgtgtgtttgtagttctttttttaaaaaaagtagatttcacaaaactacaactatttggtgataactatcaccttgttacaacttcaaccaggtctctcattgcttagagtgaattccgaagagctggctgtggcagcagcagcact

SEQ ID NO: 33170 - DNA, 411 bp, Oryza sativa
tgcagcatgcaagcttgaacctttgctcgtcccgattgattgacttaatggaacaaagactaggttgttgatcacgagttgctacgatgctgcttatcttaaagatacaggtgcaaggtttgtgtactctctatcagattaaataatctttggcacggtggcttacccttacccctgattcccacgagacactacctcttcttgacttatgcagttgaaagacagaacagcaatgagagcaccaatcacctaacctttatttaactcttattccggaagttttcaaatgatattgaaaaagaaaacctacttcctccaatgattcactcttaggttttaatatgtggatctcgggagggatcaaacatggcataactgcattccaattattactaagtcaagaacttagac

SEQ ID NO: 33171 - DNA, 384 bp, Oryza sativa
gagtccgctcaagatcttttactttttttggaccccctgtcgaagtgcacagcattgactgctgctgttttcatttctcatatgtctggacctgcttttggtgattgtctgtcagtccgatatattagcttgtaataatgatgtttataacgcatccgatgtgtgaaaaccatggtaatggtcaacacaatggtaccctgcagccagtgagttacttatttcctgatgctatcttctctgtacacccatcccaaattcatgatactcggctactcattgactcaaatgatttaaaagtactgcattgcgcgagtagcgaaatctggaagtatctaagacatgagtgcccatatattcagactattgatggcatacactacatat

SEQ ID NO: 33172 - DNA, 338 bp, Oryza sativa
agcttgtaaacccaaatattctcactgctattgctctttaccaaagaaacgaagggtacatgcgttctttgctcacctacttaatttgaatgaacagagccctagcccatattatgggggacggagggagtacatttgtgacaaataatccaaaggctctaggatgaaacaagagaagataaccaaaaatcctgtcctgaacagggaccaagaattgcatcttgcacttcagcagatgggaatcggaattcagacattcccagaatcccagcaatgaatgcgttgatatatgtcaaccaaaactgacctaaaaatcacctgccttctggccacaaaat

SEQ ID NO: 33173 - DNA, 400 bp, Oryza sativa
agctttatgtttctctgaaacctttcatttcgtccaggaaggagaggccctccactgacctgagcgcaacggctgaagatcgcagtagatgtcccgcgtggcctgaactaccttcattttgaccgagcgacgcctcatggaaaccttcaatgctaccaacatcttggtggacggacttgacctcaatgcccgtgtcgctgactactgactgcaccgcccgatgacccaagctggagttgttgaacagaacctcgacctgagcgtgctaagctaccgtgccccaaagctagcagcgttcaagaagccatctccctcgttcaagactgacgtgtacgccttctgagtcgtgctgctggagctcctaactggcagggtgctggggatgtcgcctcgggtctga

SEQ ID NO: 33174 - DNA, 364 bp, Oryza sativa
ctgggggtccatccaccagccgtttaatttttctcctgaggcttctactttctctcatcatggtaggacggcagcagggtttcccctaatacccatccattatcgccatttcagtcgttctacaccggcagtagcggttcatcatgcggacaagaaggagaggaggactagctatcggaatggcagtccctctcccaggggatctacctgcacagggcaacttgaggatgagcaactgtcggccagagccacagcgagctgaaagaagtgacactggatgaggcatgaccacctcttggctttggtccgtacatgttggctacagctgtttaccaaataacacactgaactccgagaacgacaa

SEQ ID NO: 33175 - DNA, 392 bp, Oryza sativa
agcttttcttacttagagccattgagccattatataccttattctattatggatcttctacggttttatttctttcattcttgctcgagccggatgatgaaaaattctcatgtccggttcctttgggggctggatcttaaagaattcacctatcccaataacaaagaaacctgacttaaacgatcctgtattaagagcaaaattagctaaagggatgggacataattattacggggaacccgcgtggcccaacgatcttttatatatttttccagtagtaattctaagtactattgcatgtaatgtacgtttagcggttctcgagccgccaatgattggtgaaccggcggatccgtttgcaactcctctggaaatattacccgagtggtact

SEQ ID NO: 33176 - DNA, 296 bp, Oryza sativa
aagaacgagcagcaccggataaataagaactattttttctaaacacaaacctgccacaactagccaaacaaaggagccgaaacccaaggaggaaggacttcccaactcaggggacaaccaatcaggaccccggaaaaaacaaacgacaggtgggtcctggtttaggaaccctcaaaattccgcctgcaccacacagggcccctaattgagactgccccggagacattgttaaaagaccaataaacccggacctttctcccaaaaagaggccgggcctagtggccacagaaacatac

SEQ ID NO: 33177 - DNA, 404 bp, Oryza sativa
  unsure (1)..(404): unsure at all n locations
tacttatatttagaaccaatgatgtaggtaataaccgtgttatctttataggcatgacgtaaaatcactactagaaaacaacacaaaagggacggcactatagttgtcagaaatgcaagaaccaatacttataacgtttttcccgcccgagcgcgcacccggcgggcgccatctttgagaactgacacctatgcggcgacataagtgctggtctttaatagaaatcgatactaatatcattagtgtttttttaagagaaccgatatctataatatattataggtgctagttntataatgagccagtacccatataataagagccgagccggtgttcttattcacccaactgcgcacccacgcctacccaatctttctctcgacagttacgcctctccatcctta

SEQ ID NO: 33178 - DNA, 402 bp, Oryza sativa
  unsure (1)..(402): unsure at all n locations
agcttatctcctacgctttaagaatgtattattcagaacatcaccatcggcttgacttcgccgccgccaactggtgtctccgcctgcacggctggtctattataccgtcgttgttgggcgtctacgtctttaccgaccggcttgccttcaccgccaccgactgatgttttcgcctgcacggctggcctattatgccaccattgataggcgcctacgtcttcaccactagcttgccttcaccgttgccgactagtgtcctcgcctacacagttgtttggtcacgtcaccgttgatggcgtctatgtcttcatcgaccggctgcctcatcgccgcctactaataccttcgcctacacggctggntggcacaccgccatcgatgggcacatacatcttcacgtcg

SEQ ID NO: 33179 - DNA, 284 bp, Oryza sativa
ctattcggacctatgaaactcagcttgcttttaaagtatttggacaaattctatgatacgaaggttttgccgcgggttaatcttatttggaactcatattatagaattgtccactttgaagggttctttttggtggaaagatgtttgcaatctaatggatctttttagaggaattgccagatgcttagttggtgatggtgtttctcgttcgaaatgatgtttggagtgatagttctccactctcagtcattatgccgaggctgtactcccttgctgctaataca

SEQ ID NO: 33180 - DNA, 483 bp, Oryza sativa
  unsure (1)..(483): unsure at all n locations
tctcttactgaagggggggaaagaatgagcaagaatgagtacttccacagtactcagcaagccacaccggcagatgcatgattaatgcaagggggtacaaggggtaataatataggggttaagtttgcagaacacagcatttataagtcacttagttgcccaaagccattttataaagacgatcctagagttacacagtgttattaatcaaggccgtgaaccctcacgaacctaccttaacccaaggcctacgatgattcagaccgaactggcaacccaaccctgngtcccagctcgtaccaagccaacccaggccaaccattccacattatagttgttaagcaacatttaagaattgaaacactaacttgggtacattgctangcttgcccataaccgacggcgcggctattcgaatanngtatactctgattagaggtgtacatctatacccacaagacacatcttcctcacgtgtaacca

SEQ ID NO: 33181 - DNA, 325 bp, Oryza sativa
gagaagaaaacatccctgcggtccagcaaaggcgatgtcgcaggcttgctcgccgcggatcctgcttggtgcggcttggtcggatcaccgatggcggctggtgcttgccaccgcctggctagcgcaccgatgctgccgccgctttgaccctcgccgcccgtcgcgggagaaaaagagagagcggctaggaagagaacgaactggaggaaggagagagagaacggacacgtgagtctcacaatttcttttgcgtgtcaatgataaatcggtcccacacatatttttaattctaaacgccacctaaacgccatgtcaatcccacgtg

SEQ ID NO: 33182 - DNA, 424 bp, Oryza sativa
agcttattcaaccaaagcaggacaaacgtctatgatccttattctccgagaaaattcctccgacgacaatgctgggggctaaggagagtgtaccactcaaacggctgactaaagtctttaactaagaacgcactcttacacatgacatccagagtaagagacatttgtcaaagatagatttctttattcacaaaatactccttacagctttttcacaaaactatcgctacattacatcctttcctaagatatttgtcataaggtacgagacctaccaagaatgccaacgccagtccatatactagaagatcttcttggccaacgacgacattgaccttgccagaaggtctatctccgccggagtccttcgagaacgagcaaaaccctcaccaagatattcgaggtccacgcgcgggcgatgatc

SEQ ID NO: 33183 - DNA, 343 bp, Oryza sativa
  unsure (1)..(343): unsure at all n locations
tgatcctggctntgtcacgcacttggcagagcacttggttccaacattctgtatcaacaaaacatgagagaattacaaccatgtcatgtgtataacaaagaagcaatgcctggaattggcatgtttatttcaaacacttaccctttttctcatgtaattctgtattacatatatgtcatgtaaaccaacagtggcagaatcacttgatcagcaagactaatggtgagtttgatgagaacgtgattgatgagattgtgaagatacgtaaaacgaggtgagccattagctcatgattaattgagtattaattatttaaacttcacaaatggattaatatgaattt

SEQ ID NO: 33184 - DNA, 419 bp, Oryza sativa
cagcttcggctgcactgtgcctctgttcattgctgtccggcggcggcataaagtaattggaattgaatgatagatcggatgatttacaatggcaatcagtacttcaaatatatggactgaattgataagcacagtaagaatgaaacctcaaagctggtttataatagaggcccggaataacgttgctcacgacaggcaggtttctggctttttcggcggcggtcatggcggcgaggaatctttagatgcgtgcaatgtgagggagtaaaagaataagttagcccagaatgaagtaccgcccatactatcttggcccaactaaagcccatccttacttcttttgcaaatctacggcccatacagaccgggcaattttgactttgaaaaacccatattcctagaccaatacagggccttct

SEQ ID NO: 33185 - DNA, 403 bp, Oryza sativa
tctccgacagatggcgtcacgggtcgtcgtgctcctcgtggtcgctgtggcgtgcgtgctcagcgccgcagacgcgaagctcggcaggctggtcgtcaccggcgtcgtgccctgcaacaccggcagcctcatcgatatcgccacgttccccgccttgccaagtacgtacgcactcactcgaccactcgtcacagcatgcagagtacacaggtagtggtagtaatcgatctgaatctactgttatacatgcagacgcggacgtggagctgatgtgcgcggtgaagctggtggcggtggcgacgacgaacagcaacgggtcgttcgcgatggaggcggacctgacgagcgggctggcgatgctcatcggcgggtgcaagctggtggtggacacgccgctgatcaa

SEQ ID NO: 33186 - DNA, 270 bp, Oryza sativa
agctttgcatgtaggactagcactttcaattgggagttcgcaagaattcgcggtcgaccgctgaactcggcgctgcggtgcaattccaatccaacgagcgcgaagccctcgcccttcggagcctcaacttcagccctgacaaagccgagagtgggcacctctactccggtttaacacatcgcatgagtggccaggagaaaacttacaccaaaattgactctaccgcacgagctcgcgtaagatgagcaatatcctctacatggagagaca

SEQ ID NO: 33187 - DNA, 416 bp, Oryza sativa
agcttattgccccacaaaacaaaccgacccatcaagaaaacgtatgcgctttagctccaccctcaccctgcacgccgtctcggatgccctcctctgcaacgccatccccgtcaccttcgctcactcctactccacacctacgtgtatcactcctcctactcttctcttcccatgctaatgagctcatgttcaacaccctcgcgctagcctcctggcctttctcacactttcgcggcactcgttgccacgcaatcctctgtcgaccgtcacgccgaggccatccaagcgttctcccgaatggatgagttcgacagttgtcccaccgccttcatctacaacactgccctcaaagttcatcgccgccgccgcccagctcttgtctagcaacttgctccccttcttcccctcgcgccaca

SEQ ID NO: 33188 - DNA, 490 bp, Oryza sativa
  unsure (1)..(490): unsure at all n locations
ngagagaggtaactattcgttgaatcagagttttattagaatgaattatttatacttattcgtagtgaaccaaatccattggttaggctaggctcaaaggaaaaaatatacatatatgatggtctttataagatcgaagaaaagtacagacaaacaacaaaatctcgttctaacttaaagttcaacaagttggtcagggaactaggccagcctaatggcattgtagtatggaagaatactcagaaatggagggaaaatccatcttgtagagatcatgtcataatgcctgacatgtcaaatggtgcagaaatagctcgtgtttgtgttgtaaacaacattgatagtgaggatgctcctaacaactntacctattcaactaaacttgataatgggaatcatatggtttcagcaaacaagatgtgtgtcttgcaatgcacaagctcatgccttggtgaagacaattgctcttgttgaaacaaatggagctatt

SEQ ID NO: 33189 - DNA, 369 bp, Oryza sativa
taggccagataatgttggtggcgggcctaatctcaccattttatcattgcggtgtacgctaaaccgcaattgttgtatcgctgtgcttcggctattgataagttattatgcatatgagcatagttaaatatggcccgtcactaacgttaaatggaccaaatgatccacacaagttccgcccaaaatcaacattaagcttgttgaaattccgaccatgcaaaacattaaacagacctatgtaccctactattgccataagagaactatatatcatcgagaattatatgccatgcccgtaatggcaagtaattaggtaaacaagcaattgatttattagtatccatccaattaaaactgtgtgttacactc

SEQ ID NO: 33190 - DNA, 421 bp, Oryza sativa
agctttaatttggtattatacccctatatatatgctcaagaatggcatctcatgcaagctaccacctgcgaacacataacgatcattacatttgatgcttctcttggagaaatgcaaccagctgctgcaatctcttgctacatcagctgccttgaggcagcagcagcagtcgttagcttctcttctcccagcatgcgacgacgacaacgacgactaacgacaccagctgctcttctccctttatctactgctcctgacaaatatgggctgccttgacatagataagccccaatctctgctggcataaactgtttcccggatggggagtgaattcatatgaatgtatgctccaaagaaatgtccagagttaccatcattaaacttcacacttggttttctcaatgtgtactctatgtacatg

SEQ ID NO: 33191 - DNA, 492 bp, Oryza sativa
  unsure (1)..(492): unsure at all n locations
tggttngaagganaaaataataatgataataacaattaaatgcagattaggcgtagatatatgctaaatttgactccggatccaagtcaatttgccaatttcgagaggaattgagaattgtctttnttttcccttttgcgttacgaaagttgccatactggacatgaatgaaaaactttaaatgtctgctgcctataaatcatctgcttccttttgcaatcttaggcagagctacttatctagctccttctcactttgccaccttttctttgtcttaattatatctacccactcttcataaggaaatagagatgttttcccactctcagtaaatgtggattatctcgccctatgcatttntttgtcaaagaagaccgtgatggttcatgtctgatttctggaatgttcctgttttaagcattcaatatttngggttaattgcttctgttccattcaaatggatgcatctccttgatcangaccgtaactgag

SEQ ID NO: 33192 - DNA, 483 bp, Oryza sativa
  unsure (1)..(483): unsure at all n locations
tagttgtggcaggcttaggtaacaaccaaatatgattatacttatcgaaattgtctgatgattccttttcatgggattcaagatgattggcgattgtcatgatcaggtcctgaacttctgggaattctgtcattgtgccaattccttcctttgtctccatctcaatgtcttaagaatcatgtatacagcttgtaaagcgcgtcaccacttgctgctttctggggaaattcgtactactaaaccccaaggaccatatggatcacattacgccttctttttttttgagcagtgaacttagtagacgtggtcctcttgcatcangctgtagncgcattcagacgtaatgctcctgatattgcanaactcccgagtcctgattgcactttggccatcangagtcttctctttattctttgcatattntanaatcgacatgctccacttgcaatccaatatcacgacaccatttcttttttgtcttca

SEQ ID NO: 33193 - DNA, 349 bp, Oryza sativa
cccgacctcaatgaacgctgctgcacctagagccgatcatttttttttggcacatcggccttatattatacgcaggagattgaaccgctttcatatacgaagttgccttacatctcacgggattttttcgctggattgatgatgttctcctaagatcctccatgaatgtgattaatggggagctgaactggataaaccatgcgcagagggaggcggtcttttacttataatttcgaccataagatttataaaacccataggccctttactaaacactggctaatggcgatatgccaggacacctgaattctataaaatattgaagagaacgatggtacttcttaaaaaa

SEQ ID NO: 33194 - DNA, 431 bp, Oryza sativa
  unsure (1)..(431): unsure at all n locations
tagctntgataccacatgctgctctgagatgagcgctactttttatatggctaatccgaacagtgcagatatgcaataagaatgggcaaatacacgtcatgtacctgaggtgtctgcttgcagagatgattatctatttcctctttccacaaatttagaattgaacatatatctgaatgcggtccctagggtctgaggacaacaccaacaacttcgtataataatagagatgcttggatttgatctgaatttttggatcaaaatgtagatatggaaccttgtatggccactatttgtcatattttactcggtgcaaccctgacgttaatgtaagctggggatgagctgaattgtctactcgcaccttctgcttctccttgttcccatctatttctgcctactagtatcattctagctctctatgcaacact

SEQ ID NO: 33195 - DNA, 342 bp, Oryza sativa
  unsure (1)..(342): unsure at all n locations
gaggacctgaacggtcgatatgcgagattagggaccgngatgacacatcggttctgtttacggaccgatgatggactntactctatagtttaaacaattaaatgtgacgatntattaagcatataatactatgtttagaataaagtcaacatcgtcgaactaaaaaaactgagattgcacccttaaaggaaaaaaaaaactgagttcggttccgtgtcgaactcggtctctatccgcaatagcgccgacccacctgatcggactccgatcgcccccgcccacccataaccctaaacccgtcgccgtcgtcaccgtcaccgtcactggcgttgaaacctacgc

SEQ ID NO: 33196 - DNA, 468 bp, Oryza sativa
tgacatgagatttaacactaataaatactccttccgttactaaatattcgatgacgttaactttctaccatatatgtgaatgttcgtcttattcaaaaactgatgtgatatatataaaactatatgtatacatataattatatttaacaatgaatcaaataatagaaaaattaataattacttaaattttgtgaataagatgaaccgtcaaacatatttaaaaaagtcaacggcatcaaatatttataaactgagggagtactcttaacataaatgagaataattataagcttcagttaaagaattaacgcgaaaattataattgagtttgaaaacacggtaagaacgcatatgcaccctgttatagagatagtagcaacgatccctaatatgtacccttctgaatcttcaaatattaaccacagcatatactatcaacccacatcaatgcaactgggactgcagcac

SEQ ID NO: 33197 - DNA, 390 bp, Oryza sativa
agcttctccagttcttggtctctgcccgatgcatttatgccaaccccgagaagatactggctatagagcggatgcgcccccccagctaacttatggatgtgcaatgcgtcactggatgcttggccgccctaagtccgttcattatcgtggctgggaaagaaggcgtctcccttatataagcttctcatacgctcccgaccgtttacctggactgaggaagctgaaaatgccctcacccaattgaaggcgtatcttaactctcccccagatctggttgccccggaccaaacaagcctttgctactctacttatctgcgacccaccaagtagttagtgcgcgattggttgtggagcgcgaagaagaccattacttatattactctttcccac

SEQ ID NO: 33198 - DNA, 433 bp, Oryza sativa
  unsure (1)..(433): unsure at all n locations
tccttctgatcgctggttgaagcggatgacggtcttctgcttggtatcgccctccggaggttgattgcccttggctcggactggagtacgtcggggagagacacaacttcttccatctacgacaattctttgctgaggctgtcgatgcagagagtggatggtgctaaaggtattattgccatgatttattgccgagttangtggagcaagaggagcattggtgctgtggatgatatcgtcgatgtntgtcacaccctgaaaattcataatatataaatggttcgttaaatggaatttctagaaattattttaaaagtcttgaaaagaaaatctaattctaattaataaattccaatataaaagtccgcccagataaaattcattaaatacgttgcttaattctataaatcctagaattttctgggaattattt

SEQ ID NO: 33199 - DNA, 453 bp, Oryza sativa
tctgcatagatgctacagagttcagtattgcttttcatggactgttctagtctataggttgccagtgttctgcgcgcggttttcttcatgtgacatgcttgggcttatcatgaacatggatctgtctgtttagttatctgcgagtgcttttaatgatatactgactctctatacaaatactactatatgtaaaaacattctattattatggatggctatcataagcggattctgatcatgaagcggtttaaaccaccatcacattcgagtttccttttccgctgcttatgaaatggaaagtctatgacctataaaaatataatctttatcggggatgtcgatctgctagtaatcgaatggtatatggattctggaactgatggcgtgctccatagaagatacgatctacagtcgaacacatttatttcatcggaaacggtcgaggatgacata

SEQ ID NO: 33200 - DNA, 339 bp, Oryza sativa
caggcatactaatattttttattacttaaaacaccctcctgcaacccttctaactatgttagcatactacaagaatttgagaatgcaattagctattactcatgctgataaatttctcacattgtcccatgataagctatccaacatcttggatccttccaatgtaacttgcaagtggaccgggcatccaaagctcgcataagagaagccccgaatcgagtggccaaatgggtgaacataggcatcaaattgctaggacaacagagaccagttaccatcttggaggtaaggaatcatccacttccaagagggacaacgcgtaaacgcgaacttcaatta

SEQ ID NO: 33201 - DNA, 323 bp, Oryza sativa
  unsure (1)..(323): unsure at all n locations
ctcagcttcggatggcgtgcgtaccggctgatggccgcctaatctgtttatattatgctngagagaagcactgcgctatataagctcctatacgctccgggccgtttacctggacggaggaggctgatcggtccctcacctcatttgaaggcgtacctcagttctcccccagtcctggtcgccccggagccagatgagccgttgctactctacctggtggcaaccccgcaagtggtcatcgcgcgcgtggtcgatgagcgtgacgaggacaaccctcacttcgcgcattctcaacctgcgtctactcgacccgggagagagca

SEQ ID NO: 33202 - DNA, 121 bp, Oryza sativa
caaccctagaggggatatttatcggtgatacaagtggcactctcttggcatgggatgaatcaacggagagaccaagtatgaatggaatgtaagctatatctatacatctatatatcagttc

SEQ ID NO: 33203 - DNA, 452 bp, Oryza sativa
tacggacctatgaaactcagcttaccgcctgggtcaatggatgacgaccttctcttttatggacacgtacgctcatcattcctggccatccagtatcaccttctcgagaatcaccattcgtgcgaatatcaggaccaggatcaacttttgtggtgcaaccacgtgaaacagctaattcaaccaagtttctcctcttgctataggagatttccaatctttacaagcagaaggaatacacatatgagttagtatatggagatagcgtacaggggaaaactcaacacgaacaagcactaagaaggttcatttacctcataactgggcatccagaagattcaacccaccttgggaagaattctttcatgaattggccgtcaagaataccgaccttggttgcaagatgcctgaactgaatatacaaaattatagaaagaaactctggtgtaacaaag

SEQ ID NO: 33204 - DNA, 406 bp, Oryza sativa
agcttaaggataagatgggctcacatgttatgtgtaaccgtctcggaaacagccataactgtcgcaaccgtcataaggacccacctgtcagtgacctacgaagtgtggaggcctactgagcctacctatgtgccgaaccctggcagcgtcggatcaatctgggcctccacgtgtacgcttgtgatgacttctcaatggtggttgcagggtaaatccaacaatttcaaccgttttaaccgtcattccaaggctatatgaaggggtcactttattcgttctttcacacactcgagcaagctcaagatatctcttctacactgtaagttagtattctagcgctaagtggagtagaatataattgctctcggagtcctctgactcttctgaagaatttccggatggcttt

SEQ ID NO: 33205 - DNA, 497 bp, Oryza sativa
tgcaataacgagatattcaacgcgtctcaccaaccagattctcctgttgtagtccaatcaataagtcaagagaacatgacctttcaaactgcaaggttttccttgacgccactataccttcacacccccagatccaacaacgacaagttcaatctcaacatgttgcagaggaacaaagcgtggaaggatctccagatcgcttcgtgggatccgtcggcattgacccccacaaacccttagttctacatagcatggaggatcaagaatcttcagcatctaatactacacgtgatgtgaacgttatcgaaggagacgctccaagcaatgcatacccatgtgagccacctcatcgcgaggctacagatcctgtccgtactcatgcataacatctcaccgcaatcgacttgctattgagagagtcctattgatccagatctgtaccctgaagcagatcactggttcgaagagtacgatctacaatatacaacctcaacagt

SEQ ID NO: 33206 - DNA, 266 bp, Oryza sativa
gacggaacatggcaatcccatttcgcaaggggaggagcaaatgccccgccaaaactttggcatgcaaatggtaggtcctgcccctcggacaaagattcactgctttgagcgggaaagagttggagaggagctataagacctgacctgaggaactggtcttacaccccaaagaagtcctctgcaaccttctatcaacctcatgccgcactgatactacttccttattaacattaaaagaaaatacattgaccgatcttaaaccggaa

SEQ ID NO: 33207 - DNA, 431 bp, Oryza sativa
  unsure (1)..(431): unsure at all n locations
tggaagacacatctcggcaggggtgtactgcagcttgtgttctacatgtcanaggcggcagtgatccgaccgtttcggtagcagtcgccggcatgcacccaagcgtgcgcgcgatggctcctgtgaagaagcatgaggcagcagcatcatgggttgtgtgggtcataggagctggccaagcggcgacggattgtctcgaggctcgagtgtcacgtgcacgtggatctggtcaatcaagcaagtttgctggtggttctattctggctcgaggcgagagacagaccgagcaatttacttagctgcaagcagtaaggaattggtagtgcaataattaagctaatgcatggacaatatggatacgtggtagattaattgcatacatgtgtatgtgtatgcatgatggtcaacaggcccaggattggatcacagca

SEQ ID NO: 33208 - DNA, 479 bp, Oryza sativa
  unsure (1)..(479): unsure at all n locations
tggaccagccggtgattcggaaggtatggagcgaccgaccctgcgcctcgtcgtcccgtacgtatgtcgatcacgatcgactacgccgttgcgttggaccggtaagtccgtggcatatgcaccatgcctggatgtctcctcctggattccgaccactgtaccaggctataaataaatgcataatctaaacctttttttagattgcctctttttctgggaattntaaatttgtctttttaagtttcgatttgacatgcatggagagtaatggcgaatggtctactccaatggaaaaagcggttagtatagcaagtcttcccaccgtcccaagtcttcgtcgtacggccatgcacgattacgattgatgcaatgtaagggagcacgtatacgtactgaaagttcaaagcaagactggacgcgtttttaccgtgtaaaattactcactcttttatataacttattttaactctattatataa

SEQ ID NO: 33209 - DNA, 359 bp, Oryza sativa
agcttaagtattataaagagaaagctggactgatctatttaaccaacgccaattggacagagaaacaattcggttcatcagaagcttaattgttccaaaaataacttggacagatttggattaattttaagtgatttgggaatttcaggattggacatgaactgtggcacctacatgctgcagcacgcctcgggggcgatccaacaagggaagctgacggaggaggacatctacaaggcgctctaaaacctcttctccatccggatgccgctcgggcacttctacggcgatcccaggagcaacagcgtgtaccgcgggctctgggctgtcgacatctgcacaccggaacacaggagcct

SEQ ID NO: 33210 - DNA, 381 bp, Oryza sativa
  unsure (1)..(381): unsure at all n locations
ggttattagtatatacaaaggtcatcctattatntaactagtgctaattagttcttagattgtaaattacttacctatcctatttagttagcacttcagtgtagttaatgtatggtattgtgtaaacatatttaaataaatatatatcatagattggtacaatttaaaattatagggctggtataaatggtatataaaactcgttaataagtctaacaagcttaacgagttagcctcacgagccacactgtcttttagctcctcaagattaatgagatgagtggaagctgtctctcgttatattgcaatacattatattgattagtgtgtaatgttatangcgaactcgatcgcaatccatcaatctagtcaaccactcta

SEQ ID NO: 33211 - DNA, 417 bp, Oryza sativa
agcttgtgaagagtcccatgatgacacagtccagcagtatgatgagcacctccgatgagaagtcccatgtcaggttcctgatgtagatgagcgccaagaacacgcccaagcacagcgtgttgttcatggtcacaccaccatatacctgcaaacaaagaatcaaacgcttagaatcagtaacatttttgtgtagatttagaaactagaaacggtttaggaagaataactgcttctataatgtacctcagagaaagtaagggaactggtccgtatcttcttcctgctagcgaagatgatggcagacacagcctctctggagttggtcgtcagcgggagggcgatgaacgatatgaataacgatgggatgtgcgaagcgttggagaagttgtggacagcatcaacaagcgggtctgcgaa

SEQ ID NO: 33212 - DNA, 454 bp, Oryza sativa
  unsure (1)..(454): unsure at all n locations
ngtcatcagtattaactatctattgatccncaagctatctaatcattcaccaggctcttaggttngtttgttaattatggctgcaaacgaagaactcacnggctaattggatcatttcacgtgtcatcttgtttctgactttgcagggtccagagagatcatggaactggatgtgacaattagtgaaaaagaaacatcttgttgtcaggaggacgtgaagaaatgtacacagattgctttggcttcagttttccctgcctttatcacggacttcctgngagcttatggcttgcaggaagcctaactcagagatctggtcgacctcgtgtccaatgctttcttgtaatttcttcacatgcatctacttgatcactttgtttcgtgtgtcgccttcagctcggctagcttgtgatcccgagttctagaaaagcatctggaaatgaattgagttcta

SEQ ID NO: 33213 - DNA, 439 bp, Oryza sativa
agcttgtaatagcagattaccaatttatctcagcaccaacaaaattacagaatacttagactatgtaaaggagggatactcttcggcgtggattctcaacaatgaagctaaatgaggcacgcacatcttcattcattcaaaattatgccacgaaatatgccatatgaagacttgtgaaaagccagattaccaacttatatcaccagcaccacactaaattacacgaatacaatatgcctataaaaaaggagaggataccttttcggctatatctagaaaatacaattgcagtgcatcttacattgataccctctgatttatggaaagaataatgacgcgcccctccacaaactttggcactacaaaagctggcaactgagctactgcttacaaaaaaaaggaatagttgctcgaaacactatatgcacctgcagatcaa

SEQ ID NO: 33214 - DNA, 444 bp, Oryza sativa
  unsure (1)..(444): unsure at all n locations
tacgcctgacggtactattgaaaagacaatgctcggcttgttgctaagggctatactcagaaagaaggcgaagaattctntgacacttactcacctgttgctagattgaccacaattcgtgtgctactttccctagcagcctcacatggtcttctcgttcatcaaatggacgttaagacagcttttcttaatggagagctggatgaggagatctatatggatcaacctgatgggtttgtactcgaaggtcaagaaagcaaagtgtgcaaattgttgaagtcattgtatggtctgaaacaagctcctaagcaatggcatgagaaatttgacaaaacattgacgtctgcaggctttgcagtcaatgaggcagataaatgtgtgtactatcgccatggtgggggtgagggagttataatgtgcttgtatgttgacgacatactgata

SEQ ID NO: 33215 - DNA, 474 bp, Oryza sativa
  unsure (1)..(474): unsure at all n locations
tacctgaagtacctctggatttggctgtcgtagattagaagatcatattcttttcttattactagcaatttcagacttattatcaatgatggaagtgaaacaaaacgaaaatatcatactgaattgtcggtcanggcgatggtccctcctggccggagcagccgaaatgcttcgttcacgagtcctgtgattgctcgtgctggacactcgtggcactgcaaaaaagatactcagctaaataggctaaaattttctttttgtctaagcaaaagagataaggtcttggttgaaatttaccacataatcatgggagactatgtctaatgaatatgatggcaaccctgtggcttacccgttgcatgaacccaacggatatgatattgtccgtacaacttttctttcttatgtgccgcaaccgcaaggaagtagggtgaaagatctataccctatatcattgatcaaatatccacatta

SEQ ID NO: 33216 - DNA, 403 bp, Oryza sativa
  unsure (1)..(403): unsure at all n locations
caagctagtgtgccactcgcttttcctaaccatctattgagcaatgctnctccatactcatattacatggtgtgcgcgaccctccagcataagagaagccttcatagctcacataatctttctgcttaatggccatttacatctttcatagacagtaaaattgatgctgtatagctggctccgatcatatagatcataatcagagacctggccaacaacccagaggtcaagacacaaatatttaaaccgcagctgctgttcagttgtaccacgttgtgagagcaaccatgaacaaatcatcttataatattgatcttagccataacaagtgaagacaagcaccaagtacccaacattaaaacttttagcaatgccttcattatcaacacaaaataaggggata

SEQ ID NO: 33217 - DNA, 453 bp, Oryza sativa
ggtttatgctaactacggcaaggaaactgagactaactagaggtagtggacctggcgctataccaaagtgatcttttgatactaacatatgatgaagcacatgtcgcataacaaacaattagagcgtatccacaataaaggtgcccacttaagatatcgtataagagccagcaatcgtaaacatcttatatggcataaggtcgataaataacttaactatgagaaaagctgaaacctggaaaaagataccagtacaacatcaggtcaggaaagcaaacaatgtacatacataagcccagggaatctgaatgcaacatgcatatcgtgtatgcgtgttgcgtgatacaagtatacagcaacggataggtttgcatatgcatacaccgcaagaaaatacctcaactggtagagacaatcacacaatagcttttatagaaagaaaaatgagatggt

SEQ ID NO: 33218 - DNA, 450 bp, Oryza sativa
tgctgccccgccgtcgtgccctccctccctcaccggagttgtgggtggcttacaacggcgaatgacgcgagcggcaggcggcgctgacaagggctcaatatggacaacacgatttggccatgggagcggcggtgtcggtcctacaagaggggaggtgatgggtagcggcatgtgaggatggtgctccaagaagaccgtgcggctggtgctgacgccgtctcggaacgaggtggtgagcacgaagccagccgcgttccggatgagcgaggtgaagccaatgagcgtgaggttgctcgcccacgagatgcggtggtaggaggtgccgatcccctctttcctctgctatcagcacaacccatttcgatgccgcatggagctcgggcggatgcttcccaagacgatgatgcctggccctccttccttcctggacattgactgggatgaggcagc

SEQ ID NO: 33219 - DNA, 195 bp, Oryza sativa
catgatcatcactatccatcgaaggtggtcatactgatcattacttatgatccagtgatcagataccatgattgttccgtctgtctgtgctcagcgctaaggtcttggcacgattgacttacatcttgcgctttaggcaaatagaggagcgcgttgctatgctgattaaacaaactgttctgtgcatgtgggaac

SEQ ID NO: 33220 - DNA, 297 bp, Oryza sativa
gagcttctcgtcccgctccttcccgccaccagaattctatcctgctcgaccccgcagcctccgactccggcgccgaccaccatgacctcgtcggcgccgctcccacggtcgccttccaccccgacgagggcctccaggatggccccgcacgtggggcccgagtctatgtccgggagggcattctatggcagtattgttgatgcgaaaaacacacactggcctggaagatctgcttaacttcagtggcagtgcaaaaatcttacctttaggttcgggagcgtgctagttgatttgatc

SEQ ID NO: 33221 - DNA, 361 bp, Oryza sativa
  unsure (1)..(361): unsure at all n locations
nggtgatcatttccttgtttccgatgcggatggcatcatgcaagggtagataggccgtccnctttctcagaacttccttcaatctagccgctacctgcagatttgacctcggattattagccagatcaattagaaaagaaaccatttgggaatggtcagccctgacagcgcagtgcaaaggcgtgccgcctttgttgttctgcaccagcatgagatgcggggccttgctgcagatgatctccacactcctcaggtagctccagccatcaccagaggtggccaaaacatgcagtgccgtgtcgccttcaatggtgaccccctccaggtccaggcatgactgatgcccatcatcaccagaagc

SEQ ID NO: 33222 - DNA, 423 bp, Oryza sativa
gcatgcaagctacgtgctaatggatataaataatatctctatggccattgaataatggggattcgctacatatatattacgaacctaaacaattgcctttacactcccaatattgttgagagaacgccacctttccatgtgacatagatgtacaatccacaacagctggcgccgttccgtggggataccccgacccaaagggctaaatgggaccctttttgccacacaccacacacttcgccatactaccaataaggtacgtctgcaagggctgcgggtgaataagattcgacaaacccgcgcccttctgcataataacaataatgtacagcgtacacggcagacggcgaagagtttttgtcacacgccgccccttcgcatataacaataaggacggcgtcaagagctgcggcaaaaagttct

SEQ ID NO: 33223 - DNA, 451 bp, Oryza sativa
tcaccatcaaaccgtgggctcgcttccctactgccaatgctctcaaatcactacttgcattgagaaccccatcatacgtgaactctgttggtgtgaacccagcagcatgcatctgtgagaacatactaactgcactgtctgcctcaccattttgtgcatacccagtaatcatcgccgaccaagtgatcgaattcctctccctcgatgactcatacacatgaaacgcagcacccatacacccagccttcgcatacatcgtgacaagcgagttttccacagatacaaaatccagcaacccatccttcacaatcagtccatgcatctgctcccgcatcatcaaacccaatggcacactaactgcgctgagaactgctgtggcaacaaactcgcttttctcataatggcactcttcgagcattagtcggaagagatcgaatgcctactcggagca

SEQ ID NO: 33224 - DNA, 416 bp, Oryza sativa
  unsure (1)..(416): unsure at all n locations
agcttaaataggctcaagagatagtctcgttgtttccaagngagatatgaaattaattttttcattcatgtacaaaaccctcttccgatatccaattaaatatccgataagatatctaaaaattttctcttctccaactaaactgggcacaagaagtcagataatagcaataaccggtcacataaattatagtaaacccctagctggcttgtccgttcttccccctccacagcgtcagtggcggctcaccgcaattctgtccccaatccagtgtcatatgactcatttctcttcctgccctcggggagtacgtgaggaccctaaagtacctcgcccgcaaaccctagaaccccacaccacacccaattttgccacccaaaacctagttcttccgatgctgtgatccgccgcgcgtg

SEQ ID NO: 33225 - DNA, 382 bp, Oryza sativa
  unsure (1)..(382): unsure at all n locations
gggctntcgctcacggtccttggtaggattgaacccctgaaagcggaagtacgcttaaagatcgtcgccctgttgatgcatcatgttgttgatgttggcgaactgagcatcagtagcctgttgccattcttgcatctgggctatgtgttccgtgaggttgtactggatctcccccgtctgcatatcaagggtgttcattctcctggtgatttcacccaactcccaacgagaggaactcgagcgccattcacttggagatggaggcacaccacttgatctgggaggttagttgtccccccattgtatgtcatgaggcgcacgccatcggtcctcactatcacttgcctggcttgagaccccgatgctgtggcgcggagcttgg

SEQ ID NO: 33226 - DNA, 417 bp, Oryza sativa
agcttgatcctgaactctcctcaagatttttatgaattgtaatcgtactaactactatgcatgaattgtcagtagtgaatttgttcaagagtcatgcttgaaaattattcagatctaaattgttaatggggcaaaaccttctatatgtgctcattctggaataataaggtaaaggtttatcacttcagtggcaggaatccagctcatgttcatgtactgtataagtgtgccctctttgttgaactacctataacttcattctatttacttctacgaatttaccttgtttccacattgatttatcaggggttgactttaaaatcaaatttctcactgtcaatgggaagaaactgaagctaacaatatgggacactggtaaagttgtttttactccgtacatgtttatttgtgaaaatg

SEQ ID NO: 33227 - DNA, 413 bp, Oryza sativa
tgaagagaatactattatgtgttaacattgtatattattgtgctgcatagtatgatagttcgatcgttctttttcaacatggaagatcacgattcaagattgaaaagttaaaatatattgcccgaccaatttaatatttgtacgacagtaattgtctgactatccgatctaaaaggccgaggatttgaggatgtgcccctttgcaatttagtgacagttatgtgtctatgacatgtgggaacaggtcctacatgctagtgaactacctgacgggtggcaaattctaaattttctcaatccacagaaaccacaaagtccaactctttgctagaagcctataagcttatgacttgagaattcagagatcactaattcattatgaaagccatagtttatacaacgggcatgactat

SEQ ID NO: 33228 - DNA, 408 bp, Oryza sativa
  unsure (1)..(408): unsure at all n locations
tgtcacggttcggcaatgttcaattggcgcccgccaccgtgttgaaccctatcatcaaaccatggccgttctgaggttgggctttcgatttcattggtcaaatatatccttcgtcatcaaaggggcgtaggttcgtgctagttgcaacgggttacttcaccaagtgggccgaagccgtgccgctcaagaatatgactcatacggaggtaattgactntattttgaagcatattatccatagattcggtattccgcaaacattaactacggatcaaggagcttgttttatgtctaaggaagtgaagagttttgccaaatcttatggtgttaaattgttgagttcttctccttactacgctcangctaatggacaagctgagtcgagtaataagacgttgttaagctagt

SEQ ID NO: 33229 - DNA, 243 bp, Oryza sativa
agcttatggtggagttctgtcggatcaattttttcctgttggccgaccatacatctgtcacgggttcttggcgccaagaggtcatgtctgcaaattcaccggcgtcagttacatgtgttacttcaaagaaggttgtgtttaccagggggtatattgtataagcctgcatcaaaatgaaagatgagattgtctggttccggccagctggtaaaaggttagcgaccagaacatcggttgttgggg

SEQ ID NO: 33230 - DNA, 191 bp, Oryza sativa
cggaggtactactacgcggctgatccacactggctgtcgtgatgcatgcataatatgtcaggagacggaagtgtgtccacatatgataggttaagagactgatgaaacgatcgagctcaccgttataggcggatatgacgcgattactaccgtatcttgcgatgactactgttcgctatattgctgtggga

SEQ ID NO: 33231 - DNA, 270 bp, Oryza sativa
ggaaccaaaagacgccgcagaacctccttcagagcctttatcctgaggaaacacacgaccacacggacacgtacatgggcactagaccaccccaaatacaggatggcccctccgaccgaacaacgactaatgggtcccccagggcgacaaggatggcaacatgcccgacaggccaggagggcaatcgacccccaacaatctgcgcgctggaactgcaaagttaatcccaacggaccaaactgaaacaaacaccaaactcaggcactacac

SEQ ID NO: 33232 - DNA, 459 bp, Oryza sativa
tatcaagtgtgagttctgggtgaacgaagtcaaattcttggttgacgtgatatctgctaaaggagttgctgtggaccccgaaacagagaccgccgtcaccgaatggaagcaacccaagacagtcactcagattctcagtttcttgggtgtggcaggatactaccggaggttcatctagaacattttcaaaatcgctcgacccatgacacagttgctgaagaaagaatagaagtttgtgtggagcccgcaatgcgagaaggcgttccaaactctcaaagaatagctggtttcctcgccagtgttaatcatgccggatactctcacggatatcatggtgtactgtgatgcttcacgccaacgattagggtgcgtgctcatgcacgacggtcatgtggtagcctatgctttacgcccacttccacctcatgaaggcaactaccctacacatgacttggagta

SEQ ID NO: 33233 - DNA, 302 bp, Oryza sativa
agcttgttcagcaaccaagcctaactagataatatagagttttttatactaacttccactctatacgaacggagaataagttacgataagtagtgaactcaccaattcctgatagacgacagcatcacttctgttctcaaatgtgacaaaaccgtccgggttgaccttacccctttgccaggcccaattgcgagctctttgttcacggatgtctgaaaacggggcaaggacattttgctgcagcagcgactacatcttcttgggaccaaatagactccatgccgatgtactctgctgagccc

SEQ ID NO: 33234 - DNA, 501 bp, Oryza sativa
  unsure (1)..(501): unsure at all n locations
gggttggctaccaagttatatttatgattgtactttgaaatttataaattatggcaatcattcttatcagttgcctatttggaaatattagattgagctattagggagtggctctatatagtatgacattgtcatccttggctagatgtaacaaagctgctagtctcactttcttcttatgatctgaagacttcctaccgtgttggaaggagctctgccggaagctagtagaggccgagactcaagtgcttgagccttatccaaccataactgtaccacttgatataattgttgtgcatatatgtagcttgagtgtacctgattgtctntatctatgaatttttttcggttatatttcctttgtttctgttctcaacttctcatacataccttagtctatctcctttatggacaaaagttttgcctgcttggctatttatttctcacacttaaaacttctatagcaaagcaatcatttctatcggcatatcgattgtgtcg

SEQ ID NO: 33235 - DNA, 393 bp, Oryza sativa
  unsure (1)..(393): unsure at all n locations
ggcttaagacaatgcgaacgaagatgatcttttgtatcacattctaagcatcgatttggaccacctcttttcctgtncctggcattattcatagctcgagcaattatgttagcaagcaaagccaaatcctcctcctcgatttgttcgagttgatcatcggatgtggcattaaaaacagaaagaaaagaagacttatatgaagaagcatcatcatccatagaggaagatgaagaaaccaaagctctcgacttataatcaacttttcgagaaagaacattcatctcatgtgtttccaactttgtatgaagtgaatccataattatagtacacatgttaacagactccttgaaagattgtactttcatctcccaaatagacatgtcaagaactatt

SEQ ID NO: 33236 - DNA, 429 bp, Oryza sativa
cctatcctctgagtggttatagaccttgttattggatgagttgtgtagtcctctaagtgagctttccatagagtccaagatcatcaaaagcgactcccgagcaaaagttatggtcgttttactctgtgcttttcagaagttccgaaaatggatgcgaaactgagtttagcttctgcgaaatttaggaagttctgaaaattcctgtctttgcctccaacagctagtttttgagaggctcgggtatataaactcctctacccctcctttgagtggctgctgttcttgcggagtattatacacatccaaagcccaatagccatccccatttccctacctttgtggtgtctctttgtgagggggatttgagaagagaagagagttggatcgagagagtgaggagtctatagctagtgagcttcactccatcct

SEQ ID NO: 33237 - DNA, 327 bp, Oryza sativa
ctactacttcactggtagaaaaatctaaatcagctgtacatctgcgtgatttttctgctagatttattccaaccattttaagagaaccatcagaggatcacactgaaatctggttcattcaaattcgagttaacaagaattccctgcgatttttcaaagtttcagcattttacacgcgacaaattaatcctggaactcatttttctagcttttcctttatttgacagaggggcctacatgttgggtggagctttacgtgagggaatacataatgcagagaaactccccaggtatagctatgtacgggtgggtcctttttagatcaaa

SEQ ID NO: 33238 - DNA, 415 bp, Oryza sativa
ctgtgacagaggtgcacagccgactatctttatctctgcccagatcactttgggcagaccacgctttgccagcacgtgtaatgctgattctgtcgatgcgaggcatgcaaggcaaagctgctggttcatccatcccctcttttgaagtatgctagcagtggattgttagccacatctacgaagatacaccgcgcatatgcgcggacacgtaattaatatagcatgaatttttttatcaatgatgatatgtagatgatcttactataatagatattgactctattttacatatgtattacgtaatatctggttcggagatattacttggaaccgtataaccttaacctaagtaagaacatgtgtctctatcatgaagcaattatggaatgttggagttgcttctatttgaccatac

SEQ ID NO: 33239 - DNA, 315 bp, Oryza sativa
atgtggtataactcttcttcattcagagcctcttcgtgagcctctacgaacagaaggttcaaaccacgtggccctcaagataaagcaaacgcctttctcgaaatggagtcatgaataccggagataagaaactagcatctagtttacagttacccgaaacaagcatgccctcccccataatggagaaacaggcgttaccatccatcgagagagcggtgcacgctgacgaaatcaaaccgaagtttgcactgtgggcattgaagcgtctgttcgaagacgcccacctaagaatgcacgccactttttccacaagag

SEQ ID NO: 33240 - DNA, 456 bp, Oryza sativa
  unsure (1)..(456): unsure at all n locations
tcagcttcccatcgcaccttgtcaattcttccgtaagcttacatcgatgcagaaggcaaagtcaggatagtctccctcaaaanaaaaaaatcttatagtttgactacaagtataagtcaaaagctctgacaatgcagttaagtatgataacagcagcatggtcattgaattatcctaaattacttaaggtgcctgttggctgatgccctgtgttaagttgacagactgtgcagcgtaaggatccatgttcaacaacaaaataacaagctaaacaagttaatagcaggactcggaggtcattaatcggacagttacaatcagtaagcgcaaagaaagcagcttgatgcgcatagacattgaagcgttggnggctatgagctctatggaggccatagtgagcaagtagcagatacagagcatagtatatagatggagttttcatgagtngttgtatgt

SEQ ID NO: 33241 - DNA, 291 bp, Oryza sativa
accaacctctctgagacgcttcaaatgagaaaaacctcaactctgggatcgggggaaaaaagagctagacaggagactacccactggactcatcaagtcataccggaagaggatgtatgatgcagaatataacccaaggaagctaggggctatactagcataaagacggcatttcaaaaccaatattcgaaagcattaaacccctggcgacatcaaccaccataacccaaccctatctcacgctacaccaccatgcaacaggcccacaccaccccctgaaccacaccagtt

SEQ ID NO: 33242 - DNA, 387 bp, Oryza sativa
  unsure (1)..(387): unsure at all n locations
tctggacttacactggagttaagcagatctcccaggcctcgtgtttttacatggaataagttcaccggaggtccctcaaattgacaccgagattttttaaggtccctaaactagaataccagaaatgtgtacccctaaaattactaaatccgagattttttaaggtccctaaactagaataccagaaatgtgtacccctaaaattactaaatccgtccgtagaaggtccctcggcagtattgactcagttattgcccggttttgttgacgtgtcgcgctgtgggacccactggttagtccaccattgcggagttaatagacggngttaaaggctctgtcctcgctgtttccaggcgttgccgcgacattatcctcttctcgagctga

SEQ ID NO: 33243 - DNA, 387 bp, Oryza sativa
tgccatgacaagctaagtgttttgttcgttttggaatgcggataaagcgcaccatctactgctgtatgaatactattaaaactattcgaatagccgtgctcacgggtatcgggcattgggactcacaatgatatcttggttataacataatttcaaactttattaaatactcgtgcattcaaaacattatagacctttccttctatattctctgcattctggcagtaaatctaaccctactcaaatatctattattccatgcattcattgttgattaatataatagcttactgagtatgtggactcacccttgttcaaccccacaatttttcaaagccgctgatgtcttactgagccgggatcaatcataaagtaactcatttaact

SEQ ID NO: 33244 - DNA, 482 bp, Oryza sativa
ctccatgaagtccaagatcacccaaatcggagtatgcatgatagcgctatgtccatttaaagttagtgctgtctccggaggccgaactggacttggacttggaattatcattggaacgtgtgaagttatgagtgtatccgacgaagtgatgtcctcatcaatctcaaatcaatcactctctctctctctctctctcacacacacacacaaaaccaaaatgagaaaacaaggctcaaaatgaatctcaaagcaaagcaagccaagggaaaatagttttcaacgggagcaataaccctagcttggaggtggagggggctatttataaaccgtaccctcgtatctgcctattttgaaggggggagttgatccctctttagaaattccgaacaatataaagtcacaaaacctagacaaatcaacattgcgaaagttccaaaatattttcggaaaatttaaaatcaccagaagcaaactggactttc

SEQ ID NO: 33245 - DNA, 418 bp, Oryza sativa
agcttgaggccctaggggcattcttgtatttccaagaatctttttcaattggtccgaaaatgtttaccacgttactagggtattcttcagctacaatataatgtgatgtctgctatcaaattatataaattttagatgtcctatagtaaaatttgtcttttttaagatacgaaaaaaaacttatatattaactatggatgcacgtaaccctgcctctatggtgagaacgatgatgttttaaaatacgtgcaaccgaacttcaaaagcttaaatcattaatatatgttaaactttcaagatttaaaatgcgaaatttatattagcagattaaatttataaaactattttttcatgaattcagggatttaatatttgttataaatatagtttgaagaaagacgactaaacatatatattc

SEQ ID NO: 33246 - DNA, 357 bp, Oryza sativa
tctgccttctaccagacaagatggaacgaaaccactaaagttgttatcagataagtacaggaattggagtttcttcatactacaaatggaaatgggtacatagccttttagtttgtttttggacaagttaatataggctactttgttaagatacctaccaaatgtacgtagtatggaagagaacccattgtttgagtaatccaatacaactacaccataaggcaatgatatggctggtatgggtatttctccttgaagtctattgaaactgagatttagatggcttagatgtgtaaatgtaacaagagagggagagttctccaggctagttaatgcattgttcgagaggtgcaatga

SEQ ID NO: 33247 - DNA, 396 bp, Oryza sativa
  unsure (1)..(396): unsure at all n locations
agcttggtaggcatcaggaacattcaccttcttcaaaggaataaatntttgaaaaaataagtaccctgcaggcctgcattagctcccagtgagatagacgggaaggtcgatcaacagcctattcaagcacccagtaatattgccagagtgttccattcacgccggggcagctatagcctatagctgcttgtgcagccctacaacaataaccaaggacttgaatcgctcctgttcacatttcgatttactgaaattattgaccatatatactagtgcaagacgtcgtgcattcgcatgactatcattatcctttttttatgtttaagaataatctattactggtattatgtcactgaagaatgtaatgaaaaatatataaaatatatgtttttttaa

SEQ ID NO: 33248 - DNA, 449 bp, Oryza sativa
  unsure (1)..(449): unsure at all n locations
ngtcaacggttcggcaatgttcaattggcgcccgccgccgtattgaatcctaaaatcaaaccatggccgttccgaggttggactttggatttcattggtcaaatttatccttcgttatcaaaggggcataggttcgtgctagttgcgacggattacttcaccaagtgggccgaagctgtgccattgaagaatatgactcatacggaggtaattgactttattttgaagcaaattatccatagattcggtattccacaaacattaactacggatcaaggtgcttcttttatgtctaaggaagtgaagaaatttgccgaatcttatggtattaaattgttgagttcttatccttactacgctcangctaatggacaagccgagtcgagtaataagacattgttgaaactagtgaanaagaagaatgatgaacacccaaagaggtggcatga

SEQ ID NO: 33249 - DNA, 392 bp, Oryza sativa
agcttcatgctaaactagactttttggtattttccacagaagggggtcacggagaagagtcaagatagtggggcccgccggtgggtcccactgtctttgattatctctctttcttttattttctctctctcttatacttctcttctctcggatccttctcctgctctctcaattacttctctgttttctcacccgttctcttctatgccttcggctccttcacgcgcgccctagaggagagaggcgccggaaaaggcggcctggcgcaccgcggcggtgggggaaggagagagacgataaaggggcggtgcccgtgggaaaaagaagcctgggcggtgctgctgtgctctgcacgacgtctctcggcgcttggcgcggtggcgcttggctcg

SEQ ID NO: 33250 - DNA, 441 bp, Oryza sativa
  unsure (1)..(441): unsure at all n locations
gaattagcacgtcgaaagagtgaaagagatcacctgtttgccgagcttgaggacgacgtatggatcgctgctgaagacatcacggacggcaagattggtccctctcaccaccttcaccttcaccaccccgacgatcacactgctgctgccgcactcctttgccatcgatatctatcttgctgagcttgagtaagacagttcagagttgtgtcctctcaaattagtcttgctcctctactcctactatatactccctccgaccaaaaaaaagataaaccctgcgttntcgtatccaactattgattgtccgttttatatgaatttttctataattagtattttcattgttgttagatgataaaacatgattaatactctatgcgtgactcgtattcttaatttcttttcatatttattttaaataagacggacagtcaaacg

SEQ ID NO: 33251 - DNA, 440 bp, Oryza sativa
tcgtgcggacgcggccgacgggctgtagctgcaactgcaggtctgcacgggctgtgcctatgcgtgctgtgtgctgggatgctggatcacattcacaaggtacgagtagttgagaggcgagcgcccgccgcgtcgatagttatggcgttctcggcgactatgtgcgtgtttcgtggtggcagggaagccggcagcggagacgcggacggaaaggaggaccggacgcttgagaccgctgacctttgacccgcatgatcggcggtcactgtctcgttgaggctaattggcatccgcatcacggcaatacacatagcgtacactccattccacaccccgtttcagccgtcgtttatgatgatcgcgcaatgagtgaatgaagggctggtgatcttactcgagagagaggggagaatatttactccgctcgttctcacgacaca

SEQ ID NO: 33252 - DNA, 274 bp, Oryza sativa
  unsure (1)..(274): unsure at all n locations
gtngtggcaagtgagatgtacagcaacgttgttggtaacattgtcttcacaccaaaatcaattattaggcacatcgagaataaattcaagtacaccataagctatgcataggcctgtagagccaaacaaaagattattgagatgaggtatggcacatttgaagcttcttatgataatttggctcggttgttagccaacattgcccataagaataataatacttactatgacctacatacatttacatctgttgatgatcgaacanagagtgtgc

SEQ ID NO: 33253 - DNA, 468 bp, Oryza sativa
agtcacctgaggcatgcgatcttgtgagcagcggcagcgtaaggtagtcttatctcttattcattattcttataagcttgtgtcagacagacattaacggtgtgattgagaagaacgagatagaaaatgttagaaagatacgcaaaacgaggtgagccattagcacatgattaatcgagtattaattatcttaaactttaaaaatagaataatatgattttttaagccacttttctataaaatttttgtttaacaaaacacaccgattagtactttatgaaacgtgcgcgtggaaaacgaaacaaactcacttcgctttgatttgcaaacgaacgcaccctaagtctggacactgtgtatacattatttattgagtggaagtgaaggaatacctcaggggttaactattagtgcaccagatctgtttaacttttgagcttgacatttagaaacgattacatcactccg

SEQ ID NO: 33254 - DNA, 446 bp, Oryza sativa
  unsure (1)..(446): unsure at all n locations
agcttctactgtggaatgctttgagaggagaactctcttctgatctaaattcaaacttgaggtaaactggaactttccttattccgtcatttatttgacttttgtttagtgtatgctcttcttatcccagcctactccttttgtctagcgttgtgtcactccaatattcatgcagtgaaaaagatgcgcgcgctatgcgctaatatgcacataagtatttaaagtggtcgtatattattttgagtaaaatacaagctgtttaaccacttctcacatgagcttggaaactagctcttggcagttntgtctataagggttagtgagcgaatgacactaatgtacaattgcacagaaccttattgttattgagctgattttttttaattcagcttaatcaggtccttggctacataactaggtagaatgcttttgttgtgcaaaatatt

SEQ ID NO: 33255 - DNA, 424 bp, Oryza sativa
  unsure (1)..(424): unsure at all n locations
tcttcagacctgtcaccatcgagggagtcagctagttgtgttctatggattaattacactacgtggtatggctggcagtggcaaatccatatgggttcctttgtccaactgtttttcaattagatccatgccaattatcaaagagaagaaatataaaggcaccctttggagaagttcttcctgtcctttgaaattccttcgaattaattctatataccaaataagtaacatacataggagttagttttttggattaattggtttttactacttttcttanaaaaaaattcaatccaaaggagccttaagagtggtggcatagtgctaggagcgtttaaatctataatctgtttaaatctataatcttacgtcctctgtctctttgtatggtaagccgttatgtggcagcgctgcggcgatgtat

SEQ ID NO: 33256 - DNA, 454 bp, Oryza sativa
agcttggtgtagaatgctattaattatggcagcaattggttttgtttcagcagataagaaacatctgaacattagaataacgaccaattagaataacctgtaagttttgtgcatcagaaaaataatctttccataacacaaaaggtcttacatgtgaagcgcatcagtaacataacatagatgcacatactcgagatccagcatatctctcacctaatcaataattgaagatcatcaatccactagtttccttccagcagaagtaaaattatgatataaaaaacatgttacaggacaaaatcatcacaggacagtgtagcaatcattttatgtttaatatggaaacagctttagtatcgtatttacaggaatgtatacctgatgttgaagtgaatgttgaaaaccgcgccatgatatatcagacaaatggcaatggagatactgttgtagtgtt

SEQ ID NO: 33257 - DNA, 497 bp, Oryza sativa
  unsure (1)..(497): unsure at all n locations
ggcgcataagaacccctggcctgacgggaacattggtccctatcgtatttgaagcgtccattttcgcatcattggacttcgatgtgcacaccgcgatctgtgtacacgcaatcaaacacatgcgctcttatttttccagcgacgagcatagggacaacgtactttcttgatgatcaagacatcaattttctttgaacagttttgcgtacgtcgaccatctagatgcatgccactctacgtgtacgtcggtaggatttgaaagggctgcagcccagggtttttatctttccgttttaagtaaaaaaacactcttagctggttatccaaaaccgaaaaaaaccgacgactntcgatcaatgccgtttgaanagcgtcttanaccgagaagtnttacanaccaatatctagcnggttcataaaaaccgaaccagttttgttttattgaacccgctgtgccacaactcttttgaccatggggttggttggttgactatata

SEQ ID NO: 33258 - DNA, 413 bp, Oryza sativa
  unsure (1)..(413): unsure at all n locations
agcttgcagctcttgggttcggtgtcctcttaagtattggactagccagngctgcaagagtagaaagatactctagttcccagggatctggcacgggaggcggtgagggtggaggatctgtgaatggtggaggagccgggaaaagaagtggggttgggtctggtaacagtaactattacggtgcccatgcaagtggtggaggtggcggccgatgtggtggttacagtcaatacggtggatcaggatctggtaacggatatggcacgggcttaagctctagccagacctttcaaaatggatattatggntatggcgggtcatccagtgctggcggtgctggtgctggtggcggtgccggacaagccggtggttattggccatcgtatggtcatgggtctggtaacggtaccggc

SEQ ID NO: 33259 - DNA, 447 bp, Oryza sativa
  unsure (1)..(447): unsure at all n locations
gacctatgaaactaagctaaggagttagtgggggataactntataggaagataggattacttgtcttcgtgttgacagggggactgtgcggtgcatatgtgaaacaaaatccagtttgattccctcgaatataggtaagatcgatctaattcgtatgcaacagtcacttcgactcctccaacttttaaaattaatttaaaattagtgactctctgatattgaacatggtattggcttatgtggtngtccatgttacatgttaacccaatcttaatctgacgtggcactcacgtgttacaataaaaataagaaagaaaaaaaaaataacggagggcccaaatgtcagtgtccctctatcttcttctcattccctcactactcttgctctctgcctctcatctcttaggttcagcccgcaaggtgaggatcggangagaagcaccgaga

SEQ ID NO: 33260 - DNA, 307 bp, Oryza sativa
  unsure (1)..(307): unsure at all n locations
agcttatctacgtatatgagcgagagcctgtttactgcttttctcatggcaaggatcanggctgcgagggacggctcatcgatgcaggcttctattattgcattgaaaatctcggtctcaccgctgcatgataatgacgatacactcttgtttacttgccttgcggcgtgagatacagcagacccgatacaatctggggctactatgatgaggccactgactatgatgccgctcttatgaagggagtgatataccactctgcatgcgctgcctggatggaagcgcatgacattacagatatactctg

SEQ ID NO: 33261 - DNA, 444 bp, Oryza sativa
agcttgtctagagcaacatattgtacaatcgtatgttattactaacaaataccagtatttgattggtattctgcctaacaaaaataagtagcaaacttgaattgttgcagacagtattgaagtattttccttttgagaaactgagttatatagtctcataatttccccatatactttatgttttgccttttatggtttacgataactaatatcatgcatattagtggccccctggtcattttgatgttacaatgtatctatttcaagtgtatatctcatgaacttcactacctatatatttggctcagctgtcttaagctctatgaaatgctatactgaattcatgttttcaggtatcagttgtcagcattgaagatgcatcgatcttgtatcaaaaacagcttgagtgtcgggtatctggtggaatcgcatctttgcaatttg

SEQ ID NO: 33262 - DNA, 488 bp, Oryza sativa
tattacaagtgcacaccactaacggattctgtagaagtggactaagtgtggtacttgattctctctgccaaatcttccaaatactattttcaaaacaaaactaagcacagtagtacttaaaaaaaagcatcttgactaagggcaacactttccaaataatcacagaactcagacatactaaaatatattttagaactggaaattccaaatttacaacgaacctaccatgaaggcatgtgtgatatgaacacagaattcaacagcaattcctattgacataacaaggtttacaatagaaattgcattgagctgaatgccaaggatagccatcattccctgccaataatatgtaggaaatttgctgagcgatcatatggaagaaaaatgaactgacgtagtatttttaatggagaatgaacagaataatgacattaaagtgactattaaatgtttagaaagacatgacagattgtactgcgactgtactc

SEQ ID NO: 33263 - DNA, 436 bp, Oryza sativa
agcttgtgaagagtcagaagatccaaatttttgtatgagcggacgggccgagggattctcgttcaccgaccactagagaaagcggaagcacggcgggccactttctccctcacaggccttcggacgaacaccttaccggggtggcggcgtcaccgttcggcgtgtgaaccgtgcgaagaggatgatgattcgtcaaaagcgaaggttgctgatgctctctaagtgaactgactgatcgaggcgaaactcgcggtttggactttggaagcggccgccgtcggtccgggcctcaccggcgccggcgccgctcgtgatgcattgggacttgcgatccagcggatgagaaattcagaggttgatctttatgagacggagagagtatcctataaacttatcaaccgtactgatgtaacaattatcttcagcctctcatcct

SEQ ID NO: 33264 - DNA, 427 bp, Oryza sativa
tatctatacctgtcttcgataatggcatcaacattgatatattcactctaatatcactccaagcctctgcataactaaggtgcacataaactatctctctgagtgaaagataaaacccaatctgcaacttggatgtgccacgtcagcaaataaacctcaacgtgttggtacatgggtttgtgaataactaccattgatttacgatggaaaagacacaaccgcaatagtcaatatatggggtattcggtgtctagaccacttgagcgccttggtgaatgataaatataaaataaataaacaaggtgcttgcctgaagtcatgcaatggatgcgacgaggctaacaacagccgcgtggatctggcggcgtcctataatggaatggataaatacagtgtcaatcagaatagaagcaactgcacatataca

SEQ ID NO: 33265 - DNA, 467 bp, Oryza sativa
  unsure (1)..(467): unsure at all n locations
taagtcacctgcggcatgcaagcttgggtccaagccggacgcctttcatactctctgcggcggcgactccaagtanagcattgcaagctatccttgcttctttagttcttttaccagcgcgatcaaatggagaggatctcctggggatttgtttcttcttcttcctctcgctctgtttcttctctgctctggttactctgacgaaatggcttagcctgctcttgtgttcttgagcttgctccagacgtgttcttggatttttgtttccttggcgtctgctcttgcattgcatgttcttgtgttgtacaaacaggaaagaaataaacattctagtgttcgttatctgatgatagtagaagaggtttgcttttctagtgaaaaatattttctttgctgtgtgctatgctttgcattttcatgattagtgtacccaccaaaaatgaattttatttttcaagtcatctaag

SEQ ID NO: 33266 - DNA, 492 bp, Oryza sativa
  unsure (1)..(492): unsure at all n locations
tctacactnttaacaatatagtttatcaatttatgtgttcttcttccatgcacgagggtaaaattaacctctttcatagaaattaaacgatcaactaaccgtcaactgacgaaatgggtataaatgggtatgtaagggactaaaacaaaaatccaggggcattcaagaaagtgagcaatacttaggggcgcataagagatntagctgaaatttaagagcgttaaagaattttctccaagaaatgatagcacctgtgcatgtacagacatccattatcacaatcccaataccgataaaaaccgctcccgagtgctatctatgaatttcgtgaaaaccttngataaactaacaagattaaatatgaaaaaatcatataaaanatttaaattcattattaacttacccaanaactcaagtgtttgtgttntttacttggtccagaaagtccggatttcacgggttccattgattntttaanatcatactccctct

SEQ ID NO: 33267 - DNA, 424 bp, Oryza sativa
  unsure (1)..(424): unsure at all n locations
ctcgacccggatccttaagtcacctgcggcatgaagctttgagcacagtacatatccaataaatttataaactctcggccttcttgaaaattcccagagaaaaatcctctcacctcatcccttctcccgttatctctctgaccagtgggcctaaagaccattggccccacctgccagccaccatctncttatccctgctctctgtctttctcccttctctccatctattcctttcaggcaattcatcgagcacctagcgtgcgagatcgaggtcatcgttttcaagccgaccaagcaacctctgcccgcgattcccgctggcaaagctgaaacaaggctggtgcgcccctgcccgaagccctgccgctgccttcgccgcgtncctcgccggctcgcccaacccggagctgccgctctcttgctc

SEQ ID NO: 33268 - DNA, 392 bp, Oryza sativa
  unsure (1)..(392): unsure at all n locations
agcttttgagcacagtagcatatccaaataattaatccaactctcggccttcttgaaaattcccagagaaaaatcctctcaccttatcccttctcccgttatctctctgaccaatgggcctaaggaccattggccccacctgccagccaccatctncttatccctgctctctgtctttctaccttctctccatctattcctttcaggcaattcatcgagcacctagcgcgcgagatcgaggtcattgttttcaagccgaccaaacaacctctgcccgcgattcccgctggcaaagctgaagcaaagctggagcgcccctgcccgaggccctgccgatgtcttcgccgagtacctcgccggctcgcccaacccggagctgccgatctcttgct

SEQ ID NO: 33269 - DNA, 482 bp, Oryza sativa
  unsure (1)..(482): unsure at all n locations
tggggcggtgcgaacgaagaagagcaatggaaccatattctatgtctcgattnggaccacctctgttgctgttcctggcattattcatagctcgagcaattctgttagcaaccaaagccaaatcctcctcctcgatttgttcgagttgatcatcggatgtggcattaatagcagcaagaaaagaaggcatagatgaagaagcatcatcaaccaacgaagaagaagaagaaaccaaagcactcgatttagaatcaactttgcgagaacgaatattcatctcatgtgttttcaatttagtataaagtgaatccacagtcaaagtagacatgttaacagactcctgaatagatgtaacatttcatctccaaatagacatgtcgagaccattcaaaagtgacgagaaatctagattgtggaaattaacatcataagaagaacaacagatccacatcactcaaagtttattaatctataagatagca

SEQ ID NO: 33270 - DNA, 452 bp, Oryza sativa
  unsure (1)..(452): unsure at all n locations
agctnggttctctgcataatttcagtcgaggaatntaagtctgaaaaaaaacccaatcaactcttttatttcagatttgaaggctttgcaaaagtcagttgcacccccagcaccgtcactcaaggagagggaagctgcttatcgagctgctcgcgagcgtatcttctcagcgcatgatgccaagggaaatgggacagcagtggcaaaacctaagcatgttcctgctgttgctcaacggatgatcgcgcatgcacttggcaaaaaagttgagagcccgacagagacagcagccgtgaagaatggcaaaggaaaggagccagcggaaagtagtaggaacaagttaaacccacgcacagcaggtggcaaggaagatagcangtatgttgagaatggcagaatgaggttgcacaccgggaatccatgtaagcagagctggcgtacaagtaacagta

SEQ ID NO: 33271 - DNA, 324 bp, Oryza sativa
  unsure (1)..(324): unsure at all n locations
taagctgggaaatcttattgtgnctgatattgagctgtgttttggtgtacattataaccttggagtgcttagtgaatgaagaaaatccctgatgcctaaaacagcaccgaaacatgccggttgactgcaaagatagcatatatagtggtgttaacttgcgcggtgtagggtaatggtaagaaagaaagacactgggccgtgcttgaggaagaaatgtgggaaatgtatagcgatatcaggcttgggggcaacatccaccgatgcctgcctggggcagcactggatgcgctggttctgcccatctgggtaagagagaggccgaga

SEQ ID NO: 33272 - DNA, 403 bp, Oryza sativa
  unsure (1)..(403): unsure at all n locations
agctntccacgaagtccaagatcatccaaatcggagttggtatgaagacgataggtccgtttgaaatcagtgctgtctccggaggccgaatttgattgtaaaactcattggactttaatatcttgtagatcctccattcatccaatgtattctttggcaatgttttatatttctcatgcttggttgtatgcatatacttgatggtcacatcagcgttggtgccgaccgcaccaactcttgagctccatcaacctcggcgtcttccccaagctctcctccaagaccaagctccttctcggcaataaggccatggctacctctcagtgttcgagacaatactggcttccatggtcggtggtccctccctagtggccggtgacgtgttcgcgcctagaacaatggt

SEQ ID NO: 33273 - DNA, 339 bp, Oryza sativa
  unsure (1)..(339): unsure at all n locations
tgacanatgaatatatntgatattntaatataactcctatataaattgttttcgtactaaacatatcatttagtttgaagaacatgctaacaaaactgaaaaacgtgctaacaaaactgaggtaaaatctactccatatgtttacgagaaaagaacacgcctgagtctgtgatggttctgttggagatagaanaacttcgagttcagaaagttaaaaaacacgtttgtctccctgcgcaagacaggaagcataaaggaaaagacacgtttgtttcttactccctgcgcaagaaagagggagtcgagagttaactcgaccaccttcaccgagtcccaacg

SEQ ID NO: 33274 - DNA, 430 bp, Oryza sativa
aagcttgatagcctccccgtagctagctggcgccgccccgaccgctgccgccgctcgctgtgtgctcgccgccgtcaagcgcccgtgctccgtaacacccgcacggtcgcggcctctctcgtagtggctccggcccatacaacgctagaaacagatttccggagtcgcgtagatactttagctcacccgaatcgatctcccgtcgcgccgtcggccgtttccccttctcttgccggcgggtgccggcgccgcaatccgccgccgtcgggcccccttcggcgaatccaaagccgtggctcggctccctcagtccgcgcaaacttccggtgcgctcgcccttggctgcatcactgtagatcgccccactgctcgccgccgtcgttcgccgaaccgtccggacgacgtcgtcgttttcttccgcgacccgcgt

SEQ ID NO: 33275 - DNA, 496 bp, Oryza sativa
  unsure (1)..(496): unsure at all n locations
tgtatagaaatagaagcattccatanataatattggaaaaggttgtcatgctttcatataatttgcataatgcaggtgtttatgttggttttattccaatttccaaaagttggagattctggtagacatcttcccagattatcattcctcctttcttttgttacatatagtctgggattgtggatattgctctattagctgtgagctgatactcctgtcttgcataatgcgtctcatgtagcattgtgccaaccaaattgatgatctttaaatacaccagcgatgtgtttttgcattgcaaaaatgcaatggaattacagaaactgttnttctttgaactgaatatatattaaacaaatttaaaccatgattttctgagattacctctcagtctctcgcattctgtttatagcgtgagaactttgtctaattaccaanggatcattcgctatatgtttccacgtaccaagtatggcttgatttgtcaatatccctg

SEQ ID NO: 33276 - DNA, 447 bp, Oryza sativa
  unsure (1)..(447): unsure at all n locations
agcttcaggtagcctgcaagtntctccagctaatgttgcgccttcgtttggtgcgaaaataagatgccgtgtcacaacacgcacggcgcacggcgttgcaatcctgcatctctccttttcgaccgtggctgctcgtgaattcgcgacacgagatcccgcggactggacgagtaccatggatggcgctgcttcttttcactaaaccaacttgcctggcaaatatagcacgtagcagctgactagtggggccactaggctagccactatccatgctccatgacagtcagcatcagcaccatgaccactggcgaacaaaatatgatttttattagcgccaccatcaccagatccaacaccgttgagcccgcacataaccccttgcaaaatcaaccacggcttccaaaatttcggtgccattgttgacagctcagatctttggcaatgctc

SEQ ID NO: 33277 - DNA, 502 bp, Oryza sativa
  unsure (1)..(502): unsure at all n locations
tatatgttgtcaactgacatcccttctcttcaatcttcgngtatgtgattgaatgtagttgatttgtttgttatgagaaactttntgccaatactatttgtgacatcatgatgatagaattgccctcagctgttcaattcttcataggctgttgtaggcttggcactattttaattttatctgtgtccttatatatgttgtgatgacacgtatcgatgtgaagccgtaaagtggctcttcatgaacgcttcatttgcatgcaatggctgtagaatgagttccaatttagcgttctggtgtgaagactcattntatggaattctgaagacatctgggacanngtttgaactgaagacttctggtgaggtactactctgtcctannaaaatcaaactctagctacanatctggacatactcttgtcctcaaaaaatcaaattgtactacanatctggacatacatgtgntcagattcatggctaggaatggattnntttttttt

SEQ ID NO: 33278 - DNA, 456 bp, Oryza sativa
  unsure (1)..(456): unsure at all n locations
agctttggntggtggaactatatacaaacacaaccaaattataagatatgccgtacaaatcagaaatactgtagcattcttgataaaaaaaaagggtagactatcatttgcaagggaataatggtatatgaaaaagcaaagctagcgaaggaactggaggcaggaaagggaagatacatgccaagcatacataagtgagtgtagaaaggaactggttgtggcttaactcaccaaaattgaccatgggaaacaaactgcanatggaccctgngcaaggcaacaacacatggttccaatatcaccagatatggaatcgctaaacagtggtggtgccgcacggccgacggagcttcaagctaaccaacacctacaatattggcaaacttgagcaccttctatggcagcaaccaatcctttntatacagataagacaaaatcaattatcatatttgatat

SEQ ID NO: 33279 - DNA, 433 bp, Oryza sativa
  unsure (1)..(433): unsure at all n locations
tcaccccataatttcatgagttagctnttggcccagaattccatgaatgcttatcttgggcccaaaagcgntttagtattagcctttgaccaaataacacatctagtggtagcctttggccaaataacacatgaattagcctttcgccctagaacacatgaacattagcctttgaccaaaaattgtgggtattagccttcttgtggcccaaaaatgtgattgttttccatcggcccaaaaacacgcacatattagccttcggtcccatgagtattaaccttgggcacaaaaatgcttgctagccttcacctataaacatgcaagtattagccttcggcccaaaaattaatgacccanaaatgcatgattattagcctgtcttgaaaatacatgaaatgttgcctttggccgaagatttgtaagtattaacatt

SEQ ID NO: 33280 - DNA, 447 bp, Oryza sativa
  unsure (1)..(447): unsure at all n locations
agcttgngcctcatccatccctatccgtgtcttctcaaaggagcctcgatgaaaatcttgggaaaaccactttctccaaccctatctcttgcttaaaaaatccaatggcaaagccccatgcataacccgattaagaaggtgatgtttgttttcccgtttggatcaactgatcccgttctgtttgaaggcacaaaattttcctcccaggaagagcacgattcggtgaatgagattgaacgatcgacatcacccttgatcgagtttaagcctcttccctttggcccacattatcgtgttctcaactacaatcgaaaactgatcataatctgtcatgacaaatctcttggggggagaacttctaggccatggaaaagctagaggaactgactctgaagtccgacaggaaggaccatttanacaagcatgaatgtttntttcttgaacata

SEQ ID NO: 33281 - DNA, 465 bp, Oryza sativa
  unsure (1)..(465): unsure at all n locations
cttcatgctatatctgccctttatgtatatgagatatatatatttgatttatattgagtatatttatctagattacatatataaagntctattagagtattagctaatacattatcttttgacctacgcattgtccatttagctatgatataaacacatctaatccctgagtttgtcaatctgatttatatacaatccatactgtcgcagttaggtccaatctataccatttgtctataatgtagagaagattgacttagagattatatgattgtttgcctctacaactattagagattatatgactgttggtatttcttaacggcattactagaaatattcatatctagcaatggcgcaaaaatagtcatggtatatttatggttacaaaagtaatccgcaagcgcatggatataccatnggagcatttcacaccgaagtattnccaggtatcgtatgtaatcc

SEQ ID NO: 33282 - DNA, 466 bp, Oryza sativa
  unsure (1)..(466): unsure at all n locations
cgatccttanagtcacctgcggcatgaagctttatacatttatcgggcttgtttcttttctacgaaaanagttgctgtgattgtccaaattatgaggcttaacgtcgtgtgtttggaaaaattaaggagattgggttaattacttgtatttacactcaacaagaattgccccatggactcttggagggttgaaatgaaaatttgacaattggaattatttcttcatctacgtacgttccaggagatcagtgaccttgttgaaactaacagggcactgtttatgtttattggactccagtcgcaagttcgataatatataacatacgttttatttgacgatctctctcgagttaaaatcacatatgagcacgcgtgccacatgtacacaccaaataatggaagaaaattntaatgcttttccatgctgaattgagagaattattcctgaacaatgaaagagagcgat

SEQ ID NO: 33283 - DNA, 351 bp, Oryza sativa
  unsure (1)..(351): unsure at all n locations
tccagctaaagttgcatgcatgtaagtgctgtgaggactagttatttctatcacaaacaaatgagctagtttgagatgatggttgctagtacactggaacccacaaataacatttaaggtgaagctataccttgttgtggtatggattgaaatccaaactgttcttaaattntatagtttanatttaaaaataattatatggtaatgtggttaattatcttattcngcaccatcggaatagaggtggtcaatggaagtgacatatagaaaactcttaaagaccaattctaaatattcaatgtttaaacataccatctaaagcacaacctaatactcccacatccacaatta

SEQ ID NO: 33284 - DNA, 448 bp, Oryza sativa
agcttgcaagcactgtcagcattagaatattatatttgttcagcactcagcacactaccagccgcccttctaccagccgcccttcaattattagatcaagtgtaataatatagccctctactagctccaaaatttaaaacatcatctatagtcaatttaataactcgctcatacaatagttagctgtagaaacatactactccctccatccacaaaagttacacatattactttcgacaccaagaccaagaagaaattaaatcaccttggatgttacaaaatcaagtagtgaatgcaagcatgcaaccaatgagtatttagatgacttcttgggttctaataaaacatttaatttatctcttcatttaagtctttaatgcataaagactacaaataggaacaacttatttggaaaaactagaatgtgaaatatgtgtaacttttgtag

SEQ ID NO: 33285 - DNA, 423 bp, Oryza sativa
aaccaagcttcatcatcggatacatatagccattgtgttggatgtgttattggcgatctgatgaagttgactccatttgggagctctgccatcgcatcttaccaactaaggcttagctaggaaatctggaacatatgtgatcaataggaaatagtagtcgaatttacaaaggaatcagctctgaatcgactatggattatctggatattgagataatattcaagggtgtacaaatgaataaattagctaccccaattacgtagaactaattagacatcatatggtactttgaattatctagatttatactaccggatagagtgttcaatctagtattaggctgctatagtttagaacgcagagtactgttaaattgaaatcttgttcgataagaaaataacgtattatatgaaactcagtttt

SEQ ID NO: 33286 - DNA, 442 bp, Oryza sativa
  unsure (1)..(442): unsure at all n locations
agcttagcaatattggctatgatttgccatccttcatacttacatggagagagacattccagttggtaattcttctactttatatacattttagcctttttcctgctgaaattcattgggggagaactatattatacagtttggcagttcagaaattaccaatgatgttagttttaatctactgaattctttggntatgcattcctctgttgttattttagttctaactgattcattcaatggcttactgaaggttggatacttgtaaattttctaggcacaatgacattgaggtacctattacaattttcccttgcattaaaattcatttcgtcattgcaggctggccttggtcttcgtcttggccgacacatccttgaagaaacatcaaaaggacgtgtatgttttacattttactgtgtagctaatcatcatttgggat

SEQ ID NO: 33287 - DNA, 493 bp, Oryza sativa
  unsure (1)..(493): unsure at all n locations
ttccggattaattcatcagcttctgaagacaaaagagagttttcaatgcatggtgctgggctaaggcgctaaacttgatgtcttcatcaggtaaaagaaaaaatgttaattatggaaagccaataataacattagtgaaaatttagtttatatcatgttgggatgggctggtggaattaaacaaaggatactatctgtgttatgctgttcatacttttcccctcaaaatgataaatgaatgcaagtatggtaaataaagttgatttctttgtggatagagtggcatgcttcaactatttcactaagcttgtctttgaaattttgaatgtttcagagctgtaatttcttctgccagattntactgggtacaactcagntgctgaatctggaaatagctttcaagatacccattgataagcactgtanatcgattgcaacatacaggaattacttgtgagaagtttcttgatggaaccatactagatcttttgtg

SEQ ID NO: 33288 - DNA, 446 bp, Oryza sativa
  unsure (1)..(446): unsure at all n locations
agctntcnaacaccggcgatattgctgagtgtctttaatggcatgctaagggggngtttatgctntaacccccctcaagcatggttctcgtatgcagctagaatggaccagcacggcagcacgcaagatgaaccagcacgaaaaataccaaagttcatttgcgttagtacacatgcacgcacagcacatggaccaaagttgggctcctcttgctgggctttggcccaggcaggctcaagcacgcgcgtgatgaatacaaacttggagggaacaagttcacaggaggtctctcaacttaaccgcaagatttttttagctcccttaaccacaaaatagaaatgtataccctaaaactcacacaaaccatacactcaagatcctatggcagtatatatgagtggtttcctaacatggcatcctagtcagataagatatataagtacatg

SEQ ID NO: 33289 - DNA, 486 bp, Oryza sativa
  unsure (1)..(486): unsure at all n locations
ctataaaactaagcttacattctctctctctctctctctctctctcaccataccaattactcagtaggtcacactagctggctagctagtccgtataccggcatggcagctgccangtgggccccgatcgccggcttcctgatcgtgctcccggcgctgctgctgccgccgccggcatcctccgccgccatggtgttcccgctccacggcaacgtctacccttctgggtaggcaagagcaagacggccacctnctcctcctcctccaaacgctctgcagcatgcatgcgcaaacatttcacaatnttggctgtntaattagttgataatctctgcattntttggattaattattgcatgcangaggttcttcgtgacgatgaacatcggcgtccctgagaagccctacttcctggacatcgacaccggcagcgaccttacctgtgtggagtgcgacgcatcctgccagagctgcaccangcatgcg

SEQ ID NO: 33290 - DNA, 445 bp, Oryza sativa
agcttagctagttgtgaaaagcgtttatttatctatctagcttaacatttatattttcaaggatcttgtcattggcagtgagttttttacttagcgcatcagtggttttagcttgcgcaaaaacgagatccttcaaggaaggctggttagaaaaattaccgttgttgttacctccttgataatatgggcgtggatggttccaccgctaacctccttgtggacggtacccgttgttgttgttgcccatgtacatcgcctcctcatgggtttccgggcagtcattcccagagtgacccgtgccgtcgcagacctcacacgtaacgtgtgagtccaaggccttgacgatgccttgtggccttttgttgtggtcgtccaatcgctttatgaggaggtctagcttggcagcaagcaacgccgtctccttgatggtatgcatgcctcactg

SEQ ID NO: 33291 - DNA, 472 bp, Oryza sativa
  unsure (1)..(472): unsure at all n locations
tttgtntgtagcttcatatataagagagatatggctctattcttaacagacggcgcgagatgccttttacattgctatccatattctcatcgtcaagactcgcaatcgagataattgagaaacagtgatcatggtggtggtttagttctgggtacgtagtgattacgcacttactcgggctttcttttcacatattatatggagatggtgacacanaattcatatattacgagccccacattgttaagttgcgacttcgtagattccaaatacatgcgaagtacggattttatcaattcattatcttctaaattcgacagagnaatcatttatttctcaatttcaaataacttgcagcatggaattattaaattaactaagganaatgagacatatgaaacccacacacttcacataaaaatattaaaaaaattaataatganaatttgtataaaagatactaatatacatc

SEQ ID NO: 33292 - DNA, 426 bp, Oryza sativa
agcttgacttcagcagcggtgcgactccacttcacacaggcaatccttgacggcggcgatgaaaccaactttgacaagacagctcccactaggaagattttcaattctggtgtggggaaaaagagagcaagactgagtactacccactgtactcagcaagtcataccggaagaggaggtatgatgcaagatataaccaaaggaggctaggggttcatttgcataaagcacgcatttaaaagcagaagttgaaaacagtaaaacaattgtagtaattaatcaacattaaccaatcactgtccaatgctacaccacgttgcaacaagcccaaccaaccacctgaactacaccagttcattaagctaaactatgggtgagactaatcacggtgaatctggttgatcgcccataaccacgggcacgacta

SEQ ID NO: 33293 - DNA, 433 bp, Oryza sativa
  unsure (1)..(433): unsure at all n locations
ntnggacctgtactggagttaagcaaatctcccaggctctcgtgttttacgtcaacacgattttggcacgcctggtgggacagattaaaagtctgagtcacaacaacattctcttatggctaaaaagttgccactgtcgctatcttcgactggcaaagagcttcctcccaagactaataatctaaagtctggtgcgtttgaagttaatgagggaaacattngttccatcactgtagacaagctaacacctgagcaaaagaaagagctcgatctgatgatgcagcaaacgcaacaccagttcttgaattcattcatggagacccgtaaaggaacaattgttcaaaggtataagatgaaattagttgctgatgttcctaggataggttcttccaaggatggagaagtacaacaaatcccagctggtacaactgaa

SEQ ID NO: 33294 - DNA, 240 bp, Oryza sativa
  unsure (1)..(240): unsure at all n locations
tcttcgaacatgagatagacacctctttacgcaanaacattgggtcagggaacttgattcattgtcagcatatccatacatattataacatgtcaccccttgaacattcgctcgggggctctatctatctaatattcttttctgagtcttgatgtctgagaaattctatatcgacattgtggaagactccttgtctctatggttctacacccggatcgactagtgtgagtatgaccaatg

SEQ ID NO: 33295 - DNA, 410 bp, Oryza sativa
agcttcgcagcgagccggtcggtgcacggctttgtttattgtctccgctcgcatgttttcgcgtacgactgggcaagatatggtcgcataactgtttgccgagcgatctctcttgcacgtttgctggctagcgggaataataaagactagcagtgccaatggagggcgttgcgcttgagccacaacagtgatgtaaatagacaaatagttcgggcacataaaatggagtgtactgctacatataatattgcttccggaagactacatggcacgcatgtatctatgattggagggaacatgtcttaatgctatgcgcctaacagctgctgatctactcgacgcatgagctaagatgaccattttatttacgaccggacgttgaacccgatgataataaaatcgagcaagac

SEQ ID NO: 33296 - DNA, 283 bp, Oryza sativa
tacctgaattcggcgcagtgagaagttcacttcatcaccacactcttggttattgatataaattccttcggattcgactgaatccaataccagacgaagcatagagtgctcctgtcatcttttcggatgacagcattgcgcaaggcaccacagtgagattaggagtaagcctcattcgcgagattgtgcccattttatcttcacattacatacctgatagtagacagaatcgtaacggcgctataaccgacgctcatcatcaggatcgtgttaggttacaaca

SEQ ID NO: 33297 - DNA, 450 bp, Oryza sativa
  unsure (1)..(450): unsure at all n locations
agcttgtaatttcatttatagaatcatgatcattnttcttatttccatcataagcactatcttactatctatgccaaatacagagggagtcttgaaagccaaaagtagtgaaatggtactttccacaactcaggcttgaccaactcatatgcagttacccttggaaaaattcacaactgacaaggttggtttctttggtttttgggaattctctttgattnttctgacttgcaccactattatgtgcactctttattttgantnttgcacctgtaattacattgtctcaattacaccatattatattcctgtgtacttttttctctctgaaaaatgatgtgctgttgtcttgagttgtgcaatcaaagataactattacaataagggattctnctagaaatgaacaagaaacgaaagtatgtgttcctacaggaatcaacgaaataaaac

SEQ ID NO: 33298 - DNA, 432 bp, Oryza sativa
  unsure (1)..(432): unsure at all n locations
actatatttagaaccatgatgtnggtataaccgtgtcatctttataggcatgacgtaaaatcactacttgaaaacaacacataagggacggcactatagttgtcagaaatgcaagaaccaatacttataacggttttcccgcccgagcgcgcacccggcgggcgccatctttgagaactgacacctatgcggcgacataagtgctggtctttaatagaaatcgatactaatatcattagtgttttttaagagaaccgatatctataatatattataggtgctagttntataatgagccagtacccataaaataagagccgagccggtgtccttattcacccacctgcgcacccacgcctacccattctttctctcgacagttacgcctctccatccttatctncnntcctttggcatctctctctctctccc

SEQ ID NO: 33299 - DNA, 454 bp, Oryza sativa
agcttataaggagggacatggatcgatccatgacatgccatccgataagaccgcaatgcttcggccaaccgagtatgccactgccgaggatgatcggaaatctttctcttgatcaatttgattaagctcttgttagatgcctcgacctgcccattagcttgtgcataatatggtgaagaattcaacaatttgatacccatgctatcggcaaactgaacaaactcatcggacacgaaaattgaaccttgatcagttgtaagggtttgagggataccaaatcgataaattatatgttcttgaacaaattgtacagcgtccccagaatcaactttcttcaaaggaatcgcctctacccacttggtgaaatagtcgatcgccaccaatataaacttatgtcctttactcgatggtggattaatcatgccgatcatatcaatcccccaacctctaaatg

SEQ ID NO: 33300 - DNA, 370 bp, Oryza sativa
  unsure (1)..(370): unsure at all n locations
ggtgcaccaattagttattctacaatgttctaaagcgataccgtcaccaactaggaggtgtgctgcagcacaaataggttcacaagataaagaaacaattgatattgaggacgatgacaccatttagcctttccgatgctaggtccgagaagcgattgaattggtcaaatgaagaagacaatagaatggtatgttaattttcttttgttctttttaaagatttgagtctgtatgcttntattttatttgcacttcattaaaggtacggtttattcttcttctaattgtaggctagtgcttggctgcacaattcatttaactcgatcgantggaaatgatagaagtcaaatcaatattggttagatggtac

SEQ ID NO: 33301 - DNA, 456 bp, Oryza sativa
  unsure (1)..(456): unsure at all n locations
agctntgcctctctatcgagcaggggggactatggatcatttatctatgcctaatgggaattgcgcttcgcactcggtggatttggctgcgccgcgctgagccagagcgtccttggatgcgcgttgcgcctctagctgacagaaagtcactgcactgctttgccgctggtagcaaagtactgctggggaacggagcctctacctcgttttggtgcgacagctggttgccagacggaggatcagtgcagtacagattcccaattcttttctccttcgtcaagctgagtgacatcacggtggctgccgctctctgcgacaactcctggattgcagatattaagggcggcctgtctgtccaagcgatgggggaataccttgcgctctgggacgtgatcgccgggatttctctcgaccccggaagtactgactctatgatctggaaggcggcacctaatg

SEQ ID NO: 33302 - DNA, 490 bp, Oryza sativa
  unsure (1)..(490): unsure at all n locations
ctatacaagactcaagcttcctttgattgatccgactccaccatgaacacgacatccgggcgacttgacttccatcggctgattctagaactttgaagctgatactgactctaagccgatggtaactttgggcttaccaaatttcacttgtaacacatgccccccagttttggagtatgagaactcatgcttcaaaatttcttgtcttgataacttcaaaaccgatctttctttgcttcgtgcaatcngctttcatgagccgatatntgttgcattagatgagctagactgtcaaactcgtggcaaaagaatctatnctcgataggtgctgacaatccttggaatgcangatctactagctgttcattgcttangctcaaactataacatcggctgcggacattacgaaatctctgaatatattccatagcccgatcttctttntgctgctcaactgatattaagtctgaaagcttcaactcgctgaatc

SEQ ID NO: 33303 - DNA, 447 bp, Oryza sativa
  unsure (1)..(447): unsure at all n locations
agcttctattatatatagaaacaacaatttgtctttatgatttgccaaaatcagcaatcaaagataacaatgtagacatgcagacaaaacgataggactnttccctcttatgcctctgtcctgctatgcttcgagtaattctgttcacaacctaccaagcaacatacttgaatagttgctatataggttactttgaataaatgcacatttgtatggaaacaaaatggcagcttttgatcaggtggcaaatgaaaatccataagaaagagctctcattacctcctgatattgccgtgtactatgagagtcagcaacatcggtagcatatgtttacacataaatgacaaaggaaaagaaataagtgccacatgatagtaactgacagctatgcaactaatgtaaaacttgctgatggatcaacagaggtttgctggtggaccctacggt

SEQ ID NO: 33304 - DNA, 477 bp, Oryza sativa
  unsure (1)..(477): unsure at all n locations
actcaactgtgcgtgaagcatcactctttgacgctncatgattttatcctatcctcgctggagggtttcctggatctttctcctctgacaaaagggcctgcaggtcactcccatttgccaggctgttgaactccaccgattttgagggcagagcaggataacgtcgctggcaaagggtcataagcctcttgattgactgaaggtacttgcgagtggtcttatcgntcataatgtgcgccacactgtttgtgtagatcttttctcgggccgaacgctcgtggataccaaccatagtgacaccaataagccatggtgcattgccaatggccagcttgatgtattggtccattgctgctaaataatcacgcttcatgcagcattcaacaataacgagcaatgcttgacggatgtcatcangaagaacctaaacataaatcaaaacaattatttgtatcagagttgcanacaatatgtagt

SEQ ID NO: 33305 - DNA, 446 bp, Oryza sativa
  unsure (1)..(446): unsure at all n locations
agcttcatcggnctcaatatagaattgccatggctctacgttaaatctgaggagcgctagcttcatccctgctgaccaaagtcgcatttgtggctgacacttcactggtaaaatcgacatgttaattaagttgttgaccaccgcaatcgatagtaacagaagaaacccccataaaacagcagcccataatcacgctagcactagcatggtgacgattcactgtatctaatattatctggatcaaacaggtgcttcatgaatccagggagatgaagttcaaaaaaagaatccagggagatcaacacgggcattgaataagaaggatctcattatgacgaaggcaccaacatttgcctgcgtattgaatcagaacgatttcaccacgacgaaggcacaaatcgctgcctctgtgcccacaaccgatcgacgaagttcgtcaatgagat

SEQ ID NO: 33306 - DNA, 363 bp, Oryza sativa
  unsure (1)..(363): unsure at all n locations
tctttatagctattttgctatatcactcatcatattatacattgcttttggtatatcactcggatcatgttatttggagggttcacactgcatatgctatatattgatatcaaggcacttggttgattacgattatcaaaaccactcgggtgattggattatttattccttgactatatgcttggtttgttcaattaaccacattgtcgggggctacacctattangtgcatttagtcggcacacctgactttattttccagccctccacagtcttcagatttggtaaaagtactctggagaccatggcgaagatgattgaagcactcggctttggagtaatctagttcgagagaacgttatc

SEQ ID NO: 33307 - DNA, 443 bp, Oryza sativa
  unsure (1)..(443): unsure at all n locations
agcttaaggatgtgcantgcgtcactggatgcttgtgccgcctgagnccaanaatatcgacgctgggtgagagggcgctacccctattcaagctccttaagagctctgggccgtttatatggaccgaggaagctgatcaagctctcaatcagctgaaagcttacctcacttcccccctggtcttggtagccccggggccggaagaaccattgctactctacttggccgcgacccctnatgtggtgagtgccgccctaatagttgagcgtgaggaaagcgaacgggaggcccctccggctcgcaacggcccctcgtccaccgaaggcctagcgcccaaagctcccagcctccgggaggaccccgaggcccccgagggaggaggggaggctntggcatgtggccccgagccttatgatcctgaggcaatccgggatccccccggg

SEQ ID NO: 33308 - DNA, 500 bp, Oryza sativa
  unsure (1)..(500): unsure at all n locations
aggttatggcatataataacagagctagtgtgattaaatcatctatatgaaattaatcaacgacatatcccatataatagcatatagtgggagaggtgagcaacccttagttaaccaagcagtaaatagaaactattcaaataaatgattcaatatattaagatattgtgcacacatatattgtacatcccattatagatatatggtatcgtattaaattgcttgttgcatatattaatttagagggagtatgtgacgaacatgaatattagataaatactagttatacatcttgtcctcgtataattacagatcaactgtaaatttggattattcattgtaaaattatgtgatgggataatccgtaaccataatatgattaacctaaacaattctaacatacacagcatgggtaatggttaaccttttataattattttgacaagtgaaatatgtacantaattaaataaagccttcattaataaaataataatacaaa

SEQ ID NO: 33309 - DNA, 446 bp, Oryza sativa
agcttagagagtggcttagctagctagcagagatatcagctagctagggatcataattaatttctaggggatttccattattaactctataggttatttttggctaaaaaagggtataccatttcgttgaaaaacaggaatcaatataacctatgctgctatcctatttttgcagcaagtccctgcatgtaattagaatattaaaattagtacctattttttttgcacggagagactacattaagtatgccttcattacgacattaatcgtgccctaactaacaaccttaaattggagctgtataaattagtcacgtgcagccagtcttgattaattcttgaaactttagttaatcatttgtcaagtgtcgcttaatgttgtatccaccaggcaaaaaatagtaccacttaattaatttgtagcaagctatagctttcttcagtac

SEQ ID NO: 33310 - DNA, 428 bp, Oryza sativa
  unsure (1)..(428): unsure at all n locations
ttaattggttggaatttagactctacttaaagttcagagatataatatgcacttctaatttcctacgttacatacttacattagattttggctattgtcctatgtgaaaggacctgattntggcttttcgccaacgacgaaagggccaaaagttaattataaaacaattatttctcgcaaaatatataaataaccaatataaaaagtgtaaattagcatcaaactttcaatattgagaccccgtgtcgcccacacgtatagatggtcataacgcccgatggcccggccaaaggcatgactatttggcccggcccaagcacggcacaacctcgatagtgggccgtgcctgggccgatgccttggcacgggtgggctggcctgcacggcatggtcgaagaaaatagtnagggatcaagatgacttatcac

SEQ ID NO: 33311 - DNA, 431 bp, Oryza sativa
  unsure (1)..(431): unsure at all n locations
agcttgaggctatttattaagatacattatgttatgaaatgtattttgaaaactaattntattaaaatacattaggaaagaaaataagttattttattaattaggaaaacgtattttgaaaatccctaattaagatacattttccttagctatttattttatggatatgcatggaatatctagagaggataagtaacagaagtgatcaacaaacacataacanatggctacagctatatatcatgattagatagtttaggatgcccgaggaagtgcagtgactatgaagtgtgctgtgattgacgaaacgttgggtgtgctttatggatcaaatcgagtgttaatccccacttgcttccgctggaattgcaacttggccaccaaggacattgagcaagaacgtttacttgttctggtccatgaacacatac

SEQ ID NO: 33312 - DNA, 408 bp, Oryza sativa
  unsure (1)..(408): unsure at all n locations
ttacgcaatgctctcttgatcttggacaaggttagtctcattatattntatgaatgccatcatgcaactggaaaccacccttatacttgtaatgaaggtattatgaaataccatcttatcatgtttttttttttgttttgacactaccatgaatatttgcattcagggttttctttcttgtgtttgtcataagatataacttatcacaatctcacgagttctattacaaatcacaacataagccaagtgtgtttggtatgacagcatcacctgttataagaaaagggaagtattcagttttctgcaagaactatatagaatgcttcttcttcttttcttttgtgagtgggtgggtaagtgccccgagggctcgatggangatgggatgttaaacctcatattgttcac

SEQ ID NO: 33313 - DNA, 432 bp, Oryza sativa
  unsure (1)..(432): unsure at all n locations
agcttgtcactccgacaagaaccacgagccgttgatgatgactttcaaagcgacaaggtcctggtgtcctatccacaaaaccaggaaacacactttgcaagcctgctgggtttttctcaacgtccgcgctgaaattcgctcctgcaaagagcgtggaattcagcgtatttctccaactcgtgatgtctattctcctattcacaagacaaagaatcacgacctctcaagctgcgaggtctttctcagcgccatgaaagcgccatctcctaaggtgcaacagtcacacattctcatcagggataaagacaatgaatgaggagcgacgccaacttcggatcgatttgttggggtaatcgacatcgatcctcacgaaccatcagtcttgcacctnctcgaagactatggatcatcgacaacgagcgtgccacggga

SEQ ID NO: 33314 - DNA, 479 bp, Oryza sativa
  unsure (1)..(479): unsure at all n locations
tcaatggacattgatgcttgtgattgcagaaacttgtgctattgctgttaatagatagccagactgatcggtttcacctgcttaagctacaagcaatcaactagtcatggtcatggtcatggtcatggaatcagagcaaggttaagattactagaagcaactgcaggtcaaagattctttcttagataacagcattacccaaagagtcattaacctatggcattaactggtgctggtcttgtacactacattctactactactatatttctagattttgaagaaaaaatagcatgcagataaatacttgaagtaggaatcacttgcctggagcaatgtatccataagaaccggcgatgcgtgacatagcatgatgatagttgggggaagtcatcagcttggccagcccaaagtcagccaagtatgcctcatacttcgtatcaagcagtatattattgcacttgacatcgcngtggagta

SEQ ID NO: 33315 - DNA, 451 bp, Oryza sativa
agcttacgaaggctacaaggagaagcaatgtgtcatgaattcaacgtaagacaataattttcataagattggtccatgatgcacaaatcataaaggttgcataaagattgcaataatgttcccacacaactatggtaatcatcaagtgacaatggtgactgcagtgttaattttaatgtccttagcttggttagcttactgacttcctggagggccgtcacttgttcagactgagacactacaaattcttttagctcttccaggctcttcaattgtccaatagtcgtttcatctgaaaatctcgtgtcctgattgataaatagacgagctagtcgttgaaggtttgtgatagttgatggcaatatctccacattggtttgtcttatgtccagcgtttctaaatatttcagttctccaattttttctgggagataatccactccatatgagg

SEQ ID NO: 33316 - DNA, 388 bp, Oryza sativa
  unsure (1)..(388): unsure at all n locations
ttggagaagaagtcttaggtggagtcttggcttataccccagttgttctcctgtgaagatggagccgtaggcccgctagtccgctgctgtttatttttgattgtcaggcctgaagcgcctttgtaataatgtaaatattatcggtataataaagatgtgtcttttatatcatgtttgtgtggtgtaccccggctattcctgggacggngattaatacactagcgttcgggaaaggcaattttcccggtcgcgacaagatggtatcagagccatctcgactgtaggataagccaaatggataaaacctaaggacatattttataaataaaactatttgcgaaagttcctttttctccttcccctaatgctatttgcaaaaggttactgg

SEQ ID NO: 33317 - DNA, 467 bp, Oryza sativa
  unsure (1)..(467): unsure at all n locations
cggatcttaagcacctgagctgcagctgatctgccatctttgaagaatttactttctctntatcttcaggtgctagttttcgatgaggtattttaatattttgtgattattttattggctgctcaaagtttggcagatatattctaataaaatagatacctacgtactttggcactctcaggaaattgagacaataatctagggattttgaataaaccaagcgtctaaactatgtttataatttagtccgtttaacaggagagaatttttatgcatattgaaaaaaaaaagaaagagcactaccaatacatctgggaaaccgatcagacataaggcgtctatcaaaccggtcacaaatttcggtggtatatattctaaaacactattgttttaaacttttaaagcaatataaattatttgtctataattatatactaaaagttcatactataaacgctcctaagcat

SEQ ID NO: 33318 - DNA, 461 bp, Oryza sativa
  unsure (1)..(461): unsure at all n locations
nggtgnngttttctcgatgtacaagctaagatccgtgcctgctaagagcatggaattcaacgtacttttctaactcgtgatgtctattgtcctatccacaagacaaagaatcacgacctctcaagctgcaaggttcttctcaacgccatgaagacgtcgcctcctaagatccagaagtcaaaaaatctctcttagagatgcggacaaggaataaggagcgacagttatctcagatcgattcgttggggtaatcgacatcgatccccacgagccgtcagttctacacttgctcgaagaccagggctcatcgtcgacgagtacaccacgtgatgtatttgctatcgatgggaccagcacgtcagcgcgcgctaacgcagaagcggagaatcaagtgggtacgccggcccagcatatcggggccatcaacgcaatactgagggaaacccttatgatcccgtcta

SEQ ID NO: 33319 - DNA, 450 bp, Oryza sativa
  unsure (1)..(450): unsure at all n locations
agctnnttttcgttgcatactggaatatttcttttatataatgcgtttctagatactgatagactgatatagtactacttcagtatttaaatntctttcttctttctagaaaatacgtacggagagatatatacgtactacgaagaaacagagtatattctttctgcttaaaacacttatggtcgtttcttactttcgaaatgtctcgtactctctcccgccctaaatatttgacgtcgttaacttttttttaccgtgtgtcttatttaaaaaattgaagtaattattaattctttttctaccattgttaaatatacttttacatatatacatatagctttacatatttcacaaaagtttgtgaataattacttaataattatttaacactgatgggatgcaagcaggctttctcccgaatggaccaacatatcggtcatgcgctaatgg

SEQ ID NO: 33320 - DNA, 506 bp, Oryza sativa
  unsure (1)..(506): unsure at all n locations
tctacacaagcacaaattcctcattgttattgatggcctgcagtccacagaagaatgggacttgataaaatctaccttactatctggaaattcagaaagttttatcattgtcattacaaatgaagaaagtgtcgctagacattgtgcagtagaagacaatttcgtgtttaacgtcaatggtctaaaagccgatgcggccctttatctgttcataanaagaagtgcgttatcttgccctttgttctgcaatcttgctacttagctagttccatatgtgtacaagagtaccaactgtgagaatgataaaagtgctataacaagctaaattaactcaatgatgacatagcctattattaatcaaaatgcacttgtatgggtgtaccacatgccanacanagtgagcatggtgaccataaaaaaaaaactttacaggcttcttgtcatgaacttttagntncctcccactttctttttgcaagctatcttttgtcacacatcatcatgat

SEQ ID NO: 33321 - DNA, 416 bp, Oryza sativa
  unsure (1)..(416): unsure at all n locations
agcttanaccgaatagttgaataattaatataacatatttgcatatcatcagttataagtcatcaatttattcttatacggcgatatcatactattattatgttggtatttgtttggaagtaagagtttataaggagaaaaagaaagatttaagtcaaaattttaatatatatgtccaaagtgaatgacatgtgagcaaactcatccaacttatatataaattagatacaaaccactatgcaaaactatattagagggttatataaacggtactgtaaaatttagggggttgaatgtccggttntaaagtttagagtgctagacagactttcatctaaagtttaggagtttatgtggactcttttccaaatataaaggggtaaaacctcctttaaacctcccctcactcgcatttg

SEQ ID NO: 33322 - DNA, 152 bp, Oryza sativa
actcagctagatatgagtactcacccctatcgcgcctgccctagagagcatctctcctaacatactactagcaggactattctgggtctctgtcatataacggacttcagacacgtatgcgtatttattaggctgcctcttcttaaacacat

SEQ ID NO: 33323 - DNA, 386 bp, Oryza sativa
agcttagggtacgtatctagtgaagactattgtttaccgatatgcactctaaatcatggatagtgtggttacatatgacgagatatcattgtctcatacgaagattccatgtacgtacagctgtccatgtgctgttatagccgatgagtgcgccacaagattgtaggaaagcgataagattccaatacctatacctcatctttccacctctcttggagctgatttcataggtacggaatagcacgacatctcgagtatatttttgcccaggatgtcctgatctcactacgcaatatatatatatatatgtatatatagatgtatatatatctttatatatatataagatgtatgcatgtgtataataagataaagtggcgcagact

SEQ ID NO: 33324 - DNA, 442 bp, Oryza sativa
  unsure (1)..(442): unsure at all n locations
agcttgntactccaaacatccgtaatgccaattctttttctaataatctaaaactatatagctatgatggttatggacttaatgacgatggtatgcatgtatactatggtggcccangcaagtacatctaaatgatgtgatgtgctttgcaaattgtaataacataagtttatgtgttagaaataatggaattaaagggaacatacaacaacataacaccatgtatgcatgcatgcatgcaccctctatttcctttttaataatcagattcgggctcctatgatagttagactgatgagatattcattgtcccaaaaagaagcaaattaatgttgtgtgttggagggggctggaattntgagcggaggctcctttgaccagccagtcagtagctagctcccatatccaaggactaacaagtgggcttgccggaacaaagctt

SEQ ID NO: 33325 - DNA, 450 bp, Oryza sativa
  unsure (1)..(450): unsure at all n locations
agctntaanaatgcacccaaaaagtcaaaaaattatgtaaanaaatagagatctgcagcactatgacagcatcacagaaaaaaatcagcttaaaatatgatgtacacagggagaaaaaaaacaacaaatctgtgctccaacagtggtcaaacatgtcgctttactattcatattttgatttgattttatgtgatgttacatgtcatagtgctacagatctctgatttttttcacatttttttgtgactttttaggtgcatttttgaaacatggtagtacatgagcacgaaacatttccgtatagcatccgatacttcctccgagtttttctttgccaagtttcgttatgtttttctactgtttgcaaaacgctgttcaaccttgataatctattattattattattattattattattattattattattattattattattattattat

SEQ ID NO: 33326 - DNA, 418 bp, Oryza sativa
tgtcgtcgagcattcaccgtcgccccatctgccccccatgcttatccatccctagcgccgtcgccgattcaccaccaccaggtcacgtccatcgtcttcttgatttgctccttccgcttcttatttatcctttcttttgttgatttgatcagaaactttatcctttcttttgttgatttgatcagaaacggcaatgaattttattttaacagagagagggggggggcaggggagggggaattgattgaataaatgaaaactggagtttgtttgagtcactcaaattcagatatgaataaacatgggaattttctgtatctttagctaggccatgtgcatttcacatttgtaatgttgatggaaaagctacagatacgggcagagagtaactggagagaatagattataaatagaaatg

SEQ ID NO: 33327 - DNA, 433 bp, Oryza sativa
  unsure (1)..(433): unsure at all n locations
agcttcttgaagaactctgtattggagctaccgcgttgtatcactagatcatcaagagctcgcttctgattggctttcttgagtatattctcctctatagtgctctcactgatcagtctatagatgtgaacttcacgagtttgacctatcctgtggcatctgtcttgggcctgttggtccattgcaggattccaggcactatcataaaaaatgacagngtctgcacctactaagttgattcccacaccaccactacgagtggataagataaaaagaaaaaactttgggttagtattaaacctctgcatcagagtctgcctctcttctggctgggttgatccatctaaccgcaaatacgtatacccatatagattaatgaacttctccagtatatcacgcatcttagtcatctgagtgaatatcaaggccctgt

SEQ ID NO: 33328 - DNA, 428 bp, Oryza sativa
  unsure (1)..(428): unsure at all n locations
tcanacggtaccatctgtagactggcttggtagctgtgttgtttataattccgcatatggcaagcttttgtcccaagctccaccaaaatcaagagcgcaagctctcaacatatcttccaagatttgattgactcactcggtctgaccatcagtttgcgggtgataggccgtgctgaaatttaaacgggtccccaattcttcctgcagcttctgccagaatnttgaggtgaactgactctctcgatcagatacaatcttcttgggtaccccatgcaaacacatgatccttgccaggtacaactctgccaatttctttcccgtataggtggtatgcactggtatgaagtgagcaaccttgtgagtcgaccacgactaccagattgatcgtgactgatgatgtctgggcagtcttgtatacatccattcca

SEQ ID NO: 33329 - DNA, 453 bp, Oryza sativa
  unsure (1)..(453): unsure at all n locations
agcttcaatgtggtgaacaagtcacaatacgtatctcatcacatgggtccatactaaaactaagcaaattgtatgagacaaaccatattcgacttgtatcacagtgttgaacattcccctggagaactagaatactagaacatgtataggagaaagaatcacaccgaccttgtacgtattgatcctttaacagctgcaacaggaacatactcatctccagttggaatgtttgaccagaggaagtgaatccttccccctccacctccaccactgccaaagtttccaagaccaccaacacttgaaaggatggagctctccgctagggacaaagcacgtacaaaaagaagaattgtgcccccagaaccaccaccgggtcctccaatagaagcatttgttaccacatcagtggaactttgaccatntgattctactgaaccatagagggaaagactt

SEQ ID NO: 33330 - DNA, 388 bp, Oryza sativa
tgcggcatgcaagcttcttgcagtgccgagccttcattattctttgctaaagaatataccacctctctatgctgtagattgctttatgcccaaacctactaggactgcttgaagcacacacattacacacagtgtattgcatgctagtactgcagccaaccaccatatattccaagctgataaggtgtctgttgatgggatgatgcaaccacacaaaccatgcaaatatgcttgtttcaagcaaccccttttgcagtttccatatcaatcactttttgtacagtactaccttaccttgtgttgcatgcaaggtgtgagcctttatggattaccataccactctgttataattattattcttcctaacaccatcgatgcctgccctact

SEQ ID NO: 33331 - DNA, 363 bp, Oryza sativa
tgtaagcgcgcacacacacacacagcaaattgtatgtctggtctataagtagctagatacaacgcagaaccggtcatgcttgtatattccttttgatcaacggcttcaccatcttcatcaggatgcaacacagctgtagaaccaattggtgttgaaattggcttgcaattctccatcttgaaccgtctcataagatccttcatatacttcgcttgatgcacagaaaaaccttgaggtgtttgcttaatttgcagtcccaaaaagtacgataactcacccatcatgctcatctcaaattcgctgcgcatagtctcagcacaatctacaaccaaagcgtgagttgaacaacccaagatgatatca

SEQ ID NO: 33332 - DNA, 440 bp, Oryza sativa
  unsure (1)..(440): unsure at all n locations
agcttatactatataaattatattttaacttctttntatccatgtacaaaagttagagattttattgaagagtcattcaatctataagctgtgggtcaagtataaacatgtcctataatattgacatatttagaatacggtaattaccatattataagaaacggtaatttccgcaagaatacggtaaatacggaaacgatcggtataacagcaaaaccatttccgttttcatttccatattttttaccatttctatttttgtttcggtcgattaccatttccatatggctcggccggtagaaagtcgaaaatgaactccggtcggccggtaattaccgttaccgttttcacccctactagcagactaaaactgagcgattgaagtgctgaaaactaagccagaanaagaaagagggttaacgggttaagtggacatctta

SEQ ID NO: 33333 - DNA, 302 bp, Oryza sativa
  unsure (1)..(302): unsure at all n locations
taggaatctaaagggttcttcattgtcagcatgtattttatatacatatggacaaagtccggattgcccttcttaacccaaaggtactgtgatggggctaatagtactaagctttggacatataggatccttacaataatatactagctatagcttaaagatatttcattttggtaggttcgttttggttctaaatagttgttttgggttttcagtggaacattttctattaaatatcccaatcagttgctaattgacagtactatcagagagatgtgcagacnagtaatagtggttgcata

SEQ ID NO: 33334 - DNA, 451 bp, Oryza sativa
agcttctgtgagatgggaatctatggtttttttcctgatatcttaagcttgaagactgttttcacctacctttggatgatagggcctatgatcaatttttgcagttgcaatctgatttaggctctctttctcttagtccagggaaggaggattcctggtccttcatttggaatttacatatttactctgctcaaaagttttacaaggctaattttgctggaattaatgttccagagccttttatatggatctggaaaacaaaatgtgtgaagaaaattaaagttttcatgtggttgcttatacgggacagactgaatacaagggtacaagggacaggagagagaggttgggcttgcaataagagtaaggataataatggattataattcaactataagtttataatcaaaagagattaaaacaagaggagtgttggctatcatacaaaagt

SEQ ID NO: 33335 - DNA, 450 bp, Oryza sativa
  unsure (1)..(450): unsure at all n locations
agcttctgtccccagatctatcttagccctgtgtttttattgttgacaagcaactaataccgtcctccatatgagagtatttggtttcattggcattcttttcatgtactcctgtatcttatcaagctccccagctcgaccaagaaggtctataacacaagaataatgctcaatccgaggtaatataccataatcctccatcaattcaaagtagtcaaggcctctttcaactaaaccagcgtgactacaggcagacaaaacactcacaaacgtgacatggtctggactttctccgctctcttgcatttcctcaaatatctccaaagctttccttccgagaccatgtctcgcataaccagaaatcatggagttccatgagaactcatntttctgactcatggaatgaaatacctttgaagcatagtctatccttccacacttggagtacat

SEQ ID NO: 33336 - DNA, 401 bp, Oryza sativa
  unsure (1)..(401): unsure at all n locations
cctgcggcatgcaagctnccagagaagaaatcacacgacttcaagtttaggtaattctctttaaacgtacctctacatctggtcctcgtactgcgacacgatatatcactgtcactttcccattgtcagtgataataacatcacggacctctccacaccagcctgatgtttcccaaaaaaacagtcgatataagagtggaaatccacgaacggtgtaaaagactgaagacgtggcatgaccagtgcatttcaagtatataaaggatacatcaagcgaggaaatgtgactatcatccactggaaatgacttaaagtgttaaacttggtatgcgctggagtatctcaacaaacataggacaggtagagcatgtaaatgatgacaatcattataacgaaacaat

SEQ ID NO: 33337 - DNA, 327 bp, Oryza sativa
  unsure (1)..(327): unsure at all n locations
aaactgtgtcctgatgagcctacatatgctgaaatgtcagnnttcccatatgtgtgattatctcacacatatgtgacattaaatcggnttccttcctctgtggcaagtaacatcgtcctccatcctcaaaggctgtgttcaagcccatgctatgcacagcttactatatgatattttccttcttactcaaactatatcttgtatactgaaccctgtgttatggtagcacacttagttacttccatgtgttgtgttgcaacctattcctggcccccatgttggtggaagtgctgcagcataggatgtgaacaagttgcttgatgagat

SEQ ID NO: 33338 - DNA, 459 bp, Oryza sativa
  unsure (1)..(459): unsure at all n locations
catgcaagctcgtgcatgtgcatattgatgaaaattctgcattttaatttcgcacgatgtgcatgggtaaagactcggataagatccggatcatgtcacatcatgtgcggtggcgacgcgcccgcgcctgcataaggtgtatgtagctgaatggtaccaaacctgtgcatatagctagctttggagactggcctacctttcagagggcataatatagctccaagataagagtcctagaacatcaaagcaagatataagggataatatgtaatgtggtacaactgaattgtcgccctgtacttatactggttgagtgcccatttaacaaggataaacatctgactgtnttatcatgtctgtcgcctggcgattgattagatcatcttaactccaaatacggctgagtctttaacaggttcttcggcacagaatcaataattggttttctaccgtctaagt

SEQ ID NO: 33339 - DNA, 474 bp, Oryza sativa
  unsure (1)..(474): unsure at all n locations
ctataaaactcagcttacgctccgctctantatacccgagtaggcagcctaaagcctctaaccaaactcatattagaagtcctaaacaccttaggaaaccctctagtacaagaaacaaactttacaaaactaataataccaaatttgtactccttccaaattcgactccgcatcccatacgcacacaatacctccatcgtatgccatatatggaatcttcaccaaccacatgcatcaactctagcctaagtatcccgcatgatctctgaccaccacggacgtcgtcttatccccaagccgactcccggtccatcaccgtaaatactctcccgaggcatcgagtcacctacacatganataaacaaggaaaccatattccgagaccaagctatctccaacttgactcattagtagcaaacaacaatattacatacgtatagtatccatctagaagccataatcatgaaacaatca

SEQ ID NO: 33340 - DNA, 460 bp, Oryza sativa
  unsure (1)..(460): unsure at all n locations
gagttgcgtggactgacgtgccggcagatatggttctttgtcttgcgcacttgtcggcgaaatgacccattccttgacaattgaagcaacagatgtcttcccggactcggcattttcttttctcatttcgatacctctgtcctggcactggagttaggctgaaacggtaatcttggcggagatttgtgttgccttgatgcttctctccttggaactggcgggttggttggccatcttcttcgtcagcagaaaactgaattgacaatctcttggtacatgatcagttcctttacaaaagagacaagtgatcctgctcatggggcattcaccgggtggatggtcttcctcacaatgaaagcangtagtggcacacgagctggcaacatgaccgacttctcacaacggagcatgcctacgttcatttatcttcatatctgacggacttgatctaatcttacta

SEQ ID NO: 33341 - DNA, 425 bp, Oryza sativa
  unsure (1)..(425): unsure at all n locations
agcttggaaggaattcgataaggagttttttgtttnttcttacgaggtacggaatgtgcggctttgtctagcaacagatggttttacaccatttagtatagcttcaactccatactcttgttggccagtctttgttgctccatataatctaccacctgaaatgtgcactaaagataataatattcttctttcacttgttattcctggcccagagcacccagggaaaaacttaaatgttttcatggagcctctagttgatgagcttcttgatctatggatgaatggagctgtcacatatgatcgttttttgaagcaaaacttcaatatgaaggctgcagtagtgtggactattcatgactttcctgcttatggcttaatatcttggtggagcacccatggaaaacttgcttgtcctatatgtgggg

SEQ ID NO: 33342 - DNA, 185 bp, Oryza sativa
  unsure (1)..(185): unsure at all n locations
gcagctggagcttaccctctatgttgtttatgtttgctcggccgnncgggtgcactgnccagaagaggtcgttccagttatgattggtatttccgaccgatcgaaaggtatcgagcaaaagctgttggatgtattccttgatcattgtcggaacttggatggccaggtggaaattattgccgttt

SEQ ID NO: 33343 - DNA, 449 bp, Oryza sativa
agcttgtccatcaggtgtttgtttcaagccatttgttactgttgagctatagagctaaagataagatcttctggatttgttcaaatagagtttcgttattaaaaaaatagagttttgtccctatctttaaacattggcgtagtgaattttaatcttggttttaaggatgtgtttgagatgagaggaaatgagacgattgagatgatacacgaaatgaggtgagccgttaccatatgatttttttataggaagctgttaacatatgattaattgagtattaattatttcaaacttgtaaaaatggattaatatgatttttaaagtaactttgctatagatattcttttaaacgaaaagacgtaccgtttagtagttcaagaagtgtgcgcgtaaaaaaaagatagacttttttctcttgatccaataccatttaacatagacttaattaa

SEQ ID NO: 33344 - DNA, 313 bp, Oryza sativa
  unsure (1)..(313): unsure at all n locations
ntccccccctttcctttcctctcccattcgcctccactccattgtcttcggctcccgtgctctgttcgctgtcgccgttcgccgtcgcacgtgtcggaggagccggcacgagcgaggacacggaaggggactccgggcgcttgccttctttctcttccccggcccgaggccggagagatcactcccgtgccgtcggcctctcgtcacagcgccccgcctcatctcggtagtgcactccccgttctccctcctcgatccatctcctccccttagttttcggtagtagcatgtgtagccttcccgtagctagctg

SEQ ID NO: 33345 - DNA, 413 bp, Oryza sativa
agcttacatgttacaaggactcgatcgagatgtctatggaagagcattaaatggcaaatacttgaagaaatattaccctaagtgtttgggttaatgcatgatcggctggtgttgccgatgcatgatagccgatgtgtttacatcgccttgagatggccgatattattatatcgcccttagttgttttcatattgtaatcggttgtgttttgccgatatacaatggccgatattattatatcgcccttagttgttttcacattgtaatcggttgtgttttgccgatatacaatggtcgatattgttatatcgcccttagttcaacttctaattttatcaatgccttcgtcattgcaaaattaggggggcacatatattacaacagtgccaatttttgagtaaatttttggagct

SEQ ID NO: 33346 - DNA, 409 bp, Oryza sativa
agcttgtccatggcttgcaggttctccttctcaagatatttatcatgcaagaatgatgttagttcttgacaactgtcgagaacaacatcttaatggccagaaggacaaagatcatgctcgatatgatgttgcgatggcggttctttggagagaaattcaagagtctcgccagaatcttttttaatgaattgaagatcatcctgttctacaatagactcaggggaatcatgaagcagaaccgccattacttcctctatcagcatattattagggaggatgcctgtcaaggttttctcataatcagtatgaggatcatccctgaatttacgagcgcaaccctgagcttgaatctctttggaatccggcgatggctccacggaggactctttagtcagacccgaagatgttg

SEQ ID NO: 33347 - DNA, 274 bp, Oryza sativa
  unsure (1)..(274): unsure at all n locations
ctcctgcactcgaggacgctcgcaacctgtgtgtcatattcttgtcctcggcttccaccggtgcgcatggctcctcctaggaggcgtctgacgcataacagagacgggtgagtgaggaacgagtcctagaggatagagatttgatggtgggtaccatcggctttttaaataacataattactgactatagtaccacacacgacccaatctgcttgcgaaactgctccgtgaggggttntcatccattattgatacttaggttgaaagatgtctg

SEQ ID NO: 33348 - DNA, 443 bp, Oryza sativa
  unsure (1)..(443): unsure at all n locations
agctntggttntaactgccttttacgatcagagtcttttttcttttccctgacatttgaagtgaaaaaagagtgtaaacattatggtgatgcacggtatgaaagtgcttctgatgattctgtgttttctcaagtggtgaaatggatctcctctgcctctgatgatgatgtatgagctgagcacatgcgttgatgcagaagtagtactaaaatggatctcgcacactttctctttccgtatagccaagctgtgctgcaaagatcactgatcagagtgaacctggtacattttcacgggctggttcattttgtaggactgtctgcttggcttggcctgtgcaatccagtgatcagcagtactgtactccactatagtaatcagagcatgtgcgccaagttctcccttatgttgctactctaatacatttgggattaactaattat

SEQ ID NO: 33349 - DNA, 462 bp, Oryza sativa
  unsure (1)..(462): unsure at all n locations
tcagctgaagcctacagactnatgaggcccaattcaatttaaagatattgtcgatctgggctaagaggccggtgaataagtttgtgtccggcctctctttgtatatcttgataatataggaataagttcacttcgtgaccctcaaagtgatcgagatctaacccgtgaccctaaaccacaaaaccggatatctcgacccccaactcttaaaaccagtgcaaattgactccctcggcgggtttggagggcggtttcgctgacgtggcgcatacgtgacaatattgactcggtcttctgtccacgtggcgttgacgtggcacttacgtgtcattnagaaataaaaatatgggtgggacccaattgtcattcaccanaagtacaggtgggacccactgacatgtggggcctacatanatcatatccttccnctctctttctcttcgtgagcgttggacnggagct

SEQ ID NO: 33350 - DNA, 88 bp, Oryza sativa
tggctatgaacctgatgcctcacttgtcactctgggaggacccttgcagtgagctccgctgtcatatagcacagatccctgggctggc

SEQ ID NO: 33351 - DNA, 451 bp, Oryza sativa
  unsure (1)..(451): unsure at all n locations
agctnttcgctgcctagactcgatggtttatttcttacatttangccccatcgnttcgtttttttttctaataagctaaaatggcttattaggaaataaaaataaaattgtaggtaaaacttttatatatgtgttcttggtgacttaaaagccaatgctgaaaaagaaactacgttgaaaatatctcaaaatcactctcaaaattaagtttgaaaatttaaaatttggctttttctttggtttaatgggccatccgatgggagcctaaatttgtagtttgagaatgtcagtgacaacccaaccacacgtatgtagtttgaggctgtgttcagatccaaagtttggatccaaacttcagtccttttccatcacatcaacatgtcgtacacacaactnttcagtcacatcatctctaatttcaaccaanatccanactgtacgctgaactaaa

SEQ ID NO: 33352 - DNA, 424 bp, Oryza sativa
ctgcaggcatgcgagctctcccatggggcgcataggccacgtgctaattatcttgtctggaggccttcaagcggataatgagatcatacggatgcgaataaatctggagacggattatgcagaagtgagcttggcctctttattaaacgctggcgagggaatattcttctgggttaaggatgtgtttgaaaggtgatgcaatatactcttagttaaatgtaccactgtgcagtgagccagaaacaagcgaatttatagctgaactggtatgtgtgagtggaggatggtgctactcaaactggactagtgaccatagagtctcaagttccttgcttgatattcttagacaaagacgaccgttagtatcttataggaaaaaaaggtacttatgcgatttgggccacaactttgacatttgaccttt

SEQ ID NO: 33353 - DNA, 442 bp, Oryza sativa
agcttgcccggaaagactggattggtacccttggtgagctaatgatactgcacttatagcacactaattgaatcgacccagaacgtaccaccggggaacttgtggctggagataatctccacgctgaagagagagtagtagtgtaatgcgattctagtagcataaaaagtgtatatgcatctcaaaccatcgggtaaatcagaaatgctaatgcccctttgatttataaaaaaaaggaattgaaggatcttcatcttattgaaaattttctgcgaagaccaaatcatatcatttcctttgaaattcctatgaagcagataattttgtagagattttagagaaaaattagccagagttccgatctcttaggaattttttttagtctatctctatcatattcatatgttttgcaattctctattgttgcacttgcatttctatc

SEQ ID NO: 33354 - DNA, 236 bp, Oryza sativa
  unsure (1)..(236): unsure at all n locations
aacttcttcccatggccttagggccaacgcgggtggctcagacctgctgccgcttcgccattctggaggacctgagttgactctgtgcatcaagccagatccttggtgctctncgagcgctactttgcccacgcggtatgtgctgccgctactaaatcttatgttagactttaattcactatcactatcagttgaactatttatccccatcatttaggctcaccccggtgtattgt

SEQ ID NO: 33355 - DNA, 453 bp, Oryza sativa
  unsure (1)..(453): unsure at all n locations
agctgctgggtttttctcaacgtacaagctgttatatgtttctgctaagagccggggattcagcgtacttcttcaacccgtgatgtctattgtcctattcacaaaacaaagaatcacgacctctcaagctgcgagggccttctcagcgccatgaagacgtcgccttctaagggccagcaggtaccaatctctcttatggatgaagacaaggaataaagagcgacgcttgtctcaaatcgattcgttggggtaatcgacattgatccccatgagccgtcagtcctacacttgctcgaagaatanggctcatcgtcaacgagtacaccacgcgatgtatttgctatcgatgggaccagcacgtcagcgcgtgctaatgtagaagcggagaatcaagtggttacgcccgcccagcatatcagggccatcaacacaatactganggaaaccccttat

SEQ ID NO: 33356 - DNA, 445 bp, Oryza sativa
  unsure (1)..(445): unsure at all n locations
agcttgtaggccgaattgcggcacttagccgttttctctcaaaagcggccgaaagaggtctgccattcttcaagaccctccggggcgcaggaaagttcagttggacaccagaatgccaagtagcattcgccgagttaaagcaatacttgcagagcccaccagccctcgtaagcccaacaccaggaagtgaactgctgctatacttagcagcttcaccggtggcggtcagtgctgccctcgtccaagaaacagagtctggccagaaaccggtttattttgtctccgaagcactgcaaggggcgaagacaagatacatcgaaatggaaaagctcgcttacgccctagtgatggcttcacgcaagctcaagcactacttccaggcccacaaggtaatagtgccttcgctgtaccccttgngcganatcctncgaggcaaggaaatctc

SEQ ID NO: 33357 - DNA, 455 bp, Oryza sativa
  unsure (1)..(455): unsure at all n locations
tcaaactacatccaattcttgcttcaccgctccaacaaactcgggtgatccagggagcagcccaaccaccttttagcctttcactagacgccaacccacgcgtttcatggtgtgttaacaataatattataatacacgtgctttggatggttattagtgtcaataatataaaagtttattaaaatttgagacaaatgttgaatactgtggttacattcaaaatatagntgaatacttcttttttaaaatatattggtaggtcctttttgactattaaatgcatataaaaggaagtatagatcaaatacagtcacttcagtactactcgatatattagnttaaaattgacattaatgaatatatatgagaaccatccatttttatgactgaattaaatcatccttttcatgaattaaatcatcgttttgacgaatagatcatctataatatgtgtc

SEQ ID NO: 33358 - DNA, 433 bp, Oryza sativa
  unsure (1)..(433): unsure at all n locations
agctntntttcttacaaattgatcattntcaaatacttattgtaaaattagaccatgcaaaagaaacttctacaaaaatataccgtgggctcaaggctagtgacattgtcgccgaggttgcaaagattagcgccgctacattggcgctgaccccatatccacgtggagccaaggccgatcccctcaccgacgtggtagggcctcagcgccaaactatttggcgtagacacgtgacggagcgtggggctcctcaccgggagaccgcgcaggcctccctttgccggttcggccgggggccctgggtgaggttctaagctcctagcctgtggaaagttcgcgagagtggaaacacacaagacacgggcgatgtatacaggttcgggccgctgagaagcgtaataccctactcctgtgttttggtggatctgtgtat

SEQ ID NO: 33359 - DNA, 430 bp, Oryza sativa
  unsure (1)..(430): unsure at all n locations
tatatagttatatagaggtcatcaagaaagatcaggcatgttttgtgttgctntctactggtgaccaaattgcgctagctgttcattcgaactgcttttttagttatgtttatgcaatgacaactgatcttctatgagcaagatgagaatgacagtggtagttttttttttaattaattttcttatctcctcttcctttgtactttctgttttcctttagatttttccaattgaacggaaaggggtaagatagatatactggcacaatgacatcttaccatttaaagtagtggtttagtttaattcaagtatttaccagtagattntctatttattcagtgacatctccaataaatggtattatggagaggctatgacagaaggaaggaggtacatcgatgacacttgatcatataacaaagagtttgga

SEQ ID NO: 33360 - DNA, 374 bp, Oryza sativa
  unsure (1)..(374): unsure at all n locations
agctnggnttagtttatttacttacctttgtactcttattttctaactntattcaaattaatccaaaaacttgtgctattaattcgataaaggtcttaactccctcctttcacttgtctttagatgccgcgttacaagcctgagtacctgtttggtgttgagggttttgtccaggagttgcgtacgatgtcctttgtcattggatttgggactgcccctttttatgcccagattcctcatgatccttatgaagagaaatgccgagtcaaagtcacgttgcacatttatagtgaagatattccctcagtgatgtttgaagctggacgaacaaactaantccatgcatgtctggacgtggcaaggatcgccataag

SEQ ID NO: 33361 - DNA, 469 bp, Oryza sativa
  unsure (1)..(469): unsure at all n locations
tctccgcgtgcttcacatcgtcaagcaatcaagcgaataatgaggtatttgtttcatacacttgagtttggaatttggtattctacttcatcttctatatgcttaagtggatattccgatgcggattttgctggttgtagaattgataggaaaagtactagtggaacatgtcattntcttggtacatcattgattgcatggtcttctangaaacaatctagtggtgctcaattaactgctgaatctgaatatgttgctgctgctagttgttgttcacagattctttggcttttatctactttgaaagattatggtcttacttttgataaagcacctctcttttgtgataatactagtgctattaacattgctaagaatcctggtcaacactcacgcgcanagcacaatgatattccgtttcacttttgaggaatcatgttgagaagggagatgctgagttgcagttttt

SEQ ID NO: 33362 - DNA, 243 bp, Oryza sativa
ttacgagaacagagcgggcgacagccggcggcgatggcacaagcacgaaagccaccaacccagcggacactcccggaggtggccacgacgcgacagaggcggcgccgcagccaaaaagagcgacagcagcgccgcgcaaaaggccagcacaaacgacgcgatgcagcagaaggaagaggggagaagagggcggctcacaggaggtcgcaatgaagtaacccacaaaaccccagcaaaccaacg

SEQ ID NO: 33363 - DNA, 392 bp, Oryza sativa
  unsure (1)..(392): unsure at all n locations
ctaagcttatttcagcctcatcgtgagtcgacctctatctatgcgatccttctaacattttagattacattggacacaaacaccaagtcaatttgcacacaaatattatttgttgagattangaacgaggaatgacagacatcaccttacatgcccgtgaaacctcgtgctgctggggacttgggcttaaagagatgggttggagggaggtcatgggggagaactaagaaacgagtgacggataagagaaacccgacgttaccgtgttattctgccgcgccggtggcaccggcgaggggtcaagggactgacgcgcacgggcaggttagggatcatcagcgcttgcatgcgaacaagcgcgcgccgatggctggggcagcgcgtgcatctcg

SEQ ID NO: 33364 - DNA, 96 bp, Oryza sativa
aaaaaaagaaaaaaaaagaaaaaaaagaaaaaaaaaaacaaaaaaaaaaaaaaaaaaaaaaaaaaaaaaaaaaaaaaaaaaaaaagacaaacaaaa

SEQ ID NO: 33365 - DNA, 427 bp, Oryza sativa
  unsure (1)..(427): unsure at all n locations
agctcggtagcatcaaagatcctaagggcaccatcctaacgatcccgatcgcaacaatgcaccgtgacaaggaaatgttgtgggaggacccctatgagttcaagccagagaggtcccagaatggagtgttgaatgcaacgaatcaccctcacgcactactcttcttttctatcgggctaaggtcctgcattcggccaaacttttgcatgatcgatgccaggaccatcatcaccatgatcctgcaaaggttctccttcacgttgacccctaagtacgtccacacgccaatcagtgtgatcacgctaatgcctaaatatggtcgttcaatgatccttatgagcctctatgtaagagagatangtagactcaacgaatatcttacttacacttctttttagcactgctttgtgtacacgagtagtcttgt

SEQ ID NO: 33366 - DNA, 287 bp, Oryza sativa
  unsure (1)..(287): unsure at all n locations
ctcagcttacatgagacngacaatattctactagcacagccttctattgtgtctcangcccttactgctggagcgaaacgagttggctcttgaatagcctcgtaactggagaaccacctctagcaaagtcggcatatgttagtagcacatcatgggcacatatggtgagttagataagtcttataacattaatttagattctttagacactactacagacactaactctcagaatgggctgcagtctgatcatcaaaagggtggtaatggcaatgcagataagcaat

SEQ ID NO: 33367 - DNA, 467 bp, Oryza sativa
  unsure (1)..(467): unsure at all n locations
ctgangcgtgcgagcttggacacttgccacatggctgagaccttctttttctctacacagccgccggaagaggtgtggcattctttaagattatgatacgacccaggcattgaccgctcacagataaatgacgcagacgttgttgattacaacggtaacatgagaccatggctggagcctgctatgaccaacactgaccagtgacatgctgttatacttagcagcatataccagtgtgctgacagcttacatccgtggatgcaactaggccaagtagatgtgatgtaaagctgacggatatcacccaccctgagcagaagtgccccttctctctgcgaaacatgcttcgctcgatcaaagtatagtagctagagctggagctattgattgcccttctccctgtcgttttattgaataagaaagctagatgttctcacgaacgtgtgttttaggcttacagtagttct

SEQ ID NO: 33368 - DNA, 458 bp, Oryza sativa
  unsure (1)..(458): unsure at all n locations
tcgggttaacttaagtttgtactatgtctctatgttgactgatatattcgtntatgtggaacatacggggctntatgacttccaaccaaaggttatacaccatccacatactggttcagtgtaagcatgataaggtatgacagcatccacatactngttaagtgtactgtggtattatacactattaaaagctgattacaaacctgagctagctcaagtatcccataggggatcttattcacgtctgtaggaacagaacgcacaagctttttcttcccaacagaaattacttcataaccactaccaatgacctgagagtcacaggctaaggaccagaagaataacgaactgtccaagaccataataaaattaatgccatagattcaatgaatcttgtaaactgatgatgcattaccgattccaaaaaagtgctgagattcctaaatacttgcttagct

SEQ ID NO: 33369 - DNA, 193 bp, Oryza sativa
aaaaaaaaaaaaaaaaagagaaaaaaaaaaaaaaaaaaaagaaaaaaaaaaaaaaaaaaaagaaaaaaaaaaaaaagaaaaaaaaaaaaaaaaaaagaaaaaaagaaaaaaaaaaaaaaaaaaaaaaaaaaagaaaagaaaaaaaaaagaaagaaaaaacaaaaaagaaaaaaaaaaaaaaaaaaaaaaaaaa

SEQ ID NO: 33370 - DNA, 435 bp, Oryza sativa
agcttatcgggttcttggtctctgcccgaggcattgatgccaaccccgagaagttacgagctatagagcgaatgcgcccccccagcaagcttagggatgtgcaatgtgtcactggctgtatggccgccctaagtcggttcatatcgaggctgggagagaaggcactacccctatttaagctcctcaaacgctccgggccgtttatctggacggaggaggctgaacgggccctcactcagttgaaggcgtacctcagttctcgcccagtcctggtcgccccggagccagatgagccgttgctactttacctggcggcaaccccgcaggtagtcagcgcggcgttggtcgtggagcgcgacgaggatgaccctcgctccgcgcatccccaccctgtgtcgactcgacccgggagagagcagggaggagaggcccccg

SEQ ID NO: 33371 - DNA, 423 bp, Oryza sativa
  unsure (1)..(423): unsure at all n locations
tgtagtatggttctcggaatgagcagacaaagctgttgtctattctaatctgcactagcaagtagcaactcaaataaaaaagaatcaaatggtacctacagactataaaaaggcaaaaaaggtacaagatgtatacttgagcatgatgcaagtctggctcaatatgctttctaaacaagggaaatatgctatcaatcagatagtccaacgagcaagaatctccaatatcatgctggactttagacagaaggctaanatgaacaccaccaacctgaagttcatgggtgaaattattgagataaaataactgttctataatgaaaaatatttanggcaattataatttttaccacagcaacacgaatatcaagcagtgacctcagtggtgaatgaagagcatangcaccatcaacaatcacctac

SEQ ID NO: 33372 - DNA, 418 bp, Oryza sativa
agcttctttactttctttcattactttgttttcttttagctggtagaaatggaaaatggggtcatcttttgcttttaattgcccatagtgctgggaaacatgctcagtgctgcctgggacaaatccattgctggatgcaattggaccacagcttcttccctttgcaaacatgtgtgcagcatgtgacaagttcctcaccctctttgctctaatgggccgatgtggttggagacatgtgtactgcctaattccttgctgcttttacccttcaggcctctgttcagtgttcactgaatgactagcataatactggtggatacttgggtctctctgctgtcctttctagatcaacctgaagttctagaatcacattttccacaagttacaggatcacatattcctaaccaaaaccagcatc

SEQ ID NO: 33373 - DNA, 447 bp, Oryza sativa
  unsure (1)..(447): unsure at all n locations
agcttgctgctggtgtgtggaattgccttgcatgatttaaggctatgatacctgaattccctcagactgaaacatgtgaattacttatcgtagaccgatcaatagatcaggtatgaggtggaatgtcaaacttcaagtcatttctggggtgatttttgcaattttcccttttttagtgttttagtttgactgactaccacattgaatgaagcaatgattntgtctcatgtttccttaatgttttcagatcgcaccaattattcacgaatggacctatgatgccatgtgtcatgatctactctgcatggatggcaacaagtatgtacaacaggtgagcatgtcaaaatcttcatttgtagtagcttgtttaccaattttcagttctgttgtgctcttgaatgctgaccatgaaacaacaggtcccaagcaagtctggttcaggcactg

SEQ ID NO: 33374 - DNA, 486 bp, Oryza sativa
  unsure (1)..(486): unsure at all n locations
ngagctacctgccgatattgggttagccccacgtttaactatttcttatttaaagccatatttgggagaagaagatgagttagagtcgacgacgactcatatgcaaaaaggggaggatgatgaggacatcccttccaacgatacaaccacgcctattgcacagcaaggaccaatgactagagctcgagctcgtgaacttaattatcaggtaaagtcattcctagctaatcatacaagttcttctcagaattgggtgctactaaatggttgttatgatctacttgttgttaggaatatgggagaggaaccaaatcgcaagcagcactagtagcgctgatttgatgaagtcaatgctcttcactccggagggcaaacggngcaaatgagtacttgttggaaagatctcgtcgtctactttcagctatgtgtgcgctcaccatcaagtntgacccaggctgctcagaatgacgaaaatagttctttaca

SEQ ID NO: 33375 - DNA, 444 bp, Oryza sativa
agcttatgtgtgacaaagattaaaaaaattattattgttggctttgctggtagagttagctatacatatacttgaaaatattacactgaatttatagtgagagagaaaaaataaaaccaagtttatagctaacttattatacatattagtatgttaatagtaatttagttatactaaactttttctaagccgaaccagatttggatagtcaataaatgaggcacacctacacgttcacacggtcaatgaaactgggacccactgacatggtgccctgagcaaaggtagtgagtgctgcaagggtcccatggctcagtccctgacaggtgcgcgtccagtaaaccccaaaccctcccggcgttcaactcaccgtgcggagaaggattttctacgccgagatgccatgttgactatcatttcatacttaaatagttatagaaaaaa

SEQ ID NO: 33376 - DNA, 427 bp, Oryza sativa
tgttcgttcgcggatgtcggagcgtggcagcaatggtccattatttcaattgccatttagcgcatgatatgatagtctaaagcgaattgaaaagaaaacagagaatcatcgacccggccgtgctgtctgcgccgattgctgcaccgcgaatttgtcaaacagcaagattgttgtttactaatcaggcgatttgtttattaacggtgcaactaatgtgtgcattaggtgaagctaatcttttagttgccacttctatttcggccattgacttaatactgaacaactgcaaaaactgtacttattaagaaaaatatatatgtgttgttctgtttgtgaaatcataattaaacggcaacaattgtaggttaaatatgttaatgcaagggcctagcttcactgaagatcctaagcatcggtattaatatca

SEQ ID NO: 33377 - DNA, 457 bp, Oryza sativa
  unsure (1)..(457): unsure at all n locations
acctgaggcatcaagctaagcccattgggctggctagctggagtacgattgttattcaanggaatgaatgaaacacattattgacgacaaccctactgtaccatggatcagatattacttcaaacattctcttttgctgtctactggagtaataaattggatacgagtacttcaaacatttttttgcttggttatatatgcacgtatgactagcaaaagaataaagaacgtctacatgagaatggtatatcgcaattagatatgaggttcattttactcatggtatattcttactgcatatacactagtagtacaaagaaaaaattaaggagattatcttttacaagcaatgacctacgcgcaatacaacaatggcacggtgaccccgaccatagaaatcttttgtatcccaaataataacaggaaagcagttgctattttgcaatcttacgtttcc

SEQ ID NO: 33378 - DNA, 273 bp, Oryza sativa
  unsure (1)..(273): unsure at all n locations
tgcacatttcatatcttatgtaggcagaacggcggatccaacgtgtgtgtggggacggattnattattgcctcacggcctcnacttgcctcatctagaacaagaaattaaaaagaggctattactctaagccgaaaccaaacggcaaatcgttcacgaaactcactcattatacaacggaccctgcaactgtttcggagctaggccctccaagaaaaattccaagtacacatgcatgcagcctcattctcacatgccactcgaccaatgatcc

SEQ ID NO: 33379 - DNA, 418 bp, Oryza sativa
  unsure (1)..(418): unsure at all n locations
ctgagctgcagctggcctcgcgttgcctggtgatccgatttctgcagaagntgagtttgggtggccataactccggccagagtggctaactcgggtgtctgagttcgacattgctgtgtgctgcccgacgtctgcttgccatctgtgcaggttgattgattgagtaagtatcctaattctctagctatcttttaccgctatatcccattacgggagaatgttttgatgtgaacttttgtttgcaagcatggtggaataaactcatttataacacagcaacaatagatatcataaataacatcacagatgttcacatatggcacataaatcatgatgcaatcgactgcatacatacgcagtccaaataaggttcatccaanagatacatcagactaatcatctatctactcgtcaatct

SEQ ID NO: 33380 - DNA, 466 bp, Oryza sativa
  unsure (1)..(466): unsure at all n locations
ntctgttngagactcacaattgccattgctaagcttgcatgcagactcattgttctatatatggngacgtatcgcgtatcgtcatgcatagccgaataactaaattatttattatctagtaatttagtaccgtatctgtgttatttgaggtttttgttaagtctgaagcccctgctgaatgctgaactattattattattattattattattattattattattattattattattattattattattattgctgctgctgctgctgctgctattactattactattacatcaactgaataattaattagttcgttgtgttgatgctcgatcggccgtacgtggcatatgtgctcatgttattaatattgctggccggtttattgaaatcaaccagaactttattaatacccactaactttatgtattntcattttttggtgaattaacgacgacgtcattttata

SEQ ID NO: 33381 - DNA, 450 bp, Oryza sativa
agctttggcatatataatactagggtttgatttatttcataatgtttaattgacagtcatcttcattttgttttggcagaatgctgaagcagcaggcaaggttggagcaagcgccaagggcaagcgtaagcggatgagcagcaagcaagctggtaggagcaagtgccaagggcaagcgtaagcggatcgaggagtgctgaatggtactccctcagttaaaaaaaaaaaacaatcctgagtatgaacctggacacgtgtgtgggctcatacccaggatttgttcttttctttttaggacggagagagtagtatatttctgttgcttatcatgtgcgcctagcatgtcgcttttatggcttacatcctgtgagatgtaatgttagcatgtgttcggtttcgggactaagtgggatgggatgaaaccatccctgattatggagtgggatgatt

SEQ ID NO: 33382 - DNA, 382 bp, Oryza sativa
  unsure (1)..(382): unsure at all n locations
tttttaganaatcacatatccgtatctagtaatatgtatttacaaccctcgagaagatatcataacgtaaattttttttatatcatccttgagaatgtactagaggtactatatatttctactgtaaaactagaaaggtggaccgcgtgcatgtgcgggcacttatattattcaaaggtaagaacatttattggtcgatcaaaaatattgtatcatagattaagggacaactaaagtgcggatactattattttgtaataatttaatgattctattattcttacagtatcttacacattcattcacaaacttttgagtagaagatggattaatacttacgacttttgagtcattttttttctcgagtaaattataaactatt

SEQ ID NO: 33383 - DNA, 412 bp, Oryza sativa
  unsure (1)..(412): unsure at all n locations
agcttatagcaagtgattgctactccattcgtttcacaatgnaagncatantagtattttccacattcatattgatgaattacttatattgtgaaacggagggagtaattagcacgtgcatgttcccaatgcgcactcctttccccgtacatactacgaaactttcaactaaaaaatcatacaaaactttccatgtgccctcatactttcatattgactctaaaactttcacccaaaaacaaaacaaaaaactttgtacttaaatcatatacaaagcttccgactgcgccctcaaactttcatattgaattggaaaaagtatgatatcaaaatctaactttcatctgaaatatcaaagaattttattcaacacatacaattttcagcttataatcaattgaaacggaacttt

SEQ ID NO: 33384 - DNA, 329 bp, Oryza sativa
  unsure (1)..(329): unsure at all n locations
agaggaagagcatgcgcttataatatcttctagctccccggacaccgcgagggtgactgtgagtgcgaggaaaaacccaacggcgattttctttgtggacatacagaagaggatgaaagacattnttacatggagcaccaccatgtgtgagaatataatcctggcgaatctgagagatatgcatttgagagaacacaattatgactatggtataatcttcaatttctctgcaactcacggaggtgtgattgattaaatcataaatttgtaagtgaaccacaaattcatactctttgtaattaagtgatagtctgatagacactaaaatg

SEQ ID NO: 33385 - DNA, 238 bp, Oryza sativa
  unsure (1)..(238): unsure at all n locations
aaagggggggaaaagaaaaanaaaaagaaaaggaagaagaaaaaaaaaaaaaaaagagaagaggaaaagaaaaaaaaagaaaaaaaaaaaaaaaagagagaaaaggagaaaagaagaagaggggggggggaaaaaaaaaagaaaggggagaaaaaaaaaaaaagaagaagaaagaaggggaaagagaaggaaaaaaaaaaagaaaagaaaagagaaaaaaaggaaaaagagagaaaaa

SEQ ID NO: 33386 - DNA, 448 bp, Oryza sativa
  unsure (1)..(448): unsure at all n locations
agctntatcaagtcccataactgaagatgtccttatctggcactgcaggttatactatactatacctgtgtatcacgttcaaactatgatatatcagattataacatcagatacaattgtttgaggaaagcaaaacaaaatagcaaatccaggattcaagggaatcctgatacagtagagcgcaatgatgctatttcatctggctaacaccagcatccatgacttttaacccattaacagaggcagaccagctcaaatttacagcatatcccagagtctgattacatattttggatacataaactcctgcttatatcccattcctccaagctgantttagtgcatgtgtttaaaaccatgaaaataagtatcaagtcaaataataaccatgattataattttcaaacaatcacgaaaggatcttgagtataatacatctatgtaagtg

SEQ ID NO: 33387 - DNA, 461 bp, Oryza sativa
  unsure (1)..(461): unsure at all n locations
tcanatggaaaattacaatcaaaagtgctggtattaccttgttctttttttgcatcacagagattcattnttcaacaagccttttgcttatgatacataattttaatgcctgttaggaagacaagctgtctcgacctccttgctttggttgttggaaaaaccatatgctatgtactatatatatgccttcttcataacggtagcacaaaaaatatatgaattggccttgcttgatgcaactttgtcagtatggaagatcctatgcatcattgttgacaacatacatccacatatataatttgactgcatacctgattagtttagtgctctctggttattcgtgttacataaacgcaagatnttcagaaacgctagtcagatgtacgaactgtaacatacagtatgtatatgagtcttggattaactattatcatcagctatagatgcatgcagaatacatg

SEQ ID NO: 33388 - DNA, 447 bp, Oryza sativa
agcttaattcttgagcatctgatttgcttcttttactctctttgctgctcctacagatgggctacaccaggaatggcacccgcaccactggcgagggcaacaacggcgagaagcgcactgatggcgtgcattccaataatgattccggcaatggtacgtcaccactccccgagaaatcgacccttgcccaaataatggctcatcacacgcagatgatgactgccatgatgcagcaaatgcaacagcagcaccaacagatgtaccaaaggatgctacagcaagccgagcagcaccagcagcagtttggcccccctccccctcagttcaaactgccagagtttctacgcgtgaggccacccaccttttctagcaccaccaaccctatgaacgcaaatgagtggctccatgccataaagaagaagctcaatcttctgcagtgcaatgatc

SEQ ID NO: 33389 - DNA, 393 bp, Oryza sativa
  unsure (1)..(393): unsure at all n locations
agctngacaacaagttgcgagtagatggtgattaatttctatacgcggggcgaccaagcactcacaatgcgactatgcgaactccagcggctgcctgcgggtatgatgcaacatctgacggggcgaaataacagagggctaccctcaacatgcgcagtgaatcaaataatgtgtgtaacacctatgagaagccacacgcacatatggacaaaacagtacaaacacatgaagacacctactttgtggatatggcgaagcttgctctcgcccgattatagaacgagtctatgaaacagatgacccgttctatacagatgcgggcaactctgaataacaagttctacgcctactatcacgtttgacacaggatagactctacacagtactactaca

SEQ ID NO: 33390 - DNA, 380 bp, Oryza sativa
  unsure (1)..(380): unsure at all n locations
agcttcttttccttctaatgctacaaaagtgtttatggagttcgaagaaacgatcttgctaaatatttattgacaaatttttctccaaaaatttaacagatgtaattacagtacaatcgtagtgtattacactgtaacttgcatgtaattacactgtaactatagtgtaacttgtatctatacttcaaaaatctctccgtaacatgttatttcggataaatggacgtcgtgggaacaaattctttcatatatgtgtgtgctatgatttgttttcttcctcaccaagacaaatcttgtaatagatctaacgatntaaaattatgtgaaacttacatataagttatacttgtagtacatgcgagttacagtctaattattta

SEQ ID NO: 33391 - DNA, 305 bp, Oryza sativa
aaccagccacgcagcagaaccaccttcgactctctattttgctcccccgacttctcaggtgtggctccttcaacatccaagatggctctcaagctcagtattcggaagataaacggttggcaaagccagcaaagagaacaatatccttgcctctataacgttgctaagcataaacatgcaactatgtcagaaatctccacaccaaacccctaaactttacttggctgacggaccttactggctctacgctagtaacgcggaatcaccttctctcacgcatcgctaatattatattatctcacgac

SEQ ID NO: 33392 - DNA, 332 bp, Oryza sativa
aacacacaccaaatgatttatctgagagccacaattcttctactaaagacttttatttttgggggggttgcccttactagctactacattggcatgtggacataaatgcataacaaggtatgcgtcgccagaacactactatcaattattacaaagatggcgaaacaccttgttcttgggctcgaatgaatataaaattttggtactaaatgtccaaaagggacaacatgctgcccttgaccctccaattccaaatatgcatatactcgtatcagactaatatactagcatccaatcccccgcgagacaggcaatgattctttttttttttt

SEQ ID NO: 33393 - DNA, 428 bp, Oryza sativa
  unsure (1)..(428): unsure at all n locations
aactaagcttacttaaagccagctcttcaagttaaaattagacgatgattccctgttcaacatgtcctanaagtacaacgatgttataattttattgtcaatgtgtaatacaattcaacaacaaaactaatagaagactaaggatttgccactcaaatagctaaaagctaagatttttggcactcatatacttataacatacaagggtattattatcaatagttcgacttataataatatacataatattatgtgtattgggttactgatgatattgacaatgggtctattccgttcagctgggctgtggttgtacagccacagcactgcagccctcctagcataaattgcttaccgaatcctatagaagcaatgctgctattgtcacagccagctattccgaacgcacccaatatcttatatataat

SEQ ID NO: 33394 - DNA, 319 bp, Oryza sativa
gcaactataaatttctgttctgatctcatcatattcagaatcagaaagcatcttttggttgtgcaagtctcgttcttctttaatcacctcatcattgctggcgtctgcaccggtagtgacacactcctttttcgcaaaatacctaggtagaacatgctctcacatttctactttaatctcatcaaattcgcgaccagaatgtacctcttgttttgttaacttcaaccacctcggcagccttggtatcgatggagtcggcaaccacgaccacttcctcgtcagcaatgttgtccatggagtcggcgaccatgaccacttc

SEQ ID NO: 33395 - DNA, 386 bp, Oryza sativa
  unsure (1)..(386): unsure at all n locations
ctaagcttctcaaccttctggagaataatcggaggggacctcangtacttgntctcactgtgattcgaactgtaaaatcatgcaggagaggacttccttaccagaaaaaaggggaaatcactcactccgagctatcttggatggatctcccgctccaccccaccccaagtccagtgcagcagatgggagtangggactgtctggagaggaaaagaagganggggagctgcnggcttccattcgaagcggcggaggcagccaggtcaagcgagcgtgctccggcgggaggatcgcccgcggccggcggcgctagcgaaagaagcggatactgtggatgggaggaaatagcttctctgacttcagccctcacgacggcagagagcagt

SEQ ID NO: 33396 - DNA, 463 bp, Oryza sativa
  unsure (1)..(463): unsure at all n locations
catgcaagctttcttctggtatgttcaaagagcaaaatatacttgtccaccatcttttttaacaaatagctggataatgtttgtccttttgatggtgtttatactatgaatacatcctcaggcatgggtggcacgaacaatccaaaaattagacacccatttactaggggtttgtcagaccttccatgaggaaagctatctaactgtgagtatntccattgttgtttttcctcgtgagcccttgattggcttagttgttagggaagtcttagttatctatttgctttgctaatttacaagttccattctttatatgtttacacgtggacaataggttatcgatgcctatgcgctgatgggtgacatcngtggcatggctgacaagatgcagagtttctttttgcaagaagtactctctcagactcattatgttctgaaagaaatgtctgaagaagtattggat

SEQ ID NO: 33397 - DNA, 458 bp, Oryza sativa
  unsure (1)..(458): unsure at all n locations
taaaactaagctaagggtggttatacagttcccagngggaagtttgatgattctagtattacatcttgtcgaaactagatntcggcaataataaaagggggtggctatcaagctggaaaagtgtatgggtttggagacaaaggatttatacaggttcaggccttcttattgaagaagtaataccctactcctgtccggtgatgaatccgccgaatgtcttaatgattatatgatttggagaaaatcaacatctgccgctagaggcacccggaccccccttatatatgggaagaagtccgtgttacaaaagataatctatatccctaacggaatatgcagatacagataaaatacagtcgtagccgactaagtctcaagggatttcctgatgtacaagttgagaaacaaacccgagacacaaataagatattctatctatatttggtatcctgaattca

SEQ ID NO: 33398 - DNA, 418 bp, Oryza sativa
  unsure (1)..(418): unsure at all n locations
agcttggacgaaacactctgcatgcacacggtatatgatatagcagcttggctcagtaaactaatttaatgagcatatatgcatagcagtcttgtaacaaatggttatgccatgatattcagtagaaacaattgaacatcaaagatgaaagctccgaagtctaaggacattttctagacaactctatgtgaaattatcagtttaggcatccactttctctactttctattcctcaaaagacacttcgctgtcagaattcagaacaactcagagaaaatacgaccatgggatgtattccaaaaatacatgcataaacaacacgtcatgagaccaaaaataggagaatggtnttcttctttaaaaaaaacagagagaatgggtacctggacattatcaacatccacatataggaacagta

SEQ ID NO: 33399 - DNA, 487 bp, Oryza sativa
  unsure (1)..(487): unsure at all n locations
actgatactntcctttgtggtacgttgttactcacttatttgtggtcgtataatacatacattcttgaggatattcatggttaacgataattaactntgtttcacattaatcttggaagatgctaaaagaaaatcagttctcgattggacgacccggttcatgataatcaaaggtatagcgagagggcttctttatttgcaccaagattcaaggttaacgataattacagggatctcaaagcaagcaacatcttgttggacacaaatatgagtcccaaaatatcagattttgggatggcaaggatctttgaaggaaataagcaacaagaaaatactaccagagtagttgggacatagtaagtaacctgtagaccacctaatgatatatgttttcattataactaattcaaactgcacattacatttgttttggaatgatctaaacagcgggtacantgtctctgatatgctttgaaggctcttttct

SEQ ID NO: 33400 - DNA, 327 bp, Oryza sativa
tgcgtcttcttgtgaactgtggtctgagaacaataagtcatttgcaatttgcttcctcatgtttgggatatattctggcttgatcatatatttcaagtgcatccttgggttccaccatttcatacactttatagcgtagattccgcaatcatggcttgatgagaccaaaacaaataaatcatctaagacaacaaaattcatggaaaaagggacgagtcttgacaaaaaagaaaatgatatgtaattcgcgatgtttgttgggttgatagcacgtacccatgtttggcgagtaatggtggtattgatatcaaattactaaatttttct

SEQ ID NO: 33401 - DNA, 468 bp, Oryza sativa
  unsure (1)..(468): unsure at all n locations
accgcaggggagtttgntgacaacaaagatggtcttattctacttattatgtggcgaacaataccggtttatatagaatntgtattcagtttgaggatgcacaactgaaaccttgcccattcgaagtgcatgttgttcaaggtaacatttcagttggtcagatgagattcatagttaaattcaaaaaaaaatcatagaaaaatttgagcatcaatacttctgtttaattgttaaatagctatgattagctgaaaaaaaaaacatatctcatgcagatgaagacttctccacggttcaaaacgatataatttcagtacgggagaatgaatctgtttcctttgatgtattgtcaaatgactacattgcaggaggccaagctgtatgttaattttatccggtaagcccatgccgtcaactaattccccagatcagccccataactatctaagaaccacccaagggtctttc

SEQ ID NO: 33402 - DNA, 434 bp, Oryza sativa
  unsure (1)..(434): unsure at all n locations
agcttgattgatatgggtatcgaaccggttttcgntaatggccggatcgatcgaagttctggtactatgctcacggtggaacgcttaaccccgttgttgtctccctggtgttcaccgatcagatacgtgaggctgccagtcgactaacggacgcagtggaagcgtcttctcaaggaacgttccgacccgacagagagaaggacgagctgtcactcgccctgcagattcccgagcatccaggacgaacacgagggaaaggcgtggttccttgaaatattggattcaagaaggacatccacatgtacaggagtcggatgaggagcaagagagataccgaggcaaagattgcagatcttgattatagggtatcgagctacgagctcagcatgcaagaagaggtggcaaggaaagtggatgaacgcatggcccgcaca

SEQ ID NO: 33403 - DNA, 424 bp, Oryza sativa
  unsure (1)..(424): unsure at all n locations
ccccaaaggacggccatacgtaacatagaaatcacactgcgaatgagcgggcaattagctagaacaccacgtgctggagcgaaactgattgcaaaacaaggataatcggccactntaagattaccatctggggaggtccgtttggtatcccanaactgcttagcaacagtcggacaagtgggtaatgttggggtgaaccaaaaaagtttgggtagagccgggtctaagtgttggctaggtaaacgccccgtagtaagaggggtagttatgaaccctgtggaccacccncatgggggcggtgaagggaaagcccccattggtagaaaaaaacccacaaccccttggggttatcctgcgcttggaagaaaactatgnaaggaaaaatataggatagtttattttcgcgccgaagaaaacgaactag

SEQ ID NO: 33404 - DNA, 276 bp, Oryza sativa
atgcaacttattatttggtttagagatctttatagatacatcgctattttttatagaaaggagaattaaccatatcatgtttctgcttatctatgctgaagatataattgctgtgagctcaaagaacgatgcaataccagctttattacaggatcttcaaaaggagtttgcttttaaggatcttggtgatctacactacttttctggtataaaggctacaaaagcttttcaatggaatattattaactcaagagaaatatgtttttgattattgaa

SEQ ID NO: 33405 - DNA, 454 bp, Oryza sativa
  unsure (1)..(454): unsure at all n locations
tgtatatatatactaatgagctagctaggagaagttatgcttatgatgagctgcattctggattataagccactccaaggggatttttaactgcagctatagctactcaaacggctatggctcgtcacaaaaggaactccatcaagagcccacttgaagcctatacttcgaaatcctagatatattgtggggaacacaaatcgaacatagctagggtgaatcgngatgttaattntaatctatgtgaaaatatgtatgatcctattcacaaaatacaaacacgactttcgattataataactactttcctcagtctatatatatatacactgctttttcaatccatccaatcactgtattatgtctcactagtaatttccattgctagaagtgatattttccaatcaagtaaacataaaaggtatcgaaagaatttcaccttgacctgaaacta

SEQ ID NO: 33406 - DNA, 298 bp, Oryza sativa
agcttaccctcttttctcacaaaattgtttggtcctgatggatgtggatctcccgcagagggatccaccacgctaagcgtccgagaaacatccgtagggtgaagaacggcggagcaacggtaagcgtgtgcttccctcgtggtggtgaccggatataatccgcagcagcggtcgcagcttgcgaggcggcccttgggttgggacgaggaggatagctcgtttggctcttactcggaatagagaatgcgttgatcgttgtccgtgggccatatgggccgaatgtatatgtgggccagat

SEQ ID NO: 33407 - DNA, 491 bp, Oryza sativa
  unsure (1)..(491): unsure at all n locations
actcagcttgactagtgaagcatgttaagtgctaattaatcgtgttgtgacagcagagaaatactaaggacctgagtggactgaacaacatctgacgggtcagaaatgtgagtaatcagccataagatatggcgacatgagtatagcaaatccgtatattgcttctctccatacgtcggttcgtacgatggtgacacgtgagccactcagagctgctcgtttctcggcgcgccacgtcagatgctgtgctgcacgagagcacccccctcagtcaataattgggtgacagctactgctgaaattaccgtcctgcccctcaggttctcgaagaatacactcacactcactacgacgtgatacatgcgccggagaaccaattagtccacactaacctncaggattaggagaaccactaattacacaactattatccgcgtggatatattaagaggagggctcaccctatccacatggattggttntcatacagc

SEQ ID NO: 33408 - DNA, 435 bp, Oryza sativa
  unsure (1)..(435): unsure at all n locations
ntcatggacccctagctgccttgcacgaattgacccatntttatggcgtcacatttccatccaaatccaattggcaaccgctaccacaaataatgcaacaataagtctcaacaaaaaaataatgcggcattagtggagttttaaatttgtggacaatggtagttctggtacgactctgtctaataagctacgtacacaagatccaagtaacggtgctttctctggtcacaaaaatatgttntggatgaggtcaaactttcaactttgcatcaatttatttttatatttaattaaactgaacattgaaagatcttgctcatatatttgtctcgaagaaaacgtacttccgtacataatatttcgtcatgttataaaatacattgataaaaaaatagatattgaactgaattttgtagatgatatgttctcttgact

SEQ ID NO: 33409 - DNA, 317 bp, Oryza sativa
  unsure (1)..(317): unsure at all n locations
aacacgacatcgnggcgacttgactcccatcggctgattctagaactttgaagccgatactgactctaagccgatggtaactntgggcttaccaaaattcactggtaacacatgccccccagttttggaataccagaactcatgctntaaaatttcttggcttgataacatccaaaccgatcttcctttgtttgtgcaatcggtttcatgagcccatattgtttgattanttaactagactgtaaactcgtggaaaagaatctattccgatagtgctgacaatccttgaatgcagactactagctattcatgctaag

SEQ ID NO: 33410 - DNA, 433 bp, Oryza sativa
tcagtgcctctgtcctgaagttacaagaccataatttcaacatgaatacaacggaagatcatccccttatcatctaaccacagattcccaacagttcttgttccttccaaatgtcgaactagaaatcttatcttttaaatctaaatgaacctataagggaaagacaggcctttcccctcgaaaaaaaataatcagaatcaagcttgcttcccggaatgatcgagtcacttcctcttggactctggacagctctatatggcactcaaaagaacagcatgtgaccggcccaaaaaaaacaccactaccagcaacttcctgctcttgtgaccaggggtaaaacacttctaccgggagcagctccaaaaatactgcgctcttttatcccctcttgttatgctagacatgacaagctgtcgcacgcacaacattaaat

SEQ ID NO: 33411 - DNA, 385 bp, Oryza sativa
gcttggtagggcccaccacataccatgtcttatactgaaacaaaccttgtatatagaaggagttccagataaggaaggactaatagagttatacatggaaacgacgaggactacttagatcatatccatatttatctccctagttctacttggacaagggggcacctataggtataaatacaaccccctatgaggagaggagacgagccacaaacccacaaagccacaaaccaatacaaactaatgcgccaccaaatatcgacatcagagattagcctagacataccccattcggcgcctacggaggccggcaagagggatctagtgccatctctgatcacgccgagtacagattcgaggaggaagactaccccgtcatcgacta

SEQ ID NO: 33412 - DNA, 489 bp, Oryza sativa
  unsure (1)..(489): unsure at all n locations
ctaagctggttacggttatgactgaagtaaattagcttatgcctagcactctatcaacatatttggccactaattaacagaaaggtaaacataaaaaanaaatctcacaaatataagctccatattggagaactgtataacataattggagaatgctcttaaaactctcgatattggagaattctctcattatgaaattatatatgagattgtatacataattctcattttttttcgtcatttcataccagtctaataaaaaatgtcaaaaacatagttgaggaaaggtcactgggtagcctgcttttagttggttgcttctgtatgctcaatgaatcatgtcagtatttgaatttgtatgtggtgctgcaacggatataaattcttttatagttntaatgactatcacatagaagcaagtaaattgagtaaaaaaacaaaacttaatggcctacgtggatcatgacactctaatctggtcaaaatatg

SEQ ID NO: 33413 - DNA, 223 bp, Oryza sativa
ttttaaaaattagctatgcttcagccctttgtaatcgaagctataatatatgtcagatatctttaatgacaactgagtacaatgacttgaacttgagcagattatatagactatcactttcatgtgtattctcccacttgttataaaaaaaataatgtgacttagggagcaaattggtcacacgaaagttggcgcactgacatactataaaggacaccatgtc

SEQ ID NO: 33414 - DNA, 494 bp, Oryza sativa
  unsure (1)..(494): unsure at all n locations
ctcaagctgggcgcacacganagaatgcgagagctnggataaacacacgcttagcttttatctggcgcgccagatgacggaacgtgtggctcctcaccgggagaccgcgcaggcccccctttgccggttcggccggnggccctgngtgaggttctaagctctcggtctgtggaaagttcgcgagaatggaaacacacaagacacgggcgatgtatacaagttcgggccgctgagaagcgtaataccctactcctgtgttttggtggatctgtgtatgaagaagctacaaagagctggagagccagagaactctaactctctccctttctggttccgaatcccagtctcggatcgttctccatccctttttcctctctctctaagtgggcaagggcctccttttatatctcaaggggataccacatgcaccatctctctcttttgtgtggagacttatcctctctttttccaacttgacttgcttctctcataat

SEQ ID NO: 33415 - DNA, 409 bp, Oryza sativa
  unsure (1)..(409): unsure at all n locations
agcttatttggatgatgtagtcgtcaagactcttcagaaagatgattngatcactgacctagaagaaacctttgcaagcatccgcgctttcaggatgaaattaaaccctgaaaagtgcatcttcggagtaccattaaggaaactacttggatttatggtgtctcatagaggcatacaagccaacccacagaaaatcaatgccatcctcaacatggaaccgccaagttctcagaaagatgttcaaaagctgattggttgcatggcggcgctcagccggttcgtttcacgactcggcgagcaggggatgccctttttcaagctgttgaagaaaacagacagtttccagtgtggacccgaagcccaaaaagcctttgaagacttcaaaaaactcctcactaccccaccggtc

SEQ ID NO: 33416 - DNA, 486 bp, Oryza sativa
  unsure (1)..(486): unsure at all n locations
ctgattngatgtccacatatccatggttgtagaaattctactatatactgatttcagctcatcatacaaaattctctttctaacttcaaatatctctaatatagctttactagtgataatgcgacacttgaattcaaaactaggccgtagagagtggatgaactcattgaaatacacatgatcaaccatagaaaatggatattcatgcataataacagctatataccacttttccaagcttacttcaggatcatacctgaaagtctgaacttcacccttcacctgaagttcttgctggccttgtttcaatgagtgaatacgattcatatgattccataagtgttttgtgccatttactgtctctgctccaaacactctaccacattttntgcattctgctttacgatgctgctcttccacaccagtaactttgttcttggccttgtcagtgtacttaatgaaatagttccaaccttcgaggacact

SEQ ID NO: 33417 - DNA, 424 bp, Oryza sativa
catgcaagcatttcgacaagggttcttctggccaatctttctcaaagatgcctgtgacatggttcagcggtgtgaaacctgtcaattccacagtaaacacacaaggctaccagcgcaagcactccaaactatccctctcacttggccgttctcgtgatgggggctagatatactcgggccattcccacgaagacagggcggctacaagttcctattcgtggcgatcaacaaattcactaagtggattgaagcgatacccacggtggaaatcaaggccgacaacgccatcaaaatcattaaagggatattctacaaattcgaattgccccaccatatcataacggacaacggatcccagttcatcagtgccgatttccaggattactgcatcaagctgggagtcaagatctgcttccctcggttc

SEQ ID NO: 33418 - DNA, 486 bp, Oryza sativa
  unsure (1)..(486): unsure at all n locations
tgttcctgacagtaatctcaagcatttagttatttctggatataacgtttcactacctccattggggatggaatctaagtatttttccaatttggtatatctgaagcttgatggatgtgtggaatgggataaacttcctccatttggatatctatggacactaaagcatctgtttttgaagaacctaccgaaattggaatatattgctaggtcatgctacagcactgttgtgtatggatacagagacaccagtcctgatgttctgcctcctcatctgatcacttttgttgtgaagaattgcctgggcctgtcagagctacccaagttaccttttagtctgaggtatttggacatagatagagttggaatgtcaagtctgccaaccatgtgtactcatatggggcgaagacgtgtttcttttgtggagtcacagctctctattntgaatggtgagtcttgcaatcttctgggttctctaaatgggtc

SEQ ID NO: 33419 - DNA, 376 bp, Oryza sativa
cttgtgcaccatacgatacggtgacatatttcccttgcactaccgttttataggtgttcacatgctggcttctactaatcggtgttcgcttagatgacaatgtgctaaatgagctgttgacaaatgtacttgactggctgagaacagtcttacttagcgcaatggatgataacaagcttaatatggtatttgacacctatatgattgatgctgacaagaaaagatcaagagggaggatgaaagtactacttgcgttgggggttcgtgtgagcaccatctcaatttgtacaatcatagcgcatgaagtggagggtgttaattggactgataacatctatttatcagtcatttgtcgtgccacagctggatatgggga

SEQ ID NO: 33420 - DNA, 438 bp, Oryza sativa
  unsure (1)..(438): unsure at all n locations
gtggaccacanacttgaaacatggtgtcatgtcatagggtcattangtcctttgccacacaactaggaaggctgcccgcgtagctgcgcgggcactctattagatattgcttgaatttttattacaaactttctataattgattgttgaagggttctatatttttcttataaaaatcttccacagctattattgtttaataaacatgttctatttgcacaataaagctagtcccctctaattggttatgctttttgttgcatacttatcgcagtgtaatcatctaagaactcaaaaatgatgcaatgcttatgctaatgggtgttgtagtttaagtgaaagttaagaacctattatttctatgaatnntatagggttttctataattagttcactcttctctctatntgagtatgtatttctatctcaatctatataa

SEQ ID NO: 33421 - DNA, 273 bp, Oryza sativa
  unsure (1)..(273): unsure at all n locations
gacatagtgataacagtctttattattatattgctaataaatttaatggtgaaatatatgccgggacaacaaatgagctacacagcactgatgcagcaagttattcaaaggcaaagtcctaagaataacttgcataccaatcaagtgacaagaagcaattcataacttttttgtaaaagcaatcagcgctgaaattaaaagtttcatgttaaactaataaattttctggacaaaaaaaatgcanggaaggcttgctgaaatgaactatcacct

SEQ ID NO: 33422 - DNA, 277 bp, Oryza sativa
atttgtgcacgcctaacaaggcctatgtttatgtgaggatttgagccttctatgtggcgtgaggaaaccctgggtcggcttgggaaaggctttgtcacgaacctctgacaccggccagtgtctataagtaggacgtgtcttgtgggaaagtgtaaccctcagcagaagataactaactgttcgaacaaccctgcccacagtcatgggcggatgtgaggtggtcccgctgcgtatatatggtgcctgtgcttaggaaaagtgtcgggtgtggaatcgt

SEQ ID NO: 33423 - DNA, 386 bp, Oryza sativa
  unsure (1)..(386): unsure at all n locations
tgcctacctangaagcaggcttcaggccaatgaaaacgtctgtctgtcagtcttggattgcagggaagccttaagaatcgccagaccctgcagagaatcaacaaatacatgcataccgcctaaaaccaactgatattaagttccaacaatcaagtagagtcatgtgtacggttacgaatgtaatcacctcagtgtagccgagctgcacggtcttctccttgagcgcgcccaagtccttgaccgcgaacctgttgagcagcgtgatgctggagatggacgacatgggcgccacggtgagatcgtccatcaccgtgtacgtcacgatgccctgcacgaaccctcctcctttcgccccttcggcggcggcgttctgcgtgttctgatct

SEQ ID NO: 33424 - DNA, 336 bp, Oryza sativa
agcttgcattttataaatatccgtgacattatctaatttagagaaggccctcgtgccgctcatccccagggcggtacgggcggagaccatacgagcgcgccgccgccaacctcttactcttctcccctccaccttgccgtcgctcgagcgcccgccggcaaagccggggggacgcaatgacagcggcggcgaggctccctaccttctctctcaagcgcggcggctggggcgatgccatgaccggagagaggtctcgcgggtgcagccgtcgccggcggccacatccggcgtttgtaggaccggatccggtccccacacggctggatcgggcgtctc

SEQ ID NO: 33425 - DNA, 388 bp, Oryza sativa
  unsure (1)..(388): unsure at all n locations
catctgcaaagtacacacatgcatgttaaaatcataatattngntatataatattctttttggtaccaactcttttcagttattactaagcctgngaattttgttaacattaactttcaaaaagtagagttgcctagttgaaccctacttttccgngtggaaggcaatcgaatttggcctagagcttcttaagaaaggcattatctagaggattgataatggccagtcagtttgcatttggcgagatccatggatcccgagagacctctctcggaggccgattaccacgaaaggacactatncgttgaaatgggtttctgatctttngagcccaaatggttcttgggatgctcttaaggtgtctcagacctttctgccgattgacact

SEQ ID NO: 33426 - DNA, 311 bp, Oryza sativa
gggtgtagccactggcacaaataatctcaccgccacagttatgaataggcactatccatgcgctgcacacccaactgccatccctactgcagagatgtactgtccatatgaggaagcaacgaactaatgccataaacactgctgcttacttgaggtaatgcgaccaattaaacgttctgttgcatatcagccgtaccaaatttaccttaacccgcgatgcgactctgtcggactacagtacctctaacgtgcagtacatttcatcatgctcctttagtacctcctatgcagaggatctaattttatctgct

SEQ ID NO: 33427 - DNA, 353 bp, Oryza sativa
agcttaaaggaacatctaatgtaccccaatttgtaattagcgtgatggaaaacggtctatgtaatggagcagactaacattccttagtgcctaccgatacagattaaaaaaactgctggaaattacccagaactgtgtacttttgagtcttgattattaagattagcctgggaaaacctcgtaaactaactcagatatgaggaaggctgtttgcataaattcggtgtgagttgctgttacctgcaggtccatagctcacagcctccggattctagctagcaaccttaaactagtagagtaatggaataaatgaattctcacgagcgacatttagatgacaatagtaagttact

SEQ ID NO: 33428 - DNA, 428 bp, Oryza sativa
  unsure (1)..(428): unsure at all n locations
aacatggatggagtgaatggtcagaanagataacgaagagattaaccatgcaatggaaaggaaaaacaagtagacacatatacatatagacagtctcgttctctgtttttttttctttttacctccccataactccccactcctttttccagcatacaatggaccaaaagtacttttgtaagcaggcacagcatctatatatctattctggccttacctgtgcaaaaggatccccatcctacaccttgctagttatggatacctattgccgagtcagtgggtgtcattgcccccgttgctcccagcaaacatacacgccgtacctactcactgcagtgaaaaggagaagagggagaagaanagaanatttgtgtgtatacataaacgcacacacatgctctctctcttactgattcgtacacaaaaag

SEQ ID NO: 33429 - DNA, 450 bp, Oryza sativa
gcttaatgatggaggtgagttaacaaccttttctgttgctttgacagatcacatttaccaacttaggagcaataaatagagacgggcgacaacaactctttttcctttgttatatgggttatcttcagttgtaaagataataagaagtttgttcgattcttcgttctttagatgtaatctgtaacgaagaaggtcgttatcgatgaacgtcgctgtaacctgatcgacactgtatgctttcccccgaatttttttatactagtcatcaacgttgcacaggctatggttattaatattataaacataaaggagaaagtacgaattaccccctaaactatcgcggtcgaccgaattaccccctaaaattcccaacccggaggcctttcgttttttttttgatttctactgacaagccatatggaatggtatcaactgaatatatgaaatgga

SEQ ID NO: 33430 - DNA, 505 bp, Oryza sativa
  unsure (1)..(505): unsure at all n locations
agctngagacatcaaccctagaagatgagaactccacanatgagcttganatattctttntcaaaatcccccaggattcatgctcacataaggaatccccagaatcatgttcgattagtattgacccctcgtgcgaggaccacaaccgcctttcgggccttaactctaacatgtttagaaggttggttgtggatgcttttatttatcataaatattgcaaatctcgtatatgttgtggcactaatcctgcagcgagatgtctccatggtcgagcttgtgaccataaacaaagcactgccgggagataccccggattatcttggtaagttttttttccaataaaagcaagaaccagtttttaggatagtatgcaccttcgggtattcttggtcaataaccatttcaggttgagattaagaacgagagacgtatgatgcctaagaactcgggagccatatcaactgtacattntggtgatccttggtngtgaaacacactttatgaa

SEQ ID NO: 33431 - DNA, 403 bp, Oryza sativa
  unsure (1)..(403): unsure at all n locations
agcttanaagtgaatgcaataaaaatattgttctgacaaaatacctccattctcaacgaaacctagtatgccttcagccttctgggttaatatttgatactactcctatatgttatcgcggtgtcttttctttcttttttttgtaaaaaaaaaatgatagctgcaattgtgtttaagcattttgagcttctatttctatccatgttacattctcttccatccctgacgcatttcatgtcctgataatactttgccgcaaactttaattagtactatgtcaactctgaagataaactgattaaaaagctcaatgtggtggggatccaatttataaggcgacctgcatgtcattaaaagtcgataccatgtatgtatcttacaactgacagtgactcgaggtttt

SEQ ID NO: 33432 - DNA, 412 bp, Oryza sativa
  unsure (1)..(412): unsure at all n locations
tatggcccggagcggaacaaagaaatgaaggcccccattcaccatanaaatacaagataatatttaaaaattcattgtcattaacggatttcacactaataagtctaaaatgaaaaaagaaatgtctctagatcaattaaaacaatntattctaacagntctagatataaaatcagtgatgatagtgtcaatatcaatctcatcccgcagcctcgaactatcattgatacaaaaatcgaaattagtttgagtacatctaactgttaggtagggaaaatatagacaagggaatatgattgaggaagattttgaattgaacctgcagactatggcagtcacgaagagattagagatgcaagcaatcgggcaatgggaatgggcatgacagcaagtagccatgaactcacgatct

SEQ ID NO: 33433 - DNA, 390 bp, Oryza sativa
catgccagcttgtagatgctctctacacttcttttttcgttctagtcccgtttttccatcccttccgctttgggtgagccactcacactggcgttggttggagcattggcgaggaagcgatttgccacagagctgacagatgggtagcctaatgagaaaataccgccattggcattgcgagagacaaaaaccacagcaatcatcaccccacagaggatagcgagctcattggccttgctgaatattgtagtgtggcgcttggaaaagcatgcatctcgtaccttcttgtacccgcgcttgatcttcatctttatcctagtcgtgcgtgccctacacttgaccatctcctaactggttactagcacagcttgcctatgtatagcgaaagaa

SEQ ID NO: 33434 - DNA, 390 bp, Oryza sativa
tgggccgatatagacctacccccgaacccattaatagatgattttcagcacccgagacagcaggtatcgacctccgggtgagatcaggacttgttggactccaaagcacatccacttgactaatccgttcccagagacttttcattttctctgactcccagagtcctgctgcccggcagcacaacaatccgcttacactcgggaagcctagtctatgatgcccacagacatcccgaatcacacagaatcgtttctgaccactcaggtcattcatctgccacataagctgattcttggtacgatttccacaccacaacaacgtttcacagagcacatgcgaacaaatctacgcaacgggaaaccacctacattcggccattgacgtgggca

SEQ ID NO: 33435 - DNA, 347 bp, Oryza sativa
  unsure (1)..(347): unsure at all n locations
agctttgtctttgtgatgcaagagacactatttgcatgattcaaagcgctgaaaaaattattcgattgtgctgagatactagtgatggagtcaaaacggtgaccgaattgggagaatcgattcaacacgcgaatacggatgcattaagtttggagttnttgacaaaacgaatttttttgcttgtgtttactctatctggttcatagattctaaggagatttggagaaaccggcacgtttgttctctgaagaagaacaaggtangtgaagccagccagccacagtaaacagctgaatatttttagcatttgaacccatccgtgaacaaccatgatttgcatacgaatg

SEQ ID NO: 33436 - DNA, 399 bp, Oryza sativa
  unsure (1)..(399): unsure at all n locations
ctaactgaacatgataaggaccaatgatgctgcgccggtttgcattggtgatgctgtgccgtatgagctttgatcttatcatatccttcaactgaactccatactcaagacatggaagcatgcttgtccaatggtatcaatccagaccggcttcttttttgctgcaatataagtgattctttcgtcctgcaacattttcatacccactcttcacgttctgaaatcagtgggtttgggtgcagagctggntgtaacgaacggtgttcttaatacattctatagagatgtgtagtatatgccacattaccatagccatcgcatgtcttctangagatcnaagtttcgttggcctccactgtaattcatgttatggacatagttacatgtgcatatgattgc

SEQ ID NO: 33437 - DNA, 467 bp, Oryza sativa
  unsure (1)..(467): unsure at all n locations
tacgtggagcctccacgcctgtgtataatgttttactatctttgcagccggaatgctgacttgacttaatcatatattntttttttgaggcagacttgacttaaccagttgatcagctagcgaggcattaatagcttggattttgccatacactacagatctggccctgtttagttgtaaagttttctttttcaaacttccaacttaccatcacatcaaaccttntatatacacaacttttctatcacatcgtaccaatttcaaccaaacttctaaacttcggtgtgaactaaacacaactagatctggatataacaatggggcttcatttctggcgtttcattttcttttgagctcgttcgttcgctccatgtggagaaggaattcgagcgcacgcgagatgtgaaaatcatataacanattttaataataaattcatttggttttaacaaactctatatatatat

SEQ ID NO: 33438 - DNA, 314 bp, Oryza sativa
ggtctatgtgggacaccataaacattcaccatctacatgataactatatctatttctctttataagaaaaatcaagccagcctctgcatcgagatgtataatagcattggtgagaaacacccgggggtcttccggctagcgtcataaagtggagggctatatgacctgcgttcaaaaccccccccttcaattatttatattagatctttcctaaatttgcgttttatataaccttggttaaacgcgactgatagctatagaaaattaccaaaagctaacatagttattttcaaacttttatctatttattccat

SEQ ID NO: 33439 - DNA, 419 bp, Oryza sativa
  unsure (1)..(419): unsure at all n locations
tgctcattcatccgatcatctatttctttaaaattataattgtatgttgagtaccaatacaagaggactagagtgtgacggtcgaaaaataaagcaatactccggctgtgtttaattcacgttaaaattggaagtttggttgaaattgaaacgatgtaacggaaaagttggaagtttacgtatataggaaagttttgatgtgatgaagaagttaancagtttgaagaaatatttcgaaactaaacacggcgtccgtatgcaagcgggaactggctgtgtggccagcgctaacagagatcggagatataaatcattttcatcgtattaacaaatattctggcaagagaaattaaggaaatatatagagagtttatgcagtgtagcccactagtagagcgcacgaggaggaatccgcgtga

SEQ ID NO: 33440 - DNA, 409 bp, Oryza sativa
atttggcttgaactatcaagcacagcataaatacaccagtattgtacaaattgagccttcatttggtacattcatattcagtcagaatcagtcctttcatcatcagaattattactacttggctgaaggtcgctgttacggaattgatatacaatgtcacttgcaattttgtcagccgcattctgagcattgctgataagatcaagggcggcctcctcgcttgtcccgtctgcaaagccatcaatggagtcaatttcaattctcgggacaaggatttggtcattgccaatgccatgctagctcccatacttccagctttcttgatgttcttgaagtacacatccggtgcaactcttagcttgtcaagatctcggttgcgtaagtgcactccgaccactgttattaagaa

SEQ ID NO: 33441 - DNA, 487 bp, Oryza sativa
  unsure (1)..(487): unsure at all n locations
ngctgaaatcaagctcgagcctgcccaagaggtagtctctgttctttggttcactcgtttcttctttaattattagaattgtctttcagtttttattatggtaactagcagattgcgcggcaaacatcattatattttctctcatataatagtatatatgttttctcaatatattattcaaattttttataatgacatcaaaattttaaattttggcataactttacgaaactacaaatacgtaatattcatattgtattttatatacgtgttagttattaattatttttaatatcaaattttagttatttgtaaattatatatattcctatatgtactctagacttgtcttttntttttaattctgaattttctataaattggatttctatatagactctaggctcttcttctaatattatntatttttatttctgattnnttattatttctaattatatttctacgtggactctaaactcatctc

SEQ ID NO: 33442 - DNA, 190 bp, Oryza sativa
  unsure (1)..(190): unsure at all n locations
ctgtgattctgactcanattcatcagtgggctaaaaattgattgagtatcaatgagaactttatccaataaacggatgactatggcttgtgtaacacatgtctatgattagcattaaaattaatatataagcatcaggacctcacgactttgtatacagataatgatcctgccctctgcagctaatagta

SEQ ID NO: 33443 - DNA, 491 bp, Oryza sativa
  unsure (1)..(491): unsure at all n locations
tgagattctgactcagtatcatccagatggnctacaaaatttattcgaaggaatcaaatgagaaactgttatacaaataaaacaggattgaactaatggtctttggtgtagacaacatggtctaatgatataggcatctaaaagtttaaatattagtaagcagatacagggaaccttcaactgaacttttgctactacaggattaaattgcatgcctgtccctctgccagctaatagttactctgtacacctggagtcactacttgctgatggcattagataccataatacattgctgttaattgcaaacatgcaggctactgcctgttgccagctgctactggcctatgaaatcgcagcccactgtcagtgactagtctgctatggataatgtgcaagatcactagacaccaagagcaaataagcatgtgcaacttactggtgaatgataaactnggtgctacaggcctgcagtgctcaagaatctttaa

SEQ ID NO: 33444 - DNA, 429 bp, Oryza sativa
  unsure (1)..(429): unsure at all n locations
ntcttactctggatgtagcgngtatgagtgtcttctcacttctcgacttcgatcagtcgtttgagttatacactctccctagcccccagccttgtcatcggagaattcttctcggaagataaggctcttggacttttgacctgcctcggttgaacaagcactgatcctagcccccagccgtgaagttggaaagtttatttccgattacacggctggttaatacgcacggcgagaactcttacacgaccagatcttacatggtctttcgtctctacaggatccgacaaggccttatcggctttgggcatccccagccgaagttccgttaggttccttggaggccttgtcaagacggcgtaaagggacatgaggataggttntaacagtaggtgtcatatgggtaagggatcatcgggaaggaacactttg

SEQ ID NO: 33445 - DNA, 356 bp, Oryza sativa
gcaagccttgatgcagattatgcaactgcagcgttttctgttgagcaagcccgtgtaattaatggggcatctcaaccgggttagcacatccttggcatccaccaccgtttcattccatcgccccaaaccatgacctggtggtgattagcagaatatgagttgactagttcgttctgagatttctgatagaccttgctgctggcacaagcccagagcaacactcaatatttactcaccatgaaatctgacaattcttcccaaggaaatatctgaacactagaaatcatcatcaaatggttagtatatatattttggattcgattatgacagggatgtgccttgttaaacatattact

SEQ ID NO: 33446 - DNA, 441 bp, Oryza sativa
  unsure (1)..(441): unsure at all n locations
cttagtcacctgcggcatgcaagcttttcagctcattttcagtttcagttttagctagactattgagtgtagttcagaagtgatcctaccaacatggctatacagtatagagtattgtgcttctgtgtggaagaaatccttatagtcctgtttctactgtaaataattataaactaaactatagctcaaacttaattcttttgtttagttcaaatatgcttgcacgccgactgcctgttgcatgggtgcctcccatgcaattccatatgatatagcttcaggattctgaagatcacaacttgcaagttgattatggagggtttctttcagagtcccgatgtagctcactgcaatgtgtccttttgcatcagtatttctaatgaagaaatncaccncaaaaataaaattgagttttttttttcctgtggagctttcagtctg

SEQ ID NO: 33447 - DNA, 475 bp, Oryza sativa
  unsure (1)..(475): unsure at all n locations
cttacgcttcggatccatacaaactggcctgcaccctggacttanttttnnnttccgntctgngcctcggtacgcaagtggagctaccttgtattttactcatcgcttcatattatctagctcgttttaagcaacattcttgggaactcctaaacatgcttactacttgttgccaggcgactactgaatgtctctgcaacagctcaacagcttgagttggtgaggtgattatattccaaaattccaattcttgaatatgtgtatcttcgaaggactactatatacatgactttnttggaactgtatatgtatatatggtggtacagtaacaacggcaattttaagccccttgaattggacaaaaaaaatggagaaaaaaaataaaggaattaaaatcctacactattcatgcatttgattngtagaaatgagaaaagaanaaaacgtagaanacatttctattcttatgattcta

SEQ ID NO: 33448 - DNA, 456 bp, Oryza sativa
agctttggtggtacagaatcaccaaccactttgatatctagaaactcctttacaagatgggtttacaaatcaaaaccggctagaagaaccgattctaatgaattacgggtaaacatccatcttataagtggaacggaaggtttttggaacaaacttataaagaaattcgcactcctgcgacaagaatgaacaacttacagcggaaacctacttgttaaatttacaccaatcgaacaccttaatttatcagtacctttagttttgcagaacttttttcaagacaacaccaatatgcattatcacattgtagttgcaaacaatagctagtgtttctttataacttgttataataggagctaatattgcagaaacatagcttatatatcttgcatatagtgatgttagtgacagcagccatagatgcagattaagagaagaattctgacaattctatat

SEQ ID NO: 33449 - DNA, 370 bp, Oryza sativa
caccttctacggactaccgcacactctgcttcaatgatcattgagtacaggtatgaatttgattggaaccggcataatctgcagtacagaagaagtaatcgattttaatacgttaactagcatttgtaggttctagttatacagatctgatcttctttctgaaattcagtgcatacgtatcaacataagattttttttttctgacaacaaaatcaatccaatctctacatcgaatgtagttgtaacgcaactctcaagtctcaacatctctgcgttcactgcaggaataatatatgatgctgggataggttgctctcaatcagagtatctctttccatttcctgtcattcatcacgccttaatattagac

SEQ ID NO: 33450 - DNA, 433 bp, Oryza sativa
  unsure (1)..(433): unsure at all n locations
gcatgcaagcttatttctctgatctcagattattattatgatacattagnattattcattcatggtccctgctttatgagatccattaggtagcccttaacaagtaatctgttagccgtataccactggggcaacaccagatgcactaagcaattgatgcgggagtggagttgtcaccagtgggtaaaagttccgaatatcaagcactatgccaagtcaaactggagagggtatcaggtaaaagttccgaacatcaagcactatgccaagtcaaactggagagggtatcatgtgaaaattactttgaaatttttttaaaaaaaggagaattggagggagatatcaccttccaatccttccaaacattttnttaagaaaaaattgtgaatgtgcgctggggatagaacaccggaccttatattgaaaccacata

SEQ ID NO: 33451 - DNA, 400 bp, Oryza sativa
  unsure (1)..(400): unsure at all n locations
aggggctaaagatcatcgggatttttagtcccgggtggtaacaccaaccgggactaaagttatgatcaccaaccgggactaaagttcctagggggcctgacaaggcctaacatctttgatcttgacatctttgatcttacccaccaggactaaagatcaaatatgcccgttgtagccatcaaccgggactaaagatgatctttagtcctggctnttagtggaactgggactattgtgaaaatcggccgaccgagcaaagatggtttcttcactagtgaatctttaatctagcattttaattcattttggtggtccacccctaggacacacatgcatcanaatactagtgacgtatcacataattcacatcgatatgctggcttaaataatggtactactt

SEQ ID NO: 33452 - DNA, 153 bp, Oryza sativa
cataatagtagaaccttgatcactaagtccccctacctggcgttcctatgttgacgggggatacctgtagactggatataaagggtatcggggtaccctgataccaagatctacctagtaccacatctagccaacagaaaacagggattatac

SEQ ID NO: 33453 - DNA, 282 bp, Oryza sativa
taatttgggcatatatgtcagtgcataaataatcacataccatcggtttgtttattcatgtgcttatccaaatcacttattaccaaacaaaagactatgtgtatgcaaatcttttatatacatattcttagcgattcagaagtaaatgatgtacaataaagtacaataaataacccaaaagtcgaggtataaattaatgtctaaatttaaagtttcgttacaggaaagcatagccaataatgaggccttaaaatgagctcatttgtggctaacttatttaag

SEQ ID NO: 33454 - DNA, 323 bp, Oryza sativa
  unsure (1)..(323): unsure at all n locations
gcaccagcagngaaaaacgcancgacggaggacaccccaacagcgccaccagcaacgggccgccaccgctcccagagaacccgacgctcgcacaagagacggcgcacaagacccanacgacggcggccatgatgcaacaaacgtagcaccagcaccagcagatgcaccacaggatgcatcaacaagccgagcaacggcagcagcggtctgggcctcctcccccgtagtccaaaccgccggagttgctacgcggcaagccacccactttctctagcaccaccaaccccatggaagcgaatgaccggctccatgccatagagaag

SEQ ID NO: 33455 - DNA, 182 bp, Oryza sativa
tacactcatcatattttacaaagccgtcggtatatcacttggatcatattattcagggattcacaccgcatattctacatattaatattaaagcgcttggttgactaccattatcgaaaccactccggtgggtggattatttattgcctgactatatgccttggttggtcacttaaccgcat

SEQ ID NO: 33456 - DNA, 436 bp, Oryza sativa
  unsure (1)..(436): unsure at all n locations
tcgcgaaggtacatttcaatgcatgtgttccttaatactccctccgtgcttaanaaaagcacttctgttgcagcattagaagttagttttttttctggtacggaggtacgaatgaagtatccgttgttgtgggtgtcgtcagaatctactctgaggcgcatatatcatcacttctttttagataagggcattnttttacctggcctctacatccaaccatatatatcatcactatgtcatcatttttgctctatcatactccctctgtgtcaaaataaattaaccctcgtattaggatgtgacaacaaatctggacatactntatatctgattctantttaaggggtggttatttcgagacaaagtgagtaaattggtactcagggtttggctgtacatggaatcattgatactcgtactgtcctacatagaactc

SEQ ID NO: 33457 - DNA, 428 bp, Oryza sativa
  unsure (1)..(428): unsure at all n locations
agcttaaatttttgtgctgngcatngngcttatgtagattgntntaacttcacatttgttgttatatgttgccttattttattattttcttggaactctgtttttatatgaatggtaaggttatcttgtgtgtatgttagaatatttattgttcaataggaaataagggactttgtttaaatagctggtgaggatggtgaggaaattcgtggaggcgcacggtgcaaccacagtgaggcagctatccaaggcggtgacaaatccactctcatgatgattgtgcaacagctccgacatctcagacagtctaaggttgtcgctagacatgagaaggtggcattggcgaggtcgtgctggtgcacgaaaggtgatatgggccagngcgctttcccttcatcctattggtggaggcagcggtgagtctccaa

SEQ ID NO: 33458 - DNA, 466 bp, Oryza sativa
  unsure (1)..(466): unsure at all n locations
tgcacgccctgaanaggaagcacacatgttcagatttctctttattttaacagaacagtgcatgaacctccaccacccaccacatgtccacagcagacaactagatccacattcccatcaccactccatcagtagttgtctgtgtctcaaaagggctatacagctagctagatttgtattgcaaaatgttaaaagagacaaattccctggtagatgcttgaggaaatgcatattcctgaagttgaatatagaatgttatccttcaaaagtaagatcaggaagaacaattaggttgcaaaatggaatgttggaatttctgataaaactgaagtatattntatagtggtcattcagtgggcctttctttttataatggataaaacttggtctttgtttcagccatcctgtccttgagaatcattttccatattaaacataactcaatgtgtttgctcttgatagtaac

SEQ ID NO: 33459 - DNA, 429 bp, Oryza sativa
  unsure (1)..(429): unsure at all n locations
agcttatggtattatccgatgaagtcacatcctatccagtgagcatggtaatatctagaagagttggtgtcattggcccttggttgaagaggaaagcattaagggtgttcgaccaaaaaatatgttgcagcagctatcaggggctcatccttagccgaatttgctatggtgagggctagtacttggccgattccaatctcatcccagtgggccttgttgctatcggagactcgcttgtaccatacatgccaacttttctcgggggtacttttctcgatagatggccaagatttgaaggtgtttttctagtgacctagattcgggttggccaatctaaaaggtatcctattggtctcngcactaataaactcgtgtgggtctggattgccgactggaccaagaagatactggtgatcatgcgacaaactg

SEQ ID NO: 33460 - DNA, 449 bp, Oryza sativa
  unsure (1)..(449): unsure at all n locations
ntgcaactataanacaggtgtaagcgctagcttgtgtaagattggttttgctgcgtcgtgacatgcggaccccacatgtcaacaaaaaggaccgcggtagaccgagtacacagagacggtccacgggtcgacggaagcggatcccgtgtgtcaaccgaggcgagtggccgacaaacggactccactagacaccacacgggttgcacacgtggaaaccatgcggctaccaagcggacacactaacacggtcaccacgcgcacaagcgaacgactgccgacaccgatacacaggtaccggggccgacaaccgcacaacgggcacgggcgacaccgaaaggacgaggacagggcagcgagggagagggatccttaccaccacgtgacgaggcgtgggaatgaccacgacgaacgggcgcggcggagacagacgggcacaacggagacgaacg

SEQ ID NO: 33461 - DNA, 345 bp, Oryza sativa
agcttgggctgttcatgctttgatatgcctcattgtagattgcatgtgctccacttatgtgcaaaccaaaaaagcctggtttgtagtcctgtttgctcactctgttggcaattagatgttgccctattcaatttttctgtttcctgttgatatttgtttaaaacaatgatgtgctaactggtaaatgcatactgtacgcgttttcactcatgaggtcaagttgctcttcaatggattatgccagaatactagtgtaaccataacttattcctaatgtccatggcctaatgtacttgaatacattcttcttcaattgggatcataaactcatggacacatgaatac

SEQ ID NO: 33462 - DNA, 440 bp, Oryza sativa
  unsure (1)..(440): unsure at all n locations
tcnggtcgtcggtgtcgtcgttgttcccgcggtctgtcgtgctctacggatgggtggacggngaaggggaggaagcggcgaagcggatggtggcgacgtgggctccgatgaggttccgaccaccggtgaggggcggccggagttgcgacggtggcggcacaagaagagagcggcgcggcggccatggagagaggatatggagatggccggcgtgtgaggggagagaggagggagtcgggggtcccttttataggccagaggggagggagagagacgccgggtatggagatcgacaccggccatggtggagctcaccattaaagaacattgtcaaaatccgcgacgaataaagcgggatcgagtgggaaattatgggggtaatggagaggatgacgtgggaattaattcccttcaattaatttgatgaaacggcgagtgga

SEQ ID NO: 33463 - DNA, 459 bp, Oryza sativa
  unsure (1)..(459): unsure at all n locations
ccgaccggaacttaagccacctgcggcatgcagcttagctaagcaccattatttcatttttcggtagcgtgattcagagatttccacacaccaaccaacaaaagcagagagccggccatcacacagagagccggccactgtcaaccccaccctagtcgcacaacagagctagtccatttctgaatatgaagtgcatgctgctgttctcgtgtctccaacgaaagtacattattctcattgctatttgtagacttcactctcaacagcctctgctatagattagttccacggggctgattagcatgtaccaacatctcttctgcacgtgggaaattgaaggagatcagctacatcgtcagagagaataatataactcaggcacaacagccctgcagacaacattggctccaagagactgtntcacaaatgttccacacgatcccatgctctaaactatac

SEQ ID NO: 33464 - DNA, 475 bp, Oryza sativa
  unsure (1)..(475): unsure at all n locations
ntattgcggcagctgtgaatggccagagaataaataattatttgttgaggctgaaccccattcccatgtctgctacccttcttttagctgtaaaagagctaacctttccttcttcacaaaatctactttttggctggaaaagagctaacctttctcgtcttcttcacaaaatttactctagtttatactgcacaataccctattctataaaaagaaaaatatttttatggagccatttagtttgtctttcccaaatattcatattttgcttaatttatatcatcaccgctcagttaatacggtataattttgtcctatgggtgaaatagatttgagatgaaaatttctaaagtttgatcgaaaatttcgaaatattagcatagatgagaagtcgtccctcccaaacttttgcagtgcagntntaataaagtaaaaagggaaaaaaaaagaataaagtggagtaccctcattccct

SEQ ID NO: 33465 - DNA, 290 bp, Oryza sativa
actcttacttgcgcaagactgctcggaattgcattacgctgatgagcttaactccctgaaaaccttgttcatggtcgactgttcaatggagcaaatgttctgggattgtttctccacggagcaacatagcatgatgacccatgttggtgttgggatactcgcgggctacgagagcataaattaacagtttctatcgcgtaaaccacgaaccatgcttgcattagatcatatatcgttaccactcgacgccctgcacaggggaataagacgctgacaagtctaaggaacta

SEQ ID NO: 33466 - DNA, 424 bp, Oryza sativa
  unsure (1)..(424): unsure at all n locations
tacggacctatgaaactcaagctgcccattatgtgatttttcctctcttttttcttttttttatgggtctcgatgcgtatatctgttcgaattgattcttttttcacgtagatttacccgtttaaatttctatggagctccccaattgaatttcgtaccgatctttgatttgattttgtgtgttttctatcgcacatgattggcatataaagtgatgacggaggaaacattatcgccatgacggatgaaaacgcggacacagagatgtgacgatcggaaagttacgaattttttaattagttaagattagtgtttttttatctttaggaaatttgtatcgtgtccaataaaaattagtataaacatgtggatataaatatatatancccgggatttgtatctatctctcgatcgtatacaattt

SEQ ID NO: 33467 - DNA, 374 bp, Oryza sativa
  unsure (1)..(374): unsure at all n locations
gcttgaccccaacatggatggcgcaaggtttatgtataatgtagctaagaatgttttcttagtcttttcccggtcttggtgtttggtgtagaccggatttgctagataggggccgtactatcaagaggggtctatgaagcgagcttgtggatgatcttgtgccatattagttcatatgcatgtaggtgcattntgtgggcttgtctaaccaagtgtgatgagttttctcaagtcctaaaccaagagagaagtgggcatgtccaataggagtgagtgacatcttgtgggtatgtccggtggatatcctttggagtgtgagccctttatccttgacttaagttgtgtttcttggataggattttcatgggttgggt

SEQ ID NO: 33468 - DNA, 479 bp, Oryza sativa
  unsure (1)..(479): unsure at all n locations
ggccacttagcctagagtaccatgccctaggcgctngctnttatccatacaaagctntatctagctnacacacataatcaggagtggaagggttctcataccctggtggttgtttcatataaacctcttcttctagaacaccatgaagaaaagcattctgaacatctaactgtcttaggcaccatcccctagacacagcaatggacagaataattctaatagttgctgccttgacaacaggactgaaagtatcttcataatctatcccatatctttgtttaaatccttttgcaacaaggcgagccttatatctgtctagactaccatcttgttttctctttattttatagacccacttgcaatcaataacatttctaccttgttgcggtgggactaaatgccatgtgttaattnttaatcaaagccatatattcagcatccattgcacatttccaattattattttgttaagcatcttg

SEQ ID NO: 33469 - DNA, 337 bp, Oryza sativa
accataaatgccttttgaaggaacatcataataaactttcggttaaaattatgtcttgcgtgaagtggagataacattcctcctctgcatatatattaagcttaagagaatgaactgactcctttcactcttctgttcctcttactatatcataaaagtagtctacattatattgcgttgccaactcattaatttggtagagcagatacaatagcacattataaccccactataaacacattttcagagggataaaacacgatagagagaagaccactggactccacatttgtagccagttgcaacacacacttcaacatgtatgtgtgtctgatat

SEQ ID NO: 33470 - DNA, 499 bp, Oryza sativa
  unsure (1)..(499): unsure at all n locations
ggctgaagtgagctatcatataataagaggaagaaatggagctttatttattgtggatcggaaccaaaagccctgtacaaacattgatggaaataaaaaaagctatttcgaatgactnttaagttgctataacagtttatattgattactacaggtaatatgaaatagagtagtactgaataaaaataagagttgtacatcaggtatacatttactttcaaacgaactgtacgctccacgtttgaacatattacaaaacttaagacttgtttttttaaagaaaatttcagaacaatcataaattatggttaaagttgtaaaaaaatatagttntataataagttttctacaagtttaaccgttaagtgtactctntnttatcccaaatcccaagagaaataagaatccgaaatgcctgacaatcgcatgtgatctttctcatagcaagtntaatagtatagccaactactagctctaaatatctntagtcagcttaata

SEQ ID NO: 33471 - DNA, 305 bp, Oryza sativa
gcttacaaatctggctgaagtatggagttatgaaatagagtcacactctttatacatagactgcataaaaatgcttgttggaaacaaaattgacaaggtactatttggccaaagtagttatttctttgaaaaaaaaagtgatcctggctggtcctgagttttagcttttatttcattgattcaagttcattatagtatgcccttttcagcccttaagttccatcgatttcataaaatactgttgaacatctcatgggagcatagctgattttgatggttctatctttcaggaggatgaaagaact

SEQ ID NO: 33472 - DNA, 484 bp, Oryza sativa
  unsure (1)..(484): unsure at all n locations
atatataatcaattcatgtgattaagctcgatggcattactgttgtgcttagcctaatctccatagtgtaagtacgttttctcctaatatctacatggcaaccgagctaaacacttgctaggcagattacaaggtggctcagaanattaatgagtttgcatgaaacttttctaatacaccccaggaaatgctagcttcatcccttgtgctagctaggctntaattntggggcttcatgtttaatttgcgtagttctatgcagtggcttatcaagatggacttaactacatcagtttgacaattaccatcgatctgcaggttctaacaaacgagttgccctcatgcggtaaattaaatccttagcatagctcanagagttgcaattagtttagttcacatctagaaacctctcgagcacttagcanaacttacttaagtccatatgagcatcggntngaagctataattcggacatgttcgatag

SEQ ID NO: 33473 - DNA, 273 bp, Oryza sativa
  unsure (1)..(273): unsure at all n locations
ctttcatcagactctttctggcccactcttccttaaagatgcatgttagttgtccagcgatgtgaaacctgttaattccacagtaaacacacaaagctacccgcgcaagcgctccagacttatctctctgacttggccgttctcgtgctgggggctaaatatacttgggccattcccacgaggacagggcggctacagattcctatttgtggcgatcgacaaantcaccaaatggatagaagcactgcccacgggggatatcaaggccgacaa

SEQ ID NO: 33474 - DNA, 474 bp, Oryza sativa
  unsure (1)..(474): unsure at all n locations
aagcttntggattttccttaaaggtntctggcaggttgaaaccagtttcgctctatcctgtttccacacaaaagtgaaaacaaccaaggttagcctgcaaaggacagtgattatacagaggtaaatataaaatattagttctggtaatctctattataaatattccccggcaacggcaccagaaatgcttgttggtatttcttaacgacattactagaaatataattcccagcaatggcgcagaaatactcctggtatattatggttacagagttcatccgcaagcgcacggatataccattgtagcatttcacccgagagtatttcaagggtatcgtatttatttaatcccgtgggaatatcatagtagaaagaaccttgactaataattatatngtacttngaataatcatagtctaagtanggggtaantataatcaacggtagaatgacacacaagcagggagctactca

SEQ ID NO: 33475 - DNA, 415 bp, Oryza sativa
  unsure (1)..(415): unsure at all n locations
catgcaagcttacaatgaaagccaaagcatgatctctatgttctccagncactttccaagccctacaagtacatgtcctttcctgcaaatttactgcatgtgtaatggtggccacagttacttcagcagttccagatccacatatcaatacctcacggtttttgagggtcttgctttttgcatttaaaagtgtagtaatagatgggaatatctctctatccattttactaacaagaatggctcttgacacaaacttgcttatgatcatctttcttatggtgtcaagcaagtcaacaatctgacgaaccttaattnttgagatctaactattgaaacattcagagagggtgttattgatgtaatataccccgcactcctcaaaaaacttgcttctgctcccatgtatggatgatta

SEQ ID NO: 33476 - DNA, 475 bp, Oryza sativa
ctaagcttgctgccaactggttgacttgaaactttgaatttctctgtttcttgaaacaatatagtagcagatatggatctgaatcatacaaactagcatcaaatcaattagcacatgatgaagctgactatgaactcaactgaacacctctttcaaaacatgtgccatactgccattccacatgtagtacctttccaattcttgttttcataaattggaagctactaaccccgataaccctgcctccaaaatccatactgctattagtgatgtagtaccttccatttcttgtttttcctaatgttttctcatgtaataattcgtgatatttgggttaatttgagacaggcttttggttggtgtgtctatgtccataaaataaatcattaatcataagcttttctaagaagaattggcagacctgaattacaagatcagtagaacttgatcagcatgatctcttacaaccttatac

SEQ ID NO: 33477 - DNA, 112 bp, Oryza sativa
  unsure (1)..(112): unsure at all n locations
ttcaccaaatatcatcagaacacacttcccaagacaaggctccactcaaagatcctcacccnacataaccacatgaagcttacccaatctatatggaattgcccccatctct

SEQ ID NO: 33478 - DNA, 489 bp, Oryza sativa
  unsure (1)..(489): unsure at all n locations
cggacctatgaaactcagctttctggtgaaacccatctttttagatgggcgatggtgtgtttctgtatgtcgcgaccaccgnggtggcttcgttntcggagtcttgtctctgtggtgttgccgtatgcctagcggcgttcggccattcttagcgggggtcatttggtgctaggcttcaccctcagcggtttgtgcttgggtggtagtgcgtgctgtgaggtcatgcaccttggtgcattgggatgttntttttttcttgtaacttttactccttcttaatatatttggatggcctccttcggccttcccggcgaaaaaaaagtaatagtgcacaacagcaatttagttgaagatgaactacattacatcacaacagtttcaactctaccttcatggtaaaccactctttaggtccacacccatcaggaggggaagctactntagcaaagtaagcagctggtgatctgggttccaccttgtacttcttgc

SEQ ID NO: 33479 - DNA, 486 bp, Oryza sativa
  unsure (1)..(486): unsure at all n locations
cacttaaaactcagctntcaccgaagggttcacgcgtacgtcgagagtttttcgtcttgctggccgcggctggcatgtatgtcttgatagatgcgtttttgtgcatcgacctagcaaacagcagctatatatatatatatagagagaggagggtcttgcaatatcaatccatcatcacaactcatcaaactcagatcgattgtcattgagagcgagcaactagcgctagctactactcgaaggcaaaatggtaagtaaatctcgtatacatatatgaagtaattagttatttggcaattagatgttgctgtaacccatttccattatctaaaaaaaaaagatgttgctagctagtgcatatatattcatttatatgcatgatcgatactgctggccggtgccgccggatacatctgaattattagacgtagaggccggctaattatgtcatctaagaaaactatttaatggttatgatgaatatat

SEQ ID NO: 33480 - DNA, 366 bp, Oryza sativa
  unsure (1)..(366): unsure at all n locations
ctttcagcaaccccaacctgcaatatgtgtaagactatatattttttgtattacatataccatnagtaaatctaaaattctgacttgctgaacatactccacagtattgagtgacaatcaattgaatggcgtacttgacatgggcaatatcttcgatgaacttcatgtcgatgtaccgaacaacaaaattatatcacttgcactgtacaacagtcttacaggagaaacccttgactgcgtatcgtgcttccttccttttagtaaacataactacatgtttcttcgaccaataattatgaaatggattcaaggaactttgttttgattatttaaatattctaacatgttctgaagagttgctacttc

SEQ ID NO: 33481 - DNA, 388 bp, Oryza sativa
agctgtccctcatggaggtctctagatcttgcttgttgattgtttcacgttttcagggccatagagcttgcatacgaagctccggatcaacttgtgagcagttctattatacgtggtgagtgtcttctttccaaagatgtttagtgtggtttctggaaaccaggattggaacaacttcccctcttgttgaaatatgaactggttcacctcgggatcaagggatatgaccacgtgctggcctcctatgttagttttgaatataggtccatacctgatagctcagtacaccgaacttagatttattgtgtgtgttgttcatatttagagcaatagtgtcttgatatcaacaatgttctttctcctaaagattaactatatatagcatact

SEQ ID NO: 33482 - DNA, 452 bp, Oryza sativa
  unsure (1)..(452): unsure at all n locations
taatatatagcactggcatatattatatattntatgtaagtgtgcaataaacaagcaaacttataagaacttatggtgaacaagaaaaatcctatgtacttatagttaagtttaaagtttctatctactttgtgtttgagaggttataaactatgtttcattgtcatcattctgtttcacttgaatgcataccgagagatatatctttgcccatttgtggtgctacagttgcactgccatgagacagaatccaggcacgcccttttgataatccatcattgtgttcatccagtacctcccctaagagccttaaggtagcatagttaacacatgagccaaacatggagcttgggcctaaagtatgtgtactccaacccccatcttcattctatagcaattntttcattggtagaaatatnttgtatattaaatggtttgttaaataaatcatg

SEQ ID NO: 33483 - DNA, 486 bp, Oryza sativa
  unsure (1)..(486): unsure at all n locations
tgcatctntgnataatcatgagactcacgctccatttgngttcatatagaaattgaactaggagcaagtaaactataccatgtagatgcaaagtttgacaaagaaaggggaaacaactccaacttaagcaaatcatcgctaccggccttaccacattgatcaacaaagcggccgatatgctccattgtagtcatagcattctcacctgtgaatttcgtgaagttgggcacctcaaatccttgcgggtatgggaccgaatctacatgttcaggatacgtcctttgatatgtatgcatggctactttggattctatttcactactatcccgcaagacattgtcatcatcttttccaacatccatatgaccgatttgtgactcggtcttaagtgacaatgctatttcactttcgcttgtgatacagtccgaaccgtcatttagttcggctatactctcaatggtgtcatgtctaagctagcaacacaat

SEQ ID NO: 33484 - DNA, 275 bp, Oryza sativa
  unsure (1)..(275): unsure at all n locations
agcttatacagtgcatctgcaatggttttctgatcatgtggatcaacaaggagaccattgttcaacacctgcatgaaacattcacaagaaagttaagtgatttaccccttcagtgcgttgntgtatttttgacatataacatggtagaacatatacacacctgattaatttctacaggagctccattttttgttgcataataagccaccattcatagcagcctgcatatagatataataaactggtatgatttggagtttatgacactgaaaaag

SEQ ID NO: 33485 - DNA, 434 bp, Oryza sativa
  unsure (1)..(434): unsure at all n locations
tctcttcagaaatctgcaatttcaatatacgcagctcnggtttaaccggacacatgnaattttcccatcttcacaaaactgcaaaactaaaacaactacctttccaaacagcaacattctgctgaaatctcataagatgctggcattgcaactttgcaagcttgataaacaccgtcacgaaaaagattaaagagccaagagaatttcgatgattaacgagaattttaccaagcatactatattatcaggataaccggttatacctgaactaacatagttattatagtataagtcatgataaaaacacaccacatagccgtttctccacataaatttcacagactgactggccaactaataatcactaagctgaaaaaagaagccaaatgtgaaatgcacttgtgatgaaagctagccactatgaacaccacttt

SEQ ID NO: 33486 - DNA, 334 bp, Oryza sativa
  unsure (1)..(334): unsure at all n locations
atttccttaatctaatatgcaggaatccttctattggcgacttgataactcctatcggctgattccgagatgctgcagccgataatgattctcagccgatgacgtctttgccgattaccaaatttcactgttaacagtggaacatggatagcggaagatgtcgtggctgcaccggggatgagctccggcgtggaacatggatggcggaggatgtcgtggtcgcgctaacgacaagcccggcgtatggcgaggcaacggatgacgcggccgccggcgatgagctccggcgtggaacatggatggcggaggatgtccatctccngcatgggacgtg

SEQ ID NO: 33487 - DNA, 486 bp, Oryza sativa
  unsure (1)..(486): unsure at all n locations
tattcgtttagttaactggtggtaaagacctatagggggactgccttgtgtctgtcaaatgaatgaatagtctagctaaccacaaaatgttaatcggtaaaaatcgaatgctaaaaaatagatatgtaacttaagtgaatgtctacttataaataaacacacctaanaaacaggaaaacactcgtagaaatgtggtttagtcataaaagttacacaacaaatttaacactcgtagaaatgtggtttagtcataaaagttacacaacaaatttaaggcttcagttgtaaaaacttcatgacaaatttaggattataatcatcgttaatggcatatattctaataagtacgaacatattatagtttgtgtataataaaatgttacatcatttttaaaataccacgcacttcgtccttgtgtgatgatccgncatagctaaattttagtgctgtatccgcactgtgttaatgatgatgtttttataaaa

SEQ ID NO: 33488 - DNA, 423 bp, Oryza sativa
  unsure (1)..(423): unsure at all n locations
catgcaaacttctccggttcttggtctctgcccgagtcatttatgccaacccctttattgatcgagctatacagcggatgcgcccccccacaagcttacggatgtgcaatgcctcaccggttgcatggccggcctaagtccggtcatatcgaggctgggagagaaggcgctacccttatttaagctcctcaaacgctccgggccgtttacttggaccgaggaaactgaacgtgccctcactcagtcgaaggcgtatctcagctctcccccagttctaggcgccccggagccaaatgaacccttgctactctacttagcggcgaccccgcaagtggttagtgcggcgcttgtcgtggagcgcgattatgacaatcctcatttcgcgcacccccacattgtgcagactnggcccgggagagagca

SEQ ID NO: 33489 - DNA, 439 bp, Oryza sativa
  unsure (1)..(439): unsure at all n locations
ctcagcttatntatcggaagntatttatcgggaagactgtaagccttcttattctgcgttcggagataactctntctctccgcacggaaaacggaatgatccattaacgcgtgattaattaagtatttgttaattntttttcaaaaatggattaatttgatttttttaagcaactttcgtatagaaattttttgcaaaaaaaacaccgtttaggcagtttgaatagcgtgcgcgtggaaaaagaatgagaagggttggaaaccctgagtagcaaacacagccttaattaatgtcaagttgntgtcctacaatactccctcggtccctcccacctatcgttgacctttgtgattactctatggtaatggcacactccaacactccattatattatcggtctgatgaggatgaaagtgtagccttgtcgtctcacccatat

SEQ ID NO: 33490 - DNA, 388 bp, Oryza sativa
agcttcaccgcctgcccccacaagggcaactattaaggcgaaagttgactctctcaagaacaaggacctggggtatgattgcatgcaagaggagcttgacgcttatgtggcatcagaagtcaggagacaattgaagcctcgaagtccagaaaagaagattcctatagacccaagtgttaagaacttcttcaggggtatgtctgcacctgccaaggaggccataaagctatcggactatgagcgaacactcaagaaagcatcttctggaaagtccaaaccagtccctcagcttggagagcaaccaaaccaggagatcgagccgttggtgaccggtgaagaatttggaatagaagaatttattactgacatcgggctaactacggatcaa

SEQ ID NO: 33491 - DNA, 470 bp, Oryza sativa
  unsure (1)..(470): unsure at all n locations
cgtgctagtgacttgtgagttggtgcacagtgattcgtgcatcattgtggtgccaaattgccaatgtggcatcgtggaaagatttaggatcttatcgtttaccctataaagagtaagccattgctaagatcntaaatttattttaggactttttaacgtggtattttcttcaacactgactcttgaatcactaagaaacaagtgtacaagttgtactcacaattctttttcgctaataagctggtaataatttataatcagctcttagacaaccgatggggctattagggccacgaaaggaagagatgtagttgcttctatctgagcaggcaacaagttatgatggcccgatcaaatgtgctattctctccctcccatatgatcaagttcataagaaaaacatagcaatagttacaacacctaataagtttcatcaaattcaccatgggatatattctcatatcatatgg

SEQ ID NO: 33492 - DNA, 287 bp, Oryza sativa
aaaatatattggctcatatgccgaacacgagagcctataagacagcccattggtactcttttatcctcaagatacctgagctcttgcactgaactgggagctcaatttgtcttgattattaaattgatcctgctctccacttgaaatggatgattcttttgcttcacgaaatttgtcccaagatttctctttaccaacaatagcaggagtttgcacaggttgtgtaattcgtgaacgccaatcacgggtgtctgtctcaacggaacggttatatgaactgagttgca

SEQ ID NO: 33493 - DNA, 486 bp, Oryza sativa
  unsure (1)..(486): unsure at all n locations
actaagctaaggttgcacatagcactattctctccctagctcatctcctaatgttcaaaggtacaacaaaaattactactttattccttaaggttagttntcatgcacattgtggttgcccttataaatgcaccagacagcaatagtcagcaaggtctgacgacctgttacgcttatacaggcgcataagcagtccgtgcagccgctntttaaaacattggtcctaagttaactttcttcaagttcgatcaagtttatagaaaaatgtagctggattttcagcacaaaacaaatgctgtactataaaaatatattaaatggtggatttaattaaattaatttgatgttatagctgttgctaagtttttctataaacttggtaaaatttgaaaaaaaaaattgatntaggacaaacacaaaatgacataatatggaaacagagcgtctaaaggttgtagttgggtatataccaccagaagaatttag

SEQ ID NO: 33494 - DNA, 72 bp, Oryza sativa
ttcttttccctaatgatgacagcagatggaccggggtaacagaaatattcccaccaggccacacatgtgata

SEQ ID NO: 33495 - DNA, 284 bp, Oryza sativa
  unsure (1)..(284): unsure at all n locations
cttgtctcaaactgggaatatacgtatttcaaggggaaacaatgtacatgctacatagtcttgatgttattttactgactaacttgcagtaaggttttcacaacttaaaccatgccgcaacgcatttaaaantctgaattggataattgattttctctttttttatgaatctacagtacaggacaatcgtaatatctttataggttgtagaaatctttgcttttaccaaacctgtttgtacttcattagcttntcaaaacaatctgtagtgcatgcaaccacat

SEQ ID NO: 33496 - DNA, 496 bp, Oryza sativa
  unsure (1)..(496): unsure at all n locations
actaagcttactctattacataatcgtatccaactaggactatatgtcttgccttangaaacaagaaaacataattccgctgccctaatctatcatataactagttgataacctattctttgacgcaggatatttggatgaatgcatgttatacattattgaaataactagatgatgatccgtgctttgctgcgggatatatgttacatattggacaaatgatgaaatgatttggattgagatattgtgaaaatgatttgagaatgacaatttagcatgtgtatgtttagttttagaatgaaataagttctaaatatatttactatatgcttgcatgttgagttntgtgtgcttaatggagtgatatggcatgcttgcatgtagattttaggagtgctaataaatactatgtttcttgttgagcttcaagtggttagtgggcattagtatgtatgtttaaataatgtgaaaatgatatggagataatgatttgaca

SEQ ID NO: 33497 - DNA, 325 bp, Oryza sativa
  unsure (1)..(325): unsure at all n locations
aaactggcgttccgtcgccgtggtcgaaccgcggcggcgcatcgccccggcggtcgccgcggcgcctccgctacggatgtgtatagctgcatgaacattgatccgtagtgtggtgctgcacaagtgtaattgtctcagatcaaccatgaattctttgattctttgatgctcatgtagatggttttgaacttttgatctgttacatgcatcgntgccaatattcaattaagagattattctattgtgcaaaacatctgatgctgatgtagatgttgccatcaatgtacaatgtatttttttcaaaatctgaaatacatgccgatgt

SEQ ID NO: 33498 - DNA, 443 bp, Oryza sativa
  unsure (1)..(443): unsure at all n locations
tagttcttgagccatctgttttcttcttttccccgtctgctctttccttcagaaggnctacaccaggactggcaaccgcacgacaggcgagggcagcaacggtgaagaacgcgctgatggtgtgcaccccaacggtgattctggcaatggtccgccaccacttcccgagaatccgacccttgcccaagttatggcacatcagactcagatgatggcagccatgatgcagcagatgcagcagcagcaccagcagatgcaccagaggatgatgcagcacgccgaacagcagcaccagcagtttggtccccctccccctcagtccaagttgccagagtttctacgcgtcaggccacccaccttctccagcaccaccaaccccatggaggcgaacgactggctccatgcaatagagaagaagctgaatctcctgcagtgcaatgatc

SEQ ID NO: 33499 - DNA, 434 bp, Oryza sativa
actagcttagtgcgtcttctatgggtaggaacctatccttctttttctgaatcttttaagcaactttggtatagaaactttttgcaaatatcgcaccgtttatgcagttgaatagcgtatgcgtggaaaacgaggaagatacgttgggaaccttgagtatagaacacaggccttagtagtgctaggatcatacaaaagaactagatattagggagaaaatatcacgaaaacattgcactatagatcgagaaaaggcatctgatagccggctcatacccatatgaggacccgtaacccatacgccggttcttaactcacattttttataacacatacctactaaggagcttgttattttaagccagaagtcgagtcttggccggtagcctcacaacccaatacttcactatcatacttcactatcgctattatca

SEQ ID NO: 33500 - DNA, 318 bp, Oryza sativa
gagcttataaaatacacataagatgccatggtccatacctatgcatcttgcaaacagcattgaggtatacccttttaggcatatcaagtgttcgaaatgaatttgtccagcataatttaactgaaggtgcaatatgcaaaacttttttctttttttgtatatgtagaacgggcaaggaatattgtagctatttaattattctaattttgtttgtaccctccctttatatgttgtaaccaactgcacacttatatgtctgttggtccttgatgactctggtttgaaatatagcccagcaagatatatatgatatactat

SEQ ID NO: 33501 - DNA, 447 bp, Oryza sativa
  unsure (1)..(447): unsure at all n locations
tgngcagacgagctcgctcgagatcggctcgttgtactgcctatccacgtgtaaggctagccggagccgcagctgccagggttcggctgaaccctangttcgatcgaacctgggccagcctagcaggcccctaagtttggcagggtggctgacaggtgggtcccaatgacggttgtggcagttaaggtggttttcggtggttacacctgtcatgtgagccctccttatccatttgctngcttaagagtgaggttttctccactttctctntattttatttgataaattcctgcaacatgttattttccaagtacaagtggaactgtattatttgaaaacaaatatgcattgtaagaataggtaattctccattattttagttatatttgacggtcgaaattgtctgtaacgaccgtcaacaatacccacgctaatgtccctatcata

SEQ ID NO: 33502 - DNA, 492 bp, Oryza sativa
  unsure (1)..(492): unsure at all n locations
actaagctttanatcctaccctgaanatgcatgtcttaacatatctnnctacttagaagagcacaaagcctacagtaaaaacaagattatccaatatattacctcaagtgtttccttgtgttcctttgtcttagcatcaattaactcaatcaacacgggtttaccatcctttgctggggtaatctagagatatggatgttgcaaggttacaatagtgtcaaaagatttcatattatggagaaagcttgagttgaatctcaaggtaaccttgctcgcaaagaccccagtatgatagtcaattttacgaggattgataagaatcctttgggccaattntgcaatctcaggatcaaaaccaggcatcaactgatcaagtgcttcaacaaaagtaacctgtccaagtgaaatttaagtaaatacaggtgatatatcatcagatgacaacaggccttaatcatataacagcatagatgggtaattagaattaacatg

SEQ ID NO: 33503 - DNA, 384 bp, Oryza sativa
agcttggtgtcttggaataccatgatctcttgttttctggcacacagggttgttcatgataaacaaaatgtttcaagcctgagtgccggacagttttacatggaacctgatgattaatgggtctgcagactgtgcacaccacgggagattgtccaggtcttttcatcttttagtaagatgcaaatggagggtttttcttttcctcgagaaactggcaggagatctgccttgacttatattaagaagaatatcaactgagtaggttcaaattacgtgtcctgatacaagaaccgaaagaaaacaacttgtaagatctaattgatgtacataaatttctgcaggttaattctcgtctgcagagattggcaactccatctgtgtgat

SEQ ID NO: 33504 - DNA, 436 bp, Oryza sativa
  unsure (1)..(436): unsure at all n locations
tcctgcgctgctgcgcgtgggttgacgatgtacctgaacgatttgagaagttntaggattaggatttatgggctcgccttttttcttatcgttacgtttatcggctaaaatttaaattgtacatcttaaatttaaaattgattttaagatttttttccatcaaagtttattttctagccctttgtttttaaattactaagacacgcatataaaagttntattgataaatatntttcgtttgaaatatgttggttggttattacacaaaaataagcgaaataatggagccgctagtgggagtctataagcgcaattaacgacctnacgactggcataaaatcaggcgcgcagttcctcgaagcatccttaccgcggcggtacgccatgaggatcagatcatcagggtcgcggactctgtcgacaccgacccttctct

SEQ ID NO: 33505 - DNA, 376 bp, Oryza sativa
  unsure (1)..(376): unsure at all n locations
atgtgcatcgactacaccgatctttacaangcatgtcctattgacttttaccccctgcctcgcatagatcagattgtcgactccaccggggggtgtgaccttttgtgttttctagatgcatactctggttaccatcagattcgcatggctagggaggatgaagaaaaaactgcattcattacccccatangaacttattgttatacgacaatgcccttcgggttaaagaatgcaggtcctacttttcaacgtactactcgaatttctttgggtagccaaatatgacgtaatgttgaggcttatgtcgatgacttggttgtgaagacgcgcaaccgagacaccttactcacagatctagcggagacttttgagagtc

SEQ ID NO: 33506 - DNA, 418 bp, Oryza sativa
taaataataatggtataactgagtttgctcaaattttaaaaataattacctcctcttcttgctttattcttatgaaaatcttttaccacaaagcatgttcgtttctcattctcttcacttcttagctacattcgaattttgatacctcaaacgttagttttgttcattttccattgtcatgccattatgttggatcttctaagactcaattgtcagttcttttttaaaaaaaagatggtaatagcgttatttctattcacatataagtttgcatgatctttctccgtgtgcaagttatgtccaactaaataaaaccccgcacgtggtgttgtttgagttttgtatgataatagtataaacaaaatttaagatagctagacgatatagccttaaataagttgcatcttttgattaatca

SEQ ID NO: 33507 - DNA, 408 bp, Oryza sativa
atgcaagcttttcgccgattagtgcaatgggttctgttatcggcatcgacgaccttgtcttcccacccgggcagacgtttcgggtcggtagcctcgacttcgtcaccaacaacttcggcaagatttctctccttgactcggaatcagaccagtcgggagagaatcgacttccagtcccgtttggattcccaaacgcggctgaaagttacttcaagaccatctcgatcgagtcggcttcaaaccactcggccgagatcgcattttctccaacgacgccagatcaagatgatggggcttacccaccgatcctgatgaaggctcccgacgatctagcggccgtcttcaccacgacagcgtcttcatcccgtaggcctaagcggaagtcggcttcaacaccgatttcgccta

SEQ ID NO: 33508 - DNA, 433 bp, Oryza sativa
  unsure (1)..(433): unsure at all n locations
tcttatatattgggaaatatcatataaaggctaaacacatgttgcgctctgcactgntagcattatagcattataaagagcttctcaacacttctagaattaagtaaacagatgtagtgattgcatgcaaattgtcctaaagttaactgaagtcctgacattagagtagcttctcacttagcatatctataggtcagggtgcatngtgtaatgttcttccgatttaacaactctcttgtattctctgcaggatttcagctcatcatgggatatccgcgcaacgccgacctttttcttcataaaaaacgagaagcaggtcgacaagcttgtgggcgccaacaaacctgagctcgaaaagaaagttcangcacttgctgatggcagctgaaccttattatagcgcaacggctagaacttgaaacgaattggcatg

SEQ ID NO: 33509 - DNA, 426 bp, Oryza sativa
  unsure (1)..(426): unsure at all n locations
ancttgctgagggggcgcatccgctctatatctcgtatcttctcggcgttggcctcgatgcctggggcagagaccaaaaacccgagaagcttgcccgcaggtacaccgaacacgcacttatcggggttcagntttatgcgggcggagcggagactctcaaaagtttccgctagatccgagagtaatgtctcttggttgcgcgtctttacaaccaagtcatcgacataagcctcaacattacgtcctatttggctacccaaagaaattcaagtagtacgttgaagagtaagacctgcgttctttaacccgaagggcattggcgtataacaataagttcctatggnggtaatgaatgcagtgtttttcttattctctctagccatgcgaatctgatggtaaccagagtatgcatctataaaacacaaa

SEQ ID NO: 33510 - DNA, 449 bp, Oryza sativa
  unsure (1)..(449): unsure at all n locations
gtgtcctttnttctctctgaccagttgcatgtaatgttntactttcattagctctttctcaatgtgtaaacttttcagagcatggctgcatactaccctactttgttttgtcatctttgctggcagactgatatctaatgtccccgcatgtcttcattacagcgaagctagtgatcatttctaacaactgcccacctcttcggaagtcagaaaatgagtactacgctatgttggccatagtcaccgtccaccatttccacggaagtaagtgacacccatgctttcaacatctctggacctttgcaaaaattaaaacagtgaggcatgcttggaagtaaatatgtaatcaaattatatcgaagaaacgccatgctaataatttttatgcgtttttttaaatgaaactgaaataaggtgcacagttctatcttctgttgccatggcaatgc

SEQ ID NO: 33511 - DNA, 302 bp, Oryza sativa
  unsure (1)..(302): unsure at all n locations
catgcaancttaacgctcttcgcagctttaaaaatcttgctgttgacctagatatctttccaactgaaaaataactcttacattctataaacaaacgtacatgctgatatagagtgtggtaaacctaattcgaaggagtatcaagctctaggttttcaactgtagttaaaaacaagctgtatacctggcaagctttgaatctgcacagcagatacagaagtcaatcattaacagaaagacacttaaatgtagaaactataatggctacatcaagaagcgtctgagctgaaaaagacatatat

SEQ ID NO: 33512 - DNA, 469 bp, Oryza sativa
  unsure (1)..(469): unsure at all n locations
gtacatggaactgtaaatggccacttggagatgactgctccatgctcagctgttgtagctgccattngatttcccagttcctctggaagaaacaaccagtaaaaaggaggctagcaggaagcagcagaaaatgctaagcatgctaattttcccatcatagcatcgcttgttagagcatgcatttttttttggttcataagagaaatttcagaaagtagagcattgcaatgtcagaaattaggctttattccttttgtttgacatcctttgctgtttgatatttaattttctagattgatcactagctgatgtcttttcatttttttaatatgtatttctgactgggttgaaacttctctttctaaaaaaagggaaaatagtaactggttacaaaccattaagctggatgttaaggtcgatggcttgctcaagctgtctgtgcaaataaccattctctcaactgatgaag

SEQ ID NO: 33513 - DNA, 473 bp, Oryza sativa
  unsure (1)..(473): unsure at all n locations
tggcacagtgcacctatgtgtggatgaatatggaaaactgttagaaattattattggatggtgactcattnttgtatgaccctcctccttttactttatnttggaaaacatggctttttcctatatttatctttttttttcatgctcgagaatactttatctcattcccttttgagcgttgttttcatttttctcctttntagctcatttctcattgggcatcaaccattggaggagataccataaatgtatggagtctttatagaaattcttcttgtggataatgtcttgccagaaacaacgtaccgagcgaaaaaatttatccatctccttggccttgagatacagaaaatttacgctgacgaaataattggatcctttactgnggtgattatgcggatttggaccaatgtccagtatgcgaggcttctcggtataagtgtggagacatttgaagtaatggtacaatgaat

SEQ ID NO: 33514 - DNA, 471 bp, Oryza sativa
  unsure (1)..(471): unsure at all n locations
tcatcctagtggcacaatcgatcctaatgggatgtttatgatataattntccggangggattacgtaagaccttcagcatttccagcctttatcacacctgaaacttgcgtggattatgcccatttaaaaagcagctatcaaggaccacaattttgtgcagtagatacatttgattttcagtcagagccttatcattctcctacagcatcagctgcatatggtatgggtttcagacagtcaccaagttctgaaagaatggaggtacatggttatgcagttcctagcaataacgatccatacagcaaccagcaagagctttcagtgggatgcttctgccctgcattcacgggacaaggtaatcaaacacataagccactagagatgcaaaattgctttcctagtcagcattatgagcagaactcccagccagctcctganacaacagtgcgcctgatgggcaaaaacttcac

SEQ ID NO: 33515 - DNA, 230 bp, Oryza sativa
  unsure (1)..(230): unsure at all n locations
acctgagcccaaagcgtccacagtgccgaggaccaagcacgaatccatgatgcgagacatgacaagggtatangaaatactttgacagatgcagcagcagcagcaacagacttaagaggccggcatacaagcctgggctgtatcggccattttacccaccatagcaccgtaagcagccccttcgactaaagctatgggagtaccttcgactaagccttggcatcacccac

SEQ ID NO: 33516 - DNA, 497 bp, Oryza sativa
  unsure (1)..(497): unsure at all n locations
cttggatgactatctttctanggtttaataaaatttttagtgttattagatctgttgattcttcttatgaagctaattatccacaatctgagatttctcgtcactttntgaatggtctcgacatgtctatttgggagatgaaagttacatctattcaggagtctgttaacatgtctactttgactttggattcactttatacaaaactgaaaacacatgagatgaatgttctttctcgaaaagttgattctaagtcgaatgctttggtttcttctttttcctctttggatgttgttgacagaaaacacgaggcctangagatttgcttaactccagtgcaggtccaaagctcgccttcgggtgcgctagcgtgccagttgatttgatcctgtaatcaacaagaaatagaagcaaagaaaccgtggttaaatctataaatgatagccgatcggctaggtgccgatgacatatcatttatctttgagccaatgtcatat

SEQ ID NO: 33517 - DNA, 354 bp, Oryza sativa
agcttgtcttatatatataactcacgaggttctatcttcttgactaaggtgatgtatgctgaaagcacatctgatactatcctgaacctttcctcttaacctaacatggtctcaatataatggatgcgtgatatacacggttatacctgctaattcaccaataaaactcactcatcatcggatgatgcatactcttcgatgatagtgaagacacgacccgtcctatgatagaagatattgactgctcatctgtgattacatcatcgcatactaatacgttttagtacacgctatcaaataatagaaacctcacttgaactacatagatactagaacagccgactcggtctctat

SEQ ID NO: 33518 - DNA, 466 bp, Oryza sativa
tattacggacctatgaaactcagcttgtcgagcagcgctgtggatgtatgcactcttactttgtttttcggtgagtacgtggcctctcttgcatgctacgctcaaccgaaataccctctatcattcggcggcctggctcatgatccactacttatcgcacacgtggagaatactacaccacccatcgtcgtgctgtccgtcgccaacgtatcctattcatgtgatattcagtaacctggacaacacactgaggcttatcttgcaggaaatactctgaggagaagcattgagttgctataacctcctcacacttgcattatcatcttctatgaggcttgtaatagcttgacactcatatgtctatgacctatgggccctcgtctgtctatgacctgcagaggccatgtagcttatctatggatgcctcttcttatactggcacagtgatgaatatctcgaataaagt

SEQ ID NO: 33519 - DNA, 166 bp, Oryza sativa
tagatgaacatttattttgtccccatcaaactccgcattcactactacacaaaccgattttttatatgaaaccccatgatttttgcaaacggaccataacttgccgtgtctggaaaaatcgagcggcatttttgcatacggctccttaagacgtccagatggaaaa

SEQ ID NO: 33520 - DNA, 444 bp, Oryza sativa
  unsure (1)..(444): unsure at all n locations
ntattcccgtgtagggtgttctgaccggtatgaattgagcttctctttgtaacctatcaaccactacctagatagaatcatgtcctgccgacgctctgggtagaccggttataaaatccattcctatttcttcccacttccactctggaatcttcaacggttgtaacagaccggctggcttctgatgttctgccttgacccgctgacatacatcacatagagccacatattctgctatctcacgtcgcatactggcccaccacaattgttgctttatgtcttggtacatcttagtgcttccagggtgaatggaatacaaagtttcatgagcttctttcatgatagtatcctccaactccttattatctgggacgcaaattctttctcctaaccacgcagttccttgctcatcttctacataaccggatgcttttcctcttctca

SEQ ID NO: 33521 - DNA, 359 bp, Oryza sativa
  unsure (1)..(359): unsure at all n locations
ctgcttatctttctcctctattttaacatcaaagaccataccataattagcatgccagccaacaaatattgcatgtagctgaaaatcttcaaaggaaggacaaataaccttgaattcttcataatatttatgcaccagatccatgtccgaacggggtactttaccggaaatagcagccaaaagcattgaaaagggcattcaatgtgaactaagagaccttggacttggagcacgcccaagcatacatgcttgttgttcatcacctgaagacacaatggtctgtagactgtcatcctgctcacaacaagcaagccacaaattaacaagatgaaatntttcctataactgtcatcaaaatc

SEQ ID NO: 33522 - DNA, 329 bp, Oryza sativa
  unsure (1)..(329): unsure at all n locations
cggtatgtatgtaatatcactgtcatgttctttgctacctccaccatnggaatttgcactctactgtacagtcatgcctaacttctaagctcaatgcaagtgcgtgatgcctccaacagagttggaatgcacatttctgccatgtggataatcaactgaactgcaattactntctgatgctaaatgtagntttgatttccactccagatgttaatatacatgttagttcagtcaaccaatgaaattattgcttcactgcaatctttcttcttctcttatacgttcaccaacaaagtagtttgccgaaaccaccataagaaattctcaca

SEQ ID NO: 33523 - DNA, 436 bp, Oryza sativa
  unsure (1)..(436): unsure at all n locations
agcttctcttactgaaggggggaattatttatcaagaatgagtacaaccaccgtacttagcaagtcacaccgggagatgcatgattaatgaaagggggtacaaggggtaataatataggggttaagtttggcacgtaactgcatttaaaagtcacttagttgcccaaagctattttataaagacgatcctagagttacacagtattactaatcaaggcctgggacccacacgaacctgccttaacccaaggcctacgatgattcagactgaactggcaacccgacctgggtcccagctcgtctcaagccaacccaggccaaccattccatattttagtgtgtaagcaaattttaagaattaaaccactaactanggtacattgctaggcttgcccatatccganggcacggctattcgaatagatttattctgatc

SEQ ID NO: 33524 - DNA, 203 bp, Oryza sativa
  unsure (1)..(203): unsure at all n locations
tcggcacatcataacggaagtggaagaagttggactttctattgccccggccgaagccgccaagaactatgtacgtcacagcggntgggttgtgcgggataacgtgcctgtcagtacggtgtactggcgaagaacataggcacgcggagatcatgagagctttgtcccagattcggagaaagagatgctgtggaccacaatgc

SEQ ID NO: 33525 - DNA, 351 bp, Oryza sativa
  unsure (1)..(351): unsure at all n locations
agctttataaagatcatgatntggtttgttttctgtgtcatcatgctaagatggtttctacttcacatgctcctattgtttctgtgatgacggatgcaccgggacagctattacacatagacacttntggtccaccttgagtgcaatctgttagaggaaagtggtatgtgttgggtattattgatgatttttctcgatattcttggngttttttatggaaactaaggacgaagcttttcaacactttcgtggtttgtttcttcgattagatcttgaatttcctgggtctttgaaaagattcgaagtgataatggtggtgagtttaaaaatgcttcttttgaaaattttgca

SEQ ID NO: 33526 - DNA, 476 bp, Oryza sativa
  unsure (1)..(476): unsure at all n locations
ntcatccggagcatcaggtcgcgagtcattgctccgcagattactctaccgacagagaaaccagttgtaccaacgccatcatccttcaagactatggctgacaagacccttcgcgagttcgctgctccctctgctgagaatgtggccatttggccacagatcaacatgggagacgtggatttcgacttgaagtccagcctcgttaccgtggcacanggctagcccgttctgtggcaagcctaacgaggatgccaacgctcatctacagcagttcctggagatctgtagcacgtgcaccatgaagggcgtcggtcccgacgccgtcaggctaaggctgtttccgttctccctcctcgggagagtgaagcagtggttctacgccaatcatgctgctgtcaacacctatgacaaatgttctacggcattcctctcgaaattcttcccaacgggcaaaaccaatgcccttcatggacgga

SEQ ID NO: 33527 - DNA, 447 bp, Oryza sativa
  unsure (1)..(447): unsure at all n locations
gctttactgtttgacaccttctaagatgctttgtaccaactcctaaattgtttgtcactgcggtatcaaaggattttaaggtattgggcacttgatcacgcgcactttggcctaagcgaaaagtgcctaactccctaagagaacgtgacaggccacacctgaaaatatgggctgcagacatattacgcctatgccaaaaaatatgccttcgacaccctttaaaggatgatgcatgtaacatgctcttcagtaataaatttttcgggtaatataaaccaagtgtagctcatatgaatagcttctgatctgaatgattatcccttatgggatacaccaaaataaatataataattgaatcccgactggcgcaagtattcngttgatagcccttacggggaataataatnggtccagtctttgagcatagaacatagactcatgactatt

SEQ ID NO: 33528 - DNA, 501 bp, Oryza sativa
  unsure (1)..(501): unsure at all n locations
actaagcttacanagcctangaagaatactataggatggtcaaatgtatctactaaggcattattattctntggaataattaatattaagaattatgtactcgaagcctgcctctctacaaataatttgtttagctagactgcactcggcatgaattaaatacactgagattatataatcatacaaataatgcttataatgtctatccacttgccacaattatcattggtttcgtgctatcttatttagattagaaaccatagtttatgataatattctaaaataaatagctaatttttatcagctttcggtattggattatctataactaatttacagttaaagacccatatgaactatattccaacttctaaatgagatatgttattttgaattatattatgatattataatattatatagaaatatatggaagacaacaatgatatagagtttaccagctggaaatattttggtgattttcttcaatctatgtatatg

SEQ ID NO: 33529 - DNA, 374 bp, Oryza sativa
  unsure (1)..(374): unsure at all n locations
catgcaagcttctcgggttcttggtctctgcccgatgtatcgaggccaaccccgtgattatacgagctatagagcggatgcgcccccagcaagcttaaggatgtgcaatgcgtcaacggttgcatggccgccctaagtccgttcatatcgaggctgggagaaaaagcgctacccttatttaagctcctcaaacgctccgggccgttcacttggacggaggaagctgaacgtgccctcactcaattgaaggcgtatctcagctcttccccagttntgatcgccccggagccagatgaacccttgctactctacttaacggcgaccccgcaagtaattagtgccgcgttggttgtggagcgcgatgaagacaatcc

SEQ ID NO: 33530 - DNA, 468 bp, Oryza sativa
  unsure (1)..(468): unsure at all n locations
actaactgatcagaacctgagcttatacggggcatttgttttcaggagtgcgcaacatcaagtctgggacgatggcctcaggcaccaccgtgttcgttaacgtatgggcgattaacagagaccctatgcactgggatgagcctgatgtgttcaagccggaacggtttcacagtggaaagatcgactntaaaggtgcanatttcgagtatataccagttggtgctggtaggaggatttgccctcgcatgacattcggacatgctaccgtggagctcatgcttgcaatgcttctgtaccacttcgactgggagctccctaaaggagtcgcaccgaacgaactacacatgacagaggagatgggcatcactgtgggtaggaagaatgctctttatctgcatcctatagtccgtgtgccctctgaacaagctactatgtcgtagtattgctacataccatggcnggtctcta

SEQ ID NO: 33531 - DNA, 369 bp, Oryza sativa
  unsure (1)..(369): unsure at all n locations
gcttatgtagctntttgctcaaacttggtctttatttcgaaaccttgtcttcatgatgttgaagtgtgaaataaagtaattcggagtggtcttaatcatatttttatatcccatgctttccaaatatgaaagatttcaaaagttggatttatagctatttcaaatatcctctttggtcaaaattaagaagaatctcatttaagaggcccaattttgtgaaaatnnctccaaaagtgcttcaatatgtatttcaaatttttgcaaggtattgtgaagaaaagatcttatttcttaaataatatagaaaatgggcgtaaaaggatctttgatgatcgtatttttattcaaaatgctctatctccctaattc

SEQ ID NO: 33532 - DNA, 379 bp, Oryza sativa
gcttaagttaacaatagaaacatgtatccttttcaatccaaaagtttgttagactgtagcactaaaagtccactaacctttaaatcaggggaacatttaaattttggacataacctttaaaatcactggaaaatttaaattatgaacatatgaagtttaaaacaaacatattggttacaggttcactggactcatggtacaagtcaaataagatatgtttaccataattcacaactgtagaattctcagctggtcaagatataagcaagctcaaccacaacccatattgattctgtgtaaaaaaaagggacatgtgccaaccacatactttagatttgttgaactgcacagcttatacttttcttattccattttgaat

SEQ ID NO: 33533 - DNA, 481 bp, Oryza sativa
  unsure (1)..(481): unsure at all n locations
actaagcttgtcagttgaactnttgagaaccttatgaattatctgatccttacactgccttgctcctcgaaatactctgcaatggcctccaacagctcaagtggaggtctccagtggcaagtcttcaacagagaataagcccttcttcatggcattgacagctttatccatctgcttactctgaacaanatcctccatcagtatctcccaagtcttgtaatctcgatgcgcacctttctctagcatgtggagatgaagcctctcagccttttcgatccatccattcctcacataagcaccaaggagaacatttgaaacccgcacatcgtgcttcttgctttctgcttcccagcttccaaaggtccactcggcccgaccaatgtcgccaacttttatcaagcataccatagcagacatgtagtttgcagcagggattctacctggaacaattntactagcctgccacagcctaataacccca

SEQ ID NO: 33534 - DNA, 453 bp, Oryza sativa
  unsure (1)..(453): unsure at all n locations
gatccttaagncgcctgcagcatcaagcttgtactttgatcgatccattctgttgtgttagngcatgcatacaggaggacagtacatagctgcaaggactacacagttattataagaggcggcgatgatgatgatgatagagccgagctgatacattccatcgatcgatcagcagccaagcagcttcctggatcgtcttcttcctcctccctctgcaactttattccattttgcattgctctctatacccctatagtactactagctgatagtactcctgtctgatgtgagtgctcaatggctcatctatgtttgtctatctttcattggatcgaaaaatggaccgctgggattagatgacggggaggtatgcccgggtacgaagagtatatattagagggagagagatgatagatgccattgcatgcagatgcacgaacggacatgatgaga

SEQ ID NO: 33535 - DNA, 364 bp, Oryza sativa
  unsure (1)..(364): unsure at all n locations
agcttggattacctccttattgaattacttttatgtgcactctttaaccatgccatttataaggcggtgtcaacaatttttgtttgttagtgcacgatagagttgttatttgagcacattgtgatgtttactgttctagtattaatgtcctgtttaccagttgtaggattcaaaagattgtttgcacctctatatatttattactcccttcgtctcataatataaaggattttgaanggatgtgatacatcctangaccatgtattgtgtcacatctctccaaaatcccttatatntatggacggagggagtagcgagcatgtgtgacagtttatatttgtgtgactgacatacttgactcact

SEQ ID NO: 33536 - DNA, 468 bp, Oryza sativa
tcacgaaagtggtccccgacaccggcgccgagaactacctgatgaggttcctcggcgataccgggtcggagtcgatcgccggagttggtgacgccttgtggtggccacgtctgaaagacctgacgtcgaactcgatcgcgtgcttcttctcctccttgctccttatcttgcccttccttgccacctcatgcctcggcttcggcctcggctcttcgttgaacgacgccgaggcggttcttctccggtgagacagtgccggcggctcggtctccggctctcgtcggagcacattcttcagcctgtcggagaggtgcttcctggcatctctgcagatgtagtccatctggctctggccattgagcgggatgtcgctgcggtacgaccgcgtcgactccgaccggagcaacgccgagtgcaggtccttggtgacggtctccctgatctggttggcgatgctccgagcaatct

SEQ ID NO: 33537 - DNA, 336 bp, Oryza sativa
tgactcgcatactgatactgttgacaccttcatgctactgcatactccgaacagtgagcttgctggtgtgaaggacatggaattgactgtgtacaatattgatgcccttgattcgtaggcacattgacacagatgacctgttgcaactatcctgttacttcggcagtggatcagaacaccatgatgcatgctacatactctgacctaccgtaagaatagactaaactatctctatagtctgatcaacactctctcagaagcatagtaagaagcattcattatgtcatcaccaacatgggacaacttatgttctgcacttgcttgacgacccatgga

SEQ ID NO: 33538 - DNA, 329 bp, Oryza sativa
  unsure (1)..(329): unsure at all n locations
aagcaaaaactcgcctaaacaatgagaatagaaaagggtggcgatgcgccgcagtattattgaactggcgttctgtgattacaaagtgttaggtcatatttatacactaagtcagggccggtccttgacctatgcattcaaaggggaccggcggtggagggggggcaacacctaatactaataatctagtactcttatccgatggtgagatcaatgattnttatttataattaaaggtattgcaagagagtgttctaaattctctgatatgatgttcgcgcctgagattctgaaatttgttctgaatgcatatttctattcaaatgttt

SEQ ID NO: 33539 - DNA, 462 bp, Oryza sativa
  unsure (1)..(462): unsure at all n locations
tctggcagctgtaacttatctaataattataagttttcctctcaacaattcagatcatcgcctatgttctaatagtccgggtgtataatctagaaaataaactaaaagctgagtttagcagcttctccagattttcagaaactgaataccaagatgatctactcaagtaaaacctcagctctcctactttcctccgcaatcaccatccaccttcaactcaatgccacctccaccagtactactgtactagtgcacaccccttctccggctgcagtcggtccgcactgtccgcggcttgagaattcagacaacagagaaaagctacgtagtagcacacatacgtaccagccaaatccttcggcggtggaaccagcgaaatttgcgtggacgagcgtgtcgttntggggacattaatattngtgtcgtgcgcgccggcccgcacttgcccggcatggcgaaact

SEQ ID NO: 33540 - DNA, 260 bp, Oryza sativa
tatacgcacagatatggacgccactgaccccaacaagcagctacaccaccacttcgtacaaaactcacagtcatgaactaggaaataacacctatgctcgaaggctctgcgacgtggagtgaagcgtctactgtcgtaccggaccttgacgactctgagctgacgacggctcccctgcgctggagagagacagcactcggaccctgctgaccttggggtgagctggacaagaaaaggaacccgactgactggactagact

SEQ ID NO: 33541 - DNA, 484 bp, Oryza sativa
  unsure (1)..(484): unsure at all n locations
ngaaggagcaagagacgaagtcgccaatgtcgctacaccacttgtccaagctatgttccttaatgacagtggtccgagtgcacttgacgcaaccgaaattnttgacaagctgagagttgcaccggatgtatacttcaaaaatatcaagaaagctggaagcatgggagctagcatggcattggcgatgacaaaatccttgtacccgagaattgaaatcgacaccattgatggatttgcagatgggacaagtgaagaagctgctcttgatcttatcaataatgctcaaagtgcggctgacaagattgcaagtgatgttgtagagcaattccgcaacaacgaccttcagccgagcaataataactctgatgatgaaaggactgattctgactgagtatgattgtaacaaatggaggcataacttgtactatactggtgtatttatgctgtgcttgatagttctagccaagtctttgatttcttaaaa

SEQ ID NO: 33542 - DNA, 402 bp, Oryza sativa
agcttaagatggacagcaattcttgagaatatgttggagatatatatttattctttcagaagatactgtggatgcagatacgaaatctttttggtctacggatcatatatatagatgtggcaggccaatcacatggagtggcgattcatccatgtagccaaatttcaagaaaacttgggactcttttaaataagattttgaccaacaaagtcaaatcctgaacacatcctacgtgcaacgaagaggtcaacgagaagatgggcctgggctgggccttcagagtgggcccaaacaaatcactgacacttggcaacaatgggccgatcgaatcaattggaggcccaacggaagtcggggtttaaaactccgaacccttaccaagcctgtcctcgtgcctagcgc

SEQ ID NO: 33543 - DNA, 457 bp, Oryza sativa
  unsure (1)..(457): unsure at all n locations
ggacgttacggaccactgggtctagtaccatggggtaccgtctccggtggaccactcggtcgggatgatccgagcggtcaaacttgattgcaatctctgaccatcgaagatactggggcgtgtcgggctgaacagcgttgatctcccgttcagttaacttctgcttccgtttagattcataagctagggggccgccaaagatatggntgagctccttgcggtgatcttgaaaaccagccggggtgtcgccgtcatccttcttccttgacgtgctttgttcctcgtcggagttcttccgagtagacttggtgtactgctccgcgaactgcttgtagatgaagcactctntggccacgtggttggagtttggatgatgcgggcattgggagttcatgatcttgtcgaaggtgttgacgcgcgaacgctgtcgagaagagtgagcggcggttgcaacaag

SEQ ID NO: 33544 - DNA, 408 bp, Oryza sativa
agcttaccttgcagtgtacagaagattatcttaacacgccgccgactgttcggtttgtttctatgatgttccaacccaatattaagctctctttccgtgtgagtatatattgttcaatagttaccttacacttgtaaacaaataaagatcttctgtcttgaataatggaaaacttacttaacatcatactattcatgccgtttatgcagatggaagccattgcttggatattctacagaaccactggagccctatatatgagggtgctgccatatagacttcaaatcaggtacctttttatcaattttagacaatcaaaagcatttgaatgcctgaaaagagtgctacctgataatgagacttttagggcatatttaagttccaggcatcaattattttggagaactt

SEQ ID NO: 33545 - DNA, 154 bp, Oryza sativa
agctttgaaactagttcactcgacttatactctgtgccaatgaatcttggcttacacatgacatggatgacctaccgcacttttaacgcattatttggtggacagttcgcgtcacacttagagccgttgctatgctttgatggatactactctt

SEQ ID NO: 33546 - DNA, 375 bp, Oryza sativa
aataatctcccatacttaaatattgaagaaagccttagagaagctcacacgcttttcaaataagttcgcatgatgcatctgtatgaaacaataaaagaacaatgtctgagaaaaacagcttgagtgcctatattttaactttggtaaaatattcaaaagcagagagatctcatgtgcaaattaaacaagcagagagatctcatgtgcaaattaaaaggagaagttggatacctggacatgggaagtaccatctgtttctatatgcattatcccaatccaaaagaaccttaaatttacagctgtcttgtacttttacagatcaaatatcacctttcctcgtaatttctcaatcatggctcttatgtcgctgactga

SEQ ID NO: 33547 - DNA, 471 bp, Oryza sativa
gtgcagcttcatatgcactaggaggaatcttgagctcccattccgaggtgttattttctatcggaggagctgtagtagcatcatattgtgccaaacgatttcatattgagctttgccatcatgaagactacgacagcaatctaagtaatgcgatgaggagtgcgttttacaggttattttcgcctatgctatatcattttgttgcactgaatgatgctgcacttgcaaatttggaatatcattgttcctgtgtaatttctgcagcatggatgaggacctgcaactgtccgatgctaggagggagttagttattcctcgtaataatggatggatgtactttatcaaagctggagtctgtgctaacctttcgcctttcccgcaagtagtgatcctttaacccctaaacatcttataatatccatatgttgaagaagttactcagaactggatctgttggacagtgcttattga

SEQ ID NO: 33548 - DNA, 303 bp, Oryza sativa
ctacaacaaacagattctaaccatatcacagatcctgaaaggccaaatagatcatcttacatatgcactcaaaacacatcactttacttatcaaatctccaccatcgatggtccgtacaatattgaacaaatgcctgaattgactaaaaacgaattcaaattctgggcgtaaatcttcgcaagttcaactcaatttcaatagcaaaaatgagtacttgaataccatattcaatccgcaccgttggatcatgatcagacgccaaaccgacccgaaaaagcatcacgattgaatcgggggagcag

SEQ ID NO: 33549 - DNA, 494 bp, Oryza sativa
acctataaaactaagcttattgatttgtaggtgtcttacgggtacggatggtattgactcatacatagaatttacgtagttggtcaatgttccaagagtttgctaattcgcgaccgtcgccgtctgcgaattttaatgcgcctggccgcaagacttgtgtgatcgtgtaaggtcccttcccatttggtgagagtttgtttcgccctgcttggctatgaactcgtcggaggacgtagtcgccgatcgaaagtatgcgtgctcggatgcgcttctcgtggtaacggcggagggcctgttgatagccagctgctcaaacggcaactcgttcgcgatgttcctcgagtagatttacatcgacgtttcgttgttcctcctggtcctcgtcggagtgcttctatactcgtgtactctgatgtcgtagctcgctgtggagcatggcctcggagccgtacacgaagaagaagggtgtttccttgttagacgttgtcggtgtg

SEQ ID NO: 33550 - DNA, 367 bp, Oryza sativa
  unsure (1)..(367): unsure at all n locations
tatcgggttctnggtctctgcccgaggcattgaggccaacctcctataagttacgagctatagagcgaatgcgcccccncagcaagcttatggatgtgcaatgtgtcactggctgtatggccggcctaagtcggttcatatcgaggcttggagagaaggcactacccctatttaagctcctcaaacgctccgggccgtttatctggacggaggaggctgaacgggccctcactcagttgaaggcgtacctcagttctcgcccagtcctggtcgccccggagccagatgagccgttgctactttaccttgcggcaaccccgcaggtagtcagcgcggcgttggtcgtggagcgcgacaaggatgaccc

SEQ ID NO: 33551 - DNA, 370 bp, Oryza sativa
tctgaagattctcacattctcttgtttgcatatctcctaagcaatgagcaaaaagactgatttgagcgctttgagttttgttgtcttcaggttgctagtcccttgcgtctactaatccaacatgtctttgctagcactccacttctggatgatgtgcccttgccactccaccattatatcatggcatgtgacataagcactgatgaccagatttccagggccctgacccaattttcacataaatagtttctttttgtgctcgtatattccctcaaattatcacatgtgttttttattccagctattcttcgacattgttaccattcgcgcttatttttctttgattctctactttgttctcttcattcat

SEQ ID NO: 33552 - DNA, 388 bp, Oryza sativa
  unsure (1)..(388): unsure at all n locations
actaagcttgtagctnggttcaatgtatgctaatctgaagctctgaactatgaacacgaactataccactattactattttgcccaacaaaccccaagtagagccgcctaaccaacaaccaacctcgttgaccgctagagccgctaatcactctggagtcgggacccatcaccgaatacgcgagaacccgaggaccataccgcaaaagcctcacctcaccctaggctttgatatgcgtgcggacgcctaatgctangagttaacctcgcgttaagagagagagagagagagagagataactagcagagcactctcggaggcgangagagagagagagagagagagacgttggaagaggatgggagagtccacgtgagtgagaagagga

SEQ ID NO: 33553 - DNA, 298 bp, Oryza sativa
  unsure (1)..(298): unsure at all n locations
tgccctttactactgatgattgaatgtcattctactctagcttaagctctccagaagttggaccaccaaatgatctctagattaccaattgttcacgcccttttttatattcgatccctagttaacatcaatattacctggntcatgtcttttggccataactgcccaatagcaatattgagttaagatcgctccctgatgtgccaatagtaatcttatctctattccgtaccaacctattatgggagaattcattcattcattcatctactaaaatccttctcagtttgcaccattc

SEQ ID NO: 33554 - DNA, 356 bp, Oryza sativa
tattaggacactatgatactaagcttatgttatggtgctgcagcacttatattgtgtggtatgtcaatattcatttctatctgggctctgttgattgtatggatacacttaattattaattctcctaattagtacgttgatggtctgacggagcctctctgggatgcatactgagtaacataccaatatactgactacgctatgtttgtccgagattacacaataaaacttttaggttcatcatttcccaacatgacacctactgaggtatgatccttcttttgcagctatcctgtgcttctgtggccatcatagacctaacaacttttcccgcacaggttacaaaatttgttgat

SEQ ID NO: 33555 - DNA, 403 bp, Oryza sativa
tgtgacagcccagggccaatacacactgattacctgtctccttgctgtgcttttctccagggccgtcggatcacgaaagtacgtcctaaattaatttggatttcttctttaaaatttctacactctcacatgtggaatacctttctgaactcatcgctaccttgtacatatactttctctatttcacattataaaatattgtaagttttgaatagatttatacataaatcccgttacgtgctttatatatgtttaaattcatataaatgttaatgaatctagatgaaagattggacagatatagacctattataatatgaaatgaagagagcatatatctagaattatgatatgctgatcttaccctacgagcaatggagaagaataatatataagaaacagt

SEQ ID NO: 33556 - DNA, 435 bp, Oryza sativa
tgaggtctttttcacgtggggataggttgggaatatggatgccacggttataagattatcgcataggccactttcttcatcatcgttgtcgaccttcttgtgaaaagtgctcaaaggtcgctagtaagtatcaagtgatataaatgggtaattggacataagcattttgttcttcatatgattataaatgtcaaaatatgctcacaaaagacgtgcaattggatattaaatcatgagatatgtatcttccctggctcactattaatttcaaggctctctatttcactctcaccttagtgtaatgtatgcattctcgatttaatccacggtattaaaaaaatcttgatttgataatacacttagatctttttttctaatggatatggactattattggaaacttaaagattgtataattggtatctcatctaatca

SEQ ID NO: 33557 - DNA, 468 bp, Oryza sativa
  unsure (1)..(468): unsure at all n locations
tcacctgtctgttccccncatagatgtcatcctgactgtgtctttatagaggagcgtcaatgaacacaagatcaactccatcgataaatgcatggaaatatttcacttccagatcctgcaggccaaaataaaaaccaattactaaggaatttgcgtctcctatgccagtcttcttggattgcattgttgacacacacctgtccagcagccttgtagtatttcctgattcctacatcctgggcttccgcgtaatcaccgtaccttggtaccacaacctaagattgaaagatgcatttgccagttatcagtttatatcaggaagtcaccgagagtccncgtttccgatctctgaatacgttgtggtttatattattaccataactaanattgctaaaaanattgtacatttctctactatctaanagcgaagcgtcttcttcattccctctccaaccgtcagatgtcata

SEQ ID NO: 33558 - DNA, 399 bp, Oryza sativa
  unsure (1)..(399): unsure at all n locations
ngagtgtgtgtgatattngagcagccactacctagtagttgttatgagtgtgcatattcttgtgtgtgtttcttgtttgctactaaccatggcaggattgcgcaagggaatacgagaacatcggcttcttcaccttcgacgagatatgacgacttctccacgcaatgcatattaggtatccgactataattttgcacgagtagaatctatgttatcattctatgatgggaagtatgattntgttgcttatattgattgggagctagcagtagataataaatttgatcaatatgatttttctgatgctcaaatgataaaggttgctagtaataagtttacctcttctgctctgttntggtggagttatgttagtaacannacctgtacttgggatgaatg

SEQ ID NO: 33559 - DNA, 420 bp, Oryza sativa
  unsure (1)..(420): unsure at all n locations
agctntcatatcaaatttcagaaccgtcacctttgttttttaactntcaaaatantttttaagaaaactgtcnactcaacttttgaaaatttcatcatatttctgaaacttttcaacttaactatttgtatattattttgatataataaaatctataattaaattaatctacacgcttagcactattattagtgctaatgactagtgggcccacgcgcttaacctcccatgcaagaagtggaaccgaaaatacagaaaacggaaaaaaaaaggaacacgaggcgctacggactcggagtgcgcgcgagttgctaatctggcgcgtctgcgcggattagcaatctcggaggagagggctgcttctctctcggtttgcacgtgtgctgcacgtgaagaatgggatggccgagtgaagaggat

SEQ ID NO: 33560 - DNA, 308 bp, Oryza sativa
gacaaatctattatgaacatatattcaatgatcgattcaatgaaactaatttgatattataaatattattatatttgtctataaacttagtcaaatttaaagtagtttgactttgaccaaagttaaagcgtcttataacctgaaactgaaactgacggagtattgaataggctaaaattagtgcacttgacttttagagatgtactatcatagctgtgtatttgcgaacgtcttctgtgttaaaaaaataatcaacagagtaaagccgtaaaatatatcctaacatataaagtcgacaaatcacgctg

SEQ ID NO: 33561 - DNA, 261 bp, Oryza sativa
  unsure (1)..(261): unsure at all n locations
gaaagccatcccttgcaggacctggaagaatactagtgcactttatctctaacactcctaccggaagtcgtgctatcctaacctgtgacaagacaccgtcttgtagtaggcgcccataggcttggaatatgccgacgtatttccagaagaattaaccatgatgccaccagaccgagatatgtagctctccatagaactggcaccangcaccgcaccaattagcataagaccctaccgaatggcaactaacgagttagcaga

SEQ ID NO: 33562 - DNA, 479 bp, Oryza sativa
  unsure (1)..(479): unsure at all n locations
gacctaagatactaagctaagaaccttatttgctgcacatagtcacagcaagattttttgacaaggcaagtgcattacgcttgtgcaaacattgaacataatgaatatgtgcagtccaatgtgcattactactagaatgctggcagtaaatgtgcacattggtaccaagttatcaaatataatcaggagtacatgttacaatgggccacacatctgacagaatgaaagaaagatagtttgaacattgtaaacataagataaactgcatatattatactctatgcagatgagcacattcttgttcattctctctatatacatcacaaagaaggtgtgtacagctagttgaatatgtattaacatgttcctaaatgacttgtacaagaacttntcctaattactgatacactacatatacactacatatagatctcttctaaacatcattgtgttaacttaaatacaagggaatggcacac

SEQ ID NO: 33563 - DNA, 440 bp, Oryza sativa
  unsure (1)..(440): unsure at all n locations
tactaagcttataggagggacttgaatcgatccatgacaagccatncgatattatcatattgcttccgctaaacgagcatgtcattgccgaggataatcagaaatctttcttttaatcacattgacaaactcttgtagatgcctcgggctgcccattaacttgtgcataatatggtgaagaattcaacaatttgatacccatgctatcggcaaactgaacaaactcatcagatacaaaatatgaatctagatcggctgtaatggtttgatgaataccaaatcgatagattatatgctcttgaacaaactgtatagcatccctagaatcaaccttcttcaaaggaatcgcctctacccacttgggtaaataatcggtcgccaccaatataaacttatgccctntactcgatggtggattactcatgccgatcatatcaatt

SEQ ID NO: 33564 - DNA, 447 bp, Oryza sativa
  unsure (1)..(447): unsure at all n locations
gtactcagcaagtcaccacagcaacaatgcatatgaaagaggatttcaaaggatggctatggctcttttgcgctaagccagtgttgtaattcttttcacaaacctaagacctagcattgactgatcaaattntagtaccagtggttgtatttaaacaacgacggttcttgccaccatccattgtgatcctaaggatagcttcccgccattgagtaatggttttctaatgacgcccaccttcccccttctcaggaagtggctncaacagcataaaaattcgtcatgcaacaacgcatcccacacaagttaagaatntagagactagccaagtgtaatacatgtcccggtgctcaataaccgcgagcacggctattcgaatagaattggttcactcacactgcagtggatgtacactttactcgcacttcgcgactgcccacacatgag

SEQ ID NO: 33565 - DNA, 502 bp, Oryza sativa
  unsure (1)..(502): unsure at all n locations
tcctcctattagtggatgacctctggngaggagagctggagatgggatcagttggtatcccatatccccttaagaacgaaggccaacttaagcagaaagtggtaatcacaacaaggtcttcaaccatatgcgaactgatgaatgtgacgacacatgtaaaggtggaggtgttagaggacgacgaagcacgcgagctgtttatggaatataatggtcacaagggtctctattctgatccccacatcggagatcttgccaaagaactcgtgaaggaactgaaaggtgttgcatcacagttgatacatttcggcaaggaaatgcgcgggagaaaagatccgaagcggtgggaagatgccatttttgtagtgaagacatcagatactactcacctgcangatgacgaccaatttatctctggtagtgtgctgtgaactcttatcttggttannggattttatgnttggagactatctctatgtcctaaataaatanactccacatc

SEQ ID NO: 33566 - DNA, 441 bp, Oryza sativa
accattggtgttgttaagttgagaaccagactcaccctatattcatacacaatttgggttagagacaaaatattgagatgatcacttcctttctaataattgtctctatggagtaatcactaagcttttccttacctaatcgtcacttgagccaccttataggagtcataatatccttctgttcgcctttatctagctagtatgccatggcactttccttgatcaacctgtgcttatgaaaaatgtgtggaggaagcctatctcttgcttgatctgctagattgatacaacattatggattggctggttctaggacatcctaagattagtcttagtcaatacttatattatgacgccatcgatccgaactaatctatcttgaactgcaatttggatctatgcagtactgtactaattgaacttcattctatagaggattct

SEQ ID NO: 33567 - DNA, 369 bp, Oryza sativa
  unsure (1)..(369): unsure at all n locations
tgngccatttgctagttattaataatatacacaaattcgtacatttagagaanatggatgtcacctttagttatctaaatgtacaacaaattacacttttaacttttaaaattttctactccttttgttccaaaatataagcacttatggagttnttcaccgcgattaaggagagagaggtgaaatcaaatgacggattgttgtgattggttgagatgaggagatagatggagaatattaaatgagagatggctgtagttggttgagatgggactaggtgcataagttactacattntgcgacaaaatttaaataccagaagtagctatattttgngacggaggggggggggttgtctacacccatatc

SEQ ID NO: 33568 - DNA, 442 bp, Oryza sativa
agctagtctttcgctcatggtccttggttaggattgtacccatgaaagcgaaagtatacttgcaggtcatcgtgctggtggtgcatcatgttgttgatgttggcgaactgagcatcagcaagtctgttgccattcttggatctatgctatgtgttccgtgaggttgtattggatctctcccgtatgcttatcaaaggtatccattctcatggtggtttcacccaagtcccaacgagatgaacttgagcgccatttacctggagatggaggcataccactcgatctgggggttgattgcttatgtcctcccactgtgtgtcatgaggtgcacgccaccggtcttcactgatacttgcctagcttgagactccgatgcagtggcgtggagcttgagtccatccaggtgcatccctagtttgctcccaacctgcctcatacatct

SEQ ID NO: 33569 - DNA, 375 bp, Oryza sativa
  unsure (1)..(375): unsure at all n locations
tatgtngatgatgtagtcgtcaagaccaagcagaaggatgacctgattgcggatttagaagaaacttttacaagcattcgtgctttcaagatgaaactaaacccggaaaagtgcatcttcggagtaccgtcagggaagttgctcggatttatggtatctcaaagaggcatacaggccaacccagagaaaatcaacaccatcctcaacatgaaaccgccaagctcccaaaaagacatccaaaagctaactggttgcatggcggcgcccagccggttcgtttcatgactcggcgagcggnggatgcccttcttcaagctgctgaagaagactgacaatttccagtggggacccgaagcacagaaagcctttgaagac

SEQ ID NO: 33570 - DNA, 308 bp, Oryza sativa
tacggcgcgggtgtgcacagccagaccatgcggaatgctgctctgtgtgagactctcgaagatactttcacaagcattcggtgctctcgagattaaactcaacctggaatattgcgtgaccagagtaccgttctggaagttgattcgatttattgcatcatccataggcgtacgatggacgccccagaaagataaccaccgtccttggatgacactcgccacctctcctactgacatacagaagctaactgggtggatggatgcgcccagctcagttacgtatatgactcggcgagctgtggacgccc

SEQ ID NO: 33571 - DNA, 466 bp, Oryza sativa
  unsure (1)..(466): unsure at all n locations
ctcagcttgtcagcaaccaagcccaactagaaaagaagagagtctgttatactatactgtactttatacgaacggagattagttatgttaagtagtgaactcaccagttcctgatagacgacggcatcactcttgttctcaaatgtgacagagccgtccgggttgaccttaccccttgcccgcgcccagttgcgagctatttgttcagggatgtctgaaaacagggcagggacattcgctgctgtagcggctgcatcttcttgggcccatattgcctacttgccgatgtaccctgcggtgcccagccgatgcgggtgctcattccgctgtngcagtacgcgatgtgcctcgctagattccctaaactcttgggtggtctagagagagcagaattcctcccacaccgcttcgggtatttgagggtattcatcgaacgacgtatgattgccgggcggggtgacaaact

SEQ ID NO: 33572 - DNA, 490 bp, Oryza sativa
  unsure (1)..(490): unsure at all n locations
tcttcccagcatacggctntctagatgtatatgacgatctctatacagatggatcttatatgaatcgtatgatgaagtaccacatgagtggatatataggaaaggaatccaaatctgccgaatcgctcatgttatgatcttctacatcctangtctccgcgttccgtcatctggcttatgttcttcatgtagcattcagatcgaatgactctatgaaattacgtcgatacttctacatattatgggtaacgtaggagacatccctattttcccccggnggtcttaattaccactgcttagctttcaattcgcctctgaccatcanattaaatgtgaataacccgtcctcctctctttgaaacaaggggcgcttccggttctgtgcgtgcttcanacannatttgtcttctcatattaccatatctctagagtcaataattntctatgaggaactanctgactcaatcactttgctgnncgtactcaacag

SEQ ID NO: 33573 - DNA, 297 bp, Oryza sativa
  unsure (1)..(297): unsure at all n locations
tagcataccaaaattcagtacagaggcaggcgctcttccttatctttctcgtagacactcacatatatgaagatacacgcacacgctacctcggaatacgtctgataccacacatgtatgaagacacacgtacaccttaactcaggatacgttgatacgcaccgagatataattagacaggcaactctatgagactcacatatatcaagatacacgcacacactacctcgagatacgtntggtaccaccgaaaatataattagacaggcaactttatgaagacacacgcacacctta

SEQ ID NO: 33574 - DNA, 236 bp, Oryza sativa
  unsure (1)..(236): unsure at all n locations
tatctcttacgctccaggaatggatcagtcagaacatcacctccggcttgcctcgttcgccgccgactggtgtttccgcctgcacggctggcctattatgtcaccgttgttgggcgtctacgtcttcaccgaccggctgccttgtccgccgccgactggtgttttcgccttcaccgaccggncggctcgttcgccgccgactggtgtttccacctgcacggctagccttttatgcc

SEQ ID NO: 33575 - DNA, 212 bp, Oryza sativa
cgtgccatacgcgggatgccttttatgcaacgatcatgagctaatgatcgagctgccgagcgtagaagattctcggggctgtgcgacctgtcgggagacacgcattacggcatgaatcggacgcggagggtcaacactctcatacgactctacctgtagatcgggctgggtgggagccaactggagattcgttcggagagacccgagctcct

SEQ ID NO: 33576 - DNA, 245 bp, Oryza sativa
gctaactgcgcgctgaaccgtgcgctaggaagtattccctgcggttatcaatccgaacggcatcttacatagcagaaacccgaacggcggaagaagctgcttccttgtctctttgcctgctgattggggtaccaagtagcgtcagagctatttctccagcggttgtgatcaccgtatcattcaagaaagaaggatccttgagatgcttatgggcaggaatcgcgcactttcatttgagtgccttc

SEQ ID NO: 33577 - DNA, 436 bp, Oryza sativa
  unsure (1)..(436): unsure at all n locations
tgctcctcagcgaatggtcatccatgcatcccgaagcagtcctatatatctgttgcaacagctccaactccagcgagtgcattaccacaaggtgtcaatgctcaatttcagccccagccaccagttgacaagacagaggccagtatcggcattgtaccttnggatgttccagcacagtagccaagagatcaagtacaagatgaagaacccaagccaatgggaatgagaaaagcatcaacgaaacctcaccagagctaatccaaattgtggttaaccaaaccaacatgttggcaacagcctttcaactattacagaattggaactacccagcangggcaaccaaccgtcaagtacctacagtccagcaacagtgcacgttatcagaatgtctcagaactgagactccaacctttgtcattgtctgtcaacctatgga

SEQ ID NO: 33578 - DNA, 475 bp, Oryza sativa
  unsure (1)..(475): unsure at all n locations
gacctataaaactaagcttaccttgggatatctctntatccctcntcctctaacttgcttgcttgtgccgctattggtctagttgctgtatgtgcctttgtttacatgtggtagacttctagatctagatacttctttttgtgtgcgctgctctgtgcattaacggaagttccgaaaatcctttcggaagtttcaaaaattcccagcctagttccgaaaattactgctttcgctntacttaagtttttaaattagcctattcacccccctctaggcctaattgaccttttcaaaaataatataaggcaaagcctagacaagagtggcgtgttaagagcacagttacgacagccgatgaagctgaagccgataaggccaagaggctgcttanagganaagccgttacatctacatcggtaaatatgaattttatgctacctgcagagtntgaagccaaagaagccgatgttgatga

SEQ ID NO: 33579 - DNA, 492 bp, Oryza sativa
  unsure (1)..(492): unsure at all n locations
tggatgcatcgcaatacactgggaaatccttctttcaacatgctatataaaatgggagctgatattaagcgacttttcaactcttgaaaactctgctcgcactcttctgaccacttgtagttcacatctttctgaagcagtcgtgtcataggcttggcaatcttggaanaattctctatgaacctccgataataacctgcgagacctaggaaactgcgaatctctgaaactgtcttcggttgtttccaattggttacggattccacattgctaggatcaacggcaactcctcctgctgagatgacgtgaccaaggaacttcacttcagacaaccataattcacatttgctaaactaggcatacaactgatgttctcgcagcttctcaagtgcaaggcgaagatgttcttcatgctcttctttagttcgggaataaatgagaatgtcatcaataagacaccacgaactatccaatattcatgacaccttgtca

SEQ ID NO: 33580 - DNA, 358 bp, Oryza sativa
  unsure (1)..(358): unsure at all n locations
ctagatctagatacttctttgtaggagcgctgctctgtgcatctacagaaagttcgaatatcctttcgggaagtacaaaaattcccagactatttccaataattactgctttcgctttacttaagtttgtaaattagcctattcacccgcctatatgcctaattgaccttgtcaaaaataatataaggcagagcctagacaagagtggcgtgttaagagcacaattacgacaggcgatgaatctgaagccgataaggccaagaagctgcntataggagaagccagtgcatctacatcgcgaaatatgatttgtatgctaccatgagagtttggaagccatagaaccgatggtgatgat

SEQ ID NO: 33581 - DNA, 427 bp, Oryza sativa
  unsure (1)..(427): unsure at all n locations
ngcagtggtgtgtcacgcttgacagctgtggcacatatatgtcttatagatcggccgataagccttatatcaatgcagatgcaaaaacttgcccagcaatggtgcagatatggtgtcaacgtgagcagctgcgtgtctgaggtaccgatccaacaacgagacaaacacctggagatgcttgccctcactgagctctccccatgccgtttcctctgcggtgtggagcatcgttttattctccaaaggaatgtgcctcagtgagtgtaccctgacactactacaagccactgcttccaccttccctctcctccatgataggatgcctcctacatggacttgtgaggccattcgccaacatagtgcattgtaaattaactatatataattgagtgggttaaaagttatgaccagaataataagtaaacat

SEQ ID NO: 33582 - DNA, 238 bp, Oryza sativa
caagcccttgcatttaccctactctcttggctcttgccagtctgcgcaagacctactcggggcctttgttgcatggcgctgccagcgccatggcgtgcaagcgcccagcgcccgacagcggcgacgccttcctcagcggggcgtcggcggtgtgcaagaagccccggccggtgttcaccagtatcttgaactacgagtatctgcacaagctctgggcggacagctatagcgtcgtgta

SEQ ID NO: 33583 - DNA, 461 bp, Oryza sativa
  unsure (1)..(461): unsure at all n locations
ctatganatataaaaatgctgggaaatataaggctctttcttcaaaatagacatgcttttgtttaacaaatggcacttgtggtctacttggttttaaagtgcacatctcaagctgtcttttttctccatatgcagatgattgttctgattcaattgatgccgttagagaagaggcctcagttttagttagggaagaggtggaacagagactactatccattgttcgagattcccttgcatctgcattctctgtcaaaggggtatgttatattacagccctagcgctaattntatgaaaatgtggccattgcatgtcaatgtaccaaattatcattcttgtattattcagtcacgacaacttttatggttcactgtccatctttaaatntcaattcctggcttcctagtggctgtattgcctncacatgtgtatgcccttcctaaagaagtaacttgatatg

SEQ ID NO: 33584 - DNA, 483 bp, Oryza sativa
  unsure (1)..(483): unsure at all n locations
tcgtgtatttggcacgatggcttccctttcagataggatattatttgctaatatcgantgccattttaaatgtatttatgatcacgttgccgtcgtcctttcacgacgacgaggagttcaggagtaatttagatgtttttaaagatagtggttgaggcttttagaacatataacctgtccagctgtcccctttcacaatcacagaaagaatcttattttttttggacaattcacattggcaacatggatctctctagttctctataccctttcaattaagttaaaattcagtatgtttcaggatacaaaatatgagagagattnttcttgcaacacacaaaagttacaatcacctcgatggttgctaaggtgagcaatagatgaactgaagaacttcattgggagctatgtaggcatacctggntcagagtcacagcttgctgctagcttgatccttctttgcctggtggtcacatcactgcc

SEQ ID NO: 33585 - DNA, 451 bp, Oryza sativa
  unsure (1)..(451): unsure at all n locations
actaagcttacctctcgcagagatcggaaccgtgcagcccactcttatgttgatcttgtcnaaacaatgaatggtgacaaaggtggcgatgcggcgcaagtgttgatgaaccggtgacaatcgcttaccaggtgtcgggcacatatttatacccaaaatatacgatatgtgcacattgaacacgagtacaacttgtatacaaactatgaatacgagcaaggactataggcagactcttaccgaagatctatgaagaaactactagaatatactaaatagtagatcaactgccttcttcggatcaatccatgcttgggatatgagaggacattacatgaatcccgcaatgatttaagatcagtctgccagatgggacatcggttctcctatcgatttgtatatccgggcaacgatcgatggactctgtacggataagaactcttcaaccgtt

SEQ ID NO: 33586 - DNA, 211 bp, Oryza sativa
caattaactactgatgttgcaatgagttctatctcccctcgagttggtcggactgggaaaatgattgcgcctgagctctatatggtatttggagtatccggagcactaccacacttggcatgaatgagagattgcaaggttatcgtggctggcaacagagatgcagatgctaccatatttcaagtaaatcttgggtctacagagcttcatc

SEQ ID NO: 33587 - DNA, 485 bp, Oryza sativa
  unsure (1)..(485): unsure at all n locations
tcccgtctagaacatacgtttacgtagggcagcttcttgctaagtccatcctcgcgcgttntggctctcctcaagggcgtttcagtggggagtacggctgacccgattgttgagacgagtggcggtttcaactctcaactgaccgaaggggagacgcacgcatcgtcatctgaccggccgctcacccgatgaggcgagcgattcgatcggatgggcggatcgattgggttgggttgcattggattggattangcgcgggaatcangtggcgacngacgggtggaagttatgacggcagcgcagctgcaagttggcccggttctttttgtatttctctggcgtggtcggcttggtcagctagccggtcagatgcatggagcggatagagtcgaattctcttgtacgagtagatcacggaaggaatgatgatattnttcgtacataggcctagagaattttanggcgtttcgtagtggatggtcaat

SEQ ID NO: 33588 - DNA, 480 bp, Oryza sativa
tggtctctcttgattgggcttcaccgcctagagagaagatgtcgaacgagatgaaccatgtagggaaggctcccatgttcaatggaacaaactactccaattggaaaattagaatgtctactcacctcaaagctatgagcttccatatttggagttttgcggatgtaggctttgctatcaccggcatgctcttgacggagattgatcaccgtaacctctaactcaatgcgttgttcaactctttgagccaagaggagttccatagagtgagcaaccttgagaccgcatatgagatttgaaacaagttggcggagatccatgagggcacaagtgagtacaacgatgccaagtttcatttcctcaagatccaatgtgagacattctccatgttgcctcatgagagtgtgaatgacatgtatgggaggctcaatgtcattgtgaatgatctcaaggggctgggggcaacctacaccgatcttg

SEQ ID NO: 33589 - DNA, 487 bp, Oryza sativa
  unsure (1)..(487): unsure at all n locations
tctgtaccttgctaatccttctttttggacacgtgctgaccttttattctgtgttaaacccatagtggcctgttgtcatacagcacatagaattttatggagatttcaacacactgcattaatagtgaagtgctgtggtggcatggttgataccttctttcttgtctaaatgctatgcaacatatagctcccaacagaaaatagagatcaaacttctgtgcccgaattatttttttttgaacgaatgcctgagtaaattttggggcacaaggactggctttaataaataaagacaaataagaacgttttacatggaaacgaataatgtgcttcaagttgtttggttgttatccatatggaaacaaagttgntttaaaatttacaaatgctaatcgtctaattataattcctaactgggacacataacaggtactatttcctaatgaaccagtgcccataatgcttgctcanatgattgggataattg

SEQ ID NO: 33590 - DNA, 468 bp, Oryza sativa
  unsure (1)..(468): unsure at all n locations
acatatctatactatctatattgtngataccatctaactgctaaaacttgacatctaaatgtgcaacattatcagccactagcaataactccctcgcttctataatatatcacgccaatgacttctttaaatacgtttgatcatccatcttattcaataattgtatgtaattatgatttattctatagtgacatgnattataaccgaatgttctttaagtatgactctaaatatcatgatactagtactataagcactaacattgatgaatggcaaaacgctgatttttacatattaagaaatcttagaataggattctagaggtgacaaataccaagcacgcatggcgtcttatctataattctgttgaattctagaacttgaatacaacaatgtcaatattatttcatatatttaatgatacacatcattatatatgatacatgctcatctcatatcacatagcaa

SEQ ID NO: 33591 - DNA, 401 bp, Oryza sativa
cactgacgtatgctggctatatccgatcttgtgcatatacttatatataggcgcatagaatacatgagactcccctaattaggtggcccgcctggccatcgaatgaacatcagacttaggatactagtcgagtgctgccatctaactcaggagatggaaggagatatggttgtgatacatcgccatgctgcggtatacttgtcctgtgatgcatatgtatgcactattctcatattgtgatataaagaaatgcatagtaccatggtctgtgcctcacattggaatggaattctaatgtccagatgatgcttggatattctgacatctctatggaggtcaaataagctttgatgtcgtgataaggtacacaaacaaaagactatcggatgacaaagttacat

SEQ ID NO: 33592 - DNA, 469 bp, Oryza sativa
  unsure (1)..(469): unsure at all n locations
gagcaagagacgaagtcgacaatgangctacaccattcgtccaagctatcggccttaataacagtggtccgagtgcacttgacgcaaccgaaatcttagacaagctgagagttgcaccggatgtatatttcatgacaatcaagaaagctggaagtatgggagctagtatggcatcggcgatgaccaaatccttgtacccgaggattgaaattgataccattgatggctgtgcagacgggacaagcgaagaagctgctcttgatcttatcagtgatgctcagagtgcggttgactagattgtaagtgatgctgtagagcaatatcgcatcaacgaccttcaagcgagcgataataactctgatgttgaaaggactgattctgactgagtgtaatgtagcaatggaggtcacattgacaatactggtgaattatgctgtgcttgatagcttaaccaaactttgattcctaa

SEQ ID NO: 33593 - DNA, 250 bp, Oryza sativa
acgttctattcagggacagtggcgtgctcctcagttgagacatcttgatcagaagatgcaagtgcactttcatcatctagactggcaccaacagtgggatattcatccttgctgtcgatgagatcctgacctcctgattttgatgcgtcgatcatgccacatgatccatcttccgtggtagcagtatcaccgctctggagctaaggtctttgaccgcaccacattgctcacttgagtcctggcctgggga

SEQ ID NO: 33594 - DNA, 428 bp, Oryza sativa
  unsure (1)..(428): unsure at all n locations
ctcaagcttgccgttcgccttgggaacgacgaccgggttcgccagccactccggatgtgtgacctcacggatgaatccggcctccagaagtcgcgccacctcctcgcggatgaaggcttgacgttcggtggctgtcgccgcactttctgccggaccggccttgcgcccggccgcacggcaagacggtgctcaatcacctccctggggaccccgggcatgtccgccggtctccaggcgaagacgtctgtcgttgcccgcaggaaggagaccagncgcgtcttcctattgtcgtccagaagaccaccgattcgtgtggtcttggacgggccatcgtccagggcaacctccttgaccgggaccttcgcgcatgtgaccatccgctgctttgggtggccggacggatgtgtgagtcttcgctccaccgcggc

SEQ ID NO: 33595 - DNA, 419 bp, Oryza sativa
  unsure (1)..(419): unsure at all n locations
ngtcatacgaccaatatccagatgacatagacgcgtatgctttacattggactcagcatcatgatcgcttagaaggctcacaacagttattagcacatgtcagctgaatgataaagcgaagcaagaccctctatgtcataaccttatactaatgcgttccataattagatgcgcctcatttattggattcacactcatactctaaagccatgtatatacagtagagagccgttcactagattctcttttattgaagggacatgtagcacgttactcagctgcacgatctttcctatggtatactagagatcgaccgtatgaactccatgaacagacgcatgcgatcctttgtgcatacacttggaggaacctctgccgacttgataagaggaatacatgtagatgtccgcacacacatg

SEQ ID NO: 33596 - DNA, 443 bp, Oryza sativa
  unsure (1)..(443): unsure at all n locations
ntacctctcgtcagagatcgtaaccgatgcagcccaactctttgtcttaactcgtcgaaacaatgaaagtagaataaggtggcgatgcgccgaaagtgttgttgaactggtggtaattcgttacaaggtgtcgggcacatatttatacccaaaatatacaatatgtccacatcgaacacgactccacttctattacaactctaaaatacgaacaagtactttaggcagactcttaccgaaaatctatgaagaaactactagaatatcctaattaatagatacaattgccttcttcggactcaatccatgcttggcaatatttgtggaacatttaaatcaatcccgacaatgattctaagatcacttttgccaaaatggctacatcggcttcttcctatccgattcggtattagccggtgcaaacgatcccgatgcgtactctg

SEQ ID NO: 33597 - DNA, 506 bp, Oryza sativa
  unsure (1)..(506): unsure at all n locations
taaaaagtgatgaggtatgcaaagaataacanaaattcttattgtatccatcttattatgcaaaacaatatttntttaatgttttcatcgaattgcaaaaatatgggtttatataatctatatgatgctattttgttatttattgtgcacgggtattcggttcgtatgcaaacattgcacttgacctttccttcacaaagaatgcgcacactctgttggacaataataagtatggatttgtagttaatgcaatgcttcatggtgaaaatattgttttcttttctttntgtcaaattcttcatggatcagattctttatggagtcgtttgcagttaattgttatttatgaataacatgttgtcctcatcattctttcagggtaaaaaacccaaacatctatgttggattgaattactcaccctangtataggacatgtcatnattaaaggcacgatgcgcatggatcgctangtangtgccgcaagaggagatgatgatcccatgtg

SEQ ID NO: 33598 - DNA, 444 bp, Oryza sativa
  unsure (1)..(444): unsure at all n locations
agcttcttgagagcctgtgcctccattgtacctactcataaggcgagcttcttactttatgggctgaacgatttactaagcttgtcaaagtatcatagagttgaacctcattgaatcaaaaaagtctgtagggtcttggtgatctgcccaacttatgctatgttatgttcaaaaacaagggatacacagatggcaagctcaccttctatcacataaattcaaaaatctcaagtactttcttgtcgagggcaaaaacatgagaggcatcatatttcagaaaggagcatctccaaggctcgagaagattgtattgtccttcaccaacatagagtctcttgatggagtctgtgaccttccaagactgtaagagctcgagtngaagagaaacagattccttctttcattatctgaagtgggagatactcttgagaaatacatgctcac

SEQ ID NO: 33599 - DNA, 372 bp, Oryza sativa
  unsure (1)..(372): unsure at all n locations
taggacggtatttcaggcaatgggaaatatactgtggtatgtctccattggatggagtgccctctccttttgtactgggaaaaatagtgatagacagagaccggaggcactcacataagtcgctgattgcttgaagcaaatttttgagtatgctgtccttgtcgtcgataaccacaccaagcttcctcagcttgcatagcttcccaatgtctttcaactctctgctagtccatgaagccttgacattggaaagtacctccatgctagacattntttttatcttgtgagggaattggacgctggaggatgatggtgcctgattcctgaatgaaatgttgnntttagcattacttgaactggttgaatcaatac

SEQ ID NO: 33600 - DNA, 468 bp, Oryza sativa
cacatgagactcagcttttcgctgacctcgtgcccgcggcactctttttcctattgtggtcgaccaccactagcctcctgctgctggttaccctccacatacctttccacgtgcccctgctggtcccctcttgatacctatccaagtcccttcctcgtcaagtactggcatggatcctccgtcccctcttcttcattccaatactggcttgctccctccgcgaatgatgctacaatatctgatcatatcggggcagccatctgtcgatacagaaacatctggtaagtctcgagacatgtatgtctcaacaatactaagcatgtatgctaagtgtaatcgcccacattataaccctacacaaccttacgtgctaagtctaataccaatccggaataagctaggctaccgacggatatatccacccagctagaaaaatatatacaagctaatacaataaatatctattta

SEQ ID NO: 33601 - DNA, 431 bp, Oryza sativa
tagcttatgacagcatacgtctctagctgctgtatattatcaatagaagaactaatgaacacattattgtcaatgcagctattccttagatattgatgagtgctataggaatatggataagttcactagatgatatatttgctaacacttattacgctcaattgcattagtatataatctccttagaggaacaacttctattgaaggacaaggatcaaatcaagatagtgcgtaccttgcatgatctgaatgatcttgcagtgcatgattgtccataaatcaagatagactttgaacatctgaggcgagaggggctagcactatcaagaccagccgaatctctgccgcttgttcaagattgccatataagcccaaatgacatagatgttagcttctataaacaggtgataagactccatacgattctcaca

SEQ ID NO: 33602 - DNA, 489 bp, Oryza sativa
  unsure (1)..(489): unsure at all n locations
ggtctgcagcgatgtgacgctccagtttcatgcgtcttggtgttttgttggacaacatctccatcagtgacagacattatgcaagtagaatttctttacattaattcatcattttccagcgatatctttatggttttgtaagccattattacctactagtatcttaaataatcaagaagagaatgatctcttctaccggaggaaaaaagggagaaaaatatatgcctcgcgtgcttagtcgttggatcatggattcagaggtctagattaaaccagcaaccgtgggctactccaagaagaatggttagcatggaaaattgttccctcaactatggtttgagtttcattcacgtcccccaacagctcaactggtaaaccagtatataacatcccctaattactaacacaagtgcaaatcaagtctctcgacgctttagacaacnggttcatcttacgcagcatcatgtgaactcgtgaccannacgtcat

SEQ ID NO: 33603 - DNA, 472 bp, Oryza sativa
  unsure (1)..(472): unsure at all n locations
tggcttgtaattctgatatgaccattccgcttcttgaagaatatatgcatatagattttggaactacatacatgttaaggaaattagccactatactagcaatatataatagtgctgttttcaacaaaaagaaaatgccgtccaccttttttntgttgtcactgcaacatgcggggtttgtactagttcctatgttcttgtgcccaatcaaatgcaattagtgcgacaaaactactctataaattaacagacataaccaacatanacccaagaatttgaaggctgcgttaaagaaaagttcaatatacaggagtaacatttgcagtataaatataacaatgagggagtaaacgctactaaacgtacagctnnttttgtgtgatcaattcggtattggccatcatcctccacatgaatctcanactccttgaaggttttaacagtgcactgtagaacttcttaatgtattctg

SEQ ID NO: 33604 - DNA, 497 bp, Oryza sativa
  unsure (1)..(497): unsure at all n locations
tanacacagaagaaaaccatctttatttatgtggaatcacaagaacaaatcatcaggccgtgcttacaacaattgtaacgtacacaccgacacactcagaanaattaaacgagcaaattaaatggcacaaagtgaatgggcgatcaagcaacgaaatcaacatgggctttcaactatttgtcactcttacgaatggtgcttaacgatttaccactagacccatacgtcatagacacatgaggacccacatgttatagacagtgaggggtaaatcgttaattgtcatatcataagagtgacaaatagttaaattgatttacacgggacgtcgatggagaatcatgcatgaagctgaggcagtacgcttataacagagcgaccggcttcatccnctccttgatggccgcaaccaggtgctcgtaggcttcgccccacgccgttttcatctcggggctccacatgctcgccggaatcccatctttgatcgtctcaagcag

SEQ ID NO: 33605 - DNA, 339 bp, Oryza sativa
ctaagcttatccagaagccagtgttcacgtcaatagccatagctctcatgtcatgagatagcatagtgaccaacaagacatgcgagagctaacctataaattggcatagaccgcatacatggacttttgcaagttccatgtgctcactagaagccgctattgtaagctggtacaatgccacaccgaactggttctatactaccagacagtgtacatctgacaccagattaaagaatcggattaggccaacgatcgctgcactgacatttcagagcttaagttgcaagatacccacgagggatgggtgcaaggctgtcaacatgaatgctcatgatgatt

SEQ ID NO: 33606 - DNA, 211 bp, Oryza sativa
aagcatatgtatgatataccctgattctggcacaaccactatgtccactcacccattatgcgacaatgaccagcgctctaaagatgacctactgaatccctctccaagtgatcctgtggctaggacttcacatatacttatcgccgaatgggcctagaactcaggtatgccacttcagattggagcttacatgagaatcatgaggacctga

SEQ ID NO: 33607 - DNA, 247 bp, Oryza sativa
aatagctgaccttaccgcttgttatggggaatacgttttatcaactgaatccgggggagggagtacaaaccttaatcagcgtcatgcacacttccctattttctccaccatttcccttcttgctctattgaccgtgcctttctcttactacacgaagaacaatgttgcgacgacagcggcacggcgacgagagggacttcgcgcgtgagcgcgcgcacgatgtgacgagaggcggtgcgcgcggaga

SEQ ID NO: 33608 - DNA, 419 bp, Oryza sativa
  unsure (1)..(419): unsure at all n locations
tcggcacgtgcccagacgggataacacggtcgccgacgatctctctatgctcgcttnctcgcgagcccagaccccaccgggcgcctttgaagaaaggcttgcccagccgtctgcgcgacccgaccccctatgggagacggacgcgcctgaacgggccccgaggcccgtcggagtccatgcctcgggacccgatgggagcgttcccagctcccttagattgattgcttggatcgctgagatccaggcgtacctcgcagataagactctacccgaggaccgcgaagggagtgaacgcgtncagcgcatctccaagcgctacgtgctggtggaagggaccctctatcggcgcgcggctaacggagtcctcctgaagtgcattcctcgggaacaaggcgtcgagcttctcgccgatattcatg

SEQ ID NO: 33609 - DNA, 471 bp, Oryza sativa
  unsure (1)..(471): unsure at all n locations
tgccttgcgttctttactgattgggttatacatctggttatggtttaatattacaatttngattttgcgaatggttcaataagtttactcgatgccctattacccaatccttgtttcgatcccaattagtaatttacgccattggagttaaaataggttcacaaatcaattcggagtcaaactatcaattggttcactacaagaaatatgatcttctgtgacgaatttctttgtacatcggagctattcgtcattagcacattccattttatgaccattagtatgagatgtacttganaaaaaaggtgttcgtcattaataccaactagaaatgtcatanagtatttgaatggacattgtgacgaatatttaattgtcataagcggcanaaagcanacgtcacannattatataatgcatttctagtanaatatattaaaaaggtgaaagcaattaatcaagtngaataat

SEQ ID NO: 33610 - DNA, 401 bp, Oryza sativa
  unsure (1)..(401): unsure at all n locations
actcaagctgggccgctgatgggttggcttggcatagaactggctagccttgcatcacctgacccagtcctgggcatcctggagtgtagctggccagtaaaatccttgacggaaggctttaccgaccaaagtgcgcgaggccgagtgggccccgcattttccctcgcgggcgtcggtgataagctctacgccttgttcccgagagatacatttcaagaggaccccattggcgccgctccggtagagggtcccttctacaagcatgtaccgtttggagatgtgcgcgagcttttcggcttcggcgcgatcctcangaagagtgtgattgtcgaggtatgcccggatgtcggccatccaggcgacctgacatggngggtcggngttgaccccctcgggccccg

SEQ ID NO: 33611 - DNA, 444 bp, Oryza sativa
  unsure (1)..(444): unsure at all n locations
tatgtcgacgacatcgtncgtaaaagccgcaatgttttctttcatgcgatcgacctgcaggagacgttcgacagcttacgcgcggcangcataaagctgaatccggagaagtgcgttttcagcgtccgcgcaggcaagttgatgggtttccttgtttccgaaagaggcattgaggcgaatcccgagaaaatcgatgccatccagcaaatgaagcctccgtcaagcgtacatgaagtataaaagctcgcaggccgaattgcggcacttagtcaattcctctcaaaggcggccgaaagaggtttggccttcttcaagaccctccggggcgcgggaaagtttaattggacgccacagtgccaagcagcattcgacaagctaaagcaatacttgcaaagcccgccagctctgataagcccacccccaggaagcgaactactattatac

SEQ ID NO: 33612 - DNA, 403 bp, Oryza sativa
acacatgaaactcaagctgatgcattacgctggatataggaagcatttgcatcattaccaaacctgtgatatcgatctcacacatcgcactattgcatgagtatatacctatcaatcaacagaatggtaagtatttcagagatggagtgtactttacagatggagtgaactcacatataaatgactcactcaaagatcgtcgattcattgctctgaactgatcgaggcgttgatctactgaccggtgctgatggcacccgtcgcgctaggtccctacagtacgcttgcgggccgtgcaccctgaaggctctggctgcatcacagctgtgacgactcacgcgccgcgagacagcgctacagtgccgccatcgtgccgcgcatagagccgtccttggctcgcatc

SEQ ID NO: 33613 - DNA, 375 bp, Oryza sativa
atgtgtaagcgctagcgctggaaagacaggattgctgctctgttgacatgcggagcccacatgtcaacctataggaccactgtagaccgagtacacagagaccgttcactgatcgacggaagcagatcccgtgtgacaaccatgctagtggactacatacggacttcactagacaccacactggttcgacacgtggaaaccactctgattatcgacgggcacactaacactgacactacacggtcaccactcgtacgcgtgaactactaccgacacgcgcacagaggtaccggtgtcgtcagccgtacaacgtacactgactacacctaaatgactataactgagcaataataggacagattctttccacctcgc

SEQ ID NO: 33614 - DNA, 317 bp, Oryza sativa
  unsure (1)..(317): unsure at all n locations
acacgccagtattgcccaaactgagcctncatgtatcacagtcaaacacagtcagaatctgtgcattcatcatcagaggtatcatccctcgggtgcagatcaatgtcgccgagcagtatgaccatatcgcttgaactcttgtgagcgccactcatagcactgctgatcagatcaatggcaacctctttacttgatccggctgccaatgcatcactggtatccacttctatgctcgagggcaaggatgctgacgtcaccacagccatgccagctcccgtactaacagcgtgcttgatattgttgaaatatacttgcgg

SEQ ID NO: 33615 - DNA, 504 bp, Oryza sativa
  unsure (1)..(504): unsure at all n locations
acctatgaaactcagctctctctncatggcanattcttaagtgcaaatctaagaagggtatttggtttattgccaaacctaacagtggcaaatagttaaatttcccctttaaaatcatcctgtatccacccctaagagcactcacagtgcgccatggcaaatgctgcgcctgggcttggggctggactcaagaacaccaaaagccacttgattcacaatgcaagtgactaaattcacaatgctatctatgccccacgcagcctcggcgccaagaacggatggctaactctagtcacacgcgctaggaattggtgggcccttcctgtcaagtggcgctgatttctctcccccatccaacgtgtgcgttcgaggccgaacgacacctcatcccattgtgaacgccctaacaaacctgcatgtaacacatgatgtacagcttttgcactcttagaataaaatatgcgagaatgctgngaatcagtcgaccggcgggtgagcaanatc

SEQ ID NO: 33616 - DNA, 497 bp, Oryza sativa
  unsure (1)..(497): unsure at all n locations
ggccttgatacagatatggatctctttagacgacatcccatattatctgtttctttcatgacgaaacctttcggctgcgccatgtatacttctttctacaaatcttcatttagaaatgccgctcttacatccatctgatggaattccaaatcataatgtgccactagtgccattattatgctgaaggaatctttacaagagactggagaanatgtctcattggaatcaatcccttctcggtgcgtgaagccttttgccacaagtcgcgctatanacttttctatattccctgctgagtcatattnggttatgtagacccatttacagactactgtgttggctcctttatgaattggttctaaatcccaaacatcgctcagttncattgatttcatttcatctttcatggattccaaccattcagatgagcgagcgcttctcatggcctcttcatatgaagcgggatcatccgtcatatgcgactcttctatagtata

SEQ ID NO: 33617 - DNA, 433 bp, Oryza sativa
  unsure (1)..(433): unsure at all n locations
agaagatagtcgtttatactaacttgtactttatacgaacggaaattagttaggttaagtagtgaactcaccagttcctgatagacgacggcatcacttttgttctcaaatgtgacagagccgtccgggttgaccttaccccttgcccgcgcccagttgcgagctctttgttcagggatgtctgaaaacggngcagggacattcgctgctgcagcggctgcatcttcttgggcccatattgcctccttgccgatgtaccctgcggtgcccagccgatgcgggtgctcattccgctgttgcagtacgcgatgtgcctcgctggattccctaaactcttgngtggtcttgagagagcagaattcctcccacaccgcttcggttatttgagggtattcatcgaacggcgtatgatttgccggcgggttgacatact

SEQ ID NO: 33618 - DNA, 336 bp, Oryza sativa
  unsure (1)..(336): unsure at all n locations
ctggtagttntttagcgncnggatacacgccactttaaggcaaaggaggtatcttgtgttcatgaatcttgctatcggctccgaaattgcatgctttgggggtgaagagctttgattgacgcttatgaagcaagttccccatccgctcaggtcatcatctcgtggaactgaactgtactagacaagaacaggtcaagtaaaattcaaaggtcaatgtataaatggctagcatttttgcactgaattatgaaaattctatgctgttctgggttctgaagtgaattcggtggcacgggtgtcacacttaagaagaggctgaattcgagttcgaactga

SEQ ID NO: 33619 - DNA, 364 bp, Oryza sativa
  unsure (1)..(364): unsure at all n locations
taaagccatgaatcccntttatgcatatctggatctggattctgcatatcaaacatataggatgagtagtatctgatataaatataatactcgagaaaaaatcaagtattttaaaatatttataaatatgtatttctcctcttgtcaattttgatttccccgagcagatgattcattacgtttaaacgctctgtccgactagtcatagcccccaagcaccgggagtcggcctaggcacttcccagacatgcatacgagtgacatgagttcgccattaatggaacaaagtttcacgaatccagaattactactcgggtacttttgcaattattaagagcagaannataaattatcttatctctat

SEQ ID NO: 33620 - DNA, 474 bp, Oryza sativa
  unsure (1)..(474): unsure at all n locations
tgagaaggctnntctgggctngngatgctgntccagattatctgccagcattctattgtgtatgtgaaggcctcacatcacttaatctgagttatgctactgtgcgaggtcctgagctcatcaaattcattagtagatgcagaaatttgcaacaattatgggtatgcaactcttgtcaattcttttttactactatgtattcatcccattcgaatctgttaacttttgaaaaactgttgcatatctctttgcaatacaagcacttgattccctacaagtggattntgcaaattntttcttttcttctgtgacctccagtaaaaaagttcctgatgttttcttacttatcatggtcactagtaaaagtccgactacatgtattcttttntcacaatgtagttntatcaattatattggtatanggctgcaatangcatttatgatgaaactgactgcactnttcccatgacaaca

SEQ ID NO: 33621 - DNA, 516 bp, Oryza sativa
  unsure (1)..(516): unsure at all n locations
tattacggacctatgaatactaagcttcgcaatccccggtaaccatcggtgagtctcattgtgctcatcatcaacccatgcattgatgcatgcactgatttggctcgattaatttgagccggagatcgattaatccacggtatgtaccgacgtaccgtacgccgtcggctagggcaaaacacggccactagggctgaggtgaaaattntataaacaatattactattggatgaagaaatgatcaaaataaaagttacagatattttgttgttgatgactttttcacttgaaatcatttagtatttgaaaatgttgtttgaagttgtcataatttgaaattcaaattgaaattattgaaacagagtcatatagcaaaatgaccaanacaaaagttgtagatcttgatattcataatnnttgaagtattaatattantattgtaaatcgcgacgaaattgatataacgtcacagtttttgggccggttacgatgaaatcgataactgtcacggattat

SEQ ID NO: 33622 - DNA, 491 bp, Oryza sativa
  unsure (1)..(491): unsure at all n locations
tccactcgcctcggcggcggcgccggccaggngaggcagcatctcgggctctctctctctctctcctcttggttcttcctctcgccgtcggatcggatcggngcgggtccattcgttgcggcttctcctgtagatctgtggcccgtgctcatgctcgatctgtactgtatccgcggggtgtgtgtgatccgtgtcgcgttcttttggttggttttctgcgggatggatgcgtttgattatggtgcgggtggttttttggtgagtaggtggtggcgtccagatccatgcgcatggatggatcctgngttggtgtgttcgttggtagttgtgattatccggcgggtatcggatcgatgctagtgaagtatgtgatcgagagcgactgtttggttggttaggtggttggcanggatttgtgcttggattctgggacaagttntcgtttcgtgaccgtgctgacatgcttggttngaanggaaataataataata

SEQ ID NO: 33623 - DNA, 363 bp, Oryza sativa
  unsure (1)..(363): unsure at all n locations
gggactnttaagccagcgttntggcttatatgttttataatccggcggctttaaacccttagggttattggtggagttatacctccacttcacataagccaaaaaagctactccaacctagcttttggctttggcttaacagtgtaaagagtggcttatggcttttaaaaaggccagacgaaaaagctacttatttgttcaggcttagactttttggctcataaactgtcttataagcctaaacaaagaggggttgataacatgagcgttttctctctcttttggttatgtacagtgaaactagaggcatgttcttttgctgattcaacctgcactgatngatctagtacaagttcttaactt

SEQ ID NO: 33624 - DNA, 464 bp, Oryza sativa
  unsure (1)..(464): unsure at all n locations
tgttcagctgcgtcatcaggggatacatcgttgatatatttattcaagcccatcttctccagcaccacattcttctggctagggtntgaccgattcttcaagcgttgcttcttcatttgctcccacatctctgtacccctcttcatgttatcttcagctntattgaagagttccaggacttcagatgatggccatgtgtccaggtctacgctactaccaattgcataataccatgacaagtttgcttgctcaaaatgttgatgtgcaagtgcaagaaaaccttcgaanaagtttggctttgccttcacggcttcttcatatctcctnccagccttattgtactcttcnttcgccattcatacgcttacttcacttgttcaagtaccgattcctgtggagagtcttctggcagtaacaacctcttcctggcccgagacatatgaacattaccccaatggaaaaac

SEQ ID NO: 33625 - DNA, 425 bp, Oryza sativa
  unsure (1)..(425): unsure at all n locations
gtagtagtgtagtaccacaaattccctcctcgcttacatgtgcgtgcacgattcctggcgggtaaataagggtagctaatgacgccattacatcatgattcatanaagaaaccgtgctgattaattaaatataagggtgaacgagtcatcttggtcccaatcactgttcttcctttttctcctacagtttctacggctagtccatctcttgactcacctccatactgtaccatgcatgaacaacaaggttccgatgttataatttaattttcactggtgacgtgtctgacaacgaagaggaaaaaaggggcagagtaaatgttcgtcttttcgtgagtccgctanggaaaactttccggtggaatggggacatcgctcnngaaagtgtgcccaactgctcttttgtactggtgctcgctagtaat

SEQ ID NO: 33626 - DNA, 422 bp, Oryza sativa
tctgaatggcagcgagtgcgtggactgacgtgctggcaggtattttctctgtttttggcacttgacagcaaaacgacccatttcttgacaatcgaagcaacagatatctttccggactccgcattgtcttttctcattgtgaatcctctgacctggcactggagttaggctgaaactagaatcttggcgaggatctgtgaagccttgatgctactcgtccgggcaactggaggattgagtggccatcttcatcgtcagcagaatactgaagtgaccatcttttggacatgatcagttccttcacaaagaaacaagtgatccttgctcgttgacacctatcgggaggatggtcttcctcgcaatgaacgcatgtagtggcacacgagctggcaacatgaccgattacttcacaacgagagcat

SEQ ID NO: 33627 - DNA, 343 bp, Oryza sativa
ctaagcttgagtagacacacagtaaacgacttataatatgatacagatggtttatatgattgacatttggcatgattatcttattggtcataaatatctaagtcacaaaatgcctatgttttagggtcaaccaagcgataaaagtcccatcaacttacagcatatacagagtcaagcaagaagagatatttttggtgttgagagctgctaatttattccttatcagagcgttaaatactcctttgaacatccttgactcgttgaagtataagattcagatgcaactgcaaggtactggctgaacccccatgcacaatctaaacaaatttagcggctgattagt

SEQ ID NO: 33628 - DNA, 266 bp, Oryza sativa
  unsure (1)..(266): unsure at all n locations
acactatacatcagcttcgacgcgcggcggagaggcgaggcgaggagaggagtaagtacttctcttctctgcggagacggagatctcgctggccttctcctcggcctcctggcggatgaaccgcaccatctgctggatctgcttggcgacatcggcgtcgntcatcttggcggcggcggggatcccgacggcggccctcgcggccttttgctgctgctgctgctgcgctccggcgaaccaccaccgcgcgcggtggaggggaggga

SEQ ID NO: 33629 - DNA, 490 bp, Oryza sativa
  unsure (1)..(490): unsure at all n locations
ctcagcttgaataacaatcaaaattcatgagttcatacgatttataatgcaacatcttaacaagcacataggttgaagaataaacactaaacacatatacatattgcatttatcactctttctcaaataacctttagcacaaaataaccaagagaattttttcaattttttcttttcttgagcctttttgctcatatttttctcttttattccgagtacgtccctgtcgtcgagactatttccagggattcggcacccattattttgctcacatcgaatacattcttgtcgtcaagactgtttccaaagaatcggtattcaattttttcatattntgtattctctttttcacaatgagcaattaaagctattggaggaataacaattcaataaagcatatatatagagcatttatanatcaaagcatatgctatcatcaacattacatattntcttaattcaagtatagaaattaagtatcatgcatcat

SEQ ID NO: 33630 - DNA, 337 bp, Oryza sativa
  unsure (1)..(337): unsure at all n locations
catcacattcaattngatcatggtacgagcctatatataaagggattctaaccgagcgggataccttcatcttaccacatgtattaaaccactgaatatgatacggatgtggatgtggatgggtagtcaagccaagcttcttgaccatctcttcacttgctaaattgttgcaacttccactatcaataatcattctgacggtatggcctttcacaagaactttgctttggaacaaattgtgacgttggctttgctcttcacacttctctttagcactaagtgctagcttgacaattaggctaggatactgatctagcgactctggatgcaaatggac

SEQ ID NO: 33631 - DNA, 492 bp, Oryza sativa
  unsure (1)..(492): unsure at all n locations
tggcgcacacganagaggacgagggcttatgaaaacacatgcgctctctacctggcgcgccagatgacggagcgtggggcttctcaccgggagaccgcgcgggcccccctttggcggntcgggccggggcgctaagtgaggttctaaacccttgatctgtggaatggttcgcgagagattaaatgcgcaagacacgggcgatgtagacaggttcgggccgctgagaagcgtaataccctactcctgtgttctggtggatctgtgtatgaaggagttacaaagagctggagagcaagagcgttcgaactctagagaccctctccctcctctntnttttcccttttttttctcttggtaggcatggtcctccttttatatctcaaggggataccacatacaccatttctacctacccttcttttgggtggngacccatcctactttgaccaaaacttggcttgaccttcgtctgacaccggataccctgtctcc

SEQ ID NO: 33632 - DNA, 491 bp, Oryza sativa
  unsure (1)..(491): unsure at all n locations
acctataaaactcagcttcacctagtggcatatacactaatgagcatacaggtatggtaatggtttgtcggccagattaattcccagctgctctacctggatcatttagaacatcttgatctcagcattaactatttggaggggccaagccgtccaatcccagagttcatangctctatgaaaagcttgagatatctaaagctctctggcatttcgttctctggtacggtgccttctcaacttggcaatctttcaaaggtgcaacatctcgaccttttcgacctggagggaaaggaaggtatgcacttagcggatatgtcatgggtatctcgtctaggatcattacggtaccttgaattatcctttataaatctcagcgcggcttctgaatgggctcatgccgtgaacatgatcccttccattagagtactntgtntatctttatgccaacttcaaggtgcgaaccattcactcgcacactacaaccttac

SEQ ID NO: 33633 - DNA, 55 bp, Oryza sativa
gactgtcgacagccactgactgtggtcatggcccacgtcgcacgggtggaggaag

SEQ ID NO: 33634 - DNA, 480 bp, Oryza sativa
  unsure (1)..(480): unsure at all n locations
gtgcatctacatggtatagttgacttgctcctaattcaatttctacgtggtcacaaatggagcatgagtttcatggttatttgaaagatgcaagcttgatggagcaaacaccgattgatacttcatcggtcacttgtgaaactatttcagtttcatctatgcctaagaccggaattgttagtgatcctctccctgttagtcctattgatgtagacaaaaagaaagggaaaagttntattattggggatcttcggcccaagaataggataaaaaatgcgaaggccgaagatcataaagttgtaaaggatgggtcatctaattcccaaaagaccaaaaagccgaagctcacttttgagatgcttatggctaaggacangaaanggatagccggtcaacgatttgataatcaactagtgattcaaacaaccaagatcatctcgtangaagagatttgtcaaacatcaaacaatcggagcatca

SEQ ID NO: 33635 - DNA, 439 bp, Oryza sativa
  unsure (1)..(439): unsure at all n locations
taacgagcaggccagaatgagagagcgacactggcaagtcttcattacacacaacaggcgaaaactgtagtagtagttctatttagataatagcaatggtctctggacaccaacaaagacaactagtggtgagcaagtatgcaagtgcacaaggaagctaaaagaacaccggattgaaaattgttccttcacttcaagaagattagacaacacatgtctatagcgatgaacaagaaatgcaagtgcacaagctaacagacaactggatcgaaaattgtttatccacttcaagaagattatacaacacacgtctataggatacatcatgactggctgaatctgatccctatctggatagcangaacgattacaaaaggtaacatgacacgtatgcactatttctcactattgaaacagaaggctacctaagcacaaacag

SEQ ID NO: 33636 - DNA, 476 bp, Oryza sativa
  unsure (1)..(476): unsure at all n locations
acgactggatagtgagccacacagcttataagggctcttcttaccacaaaacatcatcaccccactctggcaacccaaccaaacgtctttgtttttctggaatttcgtaccaacatacaacggaagaacctgagcagtgtcatcagcagtatgaagtacgtattcccactggaatggaatcaatttaacatcatcgcagtatcaagtctaacatgatcacagaggctggtctaaccataaccatccatcagtggaatcctcactagaaatgtgcaaatttccagcaggagcgggccgataatcgagagtgtccagccacagacctaagattaccaccctaaatcttctaatcgatgcgcataaggcactcgctgtaacctaaccacattcccatatcgaacccanaccctagaatgccgcataccaacaccaatgccatcacatatgccgtgccccgcgagaaaacccaaagagag

SEQ ID NO: 33637 - DNA, 498 bp, Oryza sativa
  unsure (1)..(498): unsure at all n locations
tccacaatagtacatcgtaagagcagtacaacccgggttaatggtgctttcttagttttgaaattcaaatatgctttntacttgtatgacacctaattaaaaagatatgtaaaagtagttaaatgtaagtgaaacaaacatatttttggatgtcaaaattgtgaaaaccactataaaaaaggctgggttgtactgcacttatttggaccggttttggtaataagagggtgcaaaatgttcggttcccaagatgcttccttttctttatcacctacaacacatgcgcacttgcacatctaaagttggtgtcagatgacttgtatcttcacttaaaaagatgtaataattcataggttgtttttcctctattcccctaaccatgcctccagaaacaaaaanaaatgatgaattgacctaattttgtactttggttgtggatggcagtttgtactacatgaatggagcgatgaggattgcgtaagaatcttgacacgatgc

SEQ ID NO: 33638 - DNA, 506 bp, Oryza sativa
  unsure (1)..(506): unsure at all n locations
actaagccttttatagctggtgtgctatgtgaattntcaataatgtagcctactttatgttacactcatcatgttctacaaagcagtcggtatatcactcggatcatgttattcaaggatttacaccgcatatgctacatatttatatcaagtcgcttggttaactataattatcgaagccactcggctggttggattatttattccttgactatatgcttggtttgttcacttaaccgcatagtcgagggctacacctattaggtgcatctagtcgatgcacctgactttatttttcagccctccacagtcttcagatttggtaaaagtactcgggagaccatggcaaagatgattgaagtactcggctttggaataatctagttcgggagaagatatctttatgactgtgaatgctcaggggctactgtggagattatgggtaccccatacccacacggcatggttatccgactagtaatacgggataacatatatgtatggaa

SEQ ID NO: 33639 - DNA, 473 bp, Oryza sativa
  unsure (1)..(473): unsure at all n locations
atatgcatgttntctcttactaccatgcaatgcatgtttcttttacacactcaaggcctccaggaggcagagacatgacatctcaatcaggtctaaagaagaatatctccctagattcatctcatcaggcagacacacacacacaaacaaacaggaagagagagacacagcagagagacagatcttgagattgagatagagaaatctatgtgcagatgactgagatctatacttaggtaagttagatttggtcgtgtgaacagtacaatcatcctttccaaaacaaaagcatgaaataagaggaggcatctttacagttaatagttcatgtcacacttcttttaccagggagagttcatgtcacactcttctctctttcagcacaacacatactaagagacgcatgcatatatattgcatactcacacacacacaatatagctactactactagctagctagagagagtatgt

SEQ ID NO: 33640 - DNA, 424 bp, Oryza sativa
  unsure (1)..(424): unsure at all n locations
tagagatgtgctngatctgcacaacaaacggtaagagtaccagtaaaaaagtcgataattgttcttatatgatgcataaagttaggttggttccatttatatagtgcgcaccgatcgatacacaccacgatgacagttcatacganaaatatggtttactggataataataacaatacacaaacaaatgttcggtcagattggtgagcagagatgcagacaatccataaggcgataattctaattctcaggcagctagtattataggcactaacatgtatgatggcatgattctatgtatatatatatatgtgctacctttgaattggattctaatcgtgacaattactaaatactcgaacggtaagagctagtttcattcagaanataataataataactatacaataatgttgaaggaatat

SEQ ID NO: 33641 - DNA, 494 bp, Oryza sativa
  unsure (1)..(494): unsure at all n locations
taggacctataaaactcagcttggggggtttgttgacngtcgttatcgaccagnttcgaccgtcaatactacccaatatatgaagactagctatgcttgcaatgcattattccataaataaaatattctattccactatatgcttggaaaactaaccatgcatgagaagctatcaaaaatggaggagaatcgacagtacaacaatcgatcaatcaaacatacgctgtcgagaatcaaacttatggatggatgggccaagaactcataaatgagacatcattctgacccaaaacattgtgtaccataaagtgaggcccacatgacaacatcctgaagaanggtgtgggccanggaaagccagccaggtttggccgaaccctctggntctgctgaacccccaactggccccatccagttcattntcggctagacagntactacccagcattctatgacagtggagctaatctacttgagaaaccgcatgacacatg

SEQ ID NO: 33642 - DNA, 497 bp, Oryza sativa
  unsure (1)..(497): unsure at all n locations
ctcagctgagcctctgctgcctaattgtccatatgccgtgctcttttttatatggcgatggagaggtgaagtagcaccacctttcttataggcaatgagcctatagcaaaaccttcatttggccttcgtctcagtgacccctttcttcgtttttgatggaacatccacaaccttgaaaagcttccaacaatctgaacgcttaacccttgccacactctttgtaggggatacaaaaatacccttctttcgtttccctttcctctntgatcctggagatccagagttgccctcatctgtagattccccatccacttccttatcttgacttgaggaatgaactgacaaatgtgagggtgtgctatcagacgaaacagacggcttagaaaattcttcatttttcgagtctgatccctgcaagttcaattaaatagctcaattaaatagtcagaatggtatgctattgcttaccacataatcagtacaggaagggtatacat

SEQ ID NO: 33643 - DNA, 414 bp, Oryza sativa
  unsure (1)..(414): unsure at all n locations
cggtgatgttgcccagctcctccatccnctatactcttatacatgagcatatcaatgacctcgttgctaacaaaattagcttagatgaggtatgtttatcggtaaggattaacgtaagggagaaaacagtgtgatcaattaatgaagtgaaagataacaatctgcatcgtttcctactttatttacatatatatgtatacaaaagaactacatccacacaaccataatatatactccctccttccctaaatatntaataccgttgacttntntaaacatgtttgacctgtcgtcttattcataaacttttgtaaaatacgtataactatatatgtcggatattcaacaatgaatcaaattatacgaaaagaattaatatcacttaattgtttaatagacgaccgtcaatatatt

SEQ ID NO: 33644 - DNA, 270 bp, Oryza sativa
  unsure (1)..(270): unsure at all n locations
ngcagtgatgacacacaattcacacaccanagagagagagagagagagagagagagagagagatctgaagaattgataagagtaaagagtgaaaaagaagaggggagccttacatggagatggagaggctactccctctggtagccaagaatgacttgcctatgtgttntgccttgtgttggctcattcatccatctatcagcccgtgcagatttgcagtggcagattaaaggggttcagaaagaaattcttgtgatggatgtgcaatgt

SEQ ID NO: 33645 - DNA, 444 bp, Oryza sativa
  unsure (1)..(444): unsure at all n locations
tcttcactctggactgctnggctcgatctcctgttgcagatggaatcttctcttcacctgacttgtccctggttgaacctttagctgactttgactgggttgcggcacttgaagatggggcttcagatccagaacttctcatagttcatatctctggtgtcaacctcatacaacttacccacttcactagctttttattactaggataccatgcttgccatcataagaatatcatgcttgtcattcacttctaacttgccgcagactgcctcgtattaactttcctgctctccgggtgctagctacttctgctattcgatgcaangggtcgatactttgcctttgatccgaanaagagacacagctganactcttagtccanacaaatgtctcttttggtgatcgcttgattttcttttccatcatcaggtgtggtattaactc

SEQ ID NO: 33646 - DNA, 295 bp, Oryza sativa
  unsure (1)..(295): unsure at all n locations
gttctgatgcaagatgggaaggtggttgtctatgcttctcgtcagttacgtccacattagaagaactatcctactcatgagcttgagctagctgcaatggttcatgcgtngaagatatggcgtcattatctttttccgtactcgtacagaggtgtatacccggtcacaagagtttaaagtatatctttactcacccagatctgaacattgagacacggagatggttggaattaataaaggattatgacatgggaattcattatcacccgggaaatgctaatgttgtagcacatgc

SEQ ID NO: 33647 - DNA, 392 bp, Oryza sativa
gctgcatggcagtgatataagcccacggtgtttcttaagtgtggggaagtctcctttccgaccagccatgcgggcataccacccggccctctccccacatttcggacgacccaaatgcgctcggggggcctcggggtgccacatcacgcccctcgggccctcaggctacctcgccccatggaccacgcccgaccgccacgtggcgggaggagtgagtggggcggtggtcgaaactgtaacctcatcaatgcgcagcaccccaaccgtccctcacctgatttaatgtggtgagggcggacgtgctgcgctgcccgattgacctgcgtaatcggtcatgaccggattgtgaccagtctgtggcccggcacgttcgatcggataagcgggtgtgc

SEQ ID NO: 33648 - DNA, 268 bp, Oryza sativa
tgacgcgacaggcggcgcggcggtcggcctgaatggctgtttttctatcatctgcttgaggagtaattgtgcgtcctggacacctataaacggtgtgttccttcgtcttaaaataagtttaatattgacctatcttatacctatatattagtacaaatttaaatgaagaggataaaatatctttactttacatcacagtacaattatctcttattgtatttactcccaatatataattattctctatatttatagactctaatataat

SEQ ID NO: 33649 - DNA, 308 bp, Oryza sativa
tagatactcagcttcctggagatggtatgtatggctgggggatgcatatctttcgttttaggattctttgaaacaatggtggctggccgtggattctaaacacaccgtcaccggcggtatgctgatcagtccggcgtcgtcggagcaagcccttcaggggacgcagaatcaggtcgtcggctcgcccctccggtgtactccgtcacaagcccacggtcgccgggaaccgccgccgccgcctgcggagcgataaaaacagataggatatggaagatggcgaatcaatccgattgactggttagtccaag

SEQ ID NO: 33650 - DNA, 485 bp, Oryza sativa
  unsure (1)..(485): unsure at all n locations
tatctttatccacgcacgccggcctcacgctaatcccggctctgcgttcgactcacgctgcttatgcgcgcgcttccgctgatagccgattccccacataacatctatttatatggagcggaataagccccaatatagtgaaggctatttaaacctaacatgcatcagttacatgtgtagtagaggattaaagccttgatggcatgaagttggaggtcttcaatggcggtgggactgtgggaggctaacagatactccctcggtattttaatatatgacgccgttgacttttatacaaacgtttgacctttcgtcttatttaaaagatttatatatntataatttatgttattgtgatttgatctatcatcaaatggtctttaagcatgatataagtattcttatatntacataaatatcttgaataaaatgagtgtcanacgttggtaaaaagtcaacggcgtatataagtatcttatattaca

SEQ ID NO: 33651 - DNA, 441 bp, Oryza sativa
actaagctttccccttcctttattcagatcaatctctctgcgccttatttctgatggtgatagcgggatatagcagagccaccagcgaggtgtggtgtggttggtttcaggacccagcgtctgacctggtcgtgtggcagctcccatggtgtggtggtctcatggatgagggcggtggtgttcgcgggaaggctggatctggtgcccctaagttggcaaggtctgatcttcccttatccagttccggtggtggtgtctaccggcatggcatggctccttcatgcggcagctacacagccagtgcatgtcccatctatgtggagtctggcacagtgggcgtgttataggtttgtggtgctgccgttgcagcaggcggcaagagcactagcgatggcggttgtggtggctaccaacgtggacgctactatcttgcaaagacag

SEQ ID NO: 33652 - DNA, 355 bp, Oryza sativa
  unsure (1)..(355): unsure at all n locations
atctctttagcaacctatgaatggtccaggaccattgatctagtgaccatttttctttgacgaaaatgacttgaattttcatcgcaacttgtcctgcacaactatgattgtattgatactgaattcaccttacaaagatcaagatattagcttttaaagaaagtcgcatattatctgctcatttatcatgccaagttcagattacacaggctgaaatcaacttgatggcaagtctaaaatgggcgttccaatgtggtactatgtgatactgccttggagagctggntcgcctatgcataaagattattctttttgggtcacagtagtattaccacgtgtctatggatcactctgt

SEQ ID NO: 33653 - DNA, 310 bp, Oryza sativa
  unsure (1)..(310): unsure at all n locations
tgagatatgccaatntcttcccaatgggttagcttgctattcttctttctcatgtaccaagcgggccagctcttctcggctgatggccaagatttgaaggtgttcttccaaacgctcagatctgggttggcgaatctaaaggggattccattggtttcaccattgatgaactctgtgggatctggattgctgactgggccaaggaaaaattgatgttcatcgcgtatgctatggactgctatctgatgagaaagatgctacatatgaccagaaatctaagattgatcaaagaaagaacctatctcgtgtg

SEQ ID NO: 33654 - DNA, 473 bp, Oryza sativa
  unsure (1)..(473): unsure at all n locations
tggtgcangcgtagtcgaagccatccgacggtatctacatttctaccgacgccatcgacatgttgacgcaatcaccaagcaccacaggcacctggtggttagcaaactcaaactcagtcagattcggagcctgcagctccagcttctgcagcctgcagtgcagcacacgcagatgccgcagacgctgcaatggctgctggtgttggatgaccacatcacagtgttgcanggagcagaaggtgaggcttaaccactcgagaacatcgcactccaggagcaagctctgaagatcaccagcaatggacaccttgtgcatggtaagcttcttcatgattgtcaagcgaattggtataccagcaggagacagctgatgaagcagattcatggagacaaagcctatgcagagagacttgacgcaagaatactaccaccaacactgaaaagatgaagagggaagctgtacatttggtctt

SEQ ID NO: 33655 - DNA, 394 bp, Oryza sativa
agcttgctttgactctgtccatcactgacttcactgttccagccgagagagggagagattgagcgagccgacgcgtggccgcaacgtgtcgacaatctcggtttccctttactcgctctctactcctgccagacgcgtcgacattctccacacatcactttgaagctgaagaagctgagggagaggtcctcagcctctccgtcatactcaacctcgccgacggtcgtagagacgacgaccttctgcatctccgtatgagtcaaggccacactcatctatttcgcgttcccatctctacacacagtgccgaaccatttctctgttgaccacctcccgttttgtgcatcacagccaccggaacgcgaccacgccgacgacgctctgtagcacgcac

SEQ ID NO: 33656 - DNA, 431 bp, Oryza sativa
  unsure (1)..(431): unsure at all n locations
tgttaaattatgccgtgcgttcacgtacgaaacacttgatatgttattgtcaagaaggatattgagcacagtgtgttcatctggcattttaactctacggagctaactgctattccgatcacaactattatagtgcgcatttattcagctgcaatctttgaacagccattgtgaacatttgctataactgcgtgatcgtgacaatctttttagctctcggagcgcaacttatgtgttgacagctcgaattttttttatttatacatttttttatgtnagaagtaacactactacaacacgagttggatttattctaataattatgtcacgtcattttgagacctatatcattagttacaagctacatgacatgttcccgatttagtgctggattcaaccagcatatgacatttatttgcaaaattctgata

SEQ ID NO: 33657 - DNA, 404 bp, Oryza sativa
atggtccatcattccatcaatttgcagcaaccaggcttattatgaagaagttccagaatactggtcgggctgctcacaacagctacttggaatactcaagttcaagatggaaattggcacactccaagggattcagccaacataatttgataaaaaaagacgttataagtatgaataagaagctggcatatacttcggctagtagcattgcaacgcaaacagtatgacaacgtaccacgcattgtttaagagctaagacaaagacaaaactgatgcatccaacgtaccaaaaagaaagcgaacagcagcagtcagatagctatgagaagagaactatgagagggataactagaacggacagaatggcatccatgggtccatgacgtttagtcgaccttcatcat

SEQ ID NO: 33658 - DNA, 485 bp, Oryza sativa
  unsure (1)..(485): unsure at all n locations
cgcgaatacgatcgatggggctcggctagtgggaaagcgtatctaatcaaaccaacggattacaagggagaaggagatgggcggttgcccacgtgtacaaccttcttaagctgccctgcttctagaaccaacaccagctaatcacgcagccaacgctctaatcacgttgcctctttaagtgttaatcctcttatacttaacagggcggtattcgtccaccaaattgctaagggcccatacgatttcatgggtatatcgcgttatttcccatattntntcttcaaattccttccttcgttccanaggatgcttagagtagtctaaaataggataatggatgaaattgaatttatgataattactcgaggacacgaaccaatgaattactatatatcgtnttatattataagtcggtctaattttttcttattcaacatttcaaagttagtcaaatatatagacaaatatagcaatattttcaactc

SEQ ID NO: 33659 - DNA, 60 bp, Oryza sativa
ccccacctatcttcaacttcatgcttcttatatacaagggatgtctcacctgacccacac

SEQ ID NO: 33660 - DNA, 464 bp, Oryza sativa
  unsure (1)..(464): unsure at all n locations
tactaagcttcaacgtgccattgagactggctggagctggggtgtctaaattcgcatatggaagcttttgtgccaagctccaccaaaatcgagagcgcaagctctcaacatatctttcaagattgaatgacttcctcggtctgaccatcaatttgcgggtgataagccgtgcttgaaattaaacgggtccccaattcttcctgcagcttctgccacaattttgaggtgaactgactccctcggtcagatacaatctttatgggtactccatgtangcacatgattctcgaaaggtagagctccgccaaccttttgcccgtatccgtggtatgtactggtatgaagtgagcaaccttagtgagtcgatccacgactacccagatcgagtcgtgacccgacgatgtccggggcagtcccgttataaagtccatcccaatctcctcccattttcattccaggatttg

SEQ ID NO: 33661 - DNA, 333 bp, Oryza sativa
cgagcagacgccgatctgcgacaagttctacatcgagatgccgagaggcgtcgcagcggcgaaggaagaagtgatcagctcagcttcgacaacttggtgtgcacctgtctgcgcgacttcttctcacctcatcagtgccagctcatacttgtccgaaccgacacaatccgtcgaggtgcgcggcgccgacaccaaagccgcttcgtgcgcagaatgcaccgcgatacgaaccggggaaagccatgcctaagaaaagtcgggacatctcgcacgttttcggcttttgtcagacttgaccggtctgttcgatttttgcaggaacaggaaagaagt

SEQ ID NO: 33662 - DNA, 456 bp, Oryza sativa
  unsure (1)..(456): unsure at all n locations
tctgctcgtatggttgagtatgagaatgatctttccacttcctaattctctgaaggctaaagttatcaacgcaaagcaaaaggatttgtcattccagaaacggaaaatagatagtgtgaagaatcaatattatgcgatgagaaagagagtccgcaatgaaccatgtagtactgtcgaccttggttttcttattgacccttgttcatgtacaatgaatggcgggcagtgtgtatgtggaggcctagataaacattcacaaggtcaccatgtggttcataatacagaaccaagggtaagtacaatgaactgctttgggcaacacgatggaagttacaatggtggacaaactatgtattgtggaatgaatggacattctttcnctgcanagcatgctgagaactgatagcatggtaaaggtggagatattgctaatagtgtcccgtatgctattctgat

SEQ ID NO: 33663 - DNA, 405 bp, Oryza sativa
  unsure (1)..(405): unsure at all n locations
agctttatcctctcatttntgaattaaccaaacacaatgtttctactcatgatggtgatggccgcatatcatgaccaaccctggagttcagaagcacccaacctctcacgctctagcttcattattagctcagctattctgttctgaactatcacataatacttctcagcagatccagtatcggaccgaagccactngagctccctctctgcatctgatacctccagcatagtactttcaaggcctaattgcaaaaagcctattctctgaagaagatttcatagcttgcgctacataggtcttcatctgtaacaagtaatcagataagatgcaacgtatccgatacatcttcaatttattgcgtgaaatcaacacttgttgtacaatatctccagggcctacgca

SEQ ID NO: 33664 - DNA, 140 bp, Oryza sativa
  unsure (1)..(140): unsure at all n locations
tgccacagntgcggcaggggtcgtctcgtgccggcttggtgtttttgttgtttcctcctgngcgcctctgcgggcgccaccctctgcacgtcttcacgcccaccgtaactggacaccttctcgcgccttgcgcggcttac

SEQ ID NO: 33665 - DNA, 255 bp, Oryza sativa
tgtgcgacgtcttcttttgggaggtgagaaggcaaggcttctttgaggccaaagctgaagcggtggctgtggtatatgcggttgcggcggaagactgagatgagccattgagctgttggtgctcacggcggcgagcggtgggcacctatgtgctcttgatcgggatggagcaatcgagaccgcggctcttgcaacacgtgcggcgatgttggtggccacagtctttctttgctaggttaccgcagttctatcaca

SEQ ID NO: 33666 - DNA, 481 bp, Oryza sativa
tagacctgttctgatgaattatgacaccccattactttttttctttttctgttgctgagttcatgttatgtcttctcttctttccggcttcaaaataaagcattcgaaggttgaaggggcttattgcttgggtgtgtttcataatggaaaagatccgacaacactattagggggtaagatcttcaactcttggtctcttacgaggaacttcaagaaaaattccattggacttcttttatttatatcatctgactacactatctctactttattcgcatataacattgtactagtgcatgctgaataacatctgcacctgtactatgagtctttgaccagcttatacactcgcgtctgctggaaacttgagtagataaccaagtaactctctctgtagaaaatactactatataacaatggtctccttatctgtttcagcataaccagctgatgcactttcaatatctttaggataatctga

SEQ ID NO: 33667 - DNA, 432 bp, Oryza sativa
  unsure (1)..(432): unsure at all n locations
gcttcacatgaataggtgcttctgcctctataattgtcatcggtagtccacatatgacttgcttaatgtactgtcgtccttctttggctccttctgggcaaacacgtaactgattaggtatctcagtggatcagatcaggtcttgtgcaattgtgccacttgngctaactntagttcatcacatgtgtcaacgtacctcgatctagctaacaagtcaagctagctctaacaataatacaattaattaaacaactcttgctgctaaaatctttgtttttctaagaaatcttagtcagaagtttcataaatggtagtcccatatctaaaaaaataaatggagtttaattgctagagttctattgcctaaggcatataaactatacaagcttgacaaaagccttttttaacaagagtctagctctattaaaattg

SEQ ID NO: 33668 - DNA, 429 bp, Oryza sativa
  unsure (1)..(429): unsure at all n locations
tggtcaatagctcgccgtcggtcgtcagcttggaggcgtgcacagacgctcgatcagacggcgcgatgtacagcaacaggtttgcccagaaatgggcgagcaccttccacctctcctccgcatccttctttcggtccacaagattgagcgcgagcaccgctccctcgtacagcagagggcatcctgcttcttgctccttccaaccatcgcgacccagcttcatcaacttgtcatacttgtcactggttgtcctgcattctgcgaggtatgcgtgtgcatcctttagcacactgcaagacagtagctggcttgtgtaagtcccatctggtattgagatccggtgcgaaagctacgatgtaggagcagtatccngagagcactgtggctacttcgtagtgatcactcaactctgcatcagcctgcgccatg

SEQ ID NO: 33669 - DNA, 474 bp, Oryza sativa
  unsure (1)..(474): unsure at all n locations
tcaccgcactagagcgggctaaccatggaggaggtcattctttatttcgccctgccggagcgcgccgaggatcaccggagctgccgccgactgccaagacttctatcagttctcatgccggaggtcaagcatcacgcatggcgtcgaaaccagcggatgacgatggaggcaagtatggctgcagtacagacgaaggactactggaggatggcgagccacttgctgtggatggcaacaagctagctaatgcatgttgattaagttaattattgtggcaacgtggccaaccaatcggaggacgacatgtcatcgctgctacagtgccatgcacaaaccaatgcgtgggctgaagaagtcctgatggtttttcttatttgtcccaaatgagatgccgagctatgataaatccggcccgccgctacatcaaccatcttcaataactcctcccctantcttctctaatataatctcgac

SEQ ID NO: 33670 - DNA, 477 bp, Oryza sativa
  unsure (1)..(477): unsure at all n locations
ctgagcatcagcttgtccctcatacctctaacaaatatattttcaactttatgtnggagaaccataggatgtgatacaggagaatttcttcatttcatgtactttatcaatgtttatccaacaatgcaaattcatgagtgcttatcagtattccaggcacacagtttattattaaaacatgataattgttcagctgcatatctgtaaccatttctttctcattgtactattggaatgctctctttagctatccatcttgacctatagggcattgatttcggatatgcactcattgtcactgctatgttaccctttttggcagaatgggaacttttctgcttagtgctgggacaaaaggtaattgagtgattgttaatgcaagtactacatttattctacaactaaacatgatctgaatccttgaatactgacttgagaatgtacacacggatctattcatctatctaactcagaata

SEQ ID NO: 33671 - DNA, 462 bp, Oryza sativa
  unsure (1)..(462): unsure at all n locations
tacttctttgagaacaagccatcaatgaacttgaccgcttatttatgtacttngcacagatggagcgtgatgctggacggctggtcaactgcaaggaacggttgaatatctgtcctcttggtgcttgtgctttggctggtactggacttcctatcgataggttcaaaactgctaaagaattgaagtttacagctccaatgaagaacaggtaaattccccagtttgttttagtactgtgaactttaaaaagtttcagtcacattgcatgatttctatggtattttagtagtttgacctatatcacctatgtcaaagttaacacacagcanatacttgctcttcatttctgctcaaataagtaatctctgctcaaataagtatgtcttctcacatagcacatgtgtagatgaaattacctatttcttcgctggaatctccactgtgatatgtcatgtatgctat

SEQ ID NO: 33672 - DNA, 150 bp, Oryza sativa
taatatgggaaaggagaagaaaaggcccttaggtaccatatcagaatggaaggcaagcaactcctcatattgagcgatctctgacacaaccagaagattactaacataacatgtcagtaacatacacatattatcagcagtccactgggt

SEQ ID NO: 33673 - DNA, 476 bp, Oryza sativa
taacatacaaagatgccacatcatcatccactaacattattctacattattatctactaatccactaattaacaagatgtcacatcatcatccactaacaatcatcacatttaaacatcatgcaaacatggtatattatctataattctatagtatttataatttaagagcttttaaaatacaagcatgttaaattatcatcccacataattcacataatgttcaatgtatatatttactatgttttataatatcctacatatttatatagttcattctcacttagtgcttaaatgactaatctcctttgtttcctctaactccttaagcttaacatgcaaagatgacacatcatcatccactaacaagatgtctaatcatcattcactaattaacaagatgccacatcatcatccactaacaatcatcacatttaaacatcatgcagacatgctatatctttatagttttataat

SEQ ID NO: 33674 - DNA, 466 bp, Oryza sativa
tgcatctgattgcaagagatgcgtggactgtcttgtctgccactatgtttctcggactggagcacttgtctgggaaatgacccattccttgacgattgaggcaacagatatctgtccggactcagcgatttctattctatcatcatgctggttattaactccaggttagaacataatttcgctgaaatgagaccctacgtctcctttgacaagtaacaatcactcacataattccatatcatcactctccaaaatagccctcctagaacttgctttaatacacatgctcccttattacatgaaacaaggccctgccttatacaaaaaggactgtgctttacatctggacattgtatactcatcatgaatgatccatatgcatagcaagctcactgatatagacatgaatatattcatgatcacatggcagaggcaactttcgatacaccctgataagtagcgaact

SEQ ID NO: 33675 - DNA, 448 bp, Oryza sativa
  unsure (1)..(448): unsure at all n locations
tgtacacattactcatgaaggtattagcaacatcaatggcttaatatggatgggataaaggcatgaattgaggatatttggagaatttatccactaccaacataatacaatcaaaatgaccagacttgggtaacccctcaataaaatccattgtgataacctgccggccccatctggcataggcagtggctgaagcaaccctgngtatttgcttctgtcaagttaacctgtaaacagaccccatattctttcaccacagactgaatcatagacttcattttgggccaagcaaacaaagatttgatccttctatcggtgataggaaaacctgagtgaccacccataggactgtcatgcaaagcagatattatcttgagctataaagcacaattattacccaaccatattctccccttatacttgagaatgccactacgaagagagaatg

SEQ ID NO: 33676 - DNA, 330 bp, Oryza sativa
ttgctaaaaaatacactcaattatacggtcgggatacgtgtcgtgttaatacgaaaataaagtgaaacatgtgttcaaaccatctaacaaaattctgcacttcattccattctctttgaaaatcttcaaagcgtgtagactgcttctcagctcatgccggccagtgtcgacggcgacagttgcactttaacaactgttagcctttgctccttgacggtgacctgagaatttattactaatacaattatggcctatgtgagtattgacgatcaatacaaaactaaccaccaaagggtggatggtggataccaaaaccacactttacggaat

SEQ ID NO: 33677 - DNA, 313 bp, Oryza sativa
gttagtcagattattggaagagtgctgatgggcactttggacacacagagagaatgaatataggtgtcatccactttaagagctcttctatttgtgtatacaggatacagcggtctaacctgggactcaccggcggtcagaccggcggcaagtggcggtcacaatggcaggagcacggcgtgcacaccgtcggtggctacagcgagcgtgaagcgatctcggtggttagaccggtcgatcaacaccggacagaccggcggctacgctactgtcagaccggctaatctactatggtcacgtcgatctcatccaa

SEQ ID NO: 33678 - DNA, 344 bp, Oryza sativa
  unsure (1)..(344): unsure at all n locations
aaatgatatgcacatttttgacttgagtactatcatagtatcacaaattcattagattttatgaacttattttaatacaaaatggattgacaaagtttcaaaagtttgaccaaatcttatcctgaacatcaaataattatgaatagaggaagtactagtacaatttatctacatagtcttccatggtcttgcaggatctgacgcggatcanatcagaaagctcactaaaagggctgtctgcttcttcagagaatttcacccagtcttcttcagaacagtcatctagttcactagcaacccaggatgtttcaggccacacagaggcaggtcttgtggctgggaca

SEQ ID NO: 33679 - DNA, 373 bp, Oryza sativa
cttaaaactaagctggacatatctaggaggattggtggctggcacaatgttattttatttgtgccgaaagttcatcaacgttgcagggcctggaggaaagcaagtccactttacctgtaacaaccctaccgcaagtcggtctatcctaacctgattacaagtcaccttcttggaggcggcgcccatagtctatgaatatcccgacgtatgtccagaagaattaacgagtatgccaccagaccgagagattgagttcaccatataactggcaccattcaccggaccaattgcataatgaccctaccgaatggcagctcatgagttatcagaagctaaaagacaaatcgaagaattggagagtaatagctatgtg

SEQ ID NO: 33680 - DNA, 441 bp, Oryza sativa
taacactgagcatcaacttaaaaaattctatctaagaaaacatttataatccatcgaatgtattttattgatcaattataactgccttctagaacgtataattgtttcaaaagggccaatattcatacactattggaccttttgagtaacacggaagaagatctgatgagaattgacagttttcgtatgcaagatggataacagatatgggacactctatacaagcatctcccaatggatttacctaagaataagttctagttgtaaatccattgcaatcttttcctcttcttctttgtcgagttataataataagaaaaaataaaactattttgcatccttgcgacaatctatatgttctcgaaatggatcataataaaatatactatatggtattagggaagattcacttggaagtaactattttctatatacctatgc

SEQ ID NO: 33681 - DNA, 375 bp, Oryza sativa
  unsure (1)..(375): unsure at all n locations
acaatttagtcaagataatggctcacactcaaggattcctccgacataccacaaatgcactcactctatgacaagccacttatttttggttaagacatgagaagacttatcacacttggttagacaagcccacaaaatacacctacatgcatataaactaaaatggcacaaggtcattcacaagcttcgctcataaaacccctcttgaaattactgcgcctatctagcaaatccggtctacaccaaacaccaagaccgggaaaagactaagaaaatatcttaactacagtatacctctgccttgnccattcatctggggtcagcttgaccgaataacactgtgacatcggagaacatgttatgcgaggttatcat

SEQ ID NO: 33682 - DNA, 469 bp, Oryza sativa
  unsure (1)..(469): unsure at all n locations
taattaaccagttaagttcagcgcattaatgagatgatcaacaatgactntaatttttccccatatagtaacgtgactatggtgacatttccgatttaattagggccaattccctatatacccatgtaatttcacccaatcccttctacgcccctgaaatttgtttgatctcttatatacccctgagtttttatttggatcccttacatacccattccgttagttgaccattagtttgaccgttagttattgtagaaattactatattgtccttgttatattgttaaaagctagaaatgttntatgtgtaaattatttgagttgtganaaccaataatgaataaattactaaatanttgttatgaaattttgaaaataaaacattatttcattagaataaaaaaagattaatcgtaaaaaagttctgcataagatttgaaaatactcttcaacaaatattagtgaaaaa

SEQ ID NO: 33683 - DNA, 431 bp, Oryza sativa
  unsure (1)..(431): unsure at all n locations
atattgaaaagtcattatgtatttcgttgcaacttgcattagtggaatcacacacttaacttgcttggcctcggtttgcgtgccagaccgacggacctacccagtagtcacactaatttccgtaagtcgtactaccctgattccttgtcgctccacccttgtggtacctcggtattcgtgctctctgagcgcgtataccaaatatcccacatacaccgttgcttgtcgaaaacttgcgaaantgggttgtgaagccttcaaaacccgacatgtggtgtcggtgtgtttgataataaaatgaattgtgaaaactcgcgatgcgcgggttgtgcctatgtggcactgtcccgtattcgcatataatggaccgattctgtgggaaactcatcgaacataatcaagtgcaaccacaaggtggaatgngacaccct

SEQ ID NO: 33684 - DNA, 399 bp, Oryza sativa
  unsure (1)..(399): unsure at all n locations
taacaaaagagatgaggaagaanagatctcatatgatgattattatgatgttgagctcgcggatgaaaaattctcatatagcaattntgttctcagtagttttcttcacagggatcgggatgatgcgggtttggatgatgcgggtttcgatggtggagaaatttttggtggatcctcgagtccggttgttgatcccagtgaaaatcaacaagagagggctgcctctagagaagattccaaggctgacatgaatganaatcaacaagagagggctgcctcgagtccggcggctgcctctagagaaaattcccaggctgtggcttcggctgtttattccacacccaaactggatggctctgggaattcgggtgttgatcccctgcagannaacacttgata

SEQ ID NO: 33685 - DNA, 451 bp, Oryza sativa
  unsure (1)..(451): unsure at all n locations
agcatcaacttgttcctagcataagcaagtaattatgcttacatgctccgtngctggaagaagataataaatctggagagaaggatggagaacagatagaatacataactgaggaaagggaggaagatatcccatagaacacttcagagatttggagactgaggagctaatgtatgtctcacagaatgccatgcaggggactaccagacctgatacattntcagtgataatcctcatcaatgggaaaagagatgttgggctggtcgatagtgggagcactagtatattcatggatcaggagtatgctatacgcaaccaatgtcccttagttaacactgagtctaaaaaggtagtggtagcaggtggaggagagttaatataagacgtgcaagttcctgctctgtcctttcagatacagggagaaaccttcaccaacanattcaacttaatt

SEQ ID NO: 33686 - DNA, 462 bp, Oryza sativa
  unsure (1)..(462): unsure at all n locations
ctcactaaagataacccatgtgcaccagcaaaacgcttggttattatgaatgggttgcaccagaatcaaacaatatttttgccggtgtcgagtcgacaggaaatgtgcccaatataacctctggtgctgactgcgcctcctctgctgacgcatgattgacacgggcctgaacaaacttgggtccagcacgtcttggcttcgggcaccttccgaccgtgtgtccgggctcgttacaattgaagcagagttcgggcttttctccaaacttcttgggctgttctggctgagctggcagagctggctgagctggaatcattaatggacttggagtangcttgagcctgtgctgctcactgttgttgtgactgccactatggtgggtcttggtgaagctacccgggtggtaaggacggtactgacggataatcatggtggaagtccaccctgattgtccatcgtgaa

SEQ ID NO: 33687 - DNA, 376 bp, Oryza sativa
gtatggaaggcacatattatacttactaatcccgtcagtagtaatagtcatacagcataaggctgatataccatataaagctgaaagaccttcatagtggcatatacaatagacaataccctgcctagacgtctacagcagatatattggtcaatttgacgacctgacctactatcccttcacattaaaaagatctagtgccctttattcccttactaaaccctagggaagttcaacacacaataaggatgaataggctgtgggattcacggcacaagtggattataggaaggcttgaagaggattggtgaaggaaaaagtgggatatcctaaccatatccaattccaacttactggttaccaaaagacccctata

SEQ ID NO: 33688 - DNA, 448 bp, Oryza sativa
tccactggctcatatgttctgtggtccataactctgagtttgtctgtattgttgctgatcaatagagtatactggtttctcaacaactctcacatataatggcgtattgtgcataaaattgtttacctgcttagattgtaacctaaatgaaccttaccaaattttagcaataccaaaatcttagtaaattaatttatgtaaattgataatattaccaaaactttactaaattatttcttatgtatttgtcaaaatatggcaagaaactaaatatatgcacatctttatcaactgtacccaaaaaaaaatggtatggtttgaaatggcatcactcagaatgagtcctttgattttccttataaaagctcatataccactaacagaattatatgtaattgcgtttgtcagaatcggtgttctaacctactattgatttacggaataagtt

SEQ ID NO: 33689 - DNA, 257 bp, Oryza sativa
  unsure (1)..(257): unsure at all n locations
tcattataaaccatggctctcttctgacctcgtaaacaacgttatcctaatctagctgatctgtatagaaacgactctgttgtgcgctatcatatgaccctgatagactatggcgtagtaatcataggattacgaatataactgtccattcatttacaccgccgctttctctatcataaacaaatgacaatactcttgaatactcacgtgttgaacgctacatggatatacatccactntaggatttatctatactc

SEQ ID NO: 33690 - DNA, 463 bp, Oryza sativa
  unsure (1)..(463): unsure at all n locations
tcccaccaattcagcctagtatcacggtcacaccaacatgatcaccagtacaccaccaacacattttagcacacaggctgacaggcagccagggtcgagaattattgtctttgctgtgcaccccctacacgtgctcggtcactattccagaacggaggcagtccttgaccgatacacagtggccgtaccgctcaaacacctatgcatccgatctgctcgcctggtaattgttaaccatgctagtagaccataacttcctgagtttgatcccagtttagcattgacaagggttgacttgaagtcttgaagtacacgcccactaactaatgctctcttcgtttcatatataagtcgtgttctgatatttntttactaaacaaacttatttaagttggatcaaatttataaaaaaataataacatctataacatcaaattacgtttattaanactaataatgaata

SEQ ID NO: 33691 - DNA, 346 bp, Oryza sativa
ctaattcaagaacctatatgtttttctaaaaaaattgtgcggctgctcattttatagagccttattggcatggcacaaccaatgccatgctgtgtctttgggcttttgagataataaaacaatgatcaaagggatcgacttccaccctactgtaaaagcgcatcaagttactatatcactccatctagaacaacctccttcttgagttgcgtatttcgcaacatttcttcttatcatggaaacggtatccttttgtacttttttgtcatagcaatagctataatcattgataccaatgtcctatttgcaggaccagttcaacataaaccctgcgtgctggcctttc

SEQ ID NO: 33692 - DNA, 412 bp, Oryza sativa
  unsure (1)..(412): unsure at all n locations
actaagctaggatcttggtcctatagttttctcggagcttatggaatatctttagtattttactcttcttganagaatattgctgaattaatagaattatcttccttatttatttatgctcatagtttgtgtacttctttattgagtatatattctatgagtagtatatacttcgtatatctactttgtcaaaggctagtcgatctatgctacggtaacggtccaatgatctttataggttgctctaactctaatttgcccatccgaagggtgggagtcctacgggagttagtgacaatatttaatagtataagcatggcgtttangttagataaatgtcgatggatgtgggtgtgccccacgaaaagtgatgtangtggcacgtggtgatagccctacccgttctttgtat

SEQ ID NO: 33693 - DNA, 394 bp, Oryza sativa
  unsure (1)..(394): unsure at all n locations
tattatgaacattttaacattgccgattcctataatttaatgatagatgagtgacacaatatgtaaatgatctaacccgtctgtaatggagtagtggttagcgcacgactgtctccattttagaaggccatctctaataaagagttaccagagacgcttttttttttccttgaacatgactatctctgatctgatgtgtgctgcaccacgttcacaacaaactgtttgcaccagatttgnaatttactatttatataantatgcagataatgatgacataaataacccatgcaaaatgcatgggttaatgcctagagtcgctaaccacggcagtttgatgactagcatgtgtacctcttggtctggaggaattcctgtagttcgttgataagct

SEQ ID NO: 33694 - DNA, 368 bp, Oryza sativa
  unsure (1)..(368): unsure at all n locations
gtatttatcagtgcacatatttagcagtgttatcaatgttagtacttcaaatggaataccatattgtagtatttatcagtgtacatgttttcaaaatatcaagaagccgaaagttcctttctgaattgtaagatttcttatcattttgccattttctatgctctataaatttgatatgttttgtcaattaatagtttagtactgtacttaaatatgcttaacgcattcaatttatggtcgattctatgaacactantaccgtttatattatacaactattagactttggngttgaaaattttttctcttctagtttcaaatacctaagttgaaaatcctaagcctgcccttgcccgtgggtccgcgcc

SEQ ID NO: 33695 - DNA, 344 bp, Oryza sativa
aagagacgtacgtctcgattcaacgtaatagatgcttctcaacaactcaactggtagtgcactgacctcccaggtcgggacattgcttctcagctcatagagccatttcacttattaatgcgatacctgagcctttctcattgtctcagactcatagagtcccgctgtcccccagcacaacaatctgcttccactcgggaagcctagtctatgatgcccgcagacatcccgaatcactcagatccggttctgaccacccaggtcatacatctgccacaaaagctgaatctggatatgattaccaatccataacaactcttcacaaagcacatgcgcaccaaact

SEQ ID NO: 33696 - DNA, 420 bp, Oryza sativa
ttattgtactgaaggtgtcttacaggcatggattatattgactcatacatagaatttacgtacgtggtcaatgttccaagaatttgccaactcgcggccatcgccatctgctatcttgaatgcgcctggccgcaagacttgtgtgatcgtgtaaggtccttcccatttgggtgagagtttgtttcgccctgcttggcattgaacccgtcggaggacgtagtcgccgatcgaaagtatgcgtgctcggatgcgcttctcgtgataacggcggagggcctgttggtaaccggctgctcggacggcaactcatttgcgatgttcctcgagtagattcacattgtcgtttcgctggtcctcctgatcctcatcggaatacttctgtactcgtgtactttgatgtcgtagctcgctggtgagcat

SEQ ID NO: 33697 - DNA, 477 bp, Oryza sativa
  unsure (1)..(477): unsure at all n locations
nagcttactgcagattggtatatttgtacattctctgtattatagaaaacaactttatctatcagctatgagcatttgtatacattcatagtaaataatataagcattcttagaatggagatagtacggacaatgcaagcattggctgatctatgaacttgacaaacccgatgacaattgacaaatatatagcaactacataaaaattcatacacaaagcttagcttatggacgtgactacacaggtagtggtagctagtttgtcaaaatcagctaccactctatctataagagacattatccacctatacttcanatacaattttctcttatactactcatccgatctacgatccgattgcaccattgtgtttataacaattaaatctttataatacgatctcacatgattatattctgatgaacaatataaaatacctttataatatatctaaattactttagattcactaaata

SEQ ID NO: 33698 - DNA, 449 bp, Oryza sativa
  unsure (1)..(449): unsure at all n locations
gggattgagttatgaggccttgtgcttatgaatcagcttgatggttttgtccggtgcttcacttctatcttccaccgttccatgtgcagaaggccagctcaacgccggtcgccggacgacgagctcggctccggtgacccgttcgctctatccctagttacacgggcagcgtgagcctgcacgatgagttgtttctattttctgatggagaaaatagaataacatctttctgtagaaaaatcagatagcttaagcgaagtagtagcataggtatgtgtatatattgttctgtaccgattcctttcatgtagatgagcaaatgtatagtacanaacggatgtctatatagccataaatntgttcatctttttggccatgggtgagctcggatgcctagttcctgagaagcaatcgccggcgagaacaggggattangagagagagagagt

SEQ ID NO: 33699 - DNA, 421 bp, Oryza sativa
atggctgtgacagtgactctacaacactttggtcagtcttgaacttatgacgataaacgctacacatggatggtctgataccactcttcgacagctctatatacaactatctgcaagaaagaagctcccctgaggtcttacctcactacacatccacacacatagtcatagcaaacgaagactcatattgctccccttccactttggtgtggaaaagatttatgcgtgcgtaaattactgcatactatacaggaaagagtacgctcccttgaatgaatgccatcatgcgggcaagccggtcaagttgaataccatactggctacaccctcttagcactgaggagactgaaatattcgcagcttgcgatgggaccttctgcaagaccgatttaccgtatcttaaccacagatgcgacaatgc

SEQ ID NO: 33700 - DNA, 148 bp, Oryza sativa
ctgatgtaatctattaactattaaagttatttaatacgaagccttcacgttcgctctcgtagcctagaaattcttatattaataattggagaaaaagaaaaaactgagtccatatatccatataggaatacaatttaaaaataactga

SEQ ID NO: 33701 - DNA, 331 bp, Oryza sativa
  unsure (1)..(331): unsure at all n locations
tntagaccagctcttacatgatcttactaatgcaagtggtttgtttatgtacatctactcaccgaagcaccccagtagaggttggatatatcgagtcctcggcaaacactagccagtcggatgcaactaaatctgtggagctatgggtatgcttaaagatgtatcaaacgaatagcagatgctctaatcacagaacgcatagatgaataaatggcaaagacaagtaccgtgctggttctatgctagaagcgtctatagacgcgagcctacactcagacggtaccactaaatggcaccggagacaactcaagcacactctgatgtatgaagt

SEQ ID NO: 33702 - DNA, 351 bp, Oryza sativa
catgctagcctattcacattaaaatactgagtgcattgttttatgatcctaagatccttgaagggtgtcatgcgcggcacagtggttactgatgatgtgagtgcactttcttatcttttaccccctctaatatataggtgtacataaccagctcaagcttacatatattacataagacatgccacaaccgatcgtaaaccatgaccaagaagaaacctgatctcctaacgcaagccaacagcctaagctccttagctccggctgtgctccacagggcagcctcctctgatatagccctaataatagtactgacactaggggactctccatcaaaaacacacccattgcggt

SEQ ID NO: 33703 - DNA, 451 bp, Oryza sativa
ccattgtgccttaatatgtttatgtgggtacagatgaccatctagctagctagtttgatcgcaaccatactaaaactaacttacatgctattctcagccacgattgtgagaggcggtcaatatcatagttgttccatcatcgatcagaagagagacgcagcagtccacaactaacaagatgacagagattctttcggaatgggtggtgcaaggatattttacgatttcacctttgatatagcacaggatggcacaggactattcagcgtcaagatatatgcccctgctgagcgaattaatcctaaaggtcgcatgcgattctactcctttactctatgatcctgcagaccagttcctgccgcctttctatattgcacttgacatatgcggattacggaactatggccgttagattatcgaaaattgctctgctctcggaaagatatgttca

SEQ ID NO: 33704 - DNA, 411 bp, Oryza sativa
  unsure (1)..(411): unsure at all n locations
gcatgccagcttatagtaataggatgaacagagaagaccgttattgtcttatngtctaatattgaataactgcacacgtatggaggatgtcatttcttctatccacttagtatatctgatcaatcagaaattcacagggaagctcatgcatatatgacctgcagatactctcatttctgtccttgatcaatccactccgaatcgcatgaagtgatttctgcacatccatcttgttcatgtaatcttcgatatgtgacgaatatcacggatcataccctgagtacatcctcgtgcctttaagcctcttctgatattcgcattcaattatcttcagttcattctgttttcatatctgctacagtacaaatactagttgttagcaatacagtaccttacattctatcactgact

SEQ ID NO: 33705 - DNA, 415 bp, Oryza sativa
  unsure (1)..(415): unsure at all n locations
aagcctgacccttcgtggtcgccttggttgaacgcgatagcatgcttatctctgatttgggaggccataactccggccagagtggttaagaacggtgtctaagctctcgcattgctggatgttgcccgacgtcggcttgccatatgtgtangttgatggagcaaggatcctaattgtctaactaactcctatggctttatcccatgtagggagatgtgttgatatgaactttgttttgcaagcatggtggaataaactcatttataacacagcaacaatagatatcataaataacatcatacagtttcacaaatggtacataaatcatgatgcaatcgactgcatacatacgcagtccaaataaggttcatccaacagatacatcatactaatcatcatactactcgacaatcta

SEQ ID NO: 33706 - DNA, 285 bp, Oryza sativa
tctttcaaaccacgaataggattgtaggagtatgcaatattttatgttgcacagcaatgcaatgatgcgagtaattcatggttttatgcatacatttccaacctgcttgacatacactgtatatggcaaatgtggcatgacctgtccttgtcgatcaggaaccgttaatttaggcagtaaggtaacatctgcaacatggtgatgaattctgtgctactaccatgcttcatggctgcacatgcacatattgatctcgctttttcaaaaaaacttgactgtaaataa

SEQ ID NO: 33707 - DNA, 455 bp, Oryza sativa
ctaatatcattcacgtcatatatcacatatgtttataaatataataatatcttcagcgcaactgataagatatacctcatttatttgtatttgtaacagctgaaaaccatgtaactagttttttacggaatggtacttttaccgataagatggaaattcattccccgttaagagaagatgtttgactccgatcttcttatctgctcgtacctcacttacagtctccaagttttacttgattggtcatctgcatgtaaaaatactatatatgtagtggaaattacgagggaaaggtattgaattatgggtaaatatatattgccaaccacacatatagtgaaaacttagaaattactgttggatcttaagaatagacgtctgagatatgtcatatcaccaaaagtaaaaaatattctcaaagtcaacatgagtaaatcttctcggcgtcattttta

SEQ ID NO: 33708 - DNA, 460 bp, Oryza sativa
  unsure (1)..(460): unsure at all n locations
tactaagcttatcatttctttactcatccttctgcaaggtctgtgatatcttttattataagttaacaagttatagatctttgtaactcagaaccaccacattttcaagcttgaaaattattggtattgttaaagaacaaaagaaataccaatggttggaaagtttctgtatcagtcaagaacagaaggaaaaaaatacaatatattaaaccagtgtgcaaattgattattaccaagcacttgttgagcatttagccgccgcctaaggtctggattgagcattcccttgacaagaatccttgcattatctgagacccttggccatgggtctctcttgaagtcaatgacagaacggataattgcctgagcaacaccctgttcagtttctgcattataacatggaaacaaaagaaggatcangaatagcattcaacattacaacattgccaggtctacaaca

SEQ ID NO: 33709 - DNA, 214 bp, Oryza sativa
ggcagggaatttttttatttcggaagactgggatctgtagtaacaattgtcgtttgtgaccctgcctggacctgacagggattaaatgcacatcagcctagaaattatgtttgagaatacttgggcatgcaatagctcgcttgctcatctatccattacatgagtccgacccaaccccctaccgcctgaacacctggacgggtagcttgactta

SEQ ID NO: 33710 - DNA, 156 bp, Oryza sativa
aagatgaacatctagaatatatgcgcaacaatgacacgagcatgcagaaaacagctgtcatcagatgaccattctagctgccactgtaatataagccacagtatgtgttcggccttcaaggcacccggccctgtcgacgtgcgccagactgccggc

SEQ ID NO: 33711 - DNA, 314 bp, Oryza sativa
cataaatatacgtagttcatagtaaaaatgcatttttcttcgccaaatgaattgtattcttttaccttctctagaggtcaaatttaagcttgatacgagtgataccttacttagtggtatttattattatctactactctatcacaaagatacaagaacctatagtattgggtggaacatattctaattataaatctgaatagagacacatcgtaatactataattatgaatagggacacatcatgtactattcttatatatcttgtccaaagttatagaaataagatgctatgtcttattcaatattatattc

SEQ ID NO: 33712 - DNA, 472 bp, Oryza sativa
actgcagcatgcaagcgtggaataatatgggtgcaaattgtatgtagatatttaatgttggtctgcgtagggcatgtgtacaatttatatacccattggttcttaagagtaaatagacaccattttaaattctggtggatatcattgggtattatgctttgaaatacacaatacattaagaccacaataatttgctaatatatcgttgcacgtctaaaatctattacatcagaatcttaatgctaacagacggatataaagaaagtagatataactaattgaggaaacggatgttgtgattaattgaatagtagatgtaggtggaaaaaattgaatggtgaaagtttgtgatcgaccgacaatagaataatggtggagatatgatgtctaatgacatatttaaatattagaagttgtctacttaataagaccactcacgatacattaggagcgctagatggacattgattat

SEQ ID NO: 33713 - DNA, 377 bp, Oryza sativa
  unsure (1)..(377): unsure at all n locations
cacactccaaaatcctattctatgtcttagtcctattaatacctaaaataccaagaaaaatacttagaaagagaatagattaatgcatctagaaatgaatcataacagattgctagaagtgattcgctatttgatggttcaaaggccacgagtatgaaatatagcttaccaacctggtcctctgtgttttcaaatgtcatggcatggtcacagcaagcagaacaaccagctatggtggaggattgatcagagtcgtttatatgatcctcaagcacaacacttggaatgaaaaggtgccacatgtatagaaatacanatctgaaatattaataaccatggcgaaaaaatggctcactcattgnggaagcatgatatat

SEQ ID NO: 33714 - DNA, 278 bp, Oryza sativa
  unsure (1)..(278): unsure at all n locations
tggagttgacgggtggngcttacatgacagggatattgcctcttattgcataacactcaccgtatgccttcatgcattatagtcatactattaggcctagaatgtggcttgaacttgtgaagctcgaggctatagctatttatcacgcctacccgtggttaacaaagtaactattttaatcatacatttaattaaaactattttatagtttggaggagctccaatcctttatagctgaacataccatccgaacaaccataatatttggtcatatgtac

SEQ ID NO: 33715 - DNA, 238 bp, Oryza sativa
tactaagcttggaggaggtggcaagcatggtggtggtcataaggaggctattcttctgttgaagaggaggtagccatgaggtggtctatcgatgagctatcgactcttcaagaggctagccgacatggacgaccagtggagttgaggtggagctcccctcagacgatgataactggaagtgtggcggtaattacatgttagtgattgttggtttgaggttgattatgaagatgatgga

SEQ ID NO: 33716 - DNA, 469 bp, Oryza sativa
  unsure (1)..(469): unsure at all n locations
tccactaattaatacatcacgaagatcgctttcaacacattataatttttctgactgactgcaagccatgtactgaataagtgcataacctgaaagtccatagtatagaaaaacatgagcagagacttttgtacgcaggcaaaatgttgggtgtcattcagagtcagagtaggcatcgatctctattggtctgaacaactgattgataacgatcggcatacatgtcggcactcagatagcacaattagtgaaagtctagctaacccagaaattaacctgaacgtaactntcactaattagttggttaaatcagtctgaatcccttttcagcactactgtatatccctgaatattaattactccctcttgtaattagtcagatataaacagaaacacttattcattcttagagtctcaattagtcattgggtattttgttcatcgacgacgggttttgacttgcaccatc

SEQ ID NO: 33717 - DNA, 396 bp, Oryza sativa
tggtacgtaatctatgcatgcatgctcaacccgagctcatgtgtatatatttaaagggactatctcacatcttgccagcggtaagccctgataatcttggtgtatagcattattagaggtgtttagcatgctgtatcatttgtacatttggtatctgttagttattgtcaaaatttatcttttcttttttattcttttgtaaaagttgacatctatttactacttcctccgtttcatattataagactttctagttaatgaatcatctatataaatatgggcaatgctagaaagtcttataacctgaaacggagatagtactaaactatataagtataactacagtttgtccaactatgtttatcatgctacatgacattgttgattccactacag

SEQ ID NO: 33718 - DNA, 184 bp, Oryza sativa
tggtgcctttaaggccacctcgtgcgtatccgtcaccgactgtgcgctcgggcctgcgctgatgtgcccccgtcaggataggatatctccctcactggttagctccctactccagtgaaggacttccgcaatgggaagcccagagaggttgggttatcgcgtcacgacttgaggactatctctc

SEQ ID NO: 33719 - DNA, 382 bp, Oryza sativa
accgacaaaataacgaagagcaaccagccacgggcggcggccgagaatttctagaccacggagaaaaaaacagacgacgacaccgacagccaggacaggcaaacaaaaacacccaatagaggcacaggaaacacacggcaagagccccccgaccgcggggcgggacaaggcacgagggcagaaagaaggaacccccaccgagaaggggacagggacacgcccgggaaaatgaaaggacgccggcgccaacccagagacaaaaaaatgagaaaaagcgacaacaggacaggcccaaagcaagggcgggcccaccaagaaactaaaccgagtaaacagagagacggagaaacaccggcacaggaaaaaaccagccagggccggc

SEQ ID NO: 33720 - DNA, 312 bp, Oryza sativa
ttttcattcatattgtacagatgcatgtttttacatagcttatgtaggcagtacggcggatccaacgtgtgtgtggggacggggttattaattccatacagtctccaactgtctcatctataacacgacattataagacgctatcactttatcccaaccaaacttccatcatcactaaacccctatatacaccgaccctcatcttgttctaacttgcccccaaaaaaatcaaaaaacatcattcccctatcctccatccctcaacaatatctataaaatccacttattgcccatgcatcatttttatcttca

SEQ ID NO: 33721 - DNA, 397 bp, Oryza sativa
  unsure (1)..(397): unsure at all n locations
tgaagccnggtactacagtgatggatatgagcgcaattgtatttcttgtggagctatacattcgtgtattgattataccggtcacaatttcttgaagctcgatcttcaccccagatgaaccatatagtcctgagaaaccatgaacccgaatagaagagcttgccccacccatgagtaaatatttcatagaatcctcattagaccgtagatctctattggtatattcacacaatatgcaggagcataaactgaaacgttctgtatctacaaagatagttattaaatcgttagcaccacataagagcattccccctagagtatctgttaataccaataacagaaactctgctatagccatttcttgacgttcaatgtactctacggatagacgaataca

SEQ ID NO: 33722 - DNA, 471 bp, Oryza sativa
  unsure (1)..(471): unsure at all n locations
ggccaaggcaataataagaagaagagacagagacagggaccttgagtatggngcagatgaagtgctccggcggcggctgcgttggcagtgcccggcgtttgaggcggtccaggtcgacggcgaccctggtcttgaggtcaggacggtccttgcctctcatctccaggcacctgagcgctaggtcagccatctcctgcgcctcttccatggcccaagtccaccctgcattctcatccaggatgtccctcaacttgccgtcctccaccgctcgctccaccaccttcgccagcccgatgggtgccctcgccgtgagcagctgcagcatcaccatgccaagcgcgtacgtgtccgacttcaccgacacctgcccgctcctctggtactctgggtctatgtagaacagcgtcccagccagagccgtcttcttgtacatggtactgctactgccaccactaccactngacaccagtg

SEQ ID NO: 33723 - DNA, 288 bp, Oryza sativa
tacttcctcatataacaaccatgtcaaaaggcgatttgcacatccaactgtcttaaactcctaccttgagacattgccatggacaagactaaatcttatagtagcagcctgaacatcaggaactaaagcatgcttataagctatcccataccgtggataaaaccctttgctactaacctggctatgcatctgactataatgccatcagctgtctttttaatcttgcacacccattgagaatctataatatttctacccttgaccggtggaactaaatgccaagattta

SEQ ID NO: 33724 - DNA, 397 bp, Oryza sativa
  unsure (1)..(397): unsure at all n locations
ttccaactgaaccatagccattacactctcaatgctcgtgccaatttctctaaatccaagactcctagttccccaaatttggtgggtgaacataccgttggccaatttactttgcatttgcccccactaatctcttggtcgcctgcccaaaggaacctcttcctaattttgtccatgtcatgtangaaattattggggggttatagtgctgtgaggaagtatgttggtatagaggttagtaccgaagtgacaggggtcttcctttctgcctgtngcaacaacttccctttccacctgcangtcgggatccgagcttgtncatgactggatggaggtgcactctctttgatcttcccatttgtcaagggtaatctcagcatccaagtgtgtcacctca

SEQ ID NO: 33725 - DNA, 312 bp, Oryza sativa
atgaacccggccttcaaaagtctagccaccttctcgcggatgaaggcttgacgctcccgggcctggcgccgcactttctgccggaccgtgcttgcgcccggccgcactgcgagacggtgctcaatcacactcctgtggaccccgggcatatccgctggtctccatgcgaagacatcagcgtttgcccgcaggaagtagatgagcgcgtcttcctatttgccatccagaagaccaccgatccgtgtggtcttggatgggccgtcgcccaaggcaatctccttgaccgggacctcgtcgcatgtggccatccgc

SEQ ID NO: 33726 - DNA, 110 bp, Oryza sativa
tgtgtgcactgggccaatggacggcacaccaatattgctactactataaatctgtctagtttatgaaaagtaagacgtcaatggtcactggatagtattgtgtgtgtctg

SEQ ID NO: 33727 - DNA, 473 bp, Oryza sativa
  unsure (1)..(473): unsure at all n locations
atcatgataagcccacactgaattggtgctgttggcttctagtgcaataatacccatgaagcaccacagggcttttctaattggttgccttagtgcgtatttaagtgctaaactgctgattcagcccctatctataatctgttgagagaaaccatatgaagaataactacagcaaactaaaccaatttatcctgccaaatttgcagaagtccccaaactacaagcatcaactgaanttttatgccaaagtgacatacatgcaagatgaaagtctccaaggcaggggaaccatccaagaaagaaaccagagaatagatatcatagttgggaggaaaagccaggtattcagcangataaatntccaataactngaggtggaggaacttgatgggcaccatnggtgtactgatcatctganagaaaagaagagatgacttanggataatcatatgnttcatgtgcacctatgacat

SEQ ID NO: 33728 - DNA, 262 bp, Oryza sativa
  unsure (1)..(262): unsure at all n locations
gcttctcattgattnttcgtgggacaaaatattgactctgaaagttgtgttttttttaaagagagttgcggagtactacgttgttttaaaacaaaaagctcgggcaatttgagctctgaaaaaatatcctatactcttaaatgtactccctcggctctaaattataaacacttattttttaaaaattcagattcggactaacaatatacagtatataccacagatcatatataatctataattagatttatatttagaatac

SEQ ID NO: 33729 - DNA, 438 bp, Oryza sativa
tatgccaccttgggaatgggacaagctactcatgatgcttatgcttatgctggagctgtcactagtcatgaatcgatggacattgatcctttgcagcttgcaagaaatagcgaagatatgctgaaagattgaagccgctagaaaggggcttgttattatatttctgccatttacttctctctttcaagcatttttacacaccttgaactgtttactaaactttcgtcatgcttcttgtgtaggttgcatggttccatttacaatgttgaattgctaaaaagagaaattgagatacgaatatcagactgcgatgcactttcatcgtatggatcttctttgcttccattgtggttgatgctgaggtacaccttaagcaactagaattctcagttcccaaagtggaaacttattactctccactgaacctagacttcatag

SEQ ID NO: 33730 - DNA, 330 bp, Oryza sativa
agaggagaacaaacctagcaccgttacacgggctaaaacttttatactacctctgtcccaagataactataattataagatgcctagcatatattaaggtatgagaagaaagactatggagcccctcaataaatagtgtttatgtgagagtggagagacggttgagggtataatacagataaatctaaatgagatgattgacggggcaattagtactctacaattacaattattttgggacaaagtatgaatcatagagaaacaattatattgggacggaggtagtacataatacatactaccataatgcttaaccattcaattactcat

SEQ ID NO: 33731 - DNA, 444 bp, Oryza sativa
  unsure (1)..(444): unsure at all n locations
tcatatctttggcatgaaatgagagatgcggtgaagaataactttgctgatcatgtggattcctccaaagacatgcccctcgtgagagtccttgattacatcgcagagggcaatgtgaagacgctacagaggtatccgttggattgtgatgaaactgagaaggcgaaatactcgttgaaggtcttgcgtatgaacccacataaggtagagcacgaggttaacaacctcatacagtggccacctgtgacctacttggcgaatttaccatcctctcttcaggagatgataagttatgaccaaacaataagccatccatctgagtacgatgataagaaaccatatcactacctaaagctgtgcanaaatataatcaagcattggtggtatcgccatatagtgtaaggtaatgaataatgaaatattcttgctattatcttttatctc

SEQ ID NO: 33732 - DNA, 441 bp, Oryza sativa
tgaccgctagtagatgaatatgctcatgtcttattttgtcggaggaggtggcataagaacatgagcagagcatatccattgcataggcatgatataagggtggacgattaaactattcatcacacatggtataagcatataatatattcatccacatgcatggtccggtactcatcaagtatataagcaatcctcatgcatggtcatgtcatggcgagtatggcggagattggatgaagctatgcatggagaagagtctcacaagcacacgtgcccaaaataatacagcttgcaagcggatacagtagatgaaaagactgcactcttgtgctatatacttgataatttaaccactaacacaagagaaagcggatgacttggtcacatatcatgcatacatatggcaatcgagctgtagtttaatactatagtatctatcga

SEQ ID NO: 33733 - DNA, 270 bp, Oryza sativa
cgcagcgcacttccccgagcagggaacgttttacccacccgcgccccggggagataacccgagcgtgaacactgcaccatccacacaaggcccggctgagcaccggtaccgctagcagaagtgaccggacgagcccagagaggccaccccggctgccgctcgccgacccgcggagaaccgccgcccaccacgcgcccccgcgcgactcccgggacggggacaacgcgacggaggcatcagcagggactgcagcccccaccgcagagaacg

SEQ ID NO: 33734 - DNA, 464 bp, Oryza sativa
  unsure (1)..(464): unsure at all n locations
tagctaccttagtaaaacatgtgtggcaatattagttctttttcttcagaccncaagactaaggctgtgttcttcccccttttctcaacccacctctttcgttttccgcgcacacgcttttcaaactactaaattgtgtgatttataaaaaactttctatatgtaagttgttttaaaaaattatattaatccattgttaaaaaacagttaatcatgtaataatacgagtttcgttttgcatgtcgaagagaagggttcccaacctaagcatatatattcagtttgaacatgtatctttaccatccatttgcaaattagactaagcttgcagttttgagtcacttgggtggcttacgctcgtgtcggggacgataccaagtggtcattaatttaactgttcttcactgttaagatgtggtaattaaaaatttgctactcgcaagtgtatgatatgtgagtctaat

SEQ ID NO: 33735 - DNA, 389 bp, Oryza sativa
  unsure (1)..(389): unsure at all n locations
taatgctactcataatacagacaacaaggtgtagaatgtgtatcttttcgctagttgtctacctacattggatggactactcaatagtcgaattgcattaggccctacagcggcggatgacggcgcaataatttctacatagactctaattaactaaaactattatatactgatggaagattgttcacaaaaatccaaatatacaatgttaggttctagtgcactctatgcacatgcacaataatgcattgcctgagagctactcgtaatgaaacctctacttaagccctaaagagtacttcatctaagagaatattatgaaactgatcattgaccaactatattntgaactggatataaacaagatcattatctatgatatctcatga

SEQ ID NO: 33736 - DNA, 384 bp, Oryza sativa
  unsure (1)..(384): unsure at all n locations
atagagcgacactttagctagcatgactatacgtacttgccacacttgtttttatctcaatggcatatggngtctacatagtgaagaaaaaatattggcataagtgtggctatgaaccatataggcatctagctcggttaaacttattgaacttgaggtgtggtaaccttatacaagttatgtgtcaaaccaacagcccctactcatataaatcttttttccatatgaaccaatggggcctctgggaaaaatactaagcaaactgaatgctccaaaaaataattgccattcttgcatctcaaaatgaaccattaaactacactttaaatggaagntcatctagcatgctagaaagaattataggaacaactgaacgaacaagca

SEQ ID NO: 33737 - DNA, 391 bp, Oryza sativa
  unsure (1)..(391): unsure at all n locations
tangtcagagatcatgcataccatgcatatatacatacacgtctctttaaaaactatttagacagatatttcatttgaaggaacaattattttaagtcagagatggtggctaccaactcatatcacactagcactttacactaatccccatcatgtgtgaatcaaaaacctagtagtggtaattatgtttacacggccactaacacttactaccaaccaccaacctaccctgagccacacaagtgtaaatgtgtgaccaagctgacccgatcgctcggtcgcaaccctgaccggcgacccggtccggtccgacccacctcacctcacctcaccggctgaatcactttccacacgctcgttgtaaggctggaccccatcatgttggaccatg

SEQ ID NO: 33738 - DNA, 250 bp, Oryza sativa
ccacccgacatgcccagctattcggtaccttcaacacagctgatgactctggaaaaatataatctccattccttcctgtgttactaggctaactttcactcctgctctgtgcttggagaactgcaacccacgatggatgatcctcactgagactgttctctgtatgcactctggtgaatccattaacatgtctcacaggtcatgctgcgtgggagagtgcaaatgggccatacgcactcctaatgtaact

SEQ ID NO: 33739 - DNA, 425 bp, Oryza sativa
  unsure (1)..(425): unsure at all n locations
atgtacatctntgaatgagcccggtagtttgtcaatgccagacattaagaagtcgtaaatttatgtgcaagtggtgaggtcaacgctttcatctacttcttccgttccataatataagggattctgagattntacttgcaacgtttgaccactcgtcttattcaaatttttttgaaattattatttattttatttgtgacttactttattatgtatagtactttaaacacaacttttcgttttttatatttaattnnttttaataagacgagtggttaaacgttgcangcaaaaactcanaatcatgcatatatgctcccgtatatagtcccatgcatgcatgccttttcttatcccgctaagaaggcagcacagtgcacactnatngactatatatacgcgtaattagtcaaaatacatggcct

SEQ ID NO: 33740 - DNA, 309 bp, Oryza sativa
tctagagcggtgctctcaccaatacgactgtactcgtgcaatgtattatctggcacttcatatgccaacatactgagagccgatactaccttatgcggacaagataatccgagcacaccggatgcattactcttatgcttaaaataatcgacgtgatgctcaacagctttcattatgccaagaaatacatgaagcctcatacgatacctatatcacgatgcagctcaattaaattagcgatactataccacacggcacagtggaagtacgtatacattgtccagaacatgctgacctgcgtctaaagat
